United States Patent Application Publication US 2025/0084491 A1 - sequence listing, part 7

SEQ ID NO: 116916 - DNA, 75 bp, synthetic construct
  source 1..75: mol_type = other DNA
atgagcggaaaacagtatcagggcacggccaccatccgtgtgaacggacaggagtacgacacccttgagggagcc

SEQ ID NO: 116917 - DNA, 75 bp, synthetic construct
  source 1..75: mol_type = other DNA
ccataacgcgggcgtgaaagaagtggtagtgaagcgcggggcagattcttgcctggtgtccattgctggcgaaga

SEQ ID NO: 116918 - DNA, 75 bp, synthetic construct
  source 1..75: mol_type = other DNA
gtgaagtggtgaaaggcgcgaaagtttacggctatcgcgagaaaccccgtgaggcgacgctggactgtaaatttc

SEQ ID NO: 116919 - DNA, 75 bp, synthetic construct
  source 1..75: mol_type = other DNA
cgtggacatttgactgcaagtacagttatccagtatcgcggcgcgattatcccgcgtgaggcgatgccagcgtaa

SEQ ID NO: 116920 - DNA, 75 bp, synthetic construct
  source 1..75: mol_type = other DNA
gtataaagaccttgcaggtcaggctcgctatcagagtctggcggcagcggaagcaacaggtggattgggttccac

SEQ ID NO: 116921 - DNA, 75 bp, synthetic construct
  source 1..75: mol_type = other DNA
ttattcgcaccttccctagaacaacaatgcctcgattggtttaaagagctaggttaccaataccaaaatggctat

SEQ ID NO: 116922 - DNA, 75 bp, synthetic construct
  source 1..75: mol_type = other DNA
ccagcgttaccatttactttcgcatttaaccgccgagcagaacgttgaagtacccgccgtctatgctggtcttga

SEQ ID NO: 116923 - DNA, 75 bp, synthetic construct
  source 1..75: mol_type = other DNA
ttaggcgcgcccattcacaccagtattgacggcacggtctgtaacgtcacagaacactccatcacggtggtaaga

SEQ ID NO: 116924 - DNA, 75 bp, synthetic construct
  source 1..75: mol_type = other DNA
caacaatctggcaaacattggccttggtgcgctgcaaggtcaggcgaacgccgggcagacatacgccaacaacat

SEQ ID NO: 116925 - DNA, 75 bp, synthetic construct
  source 1..75: mol_type = other DNA
atcggcggtctgctggatacgatgtggaactggcgtgcctgttatctctttttgttggttctttgtgccggtgtg

SEQ ID NO: 116926 - DNA, 75 bp, synthetic construct
  source 1..75: mol_type = other DNA
ctacggctatcgcgagaaaccccgtgaggcgacgctggactgtaaatttccggctggcggagaaggttcaccggc

SEQ ID NO: 116927 - DNA, 75 bp, synthetic construct
  source 1..75: mol_type = other DNA
tatgactgctgataagaagccgccgcgcgaggggtgcctgatggtttactcgccagagccaaacggggattactg

SEQ ID NO: 116928 - DNA, 75 bp, synthetic construct
  source 1..75: mol_type = other DNA
ccataacgcgggcgtgaaagaagtggtggtgaaacgcggggcggattcttgcctggtgtccattgctggcgaagg

SEQ ID NO: 116929 - DNA, 75 bp, synthetic construct
  source 1..75: mol_type = other DNA
accagcaaatgctggaatgcacggatatcgccttcctgacgctggacgatgaagacgcgctgtggggtcaacagc

SEQ ID NO: 116930 - DNA, 75 bp, synthetic construct
  source 1..75: mol_type = other DNA
cggcggagcttcaggggctatgactggcgctgctcttggctctattgttccaggacttggcactggattaggtgc

SEQ ID NO: 116931 - DNA, 75 bp, synthetic construct
  source 1..75: mol_type = other DNA
catccgttatgtcacgctgggttgccggagcagggtatgcggtctgtctggattttatttctgaccgcccggtgc

SEQ ID NO: 116932 - DNA, 75 bp, synthetic construct
  source 1..75: mol_type = other DNA
gcttttgataccgatcgtaaagaaaatcagtcatggcaattttctgattactcaggctttatgaatcaactggat

SEQ ID NO: 116933 - DNA, 75 bp, synthetic construct
  source 1..75: mol_type = other DNA
gcgctgcaaggtcaggcaaacgccgggcagacatatgccaacaacatgagtcagatttcgcagcaaagtgcggct

SEQ ID NO: 116934 - DNA, 75 bp, synthetic construct
  source 1..75: mol_type = other DNA
atattatcggtcctcagcgacaggaacctcagtcagctggaacagaagaatatccccaggcctctaatatattga

SEQ ID NO: 116935 - DNA, 75 bp, synthetic construct
  source 1..75: mol_type = other DNA
tgtgtacaaaaaggcgattgtagattcaattggtcaacgcaacagttatgtgaaaacatggggttgcggaggttt

SEQ ID NO: 116936 - DNA, 75 bp, synthetic construct
  source 1..75: mol_type = other DNA
cggatcggaaaaccgatcccggccccgcctttgattgggcacggtttcgcgccctggtcagcaaggagacaacat

SEQ ID NO: 116937 - DNA, 75 bp, synthetic construct
  source 1..75: mol_type = other DNA
atgggaaaaaatcaggaagaaaggaacccccccgtcattgtggtgaaaaaacgtcgtactttttcgccaccgtcc

SEQ ID NO: 116938 - DNA, 75 bp, synthetic construct
  source 1..75: mol_type = other DNA
gcggaagcaacaggtggattgggttccaccgcaaccagtaatcagttagcaacaatcgcaccaacgcttggtcag

SEQ ID NO: 116939 - DNA, 75 bp, synthetic construct
  source 1..75: mol_type = other DNA
acagaatcgcaggcggtgagcagtaatgataatccgccggtcattattgaagtatccggtgtcggtcagtacacc

SEQ ID NO: 116940 - DNA, 75 bp, synthetic construct
  source 1..75: mol_type = other DNA
tgtcggcagcctcgagaacttatcgtctctggaagggcaaggtcaggcgcttaaccagtattacaactctcagca

SEQ ID NO: 116941 - DNA, 75 bp, synthetic construct
  source 1..75: mol_type = other DNA
aaacataatgacttcaccgtcaactttaacgttgatgggaatatatcaaaaaaagctatacgcatagagcaggtt

SEQ ID NO: 116942 - DNA, 75 bp, synthetic construct
  source 1..75: mol_type = other DNA
caacaggtggattgggttccactgcaaccggtaatcagttagcaacaatcgcaccaacgcttggtcagcagtggc

SEQ ID NO: 116943 - DNA, 75 bp, synthetic construct
  source 1..75: mol_type = other DNA
tgtgaaggcgcggaagattctaatactgccagggagtatctggagcaggcactgctggcaaataaaatcaaagtg

SEQ ID NO: 116944 - DNA, 75 bp, synthetic construct
  source 1..75: mol_type = other DNA
cgttaccagagtcttgctgctgcggaggcgactggcggacttggttcgacagccacaagcaatcaactggctacg

SEQ ID NO: 116945 - DNA, 75 bp, synthetic construct
  source 1..75: mol_type = other DNA
aagcattagaggctattgatccatcaaaagcctctgatacagcctttccgactaagccatttaacgattcagtct

SEQ ID NO: 116946 - DNA, 75 bp, synthetic construct
  source 1..75: mol_type = other DNA
atcggcaaaagcgttaatatccgcagccgggtgctttctcatttacgcactccggatgaagccgccatgctgcgg

SEQ ID NO: 116947 - DNA, 75 bp, synthetic construct
  source 1..75: mol_type = other DNA
tctctagatctatcctcacctattggtgagatgatcctcactattatggcttcagttgctacttttgaaagaaaa

SEQ ID NO: 116948 - DNA, 75 bp, synthetic construct
  source 1..75: mol_type = other DNA
atgcgttcttttccggcatcagcctgtcgtgtcggccgtcgggccggtgccgcggggatgctgtttcttttcacc

SEQ ID NO: 116949 - DNA, 75 bp, synthetic construct
  source 1..75: mol_type = other DNA
aggagaactccttaagcgctggttatcacggtcatattggtcgtgtgaattacagtatcgcctatacctggacga

SEQ ID NO: 116950 - DNA, 75 bp, synthetic construct
  source 1..75: mol_type = other DNA
cagtgctcagggtaattcaggtgtcgcactgtacggcatctatttcagtggcatcacgccgttgccgtcaggtgt

SEQ ID NO: 116951 - DNA, 75 bp, synthetic construct
  source 1..75: mol_type = other DNA
acgaacggcgattctgtgggcgggtatttctgggctggcggaaattctcggcggcattctggcgtggttgatcct

SEQ ID NO: 116952 - DNA, 75 bp, synthetic construct
  source 1..75: mol_type = other DNA
gttgctgcccgcgttgattagcggcggtttgatcctcggttttcgcaatgtgatcggcgatttgcccatgagcaa

SEQ ID NO: 116953 - DNA, 75 bp, synthetic construct
  source 1..75: mol_type = other DNA
ggagtacaaacgccagctggctgagctgggagacaaagttgaacaccagaaacgcctgaatgagctggcacagca

SEQ ID NO: 116954 - DNA, 75 bp, synthetic construct
  source 1..75: mol_type = other DNA
ttggccttggcaaggtgcggtggcactgaaagaacagcacccggaaatgactcaatatcatattattcaaaactg

SEQ ID NO: 116955 - DNA, 75 bp, synthetic construct
  source 1..75: mol_type = other DNA
ttggccgtggaatggtgcggtggcgctgaaagaacagcacccggaaatgactcaatatcatattattcaaaactg

SEQ ID NO: 116956 - DNA, 75 bp, synthetic construct
  source 1..75: mol_type = other DNA
tactactgataatcagattcatttgataagagcacaagtagatattgatattgtattttctgatgtaaatatatc

SEQ ID NO: 116957 - DNA, 75 bp, synthetic construct
  source 1..75: mol_type = other DNA
cggttataaaatcctctgtaaaccgctgctttccggcaactatgaaatcactgaacttgatccggtgaatagcct

SEQ ID NO: 116958 - DNA, 75 bp, synthetic construct
  source 1..75: mol_type = other DNA
cttgccatacccgttcaggcggctgaacaggatgaactggccactgccatgcgccagcttgaccaggtgcaggcg

SEQ ID NO: 116959 - DNA, 75 bp, synthetic construct
  source 1..75: mol_type = other DNA
gacctggtgctggcgcatcgcaagggcaatcacattcatatcgaccacgtctggcgtcaggggaaaagggtgttc

SEQ ID NO: 116960 - DNA, 75 bp, synthetic construct
  source 1..75: mol_type = other DNA
tccgcatcacatctgccgcgggcgatgatcttttttcagcaggaagggttaaatccgctaccagccccggcgaat

SEQ ID NO: 116961 - DNA, 75 bp, synthetic construct
  source 1..75: mol_type = other DNA
gccgtgccggccgtctggccggtgccgcggggatgctgtttcttttgtcctttgcattacctgcgcaggctgccg

SEQ ID NO: 116962 - DNA, 75 bp, synthetic construct
  source 1..75: mol_type = other DNA
cggtggaagacgtcattgcgcgcacccataacgcgggcgtgaaagaagtggtggtgaaacgcggggcagattctt

SEQ ID NO: 116963 - DNA, 75 bp, synthetic construct
  source 1..75: mol_type = other DNA
gtggtgacgatcaaagatgccaatggtaatcctgttggcggcgaaggtgttacgctcaagcgcgtgcaggcgaaa

SEQ ID NO: 116964 - DNA, 75 bp, synthetic construct
  source 1..75: mol_type = other DNA
ctggtggtgaagatcgaattaattgggcattattacgcctcgtggatgccctgagctattccattgacccttccc

SEQ ID NO: 116965 - DNA, 75 bp, synthetic construct
  source 1..75: mol_type = other DNA
gcgggattagcctggcgatcttaagcccgaccagccgcgagaagctgctttctctgctgcgcgaatgccgtgcca

SEQ ID NO: 116966 - DNA, 75 bp, synthetic construct
  source 1..75: mol_type = other DNA
acgactatacaccggtgcctcctctcgaaaacctgaccctgcgccagcgtattaccgataaatacctggcaaatc

SEQ ID NO: 116967 - DNA, 75 bp, synthetic construct
  source 1..75: mol_type = other DNA
gatcctgactttcaggcatccgttagtctatcaggatttgaaaaaatatattataactacggtgatagttataag

SEQ ID NO: 116968 - DNA, 75 bp, synthetic construct
  source 1..75: mol_type = other DNA
cctgacatgtatactcgattggttgcagcagatgaagatgttcagggattgatctggttaagcaggataaaattt

SEQ ID NO: 116969 - DNA, 75 bp, synthetic construct
  source 1..75: mol_type = other DNA
ctcgagaatcaaccgcgcagtaaggaactgttggatttgtatagtgatcatccgaacggcgcaataatgactgac

SEQ ID NO: 116970 - DNA, 75 bp, synthetic construct
  source 1..75: mol_type = other DNA
gcgtcgctctctgcgatgttgccgcaaaccggtcagggcagcctggggttgttgatgaccttaatgggattgttg

SEQ ID NO: 116971 - DNA, 75 bp, synthetic construct
  source 1..75: mol_type = other DNA
aaaatgtagctatttcgcggcgaaaaggagcgcgcaatgaagttctggcgacccggtattaccggcaaactgttt

SEQ ID NO: 116972 - DNA, 75 bp, synthetic construct
  source 1..75: mol_type = other DNA
ggctggtactacgttttgccgttcgtcctgtttttacaaggaatggtcaactcaacgcgtttctcctccatgaac

SEQ ID NO: 116973 - DNA, 75 bp, synthetic construct
  source 1..75: mol_type = other DNA
tggggcggaatggcaatattggcggtcattctctacggtaacctgagtcccgtaggttgggcaggaatgagtctg

SEQ ID NO: 116974 - DNA, 75 bp, synthetic construct
  source 1..75: mol_type = other DNA
gtggtgggtgttccggttccggacaatattcacccgatgaccaaagacgaagcaggagtctggtcgtggcgcaca

SEQ ID NO: 116975 - DNA, 75 bp, synthetic construct
  source 1..75: mol_type = other DNA
aaccggcaaggatatcgccgggctgaaaactgagcttgagcagaaaaaattaactttgattaccaggaatatccg

SEQ ID NO: 116976 - DNA, 75 bp, synthetic construct
  source 1..75: mol_type = other DNA
ctgatgatgatcccgatggtactcggcagcatgggaatgaagcgaattgtggtacaggtagtgaatcgctttggc

SEQ ID NO: 116977 - DNA, 75 bp, synthetic construct
  source 1..75: mol_type = other DNA
aatagcctgttgttgttacatgacaaaccatcacgatcgcagcgggaacataaaggccgaatatcggtgaaggaa

SEQ ID NO: 116978 - DNA, 75 bp, synthetic construct
  source 1..75: mol_type = other DNA
atctgccgcgtaaaaagtcttcgttttaccgatctgatgcgtttttgcaatggggcggaatggcaatattggcgg

SEQ ID NO: 116979 - DNA, 75 bp, synthetic construct
  source 1..75: mol_type = other DNA
tctgaagactataatgcttttgcgttgggactggggaaaaattttggctctattggagctatatcagcagatatc

SEQ ID NO: 116980 - DNA, 75 bp, synthetic construct
  source 1..75: mol_type = other DNA
attatatcagttctgctgatttaaccgcagagaagttcgccacagcaatccgaaaccactggcacgtggagaata

SEQ ID NO: 116981 - DNA, 75 bp, synthetic construct
  source 1..75: mol_type = other DNA
aaccggcaaggatatcgccgggctgaaaactgagcttgagcagaaaaaattaagtttgattaccaggaatatccc

SEQ ID NO: 116982 - DNA, 75 bp, synthetic construct
  source 1..75: mol_type = other DNA
tccggttccggacaatattcacccgatgatcaaagacgaagcgggagtctggtcgtggcgcacgcctgtcctgaa

SEQ ID NO: 116983 - DNA, 75 bp, synthetic construct
  source 1..75: mol_type = other DNA
attcaagtaatggtgttggcaatagcggtaatgccagcctgggctaccagggcggcgccgggaatatcagcctgg

SEQ ID NO: 116984 - DNA, 75 bp, synthetic construct
  source 1..75: mol_type = other DNA
gcgtcccctttggtgcaactgcaacgctggtttcagatacaactgaacagattagcggtattgttggtgaagatg

SEQ ID NO: 116985 - DNA, 75 bp, synthetic construct
  source 1..75: mol_type = other DNA
ccctctggtatcaacaacagcttatggtggtgtatccagtaatattacaggttcatacgcgacggcggtttgttc

SEQ ID NO: 116986 - DNA, 75 bp, synthetic construct
  source 1..75: mol_type = other DNA
gtagcttggacaaaatcgccaccaataccacggagaagaaagacggccccggcgaaattgtcttcaagaataagc

SEQ ID NO: 116987 - DNA, 75 bp, synthetic construct
  source 1..75: mol_type = other DNA
gccctattggaatactggtaatcgctttatcagcagcagcgatcgccgttattaaattctgggaacctataaaag

SEQ ID NO: 116988 - DNA, 75 bp, synthetic construct
  source 1..75: mol_type = other DNA
aattatggtttactgaaggcgatctccatcttgctattcgtgcatcatgcagtattccaggactaatggcacccg

SEQ ID NO: 116989 - DNA, 75 bp, synthetic construct
  source 1..75: mol_type = other DNA
gcggcgtttcgatctctccggttttttgttgctggcggtcggcatggcggtattaacgctggcgctggatggcag

SEQ ID NO: 116990 - DNA, 75 bp, synthetic construct
  source 1..75: mol_type = other DNA
tcagggacgatcgaaccaggtgacctgctgttcgttgatatcactgttaaatctttcgacggtgatggcatctat

SEQ ID NO: 116991 - DNA, 75 bp, synthetic construct
  source 1..75: mol_type = other DNA
cggcgatgacctttgtcacgttacccggtcaggtcggtccgctgctcggtccggcgctcggcggcctgctggtgg

SEQ ID NO: 116992 - DNA, 75 bp, synthetic construct
  source 1..75: mol_type = other DNA
gttcgcctcagcttcaccacgctggccggggaaggaggaatagcgcggctgactggcggagtaatgcgcctgggt

SEQ ID NO: 116993 - DNA, 75 bp, synthetic construct
  source 1..75: mol_type = other DNA
tattccagcgaatggttctgggcaaaaatcctgcatgtaactcgccaggacaacgccgtggcacaatctgccgca

SEQ ID NO: 116994 - DNA, 75 bp, synthetic construct
  source 1..75: mol_type = other DNA
cgttgcagcgccggacataagtcgctatggcatgaaagctggggcggcctgccgccagccagtttctttgacgaa

SEQ ID NO: 116995 - DNA, 75 bp, synthetic construct
  source 1..75: mol_type = other DNA
gtaggcgatatgtttattatgatctgctggattattccttttttattttgttcccttgagcttttgtttgcccgc

SEQ ID NO: 116996 - DNA, 75 bp, synthetic construct
  source 1..75: mol_type = other DNA
agtattgcggttgaatgcctgacggaaatgaaatttgaagatttgcgcggcatgaaaatatctgccatccgcaaa

SEQ ID NO: 116997 - DNA, 75 bp, synthetic construct
  source 1..75: mol_type = other DNA
agcaaaagtgtgtttgtgacgctgccggaaaccattgtcacgttacatgaccgcaacggcgcggatcattatttg

SEQ ID NO: 116998 - DNA, 75 bp, synthetic construct
  source 1..75: mol_type = other DNA
gcgcaggccgcaatttacgccggtagatgtgattgaaaccgatgtcattccgccagattacacgcccggcatgtt

SEQ ID NO: 116999 - DNA, 75 bp, synthetic construct
  source 1..75: mol_type = other DNA
ttaatattttgacgaatgataaggtattcaaggcagggttaagacgtaagatgcgaaaagcagccatggacagaa

SEQ ID NO: 117000 - DNA, 75 bp, synthetic construct
  source 1..75: mol_type = other DNA
agtcagattattccggtgccctggaagactgcctgtctcaaatccgggatttgtccctgacggtcaatctcagtg

SEQ ID NO: 117001 - DNA, 75 bp, synthetic construct
  source 1..75: mol_type = other DNA
ccagcaggacggggataaagcggcagcggtggttgcgcagcgcgtggcagatattatcacccgtaccggtcaggc

SEQ ID NO: 117002 - DNA, 75 bp, synthetic construct
  source 1..75: mol_type = other DNA
ccccggctccacaaacgacgaatattttcagtcatcttcttttaccctcaacgtcatcgttgttaatttgctttc

SEQ ID NO: 117003 - DNA, 75 bp, synthetic construct
  source 1..75: mol_type = other DNA
ggctggtgatgacctgatggttgtccgcggtaatatgttaaccaatacccggatctatgccggtgaaggtaacga

SEQ ID NO: 117004 - DNA, 75 bp, synthetic construct
  source 1..75: mol_type = other DNA
agactgcctgtctcaaatccgggatttgtccctgacggtcaatctcagtgccaacatcgatgccctgctgcagtc

SEQ ID NO: 117005 - DNA, 75 bp, synthetic construct
  source 1..75: mol_type = other DNA
ttttgctgttgatagttgggctttttttctcttcgttgagttatgcgaaaaacacggagatcccttcttatgaag

SEQ ID NO: 117006 - DNA, 75 bp, synthetic construct
  source 1..75: mol_type = other DNA
tcaggtcgttgattaccgcgttgtgaagatgcctgttaccaaaggtgggaggctggaactgaccatcactgaact

SEQ ID NO: 117007 - DNA, 75 bp, synthetic construct
  source 1..75: mol_type = other DNA
aagctggcaatacagctcagttagtcaagttaacggcatcggatgtattgggtatgaatgacaattcaacgcttt

SEQ ID NO: 117008 - DNA, 75 bp, synthetic construct
  source 1..75: mol_type = other DNA
atctccggcccggtgaagattcgcatcgagtgccatatgcctgaccgccgccgccgtgacctggacaacctgcag

SEQ ID NO: 117009 - DNA, 75 bp, synthetic construct
  source 1..75: mol_type = other DNA
gtgaatacttacgacatcacaattccctggcccccgagcaataaccgctagtaccgccataatcgcgggcgcacc

SEQ ID NO: 117010 - DNA, 75 bp, synthetic construct
  source 1..75: mol_type = other DNA
caaagttgatttgggggctgacggagcgggaagtctgggtacatttacggcaacggcaacaactgttaaagcaac

SEQ ID NO: 117011 - DNA, 75 bp, synthetic construct
  source 1..75: mol_type = other DNA
cggtaatgacgctgttttccggtcctgctgacatctatagccatcaggtccgcattgtgctggctgagaaaggtg

SEQ ID NO: 117012 - DNA, 75 bp, synthetic construct
  source 1..75: mol_type = other DNA
gcggtaacccctggcgggagatggctctggtcagtcagacatccggcggtgtggagaacgccatcagcagcggga

SEQ ID NO: 117013 - DNA, 75 bp, synthetic construct
  source 1..75: mol_type = other DNA
gtgccggggccctgctgctgagtgttgcagctctgcctctggcgtcagcctcactgaatacagccagtattgtgg

SEQ ID NO: 117014 - DNA, 75 bp, synthetic construct
  source 1..75: mol_type = other DNA
tcttcataaataaaaattactttaagatacttgataatactaggctagtctggagagataaactatatggttttc

SEQ ID NO: 117015 - DNA, 75 bp, synthetic construct
  source 1..75: mol_type = other DNA
ggcggtggcgatgtttttcaaccgcgagtttcgcctgcgcaaaaccgcgcgttcgttggtgatcctctcctacgt

SEQ ID NO: 117016 - DNA, 75 bp, synthetic construct
  source 1..75: mol_type = other DNA
tgctggtctttgatgatatcgagagagctggtatagatttaccaatcttatttggatatataaatcactttgtag

SEQ ID NO: 117017 - DNA, 75 bp, synthetic construct
  source 1..75: mol_type = other DNA
gacagggatagtgatgactttaagctcattattgaacatattaaaatagaaaggaagaaacggtttgatgattca

SEQ ID NO: 117018 - DNA, 75 bp, synthetic construct
  source 1..75: mol_type = other DNA
ggtgatttaaccgtaattgttaaagaggctgatggtagtgaacaaagatttattcagccattctcttcagtcgct

SEQ ID NO: 117019 - DNA, 75 bp, synthetic construct
  source 1..75: mol_type = other DNA
atgaacaggcttttttcaggtcgttccgatatgccctttgcgctgttgcttctcgcacccagcttattactgctg

SEQ ID NO: 117020 - DNA, 75 bp, synthetic construct
  source 1..75: mol_type = other DNA
gagtatttgtggaactatcgagaacttaatgaaactatgcttaatgaacagtacgccattgccaaggataatcta

SEQ ID NO: 117021 - DNA, 75 bp, synthetic construct
  source 1..75: mol_type = other DNA
tttatgaaagtatttttccagcagttattaattttctcgatggagtaccggggagggaaccttaactacgaggat

SEQ ID NO: 117022 - DNA, 75 bp, synthetic construct
  source 1..75: mol_type = other DNA
aggtaaacggatacaaagcgatcttggttgccaatgaagatgaaataatcaatagagaaaagcgaataaataatg

SEQ ID NO: 117023 - DNA, 75 bp, synthetic construct
  source 1..75: mol_type = other DNA
gtggtctcctcagccaacagttacatcccccccagcgtgacgctggacccctggagcgaggttaccagttctgtt

SEQ ID NO: 117024 - DNA, 75 bp, synthetic construct
  source 1..75: mol_type = other DNA
ctagctatgcctgtgaaaatccgcattgagtgccacatgccggatcgccgtcgccgtgacctggataatctgcaa

SEQ ID NO: 117025 - DNA, 75 bp, synthetic construct
  source 1..75: mol_type = other DNA
gtttacgaaaacgtaccaaattggattgaaattactgttaaagatgactgtaatgatgaagtaaaaccatcgtca

SEQ ID NO: 117026 - DNA, 75 bp, synthetic construct
  source 1..75: mol_type = other DNA
tgttaattttttcgatggagtaccggggagggaatcttagttacgaggatttcaattcaatcggcaatgttaatt

SEQ ID NO: 117027 - DNA, 75 bp, synthetic construct
  source 1..75: mol_type = other DNA
gccggtcctggcgacggtggtgaccctgcgcaccatctggatgttctacatgttcgcggatgtttatctgctgac

SEQ ID NO: 117028 - DNA, 75 bp, synthetic construct
  source 1..75: mol_type = other DNA
tagaaaaaaatccaacgtattttcagcaggcatcaaagcatcgaaatattaaaaagatccatgaaaaatgggcag

SEQ ID NO: 117029 - DNA, 75 bp, synthetic construct
  source 1..75: mol_type = other DNA
cggcactgcttcccgtgacgttaacgccggagccggataataaaatcccggcccccgcacaggaaccagagcaga

SEQ ID NO: 117030 - DNA, 75 bp, synthetic construct
  source 1..75: mol_type = other DNA
cgatcgagaaagacgagatgaaccgggtgtttatcttcgggaaagtcattggaagcatgccgcagacgtatagga

SEQ ID NO: 117031 - DNA, 75 bp, synthetic construct
  source 1..75: mol_type = other DNA
gcaattaacaatgggggatacggcgaccgcgggggatatttttgacagcgttcagatgcgtggcgcgatgttagc

SEQ ID NO: 117032 - DNA, 75 bp, synthetic construct
  source 1..75: mol_type = other DNA
cggatcggaaaaccgatcccggccctgcatttgattgggcacggtttcgtgcgctggtcagcaaggagacaacat

SEQ ID NO: 117033 - DNA, 75 bp, synthetic construct
  source 1..75: mol_type = other DNA
ggattaccggacgatgtcagggataccatcaccgcacttttcaccgcaaaaagaggtgactggtgtggcttctgg

SEQ ID NO: 117034 - DNA, 75 bp, synthetic construct
  source 1..75: mol_type = other DNA
tttaagcaaagatccggcagatggtcgtaaagtgaaaggcgttatccactgggtaagcgcggcccatgcgctgcc

SEQ ID NO: 117035 - DNA, 75 bp, synthetic construct
  source 1..75: mol_type = other DNA
aaatatgtcagacagtacagtgcaaccaatacaatcaactgtcagccattccaaatacttcaagattgacgttct

SEQ ID NO: 117036 - DNA, 75 bp, synthetic construct
  source 1..75: mol_type = other DNA
aattaagaagcatcacccagatggacagccagattttgtccctgtatgccaaaggcatgactacgcgggaaatcg

SEQ ID NO: 117037 - DNA, 75 bp, synthetic construct
  source 1..75: mol_type = other DNA
acgacgcgcgatgaacccggaacggaaatttcagcagggtggggaagcaatagttatcagaactatgatgtctct

SEQ ID NO: 117038 - DNA, 75 bp, synthetic construct
  source 1..75: mol_type = other DNA
cagggtgggtccggtaatgtcaacgtaggctatagctacgggaaagattaccggcagctcaactacagcgttcgc

SEQ ID NO: 117039 - DNA, 75 bp, synthetic construct
  source 1..75: mol_type = other DNA
gtgttggtgttaattgatggcgtacgcctgaatctggcgggggtgagtggttctgccgaccttagccagttccct

SEQ ID NO: 117040 - DNA, 75 bp, synthetic construct
  source 1..75: mol_type = other DNA
gttgggtgacgatgttgacgttgaaaatgcgttccagaaagtggtgccaacgcgtggagcgattgtcagagcgcg

SEQ ID NO: 117041 - DNA, 75 bp, synthetic construct
  source 1..75: mol_type = other DNA
gcggggttatctggattttctgtagcccctcagactgtgcgtctgaatccggtgagagttcattcccctttttct

SEQ ID NO: 117042 - DNA, 75 bp, synthetic construct
  source 1..75: mol_type = other DNA
tcattccccaggcctcaagccatttcgacttcagtgaacaaaagctggtattaagtttccctcaggcggcgatgc

SEQ ID NO: 117043 - DNA, 75 bp, synthetic construct
  source 1..75: mol_type = other DNA
gcgtggagagcttgttgatgtgctgtggggggaactggaatggtcttccccgacagatgacgatgagctgccgga

SEQ ID NO: 117044 - DNA, 75 bp, synthetic construct
  source 1..75: mol_type = other DNA
caatcgagaaagacgagatgaaccgtgtattcatcttcggtaaggtcatcgggagcatgcctcagacgtacagga

SEQ ID NO: 117045 - DNA, 75 bp, synthetic construct
  source 1..75: mol_type = other DNA
tgtatttttctggtgaaccagcacagatcgctgagattaaacgactggccagcggtgcagtcacaccgttttatc

SEQ ID NO: 117046 - DNA, 75 bp, synthetic construct
  source 1..75: mol_type = other DNA
gtcgattgcgtgttttctactgaagcgctggtgtacccgcagtcagacggtacggtgtgtgcgatgaaagccacg

SEQ ID NO: 117047 - DNA, 75 bp, synthetic construct
  source 1..75: mol_type = other DNA
gaaaaacagtaaaggtaagctcggcgtggactgcgttttctctaccgaagcactggtgtacccgcagtcagacgg

SEQ ID NO: 117048 - DNA, 75 bp, synthetic construct
  source 1..75: mol_type = other DNA
cgaacggggattggcgcaatcacacttattgatatggatgatgtgtgcgtcaccaatactaatcggcaaattcac

SEQ ID NO: 117049 - DNA, 75 bp, synthetic construct
  source 1..75: mol_type = other DNA
gggtaacgaggatgtatcggtgtggtggaaccgtctgtgtgacaacgtactgccggaaaaaccatgccgtttgac

SEQ ID NO: 117050 - DNA, 75 bp, synthetic construct
  source 1..75: mol_type = other DNA
cgcaatggcggttatcgatccggtgaaactggttatcgaaaactatcagggcgaaggcgaaatggtcaccatgcc

SEQ ID NO: 117051 - DNA, 75 bp, synthetic construct
  source 1..75: mol_type = other DNA
gtacgatccgtgcttttttccgccggttgtctgtcgaatgtggttttgcggtatccccccatcgtttcaggcata

SEQ ID NO: 117052 - DNA, 75 bp, synthetic construct
  source 1..75: mol_type = other DNA
taaccggaaccgttagcgcagtagcaatgggcgcggtgaatgatgaagtagaactgacgctggcaggtggcgcta

SEQ ID NO: 117053 - DNA, 75 bp, synthetic construct
  source 1..75: mol_type = other DNA
cccctcaggccgtgcgtcttactccggtgaaagttcattcccctttttctccaggctcgtcgaatgttaatgcga

SEQ ID NO: 117054 - DNA, 75 bp, synthetic construct
  source 1..75: mol_type = other DNA
tgctggatgagcaaaactgcctgatgctgcatgaactctggctgcagagcggtactggacagcgtcgctgggaag

SEQ ID NO: 117055 - DNA, 75 bp, synthetic construct
  source 1..75: mol_type = other DNA
tgttctttctcacgttagaaacatacttcggggtgttttcctttaaaagaaaaggaaaagtaaataatggcaaaa

SEQ ID NO: 117056 - DNA, 75 bp, synthetic construct
  source 1..75: mol_type = other DNA
cggctatcgcctgccttggcggttattccgtgtggctggccgttaacggcatgggcggcctggacgtattaaaag

SEQ ID NO: 117057 - DNA, 75 bp, synthetic construct
  source 1..75: mol_type = other DNA
ggctgccggacgtggtgttttatcgccggagaatatcacgttcacccgctggctgaagcacctgcaggacggtgt

SEQ ID NO: 117058 - DNA, 75 bp, synthetic construct
  source 1..75: mol_type = other DNA
tgccggaaaaaaccatgccgtttgacctgctgacggttctgcccacccgcctggatgttgaagtgaatggcttta

SEQ ID NO: 117059 - DNA, 75 bp, synthetic construct
  source 1..75: mol_type = other DNA
tggcgcatgcccggcggtgtgcgcctgcggagtcgtgcggcttcgtggtgagaacgccggagggggagcggtatc

SEQ ID NO: 117060 - DNA, 75 bp, synthetic construct
  source 1..75: mol_type = other DNA
atccgcacgcgggcgaaggcggtcatatgggtacggaagagatagacaccattattccggtgctcgacaagctgc

SEQ ID NO: 117061 - DNA, 75 bp, synthetic construct
  source 1..75: mol_type = other DNA
ttcgttgatatcacagttaaatctttcgacggtgatggtatctatgcgtttctgtacgacgacacagcccatgta

SEQ ID NO: 117062 - DNA, 75 bp, synthetic construct
  source 1..75: mol_type = other DNA
ctcccccatcagcggcaccgcccccctgccgggactgtctccggcagctcaggaggcggctgcccttgactcacc

SEQ ID NO: 117063 - DNA, 75 bp, synthetic construct
  source 1..75: mol_type = other DNA
aaaaataataatattgttatattttgtgatccaaactgctgttctgatatggggactatatcgttttagatatat

SEQ ID NO: 117064 - DNA, 75 bp, synthetic construct
  source 1..75: mol_type = other DNA
aataattacaatgcgtttgcgttaggtatagggaaaaactttggttatatcggggcgatttccattgatgttact

SEQ ID NO: 117065 - DNA, 75 bp, synthetic construct
  source 1..75: mol_type = other DNA
tcaaatcggatggcactgtgcaaacggctctcgaaacttttttttttggagaaggctctgcattacctgttggtg

SEQ ID NO: 117066 - DNA, 75 bp, synthetic construct
  source 1..75: mol_type = other DNA
atagctttgctgcgggtgaatatcaggccgggaactatgaaagtgattctccgcgtttcgggcagcttgatctaa

SEQ ID NO: 117067 - DNA, 75 bp, synthetic construct
  source 1..75: mol_type = other DNA
cgtgcaggcagtcgcgaaggaaagcaaaaaagccgaagagaaaaagaaaaccgatgagcagaagaaacaggacaa

SEQ ID NO: 117068 - DNA, 75 bp, synthetic construct
  source 1..75: mol_type = other DNA
gcgttggcggcgcgatgatggtgccggtcggcaggttgacggtgatgaaaatcgtaccgcgcgagcaatatatgg

SEQ ID NO: 117069 - DNA, 75 bp, synthetic construct
  source 1..75: mol_type = other DNA
gcccgtcttgatttgcgcatcccccggcagggaccgcaggccgctgccggccccacaccaccggcacgggtggcg

SEQ ID NO: 117070 - DNA, 75 bp, synthetic construct
  source 1..75: mol_type = other DNA
atctggatgatgactactttgacatgttgcaggaagaactctgcagcgtggtggaggcatccggtgccagtctgg

SEQ ID NO: 117071 - DNA, 75 bp, synthetic construct
  source 1..75: mol_type = other DNA
aaagcgacgttattgcagaattaagccgctgtttcagctgcacgctggagcactggtatgccgagcagggctgtg

SEQ ID NO: 117072 - DNA, 75 bp, synthetic construct
  source 1..75: mol_type = other DNA
tatgggtacggaagagatagacaccatcattcccgtcctcgacgaactgcgggcgcaggggatgaaacttaacgg

SEQ ID NO: 117073 - DNA, 75 bp, synthetic construct
  source 1..75: mol_type = other DNA
aaatgggcattatgtggtggaaacgctggcgcgagcgtgcgatggctgtctgaacggtgaatttgctgcgctgat

SEQ ID NO: 117074 - DNA, 75 bp, synthetic construct
  source 1..75: mol_type = other DNA
gttctgccggtggtcgcatttgacacgctggaagaggctatctcaatggctaatgacagtgattacggcctgacc

SEQ ID NO: 117075 - DNA, 75 bp, synthetic construct
  source 1..75: mol_type = other DNA
ctggcgcgagcgtgcgatggctgtctgaacggtgaatttgctgcgctgatcacaggccccgtgcataaaggcgtt

SEQ ID NO: 117076 - DNA, 75 bp, synthetic construct
  source 1..75: mol_type = other DNA
aaatgggcattatgtggtggagacgctggcgcgagcatgcgatggctgcctgagcggtgaatttgccgcgctaat

SEQ ID NO: 117077 - DNA, 75 bp, synthetic construct
  source 1..75: mol_type = other DNA
ccaggttcgtcgaatattaatgcgagaacgacttttaatatgagtcatatgagtcatatgagtcatatgagtcag

SEQ ID NO: 117078 - DNA, 75 bp, synthetic construct
  source 1..75: mol_type = other DNA
atgatgacggcgacgatacgctaaagagcgacagctactacctcaacttacgcagcgggctgaaccttggcgcgt

SEQ ID NO: 117079 - DNA, 75 bp, synthetic construct
  source 1..75: mol_type = other DNA
accgatttccgaacctttatgacgggcgagttatttgatgttttatcccgccattcgattctcggtgccaccatg

SEQ ID NO: 117080 - DNA, 75 bp, synthetic construct
  source 1..75: mol_type = other DNA
gcgggggagcctcttttgatactaacacatttattgcaagattaattacacaagctccatttttttattgtattc

SEQ ID NO: 117081 - DNA, 75 bp, synthetic construct
  source 1..75: mol_type = other DNA
tgtggcgtatcggcgatgacctgtatgtccggtgccgtgcaatgctgcgcgatgagttcgaacagacgctgtcat

SEQ ID NO: 117082 - DNA, 75 bp, synthetic construct
  source 1..75: mol_type = other DNA
tgcagcgggtataaataaagaatggcttccatttatagcaacgtttattgggtattatattttattgaatgctct

SEQ ID NO: 117083 - DNA, 75 bp, synthetic construct
  source 1..75: mol_type = other DNA
gaggtgaaaactgagcgttacgtgaattttttatccagttcaagaatgatgttgcagaaatatactatcagcaat

SEQ ID NO: 117084 - DNA, 75 bp, synthetic construct
  source 1..75: mol_type = other DNA
ctgacagcgactataaccgttatcacaagcgcagcgaaatacagggtaacctgacgcagcaattaggggcctatg

SEQ ID NO: 117085 - DNA, 75 bp, synthetic construct
  source 1..75: mol_type = other DNA
taaaagccaattgctgcgcgctgatatgaaggctgccagtcaaagtgatgccgtatggaaattgaatttaactga

SEQ ID NO: 117086 - DNA, 75 bp, synthetic construct
  source 1..75: mol_type = other DNA
gacaggcatccgggtctgccgggctaccgcccattgcgcaggcattaaaaaatcatttagctgcctatgagctat

SEQ ID NO: 117087 - DNA, 75 bp, synthetic construct
  source 1..75: mol_type = other DNA
gctcacatcgctcgacgcgccagtcagcaaaatcaccagtggcttgctggtattaccctacacgcattcactgat

SEQ ID NO: 117088 - DNA, 75 bp, synthetic construct
  source 1..75: mol_type = other DNA
cgttttaaccgtgccttcgacacactatgccagcaagggcgggttggcgtgggccgttccagcgggcgctttaaa

SEQ ID NO: 117089 - DNA, 75 bp, synthetic construct
  source 1..75: mol_type = other DNA
tctgttttgctgcgttgtgcgtgactacagcttatgcattcgataataaagaattttcacgtggtgaaataaaat

SEQ ID NO: 117090 - DNA, 75 bp, synthetic construct
  source 1..75: mol_type = other DNA
ggaagctggcgttgagccgttatatcactcctgggttgtggatgtgatcaaggacggggatacgttatgcggtgt

SEQ ID NO: 117091 - DNA, 75 bp, synthetic construct
  source 1..75: mol_type = other DNA
atgaaattcatcgtaaaagcacttatttgtcttgctatcatgttatcattcacagccaacgctgctgaatataaa

SEQ ID NO: 117092 - DNA, 75 bp, synthetic construct
  source 1..75: mol_type = other DNA
aatgataagagcgcttgcgttcgagctacggcaatcgagtcaacggctcagcgatgcaagaaaaacccaatttat

SEQ ID NO: 117093 - DNA, 75 bp, synthetic construct
  source 1..75: mol_type = other DNA
tgggtgagggaacggtcatccatattgtgccgcgactggccggtgcagggaaaggcggactgcagattgtgctgg

SEQ ID NO: 117094 - DNA, 75 bp, synthetic construct
  source 1..75: mol_type = other DNA
caaacttatccgatgcttttagcattagttcttttttttacctgcgctttactttactcacagggagcgactacg

SEQ ID NO: 117095 - DNA, 75 bp, synthetic construct
  source 1..75: mol_type = other DNA
tccatgctattgcttaatcttattaataaagagattaagcacagtgtgaagaacaccgagttccgcaaactctaa

SEQ ID NO: 117096 - DNA, 75 bp, synthetic construct
  source 1..75: mol_type = other DNA
ggcaggaaaaaagctgaaaaaagataatcctaattataatggagatttgggatttaaaatatttgaaactgttca

SEQ ID NO: 117097 - DNA, 75 bp, synthetic construct
  source 1..75: mol_type = other DNA
cgccgtatcctggtgataaagtgattattactgaaggcgcattcgaaggttttcaggccattttcaccgagcccg

SEQ ID NO: 117098 - DNA, 75 bp, synthetic construct
  source 1..75: mol_type = other DNA
ggtattgtaaccttaggtaccacctttattgatgcgcatttaactgagatcaaagatatcgctggtgatatttta

SEQ ID NO: 117099 - DNA, 75 bp, synthetic construct
  source 1..75: mol_type = other DNA
cgtccttaatcaggggcgttgttcggacagtgtagggattttcccggaatttattgatggggtgatgctgccaac

SEQ ID NO: 117100 - DNA, 75 bp, synthetic construct
  source 1..75: mol_type = other DNA
cgctcctcgatgtttcccgacccgtggcgtaccaacccggtaggccgtttctgggatcgcctgcgtggacgcgat

SEQ ID NO: 117101 - DNA, 75 bp, synthetic construct
  source 1..75: mol_type = other DNA
ccccttatccgggtgataaggtgattattaccgaaggcgcgttcgaaggctttcaggccattttcaccgaacccg

SEQ ID NO: 117102 - DNA, 75 bp, synthetic construct
  source 1..75: mol_type = other DNA
acgaatggcaaaaagccggactcccggaagcccgtctgttttctgccccggagccggggctggccgccgtggacg

SEQ ID NO: 117103 - DNA, 75 bp, synthetic construct
  source 1..75: mol_type = other DNA
tggttctttttggcacttgcgcgctgctctactcgcaaggtgcgaccacgccgttaattatcccgcttgccgtcg

SEQ ID NO: 117104 - DNA, 75 bp, synthetic construct
  source 1..75: mol_type = other DNA
gtgtgcctgcctttatctggtcactggttgcttcagttcgctggctgttttttatcacgcagtacattcgggctg

SEQ ID NO: 117105 - DNA, 75 bp, synthetic construct
  source 1..75: mol_type = other DNA
gctgacgccgctggccctgctgcatcgtcctgaacgtatcacagatacagagatgatggcgtcaggcattgcaca

SEQ ID NO: 117106 - DNA, 75 bp, synthetic construct
  source 1..75: mol_type = other DNA
atcctgattattatgaccgtagttgtggcagcttcagccttacaggcggcaggtgggatggattatctggtacgt

SEQ ID NO: 117107 - DNA, 75 bp, synthetic construct
  source 1..75: mol_type = other DNA
caggcctatccgatgttgttggcgctggttctttttggcacttgtgctctgctctactcgcaaggcgcgaccacg

SEQ ID NO: 117108 - DNA, 75 bp, synthetic construct
  source 1..75: mol_type = other DNA
cttctataaccagtggaaagagaagcaagcatacgccgcacgtcgtgaagaagtggcggggattgatgaattatc

SEQ ID NO: 117109 - DNA, 75 bp, synthetic construct
  source 1..75: mol_type = other DNA
attatggccggtactggatttattgttttttctacgttgccggtgattgcagaggttgcgaaagagtccggtatc

SEQ ID NO: 117110 - DNA, 75 bp, synthetic construct
  source 1..75: mol_type = other DNA
tcctgttagatactgaatttgcccgccgcctgtatcacgactacgcaaaagaccagccgattttcgactaccact

SEQ ID NO: 117111 - DNA, 75 bp, synthetic construct
  source 1..75: mol_type = other DNA
tcaaactgctggggccggatgtaggttttgattccatcaacgaccgtccgatggcggaagagctgtctaagttgc

SEQ ID NO: 117112 - DNA, 75 bp, synthetic construct
  source 1..75: mol_type = other DNA
tgaacaactgagtaaacgggagaggtattccgaaaaatggcaacgacgaacgcattctgtctggcgtcaccgcca

SEQ ID NO: 117113 - DNA, 75 bp, synthetic construct
  source 1..75: mol_type = other DNA
acgctggaagccgacagcgttaacgtgcaggcgctgaacatggggcgcattgtcgttgacgtcgatggtgttaat

SEQ ID NO: 117114 - DNA, 75 bp, synthetic construct
  source 1..75: mol_type = other DNA
gtcgtccgtttggtatcactggcaaattgctttctccgtcaactgccgatgaaatctggaacgaatgtaacgaac

SEQ ID NO: 117115 - DNA, 75 bp, synthetic construct
  source 1..75: mol_type = other DNA
actgtagtggcaagatgtttgagtcgctggatctgattatcgctggttttcatgaaccggttttcgcgccacatg

SEQ ID NO: 117116 - DNA, 75 bp, synthetic construct
  source 1..75: mol_type = other DNA
agatatcaatggcttcgttttcgagaataccggctgcgtcaagaaaatcctggtcaatggcgcaagaaccttcat

SEQ ID NO: 117117 - DNA, 75 bp, synthetic construct
  source 1..75: mol_type = other DNA
tgaacctgcggggattgttcatcgcggggagtttgtcttcacgaaggaggcgaccagccggattggtgtcggcaa

SEQ ID NO: 117118 - DNA, 75 bp, synthetic construct
  source 1..75: mol_type = other DNA
gtctgtattctgggtaaaaccggcgttaacttcggcgcgggcatgactggcggcttcgcttacgttctcgatgaa

SEQ ID NO: 117119 - DNA, 75 bp, synthetic construct
  source 1..75: mol_type = other DNA
actgcttgataccgatcgtttcctcgagatgaatcgtcaacgctccctcgacgatggctttatgcatgcggtgtt

SEQ ID NO: 117120 - DNA, 75 bp, synthetic construct
  source 1..75: mol_type = other DNA
catgaaccggtttttgcgccgcatgatgaagctacgaatactcaggccatgattgccgcgatggcgagtgggcat

SEQ ID NO: 117121 - DNA, 75 bp, synthetic construct
  source 1..75: mol_type = other DNA
gcgctcggtcacgttgaccagttccagcaggtggcggagcagcagcaaacggctatcgacacgggcaaaagtgat

SEQ ID NO: 117122 - DNA, 75 bp, synthetic construct
  source 1..75: mol_type = other DNA
cctgaaggtctggcggttgcggggccggtttacgcggcaacggggtcgaaacgcaccgcaattctgtgggcgggg

SEQ ID NO: 117123 - DNA, 75 bp, synthetic construct
  source 1..75: mol_type = other DNA
aattattgatatcgtgacttcctggccgggagttagcggcgctcacgatcttcgcacgcggcagtcagggccgac

SEQ ID NO: 117124 - DNA, 75 bp, synthetic construct
  source 1..75: mol_type = other DNA
tggtttccctggctgctgatgctcaaagcagggtggtttgagtaccgctggcgacaaaccggcgatcaacaattt

SEQ ID NO: 117125 - DNA, 75 bp, synthetic construct
  source 1..75: mol_type = other DNA
ttatacatcgttgctcatggaaacacctccgttataggcactggctctgcaacaggaccgacattgagcccaaag

SEQ ID NO: 117126 - DNA, 75 bp, synthetic construct
  source 1..75: mol_type = other DNA
agccacttcgtgcgctttggcgcgtcgccagcgatagtcccatcggcggtgattcatcagctatcggtatataaa

SEQ ID NO: 117127 - DNA, 75 bp, synthetic construct
  source 1..75: mol_type = other DNA
ctgtggtgctgactttggatttgacccctatatcagtgatgtaccagatgttcaatgtgatctgaacacaacaaa

SEQ ID NO: 117128 - DNA, 75 bp, synthetic construct
  source 1..75: mol_type = other DNA
attgcagcggcaaaatgtttgattcgctggatttaatcattgctggttttcatgaaccggtttttgcgccacatg

SEQ ID NO: 117129 - DNA, 75 bp, synthetic construct
  source 1..75: mol_type = other DNA
tctgcgtttcctgttctggctggcaccgattgtcttctcgttgatcctgtcaccgtttgtttcggtgatttccag

SEQ ID NO: 117130 - DNA, 75 bp, synthetic construct
  source 1..75: mol_type = other DNA
tataagagtgctaagttgccattcaggtatacactcgaaaactccggcctttgcacaacgattgaaagaggctat

SEQ ID NO: 117131 - DNA, 75 bp, synthetic construct
  source 1..75: mol_type = other DNA
aagcgatccggtgacgatggcccgtctgcatttccgcgtctggaattccccggagagatattcttcatgggtgag

SEQ ID NO: 117132 - DNA, 75 bp, synthetic construct
  source 1..75: mol_type = other DNA
catcaaacctggtgcaacgctttccgtcggattattcatgctggcgacgatcgccattgttattcttgctgcatt

SEQ ID NO: 117133 - DNA, 75 bp, synthetic construct
  source 1..75: mol_type = other DNA
acttgatgaacttccgtctgttcctggtgaaagggatgcacccggtacaccgcgcggtgttcctgacaggtgtga

SEQ ID NO: 117134 - DNA, 75 bp, synthetic construct
  source 1..75: mol_type = other DNA
gaggttgggtggcattaggctcggattctcacaccgcgtttaccatgggggaatttgaagagtgtcttaaaatcc

SEQ ID NO: 117135 - DNA, 75 bp, synthetic construct
  source 1..75: mol_type = other DNA
aaaaacactatttggttcagtaaaaaccgaagataaagacatttatcttgacttttttgctggctctggaaccac

SEQ ID NO: 117136 - DNA, 75 bp, synthetic construct
  source 1..75: mol_type = other DNA
cgattatccgcgtgaaaccgtttattgagcactgtgcgctggcgccgctgccaggcgagggatcttttgctggtt

SEQ ID NO: 117137 - DNA, 75 bp, synthetic construct
  source 1..75: mol_type = other DNA
cctcgctggacgaattgccgcagtttatcaatgtgctgaccggggggatgtcgattgtggggccacgtccgcacg

SEQ ID NO: 117138 - DNA, 75 bp, synthetic construct
  source 1..75: mol_type = other DNA
tcgcacaacggctgaaagaaattatgaatgaacatgggtatcatagtctggtcgttaccggataccttggtgagg

SEQ ID NO: 117139 - DNA, 75 bp, synthetic construct
  source 1..75: mol_type = other DNA
ttcaacaatgatttcgacacgcaactgaaaatctggctggcgtggtatgggctgaccagcatcggactggtggtt

SEQ ID NO: 117140 - DNA, 75 bp, synthetic construct
  source 1..75: mol_type = other DNA
agagaaggaactaaaatttatttgcatccaacttccagaagagactaaagaaaagtcagaagcctataaagctgg

SEQ ID NO: 117141 - DNA, 75 bp, synthetic construct
  source 1..75: mol_type = other DNA
caactggcggacaccacctgttcggtgctgctgatccccgacgtctttaccttcaacattctccattcacgtctc

SEQ ID NO: 117142 - DNA, 75 bp, synthetic construct
  source 1..75: mol_type = other DNA
acaaagatgtttgtagtttggggcaattcgatattgatgaaagtgaagttgaaaaagagtgggatgaagatgaat

SEQ ID NO: 117143 - DNA, 75 bp, synthetic construct
  source 1..75: mol_type = other DNA
ggttgcttcagttcgctggttgttttttatcacgcagtacattcgggctgatgcctggaataagcgccgggaaga

SEQ ID NO: 117144 - DNA, 75 bp, synthetic construct
  source 1..75: mol_type = other DNA
gtccttagttaagtgtgctatttcccttatctttatctgtatttttttgctggctgtctttacattttatgaggt

SEQ ID NO: 117145 - DNA, 75 bp, synthetic construct
  source 1..75: mol_type = other DNA
ttgtcatttttcctttaagttgtataaatgttcttgctgacgacttcaattacagtttcattcgtgggggaagca

SEQ ID NO: 117146 - DNA, 75 bp, synthetic construct
  source 1..75: mol_type = other DNA
cgcattcagcctggcgtcaccgccactggcacgtatctgccttcacggggatttacaacgatttggccgccgcct

SEQ ID NO: 117147 - DNA, 75 bp, synthetic construct
  source 1..75: mol_type = other DNA
tattagcgttggttactctgccaacgcttgcggaggagacgccgttacaactggcgctgcggggcgcgcagcacg

SEQ ID NO: 117148 - DNA, 75 bp, synthetic construct
  source 1..75: mol_type = other DNA
aaatgcgcgtggggtcgtcgcgtggttctcaggagatcagcacggcagacgaggggacggtggtcaggttgtggt

SEQ ID NO: 117149 - DNA, 75 bp, synthetic construct
  source 1..75: mol_type = other DNA
gagccaaaacgaatgcatcgttaatctcaatggtgcagcgtttttcggatatcaccattatgctcggcgggctgt

SEQ ID NO: 117150 - DNA, 75 bp, synthetic construct
  source 1..75: mol_type = other DNA
ggtgaacgttacgaccagatactcgcctttgcctatcccgataacagccttagccgctggggagcaccacgctcc

SEQ ID NO: 117151 - DNA, 75 bp, synthetic construct
  source 1..75: mol_type = other DNA
gagcggggcgcttaaaatcggttgatgcggtaatcgtcaacggcggtgtaccgcacaatggtgaaatcccaatgc

SEQ ID NO: 117152 - DNA, 75 bp, synthetic construct
  source 1..75: mol_type = other DNA
accgcagccattcgttatatgcagcgcacccaacatattcatcgcattatggctaattatatgccgcacaataaa

SEQ ID NO: 117153 - DNA, 75 bp, synthetic construct
  source 1..75: mol_type = other DNA
tcgcgctggccgatcatcagttccttgatcatgcgggggttagtgcgttgttaagcgccgggcagacgctggtca

SEQ ID NO: 117154 - DNA, 75 bp, synthetic construct
  source 1..75: mol_type = other DNA
ggggatcaaccgtgttctcaaacgcctggaagacattgtgctctcttcgctgatccttctgctgatctctccggt

SEQ ID NO: 117155 - DNA, 75 bp, synthetic construct
  source 1..75: mol_type = other DNA
aacgctggtaatgactgaaaaagatgcggtgaaatgccgggcctttgcagaagaaaattggtggtatttgcctgt

SEQ ID NO: 117156 - DNA, 75 bp, synthetic construct
  source 1..75: mol_type = other DNA
ggcccgtcgtatcatctttgcggtaatgatccccgcattgctgatctcctacgtcatctcatcgctgttttatat

SEQ ID NO: 117157 - DNA, 75 bp, synthetic construct
  source 1..75: mol_type = other DNA
acgtcatctcgtcgctattctatatgggttcctggcagggattcggcgcactcgcccacttcaacctgtttgtcg

SEQ ID NO: 117158 - DNA, 75 bp, synthetic construct
  source 1..75: mol_type = other DNA
accgcgagatctgaaagtgaatgaaacaaatgctgagtatctggtgcgtaaattcgatgaagtacgtgctgaggc

SEQ ID NO: 117159 - DNA, 75 bp, synthetic construct
  source 1..75: mol_type = other DNA
catattttcgtattgccccggaagactggctgcaggcacagatgcagggggagattgtggcgctggtacacagtc

SEQ ID NO: 117160 - DNA, 75 bp, synthetic construct
  source 1..75: mol_type = other DNA
ctgcccgcaggtatgtcggagcgggagcttgatggccgtctttacgggagtacctccacagtacctgtcgtactt

SEQ ID NO: 117161 - DNA, 75 bp, synthetic construct
  source 1..75: mol_type = other DNA
gtacgaacagtattttgtatggggaatgaccgcaggcataattcgtgagctggcgctgcaaattggtgtgaaacc

SEQ ID NO: 117162 - DNA, 75 bp, synthetic construct
  source 1..75: mol_type = other DNA
caatgaaaaagccaaaaagatggagcagcctgcagacgcaaagccggttgcggcatcactgccgcgcctggctga

SEQ ID NO: 117163 - DNA, 75 bp, synthetic construct
  source 1..75: mol_type = other DNA
ggttccgtgctgccgttgctggtcggcttagggctggatgaactcagcatgagcgcaccatcaattccggcggcg

SEQ ID NO: 117164 - DNA, 75 bp, synthetic construct
  source 1..75: mol_type = other DNA
cacctggggcgcgtttagctttccgtttatttttcttgctaccgacctgaccgtgcgtatttttggcgcaccgct

SEQ ID NO: 117165 - DNA, 75 bp, synthetic construct
  source 1..75: mol_type = other DNA
ggctcgtcgcatcatctttgcggtgatgatccccgcgttgctgatctcctacgtcatctcatcactgttttatat

SEQ ID NO: 117166 - DNA, 75 bp, synthetic construct
  source 1..75: mol_type = other DNA
tgaatcagcgattctggcgcatgcccggcggtgtgcgcctgcggagtcgtgcggcttcgtgataagcacgccgga

SEQ ID NO: 117167 - DNA, 75 bp, synthetic construct
  source 1..75: mol_type = other DNA
ccgactctcgaagagattgatttcaatggcaaactggttgcgctgtttggttgtggtgaccaggaagattacgcc

SEQ ID NO: 117168 - DNA, 75 bp, synthetic construct
  source 1..75: mol_type = other DNA
cgaaaccggagcatggaaagacgctgttgacttggtgctcaaagaggcttgccaagctgtaaacattgacatcaa

SEQ ID NO: 117169 - DNA, 75 bp, synthetic construct
  source 1..75: mol_type = other DNA
tctttacgcttcaggatcggctcgatttaacccatgagtatctgcacctggcctttgatggttatcccaccgggc

SEQ ID NO: 117170 - DNA, 75 bp, synthetic construct
  source 1..75: mol_type = other DNA
tcaggagaagccgtgggttggtgactggaaatatgtaccgacaaaagaggattgcaacgacaggccgaactatga

SEQ ID NO: 117171 - DNA, 75 bp, synthetic construct
  source 1..75: mol_type = other DNA
atcgcgccagcaagagaagaaatttcacgttcaggactggcactgaatcttattcctggcgtggaaatatccacc

SEQ ID NO: 117172 - DNA, 75 bp, synthetic construct
  source 1..75: mol_type = other DNA
ctgatgctgaatcctatcccgcaccgccagcccgcattaaatggttgtcagccttattactgatgctgtctgttg

SEQ ID NO: 117173 - DNA, 75 bp, synthetic construct
  source 1..75: mol_type = other DNA
gtcagcggcgcagccgggcgatgtgctgctgtgctggtttggttcatcggtgccgaatcatgccgctatttactg

SEQ ID NO: 117174 - DNA, 75 bp, synthetic construct
  source 1..75: mol_type = other DNA
cggagtatccgattgatatcccggcggtggtggccgcggctaaggagtgtcatgtggcgttggaggtcaataacg

SEQ ID NO: 117175 - DNA, 75 bp, synthetic construct
  source 1..75: mol_type = other DNA
agcaactggacgatcaggccgactcacaagaaacgctcgcgctggcggtaacgaaacatcatcagcaggcactgg

SEQ ID NO: 117176 - DNA, 75 bp, synthetic construct
  source 1..75: mol_type = other DNA
tatgcaatcactggataaaaaggcgcggttacaggagttggcgcgcttacttggtggtagcgaagttacccgcaa

SEQ ID NO: 117177 - DNA, 75 bp, synthetic construct
  source 1..75: mol_type = other DNA
aaaccggcggccccaccacgcccgatgacgtcatacatgtgcgtacagcattgccgctgactgacgtcaccacca

SEQ ID NO: 117178 - DNA, 75 bp, synthetic construct
  source 1..75: mol_type = other DNA
gcacggataacggcagacagaacacgtacttttcgtcgctggataacatgattgcccaggggaacccgatgccgg

SEQ ID NO: 117179 - DNA, 75 bp, synthetic construct
  source 1..75: mol_type = other DNA
atgttactcaccgatctccttcacggtaatacgcatatggggcacattgtcgttgacattgatggtgttaatatc

SEQ ID NO: 117180 - DNA, 75 bp, synthetic construct
  source 1..75: mol_type = other DNA
cactggtgtacccgcagtcagatggcacggtctgtgcaatgaaagctacggcggaagggccaaagcggatggatt

SEQ ID NO: 117181 - DNA, 75 bp, synthetic construct
  source 1..75: mol_type = other DNA
cgaacaccacggcgacgcgatggaagtcgcgcagtgccagcaatcgcccaatgaacgcacccaactggcgacact

SEQ ID NO: 117182 - DNA, 75 bp, synthetic construct
  source 1..75: mol_type = other DNA
agcgggcgcagttaatcgctgaaagactggaaaaagcgcaaatacctggtgctctggaaggcgcgcaaagactgg

SEQ ID NO: 117183 - DNA, 75 bp, synthetic construct
  source 1..75: mol_type = other DNA
taaactctggctgcctgcaggcgttgaaggcgtctggcagctatgggaacagccgcagaacaccacagagaggga

SEQ ID NO: 117184 - DNA, 75 bp, synthetic construct
  source 1..75: mol_type = other DNA
aatccgcagcccggagagtttgagcaaatcgacgaagagtacaaacgtctggcgaacagcggtcaattgctgact

SEQ ID NO: 117185 - DNA, 75 bp, synthetic construct
  source 1..75: mol_type = other DNA
gaaagattatctgttgattgatgggcaatggcgcgatcacgtgctgactgcattaaccaccccagactggacgcc

SEQ ID NO: 117186 - DNA, 75 bp, synthetic construct
  source 1..75: mol_type = other DNA
atggtcgatattacccgggtacgccgtgaatccctgcgctggagtctgctggttgccctgaacaaaacccgccct

SEQ ID NO: 117187 - DNA, 75 bp, synthetic construct
  source 1..75: mol_type = other DNA
cgggttttatcgataccaaaaaagaaggcggcacctgggattatggtagtaccggttttaaactcgcttatgatc

SEQ ID NO: 117188 - DNA, 75 bp, synthetic construct
  source 1..75: mol_type = other DNA
gacggtcaggttaacattggcgaatgggttctgcttggcaggggatacgcgtatcagggagaaaaatttcagagc

SEQ ID NO: 117189 - DNA, 75 bp, synthetic construct
  source 1..75: mol_type = other DNA
tgaatggttttagcgcatcggtaaaatatgctcgcgccttaggggaaaacgcaaatttacagctaatcggttatc

SEQ ID NO: 117190 - DNA, 75 bp, synthetic construct
  source 1..75: mol_type = other DNA
aatgcggacaacctaccgcagagcgttgaattaaccgaaaacgcaatcaatgtaacgccaacagaaaacgcgatt

SEQ ID NO: 117191 - DNA, 75 bp, synthetic construct
  source 1..75: mol_type = other DNA
gcctcggtgatggtgccggtggatatcgccgcgattgttgccacgctggtgatgctgcatctctatttccgcaaa

SEQ ID NO: 117192 - DNA, 75 bp, synthetic construct
  source 1..75: mol_type = other DNA
gtttacgattgatgttaaatttgacgagcatcacctgggcgctgacggcgctgatcgtattgagtttcgggtaac

SEQ ID NO: 117193 - DNA, 75 bp, synthetic construct
  source 1..75: mol_type = other DNA
gatagccagaaaatggtgatgcgctatggcggacacgcctgcaacgtgaccgatcccgaaacgtttaatgctctg

SEQ ID NO: 117194 - DNA, 75 bp, synthetic construct
  source 1..75: mol_type = other DNA
gggttttgaccgtcaatacgttgacgacgctttttttgcaggcagcacgctgaagagcaatctgctgattaatat

SEQ ID NO: 117195 - DNA, 75 bp, synthetic construct
  source 1..75: mol_type = other DNA
attcaacggttgaaaccagcctgctactgtcggggaatagagcgacattaattgttgaggatgatggcccaggga

SEQ ID NO: 117196 - DNA, 75 bp, synthetic construct
  source 1..75: mol_type = other DNA
ttcctgggcggcggaagcgctagcgcgcacggggattggcgcaatcacgcttatcgatatggatgatgtgtgcgt

SEQ ID NO: 117197 - DNA, 75 bp, synthetic construct
  source 1..75: mol_type = other DNA
cgcggctggccggagccgggggaaatggtgtttttcaggtggtgctgggggttgcagcgattgtcgggtcatttt

SEQ ID NO: 117198 - DNA, 75 bp, synthetic construct
  source 1..75: mol_type = other DNA
ggcaggcagtggccaaaaattgaggcatttattacctggctaagagagcaggtatgtcagtcttgtcagtatcag

SEQ ID NO: 117199 - DNA, 75 bp, synthetic construct
  source 1..75: mol_type = other DNA
ctttctgatggatgaagaaatcttgccagtttgtagcccggagtacgctcatagacatgatttaaccaacacggt

SEQ ID NO: 117200 - DNA, 75 bp, synthetic construct
  source 1..75: mol_type = other DNA
ggccatgtttgtattaatcaataacgtttttctgagctttggggaggggtcttttttttactccttaggtattcg

SEQ ID NO: 117201 - DNA, 75 bp, synthetic construct
  source 1..75: mol_type = other DNA
gttaacggtctgaaaattagcgccagtgcttcgctgggcgcgcgtgaacgggttgtggtggtcgatgtggaagat

SEQ ID NO: 117202 - DNA, 75 bp, synthetic construct
  source 1..75: mol_type = other DNA
tagcagaaatgtttacctttattgtccgccgcaactgggtcattaaattacccgacagcgtaccgacatcggtat

SEQ ID NO: 117203 - DNA, 75 bp, synthetic construct
  source 1..75: mol_type = other DNA
caatatggttccgtcgaagcggcgctggcagccggtaagaccttccatatctgggccaagccgatgctggactcc

SEQ ID NO: 117204 - DNA, 75 bp, synthetic construct
  source 1..75: mol_type = other DNA
gtggccaaaaattgaggcatttattacctggctaagagagcaggtatgtcagtcttgtcagtagcggcgataccg

SEQ ID NO: 117205 - DNA, 75 bp, synthetic construct
  source 1..75: mol_type = other DNA
taaagatgtcactggccatgctattggcgcgtatattcgtgctcgtcgtttgtcgaaatcagcggttgcgctacg

SEQ ID NO: 117206 - DNA, 75 bp, synthetic construct
  source 1..75: mol_type = other DNA
gcggcaatgaatcttgttacgaacgcgggtattccgcttcgggttaacagtaactacaaaatccagcatgacaag

SEQ ID NO: 117207 - DNA, 75 bp, synthetic construct
  source 1..75: mol_type = other DNA
caagaagcagtttgcccagactcctgcactttaccgccgttctcctgaatggagcgcctttggtattcgcccgcc

SEQ ID NO: 117208 - DNA, 75 bp, synthetic construct
  source 1..75: mol_type = other DNA
ggtgttgcggctggtactgccacaatcgaggttactacccaagatggtagccacaaagcgacagcgaccgtagag

SEQ ID NO: 117209 - DNA, 75 bp, synthetic construct
  source 1..75: mol_type = other DNA
ccggtgctctacggcctgaatgaaacgcgtccgagtcaggataaagacgacgaacaagaggtattctataccacc

SEQ ID NO: 117210 - DNA, 75 bp, synthetic construct
  source 1..75: mol_type = other DNA
acatcactacattaccgggcaggcagtggccaaaaattgaggcatttattacttggttaagagaacaggtaaaaa

SEQ ID NO: 117211 - DNA, 75 bp, synthetic construct
  source 1..75: mol_type = other DNA
gctgggcctatgtgatctttgttccgctgctctggttcttcggtattcatggcgcgctggcgttgaccgccctgg

SEQ ID NO: 117212 - DNA, 75 bp, synthetic construct
  source 1..75: mol_type = other DNA
gcattattcgcctccagcagacgttaagcatttcactgtcagcggctacctgtaatcgtgtcatcgtactggtta

SEQ ID NO: 117213 - DNA, 75 bp, synthetic construct
  source 1..75: mol_type = other DNA
cagctgttcttacactggattcaacccgtttttctgaagaggctgcacgggtaaagaaagaactgggggaaacca

SEQ ID NO: 117214 - DNA, 75 bp, synthetic construct
  source 1..75: mol_type = other DNA
aaggcattgaataagattttcggctcgttgtttatgctggtaggagcgttgttggcatcggcgaggcatgcgtga

SEQ ID NO: 117215 - DNA, 75 bp, synthetic construct
  source 1..75: mol_type = other DNA
acatggcccgcaagggggcgcaggatgagctccggctgcagttgcgtgatggcggtctgttatcagggagcgggc

SEQ ID NO: 117216 - DNA, 75 bp, synthetic construct
  source 1..75: mol_type = other DNA
gtggccaaaaattgaggcatttattacctggctaagagagcaggtatgtcagtcttgtcagtacccgcgataccg

SEQ ID NO: 117217 - DNA, 75 bp, synthetic construct
  source 1..75: mol_type = other DNA
gtggccaaaaattgaggcatttattacctggctaagagagcaggtatgtcagtcttgtcagtaccggggataccg

SEQ ID NO: 117218 - DNA, 75 bp, synthetic construct
  source 1..75: mol_type = other DNA
tgtaatcgtgtcatcgtactggttaaagcggtatttacctgggccggaaggcaaagcattacctctgtccatccg

SEQ ID NO: 117219 - DNA, 75 bp, synthetic construct
  source 1..75: mol_type = other DNA
tggcaacggtgagctgcttcaccatatacctgaacaactgagtaaacgggagaggtattctgaaaaatggcaacg

SEQ ID NO: 117220 - DNA, 75 bp, synthetic construct
  source 1..75: mol_type = other DNA
tgcggagtcgtgcggcttcgtgataaccacgacggagggcgagcggtacctgccctgtgtgaatatctccgcagc

SEQ ID NO: 117221 - DNA, 75 bp, synthetic construct
  source 1..75: mol_type = other DNA
cgatggtcaggtagcggaagctatggccatggtgcgtgcgttgaacaggatgacaaaggctgggatgccagaaag

SEQ ID NO: 117222 - DNA, 75 bp, synthetic construct
  source 1..75: mol_type = other DNA
aacaaagcattgctgactcatgtggatatcaacaatgtggtgtgcgcgatgcccttgccctatacccgtttgtac

SEQ ID NO: 117223 - DNA, 75 bp, synthetic construct
  source 1..75: mol_type = other DNA
tttggctgggaatccagcagtggcgcgccgctggtgcaattgaccttaaatcgctggcctctactcaatcgcgtc

SEQ ID NO: 117224 - DNA, 75 bp, synthetic construct
  source 1..75: mol_type = other DNA
ggatgactggtggcgcaacggtcaaaacctttacctggacaatatggcggtcaccggcttttaccgggtgcccct

SEQ ID NO: 117225 - DNA, 75 bp, synthetic construct
  source 1..75: mol_type = other DNA
caggccactgccgttgaacagggcctgagccgtcaggcgctggctgcgcaaaaagccgggatttccgtcgggcag

SEQ ID NO: 117226 - DNA, 75 bp, synthetic construct
  source 1..75: mol_type = other DNA
ggtgcgctgcaaggtcaggcgaacgccgggcagacatacgccaacaacatgagcagcattgcacagcaaagcgca

SEQ ID NO: 117227 - DNA, 75 bp, synthetic construct
  source 1..75: mol_type = other DNA
gccgctggagcgaagaacgtaaggctgcggtacggcggcggaatctggagaaacgtatcaacaggcatgcaccac

SEQ ID NO: 117228 - DNA, 75 bp, synthetic construct
  source 1..75: mol_type = other DNA
ttgacaacccgccctttaaaaaagtgccggcttactggtttcatcccggactgacttatctgaaagggcggtttg

SEQ ID NO: 117229 - DNA, 75 bp, synthetic construct
  source 1..75: mol_type = other DNA
cactgccagggtaggcagtttgttttattgcgtgccttcacgcgcctttgaagggaatttcatcggtgattctga

SEQ ID NO: 117230 - DNA, 75 bp, synthetic construct
  source 1..75: mol_type = other DNA
acttcccccagcaacgccgacggaagaggtatcgcaggccgattttcagtcggtagtgaaaaatttactcaaacg

SEQ ID NO: 117231 - DNA, 75 bp, synthetic construct
  source 1..75: mol_type = other DNA
agcacctcagcaaagctgtttactgcaaaggaggcagtgatggcggttcaaaagcccaggcacgcgcaactgaaa

SEQ ID NO: 117232 - DNA, 75 bp, synthetic construct
  source 1..75: mol_type = other DNA
cctgaaacggcatctgaaataatagaaccgaaccaacgcatatatgactatcaggatccagaactgataacggcc

SEQ ID NO: 117233 - DNA, 75 bp, synthetic construct
  source 1..75: mol_type = other DNA
atttggcggtccgtggattgatgcattattcacaggaactatcgatccgcaggctcatcccttctttgccgggat

SEQ ID NO: 117234 - DNA, 75 bp, synthetic construct
  source 1..75: mol_type = other DNA
ccagctcagaggcggtgcaaaaagtctgaccgtacctgaacttaaaaaagagcttgccctttatcatcagttagc

SEQ ID NO: 117235 - DNA, 75 bp, synthetic construct
  source 1..75: mol_type = other DNA
gttgctaaaccagtaacagtgaccgttcccatcggaatgtctttacgcgaggtactggcgctggcgggaggcgct

SEQ ID NO: 117236 - DNA, 75 bp, synthetic construct
  source 1..75: mol_type = other DNA
gcgaaatccaggaagactgggaagccgtctgggatcagctcgacgacctgaacctcgaaggtaaaattgttgcgc

SEQ ID NO: 117237 - DNA, 75 bp, synthetic construct
  source 1..75: mol_type = other DNA
tgctcattgaatttgccattgattacctgaagaacaataaaaagcaagggctgatgaagcgtattggtcgttgca

SEQ ID NO: 117238 - DNA, 75 bp, synthetic construct
  source 1..75: mol_type = other DNA
tcagtattcataatgataatttcagtgagctggaatgggagtgtaaccggccatcctttgttgtatccggtgatg

SEQ ID NO: 117239 - DNA, 75 bp, synthetic construct
  source 1..75: mol_type = other DNA
caaccaaaggcgtgaagttcgtcggttactggccaacggaaggatatgaattcaccagcccgaaacccgttattg

SEQ ID NO: 117240 - DNA, 75 bp, synthetic construct
  source 1..75: mol_type = other DNA
cgatcgctttgtgaatcgtcaggcattcaatattgaagtacctactgcactattccagtcggtgaatgcaattgc

SEQ ID NO: 117241 - DNA, 75 bp, synthetic construct
  source 1..75: mol_type = other DNA
atgtttacctatgaaggtctgggaacaggcgtgcaggagtttatcctgacggtatacggaacgtgcatgccaatg

SEQ ID NO: 117242 - DNA, 75 bp, synthetic construct
  source 1..75: mol_type = other DNA
ctgcgtgcagttgttgataaacaggccctgcttgcccatcaacaacgagtggtcagtggggaacaggaacccagt

SEQ ID NO: 117243 - DNA, 75 bp, synthetic construct
  source 1..75: mol_type = other DNA
ggcatgtttatcggtttgttgatattcctgagtggtcatcgtcatttccaatccacgcgaggtatggataaaaaa

SEQ ID NO: 117244 - DNA, 75 bp, synthetic construct
  source 1..75: mol_type = other DNA
gggcattgatacaaattcaacttttagcctgtatctggcgctggcaatcattatttgtggctacggtttattcaa

SEQ ID NO: 117245 - DNA, 75 bp, synthetic construct
  source 1..75: mol_type = other DNA
ccgttcaatccgtaacggtaacgccagactcaacctctgttgagaaagggaaatcagtcagtctgaaagcgaatg

SEQ ID NO: 117246 - DNA, 75 bp, synthetic construct
  source 1..75: mol_type = other DNA
tatatgcatcagggatggatcctccgtcaggtgtttcctgacacggcagaccctgaatatctggagctgcactgc

SEQ ID NO: 117247 - DNA, 75 bp, synthetic construct
  source 1..75: mol_type = other DNA
tattttataatgctgactgattatggttttaatttaactgcaactcaaagaatagcacaataccccgatgataag

SEQ ID NO: 117248 - DNA, 75 bp, synthetic construct
  source 1..75: mol_type = other DNA
aacaataaaaagcaggggctgatgcagcgcattggtcgttgcatgggatatctgcaggtagctgctgagattgaa

SEQ ID NO: 117249 - DNA, 75 bp, synthetic construct
  source 1..75: mol_type = other DNA
acctatttcagcgtgaagaatttgactggatcttggcagaaaaatttgcgcgtctaaattggacaactgacgtaa

SEQ ID NO: 117250 - DNA, 75 bp, synthetic construct
  source 1..75: mol_type = other DNA
cagacgatcatgaaaaaccttgctccgttcacgcctcttgcggagcagtatgttaaccagcttcagaacctttcc

SEQ ID NO: 117251 - DNA, 75 bp, synthetic construct
  source 1..75: mol_type = other DNA
aaagaacttttggctaacacactcacaggaaatgacgcagcaaaaggcgttggtgtactgattgaaggtttaaaa

SEQ ID NO: 117252 - DNA, 75 bp, synthetic construct
  source 1..75: mol_type = other DNA
tgggctttgccgaactctttattgatccggtggcgattgcgcaaatcacgcgtctgaaaatgtctggcgtattaa

SEQ ID NO: 117253 - DNA, 75 bp, synthetic construct
  source 1..75: mol_type = other DNA
tacagaaggcgaacaggagcaagcgcaatggcgtaagcaaattgcttcgctgataccggaaggcgttgctgcata

SEQ ID NO: 117254 - DNA, 75 bp, synthetic construct
  source 1..75: mol_type = other DNA
agatagcgcaactttatggtcaacgtacagaaggcgaacaggagcaagcgcaatggcgtaagcaaattgcttcgc

SEQ ID NO: 117255 - DNA, 75 bp, synthetic construct
  source 1..75: mol_type = other DNA
aagtgggcaggcgcggcttacctgatttggctgggaatccagcagtggcgcgccgctggtgcaattgatcttaaa

SEQ ID NO: 117256 - DNA, 75 bp, synthetic construct
  source 1..75: mol_type = other DNA
gggaagataacgtcggtgaatggattgaagagatgaaagaagagtggcgtcacgacgtagaagtgctgaaagcgt

SEQ ID NO: 117257 - DNA, 75 bp, synthetic construct
  source 1..75: mol_type = other DNA
cattaccgacgggacgcgtttacggcagatcctgtggaatctcatcagtaacgccgtcaaattcacccagcaagg

SEQ ID NO: 117258 - DNA, 75 bp, synthetic construct
  source 1..75: mol_type = other DNA
aaaactggaagagatgcgcgagcgcgatctgagcctcaatgtgcagttgaaagacaatattacccagcttaatca

SEQ ID NO: 117259 - DNA, 75 bp, synthetic construct
  source 1..75: mol_type = other DNA
tacggggacgggcggcaaatatgagcctgcggggatagttcaccgcggggagtttgtcttcacgaaggaggcaac

SEQ ID NO: 117260 - DNA, 75 bp, synthetic construct
  source 1..75: mol_type = other DNA
tggtagcatgatttccccggtggtcatggcggcaatcatggcggcggttgcaggaatcatggtggcgctctccgt

SEQ ID NO: 117261 - DNA, 75 bp, synthetic construct
  source 1..75: mol_type = other DNA
cgctaaccgcgatgatcaagaaattctgggatacccaggatgatgaggagagtacggtgacgacagaagagaaca

SEQ ID NO: 117262 - DNA, 75 bp, synthetic construct
  source 1..75: mol_type = other DNA
caacactgcacggtgagattgtggcactggtccacagtcaccccggtggtctgccctgtctgagtgaagccgacc

SEQ ID NO: 117263 - DNA, 75 bp, synthetic construct
  source 1..75: mol_type = other DNA
gacggaaaaggtgctttaggcctacatgcacatttttatgcagagccgctgtctatgttcccttgcaccggtgaa

SEQ ID NO: 117264 - DNA, 75 bp, synthetic construct
  source 1..75: mol_type = other DNA
cgatgtctcggcggaatacggaagctggaacaaagaacggtatgtggcggatttacaaagtccgctcacggaaga

SEQ ID NO: 117265 - DNA, 75 bp, synthetic construct
  source 1..75: mol_type = other DNA
cagatcttgtggaacttaattagcaacgccgtcaaatttacccagcaaggcctggttactgtgcgcgtgcgctac

SEQ ID NO: 117266 - DNA, 75 bp, synthetic construct
  source 1..75: mol_type = other DNA
ggtgaatggattgaagagatgaaagaagagtggcgtcacgacgtagaagtactgaaagcgtgggtggcaaaagct

SEQ ID NO: 117267 - DNA, 75 bp, synthetic construct
  source 1..75: mol_type = other DNA
tctggtaagcctaaaggctatgatctgcttcctcctggctatatgttcgctcgtatgtcggcacacggtcagatc

SEQ ID NO: 117268 - DNA, 75 bp, synthetic construct
  source 1..75: mol_type = other DNA
aagtatttggcatagctgatgatgaatctccgcggctcacatcaaatggaatacatttctggtccacatccatac

SEQ ID NO: 117269 - DNA, 75 bp, synthetic construct
  source 1..75: mol_type = other DNA
ttcctcactggataacatggttgctcagggcaatgttttgcctgttctgtacggggaaatgcgtgtggggtcgcg

SEQ ID NO: 117270 - DNA, 75 bp, synthetic construct
  source 1..75: mol_type = other DNA
ccacgatgctgttttctctgggggccagcatgattctgggtggtgtggctcagatgctggccccgaaggctaaag

SEQ ID NO: 117271 - DNA, 75 bp, synthetic construct
  source 1..75: mol_type = other DNA
cctctcgccaccctcccctgcattcagcaaaatcagactccacggacatgtaattttgataacgaacaacgttga

SEQ ID NO: 117272 - DNA, 75 bp, synthetic construct
  source 1..75: mol_type = other DNA
agttatggcgtgctatgtggaatgtcagtgatgggattcagtttagtgctgctacaaacggcgggaattggttaa

SEQ ID NO: 117273 - DNA, 75 bp, synthetic construct
  source 1..75: mol_type = other DNA
ccacctttccggcattgatggcgccagttgaagagcaggttatcgttgattccgttttcacgggcgatctgcgcc

SEQ ID NO: 117274 - DNA, 75 bp, synthetic construct
  source 1..75: mol_type = other DNA
gcaccgaagccgcatttatatctccgtgactggatggtggtcgactatctgcccggcgaggtaaaaacgtatttg

SEQ ID NO: 117275 - DNA, 75 bp, synthetic construct
  source 1..75: mol_type = other DNA
acgtaccgcgattctgtgggcggggatttccggactggctgaaattctcggtggtgtgctggcgtggttaattct

SEQ ID NO: 117276 - DNA, 75 bp, synthetic construct
  source 1..75: mol_type = other DNA
cttaacccgtcttttgggcgaaaaacgaggctctacgaaggtacaaatgattctgaaaggtttatgtgctgctgg

SEQ ID NO: 117277 - DNA, 75 bp, synthetic construct
  source 1..75: mol_type = other DNA
cgactggcagggcgctgtcgggggcgtacatcaggacagagtgagccagcagcccgtgcgtcttcgggttagtgg

SEQ ID NO: 117278 - DNA, 75 bp, synthetic construct
  source 1..75: mol_type = other DNA
cagtgattacctgtttctgtatctcccccagccgttcggccatgcgctccgaagcctgctgccagcggtaacttt

SEQ ID NO: 117279 - DNA, 75 bp, synthetic construct
  source 1..75: mol_type = other DNA
attggcggtctactggataccatgtggaactggcgagcctgttacctgtttttactggtgctttgtgctggtgtg

SEQ ID NO: 117280 - DNA, 75 bp, synthetic construct
  source 1..75: mol_type = other DNA
tggcagcatgatttctccggtagtcatggcggcaatcatggcggcggttgccggtattatggtggcgctctcggt

SEQ ID NO: 117281 - DNA, 75 bp, synthetic construct
  source 1..75: mol_type = other DNA
cacgcgttcgcctgcctgacgggcggattgtgcactgggatgagaaatcacgaagcctggtggcagcagatcaac

SEQ ID NO: 117282 - DNA, 75 bp, synthetic construct
  source 1..75: mol_type = other DNA
tgccttacggtgaaatgctggttggttcacgacggatatcccaggacatcagcacccgtgatgagggcggagacg

SEQ ID NO: 117283 - DNA, 75 bp, synthetic construct
  source 1..75: mol_type = other DNA
tgatcttactgctgatctccccggtgctgtgctgcattgccctggcagtgaaactgagttcccctgggccaataa

SEQ ID NO: 117284 - DNA, 75 bp, synthetic construct
  source 1..75: mol_type = other DNA
gtggccaaaaattgaggcatttattacctggctaagagagcaggtatgtcagtcttgtcagtaacagcgataccg

SEQ ID NO: 117285 - DNA, 75 bp, synthetic construct
  source 1..75: mol_type = other DNA
tacaaagcccactcaccgaagacggtaaaatccgcgcgcgaattgtcggcggctaccagaataacgactcatggc

SEQ ID NO: 117286 - DNA, 75 bp, synthetic construct
  source 1..75: mol_type = other DNA
ccgtacggcgggtggtggagccgttcggcttcctgatccgcattattgagtggtggcagaccggagaaacaccgg

SEQ ID NO: 117287 - DNA, 75 bp, synthetic construct
  source 1..75: mol_type = other DNA
aagcaggccgccatcagcgcaaaagcccgtggtctcactgaccgtcaggcgcagcgggagtctgaagagcagcgt

SEQ ID NO: 117288 - DNA, 75 bp, synthetic construct
  source 1..75: mol_type = other DNA
cgggctggttgcgtaatcatggctataacaagcgcatggtcgcggtggcgggggatttagccgccggacaaatgc

SEQ ID NO: 117289 - DNA, 75 bp, synthetic construct
  source 1..75: mol_type = other DNA
agcaccccggagggcgaacggtaccagtcctgcgtgaatatctccgcagagccggaggcgtattttcgtattgcg

SEQ ID NO: 117290 - DNA, 75 bp, synthetic construct
  source 1..75: mol_type = other DNA
attgaacttgcgctcgttcgaattaaaggcgcagcgtacccgaaggcaattttcggctcgacgccaacagttacc

SEQ ID NO: 117291 - DNA, 75 bp, synthetic construct
  source 1..75: mol_type = other DNA
atgaagaaaaaatacgaactggttgttaaagggataaataattacccggataagattactgttactgtggcaccg

SEQ ID NO: 117292 - DNA, 75 bp, synthetic construct
  source 1..75: mol_type = other DNA
tagtgcgtggcgcgacaggactcatgaccgggacgggtaatccatctgcggcaattaatatggttcgaaaacacg

SEQ ID NO: 117293 - DNA, 75 bp, synthetic construct
  source 1..75: mol_type = other DNA
gtggccaaaaattgaggcatttattacctggctaagagagcaggtatgtcagtcttgtcagtaccagagataccg

SEQ ID NO: 117294 - DNA, 75 bp, synthetic construct
  source 1..75: mol_type = other DNA
ccgcagctgctgaaagcggtgtatgacatggcccgcaagggggcgcaggatgagctccggctgcagttgcgtgat

SEQ ID NO: 117295 - DNA, 75 bp, synthetic construct
  source 1..75: mol_type = other DNA
ggctgagcgaggcagaccggcggctgcagataaagagtgccctgccctggtggctggtctgccggggtgaaattc

SEQ ID NO: 117296 - DNA, 75 bp, synthetic construct
  source 1..75: mol_type = other DNA
attcaggagattcagggagatattttcgcggcggcagcaacttacgacggtgaagtcattaccatttatccggac

SEQ ID NO: 117297 - DNA, 75 bp, synthetic construct
  source 1..75: mol_type = other DNA
aaacgtaaagttgatgcgctggatttgttcgctgacggtagttatgaattgtttggtcgtcagcacaatctaatg

SEQ ID NO: 117298 - DNA, 75 bp, synthetic construct
  source 1..75: mol_type = other DNA
tgggaacgggaacgcgaactcagccctgcgctgaattactggctctctatgatgaccaggttcacgactcccgcg

SEQ ID NO: 117299 - DNA, 75 bp, synthetic construct
  source 1..75: mol_type = other DNA
tgatcgctgatgcaaaaccatgctcacggcacctgaccggccttgctatcagtctgcagactaagggggcagcat

SEQ ID NO: 117300 - DNA, 75 bp, synthetic construct
  source 1..75: mol_type = other DNA
aaaatgtctccgtagtggtgggtgttccggttccggacaatattcacccgatgaccaaagacgaagcgggagtct

SEQ ID NO: 117301 - DNA, 75 bp, synthetic construct
  source 1..75: mol_type = other DNA
aatgctggttggctcccgccgtatatcccaggacatcagtacccgtgatgaaggcgggggcggaaaggtcgtggt

SEQ ID NO: 117302 - DNA, 75 bp, synthetic construct
  source 1..75: mol_type = other DNA
gtggatgctgatctgggcgagctgaccacattttctgccggctatgaatatcaacgtattgatgttaacagcccg

SEQ ID NO: 117303 - DNA, 75 bp, synthetic construct
  source 1..75: mol_type = other DNA
aactttaatggcaatttcccacaaaccgactggtcaccacagagcctggcgcaggacgataccacacatatgaaa

SEQ ID NO: 117304 - DNA, 75 bp, synthetic construct
  source 1..75: mol_type = other DNA
ccttgccgatccgctgcatctgatcctcggcgcacgttataccaactggcgggttgatacgctgacttacagcat

SEQ ID NO: 117305 - DNA, 75 bp, synthetic construct
  source 1..75: mol_type = other DNA
ttcccgaacatgtatacagcgtgggccgtgactaccgcggggctgcgctgcatctgattgatacgctaaggatcg

SEQ ID NO: 117306 - DNA, 75 bp, synthetic construct
  source 1..75: mol_type = other DNA
attacaacgtaacgtctacctctgcgggtaccaaaatgcagatgactcaacgtgatattcctcagtcggtcacta

SEQ ID NO: 117307 - DNA, 75 bp, synthetic construct
  source 1..75: mol_type = other DNA
cagtaacattatgttttccgtgggggcagcaatggcgctggggggtgtcgcacaactgctggccccgaagccaaa

SEQ ID NO: 117308 - DNA, 75 bp, synthetic construct
  source 1..75: mol_type = other DNA
gcgttgtctgttgatcgctgggataagcgctggtctgaacagaccaagaggcaggtaataaaagcctcttggctt

SEQ ID NO: 117309 - DNA, 75 bp, synthetic construct
  source 1..75: mol_type = other DNA
catctggcgggaattgatatgccggattttgagcgtgaggatgactggtggcgcaacggccagaacctgtacctg

SEQ ID NO: 117310 - DNA, 75 bp, synthetic construct
  source 1..75: mol_type = other DNA
atccccggagtggttttgtgatgcagaccgatgatgaccgggccgcggcggtggtggcccagcgggtggccgaca

SEQ ID NO: 117311 - DNA, 75 bp, synthetic construct
  source 1..75: mol_type = other DNA
agatccagtctgcggtggcttccgtccgtcaggaagcggagagtcagcagcgtgccctgcaacaggagcagcaga

SEQ ID NO: 117312 - DNA, 75 bp, synthetic construct
  source 1..75: mol_type = other DNA
tgtgcgcggggatatcacctcgatcacctttgtttttacggacggcacgatccgcacggtgccgaagccggctga

SEQ ID NO: 117313 - DNA, 75 bp, synthetic construct
  source 1..75: mol_type = other DNA
ttttagtcgtcggcattgttatcggaagtctggttatgtccagctgtatccacgattacgtaaaagccggtgtca

SEQ ID NO: 117314 - DNA, 75 bp, synthetic construct
  source 1..75: mol_type = other DNA
aaaaaaagctaaatccatcgctactgctcattcttgccgatcacatttcgaatgcaatatcccgagtagcctccg

SEQ ID NO: 117315 - DNA, 75 bp, synthetic construct
  source 1..75: mol_type = other DNA
ggacagaagttcatttaactactccagatttatgatgcaccttaaatatttttctagtcgtgtgttatgtaatga

SEQ ID NO: 117316 - DNA, 75 bp, synthetic construct
  source 1..75: mol_type = other DNA
ttatttctgccagcggtgaaacggatgaaatcctcaagctagttccttcactgaaaaatttcggcaaccgaatta

SEQ ID NO: 117317 - DNA, 75 bp, synthetic construct
  source 1..75: mol_type = other DNA
gcgaagcgattcgctggtggattaaggacggtggcagagactgccgtattcgctcaaataactgttacggtcagg

SEQ ID NO: 117318 - DNA, 75 bp, synthetic construct
  source 1..75: mol_type = other DNA
cacggcgtgaccgttatcgatggcaggcgtgttgttaaaggcatgacggccactgaggaacaatgccggaaggtt

SEQ ID NO: 117319 - DNA, 75 bp, synthetic construct
  source 1..75: mol_type = other DNA
cctgacggcagcggcctcggccgggaatgcgatgtcacagagccagtataccgcgcagaacaacggttacggtat

SEQ ID NO: 117320 - DNA, 75 bp, synthetic construct
  source 1..75: mol_type = other DNA
cggaaaatgtttcccatcgaccttctataagcgcatcaacgcaggtgaccgcatcggtgcatgcgaggcaatccg

SEQ ID NO: 117321 - DNA, 75 bp, synthetic construct
  source 1..75: mol_type = other DNA
aacaacaaaaccattgatgatagtcacacccataacgacgtacagccaggaacggggaaatcaggaagtgtgagt

SEQ ID NO: 117322 - DNA, 75 bp, synthetic construct
  source 1..75: mol_type = other DNA
ctgctttccatcaaaattgaaaaactgcgtaccttcctgcgtaattcaccggcggccaacctggtggaagagaaa

SEQ ID NO: 117323 - DNA, 75 bp, synthetic construct
  source 1..75: mol_type = other DNA
gaagaagagatggaacagcaactgccacccgggatcagtgaatccggtgaagtggtggatatggccgcttatgag

SEQ ID NO: 117324 - DNA, 75 bp, synthetic construct
  source 1..75: mol_type = other DNA
cgtacaacattggtccaggtaaatgctatccatcgaccttctaccagcgaatcaatgccggtgaccggaaagggg

SEQ ID NO: 117325 - DNA, 75 bp, synthetic construct
  source 1..75: mol_type = other DNA
gccgaatgattttgcgcgctatcacccgggcggttcattaggtcgtcgcctgctgacccgcgttgctgatgtcat

SEQ ID NO: 117326 - DNA, 75 bp, synthetic construct
  source 1..75: mol_type = other DNA
tcaggtattcgatctgttcgttaacctcgacgcgaccgacgagcagctggacttcccgatcgtttacgcttctgc

SEQ ID NO: 117327 - DNA, 75 bp, synthetic construct
  source 1..75: mol_type = other DNA
acaacattggtcccggtaagtgtttcccgtcgacgttttacagacgaattaatgctggcgatcgcaggggagcat

SEQ ID NO: 117328 - DNA, 75 bp, synthetic construct
  source 1..75: mol_type = other DNA
gtgggtattgagtatatttttgttgccgaaaagatagtgcattatgcggagagtaatctcgaaaaaaaactcaat

SEQ ID NO: 117329 - DNA, 75 bp, synthetic construct
  source 1..75: mol_type = other DNA
aggatgtcgccgtgctcctctgtttactgcgccggctgatgcggcgcggcataaacgctgcctgtggtcagtgtc

SEQ ID NO: 117330 - DNA, 75 bp, synthetic construct
  source 1..75: mol_type = other DNA
aatttatgcaggctttattgcgcaacagattgaaaacggtaattctgtcattgcccttgaggctgatttaatgag

SEQ ID NO: 117331 - DNA, 75 bp, synthetic construct
  source 1..75: mol_type = other DNA
cgacggtcgtaaacaagagccgtatgaaaacgtgactctggacgttgaagaacagcatcagggttctgtaatgca

SEQ ID NO: 117332 - DNA, 75 bp, synthetic construct
  source 1..75: mol_type = other DNA
ttgctactgatgtattgccacgcggaactaaaaaatatatcgcaacacacggtaatctccgcgcaccttttctta

SEQ ID NO: 117333 - DNA, 75 bp, synthetic construct
  source 1..75: mol_type = other DNA
gaagctgtcgaaggaaaaatgcgaccgggttaacgctatcgaacgggataaggcgctggcatgggtggagaaaaa

SEQ ID NO: 117334 - DNA, 75 bp, synthetic construct
  source 1..75: mol_type = other DNA
aaaaagacagtattgaaatgcgcaaagtctatgccggattcatcgcgcagcagattgagactgatagtgctgtca

SEQ ID NO: 117335 - DNA, 75 bp, synthetic construct
  source 1..75: mol_type = other DNA
caacctttacaattggcaaagggcaggtattacgtgaaggtacggatgtcaccttaattgctaatggcattatgg

SEQ ID NO: 117336 - DNA, 75 bp, synthetic construct
  source 1..75: mol_type = other DNA
tcgatgttttgatcagttatttatgtcgctcgattaccaacgtggcaatgtcaaagtgatcgcttccgatgcagg

SEQ ID NO: 117337 - DNA, 75 bp, synthetic construct
  source 1..75: mol_type = other DNA
tcgagggtatttataaccgaaaggtggacagaagttcatttaactattcaagatttatgatgcaccttaagtatt

SEQ ID NO: 117338 - DNA, 75 bp, synthetic construct
  source 1..75: mol_type = other DNA
cgcggaacggatgtgtccggtcagctgaacgatgccgtggcaggactgcagaaaagttatgaggagaagcagcgc

SEQ ID NO: 117339 - DNA, 75 bp, synthetic construct
  source 1..75: mol_type = other DNA
cgctggcgtacgcctggtaccggggggattccacgctttcagcgtttaataaaaccctggttctttccggtaatc

SEQ ID NO: 117340 - DNA, 75 bp, synthetic construct
  source 1..75: mol_type = other DNA
taaagcggagataattctcgctcagcatcactggccaacctggggcaatgacaacgtcgttaaactgctaaaaac

SEQ ID NO: 117341 - DNA, 75 bp, synthetic construct
  source 1..75: mol_type = other DNA
gtctaattcgacgctcggcccgacatttaacacccgtactattcaaaacgccgtgctggttaaaaccggtgaaac

SEQ ID NO: 117342 - DNA, 75 bp, synthetic construct
  source 1..75: mol_type = other DNA
atttagacccagagattagggacgtcaccgccatgggcttgggtgaattcgattccttcattgaaatactgatgg

SEQ ID NO: 117343 - DNA, 75 bp, synthetic construct
  source 1..75: mol_type = other DNA
cgcgatggcgctggccggtgtcgggatggcgatcaggggcgcgttatcaccggcaattgaaatgtatgacgcgct

SEQ ID NO: 117344 - DNA, 75 bp, synthetic construct
  source 1..75: mol_type = other DNA
ggaaggcaagccggttgtcattattgaagatggcgagctggcctggtcgaaactcaataactccaacatgacgga

SEQ ID NO: 117345 - DNA, 75 bp, synthetic construct
  source 1..75: mol_type = other DNA
attttatgacgatgtgccgatgatcccggtacttattgtctttattactctggcgttgttatatcgcctggtgat

SEQ ID NO: 117346 - DNA, 75 bp, synthetic construct
  source 1..75: mol_type = other DNA
cggttgtcattattgaggatggtgagctggcctggtcgaaacttaataactccaacatgacggaatttgagttct

SEQ ID NO: 117347 - DNA, 75 bp, synthetic construct
  source 1..75: mol_type = other DNA
agtttatggcgtcaggcgcaactgataaatatcagcgggttattcgaagtaactgaaggtgtctatcagattcgc

SEQ ID NO: 117348 - DNA, 75 bp, synthetic construct
  source 1..75: mol_type = other DNA
gtgaacggacacgctcacctgctctacgcactcaacatcgccgtgagaaccgcgcctgatgcctcggttaaggcg

SEQ ID NO: 117349 - DNA, 75 bp, synthetic construct
  source 1..75: mol_type = other DNA
aatacgcacacgccagaaatacaggccaagagaggcaggaaaggtggcatcgctaaaggcgaagcctacgctgac

SEQ ID NO: 117350 - DNA, 75 bp, synthetic construct
  source 1..75: mol_type = other DNA
gtttacaacatacaatctttcttgtaattttaagccatcagcaggacgcactgaccaccatgaaggtgacgctct

SEQ ID NO: 117351 - DNA, 75 bp, synthetic construct
  source 1..75: mol_type = other DNA
attgctcctttacctcaggaagtgattaagggtgaacaagggaatgttatctggaacccacagcaatattctttt

SEQ ID NO: 117352 - DNA, 75 bp, synthetic construct
  source 1..75: mol_type = other DNA
aaaacttgtctaaacaactggattccgggcagtaccagcgtgtccttaatttgataatgaactgtaaagggcacg

SEQ ID NO: 117353 - DNA, 75 bp, synthetic construct
  source 1..75: mol_type = other DNA
catttatttggattatggactctttttttggtgtctttatgttatttatgggggtgtttatatctgatgatgagt

SEQ ID NO: 117354 - DNA, 75 bp, synthetic construct
  source 1..75: mol_type = other DNA
ttaaagccattcagacggtgatcggactgacgttgatcccggttttgtacccggtcctgaaccgcctggccgata

SEQ ID NO: 117355 - DNA, 75 bp, synthetic construct
  source 1..75: mol_type = other DNA
tagtctggctgtgctggcgcgatttgatgtgcggggatgacccttgcgactggctggagcgtctggtcggacagc

SEQ ID NO: 117356 - DNA, 75 bp, synthetic construct
  source 1..75: mol_type = other DNA
ttgaagcggaagaaaaaatgcaaaagcaccgcgtctcaacgttattggtgaccaacaaggcaaataaagtcactg

SEQ ID NO: 117357 - DNA, 75 bp, synthetic construct
  source 1..75: mol_type = other DNA
tgggtggagaaaaacatcagagtgccactgaccgaaccccagaaagcggggattgcgtcattctgtccgtacaac

SEQ ID NO: 117358 - DNA, 75 bp, synthetic construct
  source 1..75: mol_type = other DNA
ccctgctggggcgggtgccgatcaacggcaccgtgacggacccttacccgttcaagatcctggtcgggcgtgaca

SEQ ID NO: 117359 - DNA, 75 bp, synthetic construct
  source 1..75: mol_type = other DNA
gatgcgttttgtattgtcggtccccagtcgcaggcgaggaagattagcggcattaataccagtgccacacagttg

SEQ ID NO: 117360 - DNA, 75 bp, synthetic construct
  source 1..75: mol_type = other DNA
atccgcgcagggaggcgagttggcgttgaaaacgctgtgggagcagtgccgtcggcatttacacggctggcagag

SEQ ID NO: 117361 - DNA, 75 bp, synthetic construct
  source 1..75: mol_type = other DNA
gcctgctggaatcactgaaaaataccgttcccggcccgggagcgggcagcaatacttccgcaggcagtgacttac

SEQ ID NO: 117362 - DNA, 75 bp, synthetic construct
  source 1..75: mol_type = other DNA
gaaaaagctgattgctcgtggttgcccgaaaattcagatcaacgtgccggaagataacgacatggtgcttgggat

SEQ ID NO: 117363 - DNA, 75 bp, synthetic construct
  source 1..75: mol_type = other DNA
tatctgcggtcgttctggcgctgattgctacaggggcttctgcgcctgaaatccttgaccagtttctggatgaaa

SEQ ID NO: 117364 - DNA, 75 bp, synthetic construct
  source 1..75: mol_type = other DNA
gctggcgggcaagatggtttatatgcgcaaaacctttggcacagaaatggccactatcaaggatttgatggaagg

SEQ ID NO: 117365 - DNA, 75 bp, synthetic construct
  source 1..75: mol_type = other DNA
tatgaagggtttatgaccggtgcgattgatggcgctaaaaagctggggctgtcctttactgactccaccggcaaa

SEQ ID NO: 117366 - DNA, 75 bp, synthetic construct
  source 1..75: mol_type = other DNA
aagatgcaaaagcatcgagtctcaacgttattggtgaccaacaaggcgaacaaagtcactggtcttgtacgaatt

SEQ ID NO: 117367 - DNA, 75 bp, synthetic construct
  source 1..75: mol_type = other DNA
tacccgtcagaaagcagaactggaccggctggccaaaaatcagcgcacgctgtccggcacagcggacggggaggc

SEQ ID NO: 117368 - DNA, 75 bp, synthetic construct
  source 1..75: mol_type = other DNA
gccggaaaattgacacggtaaacatttatccgaaagaaatgattacacccggtcagttaatggaatttcaggagc

SEQ ID NO: 117369 - DNA, 75 bp, synthetic construct
  source 1..75: mol_type = other DNA
gaactggtagaagtgactccgacctctatccgtattcgtaaacgtcacctgacggaaaacgatcgtcgccgcgcc

SEQ ID NO: 117370 - DNA, 75 bp, synthetic construct
  source 1..75: mol_type = other DNA
accttcagcagccaatatcatggcgtatgtccgtattgtggcggaaaagagtatgctgcggcagcttcaggaaac

SEQ ID NO: 117371 - DNA, 75 bp, synthetic construct
  source 1..75: mol_type = other DNA
ctcgtcttcgcagcagcatgatggacgatgaggagtgggcgagacttacggcaacaatgggtgagttcatgcagg

SEQ ID NO: 117372 - DNA, 75 bp, synthetic construct
  source 1..75: mol_type = other DNA
acgggttctgttaaatacgctttgggatcgttatcaaaaaccgttatttattgtcgagaacggattaggcgcaaa

SEQ ID NO: 117373 - DNA, 75 bp, synthetic construct
  source 1..75: mol_type = other DNA
gcacagaatgccctgcgtttggcagaaaaaccggtcttttttttcagtctggaaatgccggcggaacaaatcatg

SEQ ID NO: 117374 - DNA, 75 bp, synthetic construct
  source 1..75: mol_type = other DNA
gcgattaacgacgacggattttttgtcatgtgtgacagcgcgggcaatatctcctatacccgcgccggatcgttt

SEQ ID NO: 117375 - DNA, 75 bp, synthetic construct
  source 1..75: mol_type = other DNA
ggctttatttatgtggatcgtgatgataatggcgaaggaagcctcacaagaacgcgcaagaaaagcttcggatgg

SEQ ID NO: 117376 - DNA, 75 bp, synthetic construct
  source 1..75: mol_type = other DNA
cgtattcgctcaaataactgttacggtcaggtctcccgtcgtgaccaggagagtgcgctggcgtgctggggaatt

SEQ ID NO: 117377 - DNA, 75 bp, synthetic construct
  source 1..75: mol_type = other DNA
gggcgatgaagccgaaccgaatgaagcggggttagcgttttacgatcggctgtttgatgaaatggcgcaggcggg

SEQ ID NO: 117378 - DNA, 75 bp, synthetic construct
  source 1..75: mol_type = other DNA
gatcagtacttcaggcagttctggtggatcaggcagttctggtggatcaggcagttctggtggatcaggcagttc

SEQ ID NO: 117379 - DNA, 75 bp, synthetic construct
  source 1..75: mol_type = other DNA
aaacgtcggcggtgccggtagctagtgatgtcagtcccgggactggtgatgaggttgttacccgggtggtccccg

SEQ ID NO: 117380 - DNA, 75 bp, synthetic construct
  source 1..75: mol_type = other DNA
acctcgctggcggtggcgacaggtgcgctggcgtacgcctggtaccagggggattccacactttcagcgtttaat

SEQ ID NO: 117381 - DNA, 75 bp, synthetic construct
  source 1..75: mol_type = other DNA
agtaatatacagattagcaatggaatatatcttgccagtcaaagttcaaaaaacatacatggagatccattacca

SEQ ID NO: 117382 - DNA, 75 bp, synthetic construct
  source 1..75: mol_type = other DNA
gtctaaacaaggcagttggtgatggggggggcactaatgattccttttttaacagtttagtaaattatactgtag

SEQ ID NO: 117383 - DNA, 75 bp, synthetic construct
  source 1..75: mol_type = other DNA
ccttagataaagccggtaaagtcagtattgttacatctgcatcggttaccaccatgtccggacaaccgaccccac

SEQ ID NO: 117384 - DNA, 75 bp, synthetic construct
  source 1..75: mol_type = other DNA
gcagaccattgaatttcagaccgacgccgccgcacccatcgacttaaccgtcgattactccacctgtacgcaata

SEQ ID NO: 117385 - DNA, 75 bp, synthetic construct
  source 1..75: mol_type = other DNA
aattatcattggtggcgtgcgcattccttacgaaaaagggctgctggcgcattctgatggcgacgtggcgctcca

SEQ ID NO: 117386 - DNA, 75 bp, synthetic construct
  source 1..75: mol_type = other DNA
agacgctgaccaaacggatgcctctggagaaaacaatgaagacaacggagatcatgagacacccaaggcgttaga

SEQ ID NO: 117387 - DNA, 75 bp, synthetic construct
  source 1..75: mol_type = other DNA
aagatcatgcttgttctgagtgatggcgcgccgtgggctgttgggagaggttttgacgctcatttgcgttcggtt

SEQ ID NO: 117388 - DNA, 75 bp, synthetic construct
  source 1..75: mol_type = other DNA
ctccgggaaaaacttccgatccttcagacgctgaccagacggatgcctctggagaaaacaatgaagacaacggag

SEQ ID NO: 117389 - DNA, 75 bp, synthetic construct
  source 1..75: mol_type = other DNA
gagccagggtttctttattcatcgtgtcctatctccccctgttttttatcatgtgtttcgttcaactatatacct

SEQ ID NO: 117390 - DNA, 75 bp, synthetic construct
  source 1..75: mol_type = other DNA
acctgcgtgattccggggcgctggagcaggatgctgacctcattatgtttatttaccgtgacgaggtttacaacc

SEQ ID NO: 117391 - DNA, 75 bp, synthetic construct
  source 1..75: mol_type = other DNA
gtacgccatattctcgacagcattgtcgtggcgccgtatctacaaggtgaacgttttatcgatgtcggtaccgga

SEQ ID NO: 117392 - DNA, 75 bp, synthetic construct
  source 1..75: mol_type = other DNA
tgacgacggcaaagtttacgccacctacagcaacggcgagcgcatgttgcaggggcaggtagtgctggcgacgtt

SEQ ID NO: 117393 - DNA, 75 bp, synthetic construct
  source 1..75: mol_type = other DNA
tcaaagatgatcccacaatgccacgctataacgccgacggctccgttacgataaaaactcataacgttgcttctg

SEQ ID NO: 117394 - DNA, 75 bp, synthetic construct
  source 1..75: mol_type = other DNA
tattacctgaaaccctgtactcgcctgaggctgagcagagcgtgctgggcggactgatgctggataatgaccgct

SEQ ID NO: 117395 - DNA, 75 bp, synthetic construct
  source 1..75: mol_type = other DNA
cgaactgttcccgaaactggaagaagcgcagaaaaaaattgttgccgaactcaatgctcaggggattaacgagaa

SEQ ID NO: 117396 - DNA, 75 bp, synthetic construct
  source 1..75: mol_type = other DNA
gcgctccctgaaggcgatgggcaaggagttcgggtgtcccgtgctggcgctttctcagctcaatcgtcaggtgga

SEQ ID NO: 117397 - DNA, 75 bp, synthetic construct
  source 1..75: mol_type = other DNA
gtgaaagtgcagtttgacggccgctatacgcttttttccgaatatcaggaagggggatatgacctcgggtaccac

SEQ ID NO: 117398 - DNA, 75 bp, synthetic construct
  source 1..75: mol_type = other DNA
ccggggaatccggcacgccactgattggtgttcccggctccggcacctgcggcacgctcacgtcgggagcgcttg

SEQ ID NO: 117399 - DNA, 75 bp, synthetic construct
  source 1..75: mol_type = other DNA
tcagaagcgctgatggcatcatgtgacagtgaactcaaactctggactggaaaaacaacttcatggtggctgtca

SEQ ID NO: 117400 - DNA, 75 bp, synthetic construct
  source 1..75: mol_type = other DNA
acagatgagtatggtcgtgtaaaaataagatttctctggggtgaaaagtcaacgtcaggtacagataaaacttcc

SEQ ID NO: 117401 - DNA, 75 bp, synthetic construct
  source 1..75: mol_type = other DNA
gatgccgaaggcaatatcaccaccatcttctgtacctacgatgccgatactttaagcaaagatccggcagatggt

SEQ ID NO: 117402 - DNA, 75 bp, synthetic construct
  source 1..75: mol_type = other DNA
ggatggtttcggtagtcagtttattcctcgtattggcagtgaggttctggttagttttatacagggtaatcctga

SEQ ID NO: 117403 - DNA, 75 bp, synthetic construct
  source 1..75: mol_type = other DNA
ccgtgggggcgctgacgatgggcgagcaggtggtgcagaccaattctgcccgttgtattggctgtcagagttgcg

SEQ ID NO: 117404 - DNA, 75 bp, synthetic construct
  source 1..75: mol_type = other DNA
tggacgcactggagctggtcgatacttccagtgcaccagatattgaatggcctactcctccggcagttcaggcca

SEQ ID NO: 117405 - DNA, 75 bp, synthetic construct
  source 1..75: mol_type = other DNA
tccgccagacatactgattcaacctgtttgtccacagatttctacgctcgattttcatcgtgcacatgcagccat

SEQ ID NO: 117406 - DNA, 75 bp, synthetic construct
  source 1..75: mol_type = other DNA
ctgacgcaaagagtggcagacggtacggtatctgccacgaaatccctgttttaccgacagataaaaacacttcac

SEQ ID NO: 117407 - DNA, 75 bp, synthetic construct
  source 1..75: mol_type = other DNA
caggatggtccgcagatcgacttttctgcggatatggagcggcaaaaaatgtcggcagaaggcttaatggggccg

SEQ ID NO: 117408 - DNA, 75 bp, synthetic construct
  source 1..75: mol_type = other DNA
aaacagcccgtaccgcgatcgcagcgttgaagagaacctggcgctgttcgaaaaaatgcgtgccggtggttttga

SEQ ID NO: 117409 - DNA, 75 bp, synthetic construct
  source 1..75: mol_type = other DNA
gtgagatttggatcgaccgcgccgatttccgcgaagaagctaacaagcagtacaaacgtctggtgctgggtaaag

SEQ ID NO: 117410 - DNA, 75 bp, synthetic construct
  source 1..75: mol_type = other DNA
ctcctgtatctgaaaactattataaaaaacagaataaacattttattcgattacatggttgtgatttacatttgt

SEQ ID NO: 117411 - DNA, 75 bp, synthetic construct
  source 1..75: mol_type = other DNA
aataatgatgtgcatggtaatgttgatataaaggtttcagatggaaattataacctcagagtgaccagaggaagt

SEQ ID NO: 117412 - DNA, 75 bp, synthetic construct
  source 1..75: mol_type = other DNA
tagtgaactcaaaatctggtctggaaaaacaaattcatggtggttgtcatgcggggagcgtttcagcctggacaa

SEQ ID NO: 117413 - DNA, 75 bp, synthetic construct
  source 1..75: mol_type = other DNA
tctctggcatggcgaaacgaactaattcgtacagctcgagaagtctgggggctgaatgccccagtggccgacttt

SEQ ID NO: 117414 - DNA, 75 bp, synthetic construct
  source 1..75: mol_type = other DNA
cgtatccgctcaaacaactgctacggtcaggtatcccggcgagaccaggagagtgctctggcctgctggggaatt

SEQ ID NO: 117415 - DNA, 75 bp, synthetic construct
  source 1..75: mol_type = other DNA
ctggtgcgtaatgcccgcgcggtatgggggatggatgcgcctgtcgccgatttcgccgggcagttccagcaggaa

SEQ ID NO: 117416 - DNA, 75 bp, synthetic construct
  source 1..75: mol_type = other DNA
ccgtcaacggaagccttgcgcaaaggagtgacgattaaatcccacgaacaaaccaatgccctgatcctgacgggg

SEQ ID NO: 117417 - DNA, 75 bp, synthetic construct
  source 1..75: mol_type = other DNA
ctcgttggcgtctggctggaacggcgtctggcggccaaatcctcgaaaacccaaagcatgaaaaccaaatctccg

SEQ ID NO: 117418 - DNA, 75 bp, synthetic construct
  source 1..75: mol_type = other DNA
gcgccctaccacgacgtgctggaacaggcgcagaaagcggtgtctctggttgccatcgtttctgaccgccgaagt

SEQ ID NO: 117419 - DNA, 75 bp, synthetic construct
  source 1..75: mol_type = other DNA
gataatagatggtgggcgcgattgccgcatacgttcaaataactgctatggacaggttattcgtcgtgaccagga

SEQ ID NO: 117420 - DNA, 75 bp, synthetic construct
  source 1..75: mol_type = other DNA
gagcgcaaaacggtggggatcaaactcagggtaaaaccccagatcaacgagggtgattccgtgttactggagata

SEQ ID NO: 117421 - DNA, 75 bp, synthetic construct
  source 1..75: mol_type = other DNA
gaggaacagctcaggctgtcccccgatcaagacgatacggctttccggaaggtgaaagcggcgattgctgcgttt

SEQ ID NO: 117422 - DNA, 75 bp, synthetic construct
  source 1..75: mol_type = other DNA
agtatttctgagtgccattccgggatggggggctgaattttcggccagctttaaagatacggatattcaggagtt

SEQ ID NO: 117423 - DNA, 75 bp, synthetic construct
  source 1..75: mol_type = other DNA
aacacaatttctggtaccagtcgctggcggtactgattgcaggctggctgctctggtgcggcggtttttttagcc

SEQ ID NO: 117424 - DNA, 75 bp, synthetic construct
  source 1..75: mol_type = other DNA
cgggttaacgccattgaacgtgacaaggcgctggcatgggtggagaaaaacatcagagtgccgctgaccgaaccc

SEQ ID NO: 117425 - DNA, 75 bp, synthetic construct
  source 1..75: mol_type = other DNA
attctcgaccagtttctggatgaaaaagaaggtaaccacacaacggcataccgcgatggttccggcatctggacc

SEQ ID NO: 117426 - DNA, 75 bp, synthetic construct
  source 1..75: mol_type = other DNA
atatcttggcgacccccagtattgtcacgctggacaatatggaggccactttcaatgttggtcaggaggtcccgg

SEQ ID NO: 117427 - DNA, 75 bp, synthetic construct
  source 1..75: mol_type = other DNA
cactggcaggtatcagcactgttcggcagatcagcgaagacgcctttgacatccgggctacaagccgcctgaacc

SEQ ID NO: 117428 - DNA, 75 bp, synthetic construct
  source 1..75: mol_type = other DNA
agagattgacagcccgtttgctggtaaaaccgtggtgcttacgggcagcttaagccagatgtcgcgtgatgacgc

SEQ ID NO: 117429 - DNA, 75 bp, synthetic construct
  source 1..75: mol_type = other DNA
gttgacggtatgggcgacaaaatcatcgatcagctggttgaaaaagaatatgtccatactccggcggatctgttc

SEQ ID NO: 117430 - DNA, 75 bp, synthetic construct
  source 1..75: mol_type = other DNA
tctctacgacgctccgctctggaatcttgcgctcattgcatctcgtctacacctggtttggatcgccaccatctg

SEQ ID NO: 117431 - DNA, 75 bp, synthetic construct
  source 1..75: mol_type = other DNA
cgccagctgcgcgcaccgcgacgacggcgatttccttaatgccatcgggatccgcaacgacgatttcgaagacct

SEQ ID NO: 117432 - DNA, 75 bp, synthetic construct
  source 1..75: mol_type = other DNA
gaactgaccattgtcgataacgactgggtggaagtgtttaacgccaacggcgcgctgactgcccgcgcggtggtc

SEQ ID NO: 117433 - DNA, 75 bp, synthetic construct
  source 1..75: mol_type = other DNA
gttttctgccagactatatggtgcgtgaagcgatggaaaagtcattgctggtgacacggcagatccacaacccac

SEQ ID NO: 117434 - DNA, 75 bp, synthetic construct
  source 1..75: mol_type = other DNA
gggtttgacccctgggacgcggtttctgttcgtcagccgccgctaccgccgcctggtggagacttcgctattgcg

SEQ ID NO: 117435 - DNA, 75 bp, synthetic construct
  source 1..75: mol_type = other DNA
tgaaatcgaacgtcttggtttacgcattggcgataaagtggtgattcgccgcgctggcgacgtgatcccgcaggt

SEQ ID NO: 117436 - DNA, 75 bp, synthetic construct
  source 1..75: mol_type = other DNA
tctcagcactgaaatgatcgagcacttcttccgttcgctctcttacaccatgggcgtgacgctacacctgaaaac

SEQ ID NO: 117437 - DNA, 75 bp, synthetic construct
  source 1..75: mol_type = other DNA
agctaccggatactcatcttggccgtttactgcaatttaaaaagtggggattaccggtcagcgatcgggtaacgc

SEQ ID NO: 117438 - DNA, 75 bp, synthetic construct
  source 1..75: mol_type = other DNA
tgaccaggcatatgacgacgatacgccccgtcttggctggctgacaacccgccagagtaaaccggtcctgactga

SEQ ID NO: 117439 - DNA, 75 bp, synthetic construct
  source 1..75: mol_type = other DNA
ctttgcatcccaaaggatgttcgagagacgatcacgcgcaaaatcttaggttcgagcgaggtaattaacggtagc

SEQ ID NO: 117440 - DNA, 75 bp, synthetic construct
  source 1..75: mol_type = other DNA
tggacctgaactggttgccaaagtcgtagctgatggtactgtctataaatattgcagacctgttctgattggcga

SEQ ID NO: 117441 - DNA, 75 bp, synthetic construct
  source 1..75: mol_type = other DNA
gcctttggtcgcaccctgcgccaggccatccgcgtggaaggcgacaccctgccctcgtcgaaaggagtgctgtga

SEQ ID NO: 117442 - DNA, 75 bp, synthetic construct
  source 1..75: mol_type = other DNA
cttataaagatattggtccggttatcgaagcccaacaagaggccggattaattcatccagcggttagattccgac

SEQ ID NO: 117443 - DNA, 75 bp, synthetic construct
  source 1..75: mol_type = other DNA
ggctggtggcgctatcgtttgaaaggatctaccttgctaggtcacgatcctgctgattcgctgaaacaacccgtt

SEQ ID NO: 117444 - DNA, 75 bp, synthetic construct
  source 1..75: mol_type = other DNA
agccgaagcactggcaaaaatagaagccgaaaaaaacgcgctgcacgtttctgaacttgccgccgaatactttga

SEQ ID NO: 117445 - DNA, 75 bp, synthetic construct
  source 1..75: mol_type = other DNA
gcagatcagcgaagacgcctttgacatccgtgctactagccgtttgaaccgcctgtacgtcgaactgttaaaaga

SEQ ID NO: 117446 - DNA, 75 bp, synthetic construct
  source 1..75: mol_type = other DNA
gagtacatggcatgggatatggctctcggctgggttgtctggcagcaacgcgctggaatgagtctttcaactgca

SEQ ID NO: 117447 - DNA, 75 bp, synthetic construct
  source 1..75: mol_type = other DNA
cgcagtgtgccatcaacatcgaatcaccaaacgacaagctgaacagcaaccttaatctggtggcgcgtgaactgg

SEQ ID NO: 117448 - DNA, 75 bp, synthetic construct
  source 1..75: mol_type = other DNA
tactggcgcgggaacaccacttccctgcgactattgcggatttgtatgatcccgcgaacatgccccctgacctgc

SEQ ID NO: 117449 - DNA, 75 bp, synthetic construct
  source 1..75: mol_type = other DNA
cagtacgacgctgcggtaatggctgacgttgcgaaatctaaagcgccgaactctccggttgcaggtcgcgctacc

SEQ ID NO: 117450 - DNA, 75 bp, synthetic construct
  source 1..75: mol_type = other DNA
ctgctggtgacttccgcagaccgtcctgacgtactggttgccgcttgtctggctgcaatgaacggcgtagaaatc

SEQ ID NO: 117451 - DNA, 75 bp, synthetic construct
  source 1..75: mol_type = other DNA
agcattccgcacatgctggagcacttccgtgccggttctctgctggtgacttccgcagaccgtcctgacgtgctg

SEQ ID NO: 117452 - DNA, 75 bp, synthetic construct
  source 1..75: mol_type = other DNA
aatatttcgaacgccagatcctgccgcgctggaaacatcccgatatcctccgtcgtcgcatcgacaaggacataa

SEQ ID NO: 117453 - DNA, 75 bp, synthetic construct
  source 1..75: mol_type = other DNA
gcaactgggcgatttgatcaccttactgtatctctttgccatcgcgcgtttcttctttgccatttctggtctgga

SEQ ID NO: 117454 - DNA, 75 bp, synthetic construct
  source 1..75: mol_type = other DNA
atgcggattatgcgcgcctgcgcatcacgatggaaaagcggggatttaaacctgttggtcgtgaacttattcgcg

SEQ ID NO: 117455 - DNA, 75 bp, synthetic construct
  source 1..75: mol_type = other DNA
tctctgagtacagcggcagcggctttggcgtcatgaaatggggtatcagcctgaaacagctggtggtgctgcaga

SEQ ID NO: 117456 - DNA, 75 bp, synthetic construct
  source 1..75: mol_type = other DNA
ttgcccgcacctgcccgccgatgagtgcgactgccgtaagccgaaagtaaaactggtggagcgttatctggctga

SEQ ID NO: 117457 - DNA, 75 bp, synthetic construct
  source 1..75: mol_type = other DNA
cgaaaaggaaacaccctgggaaagagaaatcaagaaacaattcgacaacaggttttggcgcaccattgccgaatg

SEQ ID NO: 117458 - DNA, 75 bp, synthetic construct
  source 1..75: mol_type = other DNA
caatgttactgccttcccgttggtgcaggagcgtctgaccacctacctgttaagttccgatgcagatatctggtt

SEQ ID NO: 117459 - DNA, 75 bp, synthetic construct
  source 1..75: mol_type = other DNA
acgagtaaaagccggttcaactccaccctcgtgtgggaagggcaacaaccgccggaatttacccttgtcctggat

SEQ ID NO: 117460 - DNA, 75 bp, synthetic construct
  source 1..75: mol_type = other DNA
cattaccgtgaaaggcgacctctatattgacgatcaccacacggtggaagataccggcctggcgctgggcgaagc

SEQ ID NO: 117461 - DNA, 75 bp, synthetic construct
  source 1..75: mol_type = other DNA
gcgctattgataaaaggtcgtgcggcccgctggccgatgagcctgcttttgtggggatgtacttttggtcacagc

SEQ ID NO: 117462 - DNA, 75 bp, synthetic construct
  source 1..75: mol_type = other DNA
agcgtaaagcagcactggcacagtgggctgatctgctggtggcactggaaagcggaaaagactacaacgtaacgc

SEQ ID NO: 117463 - DNA, 75 bp, synthetic construct
  source 1..75: mol_type = other DNA
gataacggaacgcggttattccgttgccgaagtatctgaccgtctgggcgtttctgcccacagcctctacaagtg

SEQ ID NO: 117464 - DNA, 75 bp, synthetic construct
  source 1..75: mol_type = other DNA
ctatccgcgactaccgcgccgttacattattagttaacggtaaaagctacgaagcagtagctccccgccgtctga

SEQ ID NO: 117465 - DNA, 75 bp, synthetic construct
  source 1..75: mol_type = other DNA
atgcagtttgtcatgccggcttgcccgggagttccggcgggcagactggcggcggatgctgtcggatatgtcggc

SEQ ID NO: 117466 - DNA, 75 bp, synthetic construct
  source 1..75: mol_type = other DNA
cgatcgccgccgcctcatcggtcgttatgctggactgttaattcacgtcagggataacaagccgtgggatcagcc

SEQ ID NO: 117467 - DNA, 75 bp, synthetic construct
  source 1..75: mol_type = other DNA
gtgatttgcggcgctaacgttgcggacggaatcagtccgctaatgaaagcatacatcatatcaagcgaggatatg

SEQ ID NO: 117468 - DNA, 75 bp, synthetic construct
  source 1..75: mol_type = other DNA
cgcccgcacctggaatataaagctgaatttacctaccagcgcgtgggcgatctcagcaccgaaatgatcgagcac

SEQ ID NO: 117469 - DNA, 75 bp, synthetic construct
  source 1..75: mol_type = other DNA
ggagcgcgcacgacgcagtgctacaagcacagcggtacgcgcaagatggattccgggtggtagttgatgttgacc

SEQ ID NO: 117470 - DNA, 75 bp, synthetic construct
  source 1..75: mol_type = other DNA
cagacctgagaatcatcgacgaggggcgctattgtgtccggctgtacaaggcaggccacatcaggccatcaaata

SEQ ID NO: 117471 - DNA, 75 bp, synthetic construct
  source 1..75: mol_type = other DNA
acattacgcttgccgaaaatatgggcatcaccgggctgcgctacaaccgcgacgatctcaactgggtaaagattg

SEQ ID NO: 117472 - DNA, 75 bp, synthetic construct
  source 1..75: mol_type = other DNA
gtcatacaccggccgcctctcttttccctgattctacacgcattattacctgcatgtcctcgagtaaaacattca

SEQ ID NO: 117473 - DNA, 75 bp, synthetic construct
  source 1..75: mol_type = other DNA
taatgctcgctgtcagtcgcgccgagtagacctcgctttcgagatagaggacttctgcgacaagcttatcgacct

SEQ ID NO: 117474 - DNA, 75 bp, synthetic construct
  source 1..75: mol_type = other DNA
acgaacagaccggtactgagaagctcactaacgccaagaccatgggcgagattaaccagaccatgcagggcagtg

SEQ ID NO: 117475 - DNA, 75 bp, synthetic construct
  source 1..75: mol_type = other DNA
cagaactgcgaacgacgcttcgccatcatgaatatctttatcatgtgatggatgcgccggaaattcctgacgctg

SEQ ID NO: 117476 - DNA, 75 bp, synthetic construct
  source 1..75: mol_type = other DNA
ggatttgatccctgggaggccgtttctgttcgtcagccgccaggtggagactttgccatcgcgctggggctggcg

SEQ ID NO: 117477 - DNA, 75 bp, synthetic construct
  source 1..75: mol_type = other DNA
gcgtggagattccgaaaccgactggtggcactcgggaattgggcattccgacagttactgataggctcattcagc

SEQ ID NO: 117478 - DNA, 75 bp, synthetic construct
  source 1..75: mol_type = other DNA
ctgcctacatggtgggaatacaaggagcgcattaacagtaagaccatagcaagaaagatacatccagatcgcata

SEQ ID NO: 117479 - DNA, 75 bp, synthetic construct
  source 1..75: mol_type = other DNA
ttacgcccatgtagtgcgcaacaccaaagagacgcaaattgacgtccaggtgtggctggatcgcgaaggtggcag

SEQ ID NO: 117480 - DNA, 75 bp, synthetic construct
  source 1..75: mol_type = other DNA
agaagccggggaagcccgggcgcatcgtgggcagcgagggtgaagcccgcgcggtctcgtcgcgtgacgaagcac

SEQ ID NO: 117481 - DNA, 75 bp, synthetic construct
  source 1..75: mol_type = other DNA
cggatggtgtctgattctctgtatggctctcttgaagttcattactccactctccgggctgaattcgtcaaacgc

SEQ ID NO: 117482 - DNA, 75 bp, synthetic construct
  source 1..75: mol_type = other DNA
gcgagcaactcactaaacgagaccgttacgcccatgtagtgcgcaacaccaaagagacgcagattgacgttcagg

SEQ ID NO: 117483 - DNA, 75 bp, synthetic construct
  source 1..75: mol_type = other DNA
cgttttgacaaactcgcctttgaaccgggcgtgatcccggagctgctgaagctgcaaaaagcgggctacaaactg

SEQ ID NO: 117484 - DNA, 75 bp, synthetic construct
  source 1..75: mol_type = other DNA
ccagattcaggttgaaggcctgcgccgtttgcgtgaaatcctgcaaacgcaggggctgaatatcgaagcgctgtt

SEQ ID NO: 117485 - DNA, 75 bp, synthetic construct
  source 1..75: mol_type = other DNA
aaattcggccaccaatgggtaatgactccaacttattgatagtgttttatgttcagataatgcccgatgactttg

SEQ ID NO: 117486 - DNA, 75 bp, synthetic construct
  source 1..75: mol_type = other DNA
tggaaattttggtggggtcacatccggaacagtatatctgggttttaaaattgttaaaaacgcgcaaatcaaacg

SEQ ID NO: 117487 - DNA, 75 bp, synthetic construct
  source 1..75: mol_type = other DNA
aagggattcagtcgccagaacgaaatcacgttcaaattactgttagcgttatgcgtccgcaaaatggagttatgc

SEQ ID NO: 117488 - DNA, 75 bp, synthetic construct
  source 1..75: mol_type = other DNA
gccttcacagccctgcacgcgcgccgtctcgatctccccttccgcctggcggcgccattaaaccgtgaaaccgcc

SEQ ID NO: 117489 - DNA, 75 bp, synthetic construct
  source 1..75: mol_type = other DNA
cggcgatgtgctgcagtaccggcgtttgtggttcagatgtcgatcaggttttggtcaatttttctgctgatgtgc

SEQ ID NO: 117490 - DNA, 75 bp, synthetic construct
  source 1..75: mol_type = other DNA
cagagggcaatggttattggaacctactctgaattttcactcgctaaagcgcgagaaacggcgaaagagctttcc

SEQ ID NO: 117491 - DNA, 75 bp, synthetic construct
  source 1..75: mol_type = other DNA
ctggcgctatcgttaccggatggccgggaaacaacgtgctatgcacatcggctcatattccgacctgtcactaag

SEQ ID NO: 117492 - DNA, 75 bp, synthetic construct
  source 1..75: mol_type = other DNA
cttcgtcatactttacagagtagcgacatccaacatagagatcgtaaatgtagtgcattccagaaggcaatatcc

SEQ ID NO: 117493 - DNA, 75 bp, synthetic construct
  source 1..75: mol_type = other DNA
gcccaagttgttagtaaggtggtgtttaccgatccaaacaaccaggcagcgagaaatctggaagctgatgcgctt

SEQ ID NO: 117494 - DNA, 75 bp, synthetic construct
  source 1..75: mol_type = other DNA
ccgctggatgtacgctgtgccgcctgggacttgtggaaggagtgtctgacacagccggattttgataatgtcgca

SEQ ID NO: 117495 - DNA, 75 bp, synthetic construct
  source 1..75: mol_type = other DNA
ggaagaacgcagcaaaaacggagaccctattgatatacctctaccttccccagccgttgaatggttgagagagct

SEQ ID NO: 117496 - DNA, 75 bp, synthetic construct
  source 1..75: mol_type = other DNA
cactggcgcacaggaattgcgtaatggcgtacaaaaattaccaacaccaaatactgccagcccagacaccgtgcg

SEQ ID NO: 117497 - DNA, 75 bp, synthetic construct
  source 1..75: mol_type = other DNA
aattgctatagcatcagtgttaattactggcccaagtggtaacgatggtctggaaggtgtcagctacataccata

SEQ ID NO: 117498 - DNA, 75 bp, synthetic construct
  source 1..75: mol_type = other DNA
ctggcgtctgctttcacagcgtcatggcgacgctctgcctgtggaaccgccccccgtcgccgccccggagtggct

SEQ ID NO: 117499 - DNA, 75 bp, synthetic construct
  source 1..75: mol_type = other DNA
cagcatgacattaactatcgtcgcctgagcgtaaccggtgcggcgcactccgctttactggagccgatactcgat

SEQ ID NO: 117500 - DNA, 75 bp, synthetic construct
  source 1..75: mol_type = other DNA
gagcatggataaaatcgggtgagcattttgctggtcgctctgatgggggtgggttgtatttgtgcttcccagaaa

SEQ ID NO: 117501 - DNA, 75 bp, synthetic construct
  source 1..75: mol_type = other DNA
tgtatcaggaattcagctttggccgctatttcaaccaaatcgccgccggggtattacgcggcattgtccagacgc

SEQ ID NO: 117502 - DNA, 75 bp, synthetic construct
  source 1..75: mol_type = other DNA
aagaaaatttacctcaccgcccctatcacacagatgatctcgctttcggccttcgcatctccggcaaagggcgtg

SEQ ID NO: 117503 - DNA, 75 bp, synthetic construct
  source 1..75: mol_type = other DNA
gaaatacacgcacaggaacttcacgccggaaactttcgcacagtatgtggctgatacgcacacattaacgtacgt

SEQ ID NO: 117504 - DNA, 75 bp, synthetic construct
  source 1..75: mol_type = other DNA
cgtggtcgccgcccatcctgacgctttaggcattattgatgccggaaatgcaggcatggcgagcggcggcatggg

SEQ ID NO: 117505 - DNA, 75 bp, synthetic construct
  source 1..75: mol_type = other DNA
tttactggtggtgtaccacgctggaaggcatgcgggatttaatcaaatcccagccggtatatgagatccagtatt

SEQ ID NO: 117506 - DNA, 75 bp, synthetic construct
  source 1..75: mol_type = other DNA
catccggacacccagcagcagatgcagcgtcgtgaagaggtgaacattaacgtgcgccgcgagcgaggggaggat

SEQ ID NO: 117507 - DNA, 75 bp, synthetic construct
  source 1..75: mol_type = other DNA
tgcaggtacgccagcgtgatgtcgctgcacttgatgccagatactcgagggaattagccgatgcgagagctgaaa

SEQ ID NO: 117508 - DNA, 75 bp, synthetic construct
  source 1..75: mol_type = other DNA
ccaatacggatagcggcagaaaaagtaccgcgctgctgctcagcgccgccagcgacagcgcgttgcggcggctgg

SEQ ID NO: 117509 - DNA, 75 bp, synthetic construct
  source 1..75: mol_type = other DNA
cggtggacacgtcgaatatttgactacggtattaaacgccttgctttggaggttaacccctgctcagcttttgaa

SEQ ID NO: 117510 - DNA, 75 bp, synthetic construct
  source 1..75: mol_type = other DNA
taaaagattattcctgcgcaatattggagcaacaaattcaacaaccatgtcttttagtggtggtacaggatggtt

SEQ ID NO: 117511 - DNA, 75 bp, synthetic construct
  source 1..75: mol_type = other DNA
aaagtaataaaaccataaatattacagggcgtgttaacccctcggattacggtaactttgattctcgttatgtaa

SEQ ID NO: 117512 - DNA, 75 bp, synthetic construct
  source 1..75: mol_type = other DNA
tggcaaaaatggaggctgagaaaaacgccatgcgtgtttcagatctggcctccgaatacttcgagcgccagatac

SEQ ID NO: 117513 - DNA, 75 bp, synthetic construct
  source 1..75: mol_type = other DNA
actatcaacggcgtctcgtttgatggttctaaagatattgaacttaacccacggtctataggcacgatcaactcc

SEQ ID NO: 117514 - DNA, 75 bp, synthetic construct
  source 1..75: mol_type = other DNA
acgctgatggcggcggcgaaaaaggattatgaatcgacgctgaaaaaaccgaagtcgtcaggtgtcaaagtgtca

SEQ ID NO: 117515 - DNA, 75 bp, synthetic construct
  source 1..75: mol_type = other DNA
catttggtacttgccgggcgagcgtacaaagacgggcgacgggattgatattccgctgccaaagcaggctatcga

SEQ ID NO: 117516 - DNA, 75 bp, synthetic construct
  source 1..75: mol_type = other DNA
aaaacgtttggcgaactgaaaggcaaacgtgaaacgccagctccggtgccgacgctttctccgctgcgtgcggaa

SEQ ID NO: 117517 - DNA, 75 bp, synthetic construct
  source 1..75: mol_type = other DNA
gccaggtccacagatgatgaaggcagtgtatgacatggcccgcaagggtgcccgtgatgaaattcaggcacagat

SEQ ID NO: 117518 - DNA, 75 bp, synthetic construct
  source 1..75: mol_type = other DNA
tatttgctccacgtgggtagccttgactggaccaagataaatccggatatctttggctccatgattcaggcaatt

SEQ ID NO: 117519 - DNA, 75 bp, synthetic construct
  source 1..75: mol_type = other DNA
acccagcgtgcggttctgggaactttttggttatcgcgtataaggaaatgcgtgccattgaggccgaaatcaaca

SEQ ID NO: 117520 - DNA, 75 bp, synthetic construct
  source 1..75: mol_type = other DNA
tggctgacagacgtcctgacacgtctgccggagtggccggaggagcgactggcagagttgctgccccttgaggga

SEQ ID NO: 117521 - DNA, 75 bp, synthetic construct
  source 1..75: mol_type = other DNA
gccaaacgacaaactgaacagcaacctgaatctggttgcgcgtgaactggcgaaagttcgtgataaaggcctgcc

SEQ ID NO: 117522 - DNA, 75 bp, synthetic construct
  source 1..75: mol_type = other DNA
cgcattgttacctgaaacagagaaggcaaagatcgaaagttacattgaatttgtcatcagccagaacgaaaaaaa

SEQ ID NO: 117523 - DNA, 75 bp, synthetic construct
  source 1..75: mol_type = other DNA
aacaatgaggtcagtgtttccatttccaccctggagaatgttgcatcagcattcgggcgtcacggctatgaatta

SEQ ID NO: 117524 - DNA, 75 bp, synthetic construct
  source 1..75: mol_type = other DNA
cgcagtgggatgaatttgatttagataatgctgtatggcgactccctgccgaacgggctaaaaacggggatgcca

SEQ ID NO: 117525 - DNA, 75 bp, synthetic construct
  source 1..75: mol_type = other DNA
caacgacgttaaatcaacagctattagaagaagaacgcgaacaactgttgagtgaagttcaggaacgcatgacgc

SEQ ID NO: 117526 - DNA, 75 bp, synthetic construct
  source 1..75: mol_type = other DNA
atgctgcccattttatggctaccttctgcgcgtgatgatttgcgtcagatcgtggcctatattgccaaggaaaac

SEQ ID NO: 117527 - DNA, 75 bp, synthetic construct
  source 1..75: mol_type = other DNA
aaaaaatgaggtgcttgcagcagatgaaatgaaagaaactgccgggttatgtgaaggggatggtccgttgccgga

SEQ ID NO: 117528 - DNA, 75 bp, synthetic construct
  source 1..75: mol_type = other DNA
cctcccgctgcacgtagactaaaaatacgcattgaaacatcagttttgtcacttactgaacacccttacctgtat

SEQ ID NO: 117529 - DNA, 75 bp, synthetic construct
  source 1..75: mol_type = other DNA
ctgcacgtgatgatttacgtcagatcgtagcctatattgcaaaagaaaatctccatgccgcacgcaggctaaaga

SEQ ID NO: 117530 - DNA, 75 bp, synthetic construct
  source 1..75: mol_type = other DNA
atgttagatttgtttaaagcaataggcttgggggtggtgtttttactgccgttagctaacccattgacaactgtc

SEQ ID NO: 117531 - DNA, 75 bp, synthetic construct
  source 1..75: mol_type = other DNA
cgtccgttatgagctttcagggccacaaggtattgagcaagcgatccgctttttaagtcagcagtttcgtggcgg

SEQ ID NO: 117532 - DNA, 75 bp, synthetic construct
  source 1..75: mol_type = other DNA
tgctatcagcaaagccaacttctctccacaccgcaatttattgtgcagttaccgcagatcctggacttactgcat

SEQ ID NO: 117533 - DNA, 75 bp, synthetic construct
  source 1..75: mol_type = other DNA
gtgcgctggctggcgcgtttttatatctctatctttcgcggtacgccgctcatcgcgcagctgtttatgatctat

SEQ ID NO: 117534 - DNA, 75 bp, synthetic construct
  source 1..75: mol_type = other DNA
cagagcttgctgccgaatatttcgaacgtcagatactgccacgatggaaacatcccgacatcctgcgccgtcgca

SEQ ID NO: 117535 - DNA, 75 bp, synthetic construct
  source 1..75: mol_type = other DNA
agacgccaccgacggcattgcggtcagaaaaagatgatattgaatcgctcattgaaaaactggagggcagcgtcg

SEQ ID NO: 117536 - DNA, 75 bp, synthetic construct
  source 1..75: mol_type = other DNA
aagtgaaagagttgcagcgggtacatcagcatcgctttcatgctgtagctatgtcggcgcacggcaaacccggca

SEQ ID NO: 117537 - DNA, 75 bp, synthetic construct
  source 1..75: mol_type = other DNA
cagagaaacagcaaaggaactatccgctcgcgtcgcacttgggtacgacgtagcagcggagaaacaggagcgtaa

SEQ ID NO: 117538 - DNA, 75 bp, synthetic construct
  source 1..75: mol_type = other DNA
ccaggactgccaggcattccactctctatcgtgcgtcctgaagcccatttcactctgttggatagccttggtaaa

SEQ ID NO: 117539 - DNA, 75 bp, synthetic construct
  source 1..75: mol_type = other DNA
gctggttgggccggatctcgatgcggatgggttgctggagcctgctcgccagttagcgacaaaacgcgtggtggt

SEQ ID NO: 117540 - DNA, 75 bp, synthetic construct
  source 1..75: mol_type = other DNA
cttaacgaggcaattgaaagagccaaaaaggatattagcaacgcaacagggattgatagctcagccataacaata

SEQ ID NO: 117541 - DNA, 75 bp, synthetic construct
  source 1..75: mol_type = other DNA
aaaaagagatgcgcgtgtttcagtcgctggtggggccggatcttgatgccgatggattgttggagcctgcgcggt

SEQ ID NO: 117542 - DNA, 75 bp, synthetic construct
  source 1..75: mol_type = other DNA
cactggtagcgatactagtgccttttttcttggtgggatgcgtcagcatggataaggcgcgccagcttttcgata

SEQ ID NO: 117543 - DNA, 75 bp, synthetic construct
  source 1..75: mol_type = other DNA
cttccacgccggtttctgctgcgccactgctgcaggtgagcggcgcactcatcgccattattgccctgatcctcg

SEQ ID NO: 117544 - DNA, 75 bp, synthetic construct
  source 1..75: mol_type = other DNA
cacgcttccagtttgacggcgctgaccgatattactccgcgcccgcaagtggtctatcttgacccgatgttccca

SEQ ID NO: 117545 - DNA, 75 bp, synthetic construct
  source 1..75: mol_type = other DNA
tgttctggcgacccgctgggggctggagcacgatgaagacaatctgatggccttggtgttaacgccagagcatct

SEQ ID NO: 117546 - DNA, 75 bp, synthetic construct
  source 1..75: mol_type = other DNA
tcggctgccgcgtgcggatgctggagcgtaatccagtcgttgccgcattgctcgacgacggcctggcgcgtggtt

SEQ ID NO: 117547 - DNA, 75 bp, synthetic construct
  source 1..75: mol_type = other DNA
aattttacgctcggcgcacgggtgccggatcgcagcggaaaatttctgttgcagattggcaacctgtcgcgggag

SEQ ID NO: 117548 - DNA, 75 bp, synthetic construct
  source 1..75: mol_type = other DNA
atgcctggcgcaaataccgctactacatctgctttcgtaacggcggtactgacaccttttcacagcgcatgtacg

SEQ ID NO: 117549 - DNA, 75 bp, synthetic construct
  source 1..75: mol_type = other DNA
accaaccgcccggcgcagggttactggtttgtgccgggagggcgcgtgcagaaagacgaaacgctggaagccgca

SEQ ID NO: 117550 - DNA, 75 bp, synthetic construct
  source 1..75: mol_type = other DNA
atgatgatggtgctgggattgtacgtggtgccgtatcaggagctgcagtatcaacgcagctggcgacatgcggca

SEQ ID NO: 117551 - DNA, 75 bp, synthetic construct
  source 1..75: mol_type = other DNA
tcgactttattgtcgagaacagtcgcggcgagtttctgcttggcaaaagaaccaaccgcccggcgcagggttact

SEQ ID NO: 117552 - DNA, 75 bp, synthetic construct
  source 1..75: mol_type = other DNA
caggcaccggagacggtgccttatctgttctggcggcccgctgggggctggagcacgatgaagacaacctgatgg

SEQ ID NO: 117553 - DNA, 75 bp, synthetic construct
  source 1..75: mol_type = other DNA
ggcagatcgccgctgaactgaaacggcacccggtgagcgtcgttaaaaagctggcgaagtacctggacgatgaca

SEQ ID NO: 117554 - DNA, 75 bp, synthetic construct
  source 1..75: mol_type = other DNA
tcagtgcgcagctgaataatctgcaggacatggcaacatctgccttaagcgatatcagtaaaacggtgggagggc

SEQ ID NO: 117555 - DNA, 75 bp, synthetic construct
  source 1..75: mol_type = other DNA
atcgccattattgccctgatcctcgctgctgcctggctggtaaaacggctgggatttgcccctaaacgcactggc

SEQ ID NO: 117556 - DNA, 75 bp, synthetic construct
  source 1..75: mol_type = other DNA
atcagcgccattgccggacaggtaagaattatcagagcggtaactaagcggtatgcgcctttacttcagaaagtc

SEQ ID NO: 117557 - DNA, 75 bp, synthetic construct
  source 1..75: mol_type = other DNA
caattatgcttttcgcttcatcgatctcttcgccggtatcggcggtatccgtcatgggtttgaagccattggcgg

SEQ ID NO: 117558 - DNA, 75 bp, synthetic construct
  source 1..75: mol_type = other DNA
ccgagcggtaatgaaagtgacccgtcaaccgtaacctcaaaaactgatgtgttaccaacagtgagtattagcgtt

SEQ ID NO: 117559 - DNA, 75 bp, synthetic construct
  source 1..75: mol_type = other DNA
ggatgttgcggttgcgtatccggtcactcctcacctgatagttcgcggtaaaatagctaatctgttcaacaaaga

SEQ ID NO: 117560 - DNA, 75 bp, synthetic construct
  source 1..75: mol_type = other DNA
tgtctgggcacaggatacccctctggatactctcgttgttactgctaaccgttttcaggaaccattaagtaccgt

SEQ ID NO: 117561 - DNA, 75 bp, synthetic construct
  source 1..75: mol_type = other DNA
gatattaaccgcgtcagcgaactgctacctgtacccacgaaagatgcatcacgagatagctttcccggcgatcac

SEQ ID NO: 117562 - DNA, 75 bp, synthetic construct
  source 1..75: mol_type = other DNA
ttgatgcggatattttttatttctttaatcagaaactggtcgaaagtaaggcctttttgtggctggttgcattga

SEQ ID NO: 117563 - DNA, 75 bp, synthetic construct
  source 1..75: mol_type = other DNA
gcgagcatcctgctcagcgaaaagtgtgattgcctcaagcgaggtcgatgtactactggttccgcttaagggaga

SEQ ID NO: 117564 - DNA, 75 bp, synthetic construct
  source 1..75: mol_type = other DNA
gtgtttcccgtcgacgttttacagacgaattaatgctggtgatcgcaggggagcatgtgaggcgattcgctggtg

SEQ ID NO: 117565 - DNA, 75 bp, synthetic construct
  source 1..75: mol_type = other DNA
cgagcgagcacgacgccagttgaagcggatgcctggctgattgctgtacctacgccgtttaaaggcgatcatgag

SEQ ID NO: 117566 - DNA, 75 bp, synthetic construct
  source 1..75: mol_type = other DNA
cgatataccggaaacaacgcgcggtgctctttactcgttcgtttacaacgtgggtgcaggcaatttcagaacatc

SEQ ID NO: 117567 - DNA, 75 bp, synthetic construct
  source 1..75: mol_type = other DNA
acattattcccggtaaaacgtataccgaagcagaatgcaaagccctcctgaataaagaccttgctacggtcgcca

SEQ ID NO: 117568 - DNA, 75 bp, synthetic construct
  source 1..75: mol_type = other DNA
tcgtctgggcgtgcgtgcacgtctggcttcgcagggctcgggtaaatggcagtcctccggcggggaaaaatcgaa

SEQ ID NO: 117569 - DNA, 75 bp, synthetic construct
  source 1..75: mol_type = other DNA
tgcatgagttggatgaagtgggtgttgtcggtttcaaatgcttcgttgcgacctgtggcgatcgcggtatcgaca

SEQ ID NO: 117570 - DNA, 75 bp, synthetic construct
  source 1..75: mol_type = other DNA
ttctcaccaacctttcccacaccagaaattgccagtattttgcatatcagcccacaggacccaattttgaaaatt

SEQ ID NO: 117571 - DNA, 75 bp, synthetic construct
  source 1..75: mol_type = other DNA
aagtgcgacttctgttacattcgataatgtggttcaaggtaacaatcttacggatgctgataccattacatcgac

SEQ ID NO: 117572 - DNA, 75 bp, synthetic construct
  source 1..75: mol_type = other DNA
cgctggaagggctggatcaagtgccggaacgccgcgctgtgctgctggatatcacctgtgactctgatggagcca

SEQ ID NO: 117573 - DNA, 75 bp, synthetic construct
  source 1..75: mol_type = other DNA
atcaaggttaaccagcaccgccgcgtgattgagtccctgattcattctggtgaaccgctggggctggaagcaggt

SEQ ID NO: 117574 - DNA, 75 bp, synthetic construct
  source 1..75: mol_type = other DNA
tccaaatgcggtcacaaaggtgaaatcgatgctgatggagagaatgcctgggtggaatgggacgaaatcgaggag

SEQ ID NO: 117575 - DNA, 75 bp, synthetic construct
  source 1..75: mol_type = other DNA
tgcactgcgaaaacgcgctgatctgtgacgaactgggcgaagaagcgaagcgtgaaggtcgcgtaactgctcatg

SEQ ID NO: 117576 - DNA, 75 bp, synthetic construct
  source 1..75: mol_type = other DNA
gatagtcggtgatgcggatatccgcaaattaccgaaacaatcggtcaacatggcgtttaatgccgtgtctgagat

SEQ ID NO: 117577 - DNA, 75 bp, synthetic construct
  source 1..75: mol_type = other DNA
atgcgttcatctcattctaccaatccagttatcaaacacaaagccggtttgctcaatctggctgaagaactcagt

SEQ ID NO: 117578 - DNA, 75 bp, synthetic construct
  source 1..75: mol_type = other DNA
aaaggcggaaaaattgccgctatcggtcaggatctgggcgatgcaaaagaagttatggatgcgtctggtctggtg

SEQ ID NO: 117579 - DNA, 75 bp, synthetic construct
  source 1..75: mol_type = other DNA
tggtgcactgcgaaaacgcgctgatctgtgacgaactgggcgaagaagcgaaacgtgaaggtcgcgtaaccgcac

SEQ ID NO: 117580 - DNA, 75 bp, synthetic construct
  source 1..75: mol_type = other DNA
aaactggactacgcaggtaaagacggctggagcgctagcgctacgctggaaggcgggccgaacctgagctacgcg

SEQ ID NO: 117581 - DNA, 75 bp, synthetic construct
  source 1..75: mol_type = other DNA
tggcgaagtgttcaccgccgatccgcgatttggaaaaccagaaaggcatgtgggaaaaactgtttaacggtgaaa

SEQ ID NO: 117582 - DNA, 75 bp, synthetic construct
  source 1..75: mol_type = other DNA
atcaaagttaaccagcaccgccgcgtgattgagtccctgattcattcgggcgaaccgctgggcctggaagccggt

SEQ ID NO: 117583 - DNA, 75 bp, synthetic construct
  source 1..75: mol_type = other DNA
gagctggcgcacgaagtctggctggaaaacacccagccgatgttgtcgcacattaacgtcggcacgggcgttgac

SEQ ID NO: 117584 - DNA, 75 bp, synthetic construct
  source 1..75: mol_type = other DNA
gattaaggacggtggcagggactgccgtatccgctcaaataactgttatggtcaggtatcccgtcgtgaccagga

SEQ ID NO: 117585 - DNA, 75 bp, synthetic construct
  source 1..75: mol_type = other DNA
cctcagatactcgaccagtttctgaatgagaaagaaggtaatcacacaacggcataccgtgatggttccggtata

SEQ ID NO: 117586 - DNA, 75 bp, synthetic construct
  source 1..75: mol_type = other DNA
gcagcggaaaatttctgctgcggttaagtaatctttccatggcgtgctatctctcgtttttaccggaaggcgaaa

SEQ ID NO: 117587 - DNA, 75 bp, synthetic construct
  source 1..75: mol_type = other DNA
ggactcagtttcgctatcacatctggcaaaaataccgctggcatgtcaacttccgtaacgatggctctgatgcca

SEQ ID NO: 117588 - DNA, 75 bp, synthetic construct
  source 1..75: mol_type = other DNA
aagaggggaatcacaccactgcataccgcgatggctctggcatatggaccatctgtcggggagcaacgatggtgg

SEQ ID NO: 117589 - DNA, 75 bp, synthetic construct
  source 1..75: mol_type = other DNA
cggcgcggatcgacaaaccgggcgcgtgccatatcttccggcactcgatggcgacgcagatgctggacaatggcg

SEQ ID NO: 117590 - DNA, 75 bp, synthetic construct
  source 1..75: mol_type = other DNA
cggcagcgtagaagtggagctgtctgatgaaggcgataccgttgcggacatgttgcaatatgtacagctcgatcc

SEQ ID NO: 117591 - DNA, 75 bp, synthetic construct
  source 1..75: mol_type = other DNA
tcgcgctcatcgtccgattatcgatgaattgcaggaacgtatggcggacaaaatgtacgtcaacttctcgctgtt

SEQ ID NO: 117592 - DNA, 75 bp, synthetic construct
  source 1..75: mol_type = other DNA
gacgaaggcgataccgtggcggacatgctgcaatatgtgcagctcgatccgaaaacgctgttaactcagttccgc

SEQ ID NO: 117593 - DNA, 75 bp, synthetic construct
  source 1..75: mol_type = other DNA
cgcatccgttcactggcgaaccgctgactattcacgcggggctggacgacacctggatgcaggcgttatcacaat

SEQ ID NO: 117594 - DNA, 75 bp, synthetic construct
  source 1..75: mol_type = other DNA
gatcaagtgaagaaaaccgatcttgatgctgaactgcaacaacagttcctggaagagttcgaggcaggtttgtac

SEQ ID NO: 117595 - DNA, 75 bp, synthetic construct
  source 1..75: mol_type = other DNA
atgagtaacaacgcatttttatcgctggccatcgggatggtcggttctgccatcaggcggcagctcgaacagcgc

SEQ ID NO: 117596 - DNA, 75 bp, synthetic construct
  source 1..75: mol_type = other DNA
tctgggaccagacaacgacatgctgacgctttccggtgttcttatgccggagataacaggtggcaggctgtcgtt

SEQ ID NO: 117597 - DNA, 75 bp, synthetic construct
  source 1..75: mol_type = other DNA
ctcgaactgttagcgacggcagaaacctgggataacggcaagcccatccgcgaaaccagtgctgccgatgtgccg

SEQ ID NO: 117598 - DNA, 75 bp, synthetic construct
  source 1..75: mol_type = other DNA
taccgctactgtgcctgtccaatctcgcacaggccatcaccacgccagaaatcgcctcttccgcgctgtcgccgg

SEQ ID NO: 117599 - DNA, 75 bp, synthetic construct
  source 1..75: mol_type = other DNA
atggcactaccccgcaaacttaaatatctgaacatgttcaatgacggccttagctacatgggcgttgtggaatcc

SEQ ID NO: 117600 - DNA, 75 bp, synthetic construct
  source 1..75: mol_type = other DNA
gtggatgtcacctttgaagatgaaaagggtgctaaacacaccgtgacgctggagaacggagataacggctggaca

SEQ ID NO: 117601 - DNA, 75 bp, synthetic construct
  source 1..75: mol_type = other DNA
aagcaggtttctggctggatgatgctcaggtcgttgattaccgcgttgtgaagatgcctgttaccaaaggtggga

SEQ ID NO: 117602 - DNA, 75 bp, synthetic construct
  source 1..75: mol_type = other DNA
tcagtttgtgtttttcattgcctgcatggtacctgttttcaatggcaacattattcgcacctgggtgacctcgat

SEQ ID NO: 117603 - DNA, 75 bp, synthetic construct
  source 1..75: mol_type = other DNA
attgctgatcccggtgattgtgatcctcgccgtgatcttgcccggcaaccgcgttatgccactgggtgacctctc

SEQ ID NO: 117604 - DNA, 75 bp, synthetic construct
  source 1..75: mol_type = other DNA
gtggatgtcacctttgaagatgaaaagggtgataaccacaccgtgacgctggagaacggagataacggctggaca

SEQ ID NO: 117605 - DNA, 75 bp, synthetic construct
  source 1..75: mol_type = other DNA
agttgcggggcctataccagtttgttggggcggagctattctggtggtggttctggcgctggtggcggaggcggt

SEQ ID NO: 117606 - DNA, 75 bp, synthetic construct
  source 1..75: mol_type = other DNA
ggtggctaatgacaccattaagtgatcggttaatcaccttttttgacaaatcactaccgggaaacaacaaacata

SEQ ID NO: 117607 - DNA, 75 bp, synthetic construct
  source 1..75: mol_type = other DNA
gcctcagtcagaaagcgaagcattaagaaattgctctatttacttagcgtctcaggtgagtgaaaactgtcaggg

SEQ ID NO: 117608 - DNA, 75 bp, synthetic construct
  source 1..75: mol_type = other DNA
cgttgttaaacgttgtcggcctcgcgctgtttctttcctggtacattcccgtcaatcatggattctggttgccga

SEQ ID NO: 117609 - DNA, 75 bp, synthetic construct
  source 1..75: mol_type = other DNA
gtggtatccacctacaccgcaccgggtggtaatccctggaaagagatggcgctggtcagtcagactgccggaggg

SEQ ID NO: 117610 - DNA, 75 bp, synthetic construct
  source 1..75: mol_type = other DNA
gtggatgtcacctttgaagatgaaaagggtggtaagcacaccgtgacgctggagaacggggataacggctggaca

SEQ ID NO: 117611 - DNA, 75 bp, synthetic construct
  source 1..75: mol_type = other DNA
atgagtgaaaaaagcattgttcaggaagcgcgggatattcagctggcaatggaattgatcaccctgggcgctcgt

SEQ ID NO: 117612 - DNA, 75 bp, synthetic construct
  source 1..75: mol_type = other DNA
gtggatgtcacctttgaagatgaaaagggtgataaacacaccgtgacgctggagaacggcgataacggctggaca

SEQ ID NO: 117613 - DNA, 75 bp, synthetic construct
  source 1..75: mol_type = other DNA
cacccgcgccgggcagccgcacgtgtatcaggtgcttaaaggcaaccgccgtgccggatactggccaccggacga

SEQ ID NO: 117614 - DNA, 75 bp, synthetic construct
  source 1..75: mol_type = other DNA
tgctactggctgctttgtacgcccgtgggctgcgttgtaaagacctccaccaaagtacgccattacatccctaac

SEQ ID NO: 117615 - DNA, 75 bp, synthetic construct
  source 1..75: mol_type = other DNA
taaagtggagtttgcggtcgacggtcaggttccgggtgacagcaacggagatggtgcggtggatgcaacaccggt

SEQ ID NO: 117616 - DNA, 75 bp, synthetic construct
  source 1..75: mol_type = other DNA
caattgttattcctgccggttcaaaaagtgtttcatttatagttgatccaacgcttgaggctaaccaagatgcct

SEQ ID NO: 117617 - DNA, 75 bp, synthetic construct
  source 1..75: mol_type = other DNA
gggtagcggagctgggcattctgatgctgctgactattctgatattggtggagcacagcataacgggaaaattgg

SEQ ID NO: 117618 - DNA, 75 bp, synthetic construct
  source 1..75: mol_type = other DNA
gcaatgatactgttaccatcacagatggtgcatataacacgactatttcactgggggcgggagatgatgtatttg

SEQ ID NO: 117619 - DNA, 75 bp, synthetic construct
  source 1..75: mol_type = other DNA
ttaaatatgccgatgcgctggggcatccggcaacgcgtcttattggcggaatggtgccgggattcagctgcgatt

SEQ ID NO: 117620 - DNA, 75 bp, synthetic construct
  source 1..75: mol_type = other DNA
agctagtgtcaatgggaccgtaatggatgttcccgcaactattgaagataaggatgattccactggactggttta

SEQ ID NO: 117621 - DNA, 75 bp, synthetic construct
  source 1..75: mol_type = other DNA
attctttaacctgccaaaaggtgttgcgatctgtcacccggttgccaatacctacttacttttcgcttatccatt

SEQ ID NO: 117622 - DNA, 75 bp, synthetic construct
  source 1..75: mol_type = other DNA
atgcgtcaatgggggcaattgttggcgtctatgtctggtagcttcctgtatggcgcattgaccgccgcgctattc

SEQ ID NO: 117623 - DNA, 75 bp, synthetic construct
  source 1..75: mol_type = other DNA
cctggccgccgagcaataaccgctactaccgccataatcgcgggcgcacgcacatcagcgcagaggggcaggtat

SEQ ID NO: 117624 - DNA, 75 bp, synthetic construct
  source 1..75: mol_type = other DNA
gatagagggattctgggaagaatgccagcccggggaagcacagtgtacggcggtatttaatattgttggtgaaga

SEQ ID NO: 117625 - DNA, 75 bp, synthetic construct
  source 1..75: mol_type = other DNA
gtgaatacttactacatcacaatcccctggcccccgagcaataaccgctagtaccgccataatcgcgggcgcacg

SEQ ID NO: 117626 - DNA, 75 bp, synthetic construct
  source 1..75: mol_type = other DNA
cgcctgggcgctatggcaaccctacagctgttgtaagcgtcgcggccagacgttcctttacagcgtcgattttca

SEQ ID NO: 117627 - DNA, 75 bp, synthetic construct
  source 1..75: mol_type = other DNA
ctttcggtgcttttgctgatggaaatcgtcggggatttactgccgccaggcgtcgtaaacgtggtgaatggcgca

SEQ ID NO: 117628 - DNA, 75 bp, synthetic construct
  source 1..75: mol_type = other DNA
cagaaagcggggatagcgtcattctgcccgtacaacattggtcccggtaagtgttttccgtcgacgttttataaa

SEQ ID NO: 117629 - DNA, 75 bp, synthetic construct
  source 1..75: mol_type = other DNA
tttcagtcccaacgaaggacgcctcgcgggatagctttcctggcgatcacggtatgatgctgcttattttttccg

SEQ ID NO: 117630 - DNA, 75 bp, synthetic construct
  source 1..75: mol_type = other DNA
ggctacaaacaatcaggcattggccgtgaaacccacaaaatgatgcttgagcattaccagcaaaccaagtgcctg

SEQ ID NO: 117631 - DNA, 75 bp, synthetic construct
  source 1..75: mol_type = other DNA
aagaagatgcctttttcgataaagcgctggaaggctttgcactgttcgcctttaaccagggcgaagtttgcacct

SEQ ID NO: 117632 - DNA, 75 bp, synthetic construct
  source 1..75: mol_type = other DNA
caggtgaacgccatcgagcgcaataaggcgctggcgtgggtggaggaaaatatccaggtaccgctgactgaaccg

SEQ ID NO: 117633 - DNA, 75 bp, synthetic construct
  source 1..75: mol_type = other DNA
cgcaggtgttcagcgaggacgagacgcggcaggtgctacagagcctggatatcaacacgcctgttggcctgcgta

SEQ ID NO: 117634 - DNA, 75 bp, synthetic construct
  source 1..75: mol_type = other DNA
gctggagggctttgcattgttcgccttcaaccagggcgaagtctgtacctgtccgagtcgtgctttagtgcagga

SEQ ID NO: 117635 - DNA, 75 bp, synthetic construct
  source 1..75: mol_type = other DNA
tttttggcccggtgctggcggtgacgacatttaagacgatggacgaggcgctggagattgccaacgatacgccat

SEQ ID NO: 117636 - DNA, 75 bp, synthetic construct
  source 1..75: mol_type = other DNA
gctttggtttatggtcaaaacctggtgtcccgcgtaagggatgggtaaacgtaggagtggaagacctagaagaaa

SEQ ID NO: 117637 - DNA, 75 bp, synthetic construct
  source 1..75: mol_type = other DNA
ccattgccggacaggtaagagttatcagagcggtaactaagcggtatgcgcctttacttcagaaagtctctggtg

SEQ ID NO: 117638 - DNA, 75 bp, synthetic construct
  source 1..75: mol_type = other DNA
acttcccccttcagcaccaacggaagagataccgcagaccgattttcagtcggtcatgaaaaatttgcttaagcg

SEQ ID NO: 117639 - DNA, 75 bp, synthetic construct
  source 1..75: mol_type = other DNA
ggcgtttaccggctcaacggaagtgggccaacaaattatgcagtacgccacgcaaaacattattccggtgacgct

SEQ ID NO: 117640 - DNA, 75 bp, synthetic construct
  source 1..75: mol_type = other DNA
gtgtttcccgtcgacgttttataaacgaattaatgcaggtgatcgaaaaggtgcctgcgaagcgattcgctggtg

SEQ ID NO: 117641 - DNA, 75 bp, synthetic construct
  source 1..75: mol_type = other DNA
tcgcctcgtgtattcgggcgcaggaaggtgggatcagtgaagttgatagcgaaaccgtggcctatcatttccatg

SEQ ID NO: 117642 - DNA, 75 bp, synthetic construct
  source 1..75: mol_type = other DNA
ttattgatcgtggttgggatatggcaacgggagaggctgactttatgaatgagagtaaccaggctcgtcgaccac

SEQ ID NO: 117643 - DNA, 75 bp, synthetic construct
  source 1..75: mol_type = other DNA
acgcaacagagtcttacgcagggcatttttacggatgcagaaattttatctgccgcgtaaaaagtcttcgtttta

SEQ ID NO: 117644 - DNA, 75 bp, synthetic construct
  source 1..75: mol_type = other DNA
gtatttgaagccgttgccagacttctggaaccctatatcctcaaagctgtttctgctgatgctggtaagactggg

SEQ ID NO: 117645 - DNA, 75 bp, synthetic construct
  source 1..75: mol_type = other DNA
tgtcgctcgaattattaaatcaaaaaaaccagctatttttgtgcttgagaatgtgaagaaccttaaaagtcatga

SEQ ID NO: 117646 - DNA, 75 bp, synthetic construct
  source 1..75: mol_type = other DNA
taaaccatcagataattatgttatttctttaggggaaaacttagttaaagataagcttattgatcctgatagtgc

SEQ ID NO: 117647 - DNA, 75 bp, synthetic construct
  source 1..75: mol_type = other DNA
aacattggccccggtaagtgtttcccgtcgacgttttataaacgaattaatgcaggcgatcgcaggggagcgtgt

SEQ ID NO: 117648 - DNA, 75 bp, synthetic construct
  source 1..75: mol_type = other DNA
caaaaagtgtttcatttatagttgatccaacgcttgaggctaaccaagatgcctttaatgccgagggtatggaaa

SEQ ID NO: 117649 - DNA, 75 bp, synthetic construct
  source 1..75: mol_type = other DNA
tcatcgacagaggatgggataaagaactcggcgaaatcgatttctctaatccaaagaatcaggaacaaaggccaa

SEQ ID NO: 117650 - DNA, 75 bp, synthetic construct
  source 1..75: mol_type = other DNA
cctgggataacggcaaacccattcgcgaaaccagtgctgccgacgtgccgctggcgattgaccattttcgctatt

SEQ ID NO: 117651 - DNA, 75 bp, synthetic construct
  source 1..75: mol_type = other DNA
cggggccaataccagtttgttggggcgaagttattccggtggtggtgctggcggcggcgcgggtggcggaggcgg

SEQ ID NO: 117652 - DNA, 75 bp, synthetic construct
  source 1..75: mol_type = other DNA
tgtcgctcggattattaaatcaaaaaaaccagctatttttgtgcttgagaatgtgaaaaaccttaaaagtcatga

SEQ ID NO: 117653 - DNA, 75 bp, synthetic construct
  source 1..75: mol_type = other DNA
atagtgaagggagcgggaactatagaaagcttttaaagagtgagcaaaagaatatcttattaatttttatgggtt

SEQ ID NO: 117654 - DNA, 75 bp, synthetic construct
  source 1..75: mol_type = other DNA
atgagcgcaaaaatcaaatatggcctgtcggctgccgttctggcactgattgccgtcggtgcgcctgcgcctgac

SEQ ID NO: 117655 - DNA, 75 bp, synthetic construct
  source 1..75: mol_type = other DNA
ttttcgtcgcgacctgaatattcaccagggctttaccctgcgcgatatctgtcgtttttatccggaacagcgacc

SEQ ID NO: 117656 - DNA, 75 bp, synthetic construct
  source 1..75: mol_type = other DNA
accatacaaagatattgttggtgtatggactgtatgtcacggacacaccggaaaagacatcatgctcggtaaaac

SEQ ID NO: 117657 - DNA, 75 bp, synthetic construct
  source 1..75: mol_type = other DNA
ctggcatgaagctgtcgaaggaaaaatgcgaccgggttaacgctatcgaacgggataaggcgctggcatgggtgg

SEQ ID NO: 117658 - DNA, 75 bp, synthetic construct
  source 1..75: mol_type = other DNA
ggaccaactggaagaaaaagggttaatttcgcgtcaaacttgtgccagcgatcgtcgggctaaacgtattaaact

SEQ ID NO: 117659 - DNA, 75 bp, synthetic construct
  source 1..75: mol_type = other DNA
gattcacagcaaatagaaccttacaaaacggatggtttgaagggtttattataagcaaatcaggacataaatatg

SEQ ID NO: 117660 - DNA, 75 bp, synthetic construct
  source 1..75: mol_type = other DNA
aaagatgccctcatgagcgatcgcatgcaggtcgatcttgccatattaaagcaggctttagaagagcgtcgtttg

SEQ ID NO: 117661 - DNA, 75 bp, synthetic construct
  source 1..75: mol_type = other DNA
attcagatcgagctgttcggtaactggacgctggacgacgcccgcgactggcatcgtattggcgtgcggcaggcg

SEQ ID NO: 117662 - DNA, 75 bp, synthetic construct
  source 1..75: mol_type = other DNA
gccacgctgacggaaaaatttgttagtgccgggctgagctatggggctaatggtgcggtacaaattggtacggga

SEQ ID NO: 117663 - DNA, 75 bp, synthetic construct
  source 1..75: mol_type = other DNA
acgacatgcaatacctatatcacgagaacctgcacgccaaggggttgctgaccaaacatttctttctgaaaggat

SEQ ID NO: 117664 - DNA, 75 bp, synthetic construct
  source 1..75: mol_type = other DNA
acacaaagcatgtcccgacgtggtaactgcttagataatgcagcaatggaaagcttttttagtactttaaaatca

SEQ ID NO: 117665 - DNA, 75 bp, synthetic construct
  source 1..75: mol_type = other DNA
gatattaataaccttacccaacgcgaagttgaaaacctgccgctgaacggcatcggcctggtggatctcactttt

SEQ ID NO: 117666 - DNA, 75 bp, synthetic construct
  source 1..75: mol_type = other DNA
tggctgcgaataataagtactgataaagctatacataatgaactatatgcgggtaaaaagactcaaatatctttc

SEQ ID NO: 117667 - DNA, 75 bp, synthetic construct
  source 1..75: mol_type = other DNA
acgctctgtttgtaatcgatgctgaccacgaacacattgctatcaaagaagcaaacaacctgggtattccggtat

SEQ ID NO: 117668 - DNA, 75 bp, synthetic construct
  source 1..75: mol_type = other DNA
tccggacggtgttgacttcgttatcccgggtaacgacgacgcaatccgtgctgtgaccctgtacctgggcgctgt

SEQ ID NO: 117669 - DNA, 75 bp, synthetic construct
  source 1..75: mol_type = other DNA
acctggaggaatgataattcagcgtgtttatcttggatttcctgttggcaccaatgcaagacacataactttccc

SEQ ID NO: 117670 - DNA, 75 bp, synthetic construct
  source 1..75: mol_type = other DNA
ggctttgcggtactgggtgccagtttctataaaacacgcagcattatcgtcccgacactgctaagtgcgctggcc

SEQ ID NO: 117671 - DNA, 75 bp, synthetic construct
  source 1..75: mol_type = other DNA
ttcgcaaaataaaccagggcgatatcaaaggcgcatgtgaccagctacgtcgctggacatacgctggcggtaagc

SEQ ID NO: 117672 - DNA, 75 bp, synthetic construct
  source 1..75: mol_type = other DNA
atccgctcaaataattgctacggtcaggtatcccgtcgcgaccaggagagtgcgctggcgtgctggggaatcgac

SEQ ID NO: 117673 - DNA, 75 bp, synthetic construct
  source 1..75: mol_type = other DNA
tcgtcgctgactggaaggtcgccgatgccggtgaaacactcgctcaacaagcatttaccgcaggtgctaactgga

SEQ ID NO: 117674 - DNA, 75 bp, synthetic construct
  source 1..75: mol_type = other DNA
gagtcccttcatttcatccctacggctgaaggacaaggcgaaaacggtgatatcggcccattaaggccattcgct

SEQ ID NO: 117675 - DNA, 75 bp, synthetic construct
  source 1..75: mol_type = other DNA
cgctgaatcttctgagtgttgaccctaacaatcagagccagattattgcggaacaaatcatccctgaaaacgagg

SEQ ID NO: 117676 - DNA, 75 bp, synthetic construct
  source 1..75: mol_type = other DNA
atatgccgcggtgccacccgagtggatggtaagcctgtcgtcccgggtatgaagttatcgaaggaaaagtgcgac

SEQ ID NO: 117677 - DNA, 75 bp, synthetic construct
  source 1..75: mol_type = other DNA
agcactggcaggcgcggcaaatccggtacaggtggctgccgatttccatgcgcaaatcgacgctatctggggagg

SEQ ID NO: 117678 - DNA, 75 bp, synthetic construct
  source 1..75: mol_type = other DNA
atggcaaacctgtcgtcccgggcatgaagttgtcgaaggaaaaatgcgaccaggttaacgccattgagcgtgata

SEQ ID NO: 117679 - DNA, 75 bp, synthetic construct
  source 1..75: mol_type = other DNA
cgatgacgccgccattgaaaccgacgtcgcaggcctagggattgagcttcagcaaaacggccagccgtttaaagt

SEQ ID NO: 117680 - DNA, 75 bp, synthetic construct
  source 1..75: mol_type = other DNA
ggacaacattcagcgatcctgtcgtggcaatgtcagacaatggtatgcaggctactattctgacctctatcagaa

SEQ ID NO: 117681 - DNA, 75 bp, synthetic construct
  source 1..75: mol_type = other DNA
gaagctgtcgaaagaaaaatgcgaccaggttaatgccattgaacgtgataaggcactggcatgggtggagaaaaa

SEQ ID NO: 117682 - DNA, 75 bp, synthetic construct
  source 1..75: mol_type = other DNA
cgatataccggaaacaacgcgctgcgctctttactcgttcgtctacaacgtgggtgctggcaatttcagaacatc

SEQ ID NO: 117683 - DNA, 75 bp, synthetic construct
  source 1..75: mol_type = other DNA
accttggtttgggggaaggctctgcattgcctgttggtgtaccggttccatggcccaccgccacaccgccagcag

SEQ ID NO: 117684 - DNA, 75 bp, synthetic construct
  source 1..75: mol_type = other DNA
tgatgattccgccattgaaacggacgttagcggcctggggggattgagctacagcaaaacggccagccgtttaag

SEQ ID NO: 117685 - DNA, 75 bp, synthetic construct
  source 1..75: mol_type = other DNA
cgaagggcttgaactccttctggatgaaatgattcacgacctgaatactcatggtatgccagaagcgccagtgac

SEQ ID NO: 117686 - DNA, 75 bp, synthetic construct
  source 1..75: mol_type = other DNA
aagacaagaacggcactattgatatccctaacgataacgggacgacagatcgcgcagttatttacaaggggaaac

SEQ ID NO: 117687 - DNA, 75 bp, synthetic construct
  source 1..75: mol_type = other DNA
ggtggatggtaagcctgttattcctggcatgaagctgtcaaaggaaaaatgcgaccgggttaatgccatcgaacg

SEQ ID NO: 117688 - DNA, 75 bp, synthetic construct
  source 1..75: mol_type = other DNA
aacttcgggatcgcccaggactataaaggccagtgcaatctgcgtttcgacgacactaatccggtaaaagaagat

SEQ ID NO: 117689 - DNA, 75 bp, synthetic construct
  source 1..75: mol_type = other DNA
aagtcaggaacggcaccgttgatatccctaacgataatgggactacatatcgtgcagttatttataaggggaaat

SEQ ID NO: 117690 - DNA, 75 bp, synthetic construct
  source 1..75: mol_type = other DNA
caggatgccggattcgaaagtgtcgactactacaatctgacggcaggggttgtggcgttgcatcgtggttataag

SEQ ID NO: 117691 - DNA, 75 bp, synthetic construct
  source 1..75: mol_type = other DNA
atgcagtcatcattacgcaaagctgtcacagctgctattggtggcggggctattgccatagcgtctatgctcatc

SEQ ID NO: 117692 - DNA, 75 bp, synthetic construct
  source 1..75: mol_type = other DNA
agctcgtataccgacagctacaccaccacggtgtatgactcattgggtaacgaacactcggtatgccagtacttc

SEQ ID NO: 117693 - DNA, 75 bp, synthetic construct
  source 1..75: mol_type = other DNA
ctcgtatacccgcgccggatcgtttgaaaccgacaaaaacggctatatcgttaacgcctcgggcgactatttaca

SEQ ID NO: 117694 - DNA, 75 bp, synthetic construct
  source 1..75: mol_type = other DNA
agagctctaacgtcgatatcaccagcgaactggttaacctgatgaccgcccagcgtaactatcaggccaacacca

SEQ ID NO: 117695 - DNA, 75 bp, synthetic construct
  source 1..75: mol_type = other DNA
atgagcagaccacttctgcaactggccctcgaccactcatcacttgaagccgcacagcgcgacgttgcgctgtta

SEQ ID NO: 117696 - DNA, 75 bp, synthetic construct
  source 1..75: mol_type = other DNA
atcgatctgatggctatcgggattctgaccgacgagccacgacgtttctacaaaaattacgcgctggtaaacagc

SEQ ID NO: 117697 - DNA, 75 bp, synthetic construct
  source 1..75: mol_type = other DNA
catcaaagtgctgctgaccgaaccgcagaaggcgggcattgcgtcattctgcccgtacaacattggtcccgctaa

SEQ ID NO: 117698 - DNA, 75 bp, synthetic construct
  source 1..75: mol_type = other DNA
gaatgccggtgtgcgtggtggtgaacagtttgatgccatcaaccagagtgtggcgcgttttgcttctgcatccgg

SEQ ID NO: 117699 - DNA, 75 bp, synthetic construct
  source 1..75: mol_type = other DNA
acacagccggactgaccgctgaccgcatgctggcactggcgcgtaacggacaggcagcggggctgaccttcaacc

SEQ ID NO: 117700 - DNA, 75 bp, synthetic construct
  source 1..75: mol_type = other DNA
cttgaaatccttctggatgaaattattaacgaaatgaatactcatggcatgcaatccgaaacagatattaagtaa

SEQ ID NO: 117701 - DNA, 75 bp, synthetic construct
  source 1..75: mol_type = other DNA
ttcgaactggaattgaatgccctggtccgtcgtcatttcccgcactggggcgctcgcgatttacggggagataaa

SEQ ID NO: 117702 - DNA, 75 bp, synthetic construct
  source 1..75: mol_type = other DNA
ttcgaactggaattgaatgctctggttcgccgccactttccgcactggggcgcgcgcgatttgctgggggataaa

SEQ ID NO: 117703 - DNA, 75 bp, synthetic construct
  source 1..75: mol_type = other DNA
ttcactacagtgggtttacagcgtggtgaagcgggtcagaaaagaagaattggatcggatgcagggcaaactgtt

SEQ ID NO: 117704 - DNA, 75 bp, synthetic construct
  source 1..75: mol_type = other DNA
gcacagcgtggtctttatcgagcgactattgatgcgcttatcgcccgatcacgacatgcaatacctatatcacga

SEQ ID NO: 117705 - DNA, 75 bp, synthetic construct
  source 1..75: mol_type = other DNA
gatctggcagcctgagttcacagataaaacactctccaggaaacccggggcggttcaggctgttgctgctgctat

SEQ ID NO: 117706 - DNA, 75 bp, synthetic construct
  source 1..75: mol_type = other DNA
cgctttgtgccgctctctgcactggaaggcgacaacgtggcttcgcaaagtgaaagtatgccgtggtacagcggt

SEQ ID NO: 117707 - DNA, 75 bp, synthetic construct
  source 1..75: mol_type = other DNA
atgcactacgctgaattccaggctgaagcaacagccaatggtatacaaacaggcagtatgactattgattatcac

SEQ ID NO: 117708 - DNA, 75 bp, synthetic construct
  source 1..75: mol_type = other DNA
ggggcttgagatgcttcacgatgactacatcggaatgattaaaaccagcggcatgccagatatgccagttatgca

SEQ ID NO: 117709 - DNA, 75 bp, synthetic construct
  source 1..75: mol_type = other DNA
ccctaacgataatggaactacagatcgcgcagttatttacaaggggaaacatggttgcctgagtatctaccccgg

SEQ ID NO: 117710 - DNA, 75 bp, synthetic construct
  source 1..75: mol_type = other DNA
gtgaagattatctgacctttgccgagcagttgccgggtaatctggatattcgctttgtgccgctctccgcgctgg

SEQ ID NO: 117711 - DNA, 75 bp, synthetic construct
  source 1..75: mol_type = other DNA
atgggcgatatcgccgttgtcgctgacgcgggtgacgataatcgccgctgcggtggagagcaggagggaagggat

SEQ ID NO: 117712 - DNA, 75 bp, synthetic construct
  source 1..75: mol_type = other DNA
ctgcagttgctgcattgcatgattctcaatatatgcaagcttatgttaatgaggtgattgtagcgcgacaatact

SEQ ID NO: 117713 - DNA, 75 bp, synthetic construct
  source 1..75: mol_type = other DNA
tgccgcaggtgcgcctgcgcctgacattctcgaccagtttctggatgaaaaggaaggcaaccacaccacggcata

SEQ ID NO: 117714 - DNA, 75 bp, synthetic construct
  source 1..75: mol_type = other DNA
atggtaaacctgttgttcctggcatgaagttgtcgaaggaaaaatgcgaccaggttaacgccattgaacgtgata

SEQ ID NO: 117715 - DNA, 75 bp, synthetic construct
  source 1..75: mol_type = other DNA
gatataaaacaggttaatgaacttagccgagtaaacgctgatcttggaagacttggcggattacttaaattatgg

SEQ ID NO: 117716 - DNA, 75 bp, synthetic construct
  source 1..75: mol_type = other DNA
tatcacatctcaggtgtggtggattatgagcaggttcgggagctggcccggatcaacggcgatcttggccgcttg

SEQ ID NO: 117717 - DNA, 75 bp, synthetic construct
  source 1..75: mol_type = other DNA
tggcagagactgccgtatccgctcaaataattgctacggtcaggtatcccgtcgcgaccaggagagtgcgctggc

SEQ ID NO: 117718 - DNA, 75 bp, synthetic construct
  source 1..75: mol_type = other DNA
acgctttctggcgttcttatgccggagataacgggcggcaggctgtcgttgctggcactggagcagatggcagaa

SEQ ID NO: 117719 - DNA, 75 bp, synthetic construct
  source 1..75: mol_type = other DNA
gcaccttccttaaccaattgggcggtgttataactatttataacgccggcgcaggtatggcggcctatggcgcca

SEQ ID NO: 117720 - DNA, 75 bp, synthetic construct
  source 1..75: mol_type = other DNA
gctggcacttgagcagatggcagaacaggggaaagcatggcccctgattgaaggtagcggcacgatttacggcat

SEQ ID NO: 117721 - DNA, 75 bp, synthetic construct
  source 1..75: mol_type = other DNA
acgctttctggcgttcttatgccggagataacaggcggcaggctgtcgttactggcactggagcagatggcagaa

SEQ ID NO: 117722 - DNA, 75 bp, synthetic construct
  source 1..75: mol_type = other DNA
agcaggtattccatccgaccacgcttgcctcattcgaagggatgagcatcacgattctgcatcctgaagatgaaa

SEQ ID NO: 117723 - DNA, 75 bp, synthetic construct
  source 1..75: mol_type = other DNA
agtaccactgaccgaaccacagaaagccgggatcgcatctttctgcccctataacatcggccccgggaaatgttt

SEQ ID NO: 117724 - DNA, 75 bp, synthetic construct
  source 1..75: mol_type = other DNA
accatgggcgatgcacaacgccaaaatatgggcatgaccagcatcgcttccctgaacaaacaaaacgccgaattc

SEQ ID NO: 117725 - DNA, 75 bp, synthetic construct
  source 1..75: mol_type = other DNA
ctgaccgaaccccagaaagcggggatcgcgtcattctgtccgtataacattggccccggtaagtgtttcccgtcg

SEQ ID NO: 117726 - DNA, 75 bp, synthetic construct
  source 1..75: mol_type = other DNA
catcagagtgccactgaccgaacctcagaaagcgggtattgcgtcattctgtccttacaacattggccccggtaa

SEQ ID NO: 117727 - DNA, 75 bp, synthetic construct
  source 1..75: mol_type = other DNA
ttaaactctttgttggaaatatctagcaagtctgaagatgaagtaggagtgaagcttagtgcttttaatttaata

SEQ ID NO: 117728 - DNA, 75 bp, synthetic construct
  source 1..75: mol_type = other DNA
acgctttccggtgttcttatgccggagataacaggtggcaggctgtcgttgctggcacttgagcagatggcagaa

SEQ ID NO: 117729 - DNA, 75 bp, synthetic construct
  source 1..75: mol_type = other DNA
tcaaacaactgctacggtcaggtatcccgtcgtgaccaggagagcgcgctggcgtgctggggaatcgacagataa

SEQ ID NO: 117730 - DNA, 75 bp, synthetic construct
  source 1..75: mol_type = other DNA
cgtatccgctcaaataattgctatggtcaggtatcccgtcgtgaccaggagagtgcgctggcatgctggggtatc

SEQ ID NO: 117731 - DNA, 75 bp, synthetic construct
  source 1..75: mol_type = other DNA
atgaaatacttttttgagaccaggctcggggaaacccgataccgcctggctgacggctcgttgctgtgcaaagac

SEQ ID NO: 117732 - DNA, 75 bp, synthetic construct
  source 1..75: mol_type = other DNA
gaaaacgccattcagctgatcgaagatggcctgcgcgaagtgtcgtgtggctatgacgcggagtatgagcaggct

SEQ ID NO: 117733 - DNA, 75 bp, synthetic construct
  source 1..75: mol_type = other DNA
cgatatgaaaaccttgaggctctgattgccttcctgacagaagaatgctgctcagggactaacgactgcctcccc

SEQ ID NO: 117734 - DNA, 75 bp, synthetic construct
  source 1..75: mol_type = other DNA
gaagtgactcgtgcacgtcaggaaggtcaggatgttacttgtgaatcctgcccgcattactttgtactggatacc

SEQ ID NO: 117735 - DNA, 75 bp, synthetic construct
  source 1..75: mol_type = other DNA
ccggttgccgtctgcacgtttgccacatcagcagcccggaaggtgttgaagaagtgactcgtgcgcgtcaggaag

SEQ ID NO: 117736 - DNA, 75 bp, synthetic construct
  source 1..75: mol_type = other DNA
tctgggaccggacaacgacatactgacgctttccggtgttcttatgccggagataacaggtggcaggctgtcgtt

SEQ ID NO: 117737 - DNA, 75 bp, synthetic construct
  source 1..75: mol_type = other DNA
gagcctctaaaattaataaagaccagtttgattttattgcagtaatagacccattgacctttcagtcagaatttg

SEQ ID NO: 117738 - DNA, 75 bp, synthetic construct
  source 1..75: mol_type = other DNA
gttcaccctgtcgctcaaacgggtggatgaatccctgtccgatatgttcggcgatctcagtgcgcaactgaataa

SEQ ID NO: 117739 - DNA, 75 bp, synthetic construct
  source 1..75: mol_type = other DNA
accggacaaagcaccagagatgggcggaggtccaaccggcgacagtggtgatgacctcaaaacattactgaaagc

SEQ ID NO: 117740 - DNA, 75 bp, synthetic construct
  source 1..75: mol_type = other DNA
ccaaatatgggcatgaccagcatcgcttccctgaacaaacaaaacgccgacttctggtctaaccgcaaaggataa

SEQ ID NO: 117741 - DNA, 75 bp, synthetic construct
  source 1..75: mol_type = other DNA
tgtttatgctgcgcaccgtgccgtatcaggaactgcagtatcaacgcagttggcgacatgcggcaaacagccggg

SEQ ID NO: 117742 - DNA, 75 bp, synthetic construct
  source 1..75: mol_type = other DNA
cgttgtgcaattggagacaaagacacaatggcaaatcaaaagaaaagctggtggacccgcatgcgcacggccatc

SEQ ID NO: 117743 - DNA, 75 bp, synthetic construct
  source 1..75: mol_type = other DNA
agctacgtcgctggacatatgctggcggtaagcaatggaaaggtctcatgactcgtcgtgagattgagcgtgaag

SEQ ID NO: 117744 - DNA, 75 bp, synthetic construct
  source 1..75: mol_type = other DNA
gcccgttctggcgaaagcgtcgaagtgcgcgaccggctggcgctcgacggtaaaaaagcgggcggctattttaac

SEQ ID NO: 117745 - DNA, 75 bp, synthetic construct
  source 1..75: mol_type = other DNA
gtgcctgcgaagcgttcgctggtggattaaggacggtggcagagactgccgtatccgctcaaataattgctacgg

SEQ ID NO: 117746 - DNA, 75 bp, synthetic construct
  source 1..75: mol_type = other DNA
cagaatgcaaagccctcctgaataaagaccttgccacggtcgccagacaaattaacccgtacatcaacgtcgata

SEQ ID NO: 117747 - DNA, 75 bp, synthetic construct
  source 1..75: mol_type = other DNA
atggcaatgtcaccggcactacgaaatagcgtaatagcggcgataagtggcggggctattgctatagcatctgtg

SEQ ID NO: 117748 - DNA, 75 bp, synthetic construct
  source 1..75: mol_type = other DNA
tgcctggctggatgtgtgcaccacgcccacagacggatgccactgaacgtactgataacctggctgatgccgcct

SEQ ID NO: 117749 - DNA, 75 bp, synthetic construct
  source 1..75: mol_type = other DNA
aaagcggggatcgcgtcattctgtccgtacaacattggtcccggtaagtgtttcccgtcgacgttttataaacga

SEQ ID NO: 117750 - DNA, 75 bp, synthetic construct
  source 1..75: mol_type = other DNA
gattcgctggtggattaaggacggtggcagagactgccgtatccgttcaaataattgctacggtcaggtctcacg

SEQ ID NO: 117751 - DNA, 75 bp, synthetic construct
  source 1..75: mol_type = other DNA
cttgtttatgcccagtgtgtatgccccttgtccgacatgtcatggcgcacgctataacccggatacgctcagggt

SEQ ID NO: 117752 - DNA, 75 bp, synthetic construct
  source 1..75: mol_type = other DNA
cgctgaccgaaccccagaaagcggggatcgcgtcattctgtccgtacaacattggtcccggtaagtgtttcccgt

SEQ ID NO: 117753 - DNA, 75 bp, synthetic construct
  source 1..75: mol_type = other DNA
ctgggacttggttatctgacattagacagaacaacgccaacactctccgcaggggaactccagcgattgcgtctt

SEQ ID NO: 117754 - DNA, 75 bp, synthetic construct
  source 1..75: mol_type = other DNA
tgatggcattcctttttactatgcgcatatgcgcggcgcggatattcgcgtggagtgtttacttaacggcgtgta

SEQ ID NO: 117755 - DNA, 75 bp, synthetic construct
  source 1..75: mol_type = other DNA
ctgtttgatgacgtggttaagttgcttgagtttgatacaaccactcagaagttcgaaagcccagcaaaggaggca

SEQ ID NO: 117756 - DNA, 75 bp, synthetic construct
  source 1..75: mol_type = other DNA
agtgttttccgtcgacgttttataagcggctgaatgccggtgatcgtaagggcgcatgcgaggcgattcgctggt

SEQ ID NO: 117757 - DNA, 75 bp, synthetic construct
  source 1..75: mol_type = other DNA
ctgctgttctggggttggtacttgctggtgcgccagcatccgtcattctcgatcagtttctgaatgagaaagagg

SEQ ID NO: 117758 - DNA, 75 bp, synthetic construct
  source 1..75: mol_type = other DNA
gacctgacagcgaaattctcccgtctggtcggcgaaactggcaaagtcgtgctcgctgatatcaatgaatccatg

SEQ ID NO: 117759 - DNA, 75 bp, synthetic construct
  source 1..75: mol_type = other DNA
ggcaagtaaagtttttgagaggggcgggccttacgtcgatatcttacataaaagctcgatggatgcaaagaaaga

SEQ ID NO: 117760 - DNA, 75 bp, synthetic construct
  source 1..75: mol_type = other DNA
gaagccgacagcattcaagcgtcaggtgctcgcttctgccgatcaatcactggtgcgctctattgtcggtgatgc

SEQ ID NO: 117761 - DNA, 75 bp, synthetic construct
  source 1..75: mol_type = other DNA
tgggggaaacccgctatcagctggctgacggctcgttgctgtgcaaagacgtgccgataggacgaacaggtaagc

SEQ ID NO: 117762 - DNA, 75 bp, synthetic construct
  source 1..75: mol_type = other DNA
tttgcccgcaagctggcaccggaagtgaaagtgaattctattgcgccatcgctgatcctgtttaatgaacatgat

SEQ ID NO: 117763 - DNA, 75 bp, synthetic construct
  source 1..75: mol_type = other DNA
tgagcttgtcccaaacgacagagggaaggtcatcgtacgccggacgccagaagaggtgttcagcgagcgagccat

SEQ ID NO: 117764 - DNA, 75 bp, synthetic construct
  source 1..75: mol_type = other DNA
cggtaagcaatggaaagggctgatgacccgtcgtgagattgagcgtgaagtctgtttgtggggtaagcgccccat

SEQ ID NO: 117765 - DNA, 75 bp, synthetic construct
  source 1..75: mol_type = other DNA
gatgttttatcttcaaaggatggttttttatcaaaattagcatctcattatggtgttgaaaattattctattcaa

SEQ ID NO: 117766 - DNA, 75 bp, synthetic construct
  source 1..75: mol_type = other DNA
caggctggccgcatgactattccccggctgcatccgggcgatgctaacagtgttatgagtcagcttgcgacaatg

SEQ ID NO: 117767 - DNA, 75 bp, synthetic construct
  source 1..75: mol_type = other DNA
accctggcgcggcaggtgacgctgaacgttgcgccgctgatgcgtaccgactcgccggatgaaaaacgtattcag

SEQ ID NO: 117768 - DNA, 75 bp, synthetic construct
  source 1..75: mol_type = other DNA
ggtgcttgagttctcgaaaccgattatcgagccgttaagcaaagcttatgacgcttactccttccatgttctgcc

SEQ ID NO: 117769 - DNA, 75 bp, synthetic construct
  source 1..75: mol_type = other DNA
cgtattcgctcaaataactgttacggtcaggtatcccggcgagaccaggagagcgcgctggcgtgctggggaatc

SEQ ID NO: 117770 - DNA, 75 bp, synthetic construct
  source 1..75: mol_type = other DNA
aagaaggtaaccacacaatggcataccgtgatggttccggcatatggaccatctgtcggggtgccacagtggtgg

SEQ ID NO: 117771 - DNA, 75 bp, synthetic construct
  source 1..75: mol_type = other DNA
gggaccaggaagagacgctggcgaaactccgggaaaaaacgatggggtgtgacgtatcacgagggcaggaacggg

SEQ ID NO: 117772 - DNA, 75 bp, synthetic construct
  source 1..75: mol_type = other DNA
atccggggcgtatcgagacgatgttcagcgcgatgcagaatgtggtgccgtcgcatctgtgcgataccaacctgt

SEQ ID NO: 117773 - DNA, 75 bp, synthetic construct
  source 1..75: mol_type = other DNA
ggggaaactaaatatggctctcttaaatatttagatcaggatgcgttgaatatcgcatttaatatgaataatatc

SEQ ID NO: 117774 - DNA, 75 bp, synthetic construct
  source 1..75: mol_type = other DNA
aatatgaaccgtaacaaccctaagcaatttaatcctgacgcaggtgtagataagagcaaggacggcatcaaagga

SEQ ID NO: 117775 - DNA, 75 bp, synthetic construct
  source 1..75: mol_type = other DNA
taacctgcaacgtcaggtaattgctgacatgttgcgtgactgggataaacgttatccggggcgtatcgagacgat

SEQ ID NO: 117776 - DNA, 75 bp, synthetic construct
  source 1..75: mol_type = other DNA
cattgattagcctgacatttcatgccacagccagcgccagtgatgaaacaattaaaaacaacccgaagcatggtc

SEQ ID NO: 117777 - DNA, 75 bp, synthetic construct
  source 1..75: mol_type = other DNA
gctgggggataatttgctaatggcgatgggggcgatgctggaagaagcgcaaccaatggtgacggcggaaagcat

SEQ ID NO: 117778 - DNA, 75 bp, synthetic construct
  source 1..75: mol_type = other DNA
ggccgttacgctgattttggacctacgtttgcgtgcgaaaaattgcgcgagatacacggtttatctttatccgtt

SEQ ID NO: 117779 - DNA, 75 bp, synthetic construct
  source 1..75: mol_type = other DNA
aaacaaagcatgtccagaaaaggcaattgtctggataatgctgtggtggagtgtttctttggaaccttaaagtcg

SEQ ID NO: 117780 - DNA, 75 bp, synthetic construct
  source 1..75: mol_type = other DNA
gccattcaatagcttattatgatattcacacactccctctgatttcgtgtggacgtcaaaagatagttccttttg

SEQ ID NO: 117781 - DNA, 75 bp, synthetic construct
  source 1..75: mol_type = other DNA
gggcgcaggtgtgcaggcgcgcgttgactatgacgcgatcccgaaattgcctggggttgaagagtacattaagtt

SEQ ID NO: 117782 - DNA, 75 bp, synthetic construct
  source 1..75: mol_type = other DNA
gaaagccactgccgctgagtttggtattgaactgtcggctattggtgaacttgtttccgcccgtggtggtcgtgc

SEQ ID NO: 117783 - DNA, 75 bp, synthetic construct
  source 1..75: mol_type = other DNA
gtccgcgccgctcctgtacttgataccgggaaagatacccgactgaaaagctgggaagacacgattaacatggga

SEQ ID NO: 117784 - DNA, 75 bp, synthetic construct
  source 1..75: mol_type = other DNA
aacagaaaaatgcctcacactatgacaggcaggaagggtagcgccgcaggcgcggccctcctgtatttcaggcag

SEQ ID NO: 117785 - DNA, 75 bp, synthetic construct
  source 1..75: mol_type = other DNA
ccgtcgtcagttgggggctcgttctgtcggttggttgctgtctgaggttaatgattggcttgatcgtcaacccaa

SEQ ID NO: 117786 - DNA, 75 bp, synthetic construct
  source 1..75: mol_type = other DNA
ctcgactgtacggataacgttgtggtacgtaatcaactgaacgctgggtgttttgccgcgaagataccgctgatt

SEQ ID NO: 117787 - DNA, 75 bp, synthetic construct
  source 1..75: mol_type = other DNA
cgttactttaatccaattggagcacataagtctggggtaattggtgaaaatcccaatggggttcctaataatcta

SEQ ID NO: 117788 - DNA, 75 bp, synthetic construct
  source 1..75: mol_type = other DNA
gtgtcgcggatcatgatgtgcggaggggcgaccaaaaatccgctgtggctgcgggaatacgctaatgccaccggc

SEQ ID NO: 117789 - DNA, 75 bp, synthetic construct
  source 1..75: mol_type = other DNA
cagtaaaaactatccagcaacatttgggccagctaaacatgcttcatcgtcggtccgggctgccacgaccaagtg

SEQ ID NO: 117790 - DNA, 75 bp, synthetic construct
  source 1..75: mol_type = other DNA
aagagcatccttcataagactcctacaaacttcttagaagtctattcagcacatcatcttaaacctgcaagaaaa

SEQ ID NO: 117791 - DNA, 75 bp, synthetic construct
  source 1..75: mol_type = other DNA
agataactggcaacaggcagtatcagaagaacgtgctatccgttgtgccaaaagattaattcaatgtaaaggata

SEQ ID NO: 117792 - DNA, 75 bp, synthetic construct
  source 1..75: mol_type = other DNA
gaaaatgcttctgtccgtttgccggtcgtgggcggcatggtgcaagttgaataaccggaaatggtttcccgcaga

SEQ ID NO: 117793 - DNA, 75 bp, synthetic construct
  source 1..75: mol_type = other DNA
atcgcaacctacaacaatggcaaaactcgattacactgtggcaaaagacgctctctctggagccgaaaaataaag

SEQ ID NO: 117794 - DNA, 75 bp, synthetic construct
  source 1..75: mol_type = other DNA
gccaggcgttttctgagcatacctggaaaatgcttctgtccgtttgccggtcgtgggcggcatggtgcaagttga

SEQ ID NO: 117795 - DNA, 75 bp, synthetic construct
  source 1..75: mol_type = other DNA
gcactgatttcgaccaggttcgttcactcatggaaaatagcgatcgctgccaggatatacgtaatctggcatttc

SEQ ID NO: 117796 - DNA, 75 bp, synthetic construct
  source 1..75: mol_type = other DNA
aagtaagccatttgtcaatagctgatgaacgccagcccacagaaccactaccaagacgtaccggcctggggaagg

SEQ ID NO: 117797 - DNA, 75 bp, synthetic construct
  source 1..75: mol_type = other DNA
aactgctcttcctgtggtgtgggtcaatcataggtgtaggttctgccaatgttattgcagataaaacagcgtcgg

SEQ ID NO: 117798 - DNA, 75 bp, synthetic construct
  source 1..75: mol_type = other DNA
gagatctggcaggcggtctgcgctgcggtaagcgaaagcgtccaagcggcggggatcgacccggcgcagatccga

SEQ ID NO: 117799 - DNA, 75 bp, synthetic construct
  source 1..75: mol_type = other DNA
attaagattggtgaacgtgccgctggctatcgtctctcggagattcaggcgtggatccgtggcgattggcaccca

SEQ ID NO: 117800 - DNA, 75 bp, synthetic construct
  source 1..75: mol_type = other DNA
ttcgcccgttccagcagcagctacctgcaagaacgcgccctggacgtacgcgacgtctgcttccagttactccag

SEQ ID NO: 117801 - DNA, 75 bp, synthetic construct
  source 1..75: mol_type = other DNA
gctggcgcagggtatcgcggcgcgactgcgtgctcgtggcgaacaggtaccatttcttggtttgctggatacctg

SEQ ID NO: 117802 - DNA, 75 bp, synthetic construct
  source 1..75: mol_type = other DNA
gatgccattggcagcgtggcgaactatttcaaagcgcatggctgggtgaaaggcgatcaggtcgcggtaatggca

SEQ ID NO: 117803 - DNA, 75 bp, synthetic construct
  source 1..75: mol_type = other DNA
atgcaggcgctgccggatgtcgagcaagcagttacccacgcttgtgtgattaatcaggcggcagccaccgggggg

SEQ ID NO: 117804 - DNA, 75 bp, synthetic construct
  source 1..75: mol_type = other DNA
gcattggttgctggagagagaaaacccccgcacgttgcaggtatgcacctgacaacatcacgggggctaatcttg

SEQ ID NO: 117805 - DNA, 75 bp, synthetic construct
  source 1..75: mol_type = other DNA
ggattatgccgccggatttatctttatgcgccgtatgggctcggcggcgttgacggctaccggaccagtgctcaa

SEQ ID NO: 117806 - DNA, 75 bp, synthetic construct
  source 1..75: mol_type = other DNA
gcaaatggcattcccatctggatatgagttttttgggctgtgtgctggcatttatactggaagtttattttgaag

SEQ ID NO: 117807 - DNA, 75 bp, synthetic construct
  source 1..75: mol_type = other DNA
tctctcattatcgtatatttaatcgttttttgcattatgagagaaaagttatggacatatataattctttgagtg

SEQ ID NO: 117808 - DNA, 75 bp, synthetic construct
  source 1..75: mol_type = other DNA
gcaggatgccgacgctgatttcttcgctcttggcggtcattcgctactggcgatgaaactggcagcgcagttaag

SEQ ID NO: 117809 - DNA, 75 bp, synthetic construct
  source 1..75: mol_type = other DNA
atctggcccgaacggcgcatggctgcgttatcgcaaaaaatttattactccggataacgtgcagaacggcgtggt

SEQ ID NO: 117810 - DNA, 75 bp, synthetic construct
  source 1..75: mol_type = other DNA
atggagagaatcgctcaggttggcgataccgatcccctgtacgccggattaagctgcgccgaagcgattgtcacc

SEQ ID NO: 117811 - DNA, 75 bp, synthetic construct
  source 1..75: mol_type = other DNA
gtattggtatcgaccgaatgattatgctgtttacaaacagtcatactattcgcgacgttattctcttcccggcga

SEQ ID NO: 117812 - DNA, 75 bp, synthetic construct
  source 1..75: mol_type = other DNA
ttcctgcggaagcgaacccgttcctcggttatcgcgcagtacgtatttatgaagaatatgcgtcgctgttcacca

SEQ ID NO: 117813 - DNA, 75 bp, synthetic construct
  source 1..75: mol_type = other DNA
aggctacaaggacaggcttatcagacttggcagcaacggtattattgagaacaaagatgccagaaaagaatggaa

SEQ ID NO: 117814 - DNA, 75 bp, synthetic construct
  source 1..75: mol_type = other DNA
gattttgtaggacggcaatactgcgaaaaagttaaagtcgtacacgtttttctccctctccccaaaggggcgagg

SEQ ID NO: 117815 - DNA, 75 bp, synthetic construct
  source 1..75: mol_type = other DNA
gcatcagcggatgcgggaatgggggggagggagttacacccaatccctgaccttaataaactcacttaacgccgc

SEQ ID NO: 117816 - DNA, 75 bp, synthetic construct
  source 1..75: mol_type = other DNA
tggcccaaacgcgtggctgaaacgcattcgcctgaacgccgtacgccgcgaactgataagcccgtggtcgcaaag

SEQ ID NO: 117817 - DNA, 75 bp, synthetic construct
  source 1..75: mol_type = other DNA
gtgtcctacaaccccggcattaacatcatgaaaaagacccgtacagccaatttgcaccatctttatcatgaaccc

SEQ ID NO: 117818 - DNA, 75 bp, synthetic construct
  source 1..75: mol_type = other DNA
cttcagcctacaggcgaagcgcgttctgtctaaaaatctcactttccagtacaaaagcagtgcgtttcaggtacg

SEQ ID NO: 117819 - DNA, 75 bp, synthetic construct
  source 1..75: mol_type = other DNA
acatgctttgacgattaccgcctggcagcagatttacgatcagctgcatccgggcaagtttcatggtgaatttac

SEQ ID NO: 117820 - DNA, 75 bp, synthetic construct
  source 1..75: mol_type = other DNA
tcgtaaaattgcccgtatatatcaacgccgcatgcgacgaccatcttacggtgaactgatccagattgatggctc

SEQ ID NO: 117821 - DNA, 75 bp, synthetic construct
  source 1..75: mol_type = other DNA
ctggaaaactcgccggttgaggaaatcgaaaccgtagctgcgcttagccatgcggtaggtttgccaataactctc

SEQ ID NO: 117822 - DNA, 75 bp, synthetic construct
  source 1..75: mol_type = other DNA
tcgcctgaacgccgtacgccgcgaactgataagcccgtggtcgcaaagcacaacggtaaaagacgccgccatgca

SEQ ID NO: 117823 - DNA, 75 bp, synthetic construct
  source 1..75: mol_type = other DNA
tctggttttgctgtaacagcctttttgagaattaaagagtgggatattgcaactaatatacttaaccgtgaggga

SEQ ID NO: 117824 - DNA, 75 bp, synthetic construct
  source 1..75: mol_type = other DNA
agttgctcaaccaggcaatggcctgccgtacttcgctggaagtggaacacctgctggcgcaattccgcatgaccc

SEQ ID NO: 117825 - DNA, 75 bp, synthetic construct
  source 1..75: mol_type = other DNA
ttcccgcgcccgcgaatatgtgctggagaatatgtccgaaccggtaacggtgctggacttgtgcaatcaactgca

SEQ ID NO: 117826 - DNA, 75 bp, synthetic construct
  source 1..75: mol_type = other DNA
acatgctttgacaattaccgcctggcagcagatttacgatcaactgcatccgggcaagtttcatggtgaatttac

SEQ ID NO: 117827 - DNA, 75 bp, synthetic construct
  source 1..75: mol_type = other DNA
ctggcatctggggcaatttgccacggattaccagcagctgttttccgagaagccgtcactgacgctgcatcagcg

SEQ ID NO: 117828 - DNA, 75 bp, synthetic construct
  source 1..75: mol_type = other DNA
gtggggattctggcatctggggcaatttgccacggattaccagcagctgtttgccgagaagccgtcattgacgct

SEQ ID NO: 117829 - DNA, 75 bp, synthetic construct
  source 1..75: mol_type = other DNA
aaacagaagcagatatttctgaatatataacaaaaaaaatcattgagcttaagaaaaagaccgggaaagaagtta

SEQ ID NO: 117830 - DNA, 75 bp, synthetic construct
  source 1..75: mol_type = other DNA
tggcgttaagttggttgctgaaagatgagcgagtgacgtcggtattgattggtgccagccgcgcggagcaacttg

SEQ ID NO: 117831 - DNA, 75 bp, synthetic construct
  source 1..75: mol_type = other DNA
acatggaaaatagcgctgcgcagcacggcgtaaaagcagagggtgtggtggctacggatgtccagaatcaacgca

SEQ ID NO: 117832 - DNA, 75 bp, synthetic construct
  source 1..75: mol_type = other DNA
ttcctgttcctgcagaaccgatagcaagaacggccgcccagatcgaaagcataagtgaaaaaattgccgaactgg

SEQ ID NO: 117833 - DNA, 75 bp, synthetic construct
  source 1..75: mol_type = other DNA
cagcttactgaagagtttctgaaagcagaaacgttccaaaataaaactgatattaaatcattatcagaaaaaata

SEQ ID NO: 117834 - DNA, 75 bp, synthetic construct
  source 1..75: mol_type = other DNA
agttggtcatcacccgaaaaagcaaataagtatctcaattggagtgctaaaagggagttggaaacaatgcttgag

SEQ ID NO: 117835 - DNA, 75 bp, synthetic construct
  source 1..75: mol_type = other DNA
tggcgttaagctggttgctgaaagatgaacgcgtcacctcggtgttgattggtgccagccgaccggaacaactgg

SEQ ID NO: 117836 - DNA, 75 bp, synthetic construct
  source 1..75: mol_type = other DNA
attgcgctataaaaaacgatgtggctaattttatttttagctcttctgcaacggtttatggcgaaagcgaaataa

SEQ ID NO: 117837 - DNA, 75 bp, synthetic construct
  source 1..75: mol_type = other DNA
atgccagttacccgttatctctgcattttcataaacgttggtttgggagaaggttcggcattacccgtcggtgtg

SEQ ID NO: 117838 - DNA, 75 bp, synthetic construct
  source 1..75: mol_type = other DNA
ctatcagaaagaactggtgttccctctcctaaggaagccctacaacagatcattgataaaagtttggctgataag

SEQ ID NO: 117839 - DNA, 75 bp, synthetic construct
  source 1..75: mol_type = other DNA
tgtgatgtctgtcagtctgctttagggggactctttccatccggtagtttccttcctccccggcagcgatttttt

SEQ ID NO: 117840 - DNA, 75 bp, synthetic construct
  source 1..75: mol_type = other DNA
ccgtggccttccgccactccgccgacaggctggctgaaatgcaatggtgcggctttttctgctgaagaatacccg

SEQ ID NO: 117841 - DNA, 75 bp, synthetic construct
  source 1..75: mol_type = other DNA
ttggtctttccacgatgacggaatggttcaaacaactgcgtgatgagcgtcagggtaaacgccaaaagcctccct

SEQ ID NO: 117842 - DNA, 75 bp, synthetic construct
  source 1..75: mol_type = other DNA
tcctccacaaggttcctacaaacttcttagaagtctattcaacccatcatctgaaacctacaagaaaaattcgtt

SEQ ID NO: 117843 - DNA, 75 bp, synthetic construct
  source 1..75: mol_type = other DNA
actacaacactgaccatttagaagctctacgaacagacataccggcaaaagaccactctactcctactcctactc

SEQ ID NO: 117844 - DNA, 75 bp, synthetic construct
  source 1..75: mol_type = other DNA
tggtgcaggcttttgtggaagagcgcataaagccgcagttgttacagcaatttgagcagaacaaaggtcgtaccg

SEQ ID NO: 117845 - DNA, 75 bp, synthetic construct
  source 1..75: mol_type = other DNA
aaaatcagagcatataaggtagatttactggacaaaaaagaattaaagactatattcacgaatcacacattctct

SEQ ID NO: 117846 - DNA, 75 bp, synthetic construct
  source 1..75: mol_type = other DNA
tgaccgtacacagcctggatcagcgtctaaatcccgatctggctccgccggaaatctctgagaccatgcaggagt

SEQ ID NO: 117847 - DNA, 75 bp, synthetic construct
  source 1..75: mol_type = other DNA
ttcctataaaagagtcaaatgaagttggacatacaactaatccatatggtacatctaaactaataatagaaaaaa

SEQ ID NO: 117848 - DNA, 75 bp, synthetic construct
  source 1..75: mol_type = other DNA
aacaagtataccatcggggagctgatgaatgcggacgacccctatgcactgatattcagccgtccgagtccgctg

SEQ ID NO: 117849 - DNA, 75 bp, synthetic construct
  source 1..75: mol_type = other DNA
ccatacggacaatgcgtctgcttccctggccagccagctgtcgtccaccttctccagtctgaagagtcaggcatc

SEQ ID NO: 117850 - DNA, 75 bp, synthetic construct
  source 1..75: mol_type = other DNA
atgaacggcaaacaacattacctgatgaacataaaggtaaatatagtcttgataaagtgatggatgagatgaaga

SEQ ID NO: 117851 - DNA, 75 bp, synthetic construct
  source 1..75: mol_type = other DNA
agatatttcaacccagtgggtgctcatccatcaggattaattggtgaacagcctcaaggaattccaaataatttg

SEQ ID NO: 117852 - DNA, 75 bp, synthetic construct
  source 1..75: mol_type = other DNA
agtttaaacgcgaatccgctcaactggtagttgaccagagatacacagtggcagatgccgccaaagctatggatg

SEQ ID NO: 117853 - DNA, 75 bp, synthetic construct
  source 1..75: mol_type = other DNA
tgctagatgacgcagaacttgcagcattgattgctgaacacgatctggtgctcgactgtacggataacgttgcgg

SEQ ID NO: 117854 - DNA, 75 bp, synthetic construct
  source 1..75: mol_type = other DNA
ctgaacggagatacggcggggctggtgaatgtggccacgcaaacctcaatggcaaagatgaggctgtcgcaggcg

SEQ ID NO: 117855 - DNA, 75 bp, synthetic construct
  source 1..75: mol_type = other DNA
cttttcttcaacagatcctgaatacgctgcacggcttcactgaccaggtatttggtcagacgaacggggcgcaat

SEQ ID NO: 117856 - DNA, 75 bp, synthetic construct
  source 1..75: mol_type = other DNA
aaaattacgacttatataggcgatgtaactgatagtacgtttctaaaaacgatttttgataatcactctgtcacc

SEQ ID NO: 117857 - DNA, 75 bp, synthetic construct
  source 1..75: mol_type = other DNA
gttcagagcatggtctgctgcggctggataaacatgatgtggatctggcagccgaactgaatgaattacgtgagt

SEQ ID NO: 117858 - DNA, 75 bp, synthetic construct
  source 1..75: mol_type = other DNA
agtttaaacgcgaatccgctcaactggtcgttgaccagagatacaccgtggcagatgccgccaaagctatggatg

SEQ ID NO: 117859 - DNA, 75 bp, synthetic construct
  source 1..75: mol_type = other DNA
ttttgccgcgaaggtaccgctggtttccggcgcggcaattcgtatggaaggtcaaatcacggtcttcacttatca

SEQ ID NO: 117860 - DNA, 75 bp, synthetic construct
  source 1..75: mol_type = other DNA
aagtgcgtttccatcagtcgcgtctggtgcatgactttatctatcagggtgtgctgagcgtgctacaacagcaac

SEQ ID NO: 117861 - DNA, 75 bp, synthetic construct
  source 1..75: mol_type = other DNA
ttatcagaacgaactggccttccctcccccaaagaagctctccaacagataattgataaaagtttggcagataca

SEQ ID NO: 117862 - DNA, 75 bp, synthetic construct
  source 1..75: mol_type = other DNA
caggtcactgcgctggggcgccgttttttaagtctgaccgccgatctgcgtaagattgatggtattccagcactg

SEQ ID NO: 117863 - DNA, 75 bp, synthetic construct
  source 1..75: mol_type = other DNA
aatattccattcattaaggctgatatcaacgataaacaaaagcttgaagaagtttttaaaaactacgatattgat

SEQ ID NO: 117864 - DNA, 75 bp, synthetic construct
  source 1..75: mol_type = other DNA
aacggcgtttaggggcgatttgcggcaccgcttttctcgaacatgcgctggcgattgaatggcagcacggcgatc

SEQ ID NO: 117865 - DNA, 75 bp, synthetic construct
  source 1..75: mol_type = other DNA
cgggcagttcagcagtaatggcggtacgataaatgccgacacactgcagatatcggcacaaagcctgtcaaatcg

SEQ ID NO: 117866 - DNA, 75 bp, synthetic construct
  source 1..75: mol_type = other DNA
actgaacacctggatccgcacactggtgacggagatgaccgatccgggtgatgaactgcaggcgtctcacccgct

SEQ ID NO: 117867 - DNA, 75 bp, synthetic construct
  source 1..75: mol_type = other DNA
catcagagtaatcccgaacatcgcttctaccggacgcatgaacggcttctcattcgaatacgacgggattgcttt

SEQ ID NO: 117868 - DNA, 75 bp, synthetic construct
  source 1..75: mol_type = other DNA
tgggcatctgctgatttggcacataaaaagctatcttggaaagcagaaaaaaaattaaaagaaatgatcgaagat

SEQ ID NO: 117869 - DNA, 75 bp, synthetic construct
  source 1..75: mol_type = other DNA
atcaggaaaaaaacgtcatcttctggaatactggaaagcagaagttatcatgcgggataagtttgtttttcaccg

SEQ ID NO: 117870 - DNA, 75 bp, synthetic construct
  source 1..75: mol_type = other DNA
aataccacaaaagcgcttcgtcgtgatgtggtcaaacccgtatggcacaattcgcttcgtttgccgaagaacgaa

SEQ ID NO: 117871 - DNA, 75 bp, synthetic construct
  source 1..75: mol_type = other DNA
ccatcaggatgatggcatattccttcaccgacccggatgtaatgcatgcgctggcaaaagcgaaaaaacgcggag

SEQ ID NO: 117872 - DNA, 75 bp, synthetic construct
  source 1..75: mol_type = other DNA
gcttcagaaacgcaaaaagtcaccaaagaaaaacctgcacatctggcgcaatccattcgcgttgcgaaacgttaa

SEQ ID NO: 117873 - DNA, 75 bp, synthetic construct
  source 1..75: mol_type = other DNA
gattttataacaattactggagatgctgggtgtaggaagacactctccgctattttcgagaaacacgccatagat

SEQ ID NO: 117874 - DNA, 75 bp, synthetic construct
  source 1..75: mol_type = other DNA
aatatcgtaatgacgtatggcgaaactgaagcgatgaaagcagcctggaaagagcatcctggcatgagcgatgca

SEQ ID NO: 117875 - DNA, 75 bp, synthetic construct
  source 1..75: mol_type = other DNA
gaaatgaccagcctggcttcctccatgacggtgcatagcctggatcagcgtcttaatcccgatctggctccgccg

SEQ ID NO: 117876 - DNA, 75 bp, synthetic construct
  source 1..75: mol_type = other DNA
gcttattcatttctataaaaaacatggaaaatgaaaaaattgttgaactctatgccaaaaattctgttgttccag

SEQ ID NO: 117877 - DNA, 75 bp, synthetic construct
  source 1..75: mol_type = other DNA
gcatctcacgtcgggttgcagtgactccggaacagggtaaaagcaaacatttcatcattacggttgccacggata

SEQ ID NO: 117878 - DNA, 75 bp, synthetic construct
  source 1..75: mol_type = other DNA
gtgccgatcctgccacctttatgggcatggcggggctgggggatctggtgcttacctgtaccgacaaccagtcgc

SEQ ID NO: 117879 - DNA, 75 bp, synthetic construct
  source 1..75: mol_type = other DNA
gcgtggctgaagtctggcgctatggacgaaatcaaggttatcaaccgtggaggtcaggcatattgcgtaaaagat

SEQ ID NO: 117880 - DNA, 75 bp, synthetic construct
  source 1..75: mol_type = other DNA
tttttttattataaccgtgttgtcatcacgtcattttcatgccgcggtgcttgtttctattgtggtgacgtcttg

SEQ ID NO: 117881 - DNA, 75 bp, synthetic construct
  source 1..75: mol_type = other DNA
gcttgggaaaaaatactcatgggtaaatcttcaaaagcttctcaactatgagccagagcgagacaactgcctact

SEQ ID NO: 117882 - DNA, 75 bp, synthetic construct
  source 1..75: mol_type = other DNA
tgccgactggaacaagcgacaggggaagaggaacagaaacattataatgcactaattgggttgctttttgaataa

SEQ ID NO: 117883 - DNA, 75 bp, synthetic construct
  source 1..75: mol_type = other DNA
tgttgagccaacagagactattgaacaggttactgcgctggggcgtcgctttttaagtctgactgccgatctgcg

SEQ ID NO: 117884 - DNA, 75 bp, synthetic construct
  source 1..75: mol_type = other DNA
actacaacccagatcacttagaagctctgcgaacaacaaagggagttatccctgctcctgctcctgctcctgctc

SEQ ID NO: 117885 - DNA, 75 bp, synthetic construct
  source 1..75: mol_type = other DNA
tgggcaaaacacaacatcaacgttaatgcgattgctccgggttatatggcgaccaacaatactcagcaactgcgg

SEQ ID NO: 117886 - DNA, 75 bp, synthetic construct
  source 1..75: mol_type = other DNA
gtcatggctgcaatgtatgcggctcatgaactgggatcgcttggtaaaatgattatctctcaggtcgttctggtt

SEQ ID NO: 117887 - DNA, 75 bp, synthetic construct
  source 1..75: mol_type = other DNA
cctgctcctgctcctgctcctgctcctgctcctgcaacagttttgaaaaccgctgagagaaaggaaagtatcggt

SEQ ID NO: 117888 - DNA, 75 bp, synthetic construct
  source 1..75: mol_type = other DNA
ggtagctgtgttcctgccgctgttgttgatgggcggcttgccggggcgcttgttacgcgagtttgccgtgacgct

SEQ ID NO: 117889 - DNA, 75 bp, synthetic construct
  source 1..75: mol_type = other DNA
gcaagccttacgtctggggcggcacgcggcccgatcaaggcttcgactgtagcgggttggttttttatgcctaca

SEQ ID NO: 117890 - DNA, 75 bp, synthetic construct
  source 1..75: mol_type = other DNA
ggtcaaaaacctgtcagaactggataaggaaattgccggtcttacagaggcggcatcattgaacgtagccaaagt

SEQ ID NO: 117891 - DNA, 75 bp, synthetic construct
  source 1..75: mol_type = other DNA
ttttattaaagcaacagagtcttttgagaagatctgcgggaaaaataaaggctatcttagcgttgtcaccaagca

SEQ ID NO: 117892 - DNA, 75 bp, synthetic construct
  source 1..75: mol_type = other DNA
tcgacagtttgcccgtcaggtgacgccggggcaggtgatggtcgcgtcaaccgtcgccaaactggcaacggttat

SEQ ID NO: 117893 - DNA, 75 bp, synthetic construct
  source 1..75: mol_type = other DNA
ttcccggctggttaattccaggtgtaagcgccgccacgctggtggtagcggttgcgctggcggcgtttctcgccc

SEQ ID NO: 117894 - DNA, 75 bp, synthetic construct
  source 1..75: mol_type = other DNA
ggataccagcgcattgcaggcgcagcttcgtgaaacattgccaccacatatggtaccggtggttctgctgcaact

SEQ ID NO: 117895 - DNA, 75 bp, synthetic construct
  source 1..75: mol_type = other DNA
gagggacagatgcggaaaataaagatgaaaaaatgacgttgaatgttcaactttccgtaaatagttgcataaaaa

SEQ ID NO: 117896 - DNA, 75 bp, synthetic construct
  source 1..75: mol_type = other DNA
aaagttaaatggcagataactggtaacaaactgaaagggatcaatccaacaccgttttatataaatctagcagag

SEQ ID NO: 117897 - DNA, 75 bp, synthetic construct
  source 1..75: mol_type = other DNA
atggaaattaatgagtcgcgcaccgtcctgaaaacggaagacaatagctactcgtttgacgtttttattgatgcc

SEQ ID NO: 117898 - DNA, 75 bp, synthetic construct
  source 1..75: mol_type = other DNA
gaaattgttcctcatctgaatgaacacgaccataaacggttcagtaaaggccttgcccgggttttcatcgataat

SEQ ID NO: 117899 - DNA, 75 bp, synthetic construct
  source 1..75: mol_type = other DNA
ctgttattataacttcgattttatcatgttttttttctactgcgcaagctatggataataatataaccaatagaa

SEQ ID NO: 117900 - DNA, 75 bp, synthetic construct
  source 1..75: mol_type = other DNA
atgctgatcctcgccatgccgggtattgtgctggcaacgggtttctttttgctgctcaacaacactactggcctg

SEQ ID NO: 117901 - DNA, 75 bp, synthetic construct
  source 1..75: mol_type = other DNA
cgcggcgatgctggcgctgctccagatggtgtgttgccttgggctggtgctgttgagtcagcgactaagtaaggc

SEQ ID NO: 117902 - DNA, 75 bp, synthetic construct
  source 1..75: mol_type = other DNA
aacccgatgcgcgatatcaccgcccgctacagcatgttgtgtcagtcgctgggcattgaaggctggtcgcgctta

SEQ ID NO: 117903 - DNA, 75 bp, synthetic construct
  source 1..75: mol_type = other DNA
gccgggacgtgcgccgaaagcgggcagtgaaacgattatcgccggggcgttctcgtcattactgggttgtgatgt

SEQ ID NO: 117904 - DNA, 75 bp, synthetic construct
  source 1..75: mol_type = other DNA
ctggagcaggatatcaccaatctggaaaaagcagcggcattaagcattgccagaatgattacatacccgcgttaa

SEQ ID NO: 117905 - DNA, 75 bp, synthetic construct
  source 1..75: mol_type = other DNA
tgattattcctgcctgtactgtaacaaaggcagaggttgactggggaaatgtagagattcagacattgagcccag

SEQ ID NO: 117906 - DNA, 75 bp, synthetic construct
  source 1..75: mol_type = other DNA
ttttaagcagcgaccatctgcataacatcaccgaagtggcgattcaccgtctggagcaacagattggtaagccct

SEQ ID NO: 117907 - DNA, 75 bp, synthetic construct
  source 1..75: mol_type = other DNA
ccgatcatatgggcgtgtatctgggcgatgggcagtttatcgagtcgccacgtaccggcgaaaccattcggataa

SEQ ID NO: 117908 - DNA, 75 bp, synthetic construct
  source 1..75: mol_type = other DNA
gataaaggcttcgactgcagcgggttagtttttttatgcctacaacaagatcctcgaggcgaaacttccgcgcac

SEQ ID NO: 117909 - DNA, 75 bp, synthetic construct
  source 1..75: mol_type = other DNA
caacaaccgcacggcccttattacctgctgggttattcgctgggcggtacgctggcgcagggcattgcggcgcgg

SEQ ID NO: 117910 - DNA, 75 bp, synthetic construct
  source 1..75: mol_type = other DNA
ctcgctatgcagcaattctttgccgaatatggtgtaacgaccacgcactttgttccctcaatgctggcggcattt

SEQ ID NO: 117911 - DNA, 75 bp, synthetic construct
  source 1..75: mol_type = other DNA
caccggggaaaacattcgggtaagccggttagccgaacctttctggcaggatcattttttgggcgcgcggcggat

SEQ ID NO: 117912 - DNA, 75 bp, synthetic construct
  source 1..75: mol_type = other DNA
atggcaacgcgccgtcagccgttaattcccggctggttaattccaggtgtaagcgccgctacgctggtggtagcg

SEQ ID NO: 117913 - DNA, 75 bp, synthetic construct
  source 1..75: mol_type = other DNA
tcgctccaggttataccgatgatgaaatttacgaatggatgatcaagaaagttaaggcggtacaggatctgaaat

SEQ ID NO: 117914 - DNA, 75 bp, synthetic construct
  source 1..75: mol_type = other DNA
tctatctttacaacagaaatcaaaatggttctattggttcacctatagtttttaattcgccatttacccctggct

SEQ ID NO: 117915 - DNA, 75 bp, synthetic construct
  source 1..75: mol_type = other DNA
tcgccgacgggcgcatcgcctggcagggtaaaaccgatgagttgttaagcggtaaggcgagtgcttcggcgctgt

SEQ ID NO: 117916 - DNA, 75 bp, synthetic construct
  source 1..75: mol_type = other DNA
gaaaaactaccgggcgaaatgttaaaactgactgatatcacctggctttatcaccatttgccgatgcgttttagc

SEQ ID NO: 117917 - DNA, 75 bp, synthetic construct
  source 1..75: mol_type = other DNA
ggtcgctatcagcagctttacctgttctggccgcattaccgcaaacagcttgccctgccggatttcagtccgttg

SEQ ID NO: 117918 - DNA, 75 bp, synthetic construct
  source 1..75: mol_type = other DNA
ttttgcttttattatttttatttccatcttttgttatggctggggggcataaggatgattttttatcagatctat

SEQ ID NO: 117919 - DNA, 75 bp, synthetic construct
  source 1..75: mol_type = other DNA
taacggctgatgcctgtgtgaagtcccaggaaacaggaaacaccgagtttgtggaattaccagcaaaacctgact

SEQ ID NO: 117920 - DNA, 75 bp, synthetic construct
  source 1..75: mol_type = other DNA
taatactaaaaaaacagaagccttgttaaggcagaagattggtaacaaacagtacagaaagattcaattaggtgt

SEQ ID NO: 117921 - DNA, 75 bp, synthetic construct
  source 1..75: mol_type = other DNA
cgggtcgcgccactattattcccgccgttgcggtgccggtttcgctgattggtacgtttgcggcgatgtacctgt

SEQ ID NO: 117922 - DNA, 75 bp, synthetic construct
  source 1..75: mol_type = other DNA
tgccaagaaagtccttcaataagtcgctaattgtttttttactgggtggggcggttatttctgcttcgatggcac

SEQ ID NO: 117923 - DNA, 75 bp, synthetic construct
  source 1..75: mol_type = other DNA
gagctcacacacaccaatgagactattttcccacgcgatttaatcattagcatacttgaaaacaagtcagccgga

SEQ ID NO: 117924 - DNA, 75 bp, synthetic construct
  source 1..75: mol_type = other DNA
tgctctgtgtagccaggtatgcgccacactctttacactcgccgtgcgtggatggatcgtacaggctaatacgga

SEQ ID NO: 117925 - DNA, 75 bp, synthetic construct
  source 1..75: mol_type = other DNA
accattcgcgcctcgctggaggaagtcgagcaaacgctgattatctcggtggcgctggtgattctggtggtcttt

SEQ ID NO: 117926 - DNA, 75 bp, synthetic construct
  source 1..75: mol_type = other DNA
cacaaggcgtttgtccgcgagtttggttgtactccgggagaatatcgggaaagggtcagacagcttgcaccctga

SEQ ID NO: 117927 - DNA, 75 bp, synthetic construct
  source 1..75: mol_type = other DNA
cgcctggaccgtcgaatcactggccagcatcgctcacatgtccagggcaagttttgcccaacttttccgtgatgt

SEQ ID NO: 117928 - DNA, 75 bp, synthetic construct
  source 1..75: mol_type = other DNA
tacagctgaaaaacatcatcgatagcggagaaattggtcaaccattaatggttcatggtcgtcattataatgtaa

SEQ ID NO: 117929 - DNA, 75 bp, synthetic construct
  source 1..75: mol_type = other DNA
acctgcacaccaccaccgtttgcgtattttcatgaaaggagatcactcaataacttccatcgagatcgggtaata

SEQ ID NO: 117930 - DNA, 75 bp, synthetic construct
  source 1..75: mol_type = other DNA
tataaaaacggcgtactgattgccagtattatcagcctgctgatctgcccgtggaaattaatggaaaatcaggac

SEQ ID NO: 117931 - DNA, 75 bp, synthetic construct
  source 1..75: mol_type = other DNA
ggttcgcgggttaacagcggaatgatgtttatcacgctgaaaccacgcgacgaacgcagcgaaacagcgcagcaa

SEQ ID NO: 117932 - DNA, 75 bp, synthetic construct
  source 1..75: mol_type = other DNA
gaagaaaaacgccatcatgatggtcgattttgcgctcgaagctcaaagaaatggaaatctggcgccacaggaagc

SEQ ID NO: 117933 - DNA, 75 bp, synthetic construct
  source 1..75: mol_type = other DNA
ctgtttacctctttctcagggagtttagtctccaggatttccggggcggttcagattattcaggagtcaattaat

SEQ ID NO: 117934 - DNA, 75 bp, synthetic construct
  source 1..75: mol_type = other DNA
tcgcaaaaagttatttatgcaccgggagccacgaccatgcaagtcaacatttcaccattaacgccacgcctattg

SEQ ID NO: 117935 - DNA, 75 bp, synthetic construct
  source 1..75: mol_type = other DNA
gtttgctacgccgcctcgtattgctgataacgcccatcttgatgtacaccattctgaagaggaactgggttatat

SEQ ID NO: 117936 - DNA, 75 bp, synthetic construct
  source 1..75: mol_type = other DNA
attatcgaccgtctgcgcgtaaagctggcgaaagaaccgggggcgaatctgttcctgatggcggtacaggatatt

SEQ ID NO: 117937 - DNA, 75 bp, synthetic construct
  source 1..75: mol_type = other DNA
ggctgaaaatctgttctctctggagcaggatatcaccaatctggaaaaagcagcggcattaagcattgccagaat

SEQ ID NO: 117938 - DNA, 75 bp, synthetic construct
  source 1..75: mol_type = other DNA
cagagcgggaaggtgagctgacccagttcactcgtgcgataaagacactgggcatcgagccaatccatgccaaca

SEQ ID NO: 117939 - DNA, 75 bp, synthetic construct
  source 1..75: mol_type = other DNA
tttaaacaagcatttggtcaggatttcaaactggtgacgccgggtattcgcccgcaggggagcgacgctggcgat

SEQ ID NO: 117940 - DNA, 75 bp, synthetic construct
  source 1..75: mol_type = other DNA
cgcattgcctgatttcagcccgttgtcgcaggacaaacttgcgattcagttaatccgggagcgcggtgccattga

SEQ ID NO: 117941 - DNA, 75 bp, synthetic construct
  source 1..75: mol_type = other DNA
atatcgccgcgtttctggacatgctggcctattccgaagggacggcgacgcatccgctgacgaaaaatcgtggtt

SEQ ID NO: 117942 - DNA, 75 bp, synthetic construct
  source 1..75: mol_type = other DNA
gggatgttgaatgatcccaaaaacgggatccagaaccagtcatataaccagtcatttaaccaagagagggagagc

SEQ ID NO: 117943 - DNA, 75 bp, synthetic construct
  source 1..75: mol_type = other DNA
ttcctaaagattttagaggtaagaatccgattgttgtgcagacatggtggtttgttcatttcttcctttttaaaa

SEQ ID NO: 117944 - DNA, 75 bp, synthetic construct
  source 1..75: mol_type = other DNA
ccagctaccagtacacgttgttatccgacgacctggcggcactgcgcgaatgggagccgaaaatccgcaaaaaac

SEQ ID NO: 117945 - DNA, 75 bp, synthetic construct
  source 1..75: mol_type = other DNA
ggcgctgtttaatcagggcgtgtcgctggacgacgtacgcaccgccatcagcaatgccaacgtgcgtaaaccgca

SEQ ID NO: 117946 - DNA, 75 bp, synthetic construct
  source 1..75: mol_type = other DNA
tccacattgacggaatgccactgcatatcatcgataccgccgggctacgtgaagccagcgatgaagttgaacgta

SEQ ID NO: 117947 - DNA, 75 bp, synthetic construct
  source 1..75: mol_type = other DNA
tcgctggtgaccgcattgccagtggtgattatgtatgcgtatgcgctttcggaacattttattaagagtggtttg

SEQ ID NO: 117948 - DNA, 75 bp, synthetic construct
  source 1..75: mol_type = other DNA
gggcggtaaaataacatctggaactgctgcaggaacaggcacggctgaaacccttgaaaaggactatctggctga

SEQ ID NO: 117949 - DNA, 75 bp, synthetic construct
  source 1..75: mol_type = other DNA
gcacagcgcctcggcagatattctgcgcctgaaactggaatttactgacggtgaatttcgcactctggcagcgca

SEQ ID NO: 117950 - DNA, 75 bp, synthetic construct
  source 1..75: mol_type = other DNA
ccatcaacgccagcttttacacggtgtatatgttctctggcattttgctggtggtgccgctgttcaaaatcatca

SEQ ID NO: 117951 - DNA, 75 bp, synthetic construct
  source 1..75: mol_type = other DNA
ctggcggacaagtatttccccatcgtcaacaaggagcaggacaacagcgaaatgctggccgctgacgtcatcatc

SEQ ID NO: 117952 - DNA, 75 bp, synthetic construct
  source 1..75: mol_type = other DNA
cggttagccgaacctttctggcaggaccactttttgggtgcgcgcaggattttgacggaagagacgattttgtaa

SEQ ID NO: 117953 - DNA, 75 bp, synthetic construct
  source 1..75: mol_type = other DNA
tttcttaagcagcgaccatctacacaacatcaccgaagtggcgattcaccgcctggagcagcagcttggtaagcc

SEQ ID NO: 117954 - DNA, 75 bp, synthetic construct
  source 1..75: mol_type = other DNA
gggcttttacctgaaaatgaaaagattacctccgttgatgttgaagactggacaccggagcgtcgattctcagtt

SEQ ID NO: 117955 - DNA, 75 bp, synthetic construct
  source 1..75: mol_type = other DNA
tggggccgttgtccggcaccagttacggtattgccgggctgctgatgctggcggtcagtcaccggctgtaccggg

SEQ ID NO: 117956 - DNA, 75 bp, synthetic construct
  source 1..75: mol_type = other DNA
gtcatgccgccgaactacactggtccgcaacgctggcagaaattgaacgggtaaagcgcatctaccaggcaagaa

SEQ ID NO: 117957 - DNA, 75 bp, synthetic construct
  source 1..75: mol_type = other DNA
aattgacggaaaatatccgaacagacagggcattgcgtgacgcaaaaaataagttacgagaactggagaaagagc

SEQ ID NO: 117958 - DNA, 75 bp, synthetic construct
  source 1..75: mol_type = other DNA
aatgaccttgaactggcgctgttcccggatgaacacggtgatttgagtattgagatcctcgccaataaacagcgt

SEQ ID NO: 117959 - DNA, 75 bp, synthetic construct
  source 1..75: mol_type = other DNA
gagattccagaaaccacgctgagcgcgctggtggcagtacaggcagccaaaacgccggatgctccggcgctggca

SEQ ID NO: 117960 - DNA, 75 bp, synthetic construct
  source 1..75: mol_type = other DNA
aactcaaagagaaaggactgatatggcttttaccaccatactgctggtcacatcgtcagatagcccgtaagctga

SEQ ID NO: 117961 - DNA, 75 bp, synthetic construct
  source 1..75: mol_type = other DNA
ccgcgcctgcaaaaaagaaggcattcatacctgtctggacaccaacggttttgttcgtcgttacgatccggtgat

SEQ ID NO: 117962 - DNA, 75 bp, synthetic construct
  source 1..75: mol_type = other DNA
tccgcacggtactgcgcaggcattaatgcaggcggatttgcaacaagatctgcgcgtcgatagcggtaaaccact

SEQ ID NO: 117963 - DNA, 75 bp, synthetic construct
  source 1..75: mol_type = other DNA
ttgttagctcgttgtatcggaacaggtagattgaaaggagatgtgagaagtgattttattgggtttaatggtagt

SEQ ID NO: 117964 - DNA, 75 bp, synthetic construct
  source 1..75: mol_type = other DNA
gtcgtgaaacaacaggcatgcgcatctgtacgctgattccggtgactgagactagtttgacagggccgtttggtc

SEQ ID NO: 117965 - DNA, 75 bp, synthetic construct
  source 1..75: mol_type = other DNA
ttgggtatccttacgccgggaagaaaagagcacggtgatttccaaattacttggaactgtgaaggtaacgagccg

SEQ ID NO: 117966 - DNA, 75 bp, synthetic construct
  source 1..75: mol_type = other DNA
ggatattgatgcccttactccgtggcagcatcaaacgatttatatcgacggcaacgcaggggcgattgtggttga

SEQ ID NO: 117967 - DNA, 75 bp, synthetic construct
  source 1..75: mol_type = other DNA
gagtgggtggttataaatcgttctctcaatgggattgttacagtgccagtatcatcaataaagattctttattga

SEQ ID NO: 117968 - DNA, 75 bp, synthetic construct
  source 1..75: mol_type = other DNA
ccttactccgtggcagcatcaaacgatttatatcgacggcaacgccggggcgattgtggttgagccaggggaagc

SEQ ID NO: 117969 - DNA, 75 bp, synthetic construct
  source 1..75: mol_type = other DNA
gcacacttgtactttgacaccagagacgaatgtatctcagaacgggccgttcggcctagcatcggccacactgcg

SEQ ID NO: 117970 - DNA, 75 bp, synthetic construct
  source 1..75: mol_type = other DNA
atgagccagcatttacctttggtcgccgcacaacccggcatctggatggcagaaaaactgtcggatttaccctcc

SEQ ID NO: 117971 - DNA, 75 bp, synthetic construct
  source 1..75: mol_type = other DNA
aaataccgagttcagctatttggcactccctgaaaattataaccgtttgttttaccaaattcaaaaaaccaaaca

SEQ ID NO: 117972 - DNA, 75 bp, synthetic construct
  source 1..75: mol_type = other DNA
tttgggttgatgagtccgatgatagccgacgttctatttttgaagaagcatgtctgacgcgttatttcaatatcc

SEQ ID NO: 117973 - DNA, 75 bp, synthetic construct
  source 1..75: mol_type = other DNA
atgaaaatgctgttgtcggcaccatgatgcgtacctgcaccttgactccggagacgaatgtgtctcagaacgggc

SEQ ID NO: 117974 - DNA, 75 bp, synthetic construct
  source 1..75: mol_type = other DNA
caataaatataggttggtctttttcaccaacatatatggttgccaattctgaaggtcaaggatgggatgcattat

SEQ ID NO: 117975 - DNA, 75 bp, synthetic construct
  source 1..75: mol_type = other DNA
tacgatgccgaacaaattgtccgtgacagcgggcgcgcggcgggagaggaaccgctgttcggtccggtgctcaat

SEQ ID NO: 117976 - DNA, 75 bp, synthetic construct
  source 1..75: mol_type = other DNA
atcggcaccggtagcgggttgctggcgttgatgctggcgcagcgcaccgacgatagcgtgatgattgatgccgtt

SEQ ID NO: 117977 - DNA, 75 bp, synthetic construct
  source 1..75: mol_type = other DNA
cgtctggggcggcacgcggcccgatcaaggcttcgactgtagcgggttagttttttatgcctacaacaagatcct

SEQ ID NO: 117978 - DNA, 75 bp, synthetic construct
  source 1..75: mol_type = other DNA
caaaaccgtgcgcgtttattaaaacagtaccaaacccatctgaaaaagcaggccagctatattgtggaaggcaat

SEQ ID NO: 117979 - DNA, 75 bp, synthetic construct
  source 1..75: mol_type = other DNA
ctcaaggcgagtgacagacgctggcaggcgctggtggagaataatcatttcttaagcagcgaccatctgcataac

SEQ ID NO: 117980 - DNA, 75 bp, synthetic construct
  source 1..75: mol_type = other DNA
atcggcgcgggtagcgggttgctggcattaatgctggcgcagcgaaccgatgacagcgtgatgattgatgccgtt

SEQ ID NO: 117981 - DNA, 75 bp, synthetic construct
  source 1..75: mol_type = other DNA
gcaggctaattccacacttcccgatgacagtcagcatgacggacaatcggtgcgttttctctataacaaatcgct

SEQ ID NO: 117982 - DNA, 75 bp, synthetic construct
  source 1..75: mol_type = other DNA
gcgccggggagatttgctgtttttccatatccacagccgcgagattgccgaccatatgggggtgtatctgggcga

SEQ ID NO: 117983 - DNA, 75 bp, synthetic construct
  source 1..75: mol_type = other DNA
tctccgacggcaaaattgaagcccagctcaatgacgtaattgccgatctcgacgcggtacgcgccgaagcgcgtc

SEQ ID NO: 117984 - DNA, 75 bp, synthetic construct
  source 1..75: mol_type = other DNA
gcgcagcagaacttaagcgagatcaccggggaatttacttcagacgacctactggggcggattttctccagcttc

SEQ ID NO: 117985 - DNA, 75 bp, synthetic construct
  source 1..75: mol_type = other DNA
ctcctatcggagacaccaatgagcagacacaatttattgattattttaatctgttctacagtaagcgtggtcagg

SEQ ID NO: 117986 - DNA, 75 bp, synthetic construct
  source 1..75: mol_type = other DNA
ctacagcaaatccttctaccagacaggaaccaatatccaggtcgcaggatatcgctattctacgcaaggttttta

SEQ ID NO: 117987 - DNA, 75 bp, synthetic construct
  source 1..75: mol_type = other DNA
ggattagcgcaagcagatacgttgcggatgcgttttacggaagataacggcgaagtctggcagtgggtcgatgat

SEQ ID NO: 117988 - DNA, 75 bp, synthetic construct
  source 1..75: mol_type = other DNA
atcacttcatgccaaacttggatataaaggaaatatgcagaacttgcaggcaggggcattcgctgcaacagcaac

SEQ ID NO: 117989 - DNA, 75 bp, synthetic construct
  source 1..75: mol_type = other DNA
atgcaaaaccgtgcgcgtttattaaaacagtaccaaacccatctgaaaaaacaggccagctatattgtggaaggc

SEQ ID NO: 117990 - DNA, 75 bp, synthetic construct
  source 1..75: mol_type = other DNA
ctgaacgcctgaaaatgctgattgcccagttcgccgcggatccggcgctgttgtgcggcgatgtcgatattatgc

SEQ ID NO: 117991 - DNA, 75 bp, synthetic construct
  source 1..75: mol_type = other DNA
gctgttaaaacgcattctgactattcccggcctgcggattgcccgtcctggtgagttttccgaacgcgcatttct

SEQ ID NO: 117992 - DNA, 75 bp, synthetic construct
  source 1..75: mol_type = other DNA
ccttatgagcaaattctcgcgggccgtgagtttgggataaatcacgatgctgattttctggcgatgaaccctaac

SEQ ID NO: 117993 - DNA, 75 bp, synthetic construct
  source 1..75: mol_type = other DNA
tttaatcatcagtaacccgccctattatcagcagggagtagagtgcgcaacaccacagcgggagcaggcgcgcta

SEQ ID NO: 117994 - DNA, 75 bp, synthetic construct
  source 1..75: mol_type = other DNA
caggaacagcaccagccagaaagattactctttacgcaaaacttggatataaaggaaatatgcagagtttgaggg

SEQ ID NO: 117995 - DNA, 75 bp, synthetic construct
  source 1..75: mol_type = other DNA
atgacactgaaaatacggaaatgcgcacctgtgcgctaatcccggtgactgatgtttcccgtgagggtgcactgg

SEQ ID NO: 117996 - DNA, 75 bp, synthetic construct
  source 1..75: mol_type = other DNA
tattttagttcagaatacatcaaacacatcttctgatggggtacttgtttatctttataacagtaatgcaggaaa

SEQ ID NO: 117997 - DNA, 75 bp, synthetic construct
  source 1..75: mol_type = other DNA
gttgcgttatgcaaagaacaaggtttattggtggggctgggcctccgcgtcaccgctgcatatgctggaaaaagt

SEQ ID NO: 117998 - DNA, 75 bp, synthetic construct
  source 1..75: mol_type = other DNA
taccactacgcttgatcacccatcgttgctgacctgtgcggcggagtgcattaccgaagagggatttttctgcgt

SEQ ID NO: 117999 - DNA, 75 bp, synthetic construct
  source 1..75: mol_type = other DNA
cgcaggaaaatatcaaccagtccccgtgggcagagcggattaacgtccatacggcggatattcagcagtggatca

SEQ ID NO: 118000 - DNA, 75 bp, synthetic construct
  source 1..75: mol_type = other DNA
acgccagctcggaacaggcggcgcgctcagcgctaaactcgctgcaaggcgcgttctccgcacgggttaaccatc

SEQ ID NO: 118001 - DNA, 75 bp, synthetic construct
  source 1..75: mol_type = other DNA
acaggttttctgtagcggtgaagcgttaccggccgatttatgccgcgaatggcaacagttaaccggcgtgccgtt

SEQ ID NO: 118002 - DNA, 75 bp, synthetic construct
  source 1..75: mol_type = other DNA
gcaaatattgttcgtctgcttcctttgctttgtaccagtgaagtacccacagagctgcaacgtgccatgacaaaa

SEQ ID NO: 118003 - DNA, 75 bp, synthetic construct
  source 1..75: mol_type = other DNA
tgatggcgtgataatcgatgcggttgaaattgaaaatgaagcggctgcccaggcgcaggaaaatatcgcgcagtc

SEQ ID NO: 118004 - DNA, 75 bp, synthetic construct
  source 1..75: mol_type = other DNA
gggggtaacagccattatgcatatttaaacctacagagtgggttaaatattggtgcgtggcgtttacgcgacaat

SEQ ID NO: 118005 - DNA, 75 bp, synthetic construct
  source 1..75: mol_type = other DNA
tctccatcctgaaccatgccatgaacttttacctgcagagtaaacttagtgggacggcggtgacactggctacgt

SEQ ID NO: 118006 - DNA, 75 bp, synthetic construct
  source 1..75: mol_type = other DNA
ggcacgccgcatatcgcaggctataccctggagggtaaagcgcgtggcacgacgcaagtgtttgaagcctatagc

SEQ ID NO: 118007 - DNA, 75 bp, synthetic construct
  source 1..75: mol_type = other DNA
aaagatgctggtaagacacaagccgaaatcgcgtatgcaatggaagcagtagcaagtaatggatatcgattagct

SEQ ID NO: 118008 - DNA, 75 bp, synthetic construct
  source 1..75: mol_type = other DNA
actgattcgtaacctgaagccgggagcgatcttgattaacgcctgccgtggcgcagtcgttgataatactgccct

SEQ ID NO: 118009 - DNA, 75 bp, synthetic construct
  source 1..75: mol_type = other DNA
agttgcgaaggaacaaggcgttaaaccttgtcgtccgttatctacagcggtagtttccgcacagattgcgatcac

SEQ ID NO: 118010 - DNA, 75 bp, synthetic construct
  source 1..75: mol_type = other DNA
ccctgccggggatcagcatttatgcggacgataaagccatacaggatgccagacaatcacccagccctgcagcgc

SEQ ID NO: 118011 - DNA, 75 bp, synthetic construct
  source 1..75: mol_type = other DNA
gagtatgaggaaaagaagattcttcttctagggaatttttatgcaaatatggtctactctccgggagtgagtaca

SEQ ID NO: 118012 - DNA, 75 bp, synthetic construct
  source 1..75: mol_type = other DNA
aattcaaacgtgaatccgctcagttggttgtcgatcaaaattacactgtttgtgacgctgctaaggctatggatg

SEQ ID NO: 118013 - DNA, 75 bp, synthetic construct
  source 1..75: mol_type = other DNA
tggtaaatcagtacgattaaatagtgcttcaacaatagaaaacattgatgaattagtcgatgatataaaagctgc

SEQ ID NO: 118014 - DNA, 75 bp, synthetic construct
  source 1..75: mol_type = other DNA
accagaattacacaacatccgttgatgagcgatcttatctactatcctgcaaagaagggagatgataagcctgaa

SEQ ID NO: 118015 - DNA, 75 bp, synthetic construct
  source 1..75: mol_type = other DNA
gtattcgatactctatcccgtggtgtattgggtgttgcaggtgttgctactagtgctggtattgcggttgcagcc

SEQ ID NO: 118016 - DNA, 75 bp, synthetic construct
  source 1..75: mol_type = other DNA
gacagggccgacttttcggcctttatggatagcactggctattatgatgacgagtcgatgcaggatgatattctt

SEQ ID NO: 118017 - DNA, 75 bp, synthetic construct
  source 1..75: mol_type = other DNA
ggaactgttgaagaaagtggatatcggcacgccgcatattgctggttataccctggaaggaaaagcgcgcggtac

SEQ ID NO: 118018 - DNA, 75 bp, synthetic construct
  source 1..75: mol_type = other DNA
gacagggccgacttttcggcctttatggagagtaatggctattatgatgacgagtcgatgcaggatgatattctt

SEQ ID NO: 118019 - DNA, 75 bp, synthetic construct
  source 1..75: mol_type = other DNA
gacagggccgacttttcggcctttatggataggagtggctattatgatgacgagtcgatgcaggatgatattctt

SEQ ID NO: 118020 - DNA, 75 bp, synthetic construct
  source 1..75: mol_type = other DNA
ccgctaatttgcgcaagcaaaatcagaatgaccaggcagcaaatgattctgattttattggcgcaggaatgggcg

SEQ ID NO: 118021 - DNA, 75 bp, synthetic construct
  source 1..75: mol_type = other DNA
ttaagttcaccgccaaatccctctcctgggcggtttctggtttttctaattcggttatctggctgattttcgccg

SEQ ID NO: 118022 - DNA, 75 bp, synthetic construct
  source 1..75: mol_type = other DNA
atcagctggcacctgacccgccagcagcatcgtctggtgaaagtactgaccgcgctgctggttcccctgctgccc

SEQ ID NO: 118023 - DNA, 75 bp, synthetic construct
  source 1..75: mol_type = other DNA
acaggacgaccctggcctttgattgatggcttacggcatgtatgtcctgaccggaacgaatacgacccgttccga

SEQ ID NO: 118024 - DNA, 75 bp, synthetic construct
  source 1..75: mol_type = other DNA
cgcagggcggtcaggtcgcttttatgcgcctgaaaatgttcctgcaaataaataatctgatttcttattacgtta

SEQ ID NO: 118025 - DNA, 75 bp, synthetic construct
  source 1..75: mol_type = other DNA
gtaaaattatcgtcaacaacctggtgaggtgggaccggtgggggtttcatcttatcaccgggcaacagactgacc

SEQ ID NO: 118026 - DNA, 75 bp, synthetic construct
  source 1..75: mol_type = other DNA
cattctgtgaatgatcctgaaacgttattacgggacttcattgcttcttcaatcactaacccggcgttgaaacag

SEQ ID NO: 118027 - DNA, 75 bp, synthetic construct
  source 1..75: mol_type = other DNA
ggtgggcgtgatagcactcttaatcgggtaacgttggggcgttatcctgatatgagtttgaaagatgcccgtaaa

SEQ ID NO: 118028 - DNA, 75 bp, synthetic construct
  source 1..75: mol_type = other DNA
gaagaagcgaattactatctccggttgttcgattcactgacgtatcggcagctctgtattatgagtttgatcatg

SEQ ID NO: 118029 - DNA, 75 bp, synthetic construct
  source 1..75: mol_type = other DNA
tatacgcagtcctttaaatgtcattatcacgtctgccttttttttaacaaagacgcctattaccacctgggagac

SEQ ID NO: 118030 - DNA, 75 bp, synthetic construct
  source 1..75: mol_type = other DNA
cccacgatggtatcgacagcgttcctgaaactgggacttggctcttgcagaaaggtgagcgagtcgttacatcgc

SEQ ID NO: 118031 - DNA, 75 bp, synthetic construct
  source 1..75: mol_type = other DNA
caaaaaagctaatgaagaaaacgcgaaggtagcggcgttcgtggcaaatctgcaggagcagaacgagaatgcacg

SEQ ID NO: 118032 - DNA, 75 bp, synthetic construct
  source 1..75: mol_type = other DNA
gcgatatctaatcagtccgtcagccaatttatgttgaatagtgcctcgcagcgggctgcagaagtgattgaacag

SEQ ID NO: 118033 - DNA, 75 bp, synthetic construct
  source 1..75: mol_type = other DNA
atgctgaaattcatgctggataccaatatctgtattttcactattaagaataaaccagtacatgtcagggatcgc

SEQ ID NO: 118034 - DNA, 75 bp, synthetic construct
  source 1..75: mol_type = other DNA
atgcaattattcctccccattattctaaataccaacgatgtcagtgaggttataatgaaaaggaaaaatcaacat

SEQ ID NO: 118035 - DNA, 75 bp, synthetic construct
  source 1..75: mol_type = other DNA
gacagggccgacttttcggcctttatggatagaaatggctattatgatgacgagtcgatgcaggatgatattctt

SEQ ID NO: 118036 - DNA, 75 bp, synthetic construct
  source 1..75: mol_type = other DNA
acacagaaaaacaaataccatcagattatgtgaattcaatacttaaccaaaactatgagacaataaagaactgca

SEQ ID NO: 118037 - DNA, 75 bp, synthetic construct
  source 1..75: mol_type = other DNA
ggatctcggcgtgactaccgtggaccacgctgatatttatggtggatatcagtgtgaagcggcgtttggcgaggc

SEQ ID NO: 118038 - DNA, 75 bp, synthetic construct
  source 1..75: mol_type = other DNA
gacaactataacaaggctctgtttgacgccctgacccacgcgggtgtgtgggaagacgacagtcaggtgaaaaga

SEQ ID NO: 118039 - DNA, 75 bp, synthetic construct
  source 1..75: mol_type = other DNA
tggcagtgcgatagtcactgcgcctgcgagagccgcaacgaatgtgctggcacaatttgccggagagaagtttcg

SEQ ID NO: 118040 - DNA, 75 bp, synthetic construct
  source 1..75: mol_type = other DNA
ggatggcacgctcgaccaactgcaacaactgcgtattcgcccgatggcctggtcttgtcttggcggtggtcgtct

SEQ ID NO: 118041 - DNA, 75 bp, synthetic construct
  source 1..75: mol_type = other DNA
atgaagctgatcatgcctttcccacccagcgtgaacacgtactggcgacaccccaacaaaggggagtttgctggt

SEQ ID NO: 118042 - DNA, 75 bp, synthetic construct
  source 1..75: mol_type = other DNA
gcaatggtttatcttccgtgttcaggcaatactttattcctctcacgtgttctgatttttgtttctattgtgtcc

SEQ ID NO: 118043 - DNA, 75 bp, synthetic construct
  source 1..75: mol_type = other DNA
atgctggtggaatggggacccgtagtgccgaaaggtcgggtagagataacgatcagcagatatgaaccggcgggt

SEQ ID NO: 118044 - DNA, 75 bp, synthetic construct
  source 1..75: mol_type = other DNA
cagccgccagattgagatctacccaattgccggaacacgcccacgcggtcgtcgcgccgatggctcgctggacag

SEQ ID NO: 118045 - DNA, 75 bp, synthetic construct
  source 1..75: mol_type = other DNA
atgaaagatttaacactcaaatttgccgacagggccggcttttcggcctttatggagagtactggctattatgat

SEQ ID NO: 118046 - DNA, 75 bp, synthetic construct
  source 1..75: mol_type = other DNA
gacagggccgacttttcggcctttatggaaagtagtggctattatgatgacgagtcgatgcaggatgatattctt

SEQ ID NO: 118047 - DNA, 75 bp, synthetic construct
  source 1..75: mol_type = other DNA
tgcccgctggaaaaaatggttagtgaggcactggtttttgacgatgaaaacttcacccatacaccacaaggcaat

SEQ ID NO: 118048 - DNA, 75 bp, synthetic construct
  source 1..75: mol_type = other DNA
gcggtatgggcaggttttcgtcgcccgcggggtaatctggtggcccagtcgctggcggcgcacggtagcaatcca

SEQ ID NO: 118049 - DNA, 75 bp, synthetic construct
  source 1..75: mol_type = other DNA
atgaagctgatcctgcctttccctcccagcgtgaacacgtactggcgacaccccaacaaaggggtgtttgctggt

SEQ ID NO: 118050 - DNA, 75 bp, synthetic construct
  source 1..75: mol_type = other DNA
cattagtatgaccataatgaagatacaagaggctctagcgggtgcgttggctctaggattcccgcagaacatccc

SEQ ID NO: 118051 - DNA, 75 bp, synthetic construct
  source 1..75: mol_type = other DNA
gaaactatgcaactactagaaggtactgaatctgcatttacagaaattggtaacggtatggcggcggcttttggt

SEQ ID NO: 118052 - DNA, 75 bp, synthetic construct
  source 1..75: mol_type = other DNA
tgatcgagggatttgtttcccgccttgatgttctggattacgacgccgctgcagccacacataccggccagataa

SEQ ID NO: 118053 - DNA, 75 bp, synthetic construct
  source 1..75: mol_type = other DNA
gggcagtgcgatagtcactgcgcctgcgagagccgcaacggatgtgctggcccagtttgccggagataagtttcg

SEQ ID NO: 118054 - DNA, 75 bp, synthetic construct
  source 1..75: mol_type = other DNA
gttacagcaggtgcagcaggacgtttaaaaattattaatgatatgttgggctttagtgatccaaatcagactatc

SEQ ID NO: 118055 - DNA, 75 bp, synthetic construct
  source 1..75: mol_type = other DNA
ataaagaacgtgatgcactattaaagcagaacgaactactaattcaggataaggaatcattcgaaaaacgtaaag

SEQ ID NO: 118056 - DNA, 75 bp, synthetic construct
  source 1..75: mol_type = other DNA
cgtgaagcgggtaaaactcaggccgagataacttacgcaatggaagctgtagcgagtaatggatctagactagct

SEQ ID NO: 118057 - DNA, 75 bp, synthetic construct
  source 1..75: mol_type = other DNA
aaattttgcgctcgctttccgcatttacaccgttttgaactgcaacaaccgatccgctgggcgcagggatgcccg

SEQ ID NO: 118058 - DNA, 75 bp, synthetic construct
  source 1..75: mol_type = other DNA
cattaacagcgcaaatgaaacgcgaagggattcgccgcctgttggtgttgagcggggatgcgtgctggtgctgtg

SEQ ID NO: 118059 - DNA, 75 bp, synthetic construct
  source 1..75: mol_type = other DNA
gcgcgtgcgagcagctgttgaagcagaaaccctgaaaatgactcgccaacaatggttccgtatccgtaaagcggc

SEQ ID NO: 118060 - DNA, 75 bp, synthetic construct
  source 1..75: mol_type = other DNA
tcgccacagccagctactgaaaatcactgtacgccatccgcgttgcaaacgttgctcggacgggagttccttcat

SEQ ID NO: 118061 - DNA, 75 bp, synthetic construct
  source 1..75: mol_type = other DNA
cttacctggcgactggctgtggatttcgccgcagccagatgctgaaaaccactgttctccctcggcactacaaac

SEQ ID NO: 118062 - DNA, 75 bp, synthetic construct
  source 1..75: mol_type = other DNA
gccggattgcagtccatccggcgcgtcagcgcgaaggcgttgggcaacagctcattgccagcgctttgcaatata

SEQ ID NO: 118063 - DNA, 75 bp, synthetic construct
  source 1..75: mol_type = other DNA
cagtttccggagcgtaatctcgcgattatcgaaggatttatttcgcgccttgacgtgctggattacgactgcgct

SEQ ID NO: 118064 - DNA, 75 bp, synthetic construct
  source 1..75: mol_type = other DNA
gaaagctgaaagcggagggggggtgcgagggtgaacggaaaggcgaaacctttaactgctggcttgccgtcgaag

SEQ ID NO: 118065 - DNA, 75 bp, synthetic construct
  source 1..75: mol_type = other DNA
atgaccattgcactggaacttcaacagcttaaaaaaacctatccaggcggcgttcaggcgcttcgtggaatcgat

SEQ ID NO: 118066 - DNA, 75 bp, synthetic construct
  source 1..75: mol_type = other DNA
cgccgggacgcctgattcgtgatcccgacacaatgcgcccgctggcacaggagggggaggaaaagcccttcacgc

SEQ ID NO: 118067 - DNA, 75 bp, synthetic construct
  source 1..75: mol_type = other DNA
tgagcacatttgaacaactgcaccagaataacgatgaagtgtttgaccggggtgtgatcaacgtcttcagagggc

SEQ ID NO: 118068 - DNA, 75 bp, synthetic construct
  source 1..75: mol_type = other DNA
cgcgtatgttatctggcgggatgaagcgccgtttaatgattgcccgtgcgttaatgcatgaacctaaactactga

SEQ ID NO: 118069 - DNA, 75 bp, synthetic construct
  source 1..75: mol_type = other DNA
cgtctgcaacgactgatgtcgccggaaaacccgcgggagcggcagcagaaaaacctgcggctgaaaaaaccgcag

SEQ ID NO: 118070 - DNA, 75 bp, synthetic construct
  source 1..75: mol_type = other DNA
tgtgcgaagccagcgccgtcagcggcgatgaacaggaagttcgcgacattctgataaacacgctggaaccttgcg

SEQ ID NO: 118071 - DNA, 75 bp, synthetic construct
  source 1..75: mol_type = other DNA
tgagcacatttgaacaactgcaccagaataacgatgaagtgtttgaccggggagtgatcaacgtcttcatagggc

SEQ ID NO: 118072 - DNA, 75 bp, synthetic construct
  source 1..75: mol_type = other DNA
cttggagggcgtgagagttcagttattcgtcttactctagggaattaccctgatattagtctgaaagatgccagg

SEQ ID NO: 118073 - DNA, 75 bp, synthetic construct
  source 1..75: mol_type = other DNA
tgagcacatttgaacaactgcaccagaataacgatgatgtgtttgaccggggagtgatcaacgtcttcaaagggc

SEQ ID NO: 118074 - DNA, 75 bp, synthetic construct
  source 1..75: mol_type = other DNA
gtcttctcgctatggggcctaaccggcagcggcgtgtctggttcttctatgacgaactggcgtcgctgcataaat

SEQ ID NO: 118075 - DNA, 75 bp, synthetic construct
  source 1..75: mol_type = other DNA
gccgggttgtggtaattttatgtactaatagactatccgtccttgaccctgcacttcgtaggcgagcagcgattg

SEQ ID NO: 118076 - DNA, 75 bp, synthetic construct
  source 1..75: mol_type = other DNA
cggcctccgtatttgcagcaatgctggcgcatcgcactgctggcgggtgtgcctcgctgagtgaatacaccgctg

SEQ ID NO: 118077 - DNA, 75 bp, synthetic construct
  source 1..75: mol_type = other DNA
gcgctggcagcggagaatgaggcaatgcatgaaactattgaagccgttcgcagtgttgcggataactccagtgga

SEQ ID NO: 118078 - DNA, 75 bp, synthetic construct
  source 1..75: mol_type = other DNA
cctgagaaactggatgcgttgaataaatggtatgacagacttgatattttatcaggtggattcactaacattgtt

SEQ ID NO: 118079 - DNA, 75 bp, synthetic construct
  source 1..75: mol_type = other DNA
tcagcggcaaaccgatccccgacaacagggaaaacataactattcatctggacgatcatatccggtctcttcagg

SEQ ID NO: 118080 - DNA, 75 bp, synthetic construct
  source 1..75: mol_type = other DNA
ttacgggcgctggcggcggcgacgctttccaacctgatgagcgcgaccattgccgggttctttattggtttagct

SEQ ID NO: 118081 - DNA, 75 bp, synthetic construct
  source 1..75: mol_type = other DNA
tggcgggcgctacaacgtgatgggcggcgggcgtccggttgttgcgctgtgcctgccaacccgctatctgcacgc

SEQ ID NO: 118082 - DNA, 75 bp, synthetic construct
  source 1..75: mol_type = other DNA
ccactatgaaaaccggtgcgacggatggcgggcgctacaacgtgatgggtggcggtcgcccggttgttgcgctgt

SEQ ID NO: 118083 - DNA, 75 bp, synthetic construct
  source 1..75: mol_type = other DNA
acttctggtcttatctggatggcggtgctgatggtacaaatcgctcgtcgcggcctgaccagcactaaccgtacc

SEQ ID NO: 118084 - DNA, 75 bp, synthetic construct
  source 1..75: mol_type = other DNA
tcactgctggcgtattacgactccccggcctccgtatttgcagcaatgctggcgcatcgcactgctggcgggtgt

SEQ ID NO: 118085 - DNA, 75 bp, synthetic construct
  source 1..75: mol_type = other DNA
atcttttgtcgcagtcaccactattttcctcgggcaaaatgagatcccggcgatcgttaaaccttttattgatcg

SEQ ID NO: 118086 - DNA, 75 bp, synthetic construct
  source 1..75: mol_type = other DNA
tgagcacgtctgaacaactgcaccgtaacagggatgaaatggctgaacggggcgtcatcaacctcttcagaggac

SEQ ID NO: 118087 - DNA, 75 bp, synthetic construct
  source 1..75: mol_type = other DNA
cactggagtacgataattttccggaaatcagcgaagcgaacattctgagcacatttaaacaactgcaccagaaca

SEQ ID NO: 118088 - DNA, 75 bp, synthetic construct
  source 1..75: mol_type = other DNA
atgttccgggcattgataacattaaatacccgctgaaactgggcaacgggccggggctgatgctgtttgacaagc

SEQ ID NO: 118089 - DNA, 75 bp, synthetic construct
  source 1..75: mol_type = other DNA
cgcacacatcacgttcaggaaaccagaactggttgacaggctaaatgacataattgccaggcactatccaaatgt

SEQ ID NO: 118090 - DNA, 75 bp, synthetic construct
  source 1..75: mol_type = other DNA
atcctcaacaacctggtgaaatgggactggtggggatttggtctgaaccatggcccacaggccgggcagcttgcc

SEQ ID NO: 118091 - DNA, 75 bp, synthetic construct
  source 1..75: mol_type = other DNA
acggcggagcctgccccggctgccacaacaggtaataccggcgaggctgcaaaaccagcgggagcggcagcagaa

SEQ ID NO: 118092 - DNA, 75 bp, synthetic construct
  source 1..75: mol_type = other DNA
gcctcgctgagtgaatacaccactgagtttaaccgtctttctgccctcttctcgcaggaatggcaacgcgtgaca

SEQ ID NO: 118093 - DNA, 75 bp, synthetic construct
  source 1..75: mol_type = other DNA
gcactgcctgacaccacacggcgaatcactgctggcgtattacgactccccggcctccgtattcgcggcaatgct

SEQ ID NO: 118094 - DNA, 75 bp, synthetic construct
  source 1..75: mol_type = other DNA
tgcgatgggcgaaggatggagcactaacccaacaagaggtgcagcaagtaatggatttgctgcataaactactta

SEQ ID NO: 118095 - DNA, 75 bp, synthetic construct
  source 1..75: mol_type = other DNA
tggtcacagtttattgtcgacagcaacggcatcgcacgcagcgcctggcagttggatgaagagagttccgccatt

SEQ ID NO: 118096 - DNA, 75 bp, synthetic construct
  source 1..75: mol_type = other DNA
tgacgatctcgtgccagagatgacattacaggctaaccatgaactgttgaccttgacgcttccgcaaggttggct

SEQ ID NO: 118097 - DNA, 75 bp, synthetic construct
  source 1..75: mol_type = other DNA
ccgcactggactgggcgatgaaacaggattttcgctgcggctgctggctcatggagaaaccggaaaccgcaatga

SEQ ID NO: 118098 - DNA, 75 bp, synthetic construct
  source 1..75: mol_type = other DNA
acaggcctgctgctgggagaagagcgcacccggcaagctgtatctttgaaagggcgacggctttttaaagatttc

SEQ ID NO: 118099 - DNA, 75 bp, synthetic construct
  source 1..75: mol_type = other DNA
ttggtccggctgcacaacaaggcctgcctgcgcacggttttgcccgcaacctgccgtggacgctgaaatcacatc

SEQ ID NO: 118100 - DNA, 75 bp, synthetic construct
  source 1..75: mol_type = other DNA
atgtctgaaatcacagtctcccgtccggaagtggtcaacgagaatacggacgttatctgctccacctcagtcagg

SEQ ID NO: 118101 - DNA, 75 bp, synthetic construct
  source 1..75: mol_type = other DNA
agatacagaatatgtccatgcacggtactgtatcgaccggtaagtccactctgatgcgcaagattatgaagcaac

SEQ ID NO: 118102 - DNA, 75 bp, synthetic construct
  source 1..75: mol_type = other DNA
ccatcatttttgccagccgtcgccgtgacgatttagtgccgaagattcaattacaggccagccatgaacagttga

SEQ ID NO: 118103 - DNA, 75 bp, synthetic construct
  source 1..75: mol_type = other DNA
tggaacgcgcattagtattcccgagtggtctggcgatcctgatagccatttttaccgaactgaatattcagtgta

SEQ ID NO: 118104 - DNA, 75 bp, synthetic construct
  source 1..75: mol_type = other DNA
aacaccgacgacgcaattccgggttccggcatgtttgtgcgcagcagtctggagagtaataaaaagctttatccc

SEQ ID NO: 118105 - DNA, 75 bp, synthetic construct
  source 1..75: mol_type = other DNA
ggaactgagcgggatattgaacaggatttacctaaggacgttcctccgggtctgaacagcgatggtgaggtggtg

SEQ ID NO: 118106 - DNA, 75 bp, synthetic construct
  source 1..75: mol_type = other DNA
cacagctggaagaaatttacggcccgaaagcggcggcggcgctgtttgacctgctgaataccaaattcttcttcc

SEQ ID NO: 118107 - DNA, 75 bp, synthetic construct
  source 1..75: mol_type = other DNA
ggtgcacaaaccacctctttgttcagcctgtcgatgggctgcgtcacctggctggaacgctattttgccgatcgt

SEQ ID NO: 118108 - DNA, 75 bp, synthetic construct
  source 1..75: mol_type = other DNA
ccgttcacgcaattggtaagacccgcagtatcgagcgtatcaacaaagcgctggattttattgctgaacgcgaaa

SEQ ID NO: 118109 - DNA, 75 bp, synthetic construct
  source 1..75: mol_type = other DNA
tgagcacatttgaacaactgcaccagaataacgatgatgtgtttgaccggggggtgatcaacgtcttcagagggc

SEQ ID NO: 118110 - DNA, 75 bp, synthetic construct
  source 1..75: mol_type = other DNA
aacggggttaaacaatataggggtaatgcctcatattgtcgaatcattactaggtcatgtctataatgctggctc

SEQ ID NO: 118111 - DNA, 75 bp, synthetic construct
  source 1..75: mol_type = other DNA
tgagcacatttgaacaactgcaccagaataacgatgacgtgtttgaccggggcgtgatcaacgtcttcatagggc

SEQ ID NO: 118112 - DNA, 75 bp, synthetic construct
  source 1..75: mol_type = other DNA
tgagcacatttgaacaactgcaccagaataacgatgatgtgtttgaccggggcgtgatcaacgtcttcacagggc

SEQ ID NO: 118113 - DNA, 75 bp, synthetic construct
  source 1..75: mol_type = other DNA
tttattagcccggaagccaattttgcctgctggggcgaagataaagtagtcggaaaggcgctggataaccgcatc

SEQ ID NO: 118114 - DNA, 75 bp, synthetic construct
  source 1..75: mol_type = other DNA
ttcacatcagacccgcgatatgacccgcagggaagaggtcaacatcaaccatgtgacagaaaaaacgcgtgattt

SEQ ID NO: 118115 - DNA, 75 bp, synthetic construct
  source 1..75: mol_type = other DNA
tgagcacatttgaacaactgcaccagaataacgatgatgtgtttgaccggggtgtgatcaacgtcttcatagggc

SEQ ID NO: 118116 - DNA, 75 bp, synthetic construct
  source 1..75: mol_type = other DNA
agcagctacaccagaataaggatgaagtgtttgagcgaggagtgatcaacctcttcagagggttgagctggaatt

SEQ ID NO: 118117 - DNA, 75 bp, synthetic construct
  source 1..75: mol_type = other DNA
tctaccggagggactgaacgggatatcgaacaggatttaccacaggatattcccccgggcctgaacagcgacggt

SEQ ID NO: 118118 - DNA, 75 bp, synthetic construct
  source 1..75: mol_type = other DNA
ggtgcgtctgggctggtcccacggcgatcaggaaatcttcactcgtgaagagatgatcaaatacttcactttgaa

SEQ ID NO: 118119 - DNA, 75 bp, synthetic construct
  source 1..75: mol_type = other DNA
tacaataaattcctgcgcactctgctggctattcagcttgatcaactgagaacgtttcttgccggcacgcccgct

SEQ ID NO: 118120 - DNA, 75 bp, synthetic construct
  source 1..75: mol_type = other DNA
tgagcacatttgaacaactgcaccagaataacgatgaggtgtttgaccggggtgtgatcaacgtcttcaaagggc

SEQ ID NO: 118121 - DNA, 75 bp, synthetic construct
  source 1..75: mol_type = other DNA
tgagcacatttgaacaactgcaccagaataacgatgaggtgtttgaccggggggtgatcaacgtcttcatagggc

SEQ ID NO: 118122 - DNA, 75 bp, synthetic construct
  source 1..75: mol_type = other DNA
tcccgtccggaagtggtcaacgggcatacggacgttatctgctcaaccagtatccgccacattctggctgtacga

SEQ ID NO: 118123 - DNA, 75 bp, synthetic construct
  source 1..75: mol_type = other DNA
gattgtcttttttataaaggagatatccttgacaaaaaactcttgctaaaaatatttgatgaaaataatatcact

SEQ ID NO: 118124 - DNA, 75 bp, synthetic construct
  source 1..75: mol_type = other DNA
agtttaaacgcgaatccgctcaactggtggttgaccagagatacacggtggcagatgccgccaaagctatggatg

SEQ ID NO: 118125 - DNA, 75 bp, synthetic construct
  source 1..75: mol_type = other DNA
ctgtacgaaattatcgatattgtttcccttgaacatggtgttacgttagcgaaaacagaagctgaacacgtttac

SEQ ID NO: 118126 - DNA, 75 bp, synthetic construct
  source 1..75: mol_type = other DNA
gcgatgtcagatgcgaccgctgatgaacgtttaacggcggggatgcaggtgtttctggagtgcctgacaaaatcg

SEQ ID NO: 118127 - DNA, 75 bp, synthetic construct
  source 1..75: mol_type = other DNA
ttgaatttgccaaccttggctttattccgctctcttattataagaatcgcgattatgcctgcttcttctcggcaa

SEQ ID NO: 118128 - DNA, 75 bp, synthetic construct
  source 1..75: mol_type = other DNA
ggccagtgttatgactcgtagttgcgagggatactgcggggcttctgcggcaggcgcaatggatggcctatttaa

SEQ ID NO: 118129 - DNA, 75 bp, synthetic construct
  source 1..75: mol_type = other DNA
cggtggtgggctttctcatcaccttcatgagctttgtcggcggtatggccaagtggctgttcagtaaagcggagg

SEQ ID NO: 118130 - DNA, 75 bp, synthetic construct
  source 1..75: mol_type = other DNA
aaaataaagttttatgaatgtgatatttgtgatgacgaatcaattaatacaatatttaataataatgatttttat

SEQ ID NO: 118131 - DNA, 75 bp, synthetic construct
  source 1..75: mol_type = other DNA
aaaacctggcgcggcaggctggcggggcgcacaagactgtccatgaccgtatcgccatggcagaacggttctgcg

SEQ ID NO: 118132 - DNA, 75 bp, synthetic construct
  source 1..75: mol_type = other DNA
gcgatggatttgggtcacggcgacgggcgctggcggtatgtggcgcaggtttacgggagaaaggatactgactga

SEQ ID NO: 118133 - DNA, 75 bp, synthetic construct
  source 1..75: mol_type = other DNA
ccattagtcactatctggcgcagggcttcagcaagaaagaaacgctggcaatggtggcgatggatctggggcatg

SEQ ID NO: 118134 - DNA, 75 bp, synthetic construct
  source 1..75: mol_type = other DNA
actgcgccaatgtgtgtggtatctaacggcccaaataacaaaatgcagcattctatgggcaagctgaatatgttg

SEQ ID NO: 118135 - DNA, 75 bp, synthetic construct
  source 1..75: mol_type = other DNA
agtttaaacgcgaatccgctcaactggtggttgaccagacatacaccgtggcagatgccgccaaagctatggatg

SEQ ID NO: 118136 - DNA, 75 bp, synthetic construct
  source 1..75: mol_type = other DNA
cgttattttaatcctgttggcgcacatccttccggaaaaattggagaagaccctaacggtattccaaataatttg

SEQ ID NO: 118137 - DNA, 75 bp, synthetic construct
  source 1..75: mol_type = other DNA
agatattttaaccctatcggtgctcactcatctggaaaaataggtgaagatcctaacggaattccgaataacttg

SEQ ID NO: 118138 - DNA, 75 bp, synthetic construct
  source 1..75: mol_type = other DNA
tgaagcgcatgccggcgacagcgtatatgcttccctgtttgaaaaaattaacctgagtccggtatctgccctgag

SEQ ID NO: 118139 - DNA, 75 bp, synthetic construct
  source 1..75: mol_type = other DNA
atgctgatgtctgtacagaaagaaaagaatgttgcagagagcgtggtatctgaagcgcatgctggtgacagcgta

SEQ ID NO: 118140 - DNA, 75 bp, synthetic construct
  source 1..75: mol_type = other DNA
gacaataccagccagtgtgttgcagtaattagtgaactgaaaaacggtaaggccagcgtgatgactcgtggttgc

SEQ ID NO: 118141 - DNA, 75 bp, synthetic construct
  source 1..75: mol_type = other DNA
aaaacagattgaatataagtcagtgtttgacaagttaattcaatccagcgaagtaaaaccactcgatccttcaag

SEQ ID NO: 118142 - DNA, 75 bp, synthetic construct
  source 1..75: mol_type = other DNA
ggcagtgaatggctccagacggaaaaagccagagagcatgacgctgatgttctctcctgtagtgataatccttcc

SEQ ID NO: 118143 - DNA, 75 bp, synthetic construct
  source 1..75: mol_type = other DNA
accattgattagcaatgaaagaaatgcctctattgaaataaaagtaacaaaagaaaatggaaaagtagtaaattc

SEQ ID NO: 118144 - DNA, 75 bp, synthetic construct
  source 1..75: mol_type = other DNA
gtgtcccatacatgccccacagagcaagacgctgaaataatttctttcagtatcattgagttaacacatggttcc

SEQ ID NO: 118145 - DNA, 75 bp, synthetic construct
  source 1..75: mol_type = other DNA
gaggattatatccgtggccagacagttatcgaggccaaactggacgcgctttacaacaaactggaagtggtacag

SEQ ID NO: 118146 - DNA, 75 bp, synthetic construct
  source 1..75: mol_type = other DNA
cgtgcagatccgtggtccacaggcaggtggggcagtggccgatctgcccatccatctttacgatctcggcaccgg

SEQ ID NO: 118147 - DNA, 75 bp, synthetic construct
  source 1..75: mol_type = other DNA
ctggttacattggtagccatacaatagtcgaattatctaaagcgggacatgagatagtagtaattgataattttt

SEQ ID NO: 118148 - DNA, 75 bp, synthetic construct
  source 1..75: mol_type = other DNA
gctatgtgaatgctcttcaggcctccaacattctggacaccattaaaaaggagaaatttaacctcacggccacca

SEQ ID NO: 118149 - DNA, 75 bp, synthetic construct
  source 1..75: mol_type = other DNA
ttggtctggtgatgccacgtgttctgggacgcctgccatatggtcctgataccgtacctgtccgcagctttaact

SEQ ID NO: 118150 - DNA, 75 bp, synthetic construct
  source 1..75: mol_type = other DNA
tcatcgaggccaaactggacgcgctttacaacaaactggaagtggtacagcagtaccgcaataccggaggtcaat

SEQ ID NO: 118151 - DNA, 75 bp, synthetic construct
  source 1..75: mol_type = other DNA
cacagcaaatagctgccggagaaagtcagaagcgtcgctgggtctggaatgacaataccagccagtgtgttgcag

SEQ ID NO: 118152 - DNA, 75 bp, synthetic construct
  source 1..75: mol_type = other DNA
tctcaatcccgatcaggcgcccccggaaatctctgagaccatgcgggagtttaacaacatgttcgaccgcctgga

SEQ ID NO: 118153 - DNA, 75 bp, synthetic construct
  source 1..75: mol_type = other DNA
caaactcagtacctggctgttctggttcaatatcggtctggtctttatttctgtttttctgggctggctgaccac

SEQ ID NO: 118154 - DNA, 75 bp, synthetic construct
  source 1..75: mol_type = other DNA
cacgcctgagcctgattttttctgcggtgatgcttacggtatggtggttatcaagttttatcctgattagcaccc

SEQ ID NO: 118155 - DNA, 75 bp, synthetic construct
  source 1..75: mol_type = other DNA
agtttaaacgcgaatccgctcaactggtggttgaccagaaatacacagtggcagatgccgccaaagctatggatg

SEQ ID NO: 118156 - DNA, 75 bp, synthetic construct
  source 1..75: mol_type = other DNA
atatagcatggcagacagaacgctcgaaagaagaagagtttaaatcaagcataaaaccagaagattttgtgaagt

SEQ ID NO: 118157 - DNA, 75 bp, synthetic construct
  source 1..75: mol_type = other DNA
gcggtgaaacccggctaaaagtggtatttggcaccaaaggcgggcgtccccgttatacgacagtcctggatactg

SEQ ID NO: 118158 - DNA, 75 bp, synthetic construct
  source 1..75: mol_type = other DNA
atgctcataaagatcattaaatctgcattcaatttttacatgctctgtgtgcagcctttacttggattatttctc

SEQ ID NO: 118159 - DNA, 75 bp, synthetic construct
  source 1..75: mol_type = other DNA
ccgggatgctgttcggcgcgcagctggcggcggggagcagtgatttccggttctctgagccggaaattcagcgca

SEQ ID NO: 118160 - DNA, 75 bp, synthetic construct
  source 1..75: mol_type = other DNA
ttgccggcggagcgtggtttcaggatacgctcaatggcgtggcatcgtttctcgacagccgtgcgggcgatgcgc

SEQ ID NO: 118161 - DNA, 75 bp, synthetic construct
  source 1..75: mol_type = other DNA
cattattaaaggctatgtctataccatcgcctatctgcagatgtggcccatcctgttctccatcctgaaccatgc

SEQ ID NO: 118162 - DNA, 75 bp, synthetic construct
  source 1..75: mol_type = other DNA
ttgccggcggggcgtggtttcaggatacgctcaatggcgtggcggcattttttaacagcagggccggagactcac

SEQ ID NO: 118163 - DNA, 75 bp, synthetic construct
  source 1..75: mol_type = other DNA
aaagcccgcgctgaggacgagggactggcggcggcgctggagatcgcgcggctgatgggactgcgttcgcaggag

SEQ ID NO: 118164 - DNA, 75 bp, synthetic construct
  source 1..75: mol_type = other DNA
ttttggcaatgattaccccacaaaagatggaagcggagttcgtgattatatccacgtaatggatttagctgaagg

SEQ ID NO: 118165 - DNA, 75 bp, synthetic construct
  source 1..75: mol_type = other DNA
cggtgaaacccggctgaaagtggtatttggcaccaaaggcgggcgtccacgttacacgacgctcctggacgctgg

SEQ ID NO: 118166 - DNA, 75 bp, synthetic construct
  source 1..75: mol_type = other DNA
gattcagcgaaaaagaggcgctggcaatgactgcgatggatttgggccacggcgacgggcgcgggagttatgtgg

SEQ ID NO: 118167 - DNA, 75 bp, synthetic construct
  source 1..75: mol_type = other DNA
gagccgatcgctgcgctgatttccgcttacgaatttgatgcgtctgcgcaggatgtcgcgctgctgcgtaatata

SEQ ID NO: 118168 - DNA, 75 bp, synthetic construct
  source 1..75: mol_type = other DNA
acgcctgggcgcaggacgatatccgccggtatctggcgcagggattcagcgaaaaagaagcgctggcgatggtgg

SEQ ID NO: 118169 - DNA, 75 bp, synthetic construct
  source 1..75: mol_type = other DNA
ctctacgaaattattgaaatcatcagtaaagaacagggcgtagaaatggtccgtgctgatgccgaacgcgtttat

SEQ ID NO: 118170 - DNA, 75 bp, synthetic construct
  source 1..75: mol_type = other DNA
agcttcattgggaagcaaagcgtacacttgaggatatgattactgatgcttggagatggcaaaataaaaacccga

SEQ ID NO: 118171 - DNA, 75 bp, synthetic construct
  source 1..75: mol_type = other DNA
gcgatcaggccgccattgatgccagttgcaaagagtgcgacgccctgtttgccctgctcgatgcggaactggcaa

SEQ ID NO: 118172 - DNA, 75 bp, synthetic construct
  source 1..75: mol_type = other DNA
agatgcggctggcgcaggggattcagaaacagacgctgcataacgaaacggcggctatccgtaaaatcctgacgc

SEQ ID NO: 118173 - DNA, 75 bp, synthetic construct
  source 1..75: mol_type = other DNA
ataatcttggtacaggggttggttattcagttcttgatgtgataaatacctttaaacgttgtactggaattgata

SEQ ID NO: 118174 - DNA, 75 bp, synthetic construct
  source 1..75: mol_type = other DNA
agtttaaacgcgaatccgctcaactggtggttgaccagatatacactgtggcagatgccgccaaagctatggatg

SEQ ID NO: 118175 - DNA, 75 bp, synthetic construct
  source 1..75: mol_type = other DNA
gcccgatccggcgttaatgttccatgcggcaaaagcgatgaatgtgaacgttgaaaactgcattctggttgatga

SEQ ID NO: 118176 - DNA, 75 bp, synthetic construct
  source 1..75: mol_type = other DNA
gcggcaaaagcgatgaatgtgaacgttgaaaactgcattctggtcgatgactccagcgccggcgcgcaatcaggg

SEQ ID NO: 118177 - DNA, 75 bp, synthetic construct
  source 1..75: mol_type = other DNA
tattgccctgctgcgcaatatttccagagtgtctgccgcttcccatatgccttttatcggttctgtcgggccgaa

SEQ ID NO: 118178 - DNA, 75 bp, synthetic construct
  source 1..75: mol_type = other DNA
atcgacgcaggtatggaagtgttctacttctgcgccgacccgcacaataagccgatcgttcatccgaaagtcact

SEQ ID NO: 118179 - DNA, 75 bp, synthetic construct
  source 1..75: mol_type = other DNA
gtctggtgatgccgcgcgtgctgggtcgcctgccgtatggcccggatactgtgccggttcgtagcttcaactacg

SEQ ID NO: 118180 - DNA, 75 bp, synthetic construct
  source 1..75: mol_type = other DNA
gctgtacgatacgccggatgcaacggcgaacagtcgtattaatgcccgtcttccctatattttcctgctgtcccg

SEQ ID NO: 118181 - DNA, 75 bp, synthetic construct
  source 1..75: mol_type = other DNA
tggataaccggtggttggaatcctaaattcgatccgactctactaaaatatactgaagttaaagggcagttaggt

SEQ ID NO: 118182 - DNA, 75 bp, synthetic construct
  source 1..75: mol_type = other DNA
cttatgctccctttcggtttttgacgctttccgcttattgcagaatctgttgaatgtaccgaaggaagaacggga

SEQ ID NO: 118183 - DNA, 75 bp, synthetic construct
  source 1..75: mol_type = other DNA
acgatctcgacgccctacacgcttaccgcgcctgtatgaatatgggtacgttaagcggtgcgccgaaagtacgcg

SEQ ID NO: 118184 - DNA, 75 bp, synthetic construct
  source 1..75: mol_type = other DNA
ccggcagccatactgacaataatgccgattcccgtatggaccagctgtctgcagccctgaactcagcgaaacaga

SEQ ID NO: 118185 - DNA, 75 bp, synthetic construct
  source 1..75: mol_type = other DNA
gcccactgctggatgaagacgcccgcttatgctccctttcagtatttgacgcctttcgcttgttgcaggatctgc

SEQ ID NO: 118186 - DNA, 75 bp, synthetic construct
  source 1..75: mol_type = other DNA
gccgtgccaccggaatcagactaccagaaggtaaacagaaggccacgcagtcgggcagcgtcatcgtgttaatgc

SEQ ID NO: 118187 - DNA, 75 bp, synthetic construct
  source 1..75: mol_type = other DNA
aattgcatcgcggtaacttcaccgctatcggccagcagatccagccttatctggagaacggaaaatgctttcgca

SEQ ID NO: 118188 - DNA, 75 bp, synthetic construct
  source 1..75: mol_type = other DNA
gcgcttctgatgcagggaaaattgttaatcagaaccgagcgcgccgttttaatgaaagcagaggacaaagaatga

SEQ ID NO: 118189 - DNA, 75 bp, synthetic construct
  source 1..75: mol_type = other DNA
aggtttatcagaacgcgctgggaatacgcgtgggtaagcagcaaaaactaaaagagttcgatcttagtaacccgc

SEQ ID NO: 118190 - DNA, 75 bp, synthetic construct
  source 1..75: mol_type = other DNA
ctgccagtggtttccgtgccgcatatgcgttgtgaatgtaatcagagcgatgaagagttcggcggtgtcgtgcgt

SEQ ID NO: 118191 - DNA, 75 bp, synthetic construct
  source 1..75: mol_type = other DNA
tcccgcgtggtcggtgaactgcgccacgaccttgacgccctgcacgcttaccgcgcctgtatgaatatgggcacg

SEQ ID NO: 118192 - DNA, 75 bp, synthetic construct
  source 1..75: mol_type = other DNA
tcaaactgctggcaggttatggcaaacctgccagcggaaaaatcgtgatgtacgatgcgatgacctgtcagttcc

SEQ ID NO: 118193 - DNA, 75 bp, synthetic construct
  source 1..75: mol_type = other DNA
tcaccgctggcagcctattacgtgctgaaaaagagtaaccccagcccgtatatgttttttatgcaggatgatgat

SEQ ID NO: 118194 - DNA, 75 bp, synthetic construct
  source 1..75: mol_type = other DNA
cttgataaagaggatgttactcttcttatggactattaccatgagcaaagcatcctgctggagcgtgtaaaatct

SEQ ID NO: 118195 - DNA, 75 bp, synthetic construct
  source 1..75: mol_type = other DNA
tcagcgttggggtagtgattcaactggtttacgccgcctggcaaactgccggattatggcgcggttctcacccag

SEQ ID NO: 118196 - DNA, 75 bp, synthetic construct
  source 1..75: mol_type = other DNA
ccgtactgaaagcatgagtgggcagatgagtgaagacctgtcacaacagtttgcacagtatgtgatgaaacacgc

SEQ ID NO: 118197 - DNA, 75 bp, synthetic construct
  source 1..75: mol_type = other DNA
attgcaaaaacgtctgcgtcgtaacgtaggcgaagccattgctgacttcaatatgattgaagatggcgatcgcat

SEQ ID NO: 118198 - DNA, 75 bp, synthetic construct
  source 1..75: mol_type = other DNA
aaatggcatcccgtactgaaagcatgagtgggcagatgagtgaagacttgtcgcaacagtttgcacagtatgtaa

SEQ ID NO: 118199 - DNA, 75 bp, synthetic construct
  source 1..75: mol_type = other DNA
agatgccttaccgctggaagaaattgctcaggagctggtaagtcagtatcagcgtttcgttgaactgtttggccg

SEQ ID NO: 118200 - DNA, 75 bp, synthetic construct
  source 1..75: mol_type = other DNA
tattcgctgcggctgtagctcttactggttgctctgttgacaaagaggctgcattgcacaacctgccaaatagcg

SEQ ID NO: 118201 - DNA, 75 bp, synthetic construct
  source 1..75: mol_type = other DNA
atgaaagatttaacacttaaatttgccgacagggccgatttttcggcctttatggatagcactggctattatgat

SEQ ID NO: 118202 - DNA, 75 bp, synthetic construct
  source 1..75: mol_type = other DNA
gacactgaaaaacttccgtatactggacaatggtgtcatgaactcgatcacaacatgcgccgcatcggtagcccg

SEQ ID NO: 118203 - DNA, 75 bp, synthetic construct
  source 1..75: mol_type = other DNA
tatcgacagcaaagatgatttaaaaagcctgctgctggcagacagtgcgctgcgcattacagctttaggtgacac

SEQ ID NO: 118204 - DNA, 75 bp, synthetic construct
  source 1..75: mol_type = other DNA
ttgccgatctcaccaaagtagaccgttattcctatgtgatgcacctcgtctcccgagtggtcggggaactgcgcc

SEQ ID NO: 118205 - DNA, 75 bp, synthetic construct
  source 1..75: mol_type = other DNA
taacctgcaacgtcaggtgattgctgacatgttgcgtgactgggataaacgttatccagggcgtatcgagacgat

SEQ ID NO: 118206 - DNA, 75 bp, synthetic construct
  source 1..75: mol_type = other DNA
atggcctgcggtgcgctgggttataccgatgccggactggtatttttaggggctggcgtcttctcctggttaagc

SEQ ID NO: 118207 - DNA, 75 bp, synthetic construct
  source 1..75: mol_type = other DNA
ttcgggtggtggcagtcaggatattattgctgaccatcaggaacatcaggccattattgagcaaagaacgcagga

SEQ ID NO: 118208 - DNA, 75 bp, synthetic construct
  source 1..75: mol_type = other DNA
aacttcatcgcggtaacttcaccgctatcggtcagcagctccagccttatctggaggacggcaagtgcttccgca

SEQ ID NO: 118209 - DNA, 75 bp, synthetic construct
  source 1..75: mol_type = other DNA
cagagttacgaccagtacacgacgaatatgacccgcagccatgaatatgctgaaatggcatcccgtactgaaagc

SEQ ID NO: 118210 - DNA, 75 bp, synthetic construct
  source 1..75: mol_type = other DNA
tttcagaacatctgatgctggtagatctcgcccgaaatgaccttgcgcgcatttgtactccgggcagccgctacg

SEQ ID NO: 118211 - DNA, 75 bp, synthetic construct
  source 1..75: mol_type = other DNA
atttagcaaagcatggatctatagacttattagtaagggtgattttcctaagccgattaagattggaataagagc

SEQ ID NO: 118212 - DNA, 75 bp, synthetic construct
  source 1..75: mol_type = other DNA
aattcaaacgagaatccgctcaactggttgttgaccagaactacacagtggcagatgccaccaaagctatggatg

SEQ ID NO: 118213 - DNA, 75 bp, synthetic construct
  source 1..75: mol_type = other DNA
ccgtgagctgaggaaaaagctacaacgcattgaaatggagaatgaaatattaaaaaaggccgcgctcttgatgtc

SEQ ID NO: 118214 - DNA, 75 bp, synthetic construct
  source 1..75: mol_type = other DNA
cattgcgcattacctgaagatcattcagcgggaaaatatcggtaccaccaaagatcgccgtctgcttgaactgga

SEQ ID NO: 118215 - DNA, 75 bp, synthetic construct
  source 1..75: mol_type = other DNA
caaaaaaggcgcgaccgaacgtgaagagctgcgggtatcgaaaatcaccgtcctgattttgggcgtgattgccat

SEQ ID NO: 118216 - DNA, 75 bp, synthetic construct
  source 1..75: mol_type = other DNA
atgctggcgaccacctgggtacaaattatcaaagccgtgctgttgctgttcggtgccagctttatggcctttatg

SEQ ID NO: 118217 - DNA, 75 bp, synthetic construct
  source 1..75: mol_type = other DNA
ttattgacgtgataggtaacgtgtacaaagaaaccggagaactgaatgaagatggcgaaccggtatgtgttaagg

SEQ ID NO: 118218 - DNA, 75 bp, synthetic construct
  source 1..75: mol_type = other DNA
tcagactctttgccgtgccgcatttccagattgaagggatggatatcaacctttctctggtttcccagatgccaa

SEQ ID NO: 118219 - DNA, 75 bp, synthetic construct
  source 1..75: mol_type = other DNA
gacctactaaaagatggcggctttattaagtctatatctggatttgtatcaaatctgccaggtttttatatagca

SEQ ID NO: 118220 - DNA, 75 bp, synthetic construct
  source 1..75: mol_type = other DNA
ggaaaaaaaatgacaagaacagaaatagtaaaggcagtgaaccgccccggttttcctggagagtgttttatctgt

SEQ ID NO: 118221 - DNA, 75 bp, synthetic construct
  source 1..75: mol_type = other DNA
atatcctgatggactggtttttaggcgatgcgaaagaaatcacctcaaaactggaaagcgtaaccacaagcgtta

SEQ ID NO: 118222 - DNA, 75 bp, synthetic construct
  source 1..75: mol_type = other DNA
ttcaggcggcaatggaaaaacaacgtctattcctggatggagccctgactctgggaaacctggcagatatttacc

SEQ ID NO: 118223 - DNA, 75 bp, synthetic construct
  source 1..75: mol_type = other DNA
tcgaagcgatgattgaacctgcgcttgagcaggttctggctgcgctgcgcgaatcaggcgtggaagccatcccac

SEQ ID NO: 118224 - DNA, 75 bp, synthetic construct
  source 1..75: mol_type = other DNA
ttgaaacaattcgtattgctatatcaccacaaaagcccaccccggccaccgatgtttttctggctgaagtgcggg

SEQ ID NO: 118225 - DNA, 75 bp, synthetic construct
  source 1..75: mol_type = other DNA
acaagggccaatccgcattctttcggcctgtgggtctctggtggtggtggcgctatatctcatcgcccaaatggt

SEQ ID NO: 118226 - DNA, 75 bp, synthetic construct
  source 1..75: mol_type = other DNA
cactctccggtgtatggcaagtatgaagatgacgtggaccgggaatccgcctatgagatgctgcaaaaaggcgtg

SEQ ID NO: 118227 - DNA, 75 bp, synthetic construct
  source 1..75: mol_type = other DNA
ggataattcagcggaaggtgcgcgcgagcgtgaactgttccgtgcgcagtttatccgctcccagaccggctttgg

SEQ ID NO: 118228 - DNA, 75 bp, synthetic construct
  source 1..75: mol_type = other DNA
aacgcgctgggaatgagcgtgggcgagcagcaaaaactgaaagagttcgatcttagcaacccgctggtccaggcg

SEQ ID NO: 118229 - DNA, 75 bp, synthetic construct
  source 1..75: mol_type = other DNA
gttcatgaaatcaactccggtgaatttgagtatttaagacgttttccccagtccagcactggggcaaaaatggtg

SEQ ID NO: 118230 - DNA, 75 bp, synthetic construct
  source 1..75: mol_type = other DNA
tgaagacggcggcgcaaaccatgcgtcccaatccggcatttgatacggaaaaggcgattcaggaactaggaaccg

SEQ ID NO: 118231 - DNA, 75 bp, synthetic construct
  source 1..75: mol_type = other DNA
ccgatatttttggcgttgatgtcaggaccatcaccgcctggcagagtcaggggttaccactagtttatggtggag

SEQ ID NO: 118232 - DNA, 75 bp, synthetic construct
  source 1..75: mol_type = other DNA
gacccattccgattacagccacaccggtatgctggtgatgcgtaacaaaaagccctacgtttttgaagcggtcgg

SEQ ID NO: 118233 - DNA, 75 bp, synthetic construct
  source 1..75: mol_type = other DNA
atcaccttttatcatcgggagtacggcagaaccgaaaagcaaaaactgcattttgttttcatgcccagggtgtgt

SEQ ID NO: 118234 - DNA, 75 bp, synthetic construct
  source 1..75: mol_type = other DNA
gccacaggatttatgggctacttctatatcctgacctttattatcggttttggcgcgatcatgctggttggtgca

SEQ ID NO: 118235 - DNA, 75 bp, synthetic construct
  source 1..75: mol_type = other DNA
aggttcaggcaaaactcaaagaacgctacggtaaaaatattccgcttgaggaaacggtggtctcgccacaggccg

SEQ ID NO: 118236 - DNA, 75 bp, synthetic construct
  source 1..75: mol_type = other DNA
aacgctttacctggataatccaagatccaacaaaaaaggaagaaccgtgcgcacagttgataactatatcgccct

SEQ ID NO: 118237 - DNA, 75 bp, synthetic construct
  source 1..75: mol_type = other DNA
atgctggttgagtggggaccggttatcccgaaagggaaggtcgagatcactatcagtaagttcgagaaaacggcg

SEQ ID NO: 118238 - DNA, 75 bp, synthetic construct
  source 1..75: mol_type = other DNA
tttcatgcccaggatgtgtaacggaaaacagaaaccttattactcggtaagcagtttgggtgcgagatggaatgc

SEQ ID NO: 118239 - DNA, 75 bp, synthetic construct
  source 1..75: mol_type = other DNA
aacagaattcaatgcattaatggaaagtgaaaaaggacagagccagaacttgtggaaatttgccgtttactcagg

SEQ ID NO: 118240 - DNA, 75 bp, synthetic construct
  source 1..75: mol_type = other DNA
tcaccactttactcgattttgtgggatgttggtgaggctctgggctggttgctgtatgacctggagatggaaaat

SEQ ID NO: 118241 - DNA, 75 bp, synthetic construct
  source 1..75: mol_type = other DNA
gggttcagccctggcagccggtggtttttctgccaccacgatgctgttttcactgggagccagcatgattctggg

SEQ ID NO: 118242 - DNA, 75 bp, synthetic construct
  source 1..75: mol_type = other DNA
agcgccagatgaagcagagcgcgccttcgctgtcctattcaatgtattggggatcgaagcccccgaccgcgaacg

SEQ ID NO: 118243 - DNA, 75 bp, synthetic construct
  source 1..75: mol_type = other DNA
gtccttccgcacagcctggcgatatcctgctgtgctgctttggcgcatcggtggccaatcatgccgccatttact

SEQ ID NO: 118244 - DNA, 75 bp, synthetic construct
  source 1..75: mol_type = other DNA
tgtcagaggcggagaatcctggtgattttgtttttcgacgtggtgacgggcatgccttcgcgaaaatcgcacctg

SEQ ID NO: 118245 - DNA, 75 bp, synthetic construct
  source 1..75: mol_type = other DNA
ttgcccaggggaacccgatgccggtgccttacggggaaatgctggttggctcccgccgtatatcccaggacatca

SEQ ID NO: 118246 - DNA, 75 bp, synthetic construct
  source 1..75: mol_type = other DNA
gtggcgatgtcgataacgacggcgacggaacgttttactcgacagtgcaggattgtattgatgacggtaataatg

SEQ ID NO: 118247 - DNA, 75 bp, synthetic construct
  source 1..75: mol_type = other DNA
ggtctgatcgaccttgggcggctcggaacagcagatcgctatgccgatttggcactcatgattgctaacgccgaa

SEQ ID NO: 118248 - DNA, 75 bp, synthetic construct
  source 1..75: mol_type = other DNA
gccggaggggtattttcgtatcgcaccggaagactggctgcgggcagagatgcagggggagattgtggcgctggt

SEQ ID NO: 118249 - DNA, 75 bp, synthetic construct
  source 1..75: mol_type = other DNA
tataaacaacctttatcaagcagcctctgatgaaataagagcgattgtagctttcctgttatctggaaatgctac

SEQ ID NO: 118250 - DNA, 75 bp, synthetic construct
  source 1..75: mol_type = other DNA
gccggaggcgtattttcgtatcgcaccggaagactggctgcgggcagagatgcagggggagattgtggccctggt

SEQ ID NO: 118251 - DNA, 75 bp, synthetic construct
  source 1..75: mol_type = other DNA
ggatggctggtggcgcaacggtcagaacctttacctggacaatatggcggtcaccggcttttaccgggtgcccct

SEQ ID NO: 118252 - DNA, 75 bp, synthetic construct
  source 1..75: mol_type = other DNA
atcatgatgctgcacagtaccaaatgttatctcaattagcagcttacgcagtgcaaaacttaactcgacagagtg

SEQ ID NO: 118253 - DNA, 75 bp, synthetic construct
  source 1..75: mol_type = other DNA
tgtctgtaacatctggggttaataccgcctcgggtacttctggtattactcaatctgaaacgggtttatcgctgg

SEQ ID NO: 118254 - DNA, 75 bp, synthetic construct
  source 1..75: mol_type = other DNA
tgactggatgaagaaaggttcaataagtaaagacaaacttccagaactatggcgtttcttttctgatgtagttgg

SEQ ID NO: 118255 - DNA, 75 bp, synthetic construct
  source 1..75: mol_type = other DNA
agggaacggtcatccacattgtgccgcgactggccggagccggaaagggcggactgcagattgtgctgggggccg

SEQ ID NO: 118256 - DNA, 75 bp, synthetic construct
  source 1..75: mol_type = other DNA
gatgatggccactctgttatccctggatgcctcagcgcagagagttgcgagtatgaagaactccaacgagatcta

SEQ ID NO: 118257 - DNA, 75 bp, synthetic construct
  source 1..75: mol_type = other DNA
caaagttaaagttgatataactaagatgttgaatgctctaggttatgaagatcacgcgaagtttcgcgtcatcta

SEQ ID NO: 118258 - DNA, 75 bp, synthetic construct
  source 1..75: mol_type = other DNA
gaaatctccggcacaaacaattacgttaatgtaccgcattaataatgactatacagttgaagcgctggcctccct

SEQ ID NO: 118259 - DNA, 75 bp, synthetic construct
  source 1..75: mol_type = other DNA
tccaaatgttgtctcagttagctgctttcgcggtgcaaaacttaactcgacagagtgaaagcttaggtgagagtg

SEQ ID NO: 118260 - DNA, 75 bp, synthetic construct
  source 1..75: mol_type = other DNA
gggcgctgtcgctgcagctgccgggattccgccgtcagatgaacgaaggctggtaccgggtacgtattgccggtg

SEQ ID NO: 118261 - DNA, 75 bp, synthetic construct
  source 1..75: mol_type = other DNA
gtcagtgggttatctcgtccgtattcagctatcgctgctggtttacgagcccgaattgataatgaaaaaggattc

SEQ ID NO: 118262 - DNA, 75 bp, synthetic construct
  source 1..75: mol_type = other DNA
gccaccacgatgctgttttcactgggggccagcatgattctgggcggtgtggcccagatgctggccccgaaggca

SEQ ID NO: 118263 - DNA, 75 bp, synthetic construct
  source 1..75: mol_type = other DNA
agggaacggtcatccacattgtgccgcgactggccggcgccggaaagggcggactgcagattgtgctgggggcag

SEQ ID NO: 118264 - DNA, 75 bp, synthetic construct
  source 1..75: mol_type = other DNA
agggaacggtcatccacattgtgccgcgactggccggcgccggaaagggaggactgcagattgtgctgggggccg

SEQ ID NO: 118265 - DNA, 75 bp, synthetic construct
  source 1..75: mol_type = other DNA
tagcggtgaaatccctttcggttaaaacctggcaagatgttgaatgccaacactgtggaacgagctttgatcttg

SEQ ID NO: 118266 - DNA, 75 bp, synthetic construct
  source 1..75: mol_type = other DNA
tgcagggtgagattgtggcactggtccacagccaccccggtggcctgccctggctgagtgaggctgaccggcggc

SEQ ID NO: 118267 - DNA, 75 bp, synthetic construct
  source 1..75: mol_type = other DNA
taatcatcaggaactgttgcagcaggcattaacccatcgtagtgccagcagcaaacataacgagcgtttagaatt

SEQ ID NO: 118268 - DNA, 75 bp, synthetic construct
  source 1..75: mol_type = other DNA
cgcgccccgtctggcgcaacacttccggtgattactcctggcgctccggttctggcaaaaaagagtcttactctt

SEQ ID NO: 118269 - DNA, 75 bp, synthetic construct
  source 1..75: mol_type = other DNA
ttttgattgcacctgattacagtgctaatgacgacgtcgctgccgcgctggaggtagtcacaaataaattacgtg

SEQ ID NO: 118270 - DNA, 75 bp, synthetic construct
  source 1..75: mol_type = other DNA
tccagggcgataagcgtgatttattaaaatcattgcttgaagccaaagggatgaaagttaaacttgctggcggtt

SEQ ID NO: 118271 - DNA, 75 bp, synthetic construct
  source 1..75: mol_type = other DNA
tattccggtgggcaaggcaaccgggctggatattaatttgctgattgccgtttccggtttactgatgaccgtcac

SEQ ID NO: 118272 - DNA, 75 bp, synthetic construct
  source 1..75: mol_type = other DNA
ttggcgttggcgtggcgatgtttgccattccggtgggtaaggcaaccgggctggatattaatttgctgattgccg

SEQ ID NO: 118273 - DNA, 75 bp, synthetic construct
  source 1..75: mol_type = other DNA
tctgttccattaaagcaaagcatttaccagtacttcctagatgaagtgaagcctcatgtcgatgaagcatggata

SEQ ID NO: 118274 - DNA, 75 bp, synthetic construct
  source 1..75: mol_type = other DNA
gctgctggagcgtggtaaacgcatggacatcaatatcccgttactcgaaaagaatccgggatattacacgcaggc

SEQ ID NO: 118275 - DNA, 75 bp, synthetic construct
  source 1..75: mol_type = other DNA
gaaagatccgagcgtaagtccattaggcagccggattgcctctgttcataacggctcatcgctctttaccggtga

SEQ ID NO: 118276 - DNA, 75 bp, synthetic construct
  source 1..75: mol_type = other DNA
ttgctcgcttctcgtttggtgttaaaggctcatggctgccttcactgctgctgggcggcactcaggttggctggt

SEQ ID NO: 118277 - DNA, 75 bp, synthetic construct
  source 1..75: mol_type = other DNA
ctaaccgaatacctttccggtgtgctgaacgtactggcggataaaggactctgggctgcgacgctgggtactggc

SEQ ID NO: 118278 - DNA, 75 bp, synthetic construct
  source 1..75: mol_type = other DNA
aaaagtcgtcgccgcttacgtcggcataaagcgattaatcatgatttccgccagctggaaaaatatctggagccg

SEQ ID NO: 118279 - DNA, 75 bp, synthetic construct
  source 1..75: mol_type = other DNA
ctgcttgcattaggtttcagtaaaggtactacgctggcatttgtcatggccgccgggtttattgccgatacggcc

SEQ ID NO: 118280 - DNA, 75 bp, synthetic construct
  source 1..75: mol_type = other DNA
gacgcgggaggcatcgagatcgcggtgaatactgcgcccgggactgatagcgatctcgctcaatcaattacgagc

SEQ ID NO: 118281 - DNA, 75 bp, synthetic construct
  source 1..75: mol_type = other DNA
ttttctgccaccacgatgctgttttcactgggtgccagcatgatactgggcggagtggcccagatgctggccccg

SEQ ID NO: 118282 - DNA, 75 bp, synthetic construct
  source 1..75: mol_type = other DNA
atgacggcttcactgctggcccgtgtgcaggcaaatgttccggcctgggcacatgaacaactgaccgcatgggat

SEQ ID NO: 118283 - DNA, 75 bp, synthetic construct
  source 1..75: mol_type = other DNA
cggaccgggagttccggtctgcctgtcgggagattcacaacctgacagaaccgttgtcccggcatggtgtgtatc

SEQ ID NO: 118284 - DNA, 75 bp, synthetic construct
  source 1..75: mol_type = other DNA
tttgactttatgttgtctaccccgccatacggtaagagttgggcgtctgaacagaagtacattaaagacggcagt

SEQ ID NO: 118285 - DNA, 75 bp, synthetic construct
  source 1..75: mol_type = other DNA
attactgctgaatgcggcagacgcatggcgggaggtgatggtgttacagcgcaggctggaggcactgtcagcgtc

SEQ ID NO: 118286 - DNA, 75 bp, synthetic construct
  source 1..75: mol_type = other DNA
gccggaggagtattttcgtatcgcgccggaagactggctgcgggcagagatgcagggggagattgtggcgctggt

SEQ ID NO: 118287 - DNA, 75 bp, synthetic construct
  source 1..75: mol_type = other DNA
tcaatctagagcagaaggctgatggtttgattgcacaaatattaggcgtgaaagtggcggaagttcagggagaag

SEQ ID NO: 118288 - DNA, 75 bp, synthetic construct
  source 1..75: mol_type = other DNA
cctcagttgtatgcgagttggcgaagtgtgcaaaatccgctgggaagatgtagacgaaaaacaaaaggccgtgct

SEQ ID NO: 118289 - DNA, 75 bp, synthetic construct
  source 1..75: mol_type = other DNA
gccggaggtgtattttcgtatcgctccggaagactggctgcgggcagagatgcagggggagattgtggcgctggt

SEQ ID NO: 118290 - DNA, 75 bp, synthetic construct
  source 1..75: mol_type = other DNA
ctggcagatttccggggtcggaatgggtgtggcgacgctggtttcgctgattgccatcggcgcaatcggtgcctg

SEQ ID NO: 118291 - DNA, 75 bp, synthetic construct
  source 1..75: mol_type = other DNA
gccggaggtgtattttcgtatcgcaccggaagactggctgcgggcagagatgcagggggagattgtggctctggt

SEQ ID NO: 118292 - DNA, 75 bp, synthetic construct
  source 1..75: mol_type = other DNA
gccggaggagtattttcgtatcgctccggaagactggctgcgggcagagatgcagggggagattgtggctctggt

SEQ ID NO: 118293 - DNA, 75 bp, synthetic construct
  source 1..75: mol_type = other DNA
cgccctaaaggcgacggcgtggtacgcattcaacgtcaaaccagtggacgtaaaggaaagggcgtttgcctgatc

SEQ ID NO: 118294 - DNA, 75 bp, synthetic construct
  source 1..75: mol_type = other DNA
gccggaggagtattttcgtatcgcaccggaagactggctgcgggcagagatgcagggggagattgtggcactggt

SEQ ID NO: 118295 - DNA, 75 bp, synthetic construct
  source 1..75: mol_type = other DNA
atgagtgattccaacagccgtctggtctactcaacggaaaccggacgtattgatgagccaaaagcggcccctgta

SEQ ID NO: 118296 - DNA, 75 bp, synthetic construct
  source 1..75: mol_type = other DNA
agtgaagtggcgcatcaacttcatgccgcgtttcttgatggcgatttcctccatccacggcgcaatatcgaaaaa

SEQ ID NO: 118297 - DNA, 75 bp, synthetic construct
  source 1..75: mol_type = other DNA
gccggaggagtattttcgtatcgccccggaagactggctgcgggcagagatgcagggggagattgtggccctggt

SEQ ID NO: 118298 - DNA, 75 bp, synthetic construct
  source 1..75: mol_type = other DNA
gtattcagcgtcagaccagtggacgtaaaggtaagggcgtttgcctgattaccggtgtcgatctcgatgatgccg

SEQ ID NO: 118299 - DNA, 75 bp, synthetic construct
  source 1..75: mol_type = other DNA
aatacaaaagaaagtctggctgcgggtaatctttatattaatgttgattttggcccgaaatctccggcacaaaca

SEQ ID NO: 118300 - DNA, 75 bp, synthetic construct
  source 1..75: mol_type = other DNA
tccggatgtgcagaaattgcccgttaagcccgccaggcaaaaagctcctaaacgcgacatgaaccttaccgtggc

SEQ ID NO: 118301 - DNA, 75 bp, synthetic construct
  source 1..75: mol_type = other DNA
atgaaaaccagtattatcaacggctcggaagtgtctagattatccgtggcgattcagaccggcgtaaccgttttt

SEQ ID NO: 118302 - DNA, 75 bp, synthetic construct
  source 1..75: mol_type = other DNA
tccgcgctgcgtatctggggcgacaccgttgtcgaatgtgtgcttaacaaactctgcccgtcgcatacctacgta

SEQ ID NO: 118303 - DNA, 75 bp, synthetic construct
  source 1..75: mol_type = other DNA
ggttggggagatatcgtagaaggttgcgttaagcattttgctgaacacactgcatatagtttttctgatgttgat

SEQ ID NO: 118304 - DNA, 75 bp, synthetic construct
  source 1..75: mol_type = other DNA
ctggatgagcgtcaggccgtttctgttaacaagcacaatttcggcgcagtgatggctgaagcagccatcggcctg

SEQ ID NO: 118305 - DNA, 75 bp, synthetic construct
  source 1..75: mol_type = other DNA
ctttgccgccgaacaccaaagtgtagaacgctggcaggacatgctggcgtttgccgccgaggtaactaagaacga

SEQ ID NO: 118306 - DNA, 75 bp, synthetic construct
  source 1..75: mol_type = other DNA
tctgtaagaaaaacaacaaagtcccagctaaatcattgcgtactcattgtgtcagcgcccgattcaaccatgaag

SEQ ID NO: 118307 - DNA, 75 bp, synthetic construct
  source 1..75: mol_type = other DNA
ggcaagggggacacgctgacgctgaaaatgggctatcaggacgagaagctgctgtcctgcggtacgttctctata

SEQ ID NO: 118308 - DNA, 75 bp, synthetic construct
  source 1..75: mol_type = other DNA
gtgaacatatatatcgggtggcttttcaaattaatccctttaattatgggcttgatttgtatcgcgttaggtggc

SEQ ID NO: 118309 - DNA, 75 bp, synthetic construct
  source 1..75: mol_type = other DNA
gggatattttattccttcgcgggttctggtcggtttgggagcggtatgctttacgttgttctcaatcgtttcaat

SEQ ID NO: 118310 - DNA, 75 bp, synthetic construct
  source 1..75: mol_type = other DNA
gcgagtatttcgtcgcgggtcatgtgctgatttctctggcggccatatgcctggcattattcactaccgcattta

SEQ ID NO: 118311 - DNA, 75 bp, synthetic construct
  source 1..75: mol_type = other DNA
ctggtttcaacgggcggtctgggtaccgcaaccgtcagcgtcaagtccggtgagcatgttctcatcgataacagc

SEQ ID NO: 118312 - DNA, 75 bp, synthetic construct
  source 1..75: mol_type = other DNA
aacaattctgccggtagtcaattacagatgaattttcagcaaataattaaaaaatacccaaaagaaacaggaatg

SEQ ID NO: 118313 - DNA, 75 bp, synthetic construct
  source 1..75: mol_type = other DNA
cgtgaacgatgacggcagcctgaacccgaaatactgcggagcaacggtacgcgatgccagtgattatctggttta

SEQ ID NO: 118314 - DNA, 75 bp, synthetic construct
  source 1..75: mol_type = other DNA
aaacgtggccgtcatcgtaaaggtgaatgggttcgtttagccctcattgaaaagcttccagtaactgtccctcct

SEQ ID NO: 118315 - DNA, 75 bp, synthetic construct
  source 1..75: mol_type = other DNA
ggagtataaacgcagtaccattcgtaccattaccagcactgaagagttattaccggtgttggacgaggtacgcga

SEQ ID NO: 118316 - DNA, 75 bp, synthetic construct
  source 1..75: mol_type = other DNA
atgtgctggtaaatggcaagtcgcgctttgccgaattgcttgatggtgtggcgtcagggcagttaaaagcgtcct

SEQ ID NO: 118317 - DNA, 75 bp, synthetic construct
  source 1..75: mol_type = other DNA
aatataccgacgcgacgggtaaaaactatggcgcagcccagccaggccgcaccatgaccgtaccgaagacggcaa

SEQ ID NO: 118318 - DNA, 75 bp, synthetic construct
  source 1..75: mol_type = other DNA
gtatctcctacggtgcctgcggtaacagtggcgggatcttccacgatctctactgcgtgtggggcggtacggata

SEQ ID NO: 118319 - DNA, 75 bp, synthetic construct
  source 1..75: mol_type = other DNA
aggtcgtacagaaagtcgagaaacaactttttgagctatataaaaacccggagttgaacgttaagccgaaagaac

SEQ ID NO: 118320 - DNA, 75 bp, synthetic construct
  source 1..75: mol_type = other DNA
cattgcgcccggcaccacgctgctgcaaggctggcacgacccggacgaccgtctgcatagccgcatttgcgacac

SEQ ID NO: 118321 - DNA, 75 bp, synthetic construct
  source 1..75: mol_type = other DNA
aacgctatctacaacgacaagcaagctgaacattacgttaatatcccgcatcatgggcatattgataatattccg

SEQ ID NO: 118322 - DNA, 75 bp, synthetic construct
  source 1..75: mol_type = other DNA
ccgccggcaggattgtcaggatcgtcacggcccggatgcgccgctgccgttcggcggttttccggctgcaaacct

SEQ ID NO: 118323 - DNA, 75 bp, synthetic construct
  source 1..75: mol_type = other DNA
agcctgatttaacaaaaacatcgagaaggggaaaatttcatactgaacggctaccagagaatgaaatcagatcat

SEQ ID NO: 118324 - DNA, 75 bp, synthetic construct
  source 1..75: mol_type = other DNA
cccggaagagattgaagccgcaggcggcgacgagaataaacttccggcgaagtccatctggtggcagggggagga

SEQ ID NO: 118325 - DNA, 75 bp, synthetic construct
  source 1..75: mol_type = other DNA
cgggaaaaccggatacgttccgccacagtggtgtacaatagagcaccggatacgttccgccacagtggtgtacaa

SEQ ID NO: 118326 - DNA, 75 bp, synthetic construct
  source 1..75: mol_type = other DNA
ccagcccaggctggcatggcaccggaaaaccaggcgcaggcccagcaatcgagcgggagtttctggatgccgctg

SEQ ID NO: 118327 - DNA, 75 bp, synthetic construct
  source 1..75: mol_type = other DNA
ccgatgagcgcttacagctcttttacgtcaatgctaaaaccgcagagacgcgggtacaggttgatttcgagctgt

SEQ ID NO: 118328 - DNA, 75 bp, synthetic construct
  source 1..75: mol_type = other DNA
tattgtttacattcacaaaattgactctatgtacaatttgcgcatgtatgatcctacccacgtaatatggacaca

SEQ ID NO: 118329 - DNA, 75 bp, synthetic construct
  source 1..75: mol_type = other DNA
gtgaaatgctggttggttcacgacggatatcccaggacatcagcacccgtgatgagggcggagacgggaaagtgg

SEQ ID NO: 118330 - DNA, 75 bp, synthetic construct
  source 1..75: mol_type = other DNA
attccgcggtcagatgaacgaaggctggtatcagatacgtattgccggtgaggataccgcgccggaggcggtgta

SEQ ID NO: 118331 - DNA, 75 bp, synthetic construct
  source 1..75: mol_type = other DNA
agatagcctcaagcacccgcagcaattctacttaactctcgctttacagcaaaccgtttttgcccaatatgggaa

SEQ ID NO: 118332 - DNA, 75 bp, synthetic construct
  source 1..75: mol_type = other DNA
ttagccacgatgttagttatcttggcagtgttctggatgcagccaaacctgtatacggaattaattacacatcaa

SEQ ID NO: 118333 - DNA, 75 bp, synthetic construct
  source 1..75: mol_type = other DNA
aaatcggaattcatttttccatataacagcacttctgttactgcaggatttcagagggtaagaagcaaattaggt

SEQ ID NO: 118334 - DNA, 75 bp, synthetic construct
  source 1..75: mol_type = other DNA
cgtgatgctggcgcgttacgagcgtgaatgccgcagcctgacgctgcgcgaaatccatcgttttaacaatgggct

SEQ ID NO: 118335 - DNA, 75 bp, synthetic construct
  source 1..75: mol_type = other DNA
aaagatctgcgatatcatgatttgcgtagagaaggggcaagtcgcttatttgaggctggttttagtattgaggaa

SEQ ID NO: 118336 - DNA, 75 bp, synthetic construct
  source 1..75: mol_type = other DNA
gaaaaaggtgttatcacttacagggaaagcaaaacattccctaaacatgctcatgccaaaacatggggcacacag

SEQ ID NO: 118337 - DNA, 75 bp, synthetic construct
  source 1..75: mol_type = other DNA
gtaatctttatattaatgttgattttggtccgaaatctccggcacaaacaattacgttaatgtaccgcattaata

SEQ ID NO: 118338 - DNA, 75 bp, synthetic construct
  source 1..75: mol_type = other DNA
ttcgcggcgttggatatattgactctccgcatttagctacacccgcaaatgttgtaaatcgtcggcaaaatttcg

SEQ ID NO: 118339 - DNA, 75 bp, synthetic construct
  source 1..75: mol_type = other DNA
accatcgttacaggctcgattaaccacctcgaagcaatgtctaaagacaatgatctcaaagaactactgatccgt

SEQ ID NO: 118340 - DNA, 75 bp, synthetic construct
  source 1..75: mol_type = other DNA
gagggaacggtcatccacattgtgccgcgactggccggtgccggaaagggtggactgcagattgtgctgggggcg

SEQ ID NO: 118341 - DNA, 75 bp, synthetic construct
  source 1..75: mol_type = other DNA
aaatgcttaaggagagacgtaaagagctactctcatctcgtcttgcaacgaaagaagaaagagagcgggattttt

SEQ ID NO: 118342 - DNA, 75 bp, synthetic construct
  source 1..75: mol_type = other DNA
tggactgcagattgtgctgggggcggcagccatcgtgggctctttcttcacggccggtgcctcgatggtgttatg

SEQ ID NO: 118343 - DNA, 75 bp, synthetic construct
  source 1..75: mol_type = other DNA
ggggaagatgaaagtgatatgtcggcgatggaatttgagctaggcccagtagagtggcatgcttttgttgagtct

SEQ ID NO: 118344 - DNA, 75 bp, synthetic construct
  source 1..75: mol_type = other DNA
gtgaacatatatatcgggtggcttttcaaattaatccctttgattatgggcttaatttgtatcgcgttaggtggc

SEQ ID NO: 118345 - DNA, 75 bp, synthetic construct
  source 1..75: mol_type = other DNA
taatcggtcaacaaagcagtaataaacgactggctgacgtgttaaatcaggtacgcagcgccatccttgaagggc

SEQ ID NO: 118346 - DNA, 75 bp, synthetic construct
  source 1..75: mol_type = other DNA
agttagggatttatgtctcaaaaatcgatcccacccttcgcatcactgtaaccgacgttgatattgttgatgacg

SEQ ID NO: 118347 - DNA, 75 bp, synthetic construct
  source 1..75: mol_type = other DNA
ccgtttagatcgaattagaagccgggatccgagaacgggtaaaaattactttcatgtaggagtcatgactgatga

SEQ ID NO: 118348 - DNA, 75 bp, synthetic construct
  source 1..75: mol_type = other DNA
agatgaattttcagcaaataattaaaaaatacccaaaagaaacaggaatgtgtttcgttattggtgttttattag

SEQ ID NO: 118349 - DNA, 75 bp, synthetic construct
  source 1..75: mol_type = other DNA
actttttggatgtaaaaaatgaaggtgttcctgatggggcagcagcttcagtggtaattgctgccgaagtgaacg

SEQ ID NO: 118350 - DNA, 75 bp, synthetic construct
  source 1..75: mol_type = other DNA
gcgtcatccggtcactttctgctcattcccaaaaatgcagcggggagcaagagcgacggaacgccggtacaggct

SEQ ID NO: 118351 - DNA, 75 bp, synthetic construct
  source 1..75: mol_type = other DNA
atgagaaccttattagcaatattattgtttccgctgctggtgcaagccgccggggaggggatgtggcaggcaagt

SEQ ID NO: 118352 - DNA, 75 bp, synthetic construct
  source 1..75: mol_type = other DNA
cgtaagagacaggaaagatccacgtaaaaaggaaggcaaccatatgaaagtagccttgcttggggaagcctggga

SEQ ID NO: 118353 - DNA, 75 bp, synthetic construct
  source 1..75: mol_type = other DNA
tgccttacggggaaatgctggttggctcccgccgtatatcccaggacatcagtacccgtgatgaaggcgggggcg

SEQ ID NO: 118354 - DNA, 75 bp, synthetic construct
  source 1..75: mol_type = other DNA
atggctccggaggactggctgcgggcacaaatgcagggtgagattgtggcactggtccacagtcatcccggtggt

SEQ ID NO: 118355 - DNA, 75 bp, synthetic construct
  source 1..75: mol_type = other DNA
cagtattaaaaacgagtcggataccatcgcgattacactggatgacaccgatggacgctggataaaagagtggta

SEQ ID NO: 118356 - DNA, 75 bp, synthetic construct
  source 1..75: mol_type = other DNA
ttataactacctccaaatgctgaagagcgaaccgttccgggcaaaaggttcatggttaaccaactggtcaaccct

SEQ ID NO: 118357 - DNA, 75 bp, synthetic construct
  source 1..75: mol_type = other DNA
atgtcttcccactggaattgccgccgctgcgcgaccgtccggaagatatccctcttttagcaaagcatttcacgc

SEQ ID NO: 118358 - DNA, 75 bp, synthetic construct
  source 1..75: mol_type = other DNA
aactgacagaagaattggtggcagaggccgttagtgccggtaaaaaagcacaactggaatcggtcgatttttctg

SEQ ID NO: 118359 - DNA, 75 bp, synthetic construct
  source 1..75: mol_type = other DNA
taaacgacctgaacccgcaggcggttgagcgggcgatcgatcgtcttcgctccaatagcgagtttgtaccactgt

SEQ ID NO: 118360 - DNA, 75 bp, synthetic construct
  source 1..75: mol_type = other DNA
cccatcccgccgaagtatgccgcgctgatcgaaaaccttcgtgaaggtctgaagaacggtaaacaaatcgtcttc

SEQ ID NO: 118361 - DNA, 75 bp, synthetic construct
  source 1..75: mol_type = other DNA
gggggccagcatgattctgggtggtgtggctcagatgctggccccgaaggctaaagtaccggagtacaaaagcac

SEQ ID NO: 118362 - DNA, 75 bp, synthetic construct
  source 1..75: mol_type = other DNA
agcgagtttaggacctccggcggtggttacattccatcaatcaaggaggctgccatcatggctactacccctgcc

SEQ ID NO: 118363 - DNA, 75 bp, synthetic construct
  source 1..75: mol_type = other DNA
cggaacgcgaagcgcgtagccgttgcccgtccggttgtattgcggtattcgccgcccgtattcgccagggggaaa

SEQ ID NO: 118364 - DNA, 75 bp, synthetic construct
  source 1..75: mol_type = other DNA
caacgccaaagcggcattttatgccgatgttccgaagaatatgactcagcagaattgtcagtctaagtacgaaaa

SEQ ID NO: 118365 - DNA, 75 bp, synthetic construct
  source 1..75: mol_type = other DNA
attcgctgccagaaatggctacgcgaccggacatgaccgcgcactgggaatcggtgctgacgcaaatcagcgaaa

SEQ ID NO: 118366 - DNA, 75 bp, synthetic construct
  source 1..75: mol_type = other DNA
cgtaccagcttccgcaataccctggtggtgaaaaaggacggtcgtgtatccaatgagtcgatgaaaaccgcgcta

SEQ ID NO: 118367 - DNA, 75 bp, synthetic construct
  source 1..75: mol_type = other DNA
gcagccgctggtggggacgctatatcagcttattgatcaagccaaacgtactccggtgcggcagtttcgcggcat

SEQ ID NO: 118368 - DNA, 75 bp, synthetic construct
  source 1..75: mol_type = other DNA
tactgaaggccattgcggctgccggtattgatatgcagcaggtatcgcaccccatcccgccgaagtatgccgcgc

SEQ ID NO: 118369 - DNA, 75 bp, synthetic construct
  source 1..75: mol_type = other DNA
gatgaagaagggcgcttgttacatcgtccactggcggagcatgtggttaaccgcattagtggtcaaccggctatt

SEQ ID NO: 118370 - DNA, 75 bp, synthetic construct
  source 1..75: mol_type = other DNA
ggtaccagatacgtattcgcggtgaggacacggcaccggaggcggtgtacgcccgtcttcacgaacagctgggtg

SEQ ID NO: 118371 - DNA, 75 bp, synthetic construct
  source 1..75: mol_type = other DNA
gccgggttattcgtaaagatcgcgatgagccgttcgtctataacagcggcggatcctcatttgcttcccgccccg

SEQ ID NO: 118372 - DNA, 75 bp, synthetic construct
  source 1..75: mol_type = other DNA
ccgatgctgaccgaccagtggtacgtgcgtgccgatgtcctggcgaaaccggcggttgaagcggttgagaacggc

SEQ ID NO: 118373 - DNA, 75 bp, synthetic construct
  source 1..75: mol_type = other DNA
acggtactgacgcgctgcgcttcaccctggcggcgctggcgtctaccggtcgtgacatcaactgggatatgaagc

SEQ ID NO: 118374 - DNA, 75 bp, synthetic construct
  source 1..75: mol_type = other DNA
atattgccacaggtaacaggtatccgcaccaaacacccgacagagaaaatcagttgatcgccagtatcaaaaatg

SEQ ID NO: 118375 - DNA, 75 bp, synthetic construct
  source 1..75: mol_type = other DNA
gaagttagctttaacgactggttacgcacccacccgcaggcggatcagatagcccgtgactataacgacgcattc

SEQ ID NO: 118376 - DNA, 75 bp, synthetic construct
  source 1..75: mol_type = other DNA
ctttacccgaaggggactggcgcaagcagaacctgaagctgaatatggccctgaatttaagcggtacggcgatct

SEQ ID NO: 118377 - DNA, 75 bp, synthetic construct
  source 1..75: mol_type = other DNA
gaagaatatgactatcagctggggatattacttccgtacaggaattatcatgaccctgcctgtgctgtttgtgac

SEQ ID NO: 118378 - DNA, 75 bp, synthetic construct
  source 1..75: mol_type = other DNA
cacgctggggcaatgggcgcggtcgcttgctgtttacctggattgtcctgctcggtgctaccgttgcggccctgt

SEQ ID NO: 118379 - DNA, 75 bp, synthetic construct
  source 1..75: mol_type = other DNA
ccacgcctcgacagtaacgggcagcctcttaccagaaatgttgtgaaagagtccgccagcgccgttatcgttcag

SEQ ID NO: 118380 - DNA, 75 bp, synthetic construct
  source 1..75: mol_type = other DNA
ccacgatgctgttctcactgggtgccagcatgatactgggtggtgtggcccagatgctggccccgaaggcaaaga

SEQ ID NO: 118381 - DNA, 75 bp, synthetic construct
  source 1..75: mol_type = other DNA
aagtacggataacggtaaacagaacacgtatttttcgtcactggacaacatgattgcccagggtaaccctatgcc

SEQ ID NO: 118382 - DNA, 75 bp, synthetic construct
  source 1..75: mol_type = other DNA
cgtacagtccaccgccagcgaaattggcgtttcctgcggtgggtttattaaccctaacgaagaggctgccaacat

SEQ ID NO: 118383 - DNA, 75 bp, synthetic construct
  source 1..75: mol_type = other DNA
ccgtttattccagggcaggatgaaagcctttagcaacactgatgacattgaacggatgtttaatcaggtgaaggc

SEQ ID NO: 118384 - DNA, 75 bp, synthetic construct
  source 1..75: mol_type = other DNA
cactgggggccagcatgatactgggtggtgtggcacagatgcttgccccgaagccaaaaacaccggaatacaggg

SEQ ID NO: 118385 - DNA, 75 bp, synthetic construct
  source 1..75: mol_type = other DNA
acggaacgcgaagcgcgtaaccattgcccgtcaggttgtgtcgctgtattcgccgcccgtattcgtcaggaggtg

SEQ ID NO: 118386 - DNA, 75 bp, synthetic construct
  source 1..75: mol_type = other DNA
tgacaggacggcgctttgagcacggggtgacggactgttacaccctgttccgggatgcataccatctggcgggga

SEQ ID NO: 118387 - DNA, 75 bp, synthetic construct
  source 1..75: mol_type = other DNA
ggcggctgcagataaagagcgcactgccctggtggctggtctgccggggtgacattcacaaattccgctgcgtgc

SEQ ID NO: 118388 - DNA, 75 bp, synthetic construct
  source 1..75: mol_type = other DNA
tggagtgagggttggggtggcggtaaatggggcgctggcaggtggggttaaggtggcgcaggatagtggcggtag

SEQ ID NO: 118389 - DNA, 75 bp, synthetic construct
  source 1..75: mol_type = other DNA
gggcgcgaatgatgaccgcctggacgcaggatctcatctatgcgggcgacccggtccattatcacgacagtcgcg

SEQ ID NO: 118390 - DNA, 75 bp, synthetic construct
  source 1..75: mol_type = other DNA
cgctggtgatctgtattccgctgataacgctctgttcggcgtgggatgtgaaagtagtgatgacgctgacgtttg

SEQ ID NO: 118391 - DNA, 75 bp, synthetic construct
  source 1..75: mol_type = other DNA
cagtcctcagaagcaaagccggttgcggcatcactgccgcgcctggctgaagggaacttccggacaacgccggtg

SEQ ID NO: 118392 - DNA, 75 bp, synthetic construct
  source 1..75: mol_type = other DNA
cctcgtccgctaagaacgggtgagcagacggctgcattatggatagcgccttatattgataatcaggatgtttat

SEQ ID NO: 118393 - DNA, 75 bp, synthetic construct
  source 1..75: mol_type = other DNA
gactcgattgatgatgaaatattaagcaattcagttaagaaaaaaatagcggaattagaaaaagcacttctccat

SEQ ID NO: 118394 - DNA, 75 bp, synthetic construct
  source 1..75: mol_type = other DNA
ccacgtccgttgtttacggctgcccgggaagtgaaaacgattgttccggtcagttcagttgcgccggtaacacct

SEQ ID NO: 118395 - DNA, 75 bp, synthetic construct
  source 1..75: mol_type = other DNA
gcacgtaaaggtgcaaaagtgggtgccgccgttggtgctgtcactggcgttctgaccggcaatggcctcgaaggg

SEQ ID NO: 118396 - DNA, 75 bp, synthetic construct
  source 1..75: mol_type = other DNA
cttagtcgtttgttcggtgaaaactcactaacctgcgtggaagcgggtgtgatggcaccgttgattggagtgatt

SEQ ID NO: 118397 - DNA, 75 bp, synthetic construct
  source 1..75: mol_type = other DNA
cgcagtcgatgacacggacgcatcagttatcgccgccgcgctgcgcgaagctgaagaagaggtcgctataccgcc

SEQ ID NO: 118398 - DNA, 75 bp, synthetic construct
  source 1..75: mol_type = other DNA
ccccgtccgctaagaacgggtgagcagacggcagcattatggatagcaccttatattgataatcaggatgtttat

SEQ ID NO: 118399 - DNA, 75 bp, synthetic construct
  source 1..75: mol_type = other DNA
caatgagaaggccaaaaaactggagcagtcctcagaagcaaagccggttgcggcatcattgccgcgcctggctga

SEQ ID NO: 118400 - DNA, 75 bp, synthetic construct
  source 1..75: mol_type = other DNA
gttatcgccgctgcgctgcgcgaagctgaagaagaggttgctataccaccttccgccgtcgaagttatcggcgtg

SEQ ID NO: 118401 - DNA, 75 bp, synthetic construct
  source 1..75: mol_type = other DNA
aggcgcatgggatgggcaagaggcaattaccattccagtcgatggcatagaaatgggaagtttaagtatgctatc

SEQ ID NO: 118402 - DNA, 75 bp, synthetic construct
  source 1..75: mol_type = other DNA
gaaaaaggtgaagtggtagagcggcaaacgcagccgccgcgccattttaccgatgcaacactgctttcggcgatg

SEQ ID NO: 118403 - DNA, 75 bp, synthetic construct
  source 1..75: mol_type = other DNA
cagaccagcgagcgtaacggctcagggctggcactggcggcgaagctgctttccggcaagctgaacattcagatt

SEQ ID NO: 118404 - DNA, 75 bp, synthetic construct
  source 1..75: mol_type = other DNA
agtggccccgggcagtggtgaagagaagaaaaaggcttcaccgcgcaagcgaacgtcgaaaaaaagcccgccatc

SEQ ID NO: 118405 - DNA, 75 bp, synthetic construct
  source 1..75: mol_type = other DNA
gaacttttcacaattgcgccgtttgttaccgcgcaatgacgcacccggcgaaactgtaagctatcaggtggcaaa

SEQ ID NO: 118406 - DNA, 75 bp, synthetic construct
  source 1..75: mol_type = other DNA
aattgctggtagatgaagtgctggattatctgcaactggcgccggaaaagcgccagcaagttcagcgttgtttaa

SEQ ID NO: 118407 - DNA, 75 bp, synthetic construct
  source 1..75: mol_type = other DNA
attacttatccgcgttccgattgtcgttatttgccagaagaacatttcgccggacgtcatgcggtgatgaatgcc

SEQ ID NO: 118408 - DNA, 75 bp, synthetic construct
  source 1..75: mol_type = other DNA
cagattcttgccgggtataccggtgaaggcggcctgacagatggtgagggcagccaatacgaatactacacgcca

SEQ ID NO: 118409 - DNA, 75 bp, synthetic construct
  source 1..75: mol_type = other DNA
tttatgatactcattaccctgctcccggatcgcctgcactggcgcagcgactggtcgaactgttagcccctgttc

SEQ ID NO: 118410 - DNA, 75 bp, synthetic construct
  source 1..75: mol_type = other DNA
aggtgcgtgggatgggcaggagccaattaccattccggtcgatggtatagaaatgggcagcctgagtatgctgtc

SEQ ID NO: 118411 - DNA, 75 bp, synthetic construct
  source 1..75: mol_type = other DNA
gtgctgattaagatgtatccgcaagctgatattccgatggtgcagttgagtatcgatagtactaaacccgtcgcc

SEQ ID NO: 118412 - DNA, 75 bp, synthetic construct
  source 1..75: mol_type = other DNA
tatacgcaaccgctgttgggatgacaaaaaggtcgatgcgcaccacgccatcatcccgaccgcacggagttctgc

SEQ ID NO: 118413 - DNA, 75 bp, synthetic construct
  source 1..75: mol_type = other DNA
ttgctactacgacaatgttgaacagagttggatcccggtcgtttctggatttttgttaagccgggttattcgtaa

SEQ ID NO: 118414 - DNA, 75 bp, synthetic construct
  source 1..75: mol_type = other DNA
gatgaagaagggcgcttgttacatcgtccgctggcggagcatgtggtcaaccgcatcagcggccaaccggctatt

SEQ ID NO: 118415 - DNA, 75 bp, synthetic construct
  source 1..75: mol_type = other DNA
cgcacacactccctctggcgtcacctggcatggcacgcatctgcctttacggggatttccaacgatttggccgcc

SEQ ID NO: 118416 - DNA, 75 bp, synthetic construct
  source 1..75: mol_type = other DNA
cacgttggggtaacggccgcgggcgtttgctgtttacctatatcgttttgctcggcgcagcggtggcggcactgt

SEQ ID NO: 118417 - DNA, 75 bp, synthetic construct
  source 1..75: mol_type = other DNA
aaagagcgtgagaagctggaaggctatgcagaagcgaaagccaagctgattgaacagcaggcggttatcgctgcg

SEQ ID NO: 118418 - DNA, 75 bp, synthetic construct
  source 1..75: mol_type = other DNA
tcagatgccattctgttcgcaaaaaatgactacaaattgctcccggaaagccagcaacagatagatccaaaccat

SEQ ID NO: 118419 - DNA, 75 bp, synthetic construct
  source 1..75: mol_type = other DNA
tgcagataaaaagtgcactgtcctggtggctggtctgccggggggacattcataaattccgctgtgtgccacatc

SEQ ID NO: 118420 - DNA, 75 bp, synthetic construct
  source 1..75: mol_type = other DNA
gctttctggaaaaggatctctgggtaacggagatccttcggttactttttaatgaggagctgctgggaggtttat

SEQ ID NO: 118421 - DNA, 75 bp, synthetic construct
  source 1..75: mol_type = other DNA
ccggacggagggggcaaaaaacggaggtgttcttcaggtggtggccggtgctgttctggctgttgtgggatatgt

SEQ ID NO: 118422 - DNA, 75 bp, synthetic construct
  source 1..75: mol_type = other DNA
ggctctttcttcactgccggggcatcaatggcgttatggggttcagccctggcagccggtggcttttctgccacc

SEQ ID NO: 118423 - DNA, 75 bp, synthetic construct
  source 1..75: mol_type = other DNA
ctgcgtggttgcagcgcggatgcagagcgtcgcgtaaatgaaaaccgtggcttcctgcaaacgctggcgcgtctg

SEQ ID NO: 118424 - DNA, 75 bp, synthetic construct
  source 1..75: mol_type = other DNA
gcgtcggtaatggtgccggtggatattgcagccattgttgccacgctggttatgctgcatctgttcttccgcaag

SEQ ID NO: 118425 - DNA, 75 bp, synthetic construct
  source 1..75: mol_type = other DNA
gggatcgtcatgactctgcctgtgctgtttgtaacgctggccgcgctggcgctacgtctctctttcactttgtaa

SEQ ID NO: 118426 - DNA, 75 bp, synthetic construct
  source 1..75: mol_type = other DNA
gcttcggtgatggtgccggtggatatcgccgccattatcgccacgctggtgatgctgcatctttttttccgcaaa

SEQ ID NO: 118427 - DNA, 75 bp, synthetic construct
  source 1..75: mol_type = other DNA
cttgaacaactcaaggtatggaatcgccatgaacatgacgggtatacaacagtgccaagaacgctgacatatatc

SEQ ID NO: 118428 - DNA, 75 bp, synthetic construct
  source 1..75: mol_type = other DNA
tgcttgatgacgctgagcttgctgcgttgattgctgaacacgatctggtgctcgactgtacggataacgtagcgg

SEQ ID NO: 118429 - DNA, 75 bp, synthetic construct
  source 1..75: mol_type = other DNA
tctttttcgtggctaaaaaaggtcatgccattaacaccggtaaagtcctgcgtggtgcaccgtggcagattgtga

SEQ ID NO: 118430 - DNA, 75 bp, synthetic construct
  source 1..75: mol_type = other DNA
gggggagattgtggcactggtccacagtcatcccggtggtctgccctggctgagcgaggccgaccggcggctgca

SEQ ID NO: 118431 - DNA, 75 bp, synthetic construct
  source 1..75: mol_type = other DNA
gggcgctgtcgctgcaggtgcccggattccgctgtcagatgaacgaaggctggtaccagatacgcattgccggtg

SEQ ID NO: 118432 - DNA, 75 bp, synthetic construct
  source 1..75: mol_type = other DNA
ttgctggtgacggaagatatggcggggttcataagtattgctgactggtatgcccagcatgcagtaacaccttat

SEQ ID NO: 118433 - DNA, 75 bp, synthetic construct
  source 1..75: mol_type = other DNA
ataaagcgattaatcatgacttccgccagctggaaaaatatctggagccaatccccaaagcggactgggagcagg

SEQ ID NO: 118434 - DNA, 75 bp, synthetic construct
  source 1..75: mol_type = other DNA
gagatgcttttggcagggagtatatttttactgacgctggtactggtgatctggcaacccagcggcctgagtatt

SEQ ID NO: 118435 - DNA, 75 bp, synthetic construct
  source 1..75: mol_type = other DNA
ccgcctgctgttcacctggatagtcttgctcggtgccgctgttgctgctttgttcgccaatgatggcgccgcgct

SEQ ID NO: 118436 - DNA, 75 bp, synthetic construct
  source 1..75: mol_type = other DNA
agccggaggcgtattttcgtattgcaccggaagactggctgcgggcagagatgcagggggagattgtggcgctgg

SEQ ID NO: 118437 - DNA, 75 bp, synthetic construct
  source 1..75: mol_type = other DNA
actgaataatggcctgaaagatgttccctcccgcctgctgacaccgatcgatgtgaataaaaacaacatcaaaga

SEQ ID NO: 118438 - DNA, 75 bp, synthetic construct
  source 1..75: mol_type = other DNA
aacctgtacctggacaatatggaggccacgggattttaccgggtgcccctgccctctgcacagccgggcgatatc

SEQ ID NO: 118439 - DNA, 75 bp, synthetic construct
  source 1..75: mol_type = other DNA
tcatgaacaatatgcctaccgtgctggttggtgctctctctattgatggcagcactgcaacaggcgttatcaaag

SEQ ID NO: 118440 - DNA, 75 bp, synthetic construct
  source 1..75: mol_type = other DNA
tggtgaatatagtctcggcggacttctttggactgggcttcactgagtatgcgtcggtaatggtgccggtggata

SEQ ID NO: 118441 - DNA, 75 bp, synthetic construct
  source 1..75: mol_type = other DNA
aaatgctgttaaaacattatcaaaacactaaaaatataattgttagttatgatgtaaatcctttaggattgtttt

SEQ ID NO: 118442 - DNA, 75 bp, synthetic construct
  source 1..75: mol_type = other DNA
acggacacattcgatatggcggcatcaccggtggtgtgtttctgcctttacggggatttacaacgatttggccgc

SEQ ID NO: 118443 - DNA, 75 bp, synthetic construct
  source 1..75: mol_type = other DNA
cggagtcgtgcggcttcgtggtgagaacaccggagggggaaagatattttccctgcgtgaatatctccggtgagc

SEQ ID NO: 118444 - DNA, 75 bp, synthetic construct
  source 1..75: mol_type = other DNA
tcgtcttcctgactgcgaccgggtacacctggtcttcaccctgccggacacgctgtggccggtgttcgaaagcaa

SEQ ID NO: 118445 - DNA, 75 bp, synthetic construct
  source 1..75: mol_type = other DNA
ctgggcgtgaaggaatacaactgcgataaacctgactgcccccacgtcagatacgtcactaactcatgcggcagc

SEQ ID NO: 118446 - DNA, 75 bp, synthetic construct
  source 1..75: mol_type = other DNA
tggcgcatgcccggcggtgtgcgcctgcggagtcgtgcggcttagtggtgagaacgccggagggggagcggtata

SEQ ID NO: 118447 - DNA, 75 bp, synthetic construct
  source 1..75: mol_type = other DNA
acagctgaatcgtcttcctgactgcgactgggtacacctggtcttcaccctgccgaacacgctgtggccggtgtt

SEQ ID NO: 118448 - DNA, 75 bp, synthetic construct
  source 1..75: mol_type = other DNA
ttgccaatgatggcgcggcgcttattttgacaccgattgtcatcgccatgctgctggctttagggttcagtaaag

SEQ ID NO: 118449 - DNA, 75 bp, synthetic construct
  source 1..75: mol_type = other DNA
atgctgaccgaccagtggtacgtgcgtgccgatgtactggcgaaaccggcagttgaagcggttgagaacggcgac

SEQ ID NO: 118450 - DNA, 75 bp, synthetic construct
  source 1..75: mol_type = other DNA
ctcggtgccgccgttgcagctctgtttgccaatgatggcgcggcgctgattttaacgccaattgtcatcgccatg

SEQ ID NO: 118451 - DNA, 75 bp, synthetic construct
  source 1..75: mol_type = other DNA
ggactgttacaccctgttccgggatgcttaccatctggcggggactgaaatgccggattttcatcgcgaggatga

SEQ ID NO: 118452 - DNA, 75 bp, synthetic construct
  source 1..75: mol_type = other DNA
gcggtggagaatctgctgtatgccgcccgaaaacgggggctggaacccggtatcttctgcgccatccacacgtat

SEQ ID NO: 118453 - DNA, 75 bp, synthetic construct
  source 1..75: mol_type = other DNA
tgctctggctgcatgtactttcacagaagaacatgaccatcacctggggatactatttccgcaccgggatcgtca

SEQ ID NO: 118454 - DNA, 75 bp, synthetic construct
  source 1..75: mol_type = other DNA
ctgttgcctgacgatgctgaacggttcgcagcgatcgccggggatcatcaaacggcggtggaagggggaatgttc

SEQ ID NO: 118455 - DNA, 75 bp, synthetic construct
  source 1..75: mol_type = other DNA
ctgccttcacggggatttgcaacgatttggccgccgcctcagcctgtatgtgaacacggcagcggaagccatccg

SEQ ID NO: 118456 - DNA, 75 bp, synthetic construct
  source 1..75: mol_type = other DNA
gccctacggtgaaatgctggttggttcacgacgtatctctcaggacatcagcacccgtgatgaaggcgggggcgg

SEQ ID NO: 118457 - DNA, 75 bp, synthetic construct
  source 1..75: mol_type = other DNA
actggaaggtctgctgcgcctcgcgcatccgatcattccattcatcaccgaaaccatctggcagcgtgtgaaagt

SEQ ID NO: 118458 - DNA, 75 bp, synthetic construct
  source 1..75: mol_type = other DNA
attctgccgctggttaaccgtcgtattccgatcgttggcgacgaacacgccgacatggaaaaagggaccggctgc

SEQ ID NO: 118459 - DNA, 75 bp, synthetic construct
  source 1..75: mol_type = other DNA
caaactcgcccttacaggtcgatattcagctgttgcgcatcgattcccgtgaatcgcgcaacacgcccgcagagc

SEQ ID NO: 118460 - DNA, 75 bp, synthetic construct
  source 1..75: mol_type = other DNA
cgatccgcaaaacaaaccgcgagcgagctggcgtagtcacggtaatttgctgtttaccaactggctcaactatta

SEQ ID NO: 118461 - DNA, 75 bp, synthetic construct
  source 1..75: mol_type = other DNA
ggtaccagatacgtattcgcggtgaggacacggcaccggaggcggtgtatgcccgccttcacgaacaactgggtg

SEQ ID NO: 118462 - DNA, 75 bp, synthetic construct
  source 1..75: mol_type = other DNA
ggggctggaacccggtatattctgcgccatccatacgtatggccgtcgtctcaactggcatccgcatgtgcatgt

SEQ ID NO: 118463 - DNA, 75 bp, synthetic construct
  source 1..75: mol_type = other DNA
gaagaacatgaccatcacctggggatattatttccgcaccgggatcatcatgactctgcctgtgctgtttgtaac

SEQ ID NO: 118464 - DNA, 75 bp, synthetic construct
  source 1..75: mol_type = other DNA
tatttaccaactggctcaactattacgtctaccagatcacgccatacgatctgcgccgtatgaatccaacgctgg

SEQ ID NO: 118465 - DNA, 75 bp, synthetic construct
  source 1..75: mol_type = other DNA
gcgaattatggctggtggatgtcgaaggtggtaaagctaaactggatattatttttgatctctgccaacggatga

SEQ ID NO: 118466 - DNA, 75 bp, synthetic construct
  source 1..75: mol_type = other DNA
tcgtcaacaaacgcgaagaaccgcagtccattgaagttcatccacgccttattgaacgccgctccgtagctgacg

SEQ ID NO: 118467 - DNA, 75 bp, synthetic construct
  source 1..75: mol_type = other DNA
ccatcgccgcgccataacaagcacaatgatcatcgtggcgatcatcgtccggggcctgacaaacatcatcgctaa

SEQ ID NO: 118468 - DNA, 75 bp, synthetic construct
  source 1..75: mol_type = other DNA
aacgtgcgcaacgcccgctattttacgccggcgctgaccacgatccatcagccaaaagattcgctgggtgaaaca

SEQ ID NO: 118469 - DNA, 75 bp, synthetic construct
  source 1..75: mol_type = other DNA
atgggtggtacgccagtgtggccgctgattgcgctgtcgaatatcgctcagggctccgccgtgataggcattatc

SEQ ID NO: 118470 - DNA, 75 bp, synthetic construct
  source 1..75: mol_type = other DNA
gtacgccagaacaaacattacgttatctcaaccgactctcaggtccctttctcgaccgctttgatctctcactgg

SEQ ID NO: 118471 - DNA, 75 bp, synthetic construct
  source 1..75: mol_type = other DNA
gctatgggcgcactttgcgccgctgatgaaatgggtctgcgcgtaccgcaagatatttcgctgatcggttatgat

SEQ ID NO: 118472 - DNA, 75 bp, synthetic construct
  source 1..75: mol_type = other DNA
gaaaccataaccgctgcacgccagaacagacattacgttatctcaaccggctctcggggccctttctcgaccgct

SEQ ID NO: 118473 - DNA, 75 bp, synthetic construct
  source 1..75: mol_type = other DNA
atgaaatgggtctgcgcgtcccgcaggatgtttcgctgatcggttatgataacgtgcgcaacgctcgctacttta

SEQ ID NO: 118474 - DNA, 75 bp, synthetic construct
  source 1..75: mol_type = other DNA
tcgataacgcttttgaaggcggttacatggccgggcgctatctgattgaacgcggtcaccgcgaaattggcgtta

SEQ ID NO: 118475 - DNA, 75 bp, synthetic construct
  source 1..75: mol_type = other DNA
gaacgtgatgttgccaggtcccgacctttactccctctcatttattcacattacaaggatttcatacatgaaaac

SEQ ID NO: 118476 - DNA, 75 bp, synthetic construct
  source 1..75: mol_type = other DNA
cgcggtcaccgcgaaatcggcgttatccccggcccgctggaacgtaacaccggcgcaggccgccttgccggtttt

SEQ ID NO: 118477 - DNA, 75 bp, synthetic construct
  source 1..75: mol_type = other DNA
ctagtggaatattacaataatacctcattcaaaaaagttcaattgttaattcataaaatgatgaagcatgattat

SEQ ID NO: 118478 - DNA, 75 bp, synthetic construct
  source 1..75: mol_type = other DNA
gccgatttatcctgaccccgacgagctggatatctttggcgtcgtcacgcatatcatccaccgcccgagggagat

SEQ ID NO: 118479 - DNA, 75 bp, synthetic construct
  source 1..75: mol_type = other DNA
aagacgagcgtgtaattattttagaggacgttcacgaagtcacggtcgatcacgttgtagaagccgtttatatga

SEQ ID NO: 118480 - DNA, 75 bp, synthetic construct
  source 1..75: mol_type = other DNA
aatccctggtttttaaaaattgtgcatagtgaaaatcaaagtaaaggtgtgcattatgcaaaatcacagcgtctt

SEQ ID NO: 118481 - DNA, 75 bp, synthetic construct
  source 1..75: mol_type = other DNA
cttctataaatttgggatgttcatggaattctttaaccagaaacctgacttcgcctgataatcgtgttttatcct

SEQ ID NO: 118482 - DNA, 75 bp, synthetic construct
  source 1..75: mol_type = other DNA
agtgggacaagtacgcagcccaactagttgatgaagctccgacagaatggcatgactggaaaaatcgcattagtt

SEQ ID NO: 118483 - DNA, 75 bp, synthetic construct
  source 1..75: mol_type = other DNA
ttcgtctcttgttcgatctgaatgaagaaagatgtcgcgccgtctgcgcggtggctatgtctgacgggattactc

SEQ ID NO: 118484 - DNA, 75 bp, synthetic construct
  source 1..75: mol_type = other DNA
tctttacatcggtaagacgcctcgcgctgtagctgaaatggcgaaagcaggcaagctgcctgccttttacatggt

SEQ ID NO: 118485 - DNA, 75 bp, synthetic construct
  source 1..75: mol_type = other DNA
ggctgaaacagaaactactcggtcatatccgaaagctggctacagatacgataattaaccatgatgaacaactag

SEQ ID NO: 118486 - DNA, 75 bp, synthetic construct
  source 1..75: mol_type = other DNA
aaagctgttgttatgtgcggttaatgaatttgccgagtatggttatgaaggggcaagagtcgataatatcgtaaa

SEQ ID NO: 118487 - DNA, 75 bp, synthetic construct
  source 1..75: mol_type = other DNA
tcggctcagcttagtgcactgaccgcaactattcgtgataaatccagccagatcgtcaatacgcaggaaacgatt

SEQ ID NO: 118488 - DNA, 75 bp, synthetic construct
  source 1..75: mol_type = other DNA
ggcaggtatttgcgctggcaatggttatcgccatcatcatcccgattgtactcacctcgtttatctatcagcgga

SEQ ID NO: 118489 - DNA, 75 bp, synthetic construct
  source 1..75: mol_type = other DNA
attatgttgaaacacgaatctccctcgatcagcagctaatcatccagccagcagcgacttatttcatgcgggcat

SEQ ID NO: 118490 - DNA, 75 bp, synthetic construct
  source 1..75: mol_type = other DNA
caggaaattaactacgcgcatttgcagttaatggaatctttgttggctgaagggaagaaacgtaatatttttaag

SEQ ID NO: 118491 - DNA, 75 bp, synthetic construct
  source 1..75: mol_type = other DNA
accttgctgaccgaagggcagcaatctccgatcatcgtgttcccgaagaatgaagaaggcaagttcgtcatccaa

SEQ ID NO: 118492 - DNA, 75 bp, synthetic construct
  source 1..75: mol_type = other DNA
agcgctgccagcagatgatgatggttacagttctgcacccgctatatttggagtgatcacgtacatcattaatga

SEQ ID NO: 118493 - DNA, 75 bp, synthetic construct
  source 1..75: mol_type = other DNA
ggagtcatcatgaccgaccgtgttgctctggttccgtctactgtctgggttaaaacgctcgatggcgaaggcaag

SEQ ID NO: 118494 - DNA, 75 bp, synthetic construct
  source 1..75: mol_type = other DNA
taaaacgctcgatggcgaaggcaaggaaaagcatgttcatgtgcctgtgtcagacattgaactcctgagtgtcga

SEQ ID NO: 118495 - DNA, 75 bp, synthetic construct
  source 1..75: mol_type = other DNA
aattattacatgctgccaatgtggtacatggcggaagaccgtctcgcctggtgggataaattctcccaacccgct

SEQ ID NO: 118496 - DNA, 75 bp, synthetic construct
  source 1..75: mol_type = other DNA
aagatttaaacaggatgcttttttttattactttcgcgggtataatcccattaattattatttttataacttata

SEQ ID NO: 118497 - DNA, 75 bp, synthetic construct
  source 1..75: mol_type = other DNA
tctcgggctcaatgacttccgaatggatttgctcaactatgtgaaggctaatggcgaattgagcaacgtgccaaa

SEQ ID NO: 118498 - DNA, 75 bp, synthetic construct
  source 1..75: mol_type = other DNA
ttgctgatattaaatataacacccagtttagcttaaactatcaactcaaagaaagttttacaaacccagtaacca

SEQ ID NO: 118499 - DNA, 75 bp, synthetic construct
  source 1..75: mol_type = other DNA
catacagtcgcaatggttgttaccgaaggacaaaatgactggtgggaaaaacgtgcacattcgttaggtgttgtg

SEQ ID NO: 118500 - DNA, 75 bp, synthetic construct
  source 1..75: mol_type = other DNA
gtggtacaaaaacaagggagtacccacttctccccaggacaacgcgtagtactggcaagcaatggcagccaggtg

SEQ ID NO: 118501 - DNA, 75 bp, synthetic construct
  source 1..75: mol_type = other DNA
ggtacacgacaacaaggacatcagtaactttaaaagtatcaaccggaaatggtttgtatggaactatgattatcg

SEQ ID NO: 118502 - DNA, 75 bp, synthetic construct
  source 1..75: mol_type = other DNA
ctgacgaaaccgctggggattggcgttcttaccacggctgagaaaaaatcactgctgaaaccagaacatcaggga

SEQ ID NO: 118503 - DNA, 75 bp, synthetic construct
  source 1..75: mol_type = other DNA
cgctatgcatgccgtcaggcgggtattgcgctggctggcggtcactccatcgatgcgccggagccgatttttggt

SEQ ID NO: 118504 - DNA, 75 bp, synthetic construct
  source 1..75: mol_type = other DNA
ctcggtattaactacaccacagttagcttctggatatttcaatgctggttttttactgataaatattgatgagtg

SEQ ID NO: 118505 - DNA, 75 bp, synthetic construct
  source 1..75: mol_type = other DNA
ggaattgctaaaggttactttaactccggttttttattgattaatactgccaaatgggcggctcagcaggtttct

SEQ ID NO: 118506 - DNA, 75 bp, synthetic construct
  source 1..75: mol_type = other DNA
gaactgacaagaattttctttttggttgcggaatttcgattgcttcaatattaaaatataatgaaggaaatcgct

SEQ ID NO: 118507 - DNA, 75 bp, synthetic construct
  source 1..75: mol_type = other DNA
gaatccaagcgtcaacgtcagtcagcacaaccgcctgcacccttattacctcgtctacattaatcgcgaggggga

SEQ ID NO: 118508 - DNA, 75 bp, synthetic construct
  source 1..75: mol_type = other DNA
atgagcgagaactcgattcgtttgacccaatacagccacggagctggttgcggctgtaaaatttccccaaaagtg

SEQ ID NO: 118509 - DNA, 75 bp, synthetic construct
  source 1..75: mol_type = other DNA
atgcagcaggtgtttttccaggaaactgagtttcttaattcagttattgattataatcataaagtagaaacagaa

SEQ ID NO: 118510 - DNA, 75 bp, synthetic construct
  source 1..75: mol_type = other DNA
ggaaagaacacccgccacaggcccatccattgtttgccgatctggccagctgcggttttcccagccctgccgctg

SEQ ID NO: 118511 - DNA, 75 bp, synthetic construct
  source 1..75: mol_type = other DNA
ggaataatacgattgtgttcaaagtcgacaaaccactgaatgcagcctttccttcagataccagcgtctcagcat

SEQ ID NO: 118512 - DNA, 75 bp, synthetic construct
  source 1..75: mol_type = other DNA
tggataaaaacagcctccagctttcattgaacaacctggggatgacggcagcggataagcaggatttagaaaatc

SEQ ID NO: 118513 - DNA, 75 bp, synthetic construct
  source 1..75: mol_type = other DNA
gataccgggcaagtaccagatatgagtagttttacaacggggcactctggagcagcagactggccgattcctaaa

SEQ ID NO: 118514 - DNA, 75 bp, synthetic construct
  source 1..75: mol_type = other DNA
gccgatttaccccgacccggacgatctggatatctttggcgtcgtcacgcacatcatccaccgcccgagggagat

SEQ ID NO: 118515 - DNA, 75 bp, synthetic construct
  source 1..75: mol_type = other DNA
acccgcgccctgctcaaagccattagcccgcaggaacgcgtgataatcatggaggatgctcacgaagttgaagct

SEQ ID NO: 118516 - DNA, 75 bp, synthetic construct
  source 1..75: mol_type = other DNA
cttctgctgacgcctcgactgacgctgcagcccatgaatgcctcctggtcgccgatttatcctgaccccgacgag

SEQ ID NO: 118517 - DNA, 75 bp, synthetic construct
  source 1..75: mol_type = other DNA
gaatcaattacactgacaatggcagatatccaggagtctctgctttctccagcaaccatgcctgcttatggagtt

SEQ ID NO: 118518 - DNA, 75 bp, synthetic construct
  source 1..75: mol_type = other DNA
taaagatgatggcaacaccattatggtggtacagaaacagggcaatacccacttctctccgggacaacgtgttat

SEQ ID NO: 118519 - DNA, 75 bp, synthetic construct
  source 1..75: mol_type = other DNA
cctagcacaaagaactggactcatgcaatatattttcgttttgttattgcagattactttattaataaggcggct

SEQ ID NO: 118520 - DNA, 75 bp, synthetic construct
  source 1..75: mol_type = other DNA
ccctcgcctcggctgaaaaactgccttacagcaagccgcatccgcaagtatatctcgactgcgcagcaaaactgg

SEQ ID NO: 118521 - DNA, 75 bp, synthetic construct
  source 1..75: mol_type = other DNA
ggacgaatgttgttttcccgctacctttccccgcgcgggtcgaatcaattacactgacaatggcagatatccagg

SEQ ID NO: 118522 - DNA, 75 bp, synthetic construct
  source 1..75: mol_type = other DNA
cttgagaaacagcgggcttatctgtcgatgatggcgcaaaaacgcgtcgatggcctgctggtgatgtgttctgag

SEQ ID NO: 118523 - DNA, 75 bp, synthetic construct
  source 1..75: mol_type = other DNA
ggtcgtttacaacaacgaactattccatctcaattaactggaatgatatcggtactgtaacaactgaaacactat

SEQ ID NO: 118524 - DNA, 75 bp, synthetic construct
  source 1..75: mol_type = other DNA
atttcagcctgtcatggacggcgccggggacggccgaggtggttctgccggtgtccggggatggtaatgcagtat

SEQ ID NO: 118525 - DNA, 75 bp, synthetic construct
  source 1..75: mol_type = other DNA
gatttagcaaaacaatataattcaagaattaatatttatgttatcaattgtgataagctgaagtcattaccaagc

SEQ ID NO: 118526 - DNA, 75 bp, synthetic construct
  source 1..75: mol_type = other DNA
agatgcacgccgacctgttccgcgccgattactggcgcgcactacaaaaccgcattcgtgaaggacatgtggaag

SEQ ID NO: 118527 - DNA, 75 bp, synthetic construct
  source 1..75: mol_type = other DNA
tgtttattgatacctgcctgacgacgaccgccgaagcgagcatcgtctttggcttcgcgcgatcctattttatgg

SEQ ID NO: 118528 - DNA, 75 bp, synthetic construct
  source 1..75: mol_type = other DNA
tcacgccagtccgggcagtgcgtttacggttacgaaatactccacgctcgggatgattaatcaactgcaaaatag

SEQ ID NO: 118529 - DNA, 75 bp, synthetic construct
  source 1..75: mol_type = other DNA
gtctggtggtggagcagttacgctgcattaccaacggccaaagcacgaatgcggcatttttactgcacgtcaaag

SEQ ID NO: 118530 - DNA, 75 bp, synthetic construct
  source 1..75: mol_type = other DNA
aatccaaccgatctggcgattgaagccatccgcagtctgcgtaccagtctgcacttcgcgatgatgcaggcacag

SEQ ID NO: 118531 - DNA, 75 bp, synthetic construct
  source 1..75: mol_type = other DNA
acaccaaagttcacccggcgtaccgcacgctgctggagaaacgtcaggcgctggaagacgaaaaagccaaactta

SEQ ID NO: 118532 - DNA, 75 bp, synthetic construct
  source 1..75: mol_type = other DNA
gctcatgttcgcgcctgctatcaactggtgaaagagcacgaccgcgtgggtcgaatggcggacacccaggaattt

SEQ ID NO: 118533 - DNA, 75 bp, synthetic construct
  source 1..75: mol_type = other DNA
tggggctgggcaacctgctgtgggccgatgaaggcttcggcgtgcgggtggcggaacggctgtatgcccattacc

SEQ ID NO: 118534 - DNA, 75 bp, synthetic construct
  source 1..75: mol_type = other DNA
tggggctgggcaacctgctgtgggccgatgaaggtttcggcgtgcgggtggcggaacggttgtatgcccattacc

SEQ ID NO: 118535 - DNA, 75 bp, synthetic construct
  source 1..75: mol_type = other DNA
gttgattcgttcacgcctggtgctcggtaaaacggtggacgatcttgacctcgatatcgcggtgagtaaaaacac

SEQ ID NO: 118536 - DNA, 75 bp, synthetic construct
  source 1..75: mol_type = other DNA
ggcaaggcagcatttgacgtatttacagcagcatctgaaaaagacgtctatggaatccgaaaagatctggcggac

SEQ ID NO: 118537 - DNA, 75 bp, synthetic construct
  source 1..75: mol_type = other DNA
gcgggccagatgctgaaaaaagaaggcgtcacgctgatggttgaagccattcacgccagcccgggcagtgagttt

SEQ ID NO: 118538 - DNA, 75 bp, synthetic construct
  source 1..75: mol_type = other DNA
atccaccagacggacgacggcgagttatttattgatacttgcctgacgacgaccgccgaagcgagcattgttttt

SEQ ID NO: 118539 - DNA, 75 bp, synthetic construct
  source 1..75: mol_type = other DNA
ataccggtgaagatcgcgaacagatccgcgacattcttaacagcatcgcccgtaactatcaggaacaaaatattg

SEQ ID NO: 118540 - DNA, 75 bp, synthetic construct
  source 1..75: mol_type = other DNA
aggcggcgatcaacgctgcacaaagtttgctgcccagtgggatgcccagccgtccgacctatcgcaaagcgaacc

SEQ ID NO: 118541 - DNA, 75 bp, synthetic construct
  source 1..75: mol_type = other DNA
tcaccattgtcggcggtctggtaatgagccagctcctgacgctgtataccacgccggtggtgtatctctttttcg

SEQ ID NO: 118542 - DNA, 75 bp, synthetic construct
  source 1..75: mol_type = other DNA
tgacgcgtatgccgatagcttcacgctcgacccggttgtggaaaaagaagagtggtgtcgcattaccggtcgtaa

SEQ ID NO: 118543 - DNA, 75 bp, synthetic construct
  source 1..75: mol_type = other DNA
tattatccagacggttgacagcatccgggcaaaattaccggagttgcaggagaccattccggcggcgattgatct

SEQ ID NO: 118544 - DNA, 75 bp, synthetic construct
  source 1..75: mol_type = other DNA
caaaaaagggcgctatatccactccaccgacgccggaaaagcgctattccattcgctgccagaaatggcgacgcg

SEQ ID NO: 118545 - DNA, 75 bp, synthetic construct
  source 1..75: mol_type = other DNA
ggagcgctcacttgggcgcattgccggggtcagtgaaatgacctccagcagttcgctcggcagcacgcgcattat

SEQ ID NO: 118546 - DNA, 75 bp, synthetic construct
  source 1..75: mol_type = other DNA
acctaccgcgtatgcttttgggcgcatgaattttcgcggtaaggccatcgcggaaatgctgacattaattccact

SEQ ID NO: 118547 - DNA, 75 bp, synthetic construct
  source 1..75: mol_type = other DNA
tgtttgacgcagaaacagacatgaatgaagttgtggcgattctggaaaaccatccgctactcggcgcgggcttcg

SEQ ID NO: 118548 - DNA, 75 bp, synthetic construct
  source 1..75: mol_type = other DNA
cgaagcttatgccgacagcttcactctggacccggttgtggaaaaagaagagtggtgtcgcattaccggtcgtaa

SEQ ID NO: 118549 - DNA, 75 bp, synthetic construct
  source 1..75: mol_type = other DNA
gcggtcaacgtgatgctagatccgggcctggcgtttggtacggggactcatccaaccacctctctgtgcctgcaa

SEQ ID NO: 118550 - DNA, 75 bp, synthetic construct
  source 1..75: mol_type = other DNA
cattcgaacagacctgatttacctcctgttgattatgcaccgccagagttaccgagtgtggactataacaggttg

SEQ ID NO: 118551 - DNA, 75 bp, synthetic construct
  source 1..75: mol_type = other DNA
ttaccgttggggtgcacctaacatgcgtcgccgtctgctactggacagcatcaggccaataaaacaggtagcaac

SEQ ID NO: 118552 - DNA, 75 bp, synthetic construct
  source 1..75: mol_type = other DNA
tgattattcagtgggggcaggcgagatttggtgggtctggtggtgaagatgccggatatcttaacgattttcctt

SEQ ID NO: 118553 - DNA, 75 bp, synthetic construct
  source 1..75: mol_type = other DNA
aactaccggaaacatgccgggctgttatcaagcgtaaggacggacacatcgttggtgtgcgtgttctgaccgatg

SEQ ID NO: 118554 - DNA, 75 bp, synthetic construct
  source 1..75: mol_type = other DNA
gaggtcagaaagaacgagtttggctttgctgaaggcgcggcggtatttggcgaaagttacaaagccctgccggaa

SEQ ID NO: 118555 - DNA, 75 bp, synthetic construct
  source 1..75: mol_type = other DNA
agacaacgccgcagatgcagctgccgcacgcaaggcgaaggcgctgccgttcggcgggcggcttgacccatataa

SEQ ID NO: 118556 - DNA, 75 bp, synthetic construct
  source 1..75: mol_type = other DNA
gcactggatgaagtcatggccacgctgaccacgccggcccgcagcagagttatcagcattgttaacggcaactga

SEQ ID NO: 118557 - DNA, 75 bp, synthetic construct
  source 1..75: mol_type = other DNA
ataaaaccgcatggatgatgattcgtctgcatgcgctgagtaatgagggcgcagtattccccacctacgatgaac

SEQ ID NO: 118558 - DNA, 75 bp, synthetic construct
  source 1..75: mol_type = other DNA
cgggccgcgtattgaacagcgtcctttaacccatgtggaggctgcaaaaatcctgcgcgagaaattcagcgctgc

SEQ ID NO: 118559 - DNA, 75 bp, synthetic construct
  source 1..75: mol_type = other DNA
tgacgaaaaacatgtgccgctcactgggcatcgacctgatagcgcacaagccgcataacgcccgcgccaccggac

SEQ ID NO: 118560 - DNA, 75 bp, synthetic construct
  source 1..75: mol_type = other DNA
gataagatcctgtacctggatgctgatatcgcctgtcagggaaccttaaaaccgctgataacaatggatcttgcc

SEQ ID NO: 118561 - DNA, 75 bp, synthetic construct
  source 1..75: mol_type = other DNA
gtcgctaccagtagatgatgacagctacagttctgcacccgctatattcggggtgatcacttacatcattaatga

SEQ ID NO: 118562 - DNA, 75 bp, synthetic construct
  source 1..75: mol_type = other DNA
tcgcccgagctatcatgccgcatctgcaaaagatggctggcagcgtatgctggagtggtttaagcagtatggtgt

SEQ ID NO: 118563 - DNA, 75 bp, synthetic construct
  source 1..75: mol_type = other DNA
cagctacagcttcttgaatggcaagtcgtgcgaatcaatcgtgtacccagacggcacgggcaaaacgacttgtga

SEQ ID NO: 118564 - DNA, 75 bp, synthetic construct
  source 1..75: mol_type = other DNA
ctcgcaggtgctggccgatctcgatcatgtcgccagttgggcgtcacgcaacggcggcgatgttcatcgtttaat

SEQ ID NO: 118565 - DNA, 75 bp, synthetic construct
  source 1..75: mol_type = other DNA
gtgactgataaacgcaaaaaacgcgccgatgccggacgcagcgccctgacccgcgacgaagccgcgctgatatct

SEQ ID NO: 118566 - DNA, 75 bp, synthetic construct
  source 1..75: mol_type = other DNA
tgcacccggaacaactggatgcccctgcaccgcataccgaagtggccagtctgcatcccaatcatgtctggcaga

SEQ ID NO: 118567 - DNA, 75 bp, synthetic construct
  source 1..75: mol_type = other DNA
ctatcccttcacaaggggataacatgcctgcttaccatgccagaccaaagcagagcgatggcccactgccagtgg

SEQ ID NO: 118568 - DNA, 75 bp, synthetic construct
  source 1..75: mol_type = other DNA
accgggtaaaaaaatggggcaaaaaagacagagttcggattccgaaccatcaggaaaatcagcaggttatcacag

SEQ ID NO: 118569 - DNA, 75 bp, synthetic construct
  source 1..75: mol_type = other DNA
ctcgacacgcggttgtcaccgctggacaagatgggctggatgatgatccggctgtatgcacaaaataatgagggg

SEQ ID NO: 118570 - DNA, 75 bp, synthetic construct
  source 1..75: mol_type = other DNA
gaagccgggttcgggatccgaactcagtgtaaatcgaataaaaaacaaccatcaagaactgagtacggaaaccga

SEQ ID NO: 118571 - DNA, 75 bp, synthetic construct
  source 1..75: mol_type = other DNA
taccgacggcgatggagtctgttgctaaccaggtcattcgctcctcaagtgtcaagggggctgacattaacgccg

SEQ ID NO: 118572 - DNA, 75 bp, synthetic construct
  source 1..75: mol_type = other DNA
ttacaggtgatggacagttcgaagttctacaagaacaagccgaagaatctgcaacgtatcgccagtgaccgggta

SEQ ID NO: 118573 - DNA, 75 bp, synthetic construct
  source 1..75: mol_type = other DNA
gccatctgttgattctcgatgctattgattacgggctggaacccggaacactacgaacatatgccggagagcgca

SEQ ID NO: 118574 - DNA, 75 bp, synthetic construct
  source 1..75: mol_type = other DNA
gtctggaactctacttaccgaaagatcagccagaagaaatgaaagccgacgtggtggtcgctaacatccttgcag

SEQ ID NO: 118575 - DNA, 75 bp, synthetic construct
  source 1..75: mol_type = other DNA
aattgacggtgaagaggtttaccgggcagagcgcgaagctgaacctcagccagcgccagccgcactgccagcaga

SEQ ID NO: 118576 - DNA, 75 bp, synthetic construct
  source 1..75: mol_type = other DNA
ctgaaaaaagcgccgtccgttgaagtatgccgtgagctggctgtggctgcacctgaacttcgcaaggtcacgcca

SEQ ID NO: 118577 - DNA, 75 bp, synthetic construct
  source 1..75: mol_type = other DNA
caccattgatgaactgtggcgggatatgcgctgggcagtggcgcgcatccaggacaagccacgctgcatcgtgag

SEQ ID NO: 118578 - DNA, 75 bp, synthetic construct
  source 1..75: mol_type = other DNA
gtagtgtcgcaggaagaccaggcgatgttgattcgccagcttcaggctcttcctgaagaacaggcacaacaggtc

SEQ ID NO: 118579 - DNA, 75 bp, synthetic construct
  source 1..75: mol_type = other DNA
atggaaagaggcattgttcattcgaacagacctgatttacctcctgttgattatgcaccgccagagttaccgagt

SEQ ID NO: 118580 - DNA, 75 bp, synthetic construct
  source 1..75: mol_type = other DNA
atgtttgatagactggagcaaaaaggaattctttttgtcgatacaacagagacaaatgtcttatatgaccgcgcg

SEQ ID NO: 118581 - DNA, 75 bp, synthetic construct
  source 1..75: mol_type = other DNA
tttgccaaccgatctatgaggaatggttggccgaagccgttgctaaaggtcgtgttattgcccctggtttttttt

SEQ ID NO: 118582 - DNA, 75 bp, synthetic construct
  source 1..75: mol_type = other DNA
ttcgccgatattcccacgttgctaagcggtctggtagcaaaagtgcctgactcacaggtgctggccgatctcgat

SEQ ID NO: 118583 - DNA, 75 bp, synthetic construct
  source 1..75: mol_type = other DNA
ttaggtcaggctcgttccggggcaacaattgtatcgagtagcaatcagatacttgatgatgattatgatccaccg

SEQ ID NO: 118584 - DNA, 75 bp, synthetic construct
  source 1..75: mol_type = other DNA
ctacgacactaaagaatatgctagaacttctttatgaagaaaaaaaagggaaagttaatataatcagtattgaag

SEQ ID NO: 118585 - DNA, 75 bp, synthetic construct
  source 1..75: mol_type = other DNA
gttgataaggataaaaccgcagacaatgcggcggaatatttcttcgatccatccgtgggtatcaacgtttacggc

SEQ ID NO: 118586 - DNA, 75 bp, synthetic construct
  source 1..75: mol_type = other DNA
tgatattgtcgataacccgaccaccggtattcgccagggtaaagccgttgttcgctacaactacagccccgtacc

SEQ ID NO: 118587 - DNA, 75 bp, synthetic construct
  source 1..75: mol_type = other DNA
gagcagtttgccgaacgtgaagggatgatgatttggcctaacttcatcgcctacaacccgcagaccggcgttaat

SEQ ID NO: 118588 - DNA, 75 bp, synthetic construct
  source 1..75: mol_type = other DNA
gctggacgatgtaggctggatggacgttggctttaacggcggcggcgtggcagtaggtaacccaacgccagatat

SEQ ID NO: 118589 - DNA, 75 bp, synthetic construct
  source 1..75: mol_type = other DNA
atgaatatgaatttgagagacttaaagttggaaatattgcaatagtaaaatccggaaatttattacaaaaaaaca

SEQ ID NO: 118590 - DNA, 75 bp, synthetic construct
  source 1..75: mol_type = other DNA
cagtaaataaaatttcaggcatcgataatattacagaagaaaggaaaaaatatcttttcagcagagataacgaga

SEQ ID NO: 118591 - DNA, 75 bp, synthetic construct
  source 1..75: mol_type = other DNA
actggctatattcgatcgattgaaagatcagggcgtggatgaatttaaacttacagatccggaattgatcactgg

SEQ ID NO: 118592 - DNA, 75 bp, synthetic construct
  source 1..75: mol_type = other DNA
atctctcaaaaccgtacagaataatggacaggatctattaccagtcgaaaaaagagcttcaatgctacttttcga

SEQ ID NO: 118593 - DNA, 75 bp, synthetic construct
  source 1..75: mol_type = other DNA
cgcctacaacccgaaaagtggcaaaaacgaaacgttccccgcgcctgcctatgcgtgcggccttcgtgcgtacat

SEQ ID NO: 118594 - DNA, 75 bp, synthetic construct
  source 1..75: mol_type = other DNA
ctgactgttacaggcggtgcgcatggtgttgagaacattggtgacaacggcacggttaacaacaaaggagatatt

SEQ ID NO: 118595 - DNA, 75 bp, synthetic construct
  source 1..75: mol_type = other DNA
tcccgctattgttggtgcagtttctgctgcgacaagcgctgctacggcagccgcaccccgggcaggtgtaataaa

SEQ ID NO: 118596 - DNA, 75 bp, synthetic construct
  source 1..75: mol_type = other DNA
taacggtggcggcgtggcggtgggtaaccctacaccagatatcgacgccgttgccagccaggggctgattttaac

SEQ ID NO: 118597 - DNA, 75 bp, synthetic construct
  source 1..75: mol_type = other DNA
acaccctaccttgcaaaattattatctactttaaacttaagaaggctcgccgttggtaccgctcagcaatattta

SEQ ID NO: 118598 - DNA, 75 bp, synthetic construct
  source 1..75: mol_type = other DNA
aacgaacattcgaaattacagaaagcggctacacactggcaaaacagatcgctgatagcaattatgagctacccg

SEQ ID NO: 118599 - DNA, 75 bp, synthetic construct
  source 1..75: mol_type = other DNA
cggatacaacattttaaaagctattttggacatagagttctcaccgccgacagtggttagcttttgtagtttagg

SEQ ID NO: 118600 - DNA, 75 bp, synthetic construct
  source 1..75: mol_type = other DNA
tgctgctggtttcatctggtgccggcgcagcgcttcccatgcgttatatgcaaaccactcaggatgcggctatct

SEQ ID NO: 118601 - DNA, 75 bp, synthetic construct
  source 1..75: mol_type = other DNA
atcaccttctccgccatcagcctggtgtgcggtttcgtctattcaaagttcattgtctttagggatgcgaaatga

SEQ ID NO: 118602 - DNA, 75 bp, synthetic construct
  source 1..75: mol_type = other DNA
aatcgtcacactggtggcgttctcagccattagccttgtatgtggctttttctattctaagttcattgtctttag

SEQ ID NO: 118603 - DNA, 75 bp, synthetic construct
  source 1..75: mol_type = other DNA
acaagccgctgacgccgtcgaacgtgaaggatgtgttaagcgatatccgggcaaaactgagtgcctttgtgacag

SEQ ID NO: 118604 - DNA, 75 bp, synthetic construct
  source 1..75: mol_type = other DNA
ttatacccagagcggatatcagggtggattcaccggcacagtaatgcaaacggcgggatcgtcggtgtttaacct

SEQ ID NO: 118605 - DNA, 75 bp, synthetic construct
  source 1..75: mol_type = other DNA
ggtaagctccgtgatatcagcaatcagcaaaatggatcattcataccagcgagaggtccgataattccgcggcca

SEQ ID NO: 118606 - DNA, 75 bp, synthetic construct
  source 1..75: mol_type = other DNA
cgtgaacgcctgaaaaaagtggtcgcagagtattgcgacgagcagggcgggtttatcatccgtaccgcagcggaa

SEQ ID NO: 118607 - DNA, 75 bp, synthetic construct
  source 1..75: mol_type = other DNA
gtgtgcattatgcaaaatcacagcgtctcttagaaattaaccatgcgcacttgcagttaatggaatccttattgg

SEQ ID NO: 118608 - DNA, 75 bp, synthetic construct
  source 1..75: mol_type = other DNA
ggaaaccgtatgctatgaaatcatgcgtgagatcgttcgcgtgcaccatgcttacgactctgaccgtttcctggt

SEQ ID NO: 118609 - DNA, 75 bp, synthetic construct
  source 1..75: mol_type = other DNA
tttcgcatatggttctttttacaacggcataaagactttgctttcaaaccttttttcaccaattttaacactatc

SEQ ID NO: 118610 - DNA, 75 bp, synthetic construct
  source 1..75: mol_type = other DNA
tgccgaaatagtacgggataattacgggcagcttaactatatcggtcagtccagagttgcgccaccaccacgaag

SEQ ID NO: 118611 - DNA, 75 bp, synthetic construct
  source 1..75: mol_type = other DNA
gaaatagtcagggataattacgaacatcttaactatatcggtcagtccagccttgcgccgccaccacgcagacga

SEQ ID NO: 118612 - DNA, 75 bp, synthetic construct
  source 1..75: mol_type = other DNA
aacacgccactggatgagcgccagcccgttgccatcaaccgcaacaactttaacgcagtgctggatcaggcaggg

SEQ ID NO: 118613 - DNA, 75 bp, synthetic construct
  source 1..75: mol_type = other DNA
ctcctacgacaaattgaagcagagaaaggtcatagcctattagctgctctttacaatacagctgaggatgccgac

SEQ ID NO: 118614 - DNA, 75 bp, synthetic construct
  source 1..75: mol_type = other DNA
gaatggagatacgacaatcagcggagaattccctctggggtttgccggggttattcgggtacaggataaagcttt

SEQ ID NO: 118615 - DNA, 75 bp, synthetic construct
  source 1..75: mol_type = other DNA
gcggaacttgagaaaaaaaccggtaagaaaccgaatgtggttgttttcttgctggatgatgtgggctggatggac

SEQ ID NO: 118616 - DNA, 75 bp, synthetic construct
  source 1..75: mol_type = other DNA
ctgcgtcgggtcaacggcgtcgcgctctgtttaatcgaccactacttcgcggacctcaccctctggccgacgctg

SEQ ID NO: 118617 - DNA, 75 bp, synthetic construct
  source 1..75: mol_type = other DNA
acgccgttggacgagcgaactgccattgctatcaaccgctataacctcaacgcagtcatttcagaagctgacatt

SEQ ID NO: 118618 - DNA, 75 bp, synthetic construct
  source 1..75: mol_type = other DNA
atcaagaatttctataccggaaaggttacaatctattcgtcttcagtttaaccctttagggcaaggtggaagata

SEQ ID NO: 118619 - DNA, 75 bp, synthetic construct
  source 1..75: mol_type = other DNA
ctctctaatccgcgtaaccgccgtaacgagatgatgacctgcgcccggggaatggagcaggtcgccgaagcacgc

SEQ ID NO: 118620 - DNA, 75 bp, synthetic construct
  source 1..75: mol_type = other DNA
tatctgtggcatgtggtgcgcttctccttctggcaggcgtttctctcggcgctgctctctgtcgtacccgcaata

SEQ ID NO: 118621 - DNA, 75 bp, synthetic construct
  source 1..75: mol_type = other DNA
acgaaacatcatcagcaggcactggaaacggcgcgcgcgttacaccagcaacgccagcattatgcaaatgagttg

SEQ ID NO: 118622 - DNA, 75 bp, synthetic construct
  source 1..75: mol_type = other DNA
cgtaaggtatttgacaaaaaatcggtagcggtggccactgaacgctacatcatggcgaacgctgaaaagcgggaa

SEQ ID NO: 118623 - DNA, 75 bp, synthetic construct
  source 1..75: mol_type = other DNA
ccaacctcttatcctgcaaagcattaaaaccaaattactttcatcaagactaaataaatttaatgacttcgagga

SEQ ID NO: 118624 - DNA, 75 bp, synthetic construct
  source 1..75: mol_type = other DNA
gtaatgatcaatcgcggggcgttcacgccccgctttctttcccgccgactaacatccttcccccgtccgttgtat

SEQ ID NO: 118625 - DNA, 75 bp, synthetic construct
  source 1..75: mol_type = other DNA
cgtggcgttctcaaaagatagctgatggattgaaaccgtcatctgctaacaggtacatgaatcggttatccggaa

SEQ ID NO: 118626 - DNA, 75 bp, synthetic construct
  source 1..75: mol_type = other DNA
tcaacgcccaggcgcgttttagccagaatctgctggatcagggcagccatcccaccagcgaaaaactgctgtcgg

SEQ ID NO: 118627 - DNA, 75 bp, synthetic construct
  source 1..75: mol_type = other DNA
tcaacgcccaggcgcgttttagccagaatctacttgatcagggcagtcaccccaccagcgaaaaactgctgtctg

SEQ ID NO: 118628 - DNA, 75 bp, synthetic construct
  source 1..75: mol_type = other DNA
cgccgtttcctgctgcaattgtcatctttagaactgagccacgtaagcatgaaattacgcagatggtttgctgtg

SEQ ID NO: 118629 - DNA, 75 bp, synthetic construct
  source 1..75: mol_type = other DNA
tgcgaaatcgaaattttcgccacgctttcgccgctgtttgatgcagaacgcttcggcattaaagtcgttccttca

SEQ ID NO: 118630 - DNA, 75 bp, synthetic construct
  source 1..75: mol_type = other DNA
cggctcgctgcacgattttctgcgcgagcaaaccggaattgcgctgcgccgcagccagacgcggatcagcgcccg

SEQ ID NO: 118631 - DNA, 75 bp, synthetic construct
  source 1..75: mol_type = other DNA
cgaaaaaacactcgccacttgaaataaagtggacatgcgccgggaatataccagtaaaaacggcaattaaaggtt

SEQ ID NO: 118632 - DNA, 75 bp, synthetic construct
  source 1..75: mol_type = other DNA
caattttatagcctgggaacattaacaccgggagcggcgaaaaaacactcaccgcttgaaataaagtggacatgt

SEQ ID NO: 118633 - DNA, 75 bp, synthetic construct
  source 1..75: mol_type = other DNA
atggcgatatggtgcagccgctgcgtgtgaaagtggatcgcgaagcacgtcgcctggcgggttatcgttacggtc

SEQ ID NO: 118634 - DNA, 75 bp, synthetic construct
  source 1..75: mol_type = other DNA
ccgcgtcatgcggatattttactgtttaccggcgcggtcacccgtgcaatgcgatcccctgcgctgcgtgcgtgg

SEQ ID NO: 118635 - DNA, 75 bp, synthetic construct
  source 1..75: mol_type = other DNA
taacagcagacaaaaatactctggtcgctgaagcccgccgtaatctggccactgtacttaaacgcaacgcggacc

SEQ ID NO: 118636 - DNA, 75 bp, synthetic construct
  source 1..75: mol_type = other DNA
agcaaaggtagaaacaaagcaacaacgagatttaatgccaattgaacaagttgtatctaatcttatctctgaatg

SEQ ID NO: 118637 - DNA, 75 bp, synthetic construct
  source 1..75: mol_type = other DNA
gtaccgctacagaccgaaatgcatgcgtatatggagatcctgaaaaaatatccaccacgcgcgcagattaaatct

SEQ ID NO: 118638 - DNA, 75 bp, synthetic construct
  source 1..75: mol_type = other DNA
ctgcctacaggaattctgcaggaaactggcacgcttaatttattcctgaaaaccaccgacagcgagtctggccat

SEQ ID NO: 118639 - DNA, 75 bp, synthetic construct
  source 1..75: mol_type = other DNA
gccacgctgtatggctttgcgatggcgctcggcctgctggagcagaaaatccacgctcgtgggccgggtgaactg

SEQ ID NO: 118640 - DNA, 75 bp, synthetic construct
  source 1..75: mol_type = other DNA
tcacgtcgctgacgcgctggggataaccgagggggagaacgtcatccacctgcgcaccctgcgtcgggtcaacgg

SEQ ID NO: 118641 - DNA, 75 bp, synthetic construct
  source 1..75: mol_type = other DNA
ctggtgaacacgggcctgtatccgccaatgtttcattcccaattccatttacacagacaccgggcattgtaattg

SEQ ID NO: 118642 - DNA, 75 bp, synthetic construct
  source 1..75: mol_type = other DNA
atttgagtggaaaggatgtagctggtcttctcgcataccttggtttgggagaagcggcaaaacggaatgtaggaa

SEQ ID NO: 118643 - DNA, 75 bp, synthetic construct
  source 1..75: mol_type = other DNA
acaattggcgggattacgccagcaagaaaactggcgattttgagcgagatgttcggtgttagaacggcatggcat

SEQ ID NO: 118644 - DNA, 75 bp, synthetic construct
  source 1..75: mol_type = other DNA
aacataatgccttaatcaaaaatggcctgcacaaagtgataagtggagacacctcctgggatgaagtgatgcgcg

SEQ ID NO: 118645 - DNA, 75 bp, synthetic construct
  source 1..75: mol_type = other DNA
taaatattcttgatatcgccgctaactatgctgatttcgtaacggaaactgttttaagaaaaacgacggacgggg

SEQ ID NO: 118646 - DNA, 75 bp, synthetic construct
  source 1..75: mol_type = other DNA
cggctggttcgtcgtctttgtccacaatgccgacaattcactccagtatccccccaacaagcgcagatgtttaca

SEQ ID NO: 118647 - DNA, 75 bp, synthetic construct
  source 1..75: mol_type = other DNA
ggtttgggagaagcggcaaaaaggaatgtggggacagggacgaatcagatacctgatatgggtagcttcacgctt

SEQ ID NO: 118648 - DNA, 75 bp, synthetic construct
  source 1..75: mol_type = other DNA
acaggggcaataatcccgcattcgctggcctacgcacagctaaccgctgatatggcgctgaatgaggctaaagcc

SEQ ID NO: 118649 - DNA, 75 bp, synthetic construct
  source 1..75: mol_type = other DNA
gcaaatgcgcatgcataatgtcgctggccgggcgaccgtgcgccagcaaatcagccattgctttaagatatggcg

SEQ ID NO: 118650 - DNA, 75 bp, synthetic construct
  source 1..75: mol_type = other DNA
caaccgccgccgcgctcactacgctgatgcacgcgctgattgatatttctgttattgctgacatggcgcataagc

SEQ ID NO: 118651 - DNA, 75 bp, synthetic construct
  source 1..75: mol_type = other DNA
taaaagctgcatgttttttactggaaaccgccgaacattcaggaacgggtagcgatattctcaatattgcgtcgg

SEQ ID NO: 118652 - DNA, 75 bp, synthetic construct
  source 1..75: mol_type = other DNA
agcggcaaaacggaatgtgggcacaggagataatcagataccggatatgggagcattcgcttctggttcgggatg

SEQ ID NO: 118653 - DNA, 75 bp, synthetic construct
  source 1..75: mol_type = other DNA
cgatactgattctggcactgacgtatcaagaacgcgattcactgtggcgtatacgacacccaatctcggcgaaat

SEQ ID NO: 118654 - DNA, 75 bp, synthetic construct
  source 1..75: mol_type = other DNA
atgccatttgctcgttatttctgcattttcataaacgttggtttgggaaaagcggcaaaacgggatgtagggaca

SEQ ID NO: 118655 - DNA, 75 bp, synthetic construct
  source 1..75: mol_type = other DNA
agtatcagactccacgccgctggctgtattaacctcgctgcgcctgcagttagccacccagatgttgtcacgcgg

SEQ ID NO: 118656 - DNA, 75 bp, synthetic construct
  source 1..75: mol_type = other DNA
ggctcctgtggctttctcacgcgcccttgcggtgacggctgaaggtggacaggccggaagcaataccaggacccg

SEQ ID NO: 118657 - DNA, 75 bp, synthetic construct
  source 1..75: mol_type = other DNA
aggcgaagtttgttgatccgaatttgcttgtgggtaatgaaacccgcgacgatgcggcggtgtacgatctgggca

SEQ ID NO: 118658 - DNA, 75 bp, synthetic construct
  source 1..75: mol_type = other DNA
tgcttaacgctccacaaggaacgatcgataagaattgcgtgttaggaagtgactggcagcttccacatggtgccg

SEQ ID NO: 118659 - DNA, 75 bp, synthetic construct
  source 1..75: mol_type = other DNA
tcgttcatgcagaagccccaaacaacgccgactgaatacattgctatgtggtaaaaaaagagctcgaaaatcctc

SEQ ID NO: 118660 - DNA, 75 bp, synthetic construct
  source 1..75: mol_type = other DNA
attttgcccgacgatagagctacccgaacttcaagctcgtattgctgatacactttgggttcgtaaaattggtgg

SEQ ID NO: 118661 - DNA, 75 bp, synthetic construct
  source 1..75: mol_type = other DNA
gcaatggcggtcgtgagctgattggggataccctgacggcgcgcggtgctgaggtcactttttgtgaatgttatc

SEQ ID NO: 118662 - DNA, 75 bp, synthetic construct
  source 1..75: mol_type = other DNA
gacagcgtgggcttgggtaagactttcaccgcgctggccgtgataaagtattacgaactgcgcaacaagtcagtt

SEQ ID NO: 118663 - DNA, 75 bp, synthetic construct
  source 1..75: mol_type = other DNA
tcaagacacactcatctggaacaaactcttcaattaccagaaagatgctgccaccgggatcatcaacaaacttga

SEQ ID NO: 118664 - DNA, 75 bp, synthetic construct
  source 1..75: mol_type = other DNA
aaaaaattcggattcagaatttgcgggaataagaaaaggccgcaaagctggtgccgttcatgcagaagcacgaaa

SEQ ID NO: 118665 - DNA, 75 bp, synthetic construct
  source 1..75: mol_type = other DNA
ttttcataaatgttggtttgggagaagcggctaaaaggaatgtagggacaggggcgaatcagatacctgatatgg

SEQ ID NO: 118666 - DNA, 75 bp, synthetic construct
  source 1..75: mol_type = other DNA
ctgatgccgttcagtcagaaccgtcgaatcctgcaccgctggttttatctgtaaattttgaacatatcagtaatt

SEQ ID NO: 118667 - DNA, 75 bp, synthetic construct
  source 1..75: mol_type = other DNA
aaccgctggacaatacgctgactaatttgagtggaaaggatgtcgctggtcttctcacataccttggtttaggag

SEQ ID NO: 118668 - DNA, 75 bp, synthetic construct
  source 1..75: mol_type = other DNA
ttataaaattattaaacttttcattattattccacacatcattagatgagagttttgatactattgaaaaaagaa

SEQ ID NO: 118669 - DNA, 75 bp, synthetic construct
  source 1..75: mol_type = other DNA
tgaacatcgcaggcgcctcctttgccaacattgaaggcgtaaaagcgatgaccgacgttacgggatttggtctgc

SEQ ID NO: 118670 - DNA, 75 bp, synthetic construct
  source 1..75: mol_type = other DNA
aatgataccggtatttacctgtctgttttgcctgttcctcgcggcgttccttgctgaaattgcgcaaatcgatat

SEQ ID NO: 118671 - DNA, 75 bp, synthetic construct
  source 1..75: mol_type = other DNA
agtatggtttccccccaggcactggaagccagacgtaaggtcatcaaagagacaatccttagctggcttttggtt

SEQ ID NO: 118672 - DNA, 75 bp, synthetic construct
  source 1..75: mol_type = other DNA
aatgaattgaaagatattcttgagcgcttttgccaggataagcatttgaccttgggtgaagggatcgagttgcta

SEQ ID NO: 118673 - DNA, 75 bp, synthetic construct
  source 1..75: mol_type = other DNA
atgtgcggttaatgaatttgccgaatatggttatgaaggggccagagtagataatattgttaaggcagcagggtg

SEQ ID NO: 118674 - DNA, 75 bp, synthetic construct
  source 1..75: mol_type = other DNA
ttgaacagtggggacgaattagttttcctggtgaacacgggcctgtatccgccaatgtttcattcccgattccat

SEQ ID NO: 118675 - DNA, 75 bp, synthetic construct
  source 1..75: mol_type = other DNA
acgtattgaccacgaacagggctggcataaatcgctgtccaacgtgccggtaagaaatgtgctgggtatttccag

SEQ ID NO: 118676 - DNA, 75 bp, synthetic construct
  source 1..75: mol_type = other DNA
taccgaatggcgcgatgttcacgtaaatccggaagtcgccctgagcccggatcgttctgaatacatcaaacaatt

SEQ ID NO: 118677 - DNA, 75 bp, synthetic construct
  source 1..75: mol_type = other DNA
tgcgctcaaagaaatggccgacgccggattggttgacgaggttctcaaaaaccttggtttgggagaagcggcaaa

SEQ ID NO: 118678 - DNA, 75 bp, synthetic construct
  source 1..75: mol_type = other DNA
cgacactatcttcaatactaatattgaagcgacacaggccattgcgcgccagttgcggttacgtaatcttggcgg

SEQ ID NO: 118679 - DNA, 75 bp, synthetic construct
  source 1..75: mol_type = other DNA
atccgtttggcgatatcaaatctgatggcacggtgaaaacggctctcgaaaaccttggtttgggagaagcggcga

SEQ ID NO: 118680 - DNA, 75 bp, synthetic construct
  source 1..75: mol_type = other DNA
agcggactgcgccatgcttactcattctggtgatggcggtgcgcctttaggcgctgggcgagggttcgtgatgac

SEQ ID NO: 118681 - DNA, 75 bp, synthetic construct
  source 1..75: mol_type = other DNA
agttacggttgcgtaatctgggcgggattatcattattgatttcatcgatatgaataatgaagatcaccgccgcc

SEQ ID NO: 118682 - DNA, 75 bp, synthetic construct
  source 1..75: mol_type = other DNA
atgtatcttgataccagttacgcacaaaacctgaaggaaaaattgctgctatgtgcggttaatgaatttgccgaa

SEQ ID NO: 118683 - DNA, 75 bp, synthetic construct
  source 1..75: mol_type = other DNA
gacacagtaacctattttccgattgcatttccgaatagatgtctgcgggtatttgcgactcaggattacactccc

SEQ ID NO: 118684 - DNA, 75 bp, synthetic construct
  source 1..75: mol_type = other DNA
gacttattgagcaatggggaagtgctggtatatcagatgcatacggcaacgcggcagtgacattccctattgcct

SEQ ID NO: 118685 - DNA, 75 bp, synthetic construct
  source 1..75: mol_type = other DNA
tccagcgttatcggtatcgtggcaacggcggatgatgcggatgcggagctgttcccgctgaacaagcccacactg

SEQ ID NO: 118686 - DNA, 75 bp, synthetic construct
  source 1..75: mol_type = other DNA
ttaattccctgaaacaggaattttccggcgttcctgatgatgcggctgatgcgctttcgtcaatgccagaactta

SEQ ID NO: 118687 - DNA, 75 bp, synthetic construct
  source 1..75: mol_type = other DNA
ctaaacagttgtacggaggtctggggcaaaacccgtttaacccggcgatgattggctatgtggtcttactgatct

SEQ ID NO: 118688 - DNA, 75 bp, synthetic construct
  source 1..75: mol_type = other DNA
agatccttggtgaaatgaaggtatatgccccttatacatacaaaagtaaaacagataaagtggttgataaaatac

SEQ ID NO: 118689 - DNA, 75 bp, synthetic construct
  source 1..75: mol_type = other DNA
ggggcatcctggagcgaaagtggcgaatttagtgccgaaaacgacctttatcgatggcgtagaccagacctcttt

SEQ ID NO: 118690 - DNA, 75 bp, synthetic construct
  source 1..75: mol_type = other DNA
tctatcgagcaagaatatccccagatactcaataaggcacaggcaatccttgccagagaaacggcacatgtaaaa

SEQ ID NO: 118691 - DNA, 75 bp, synthetic construct
  source 1..75: mol_type = other DNA
tacctaccgccagaaattcaacgaacgtgaggtgatgctcttatggccggacttcatcgcctacaacccgaaaag

SEQ ID NO: 118692 - DNA, 75 bp, synthetic construct
  source 1..75: mol_type = other DNA
gcaacgcggtcactgaatgacgctaaaaatattcttgttgccgattgtgaaaatgggggggttatgcgtgatgat

SEQ ID NO: 118693 - DNA, 75 bp, synthetic construct
  source 1..75: mol_type = other DNA
ttcagtcagtgttatgtctgatgccgttcagtcagacccgtcgattcctgccccgcaggttttgtctgtaaattt

SEQ ID NO: 118694 - DNA, 75 bp, synthetic construct
  source 1..75: mol_type = other DNA
atgaagggaagaaacacaatatttttaagccagatatcgacccattgcaggtgaatattaatattgctgcgcttg

SEQ ID NO: 118695 - DNA, 75 bp, synthetic construct
  source 1..75: mol_type = other DNA
ttgtgcatttgggaccatctctgttgagtgtaccggtaaaactgacgccatttgcgctaaaacgccaggttcttg

SEQ ID NO: 118696 - DNA, 75 bp, synthetic construct
  source 1..75: mol_type = other DNA
ctggctgattttgttgaggcgggaatgaaaaccgcgcctgaaaccaaacagacatcggtaggtgaaccatgctaa

SEQ ID NO: 118697 - DNA, 75 bp, synthetic construct
  source 1..75: mol_type = other DNA
tctggcgcgaccatgctcggcgcattctttattctgaccgatccggtgaccgcttctacgaccaatcgtggtcgt

SEQ ID NO: 118698 - DNA, 75 bp, synthetic construct
  source 1..75: mol_type = other DNA
agcggcgaaaaggaatgtggggactggggcgaatcagataccagacatgtcagcttattcatcaggatctggctg

SEQ ID NO: 118699 - DNA, 75 bp, synthetic construct
  source 1..75: mol_type = other DNA
acaagtgttggacgtgccattcttggtaaaaccagcactcagggagttcttgattaccttggtttgggagaagcg

SEQ ID NO: 118700 - DNA, 75 bp, synthetic construct
  source 1..75: mol_type = other DNA
ccgctggttactcatcgttctatttcgacgaccagcaggcgataaaaaacggagcgggtcatgacggcttttttt

SEQ ID NO: 118701 - DNA, 75 bp, synthetic construct
  source 1..75: mol_type = other DNA
taccggagcgccgatgacagtcccacaaactgggtattttccggcggagaacaacacgatcctctggccagactg

SEQ ID NO: 118702 - DNA, 75 bp, synthetic construct
  source 1..75: mol_type = other DNA
ggcgctggcaaaatgccaggatgagagcgggttatggcatacgttgctggacgatccaaattcatatctggaatc

SEQ ID NO: 118703 - DNA, 75 bp, synthetic construct
  source 1..75: mol_type = other DNA
cacagtttctgaaccggccgggatgcggccagttcagcaggtgaccactgaactgacggcagaagataaagcaca

SEQ ID NO: 118704 - DNA, 75 bp, synthetic construct
  source 1..75: mol_type = other DNA
agcatcacccctactccatgatgagctatgttgatcgaaaaactcttaacctggacgtttctgtgctcttcgata

SEQ ID NO: 118705 - DNA, 75 bp, synthetic construct
  source 1..75: mol_type = other DNA
ttgctgtcccgcctgaggagacagaagccgtaaaaaatgcagtccccccgttaaatggccgcaaagcggtagcat

SEQ ID NO: 118706 - DNA, 75 bp, synthetic construct
  source 1..75: mol_type = other DNA
agacgcagccaggacaaagtacgcaggatattgcgcgggaggtggcccgccagcttgatgaacgtgaacgcaggc

SEQ ID NO: 118707 - DNA, 75 bp, synthetic construct
  source 1..75: mol_type = other DNA
aagcacttaaacgtctgggtgaacaacaggcacggatgaacgctgccagagaacaatactcaagacggcttgaag

SEQ ID NO: 118708 - DNA, 75 bp, synthetic construct
  source 1..75: mol_type = other DNA
ctcaggcggtttttttatgcgtaatgcacagccacattcaaattatggtggggcgtgcggggcagccacaaggct

SEQ ID NO: 118709 - DNA, 75 bp, synthetic construct
  source 1..75: mol_type = other DNA
cactgtgccgcccgtttacaggattgaggcaccgacgcagatcatcatccagacgcagccaggacaaagtacgca

SEQ ID NO: 118710 - DNA, 75 bp, synthetic construct
  source 1..75: mol_type = other DNA
aacgcgaaatagaccatctgcaggcacagctggataagctgcgccggatgaacatcggcagccgctcggaaaaag

SEQ ID NO: 118711 - DNA, 75 bp, synthetic construct
  source 1..75: mol_type = other DNA
gccgctgtcgctgaatttaacgccttcaaacatctgacggaagaaatgcgccgtacactacaggatatttcaaga

SEQ ID NO: 118712 - DNA, 75 bp, synthetic construct
  source 1..75: mol_type = other DNA
aataacatgctgccgctgtcatttgccgaggcgattgatgccgatattcaggctcagcagcagcttgacgacgcg

SEQ ID NO: 118713 - DNA, 75 bp, synthetic construct
  source 1..75: mol_type = other DNA
gtgcaatgttgaggttgatgatcccagagcaggatatcaggctatcggtgggcgcaacatcgtcgcctgtcaggg

SEQ ID NO: 118714 - DNA, 75 bp, synthetic construct
  source 1..75: mol_type = other DNA
attgccgggtgcccgaatgactgtgccaaagcgtccatgtcagattttggcattattggtgtggcgaaaattcgc

SEQ ID NO: 118715 - DNA, 75 bp, synthetic construct
  source 1..75: mol_type = other DNA
gatcaacagctggaaactgcccgcttccgcttcccgtacaacacgccgacgtccaaagaagcgtatctgtaccgg

SEQ ID NO: 118716 - DNA, 75 bp, synthetic construct
  source 1..75: mol_type = other DNA
cctggaatatcagtctgtcgccattcgatacaacagtactacccgttatgacggtagttacaaccacgggagcag

SEQ ID NO: 118717 - DNA, 75 bp, synthetic construct
  source 1..75: mol_type = other DNA
tgtcaaacctggtgaccagtgtggttaagcatgacgaagaacgtcgtgttaatccggacgacagcaaggaggact

SEQ ID NO: 118718 - DNA, 75 bp, synthetic construct
  source 1..75: mol_type = other DNA
cggttttacctgtggtaacccccagaccggcacgcctgccaccgatctggatgatgactactttgacatgttgca

SEQ ID NO: 118719 - DNA, 75 bp, synthetic construct
  source 1..75: mol_type = other DNA
gacaaagtgaatgccgcactggaacctttcattcgcgaaattgaaatggagctgtgtgatgttcaggttgatgat

SEQ ID NO: 118720 - DNA, 75 bp, synthetic construct
  source 1..75: mol_type = other DNA
cttttggcgcttcccgcaaaagacggtgaagcgatggtgagtcgtgcagctactgtgccgcccatttaccggatt

SEQ ID NO: 118721 - DNA, 75 bp, synthetic construct
  source 1..75: mol_type = other DNA
gggtacctgtacatcaatgttgactgatgacggtacagctaaactgtccaccatcaatttcggtgatgtatatat

SEQ ID NO: 118722 - DNA, 75 bp, synthetic construct
  source 1..75: mol_type = other DNA
atgtcgcgccagtgcacgcattatgggcgttggcctcaacacggttttccgccatttaaaaaactcaggccgcag

SEQ ID NO: 118723 - DNA, 75 bp, synthetic construct
  source 1..75: mol_type = other DNA
acgatctgcaggagcggctggcccgcattctctttgtgacaaatatctgggggcgtctgcatgagcgtgacaacg

SEQ ID NO: 118724 - DNA, 75 bp, synthetic construct
  source 1..75: mol_type = other DNA
ggctgaagcagataacaacatcgccgaaaatgccctgcggatggtcagcccggggcgtaaaaacttcctgttctt

SEQ ID NO: 118725 - DNA, 75 bp, synthetic construct
  source 1..75: mol_type = other DNA
ggctgaggcggacaataacatcgctgaaaatgcgttgcggatggtcagtctgggccgcaaaaactacctgttctt

SEQ ID NO: 118726 - DNA, 75 bp, synthetic construct
  source 1..75: mol_type = other DNA
tctgaagggaaaactgcacgtcatcagtaagcgttacacgcagcgaattgagcgacacaacctgaatctgagaca

SEQ ID NO: 118727 - DNA, 75 bp, synthetic construct
  source 1..75: mol_type = other DNA
atgaaaaaatttgcacttatcttgtttatgggaatgcttgtttcgttttatgccgatgccgggcgcaagccgtgt

SEQ ID NO: 118728 - DNA, 75 bp, synthetic construct
  source 1..75: mol_type = other DNA
acgtattcggtgaacgcactctggccacactggagcgtcttctaagcctgctgtcggcctttgaggtcgtggtat

SEQ ID NO: 118729 - DNA, 75 bp, synthetic construct
  source 1..75: mol_type = other DNA
ctgctggaaaagctgaacgagcgtgaacgcgaaatagaccatctgcaggcgcagctggataaactccgccggatg

SEQ ID NO: 118730 - DNA, 75 bp, synthetic construct
  source 1..75: mol_type = other DNA
acggaagccgcctgttgggctcacgcccgccgtaaatgtcaacgacggatgaaaagtgatccacttatatctcca

SEQ ID NO: 118731 - DNA, 75 bp, synthetic construct
  source 1..75: mol_type = other DNA
gctacccgcgccagaacggcttggccgtcgcgctgcgcgagttgggccgcatcgagcgcacgctgttcatcctcg

SEQ ID NO: 118732 - DNA, 75 bp, synthetic construct
  source 1..75: mol_type = other DNA
agcaacctgcgacggtgaatgcagacggaaaagtgatgataccatcgggtggttttccgtcatggggatatggct

SEQ ID NO: 118733 - DNA, 75 bp, synthetic construct
  source 1..75: mol_type = other DNA
tttggactttcatacagtctgatgaactgctcgtatggcgcgatgatcccggcaattaccaaaaacccgaatgag

SEQ ID NO: 118734 - DNA, 75 bp, synthetic construct
  source 1..75: mol_type = other DNA
cgatgaactagggatgcctgcttactatggtggaattatctttctggtagcgaagttctttaccgcatttaccga

SEQ ID NO: 118735 - DNA, 75 bp, synthetic construct
  source 1..75: mol_type = other DNA
gctgttcgcacccgcatcaaactgttttatcgcccggcagggttacagggtgatgtaaaaaccgcgccaaacgaa

SEQ ID NO: 118736 - DNA, 75 bp, synthetic construct
  source 1..75: mol_type = other DNA
agataaaagttgacaatccaactgtttttaacatcacgttcagtgatgtatttattaacggacacgaaattgaaa

SEQ ID NO: 118737 - DNA, 75 bp, synthetic construct
  source 1..75: mol_type = other DNA
atgtctgaccataatccactgacattaaaactgaatctgcgggaaaaaatcgcctatggtatgggcgacgttggt

SEQ ID NO: 118738 - DNA, 75 bp, synthetic construct
  source 1..75: mol_type = other DNA
ttccatggaggcaatggtggaagacgcggtggccgctatccccgacgattcctccattgaaattaaggaggccgc

SEQ ID NO: 118739 - DNA, 75 bp, synthetic construct
  source 1..75: mol_type = other DNA
atttcgccgaacagatggagcgcgccaacgctaccgcgccgattcaggtgatcaccgacggcagtgagccgaata

SEQ ID NO: 118740 - DNA, 75 bp, synthetic construct
  source 1..75: mol_type = other DNA
cgaagggatctggcagatctggcaaatgcagcgggcagaggacaatgggcagacgtttgaaccgcttatcgacgt

SEQ ID NO: 118741 - DNA, 75 bp, synthetic construct
  source 1..75: mol_type = other DNA
tcacggcgggtgtggaacgagcaggcgctgatcgggtcatcgtggtttcctgtgcgaatcctgatcgacgccatg

SEQ ID NO: 118742 - DNA, 75 bp, synthetic construct
  source 1..75: mol_type = other DNA
ggatcacttttcatccgtcgttgacagctgaactgtaccgggcgggaatttctgcgaaagacgatgcgggagcaa

SEQ ID NO: 118743 - DNA, 75 bp, synthetic construct
  source 1..75: mol_type = other DNA
acacgccagctactacatgcgtggctggaactccgtggatacacgggacattttctggcagtgccagaagtacaa

SEQ ID NO: 118744 - DNA, 75 bp, synthetic construct
  source 1..75: mol_type = other DNA
tgcggcgctggatgaactgatgaccaatggcaagctggacgatacgctgacgccggtgctggctccattgtttgc

SEQ ID NO: 118745 - DNA, 75 bp, synthetic construct
  source 1..75: mol_type = other DNA
actgtacggcaggcggcaaatttgtctgtaatgatggttctattagtgcctcgaaaaaaatggtaatgctgccaa

SEQ ID NO: 118746 - DNA, 75 bp, synthetic construct
  source 1..75: mol_type = other DNA
accccgcaatacttcaagcgtgagtaccagctgcaggacggtgatattgacgagacaccaccgtcagaacgccag

SEQ ID NO: 118747 - DNA, 75 bp, synthetic construct
  source 1..75: mol_type = other DNA
ctgcagagcgcagcggcaatggggcaacgattcggggaggcactggcggaaggactgaatatggtcatgcatccg

SEQ ID NO: 118748 - DNA, 75 bp, synthetic construct
  source 1..75: mol_type = other DNA
ggtcgttgaggcatctgatatcggcgcagcattgatttttgaccgtgtattatctgatacggaaataaattcaat

SEQ ID NO: 118749 - DNA, 75 bp, synthetic construct
  source 1..75: mol_type = other DNA
tgggagcgatggggccgccttcgcaacgtcaggttgttgctctgggccgtcaacggctggctgttcagcgcctgg

SEQ ID NO: 118750 - DNA, 75 bp, synthetic construct
  source 1..75: mol_type = other DNA
gcacaaggggcagtgtgtggcgcaacatccgcgcagcacacatgaatataaacacacaaccaatccgcttcacat

SEQ ID NO: 118751 - DNA, 75 bp, synthetic construct
  source 1..75: mol_type = other DNA
aggggcaactgacaattcgttactctaatcagaatgtggggctggtgatccgcaatgataaaattgaagtttatg

SEQ ID NO: 118752 - DNA, 75 bp, synthetic construct
  source 1..75: mol_type = other DNA
gtgaaaggcagtttcagtaaagtgctggcggaaccgcggctgctgaaactcaactttggcattatgtgtctgcac

SEQ ID NO: 118753 - DNA, 75 bp, synthetic construct
  source 1..75: mol_type = other DNA
acgatggttgtcactgcatcttccgttgagcaaaaccttaaagatgcacccgccagtatcagcgtcattacctag

SEQ ID NO: 118754 - DNA, 75 bp, synthetic construct
  source 1..75: mol_type = other DNA
tgcagcgaaaaccggtacagaatctgaaggatgtcctcaaaagaagtgcctggcgtacaactgacgaacgaaggg

SEQ ID NO: 118755 - DNA, 75 bp, synthetic construct
  source 1..75: mol_type = other DNA
ttgtacgcagttatgccggaccggggcttctggtccatgttatcaccgggaagtatgcggaccatctggcattat

SEQ ID NO: 118756 - DNA, 75 bp, synthetic construct
  source 1..75: mol_type = other DNA
gtgcttggcgtcatagcagactggccggtcaaccgggtcagcgaactgcttccgtggcgcatagcactgccagct

SEQ ID NO: 118757 - DNA, 75 bp, synthetic construct
  source 1..75: mol_type = other DNA
gcccccggcggtctggttcgcgtacagtccggaccggaaaggtatccatccacaaaatcacctggccggttacag

SEQ ID NO: 118758 - DNA, 75 bp, synthetic construct
  source 1..75: mol_type = other DNA
gcagaggtccggggctgtgcagcagaacagcgtctggcagcaagaaaagccagagcggctccactgatgcagtca

SEQ ID NO: 118759 - DNA, 75 bp, synthetic construct
  source 1..75: mol_type = other DNA
ccttgacgtcatagccgactggccgataaaccgggtcggcgaactgctccccctggcgcgtagcactgccgactg

SEQ ID NO: 118760 - DNA, 75 bp, synthetic construct
  source 1..75: mol_type = other DNA
ctttcaaaaagctgcaatgagtttagctacttccttatttgagggatttggcgtgagttttgctgaatctctatc

SEQ ID NO: 118761 - DNA, 75 bp, synthetic construct
  source 1..75: mol_type = other DNA
aacgcgaaatagaccatctgcaggcacagctggataagctgcgccggatgaacgtcggcagcggctcagaaaaag

SEQ ID NO: 118762 - DNA, 75 bp, synthetic construct
  source 1..75: mol_type = other DNA
tatccggaaactgagcgtcttgaaataattaggtccttaaaatttgtagatgaagtttttattgaagagtcattg

SEQ ID NO: 118763 - DNA, 75 bp, synthetic construct
  source 1..75: mol_type = other DNA
agcggcgaaaccttctgggatttgctggaacaggcggcgacgcagcaggcgggtgaaacagtcagtttccgctaa

SEQ ID NO: 118764 - DNA, 75 bp, synthetic construct
  source 1..75: mol_type = other DNA
ctacaattttttcgtacttttgtccttgcaaccgaacaagcaacctatttcgagatccctgccgaagactcctgg

SEQ ID NO: 118765 - DNA, 75 bp, synthetic construct
  source 1..75: mol_type = other DNA
tgtgatatgtttaaaaaaatatgtgaggtaatttatttgccaagaacggaaggtgtttctactacaaagcttatt

SEQ ID NO: 118766 - DNA, 75 bp, synthetic construct
  source 1..75: mol_type = other DNA
cgctgccgttatggcgttgctgtccgatctcacccgcgaacaaaaccgtaccaaagcgatggcgtttatcggcgt

SEQ ID NO: 118767 - DNA, 75 bp, synthetic construct
  source 1..75: mol_type = other DNA
gggttgtgcctaacagccgcacgcacgtacttaatcgtgagtccgggatggtgaaaggcagtttcagtaaagtgc

SEQ ID NO: 118768 - DNA, 75 bp, synthetic construct
  source 1..75: mol_type = other DNA
caaagaagtgttgattgcagaagaagaacattcagcttatgtgaaaatcgacagcaaagtgacgaatcgctttga

SEQ ID NO: 118769 - DNA, 75 bp, synthetic construct
  source 1..75: mol_type = other DNA
atggcgcaacgctgcggcggtgaaatccagatcgagctgttcggcaactggacgctggacgatgcccgtgactgg

SEQ ID NO: 118770 - DNA, 75 bp, synthetic construct
  source 1..75: mol_type = other DNA
tgccgtctgaacggtatcgatccggaagcgtatctgcgccatatcctgagcgtactgccggaatggccttccaac

SEQ ID NO: 118771 - DNA, 75 bp, synthetic construct
  source 1..75: mol_type = other DNA
tggcggaaccacgcctgctgaaactcaacttcggcattatgtgtctgcacatgttgctgatgtcgacgtttgttg

SEQ ID NO: 118772 - DNA, 75 bp, synthetic construct
  source 1..75: mol_type = other DNA
cgccacggtggaaaaaggccacgcgatggcacagaactgcggcggtgaaattcagatcgagctattcggcaactg

SEQ ID NO: 118773 - DNA, 75 bp, synthetic construct
  source 1..75: mol_type = other DNA
aagcgtatctgcgccatatcctgagcgtactgccggaatggccttccaaccgagttgatgaactcctgccatgga

SEQ ID NO: 118774 - DNA, 75 bp, synthetic construct
  source 1..75: mol_type = other DNA
gaaaaatggctgcgttacgtcattgagcatatccaggactggccggcaaaccggggacgtgatctgttgccttgg

SEQ ID NO: 118775 - DNA, 75 bp, synthetic construct
  source 1..75: mol_type = other DNA
gtgtactgcagcaatggctgggtggaaatcgacaacaacatcgcagagaacgccttacggggtgtggccgtgggc

SEQ ID NO: 118776 - DNA, 75 bp, synthetic construct
  source 1..75: mol_type = other DNA
acggaagccctgcagcgtatcggtgaactgtatgccatcgaggcagaggtccggggctgttcagcagaacagcgt

SEQ ID NO: 118777 - DNA, 75 bp, synthetic construct
  source 1..75: mol_type = other DNA
aactgaaggcgtcaaagaagtgttgattgcagaagaagaacattcagcttatgtgaaaatcgacagcaaagtgac

SEQ ID NO: 118778 - DNA, 75 bp, synthetic construct
  source 1..75: mol_type = other DNA
aaggtctatctggcgacgatgctaatcgcctttggctcggtcgtgcctttcattatctacgctgaagttaagcgc

SEQ ID NO: 118779 - DNA, 75 bp, synthetic construct
  source 1..75: mol_type = other DNA
gttgggtatcaaaacgttatcttccgttaggtgctctgctcagtccgataggtcttgtggttactgcactggcgg

SEQ ID NO: 118780 - DNA, 75 bp, synthetic construct
  source 1..75: mol_type = other DNA
gaaatacgcgggttgccggtgtctgaacgcctggcggtcaggcaaatgcagagtaaaccgctactgacttccctg

SEQ ID NO: 118781 - DNA, 75 bp, synthetic construct
  source 1..75: mol_type = other DNA
cttaccagacaggcagggaaaacatccggtacaacaccttcgtcccttccggggtatcctgcaggcggatgcgtt

SEQ ID NO: 118782 - DNA, 75 bp, synthetic construct
  source 1..75: mol_type = other DNA
ggcgagcgtggagcactgttgtacgggctgatcggcacctgccgactgaacggtatagatccggaagcgtatctg

SEQ ID NO: 118783 - DNA, 75 bp, synthetic construct
  source 1..75: mol_type = other DNA
tggagcctgaagaaagttgttgcccggagtgtggcagtgagctggattatctgggggaagtcagtgctgagcagc

SEQ ID NO: 118784 - DNA, 75 bp, synthetic construct
  source 1..75: mol_type = other DNA
ggaggtgtctcatacgccctgaatccggggatcgagattgacagtagcctgatggtcgttgatttcccctcgaag

SEQ ID NO: 118785 - DNA, 75 bp, synthetic construct
  source 1..75: mol_type = other DNA
aggttccccgccagttgcgacagtcacgtcatcgtcgtccgttaccagcacatattcgtaagcgactcgtcagaa

SEQ ID NO: 118786 - DNA, 75 bp, synthetic construct
  source 1..75: mol_type = other DNA
taatgacaccggtgaatgatgccctgtaccgttatgtaatgaacacctgcaaggttcacactgatgacacaccgg

SEQ ID NO: 118787 - DNA, 75 bp, synthetic construct
  source 1..75: mol_type = other DNA
tcgtcagagtgaaatctttgcccgacagggtgtcgaactgagccgtgcattactctccaactgggttgacgcgtg

SEQ ID NO: 118788 - DNA, 75 bp, synthetic construct
  source 1..75: mol_type = other DNA
catccaacgacagtaacgggagaagcactccgtcgtatcggggcactgtacgctatcgagtctgagatccgcggc

SEQ ID NO: 118789 - DNA, 75 bp, synthetic construct
  source 1..75: mol_type = other DNA
ggaaggatttatccacagttgtggagaacatggaaattggcaccgggcagcgtggtgacggacgccacgcatttg

SEQ ID NO: 118790 - DNA, 75 bp, synthetic construct
  source 1..75: mol_type = other DNA
atgacggtctggcggaggcggacaataacacagcagaaagagcgcttcgtgccgtctgtctcgggaaaaagaatt

SEQ ID NO: 118791 - DNA, 75 bp, synthetic construct
  source 1..75: mol_type = other DNA
aatgatagcaatcaacaaatttctgcggtggattttggcgatgtttatatttctgaaatcgataaaaaattaaaa

SEQ ID NO: 118792 - DNA, 75 bp, synthetic construct
  source 1..75: mol_type = other DNA
aacgcgaaatagaccatctgcaggcacagctggataagctgcgccggatgaacttcggcagctgctccgaaaaag

SEQ ID NO: 118793 - DNA, 75 bp, synthetic construct
  source 1..75: mol_type = other DNA
cgccatatcctgagtgtactgccggaatggccttccaaccgtgttaacgaactcctgccatggaatgtagtactc

SEQ ID NO: 118794 - DNA, 75 bp, synthetic construct
  source 1..75: mol_type = other DNA
aaacgcgcaggggcaggctgtaaaggatgctgcaattaagacaaccgaagttgtagggactctcagggaagaaac

SEQ ID NO: 118795 - DNA, 75 bp, synthetic construct
  source 1..75: mol_type = other DNA
gtgaaggcaggcctgtaagtcaggttgcaatttctgcgtcgcagttgtttgtctttgacccgaataatccggata

SEQ ID NO: 118796 - DNA, 75 bp, synthetic construct
  source 1..75: mol_type = other DNA
ctatcatggtgtgctgcaggcggatgccttcgcaggctacgatcggttgttcagtccggaacgtgaaggagggcc

SEQ ID NO: 118797 - DNA, 75 bp, synthetic construct
  source 1..75: mol_type = other DNA
aagggagaaagagagaactggtgcgatggagatatgacgcctttactctcatggtggcgaaatcgacagattccg

SEQ ID NO: 118798 - DNA, 75 bp, synthetic construct
  source 1..75: mol_type = other DNA
cgaactttaccgcgatggacaaataacggaagccgcctgctgggctcatgcccgtcgcaagatccacgatgtgca

SEQ ID NO: 118799 - DNA, 75 bp, synthetic construct
  source 1..75: mol_type = other DNA
cggggtggtcggggttttactggatacgttttgtgaatgccgctggcgttaaagggccgtggcatgctgtttccg

SEQ ID NO: 118800 - DNA, 75 bp, synthetic construct
  source 1..75: mol_type = other DNA
aacgcgaaatagaccatctgcaggcacagctggataagctgcgccggatgaacctcggcagcagctcggaaaaag

SEQ ID NO: 118801 - DNA, 75 bp, synthetic construct
  source 1..75: mol_type = other DNA
actgaaactaatcggcgaactgtacgccattgagcacgaaatacgcgggttgccggtgtctgaacgcctggcggt

SEQ ID NO: 118802 - DNA, 75 bp, synthetic construct
  source 1..75: mol_type = other DNA
ctggttgccaccctcgtccctgatgagcagcgcgtcagcttctggccgcagcattttggcctcattccacagtgg

SEQ ID NO: 118803 - DNA, 75 bp, synthetic construct
  source 1..75: mol_type = other DNA
agaatggcagttggggcagttcacgcatcagtaaccttcaggcgatagtggtgaagaaaaacagtgcggggatta

SEQ ID NO: 118804 - DNA, 75 bp, synthetic construct
  source 1..75: mol_type = other DNA
ctgggctcatgcgcggcgcaaaatccacgatgtatatatcagtaccaaaagcgcgacggcggaagaagcactgaa

SEQ ID NO: 118805 - DNA, 75 bp, synthetic construct
  source 1..75: mol_type = other DNA
tgccggtggtggtcatatcactctgagttttaccgtgatctcacggcgtcagaatggcagttggggcagttcacg

SEQ ID NO: 118806 - DNA, 75 bp, synthetic construct
  source 1..75: mol_type = other DNA
agcccggacagaaaaggcatccatccgcagactcatcttgcttgcttcagcggtgtgctgcaagcggatgcgtac

SEQ ID NO: 118807 - DNA, 75 bp, synthetic construct
  source 1..75: mol_type = other DNA
aacttcggcagccgttccgaaaaggtatcccggcgtatcgcgcagatggaggctgacctgacccggcttcagcag

SEQ ID NO: 118808 - DNA, 75 bp, synthetic construct
  source 1..75: mol_type = other DNA
tgttcaggcgctgattgaccagattaaggaagaagcggcgaactctcctgttgtggaggagttacggcaggaaat

SEQ ID NO: 118809 - DNA, 75 bp, synthetic construct
  source 1..75: mol_type = other DNA
cgaacgatcctgataacacggcctatccgtttgcagtttctggcggaaaagtcgtgattactaaagcgatgattt

SEQ ID NO: 118810 - DNA, 75 bp, synthetic construct
  source 1..75: mol_type = other DNA
cacgccgtggtatataacgggatgtatgggtttatgacgatatatcccggccccattcgatttgccttacaacag

SEQ ID NO: 118811 - DNA, 75 bp, synthetic construct
  source 1..75: mol_type = other DNA
gccgggtcaacgctggcgccggcggtgttgttcgcttacagcccggacagaaaaggcatccatccgcagactcat

SEQ ID NO: 118812 - DNA, 75 bp, synthetic construct
  source 1..75: mol_type = other DNA
gggtaataagaagacgaagaccgggcggttgtgggcgtatgttcgtgatgaccgcaatgcagggtcagcgttggc

SEQ ID NO: 118813 - DNA, 75 bp, synthetic construct
  source 1..75: mol_type = other DNA
ctggccacactggagcgtcttctgagcctgctgtcggcctttgaggtcgtggtatggatgacggatggctggccg

SEQ ID NO: 118814 - DNA, 75 bp, synthetic construct
  source 1..75: mol_type = other DNA
gcagctctttattctgttgatcctcggctgttaacgctaatcagcggtttcttcagtgagaacatcacagcagaa

SEQ ID NO: 118815 - DNA, 75 bp, synthetic construct
  source 1..75: mol_type = other DNA
aacgatggcttcttgcccgtatccgtaatgaaaccttccacacgctcagggcgctgaatgcgcgccttcgggagt

SEQ ID NO: 118816 - DNA, 75 bp, synthetic construct
  source 1..75: mol_type = other DNA
cgcgccgtttgtcacctgtatactgaccattctttgcggtactggccacgtggtctacaccattctaccgatcat

SEQ ID NO: 118817 - DNA, 75 bp, synthetic construct
  source 1..75: mol_type = other DNA
cgctgtatgaatcacgcctgaagggaaagctgcacgttatcagcaagcgttacactcagcgaattgagcggcata

SEQ ID NO: 118818 - DNA, 75 bp, synthetic construct
  source 1..75: mol_type = other DNA
cgcgctgttatttataaggggaagcatggttgcatgagtatatacccaggaccacttcgcattgccctgcaaaac

SEQ ID NO: 118819 - DNA, 75 bp, synthetic construct
  source 1..75: mol_type = other DNA
ctttctatgttaaaaaaaataataaaagaagagcaggttaagtctattacctgctcttcttttataatgagggac

SEQ ID NO: 118820 - DNA, 75 bp, synthetic construct
  source 1..75: mol_type = other DNA
gcattgagcgacataatctgaatctgagacaacatctggcaaggctgggacggaagtcactgtcgttctcaaaat

SEQ ID NO: 118821 - DNA, 75 bp, synthetic construct
  source 1..75: mol_type = other DNA
atgaaaatcgaatatcaggactatggcaccgtagcgaacatcgttatcaccagtacagtatttgagttccgtaaa

SEQ ID NO: 118822 - DNA, 75 bp, synthetic construct
  source 1..75: mol_type = other DNA
cgacgataaaggttacgactggctgggcgccatgggttttgtgttactcagtcagggtaaacaggaacgcctgtt

SEQ ID NO: 118823 - DNA, 75 bp, synthetic construct
  source 1..75: mol_type = other DNA
gtttacttgataggattgttaaaaaatcaatagaaaacaagccgttggaaatgtttcatgattcatgttacttct

SEQ ID NO: 118824 - DNA, 75 bp, synthetic construct
  source 1..75: mol_type = other DNA
actttagagcgggaagtaacagcgctctcacttacaaaaggaaatcagaggtgcttaatctttcagaggaggact

SEQ ID NO: 118825 - DNA, 75 bp, synthetic construct
  source 1..75: mol_type = other DNA
atcgcggtgtacgcggaaagataatgccattgccagcggataagtgggatatgctgccgctccaggccagccttc

SEQ ID NO: 118826 - DNA, 75 bp, synthetic construct
  source 1..75: mol_type = other DNA
tgtttacgattacgttgccagtcataagggcgtttgcgcactggagcacgatgggtttttttcatataaagaggt

SEQ ID NO: 118827 - DNA, 75 bp, synthetic construct
  source 1..75: mol_type = other DNA
gaagttcagccggaccagatgatcaacattagcggcagtctggataagaaaagcgcgccggccgtcgttcgggtc

SEQ ID NO: 118828 - DNA, 75 bp, synthetic construct
  source 1..75: mol_type = other DNA
cgcggcgcgcttggaattattaccggtaataaagaacagcgtgaacgcctgttttgcagcgaattttgtgccgaa

SEQ ID NO: 118829 - DNA, 75 bp, synthetic construct
  source 1..75: mol_type = other DNA
gtgaacgcactctggccacactggagcgtcttctgagcctgctgtcggcctttgaggtcgtggtatggatgacgg

SEQ ID NO: 118830 - DNA, 75 bp, synthetic construct
  source 1..75: mol_type = other DNA
tgttatgccttgccggaaaacttgacggaagtagtccggcagagtgtgacccgatgtataaaagttttatgtcaa

SEQ ID NO: 118831 - DNA, 75 bp, synthetic construct
  source 1..75: mol_type = other DNA
tggaaatatgcttcaccaggaacgtgacgatatatccaatatggttccggcatgccacccatgcaatctgcacaa

SEQ ID NO: 118832 - DNA, 75 bp, synthetic construct
  source 1..75: mol_type = other DNA
ttaatattaaagacaatctattggtcagcgcctgccctggggctggtaaaacaaaactattgattggtatgttag

SEQ ID NO: 118833 - DNA, 75 bp, synthetic construct
  source 1..75: mol_type = other DNA
agagatatgtcgaaagatgaattgcctaaaagaattttcaatctaataaatcaatatcacttaaaatataatggt

SEQ ID NO: 118834 - DNA, 75 bp, synthetic construct
  source 1..75: mol_type = other DNA
tacgcgtatgacaggatgcggaggacggttgtggcgcacgtcttcggtgaacgcactctggccacactggagcgt

SEQ ID NO: 118835 - DNA, 75 bp, synthetic construct
  source 1..75: mol_type = other DNA
atcagcaagcgttacactcagcgcattgagcgacataatctgaatctgagacaacatctggcaaggccgggacgg

SEQ ID NO: 118836 - DNA, 75 bp, synthetic construct
  source 1..75: mol_type = other DNA
gctgggaagagtacctgaagaaagggttaaccaatccggatgcgacgccggaacagacgcgcgtcgcggtgaaag

SEQ ID NO: 118837 - DNA, 75 bp, synthetic construct
  source 1..75: mol_type = other DNA
aacccagtgcactatgcggatgccattcgttataatgctcgaacgcctctgcaaggttctttgctgccgttaacc

SEQ ID NO: 118838 - DNA, 75 bp, synthetic construct
  source 1..75: mol_type = other DNA
gctgtcggatgcagcgtgaacgccttatccgacctactgttctacccctgcgtaggcctgataagacacgccagt

SEQ ID NO: 118839 - DNA, 75 bp, synthetic construct
  source 1..75: mol_type = other DNA
gattaaaggcatgggttgatcgatatctgaaaatacaggacacgcgactgaaaaatggagacattgcagctacaa

SEQ ID NO: 118840 - DNA, 75 bp, synthetic construct
  source 1..75: mol_type = other DNA
gatctggcagcctgagttcacagataaaacactctccaggaaacccggggcggttcactttgcattaatactgga

SEQ ID NO: 118841 - DNA, 75 bp, synthetic construct
  source 1..75: mol_type = other DNA
ccgcgcggtcttctcctggcagatccagcccggcgacagcgtgcgtccgcaggatgtgggctttgtccccgacct

SEQ ID NO: 118842 - DNA, 75 bp, synthetic construct
  source 1..75: mol_type = other DNA
acaggcctgataagacgcgctggcgtcacatcaggcaacggctgtcggatgcagcgtgaacgccttatccgacct

SEQ ID NO: 118843 - DNA, 75 bp, synthetic construct
  source 1..75: mol_type = other DNA
ggtaaatccacacgtttttgtttggccttatggcgaagcgaatagcatagcgatagagggtgatgctgccaactt

SEQ ID NO: 118844 - DNA, 75 bp, synthetic construct
  source 1..75: mol_type = other DNA
gcgtcgaaaattcctggcggggtgatgccgattgctgttctgaccgaaggactaagcatcgcgaacggtctgctg

SEQ ID NO: 118845 - DNA, 75 bp, synthetic construct
  source 1..75: mol_type = other DNA
tactatgacgtgcgcattgaagataaaccgctgccgaacggctgcgcgggcaaaccgattgtcgagcgcggtaaa

SEQ ID NO: 118846 - DNA, 75 bp, synthetic construct
  source 1..75: mol_type = other DNA
tttccgggcgttgcgctgctgacggaagagtacatcaactttatggccagcaatttcgaccgcctgaccgtctgg

SEQ ID NO: 118847 - DNA, 75 bp, synthetic construct
  source 1..75: mol_type = other DNA
aaggcgccaaagaggagacgctgtctgggctgaacaactacacccgcgtggtggagaaaggccagtacgacagtc

SEQ ID NO: 118848 - DNA, 75 bp, synthetic construct
  source 1..75: mol_type = other DNA
tagcatgtagatatctttttgaaaaaattgcatctgactcggctatgagggggtcagtattttatactccagaag

SEQ ID NO: 118849 - DNA, 75 bp, synthetic construct
  source 1..75: mol_type = other DNA
atggtcagtgtgactttctctgtgggctggtcacccccccgggcgcaggctcacccactaaaaggaaaagtcacg

SEQ ID NO: 118850 - DNA, 75 bp, synthetic construct
  source 1..75: mol_type = other DNA
gcggtcgtgtctctggttgcgatgctgggtaatgtcacctttgatggtcgccatcttgagttcctcgacctgctg

SEQ ID NO: 118851 - DNA, 75 bp, synthetic construct
  source 1..75: mol_type = other DNA
tggtctacaccattctgcctatcatctacgacgttgctattaagaacaacattcgcccggagcgtccgatggcgg

SEQ ID NO: 118852 - DNA, 75 bp, synthetic construct
  source 1..75: mol_type = other DNA
aaaaaatgcgtcgggaaaaacgaaaaattatcccattatgcccatttgcgaaacacgaatttgataaaacacggg

SEQ ID NO: 118853 - DNA, 75 bp, synthetic construct
  source 1..75: mol_type = other DNA
gccgccgtctttgggtttatcgacaaagaacagctggataaatatgtcgctaatggcggcaaacgtagcgactgg

SEQ ID NO: 118854 - DNA, 75 bp, synthetic construct
  source 1..75: mol_type = other DNA
ttttgtgtgatgtgtgacgaagattatgagggggaaaagtgctgccggctgctgtctccgctggaagaggcgctt

SEQ ID NO: 118855 - DNA, 75 bp, synthetic construct
  source 1..75: mol_type = other DNA
tacagtgggtaaaactctatgaaacgtccggtgatgcgggatttgtatgccgtcgctgtggcatttctcgaccca

SEQ ID NO: 118856 - DNA, 75 bp, synthetic construct
  source 1..75: mol_type = other DNA
atctggtctttttcatcattctgtcagtgattgtgttccgccaggtgattttctccgcccggataaacacagagt

SEQ ID NO: 118857 - DNA, 75 bp, synthetic construct
  source 1..75: mol_type = other DNA
atagaggcatcttcagaaaacaaatcagagagcatcacttcaaaagatgatttcgaagaacaaaccagacgcaat

SEQ ID NO: 118858 - DNA, 75 bp, synthetic construct
  source 1..75: mol_type = other DNA
gcaacatccgcgcagcacacatgaatataaacacacaaccaatccgcttcacatgccaaggcgccaccagcggta

SEQ ID NO: 118859 - DNA, 75 bp, synthetic construct
  source 1..75: mol_type = other DNA
agcgttacggttatcgtgatgatgccctgaagctggcggatacgttcttccggcacgccaaaggattaaccgccg

SEQ ID NO: 118860 - DNA, 75 bp, synthetic construct
  source 1..75: mol_type = other DNA
acatctggcaaggctgggacggaagtcactgtcgttctcaaaatcggtgcagctgcatgacaaagtcatcgggca

SEQ ID NO: 118861 - DNA, 75 bp, synthetic construct
  source 1..75: mol_type = other DNA
gctgatcagcgtctggagctcgatacattacgtaaggaaatggctgtcggtaaggatgctgttgtcacccatcag

SEQ ID NO: 118862 - DNA, 75 bp, synthetic construct
  source 1..75: mol_type = other DNA
agcaacctgcgacggtgaatgcagacgggaaagtgatgatgccatcgggtggttttccctcatggggatatggct

SEQ ID NO: 118863 - DNA, 75 bp, synthetic construct
  source 1..75: mol_type = other DNA
atctggcaaggctgggacggaagttactgtcgttctcaaaatcggtggagttgcatgacaaggtcatcgggcatt

SEQ ID NO: 118864 - DNA, 75 bp, synthetic construct
  source 1..75: mol_type = other DNA
cgattacctctggcgcagcagcgccaagatcggcgcgggcaagttcaggccgctacgaccgctgcaaccggctta

SEQ ID NO: 118865 - DNA, 75 bp, synthetic construct
  source 1..75: mol_type = other DNA
gaatgccggcagagcagcggcttgctgaacgtcagcgaaaaacgaaaccgctgttgaaattcctggaaagctggt

SEQ ID NO: 118866 - DNA, 75 bp, synthetic construct
  source 1..75: mol_type = other DNA
gccagttatgcccgttcgctggaggtgcgcgatcgtattgcaggtgccggagccactaccacggctgcagggctg

SEQ ID NO: 118867 - DNA, 75 bp, synthetic construct
  source 1..75: mol_type = other DNA
atcaagcagggcacggtgacggcctccctgatgctccgaaagctcggcagctacccacgccagaacggcctggcc

SEQ ID NO: 118868 - DNA, 75 bp, synthetic construct
  source 1..75: mol_type = other DNA
aactacgaagatcgctttgtggtgccgagtagtcatcgtgaactggcgcgggaagccttcccggagaaaaatggc

SEQ ID NO: 118869 - DNA, 75 bp, synthetic construct
  source 1..75: mol_type = other DNA
ccgtacagcaggcaacccctgaaccaacggcagaagataaaccgaaggaagagcgtcctgtgtctgccactgaga

SEQ ID NO: 118870 - DNA, 75 bp, synthetic construct
  source 1..75: mol_type = other DNA
ggcaaggctgggacggaagttactgtcgttctcaaaatcggtggagttgcatgacaaggtcatcgggcattatct

SEQ ID NO: 118871 - DNA, 75 bp, synthetic construct
  source 1..75: mol_type = other DNA
agcaacctgcgacggtgaatgcagacggcaaagtgatgattccatcgggtggttttccttcatggggatatggct

SEQ ID NO: 118872 - DNA, 75 bp, synthetic construct
  source 1..75: mol_type = other DNA
cggcgattaacatcaagccgctgtacgaccgcgtcgtcatcaagcgcaccgaggaagagaaggtctccgccggtg

SEQ ID NO: 118873 - DNA, 75 bp, synthetic construct
  source 1..75: mol_type = other DNA
ggtagccccacgaggaagatatgcgcggcgattaacatcaagccgctgtacgaccgcgtcgtcatcaagcgcacc

SEQ ID NO: 118874 - DNA, 75 bp, synthetic construct
  source 1..75: mol_type = other DNA
gttcggcaagtacagcggcaccgaagtgaagctggacggcgtcgagctgctggtggtgaaggaagacgacctgtt

SEQ ID NO: 118875 - DNA, 75 bp, synthetic construct
  source 1..75: mol_type = other DNA
agcaacctgcgacggtgaatgcagacggtaaagtgatgatcccatcgggtggttttccttcatggggatatggct

SEQ ID NO: 118876 - DNA, 75 bp, synthetic construct
  source 1..75: mol_type = other DNA
tatgagtttcaagatagcgaacaggtaacagatccaactactggctatcaatcgttatcgtttgcaataaatatt

SEQ ID NO: 118877 - DNA, 75 bp, synthetic construct
  source 1..75: mol_type = other DNA
caacatctggcaaggctgggacggaagttactgtcgttctcaaaatcggtggagttgcatgacaaggtcatcggg

SEQ ID NO: 118878 - DNA, 75 bp, synthetic construct
  source 1..75: mol_type = other DNA
tacgccacgtgatcagtgtcatcaacacctggccagccaaccgcgtgaaagagttgttgccctggaacgtcactc

SEQ ID NO: 118879 - DNA, 75 bp, synthetic construct
  source 1..75: mol_type = other DNA
ctgtacagcctgatcgggacgtgcaaactgaacggagtggagccagaaagctacctccgctatgtccttgacgtc

SEQ ID NO: 118880 - DNA, 75 bp, synthetic construct
  source 1..75: mol_type = other DNA
cactcattgacgccacattgaggtggcttatagatggaaatttcacaatgaaaaaagcatttgctgcactgttcg

SEQ ID NO: 118881 - DNA, 75 bp, synthetic construct
  source 1..75: mol_type = other DNA
gatactgccgctgacggctcccgctgcggtgggcgttctgcggattcccgcccgggtggcggtggcattcgttaa

SEQ ID NO: 118882 - DNA, 75 bp, synthetic construct
  source 1..75: mol_type = other DNA
atgagcttattgcctcgggaaaacgcaccccaaaaaagctatagacttctgagaatatcagaagtgattaatttg

SEQ ID NO: 118883 - DNA, 75 bp, synthetic construct
  source 1..75: mol_type = other DNA
tgaatctgaggcaacatctggcaaggctgggacggaagtcactgtcgttttcaaaatcggtggagctgcatgaca

SEQ ID NO: 118884 - DNA, 75 bp, synthetic construct
  source 1..75: mol_type = other DNA
ctgctgtaccgccccaacagcccgctgaagctgcggcatcgccgacacaggatgaaacgccacagccgccggcag

SEQ ID NO: 118885 - DNA, 75 bp, synthetic construct
  source 1..75: mol_type = other DNA
tttatgaatcacgcctgaagggagagctgcacgttatcagcaagcgatatacgcagcgcattgagcggcataacc

SEQ ID NO: 118886 - DNA, 75 bp, synthetic construct
  source 1..75: mol_type = other DNA
agcagcggcttgctgaacgtcagcgaaaaacgaaaccgctgttgaaatccctggaaagctggttgcgtgaaaaga

SEQ ID NO: 118887 - DNA, 75 bp, synthetic construct
  source 1..75: mol_type = other DNA
ggcaaacgggaatactggggaaacggcctggaagaactggtcaaaaaccatcagaagggtgaccccgtcacactg

SEQ ID NO: 118888 - DNA, 75 bp, synthetic construct
  source 1..75: mol_type = other DNA
cgcaaatgaaggcactatcgtaatcaccacacagcatccttgtgtagcaaaacttaaagataaaacattggaggc

SEQ ID NO: 118889 - DNA, 75 bp, synthetic construct
  source 1..75: mol_type = other DNA
agaaatcacgatctatccgtatatcaacgaaacgattatttccggtggcaccgcgcatgaaggcggggcggtcca

SEQ ID NO: 118890 - DNA, 75 bp, synthetic construct
  source 1..75: mol_type = other DNA
cgcacccgagagtggcggttatgtccacctggagtccccgggacactctggtaacacaggtgctcagatttgccg

SEQ ID NO: 118891 - DNA, 75 bp, synthetic construct
  source 1..75: mol_type = other DNA
ggacggtaaaatccaccgggttccgaccaccggtgacaaaaacgggcaaaaaagtggcgcatatcgcggcttcct

SEQ ID NO: 118892 - DNA, 75 bp, synthetic construct
  source 1..75: mol_type = other DNA
atgcagtattacggcggggtgattgagctcaccggcagcgatgagttcaaaaaacggacaatggaaatcatcgtc

SEQ ID NO: 118893 - DNA, 75 bp, synthetic construct
  source 1..75: mol_type = other DNA
accatacactgcagtatcaccttccggatggcacgcacgccttcacagacgtcggagggcatctgctcatggcta

SEQ ID NO: 118894 - DNA, 75 bp, synthetic construct
  source 1..75: mol_type = other DNA
atgagtaattcgttgttacccccatcagccagcaatttcatgcgttgtgccgaagccgtcggaacacgcattaca

SEQ ID NO: 118895 - DNA, 75 bp, synthetic construct
  source 1..75: mol_type = other DNA
cgaagctgtcggaacacgcattacagacattccggtagacctcaacacgctgtggtcgccggacacctgcccggt

SEQ ID NO: 118896 - DNA, 75 bp, synthetic construct
  source 1..75: mol_type = other DNA
ggttgccacaggcaacagcacatgaatacctgacgcgcaagggcatccgggccgcgcctggcgtgcggctgaaca

SEQ ID NO: 118897 - DNA, 75 bp, synthetic construct
  source 1..75: mol_type = other DNA
cgccatgtcgaaaggggcggacatcatcgatgtgatgcaacgcctgggcggtgtggctgatcgtctggattatcg

SEQ ID NO: 118898 - DNA, 75 bp, synthetic construct
  source 1..75: mol_type = other DNA
aaggctgggacggaagtcactgtcgttctcaaaatcgctggagctgcatgacaaggtcatcgggcattatctgaa

SEQ ID NO: 118899 - DNA, 75 bp, synthetic construct
  source 1..75: mol_type = other DNA
cgagcagccatcgcgaactggcgcgtgaagctttcccggagaaaaatggctgcggctttacctttggcgacggct

SEQ ID NO: 118900 - DNA, 75 bp, synthetic construct
  source 1..75: mol_type = other DNA
atggctgtccgctgtatgaatcacgcctgaagggaaagctgcacgttatcagcaagcgttacactcagcgcattg

SEQ ID NO: 118901 - DNA, 75 bp, synthetic construct
  source 1..75: mol_type = other DNA
gacagaaaagccatccacccgcagacccatcttgccggcttcaggggagtgctgcaggcggatgcgtatgcagga

SEQ ID NO: 118902 - DNA, 75 bp, synthetic construct
  source 1..75: mol_type = other DNA
ttacgctactgccgcctccctgcacgaagcaaccggccttcctgttctgatgacaattgatgccgacaatatgat

SEQ ID NO: 118903 - DNA, 75 bp, synthetic construct
  source 1..75: mol_type = other DNA
aaaaaaatctacttcaactggaagagcggtaagtctgagaagtgcatcttctgctatccgcgtattgaagcgggt

SEQ ID NO: 118904 - DNA, 75 bp, synthetic construct
  source 1..75: mol_type = other DNA
gccgctcggctatctgattgaggtgagggagtggtggcagctcaacgaggagccggggacgtttcgcatcgttgt

SEQ ID NO: 118905 - DNA, 75 bp, synthetic construct
  source 1..75: mol_type = other DNA
gaggcaataaaagatgtcgggatgtcatcacttaaattaattaatgatgtcgttctctttccacgaacaattccc

SEQ ID NO: 118906 - DNA, 75 bp, synthetic construct
  source 1..75: mol_type = other DNA
gtaaccgcgctgaaatgagtccggaagccgccggcattgcggcctgtctgatgacgtacagtcatcacgcctgtc

SEQ ID NO: 118907 - DNA, 75 bp, synthetic construct
  source 1..75: mol_type = other DNA
cgaagccactgaacagaccagcgcagcagcgaggtctgcttccgcagcgaagacatccgaaacgaatgcgaaagc

SEQ ID NO: 118908 - DNA, 75 bp, synthetic construct
  source 1..75: mol_type = other DNA
attaagtctgaatccgaacttacggtggacgcaagcataaccctgagagatcccctcataatttccccaaaacgt

SEQ ID NO: 118909 - DNA, 75 bp, synthetic construct
  source 1..75: mol_type = other DNA
taatggttataccgcgatttcaaatctaagcgcggggattatgagcacaacaagcggtagtggccagactcgtaa

SEQ ID NO: 118910 - DNA, 75 bp, synthetic construct
  source 1..75: mol_type = other DNA
tgagtattttgataaaaatgaggttgataaactcaactttaatataaaacaggttggtagaaggataatagaaat

SEQ ID NO: 118911 - DNA, 75 bp, synthetic construct
  source 1..75: mol_type = other DNA
cgttcctgcatatgcggtggatgaagtgattcttggccaggtgttgactgcaggggcagggcagaatccggcaag

SEQ ID NO: 118912 - DNA, 75 bp, synthetic construct
  source 1..75: mol_type = other DNA
gggatcaggttgttttgcgtctggaaagccccggcggtatggttcatggttatggcctggcagcctcacaattgc

SEQ ID NO: 118913 - DNA, 75 bp, synthetic construct
  source 1..75: mol_type = other DNA
tcgacaataagctgtgtgaaaacgccctccgggtagttgcactggggcggcgtaactacatgttcttcggctctg

SEQ ID NO: 118914 - DNA, 75 bp, synthetic construct
  source 1..75: mol_type = other DNA
ataatttactcgctatttttgcacgtcctgaaatgaattttggatatactcatgatggtaatgataagataaaag

SEQ ID NO: 118915 - DNA, 75 bp, synthetic construct
  source 1..75: mol_type = other DNA
tataaggagatgaaagaagaactggcagcagcgctgatggatccgcatcagcaaaagcagtggcacaaagcgcag

SEQ ID NO: 118916 - DNA, 75 bp, synthetic construct
  source 1..75: mol_type = other DNA
gtagttaagcagcagcgcgttgaatgccggggagagtggtttactaattttcatatgcgttataaacagcaacat

SEQ ID NO: 118917 - DNA, 75 bp, synthetic construct
  source 1..75: mol_type = other DNA
ccacaccttctgtttccgtgaccgctgcatcagggaataaccagtctcaactggttgccactcccgtccctgatg

SEQ ID NO: 118918 - DNA, 75 bp, synthetic construct
  source 1..75: mol_type = other DNA
tactgcggtggtatctggaatctgtacacactgaacaacggtggcgcatttatggcccccgaaccggatgacgat

SEQ ID NO: 118919 - DNA, 75 bp, synthetic construct
  source 1..75: mol_type = other DNA
ctgtgagaacgtgggtggcacctaccttgacggtaagtcactcaaatttaatccgtttgccaacatctctaacat

SEQ ID NO: 118920 - DNA, 75 bp, synthetic construct
  source 1..75: mol_type = other DNA
actgtattgttgaagcaccggcgccgtcccgcccgatagagcgtggtatcgcgggccccggattacttgcccgcg

SEQ ID NO: 118921 - DNA, 75 bp, synthetic construct
  source 1..75: mol_type = other DNA
atagtccctgatgaacagcgcatcagcttctggccgcagcactttggcctcattccacagtgggtgaccctggag

SEQ ID NO: 118922 - DNA, 75 bp, synthetic construct
  source 1..75: mol_type = other DNA
cgaaaaagcggatgatctgaatgaagacgtcaccgccagcctgagtgccctttttgcgatgttgccgggttttga

SEQ ID NO: 118923 - DNA, 75 bp, synthetic construct
  source 1..75: mol_type = other DNA
cgaatgcggcagcgtcacaacaatcagcagccacttctgcatctaccgcgaccacgaaagcgtcagaagcagcca

SEQ ID NO: 118924 - DNA, 75 bp, synthetic construct
  source 1..75: mol_type = other DNA
acaccggggcgcatacccatagtattagcgggaccgcaaatagtgccggtgcgcaccaacacaagagttccggtg

SEQ ID NO: 118925 - DNA, 75 bp, synthetic construct
  source 1..75: mol_type = other DNA
cagccaacgacagtaacgggagaagcgctccgtcgtatcggggaactgtacgctatcgaggctgagatccgcggc

SEQ ID NO: 118926 - DNA, 75 bp, synthetic construct
  source 1..75: mol_type = other DNA
gcggctgcctcatctgccagcgccgcgtcaacaaatgccgggcaggcctcagccagtgccaccgctgccggaaag

SEQ ID NO: 118927 - DNA, 75 bp, synthetic construct
  source 1..75: mol_type = other DNA
gatgacgatgcactgccaatttctgcctctttacgagggcgtgtagcaggcaacagtggcgttgatattttcgcc

SEQ ID NO: 118928 - DNA, 75 bp, synthetic construct
  source 1..75: mol_type = other DNA
gacgatacgcttccggttcccgtctctttacaagggcgcgtaacaggcaacagcggcgttgatattttcgcctaa

SEQ ID NO: 118929 - DNA, 75 bp, synthetic construct
  source 1..75: mol_type = other DNA
aacagcgtctggcagcaagaaaagccagagcggctccactgatgcagtcactgtatgactggatacaggaacaga

SEQ ID NO: 118930 - DNA, 75 bp, synthetic construct
  source 1..75: mol_type = other DNA
cccggggacttcttcccgtagatcgtattatcaacgtattcagacacagtcagcaggtgctcatacccactcgct

SEQ ID NO: 118931 - DNA, 75 bp, synthetic construct
  source 1..75: mol_type = other DNA
aagagacggaggccttcctgcgctctgcactggcacgtgtcgaagaaaagatcgaagaggaggagcgggaaacag

SEQ ID NO: 118932 - DNA, 75 bp, synthetic construct
  source 1..75: mol_type = other DNA
ttggtgatagccaactggttgatagtcttgttcatgatggtctgtgggacgcattcaatgattatcatattggcg

SEQ ID NO: 118933 - DNA, 75 bp, synthetic construct
  source 1..75: mol_type = other DNA
cctgtttacctctttctcagggagtttagtctccaggattcccggggcggttcatgtggcggtgagctggattat

SEQ ID NO: 118934 - DNA, 75 bp, synthetic construct
  source 1..75: mol_type = other DNA
accgtctggagtctgaagaaagctgttgcccggagtgtggcggtgagctggattatctgggggaagtcagtgcag

SEQ ID NO: 118935 - DNA, 75 bp, synthetic construct
  source 1..75: mol_type = other DNA
atgggtgctgttcaatgccatgaacggtaaccgcgcagaaatgagcccggaagccgccggtattgccgcctgtct

SEQ ID NO: 118936 - DNA, 75 bp, synthetic construct
  source 1..75: mol_type = other DNA
ctgtacaccctgaacaacggcggggcatttatggcacccgaaccggatgacgatgatgacgaaacatgggtactg

SEQ ID NO: 118937 - DNA, 75 bp, synthetic construct
  source 1..75: mol_type = other DNA
gccgggtcagcgttggcacctgcagtgaggttcgcttacagcccggacagaaaaggcatccatccgcagactcat

SEQ ID NO: 118938 - DNA, 75 bp, synthetic construct
  source 1..75: mol_type = other DNA
aattttacttatggtgttcctgtaaactttaacgcttccagaacctggtctggtgccacaagcactacaggtaac

SEQ ID NO: 118939 - DNA, 75 bp, synthetic construct
  source 1..75: mol_type = other DNA
gcaaaacgtaacagtaccacggtggtggtgaacacgctggcctcagaaaatccggatgaagccgggcgttacagc

SEQ ID NO: 118940 - DNA, 75 bp, synthetic construct
  source 1..75: mol_type = other DNA
caagcggggagaaaataccgttactcagtacagcgaatacctggactaatcgacaaacattcagcggtggccttt

SEQ ID NO: 118941 - DNA, 75 bp, synthetic construct
  source 1..75: mol_type = other DNA
tgcaggggcagacttttgacaaatctgcctacccgaaacttgcagtcgcttatccgtcaggcgtgatccctgata

SEQ ID NO: 118942 - DNA, 75 bp, synthetic construct
  source 1..75: mol_type = other DNA
tcacgtttaactcgccggatctctcatggttcggcagcggatcgctgttgttcctgccaacgcccgtcattattg

SEQ ID NO: 118943 - DNA, 75 bp, synthetic construct
  source 1..75: mol_type = other DNA
cggtggtgggggcgctgattattcaggggatgaacaccggaattttgctttcgggctttccgccggagatgaacc

SEQ ID NO: 118944 - DNA, 75 bp, synthetic construct
  source 1..75: mol_type = other DNA
aggatgcgagcacgacgaaaaaggggatagtacagctcagcagtgcaacaaacagcaccagtgaaaagctggcgg

SEQ ID NO: 118945 - DNA, 75 bp, synthetic construct
  source 1..75: mol_type = other DNA
ttcatggcgatgtcatgactgacggcaaactccatgccgatgataccccggtccaggtactgctgccgggtaata

SEQ ID NO: 118946 - DNA, 75 bp, synthetic construct
  source 1..75: mol_type = other DNA
cttgcagccgcttatccgtcaggcgtgatccctgatatgcgtggctggacgattaagggcaaacccgccagtggt

SEQ ID NO: 118947 - DNA, 75 bp, synthetic construct
  source 1..75: mol_type = other DNA
ctgcagtaatggctgggtggaaatcgacaacaacatcgcagagaacgccttacggggagtggccgtaggccggaa

SEQ ID NO: 118948 - DNA, 75 bp, synthetic construct
  source 1..75: mol_type = other DNA
cgtcaacaagtgccgggcaggcctcagccagtgccaccgccgccggaaaatcggcagaaagtgccgcatcgtctg

SEQ ID NO: 118949 - DNA, 75 bp, synthetic construct
  source 1..75: mol_type = other DNA
gtttgtgcgtccggcgtttgatgtgcgcagtgaacaggcagcgcaagtggcgattgctcggatgaaccgggccat

SEQ ID NO: 118950 - DNA, 75 bp, synthetic construct
  source 1..75: mol_type = other DNA
aagagacggaagccttcctgcgctctgcactgacacgtgccgaagaaaagatcgaagaagatgaacgggaagcag

SEQ ID NO: 118951 - DNA, 75 bp, synthetic construct
  source 1..75: mol_type = other DNA
gattacttgcccgcgtgttaacgggaaaatactgcgaacacctgctactgtatcgtcagagtgaaatctttgcct

SEQ ID NO: 118952 - DNA, 75 bp, synthetic construct
  source 1..75: mol_type = other DNA
cagcagaacagcgtctggcggcaagaaaagccagagctgcgccactgatgcagtcactgtatgactggatacaga

SEQ ID NO: 118953 - DNA, 75 bp, synthetic construct
  source 1..75: mol_type = other DNA
ctggccccgggatccgtcagtgaaatgcaggactatattccggaaaaccgctgttaccgtgcaaccctggagttt

SEQ ID NO: 118954 - DNA, 75 bp, synthetic construct
  source 1..75: mol_type = other DNA
gtccggcacagcagcatctgcaggtgcacacgcgcatactgtcggtattggtgctcatacgcactccgttgcgat

SEQ ID NO: 118955 - DNA, 75 bp, synthetic construct
  source 1..75: mol_type = other DNA
atgctgaacgatccggcaattcatggtgaaagaatcaccgtttctgataacgcgaaatttattttaagcagcagt

SEQ ID NO: 118956 - DNA, 75 bp, synthetic construct
  source 1..75: mol_type = other DNA
cctgcttcagcggtgtgctgcaagcggatgcgtacgccgggttcaacgagctttatcgcaatggtgggataacgg

SEQ ID NO: 118957 - DNA, 75 bp, synthetic construct
  source 1..75: mol_type = other DNA
ccacaccttctgtttccgtaaccgctgtatcagagaataacccgcctcaactggttgccaccatagtccctgatg

SEQ ID NO: 118958 - DNA, 75 bp, synthetic construct
  source 1..75: mol_type = other DNA
tcggcagaaagtgccgcatcgtctgcttcaacagccacaacgaaggctggcgaagccactgaacaggccagcgca

SEQ ID NO: 118959 - DNA, 75 bp, synthetic construct
  source 1..75: mol_type = other DNA
aagcggattactcaaacgtgatggttttccatcaaccctttacggtgggattttatgagtacaaagcaacagatg

SEQ ID NO: 118960 - DNA, 75 bp, synthetic construct
  source 1..75: mol_type = other DNA
gcactttggcctcattccacagtgggtggccctggagccccgtgtcttcggctggatggaccgtctgtgtgaaga

SEQ ID NO: 118961 - DNA, 75 bp, synthetic construct
  source 1..75: mol_type = other DNA
atgaagttgaatcttaagggatttttcaaagctgccagtttgtgttctttagcatttgcgttgaccggatgtatc

SEQ ID NO: 118962 - DNA, 75 bp, synthetic construct
  source 1..75: mol_type = other DNA
cgtaggccggaaaaactggatgttcgcgggttccgacagcggtggtgaacatgcggcggtgttgtactcgctgat

SEQ ID NO: 118963 - DNA, 75 bp, synthetic construct
  source 1..75: mol_type = other DNA
cggacgatttaaagatgagatcgtcccggtaatgatccaaagtaacggtcagacgttggttgttgataccgatga

SEQ ID NO: 118964 - DNA, 75 bp, synthetic construct
  source 1..75: mol_type = other DNA
atgagtgcgggtataacggtccggcagtggcggatgagttcgacaaccctaccacggatatccggaaggacagat

SEQ ID NO: 118965 - DNA, 75 bp, synthetic construct
  source 1..75: mol_type = other DNA
gttttatccgcctggcgcaccaatcccgtggccatcggataccgttccgtctggttatgccctgatgcaggggca

SEQ ID NO: 118966 - DNA, 75 bp, synthetic construct
  source 1..75: mol_type = other DNA
cgaaggggattactggtgctttatggcagcgcacatcggcagggtttacaaattttgcctgggtcaatacatctg

SEQ ID NO: 118967 - DNA, 75 bp, synthetic construct
  source 1..75: mol_type = other DNA
cagcgccagcgcatccagtacggatttgggtacgaaaaccacatcgtcgtttgattacggcactaaatccacgaa

SEQ ID NO: 118968 - DNA, 75 bp, synthetic construct
  source 1..75: mol_type = other DNA
gtctgctggaagcggctaaagaagcgggaattccgctggtggtaaatcacgttggcggcatgttcggtattttct

SEQ ID NO: 118969 - DNA, 75 bp, synthetic construct
  source 1..75: mol_type = other DNA
tgtacgccatcgaggatgaaatacggggattaccagagtcagagcgtcttgcagccaggcagcagcgaagcaaag

SEQ ID NO: 118970 - DNA, 75 bp, synthetic construct
  source 1..75: mol_type = other DNA
ccagatggtaatcctgtccgcctgacacatatggccgtgggtgacggcggcggtactttacccacgccagacagt

SEQ ID NO: 118971 - DNA, 75 bp, synthetic construct
  source 1..75: mol_type = other DNA
tgtttggtctggtcaccgggatggcggaggacctgcagagcctggtgggggccacggtggtccgccgccgggtgt

SEQ ID NO: 118972 - DNA, 75 bp, synthetic construct
  source 1..75: mol_type = other DNA
acctaccgctctgatgagtgtggttacacgggcggggcagtggcggatgagttcgataaacccaccacggatatc

SEQ ID NO: 118973 - DNA, 75 bp, synthetic construct
  source 1..75: mol_type = other DNA
cctgttccgtggccctcagccacaccaccaactggatggctgaaatgtaacggtgcagcattttcttctgaaatg

SEQ ID NO: 118974 - DNA, 75 bp, synthetic construct
  source 1..75: mol_type = other DNA
gctaacgggaaatataccgctcaggacgctacgacagcacaaaaaggaattgtccagctcagtagtgcaaccaac

SEQ ID NO: 118975 - DNA, 75 bp, synthetic construct
  source 1..75: mol_type = other DNA
gcagccaggcagcagcgaagcaaagcgttactgacgtcgctgcatgaatggatggtggagaagaatggcacgctg

SEQ ID NO: 118976 - DNA, 75 bp, synthetic construct
  source 1..75: mol_type = other DNA
tggccccgggatccgtcagtgaaatgcaggactatattccggaaaaccgctgttaccgtgcaaccctggagtttc

SEQ ID NO: 118977 - DNA, 75 bp, synthetic construct
  source 1..75: mol_type = other DNA
ctggcgaacacctgtatgtgggattaccggggagatgaatgcgggtataacggtcctgcggtggcggatgagttc

SEQ ID NO: 118978 - DNA, 75 bp, synthetic construct
  source 1..75: mol_type = other DNA
attatcgtcgagccggtggcaggcaatatgaactgtgttccgccgctgccagagttcctgccaggtctgcgcgcg

SEQ ID NO: 118979 - DNA, 75 bp, synthetic construct
  source 1..75: mol_type = other DNA
tcatttgttgaaagcgaagtggatcactggattcaagagcaaatatatgcctctcgtggtgagcgatatgaaaat

SEQ ID NO: 118980 - DNA, 75 bp, synthetic construct
  source 1..75: mol_type = other DNA
cattaaatcgcacacccacagtgccagcgcatccagtacggatttgggtacgaaaaccacatcgtcgtttgatta

SEQ ID NO: 118981 - DNA, 75 bp, synthetic construct
  source 1..75: mol_type = other DNA
tcacactcccacagtgccagcgcgtccagtacggacttggggacaaaaaccacatcatcatttgactacggcacc

SEQ ID NO: 118982 - DNA, 75 bp, synthetic construct
  source 1..75: mol_type = other DNA
gcgccactaacagcacgtctgaagcactggctgcaacgccgaaagcggtcaagacagcctatgaccttgctaacg

SEQ ID NO: 118983 - DNA, 75 bp, synthetic construct
  source 1..75: mol_type = other DNA
gaccacgacggcaatgcctgggtgcctgaccatagctggggcggttttgaaggtgggattaaccgtttttatggc

SEQ ID NO: 118984 - DNA, 75 bp, synthetic construct
  source 1..75: mol_type = other DNA
ttcctcgctggatgacctgcaatggtggggcgacttcacccccgatctgggctacgtcattcccaatacccgcga

SEQ ID NO: 118985 - DNA, 75 bp, synthetic construct
  source 1..75: mol_type = other DNA
cctcctttgtgctggccacaccgacggaaacggatggtgctgtttttccggggcgtatcatgctggccaacacct

SEQ ID NO: 118986 - DNA, 75 bp, synthetic construct
  source 1..75: mol_type = other DNA
gcgtcggggggaaattatctcgggtgtccacattcgcggacggaacctgcgaaccggaaacagtgataacagcat

SEQ ID NO: 118987 - DNA, 75 bp, synthetic construct
  source 1..75: mol_type = other DNA
gtgcgcagtgaacaggcagcgcaggtggcgattgctcggatgaaccgggccattgatgaggtactgagacgatga

SEQ ID NO: 118988 - DNA, 75 bp, synthetic construct
  source 1..75: mol_type = other DNA
cgttacgtcattgagcatatccaggattggccggcaaaccgggtacgcgatctgttgccctggaaagttgatctg

SEQ ID NO: 118989 - DNA, 75 bp, synthetic construct
  source 1..75: mol_type = other DNA
cgctgccggtgaaattggtgagaaagagcacctgaaagccagcgagcagtattcctacggtgctgacccggtacg

SEQ ID NO: 118990 - DNA, 75 bp, synthetic construct
  source 1..75: mol_type = other DNA
tgctcaggtactgcatgataaatatatgatctggtgcggtgagcagttatggtctgcattcgttctggccactgt

SEQ ID NO: 118991 - DNA, 75 bp, synthetic construct
  source 1..75: mol_type = other DNA
ttggtccccacggacacaccatcaccgttaatgctacggggaacgcagaaaacaccgtaaaaaacatcgcattta

SEQ ID NO: 118992 - DNA, 75 bp, synthetic construct
  source 1..75: mol_type = other DNA
ggcgaacatgcggcggtgttgtactcgctgatcggcacatgccgtctgaacaatgtggaaccagaaaaatggctg

SEQ ID NO: 118993 - DNA, 75 bp, synthetic construct
  source 1..75: mol_type = other DNA
agagtgaaatctttgcccgccagggtgtcgaactgagccgggccttactctccaactgggttgacgcgtgctgcc

SEQ ID NO: 118994 - DNA, 75 bp, synthetic construct
  source 1..75: mol_type = other DNA
ggcggaggcggataataatgctgcggaaagagcgcttcgtgcagtctgtctcggaaagaaaaactttatgttctt

SEQ ID NO: 118995 - DNA, 75 bp, synthetic construct
  source 1..75: mol_type = other DNA
ccagtacgcaccgaaagccagcccgacattcaccggcacaccaacagcgcctacgcctgcaaatagcgataacag

SEQ ID NO: 118996 - DNA, 75 bp, synthetic construct
  source 1..75: mol_type = other DNA
atggcaaacctacccgaaaccccgcagtgggaagacggcatctaccagattgaggtctccgaccctgttctgggc

SEQ ID NO: 118997 - DNA, 75 bp, synthetic construct
  source 1..75: mol_type = other DNA
gatttactgatccctgtggatgaaacaccgcctgtcatcaacgacgaacaatccacatcaacaccgttaaccacc

SEQ ID NO: 118998 - DNA, 75 bp, synthetic construct
  source 1..75: mol_type = other DNA
gacgacgatgcgctacccgttcccgtctctttacaagggcgcgtaacaggcaacagcggcgttgatattttcgcc

SEQ ID NO: 118999 - DNA, 75 bp, synthetic construct
  source 1..75: mol_type = other DNA
ttcacccgccagaggcaacaaagtgcagagttgcgtctgcacccgcaggatttaggtgaagtgcaaatcatccct

SEQ ID NO: 119000 - DNA, 75 bp, synthetic construct
  source 1..75: mol_type = other DNA
atgactctcaataaaaccgatcgcattgtcattacgctgggtaaacagatcgttcacggcaaatacgtgccaggc

SEQ ID NO: 119001 - DNA, 75 bp, synthetic construct
  source 1..75: mol_type = other DNA
gatccggaagcgtatctgcgccatattctgagcgtactgccggaatggccctccaaccgtgttgacgaactcctg

SEQ ID NO: 119002 - DNA, 75 bp, synthetic construct
  source 1..75: mol_type = other DNA
cgttacgaacacctatcggttgctttcgtggagcattggcaggccattccgccgtggaattaggcagcctggtcg

SEQ ID NO: 119003 - DNA, 75 bp, synthetic construct
  source 1..75: mol_type = other DNA
actggccgcaacaccgaaagcggtaaagacagcatatgaccttgctaacgggaaatataccgctcaggacgctac

SEQ ID NO: 119004 - DNA, 75 bp, synthetic construct
  source 1..75: mol_type = other DNA
aaagtggatgataaccaggcgcaaatccagatggtttcaccgcatcagcacgtacgcgccgccctggaagcagcg

SEQ ID NO: 119005 - DNA, 75 bp, synthetic construct
  source 1..75: mol_type = other DNA
acagaagttgcgtgctgggcccatgcccggcgaaaaatccacgatgtatacatcagcagcaaaagtacgacggca

SEQ ID NO: 119006 - DNA, 75 bp, synthetic construct
  source 1..75: mol_type = other DNA
ccactccttctgtttccgtaaccgctgcatcagggaatgaccagcctcagctggttgccactcccgtccctgatg

SEQ ID NO: 119007 - DNA, 75 bp, synthetic construct
  source 1..75: mol_type = other DNA
agcgtactgccggaatggccctccaaccgggttgatgaactcctgccatggaacgtagtactcaccaataaataa

SEQ ID NO: 119008 - DNA, 75 bp, synthetic construct
  source 1..75: mol_type = other DNA
gtactgtccacgccgacggaaacggacggtgctgtttttccggggcgcatcatgctggccaacacctgcacctgg

SEQ ID NO: 119009 - DNA, 75 bp, synthetic construct
  source 1..75: mol_type = other DNA
cctgttccgtggccctcagccacacccccaactggctggctgaaatgtaacggtgcagcattttcttctgaaatg

SEQ ID NO: 119010 - DNA, 75 bp, synthetic construct
  source 1..75: mol_type = other DNA
gacggtctggcggaggtggacaataacacagcggaaagagcgcttcgtgcagtctgtctcggaaagaaaaattac

SEQ ID NO: 119011 - DNA, 75 bp, synthetic construct
  source 1..75: mol_type = other DNA
cctgttccgtggccctcagccacacctccaactggttggctgaaatgtaacggtgcagcattttcttctgaaatg

SEQ ID NO: 119012 - DNA, 75 bp, synthetic construct
  source 1..75: mol_type = other DNA
atttaacgtggagtcacctcaacaggcaggtatatctgaacttgttcttcgtgcgggaaatggaaatccaaaagg

SEQ ID NO: 119013 - DNA, 75 bp, synthetic construct
  source 1..75: mol_type = other DNA
ctgaaacgcttgccgcgacaccgaaagcagtgaaagcagctaatgacaatgcgaatggtcgggtaccttctgccc

SEQ ID NO: 119014 - DNA, 75 bp, synthetic construct
  source 1..75: mol_type = other DNA
ggcgtataaatttaagtgctgacgaacgtagggatatatctatacagttcagagtaaacaaatcagagtttgact

SEQ ID NO: 119015 - DNA, 75 bp, synthetic construct
  source 1..75: mol_type = other DNA
cgggggggggggggggcggggcgctggcggccatgacggccgcggtggtgtgggcacgggcggagaccggggggc

SEQ ID NO: 119016 - DNA, 75 bp, synthetic construct
  source 1..75: mol_type = other DNA
aacgaaaccgctgttgaaatccctggaaagctggttgcgtgaaaagatgaagaccctgtcgcgacactcagagtt

SEQ ID NO: 119017 - DNA, 75 bp, synthetic construct
  source 1..75: mol_type = other DNA
ggttcacactgacgatacaccagtaaaagtgctggcaccgggcagaaaaaaggcaaaaacaggacgcatctggac

SEQ ID NO: 119018 - DNA, 75 bp, synthetic construct
  source 1..75: mol_type = other DNA
tagcccaaactggcaaaagcttaccccaccaataaattaccggatttacggggtgaatttattcgtggctgggat

SEQ ID NO: 119019 - DNA, 75 bp, synthetic construct
  source 1..75: mol_type = other DNA
ctgcgttacgtcattgatcatatcctggactggccggcaaaccgggtacgcgatctgttgctctggaaagttgat

SEQ ID NO: 119020 - DNA, 75 bp, synthetic construct
  source 1..75: mol_type = other DNA
cctgttccgtggccctcagccacaccgccaactgggtggctgaaatgtaacggtgcagcattttcttctgaaatg

SEQ ID NO: 119021 - DNA, 75 bp, synthetic construct
  source 1..75: mol_type = other DNA
accgctccggcactgaaggcattaaaagcgagtggaattaccgtaaaaatccttactggcgacagtgagttagtt

SEQ ID NO: 119022 - DNA, 75 bp, synthetic construct
  source 1..75: mol_type = other DNA
gttcgatgaaatctggaaagagggtatgaagccggaagaatggcttgatacctatctggaacgtgcaaacctgat

SEQ ID NO: 119023 - DNA, 75 bp, synthetic construct
  source 1..75: mol_type = other DNA
caataagaaaacgaagaccgggcggttatggacctgcgttcgtgacgaccgtaacgccgggtcaacgctggcgcc

SEQ ID NO: 119024 - DNA, 75 bp, synthetic construct
  source 1..75: mol_type = other DNA
gaagttacggttaaagagggcggcccgcggatgattgtcactggatactccagcggtatggttgagtgtcgttga

SEQ ID NO: 119025 - DNA, 75 bp, synthetic construct
  source 1..75: mol_type = other DNA
tgaactttattcaggaagctcgttccaccaaagcggcagatgccctgaaagcgatggtcagcaatactgcgacgg

SEQ ID NO: 119026 - DNA, 75 bp, synthetic construct
  source 1..75: mol_type = other DNA
gtaccgtttattcagagctgtgcatcgtggccgttaatgatcatgaccgtgatcgtgatgattgtcgggatcgca

SEQ ID NO: 119027 - DNA, 75 bp, synthetic construct
  source 1..75: mol_type = other DNA
cggcggcattcgtatcgaagacaacgtggtgatccacgaaaataacgtggaaaacatgacccgggatctgaaact

SEQ ID NO: 119028 - DNA, 75 bp, synthetic construct
  source 1..75: mol_type = other DNA
cgtcctgtcgagcggggtatcgccggaccgggtctgctggcccgtgtgttaacagccaaatactgtgaacatctg

SEQ ID NO: 119029 - DNA, 75 bp, synthetic construct
  source 1..75: mol_type = other DNA
cacccggagctgcaccttcgctccttccgtggcgtcctgcaggcagatgccttcgcggggtatgaccggctgttc

SEQ ID NO: 119030 - DNA, 75 bp, synthetic construct
  source 1..75: mol_type = other DNA
gtctggcggccagacagtcgcggagtgcgccgctgctggcgtcactgcatgagtggatggtggagaaaagtgcga

SEQ ID NO: 119031 - DNA, 75 bp, synthetic construct
  source 1..75: mol_type = other DNA
ctccgggtagttgcactggggcggcgtaactacatgttcttcggctctgatggaggaggcgagagtgcggcagtg

SEQ ID NO: 119032 - DNA, 75 bp, synthetic construct
  source 1..75: mol_type = other DNA
tctgcgtcagacccgcacccgcaaaccgttccccgaatcactcccccgcgatgaaaaacgcctgcggccagcggg

SEQ ID NO: 119033 - DNA, 75 bp, synthetic construct
  source 1..75: mol_type = other DNA
aaccgcgctgaaatgagcccggaagccgccggcattgccgcctgtctgatgacgtacagtcatcacgcctgccgt

SEQ ID NO: 119034 - DNA, 75 bp, synthetic construct
  source 1..75: mol_type = other DNA
ggcacaggccagattgcttgggcaggctaaaagccgcgtcactgaactgcagggcaaatacaacggcctgcgtca

SEQ ID NO: 119035 - DNA, 75 bp, synthetic construct
  source 1..75: mol_type = other DNA
cacgccccgctttgattagagggttaggtgttccactttacccttttctagcaatgtgcgtgttggtcgttctgc

SEQ ID NO: 119036 - DNA, 75 bp, synthetic construct
  source 1..75: mol_type = other DNA
gctgggcccatgcccgccgaaaaatccacgatgttcacgtccgtaccccgtcagccctgacggaggaggcgctga

SEQ ID NO: 119037 - DNA, 75 bp, synthetic construct
  source 1..75: mol_type = other DNA
atgcccggtaaagtccatgcggatgatatccccgttccggtccaggagccgggcagtggtaaaacaagaactgcc

SEQ ID NO: 119038 - DNA, 75 bp, synthetic construct
  source 1..75: mol_type = other DNA
atcgaagaagatgagcgagaaatagtaagcgtaaagccaatgccgtctgtaacacctgctccttgcagactaaat

SEQ ID NO: 119039 - DNA, 75 bp, synthetic construct
  source 1..75: mol_type = other DNA
aagccggacatcttgagctgcaatataccgcccgcgccagctatgcactggaaaaagcgtttggtgcaccattgg

SEQ ID NO: 119040 - DNA, 75 bp, synthetic construct
  source 1..75: mol_type = other DNA
tattaccgggtgaaggagggagagccgacaggctggaatcccgccgcactgccgccaacaaaacgtaatatcgct

SEQ ID NO: 119041 - DNA, 75 bp, synthetic construct
  source 1..75: mol_type = other DNA
aaattgccgccagcgcttctaatgccatggtgcgtgagctttccattgccaccatgcaaagcaaacgcttttttg

SEQ ID NO: 119042 - DNA, 75 bp, synthetic construct
  source 1..75: mol_type = other DNA
ttcttcggctctggccatggtggtgagcggggagcgctactgtacagcctgatcgggacgtgcaaactgaatgac

SEQ ID NO: 119043 - DNA, 75 bp, synthetic construct
  source 1..75: mol_type = other DNA
ggccacaacgcgtgctcgatctcgcttgccaggcgcaggcattaatcgctgaaagcggtgcgcaattgcagggca

SEQ ID NO: 119044 - DNA, 75 bp, synthetic construct
  source 1..75: mol_type = other DNA
aaccgcagaaatagagctgccggaactggatgtcctgcgcaataacgccaccgaatttcgcgcggtgaatatcgc

SEQ ID NO: 119045 - DNA, 75 bp, synthetic construct
  source 1..75: mol_type = other DNA
ccatctcaattatcacatgactacggagaatattaactttttcggcaagaaccctacgcttggcggcactgttgc

SEQ ID NO: 119046 - DNA, 75 bp, synthetic construct
  source 1..75: mol_type = other DNA
aaattgaagcactgaaaccgttcggcggcattcgtatcgaagacaacgtggtgatccacgaaaacaacgtggaaa

SEQ ID NO: 119047 - DNA, 75 bp, synthetic construct
  source 1..75: mol_type = other DNA
gaaaaagcgtttggcgcacctctgggtcgcgcttgcggcgttattgtcggcgctccagccgctgttggtgttctg

SEQ ID NO: 119048 - DNA, 75 bp, synthetic construct
  source 1..75: mol_type = other DNA
ggctaacaacctgctggagctgcagcgccagttgaaactcaccgccggagctgatgcgaacggctcaatgcagaa

SEQ ID NO: 119049 - DNA, 75 bp, synthetic construct
  source 1..75: mol_type = other DNA
atcggttatatcggtccggtgccggaacgtgcgctgcaactgggtattgaggccagcaatatcaacccgaaaggg

SEQ ID NO: 119050 - DNA, 75 bp, synthetic construct
  source 1..75: mol_type = other DNA
ttcacctgcccatggcaccagttttagtaacgaagccattctggtcctctccggtgattccggcgccgtgcgaca

SEQ ID NO: 119051 - DNA, 75 bp, synthetic construct
  source 1..75: mol_type = other DNA
ataagaaactggaagaccagagtgcagcgatccagcagatacagaaggttcaggttgatacaaataataacctga

SEQ ID NO: 119052 - DNA, 75 bp, synthetic construct
  source 1..75: mol_type = other DNA
gtgaatgcgaacgccgggacgctcaacaatgtcacggtaaatgaaaactgtacgattaagggcatgctggaggcg

SEQ ID NO: 119053 - DNA, 75 bp, synthetic construct
  source 1..75: mol_type = other DNA
aacctgtcattagttcttgaattaacggagcagtatttttttactatggatagcaaaaccatatccacctttcat

SEQ ID NO: 119054 - DNA, 75 bp, synthetic construct
  source 1..75: mol_type = other DNA
gaacagcatgtgggctgtgaagctgcagcagatgcaggacggacgcctttatattgcgggtatcggtgccggtat

SEQ ID NO: 119055 - DNA, 75 bp, synthetic construct
  source 1..75: mol_type = other DNA
tatcctcatcgtatccgagggaaaaaaacagtccaccctccatttaacagtaaaatcccatttgttaacagggtg

SEQ ID NO: 119056 - DNA, 75 bp, synthetic construct
  source 1..75: mol_type = other DNA
atatcaccacggaagccctgcagcgtatcggtgaactgtatgccattgaggcggaggtccggggatgttcagcag

SEQ ID NO: 119057 - DNA, 75 bp, synthetic construct
  source 1..75: mol_type = other DNA
ctgatcggcacctgccgtctgaacggtctcgatccggaagcgtatctgcgccatattctgagcgtactaccggaa

SEQ ID NO: 119058 - DNA, 75 bp, synthetic construct
  source 1..75: mol_type = other DNA
gtcaggcagcagcgaagcaaagtgttactgacgtcgctgcatgaatggatggtggagaagaatggtacgctgtcg

SEQ ID NO: 119059 - DNA, 75 bp, synthetic construct
  source 1..75: mol_type = other DNA
catcacgcctgccgtacggagtgttatgtcatgacggttcattattaccgtctgcgggattacgccctgcagcat

SEQ ID NO: 119060 - DNA, 75 bp, synthetic construct
  source 1..75: mol_type = other DNA
tgtatatctcttatttcagtggtctctcccacatttgcattcggacggaatgacagtcgtcattcgacctcacca

SEQ ID NO: 119061 - DNA, 75 bp, synthetic construct
  source 1..75: mol_type = other DNA
tccaatgcggtgtcggtagtggtgtatgaagcctggcggcagttggggtatccgggagcggtattgagagattag

SEQ ID NO: 119062 - DNA, 75 bp, synthetic construct
  source 1..75: mol_type = other DNA
cttcgccatgtaccgggcgatgtcattgaaatctgcgatgatgactatgcgggtatcagcaccggcgggcgcgtg

SEQ ID NO: 119063 - DNA, 75 bp, synthetic construct
  source 1..75: mol_type = other DNA
ctcagtctgaatttttcgagaataaattatttctgacgatttgttttaaaccttttactacggaagataaagtaa

SEQ ID NO: 119064 - DNA, 75 bp, synthetic construct
  source 1..75: mol_type = other DNA
taatgtaaatgcgaactccggaacactcaacaacgtcacgattaaccagaactgccggattctgggaaaactgtc

SEQ ID NO: 119065 - DNA, 75 bp, synthetic construct
  source 1..75: mol_type = other DNA
caagcggatgcgtacgccgggttcaacgagctgtatcgcaatggtcggataacggaagctgcctgctgggctcat

SEQ ID NO: 119066 - DNA, 75 bp, synthetic construct
  source 1..75: mol_type = other DNA
aggagactgataccgccgaacagctggagttgatgcgtagcgccttccgggttatccggacggtacgggaaaaac

SEQ ID NO: 119067 - DNA, 75 bp, synthetic construct
  source 1..75: mol_type = other DNA
agaaactcagcagtgcgcagcgggagctgcgacagaatgccgatgaaacaagacaggcgctggaccgtcagcaga

SEQ ID NO: 119068 - DNA, 75 bp, synthetic construct
  source 1..75: mol_type = other DNA
cgagctgtatcgcaatggtgggataacggaagctgcctgctggcttcatgcccgccgaaagatccacgatgtgca

SEQ ID NO: 119069 - DNA, 75 bp, synthetic construct
  source 1..75: mol_type = other DNA
cagcagatacagaaagttcaggttgatacaaataataacctgaacagcatgtgggctgtgaagctgcagcagatg

SEQ ID NO: 119070 - DNA, 75 bp, synthetic construct
  source 1..75: mol_type = other DNA
gatcagaaatttgaccggcaggtcatgataccgccagtgttattccgcggtggtaagcatgagaatttcaacagt

SEQ ID NO: 119071 - DNA, 75 bp, synthetic construct
  source 1..75: mol_type = other DNA
ctggagcctgaagaaagctgttgcccggagtgtggcggtgagctggattatctgggggaagtcagcgctgaacag

SEQ ID NO: 119072 - DNA, 75 bp, synthetic construct
  source 1..75: mol_type = other DNA
cggggctgaaatttataaccgaaccgcgctggataatacgctgatttacacgggcgttattgatatgcctgcagg

SEQ ID NO: 119073 - DNA, 75 bp, synthetic construct
  source 1..75: mol_type = other DNA
tgacgtactatgcgaacgatggctgggtggaaatcgacaacaacatcgctgaaaatgccttgcgggcggtcagtc

SEQ ID NO: 119074 - DNA, 75 bp, synthetic construct
  source 1..75: mol_type = other DNA
tgcccgacagggtgtcgaactgagccgtgcattactctccaactgggttgacgcgtgctgccagttaatgacgcc

SEQ ID NO: 119075 - DNA, 75 bp, synthetic construct
  source 1..75: mol_type = other DNA
tcttgttctgcacgatatatcaggcaatccgatcaaagtttctgaagggatggaatttgtgcaatcaggtactaa

SEQ ID NO: 119076 - DNA, 75 bp, synthetic construct
  source 1..75: mol_type = other DNA
ggatcggcgagctgtatgccatcgagtcggagatcagaggtaaaagagcagaggaacggcaggcagtccggcacc

SEQ ID NO: 119077 - DNA, 75 bp, synthetic construct
  source 1..75: mol_type = other DNA
aaatgagcccggaagctgccggcattgccgcctgtctgatgacgtacagccatcatgcctgtcgtacggagtgtt

SEQ ID NO: 119078 - DNA, 75 bp, synthetic construct
  source 1..75: mol_type = other DNA
gacgtgcaaactgaatgacgtggagccagaaagctaccttcgccatgtgcttggcgtcatagcagactggccggt

SEQ ID NO: 119079 - DNA, 75 bp, synthetic construct
  source 1..75: mol_type = other DNA
gaggaacggcaggcagtccggcaccaaaaagtgctgccgctgctggcgtcactggaggggtggctgcgggagaaa

SEQ ID NO: 119080 - DNA, 75 bp, synthetic construct
  source 1..75: mol_type = other DNA
aggctctgcactgcccgttggtgtgcccgttccgtggccctcagcaacaccgccaacgggctggctgaaatgtaa

SEQ ID NO: 119081 - DNA, 75 bp, synthetic construct
  source 1..75: mol_type = other DNA
gtcgctggaccggtgccgttgctgaactgctggagccgggcagtggtaaaacaagaactgcccggctgtgggtct

SEQ ID NO: 119082 - DNA, 75 bp, synthetic construct
  source 1..75: mol_type = other DNA
ggcgaaggcgttcgggtatgcgctgaaccagtggccggcgctgacccgctatgcagaagatggctgggtggaggt

SEQ ID NO: 119083 - DNA, 75 bp, synthetic construct
  source 1..75: mol_type = other DNA
cggaagccgccggcattgcggcctgtctgatgacgtacagtcatcacgcctgtcatacggagtgttatgccatga

SEQ ID NO: 119084 - DNA, 75 bp, synthetic construct
  source 1..75: mol_type = other DNA
gtacgccatcgaggcagagataaggggaatgacggcggagcagcgccttgccgaacgtcagttgaaaacgaaacc

SEQ ID NO: 119085 - DNA, 75 bp, synthetic construct
  source 1..75: mol_type = other DNA
ccagcgcgcagctagcagtcacaggtaacagccttaaagccgcccgcgaagaagcggcaaaactcgccacgcagt

SEQ ID NO: 119086 - DNA, 75 bp, synthetic construct
  source 1..75: mol_type = other DNA
aacaacggtggcgcatttatggcacccgaaccggatgaagatgatggaaaaacctgggtactgttcaatgccatg

SEQ ID NO: 119087 - DNA, 75 bp, synthetic construct
  source 1..75: mol_type = other DNA
aggcactgcaatgggcgttgccggttaccagattgtggaaatcttcctgcgtcatatgcgccggaagctgggcga

SEQ ID NO: 119088 - DNA, 75 bp, synthetic construct
  source 1..75: mol_type = other DNA
ccggtcgggttgatgatccggcggtgcagcgcccgctgcgtcagacccgcacccgtaaaccgttccctgaatcac

SEQ ID NO: 119089 - DNA, 75 bp, synthetic construct
  source 1..75: mol_type = other DNA
gggtctacgttcgtgatgaccgtaacgccggttcggaaatgcctccggcggtctggttcgcgtactcaccggacc

SEQ ID NO: 119090 - DNA, 75 bp, synthetic construct
  source 1..75: mol_type = other DNA
ttctttgcgccgccttactgacggccatacccacagcgtcagcggatgtgaacagcgacatgaatcagttcttta

SEQ ID NO: 119091 - DNA, 75 bp, synthetic construct
  source 1..75: mol_type = other DNA
ccatgcgtattcaccaacaacatcctgcatcccgtctttttccgttctgtaccggtaaataccgctggcacggta

SEQ ID NO: 119092 - DNA, 75 bp, synthetic construct
  source 1..75: mol_type = other DNA
cacagcgccagcgcatccagtacggatttggggacgaaaaacacatcgtcgtttgattacggaaccaaatccacg

SEQ ID NO: 119093 - DNA, 75 bp, synthetic construct
  source 1..75: mol_type = other DNA
aggtggtgaaagccgtggtggtgctttgcgtgctgattgttcagtcacaacgctttatcagtctgattaaaggag

SEQ ID NO: 119094 - DNA, 75 bp, synthetic construct
  source 1..75: mol_type = other DNA
cccgccgtaaaatccacgatgggcacgttcgcaccccgtcagccctgacggaggaagcgctgaaacggatcggcg

SEQ ID NO: 119095 - DNA, 75 bp, synthetic construct
  source 1..75: mol_type = other DNA
gtatacggtgtcaggctcggggagctcttatattgttgctcacttttacaccgggataggcagttgtcgctcatt

SEQ ID NO: 119096 - DNA, 75 bp, synthetic construct
  source 1..75: mol_type = other DNA
atgacccggcagtacagcgtccgttgcgtcagacccgcacccgtaagccgttccctgaatcactaccccgtgacg

SEQ ID NO: 119097 - DNA, 75 bp, synthetic construct
  source 1..75: mol_type = other DNA
acggggattaccagagtcagagcgtcttgcagccaggcagcagcgaagcaaagcgttactgacgtcgcttcatga

SEQ ID NO: 119098 - DNA, 75 bp, synthetic construct
  source 1..75: mol_type = other DNA
ggtgattggcggcggatcgctgatgggcgggcgttttaacctgctgctctcagtggtaggggcgctgattattca

SEQ ID NO: 119099 - DNA, 75 bp, synthetic construct
  source 1..75: mol_type = other DNA
cccgatagagcgtggtatcgcgggcccccggattacttgcccgcgtgttaacgggaaaatactgcgaacatctgc

SEQ ID NO: 119100 - DNA, 75 bp, synthetic construct
  source 1..75: mol_type = other DNA
aggctcggcgctgcccgttggtgtccccgttccgtggccctcagccacactgccagcagggtggctgaaatgtaa

SEQ ID NO: 119101 - DNA, 75 bp, synthetic construct
  source 1..75: mol_type = other DNA
caggtatatctgaacttgttttacgtgcaggtaatggtaatccgaaggggattactggtgctttatggcagcgca

SEQ ID NO: 119102 - DNA, 75 bp, synthetic construct
  source 1..75: mol_type = other DNA
tgcatcatgtactccccgtcatcgccgactggcctgtgaaccgggtgggtgctctgctcccgtggcgggttactc

SEQ ID NO: 119103 - DNA, 75 bp, synthetic construct
  source 1..75: mol_type = other DNA
ctatgacaatgccgagaaacgtctgcagaaagatcagaacggtgcggatatccctggcaaagacacctttacgaa

SEQ ID NO: 119104 - DNA, 75 bp, synthetic construct
  source 1..75: mol_type = other DNA
cattccacagtgggtgaccctggagccccgtgtcttcggctggatggaccgtctctgcgaaaactactgcggtgg

SEQ ID NO: 119105 - DNA, 75 bp, synthetic construct
  source 1..75: mol_type = other DNA
gcttcagtggtgtcctgcatgcggatgcgtacgccgggttcaacgagctgtatcgcaatggtgggataacggaag

SEQ ID NO: 119106 - DNA, 75 bp, synthetic construct
  source 1..75: mol_type = other DNA
gcttcagaggtgtcctgcaggcggatgcgtacgccgggttcaacgagctgtatcgcaatggtgggataacggaag

SEQ ID NO: 119107 - DNA, 75 bp, synthetic construct
  source 1..75: mol_type = other DNA
ggtcgatgttgatgctaccggtaaagtgacatttaaaaatgtcggcagcaattcggaaaggattacggcgacgcc

SEQ ID NO: 119108 - DNA, 75 bp, synthetic construct
  source 1..75: mol_type = other DNA
cattccacagtgggtcaccctggatccccgtgtcttcggctggatggaccgtctttgcgaaaactactgcggtgg

SEQ ID NO: 119109 - DNA, 75 bp, synthetic construct
  source 1..75: mol_type = other DNA
gagtggagccagaaagctacctccgctatgtccttgacgtcatagccgactggccgataaaccgggtcggcgaac

SEQ ID NO: 119110 - DNA, 75 bp, synthetic construct
  source 1..75: mol_type = other DNA
gcttcaggggtgtcctgcaagcggatgcgtacgccgggttcaacgagctgtatcgcaatggtgggataacggaag

SEQ ID NO: 119111 - DNA, 75 bp, synthetic construct
  source 1..75: mol_type = other DNA
cgcccgaaccggatgatgatgacgaaacatgggtgctgttcaatgccatgaacggtaaccgcgctgaaatgagcc

SEQ ID NO: 119112 - DNA, 75 bp, synthetic construct
  source 1..75: mol_type = other DNA
ggagagggtatcgcaacgctgatccccgtattgaatggtgttcatcaggcgggcctgagtaccacgatagaattc

SEQ ID NO: 119113 - DNA, 75 bp, synthetic construct
  source 1..75: mol_type = other DNA
aaatgagcccggaagctgtcggcattgccgcctgtctgatggcgtacagtcatcacgcctgtcgtacagagaatt

SEQ ID NO: 119114 - DNA, 75 bp, synthetic construct
  source 1..75: mol_type = other DNA
gccgggtaataagaagacgaagaccgggcggttgtgggcgtatgttcgtgatgaccgcaatgccgggtcagcgtt

SEQ ID NO: 119115 - DNA, 75 bp, synthetic construct
  source 1..75: mol_type = other DNA
attgttggagaaaatggccctgaaattgtgaacggaccggcaaatgtcaccagcaggcggcgtactgctgcgctg

SEQ ID NO: 119116 - DNA, 75 bp, synthetic construct
  source 1..75: mol_type = other DNA
gattcagcggtgtcctgcacgcggatgcgtacgccgggttcaacgagctgtatcgcaatggtgggataacggaag

SEQ ID NO: 119117 - DNA, 75 bp, synthetic construct
  source 1..75: mol_type = other DNA
acggcgcgattgactacgcggcattagttgaggggggcgcccgcatgggcgtgatcaatcaggatgatccttttg

SEQ ID NO: 119118 - DNA, 75 bp, synthetic construct
  source 1..75: mol_type = other DNA
tagttcccgaggcatcgggtcactgtacagtgaatggggagatatggggcattacacgactgacgctggttttca

SEQ ID NO: 119119 - DNA, 75 bp, synthetic construct
  source 1..75: mol_type = other DNA
tttatatctacccggagcgcaatgcggcggaccgggtagccgacggctttcttgagaaactgcctcagaaagagc

SEQ ID NO: 119120 - DNA, 75 bp, synthetic construct
  source 1..75: mol_type = other DNA
aagccatgcgtattcaccaacaacatccgacatcccgtctttttccgttctgtaccggtaagtaccgctggcacg

SEQ ID NO: 119121 - DNA, 75 bp, synthetic construct
  source 1..75: mol_type = other DNA
ggcagaagaagccctgaagcgaatcagtgaactgtacgccatcgaggatgaaatacggggattaccagagtcaga

SEQ ID NO: 119122 - DNA, 75 bp, synthetic construct
  source 1..75: mol_type = other DNA
cggtgattcggtttggcctgtctgtgctgggtgtaaaaacattaccttccgttgctgcagcggtaacacgtactg

SEQ ID NO: 119123 - DNA, 75 bp, synthetic construct
  source 1..75: mol_type = other DNA
acggcgcggtagatattgcccgtgaagcggctgatatcatcctgctggaaaaaagcctgatggtgctggaagagg

SEQ ID NO: 119124 - DNA, 75 bp, synthetic construct
  source 1..75: mol_type = other DNA
tggaactggtgagcagcgccctgaaagtgatccgcacagaacgggtaaaaaagcctgtacaaaatgtgactgcat

SEQ ID NO: 119125 - DNA, 75 bp, synthetic construct
  source 1..75: mol_type = other DNA
gcagcgccattatgcgcatcatcgactgaatggagagaagcacaatgcaacaactttcctttctgcccggagaga

SEQ ID NO: 119126 - DNA, 75 bp, synthetic construct
  source 1..75: mol_type = other DNA
ccgtgattatgatcgtgactccgggttgtttgtgaaccgcactacggttggttttctgctgcgtgctgaacccct

SEQ ID NO: 119127 - DNA, 75 bp, synthetic construct
  source 1..75: mol_type = other DNA
tgcatcccgtctttttccgttctgtaccggtaaataccgctggcacggcagtgctgagacgtataccggtcgtga

SEQ ID NO: 119128 - DNA, 75 bp, synthetic construct
  source 1..75: mol_type = other DNA
cattccacagtgggtaaccctggaaccccgtgtcttcggctggatggaccgtctgtgcgaaaactactgcggtgg

SEQ ID NO: 119129 - DNA, 75 bp, synthetic construct
  source 1..75: mol_type = other DNA
ttccctgcgtcgctcagttggaatagcgggtaatgcactgaaaacggtggcaggtgctccgcttgccgtgttccg

SEQ ID NO: 119130 - DNA, 75 bp, synthetic construct
  source 1..75: mol_type = other DNA
gcgctgatgttgcgtttgcactaccagaccccaaataagtccgagcaggaagggactgaagttggtcagacgctc

SEQ ID NO: 119131 - DNA, 75 bp, synthetic construct
  source 1..75: mol_type = other DNA
tggagccagaagaaagctgttgcccggagtgtggcggtgagctggattatctggggaagtcagcgctgaacagct

SEQ ID NO: 119132 - DNA, 75 bp, synthetic construct
  source 1..75: mol_type = other DNA
gttgctgcagcggtaacacgtactggcggtgccctgtcatggctggcaggtgcgccactttccctgttgcgtcgg

SEQ ID NO: 119133 - DNA, 75 bp, synthetic construct
  source 1..75: mol_type = other DNA
acggtggacagttcgaccaaagtacagttgcttcagctgaacgggctggcaggcgaacagctggatggtgcggag

SEQ ID NO: 119134 - DNA, 75 bp, synthetic construct
  source 1..75: mol_type = other DNA
ctgcggcaggccaggtgctgactgtgtttgcccgtaccatcaccgtagtgttccagcacgcggcggataaagcag

SEQ ID NO: 119135 - DNA, 75 bp, synthetic construct
  source 1..75: mol_type = other DNA
ctgggtcggtttggacaggttcctccctcagcgataatgtcaatggcgggaaactggacgttgcaatgaataaca

SEQ ID NO: 119136 - DNA, 75 bp, synthetic construct
  source 1..75: mol_type = other DNA
tcagctatcttgctaagcaggaacagaagtatgacatgaatatctacgggagtagtgaagtgccaccaccaagtg

SEQ ID NO: 119137 - DNA, 75 bp, synthetic construct
  source 1..75: mol_type = other DNA
tttgataagcaactggcggcggcgaaagagcaaatcaaattaccgccgcagccggtcactgccattgtctatacc

SEQ ID NO: 119138 - DNA, 75 bp, synthetic construct
  source 1..75: mol_type = other DNA
gctggatttttctgggtaattgaatatggtgaggacagtaggtttcattctcactcagttgtgtatctggatggg

SEQ ID NO: 119139 - DNA, 75 bp, synthetic construct
  source 1..75: mol_type = other DNA
ttatgcgctgggaaccgagacgttccgtctggattactacagcgccatgcaagtgctggaacgacttaaggcgct

SEQ ID NO: 119140 - DNA, 75 bp, synthetic construct
  source 1..75: mol_type = other DNA
caggcaccagtaccttcaaaacccattgcacgcagttatgccggagcggggctcctggcccatgtcgtcaccgga

SEQ ID NO: 119141 - DNA, 75 bp, synthetic construct
  source 1..75: mol_type = other DNA
cgcgcttggcgtgcaggcgctgcgcgttgctattccggcactgattgtctcgctgttcgtcagcgccgatatggt

SEQ ID NO: 119142 - DNA, 75 bp, synthetic construct
  source 1..75: mol_type = other DNA
gatcgaccccggcaaaaccggcaaggcttccatagataccttgtgcggctatgtctggccgtcagaggccagtgg

SEQ ID NO: 119143 - DNA, 75 bp, synthetic construct
  source 1..75: mol_type = other DNA
gttctgaatgggatataaaaggaattatgccagtactgacaagaggcgattcacatatgatcgtgatgccaacca

SEQ ID NO: 119144 - DNA, 75 bp, synthetic construct
  source 1..75: mol_type = other DNA
atgaaaaaacgctctgcaactcttatgacgagattcgccgcaggggagcgattcatttcattagttcgttcttaa

SEQ ID NO: 119145 - DNA, 75 bp, synthetic construct
  source 1..75: mol_type = other DNA
cctccgttgacgtcaccattaatggcgttaaaatcggaacacacaaacacccaaccccacacggcatgtctgaca

SEQ ID NO: 119146 - DNA, 75 bp, synthetic construct
  source 1..75: mol_type = other DNA
ccaggggccggtggaatggctctggcgtcagttaactttgcgtgctgccggaccggcaatatctaaaacatcaag

SEQ ID NO: 119147 - DNA, 75 bp, synthetic construct
  source 1..75: mol_type = other DNA
aactatctgctgaagatgtattccagacaacatgagacgggaggggatgcgatttattgtgggctttatggccat

SEQ ID NO: 119148 - DNA, 75 bp, synthetic construct
  source 1..75: mol_type = other DNA
taactggtgggactggttcttttggtaatgcagttttgaagcgttttcttgaaacggatataaaagaaattcgta

SEQ ID NO: 119149 - DNA, 75 bp, synthetic construct
  source 1..75: mol_type = other DNA
tggggatttccaaagcaatgatggaaaaagtaattgtagcgaaatcgcgtaatttggatagttctaaaactgtca

SEQ ID NO: 119150 - DNA, 75 bp, synthetic construct
  source 1..75: mol_type = other DNA
ctggactatattgatgcagttaatgcattagatttcaacacaataacagataaagccactttcaatgcgatcgcc

SEQ ID NO: 119151 - DNA, 75 bp, synthetic construct
  source 1..75: mol_type = other DNA
gagtggggatacttttgtgcaaaaagctcctgctgctacgattgatattttggttaaatcgctactttctttttt

SEQ ID NO: 119152 - DNA, 75 bp, synthetic construct
  source 1..75: mol_type = other DNA
tggagatatttttgtacagaaatctcctgctgctaccattgaagttttgactcatgcgattctagaaattatgaa

SEQ ID NO: 119153 - DNA, 75 bp, synthetic construct
  source 1..75: mol_type = other DNA
gtaccccgccgaactggaaggctgcgacgccaaatgcatagaggacatcggtcagggcaaagcctgttacctcaa

SEQ ID NO: 119154 - DNA, 75 bp, synthetic construct
  source 1..75: mol_type = other DNA
tccaatggaagcagtaaaaactaatattattggcactgataatgttctggaagcagctattgccaataaagtgtc

SEQ ID NO: 119155 - DNA, 75 bp, synthetic construct
  source 1..75: mol_type = other DNA
ccgggcttgccgctattcttgaggtttgcaatttactctttacgccaacaatttatcttctactcaacgtcttta

SEQ ID NO: 119156 - DNA, 75 bp, synthetic construct
  source 1..75: mol_type = other DNA
aaaattgagctgtttgatgattacaattcccataatacatatagactcaatgttgatgaaatgaaaaaattattg

SEQ ID NO: 119157 - DNA, 75 bp, synthetic construct
  source 1..75: mol_type = other DNA
catacattattgagtcaaaatagagcttatcataaaactcgttatttatggaatgttctacttaatggcgatttt

SEQ ID NO: 119158 - DNA, 75 bp, synthetic construct
  source 1..75: mol_type = other DNA
catcttgcttgcttcagcggtgtgctgcaagcggtgcgtacgccgggttcaacgagctgtatcgcaatggtggga

SEQ ID NO: 119159 - DNA, 75 bp, synthetic construct
  source 1..75: mol_type = other DNA
aggatttaagcaccgggaagaaagaggcgttaccagtagatgacgatggatgcacgggcagtaatgctgtttttg

SEQ ID NO: 119160 - DNA, 75 bp, synthetic construct
  source 1..75: mol_type = other DNA
aatgataaattgaaattctatattggtgatgtcagagattatagaagtattttaaatgctacacgaggtgttgat

SEQ ID NO: 119161 - DNA, 75 bp, synthetic construct
  source 1..75: mol_type = other DNA
tgggaatttcgaaggctatgatggaaaaagtgatgacagcaaaggctagaacgttcaacaatgaagattcagttg

SEQ ID NO: 119162 - DNA, 75 bp, synthetic construct
  source 1..75: mol_type = other DNA
ctggtaacggcaagaaaggttacagcctggaggatattgtggacggtttacgcgataacggtctgattattgctg

SEQ ID NO: 119163 - DNA, 75 bp, synthetic construct
  source 1..75: mol_type = other DNA
gcgtcgcctccaacaatgacaagcggtggagatcttctctgccgctttttttttcatcaatcatccccataatcc

SEQ ID NO: 119164 - DNA, 75 bp, synthetic construct
  source 1..75: mol_type = other DNA
tgttatttaataacgatgttattttagagcaaaaattactcacaaatgacagaactgatttaataaatgaaaaaa

SEQ ID NO: 119165 - DNA, 75 bp, synthetic construct
  source 1..75: mol_type = other DNA
ttctggggtagtgaaactgaacaaacagactattcaggtgattgttggcgcgaaagcagaatccatcggcgatgc

SEQ ID NO: 119166 - DNA, 75 bp, synthetic construct
  source 1..75: mol_type = other DNA
ttaccgggcgtaccgtattatcgagcatttaccaggatcagcgtactaaacagaacgtgatgagtttgctgacgc

SEQ ID NO: 119167 - DNA, 75 bp, synthetic construct
  source 1..75: mol_type = other DNA
catttgaaatcaccgaccacactacgggctggatttacgtcgagtaccgcttcgggggagaaagtgccgtcaact

SEQ ID NO: 119168 - DNA, 75 bp, synthetic construct
  source 1..75: mol_type = other DNA
aacagccgaacgctgaggggcggactcagtctgtcacgccggaaagcgccggatggggatatgttggctttgagg

SEQ ID NO: 119169 - DNA, 75 bp, synthetic construct
  source 1..75: mol_type = other DNA
ggggaaagcagatcatatggaacattggtgtggcatggaatccgaaaatcgacaaccagatgcgggatgagttcc

SEQ ID NO: 119170 - DNA, 75 bp, synthetic construct
  source 1..75: mol_type = other DNA
ccatcgcctggttccagattggtgaattcaccaacgcggcgggtacggttttccacggtgacatcaaccgcttct

SEQ ID NO: 119171 - DNA, 75 bp, synthetic construct
  source 1..75: mol_type = other DNA
tttttgccggagcatttattgttgagtatctcagaacaaaagatgctgttgatgcattaaattatgcaaatgcag

SEQ ID NO: 119172 - DNA, 75 bp, synthetic construct
  source 1..75: mol_type = other DNA
gagtttgtaaactggtatataaaaaacgtattctcattcgatttcgcttcattttttaatcaccccatacagttt

SEQ ID NO: 119173 - DNA, 75 bp, synthetic construct
  source 1..75: mol_type = other DNA
atctgggcggaacaccgggccgagttctgtgctaatgctcacctgaaaggatggaagccacgccatgaatgcgaa

SEQ ID NO: 119174 - DNA, 75 bp, synthetic construct
  source 1..75: mol_type = other DNA
aaaagctgtggcgtaaggcagcacaaagcccgtgtagcaccctgcgccgcatctgggcggaacaccgggccgagt

SEQ ID NO: 119175 - DNA, 75 bp, synthetic construct
  source 1..75: mol_type = other DNA
atctgggcagaacaccgggcacagttctgtgctaatgctcaccagaaaggatggaagccgattcatgaacgcgaa

SEQ ID NO: 119176 - DNA, 75 bp, synthetic construct
  source 1..75: mol_type = other DNA
gacagcagcgaagcaaagcgttactgacgtcgctgcatgaatggatgatggagaagaatggcacgctgaaccgcc

SEQ ID NO: 119177 - DNA, 75 bp, synthetic construct
  source 1..75: mol_type = other DNA
gaggaggcgctgaaacggatcggcgagctgtatgccatcgagtcggagatcagaggtaaaagagcagaggaacgg

SEQ ID NO: 119178 - DNA, 75 bp, synthetic construct
  source 1..75: mol_type = other DNA
gttcggccggagcaagaagcatcgccacaatggcaacccggagaggttaccagatgggacgctggcttgctggca

SEQ ID NO: 119179 - DNA, 75 bp, synthetic construct
  source 1..75: mol_type = other DNA
cataaatatgaagaagagataagcgaaaaagaatcaaaactcactcaggcaatatcagaaaaagaacagatttta

SEQ ID NO: 119180 - DNA, 75 bp, synthetic construct
  source 1..75: mol_type = other DNA
gcgtgatggtgggcaaaccgggcggcatcgaggtctggccggtgcaggtcaggctgaagaagctcgacctgtcca

SEQ ID NO: 119181 - DNA, 75 bp, synthetic construct
  source 1..75: mol_type = other DNA
ttacgacacatgccttggattgttaatttatgtctaaagtggtctgcgtcagtaactggcaagaataaaaaattc

SEQ ID NO: 119182 - DNA, 75 bp, synthetic construct
  source 1..75: mol_type = other DNA
atggcgacagtcagcgccggtgatggtttcccggtcgctatcctgaaccgtaatcagcctgctttctactgtgta

SEQ ID NO: 119183 - DNA, 75 bp, synthetic construct
  source 1..75: mol_type = other DNA
ttgtgggtcaacgctgtacatgcggaaattgctctcagcggttgtgggatttattactcgacgccacacagcaag

SEQ ID NO: 119184 - DNA, 75 bp, synthetic construct
  source 1..75: mol_type = other DNA
caacaggaacccgttcaagacactgaatgacctctttgaggattatcaccagttacgcaaacgcgaaattgcctc

SEQ ID NO: 119185 - DNA, 75 bp, synthetic construct
  source 1..75: mol_type = other DNA
accgccagttaacggcacagtacccggacggcgtaccggaagctgcactggatgaagtcatggccacgctgacca

SEQ ID NO: 119186 - DNA, 75 bp, synthetic construct
  source 1..75: mol_type = other DNA
aaacgggaatagctggtggagattttgaggatgtattcgaagtggacgatgacgcaacacctgaggaaattcgta

SEQ ID NO: 119187 - DNA, 75 bp, synthetic construct
  source 1..75: mol_type = other DNA
atgggcttcccttctcctgcggcggattatgcagagagccgcatttctcttgatcagcaactaatcagacatcct

SEQ ID NO: 119188 - DNA, 75 bp, synthetic construct
  source 1..75: mol_type = other DNA
tattccgtaaacgcaatccccctgttggtggggctgtgcatgactatgtcatctgggcacgagaaatggctggtg

SEQ ID NO: 119189 - DNA, 75 bp, synthetic construct
  source 1..75: mol_type = other DNA
acggccacaaccagcgttatgtgcataatattttgccggaagacaagcccgctgacagcctgctggtcgtcgagg

SEQ ID NO: 119190 - DNA, 75 bp, synthetic construct
  source 1..75: mol_type = other DNA
cggcgagagtacaccataggtcaggtatccgactggtctctggctgatgcccgggacgaagcggccaagctgcgg

SEQ ID NO: 119191 - DNA, 75 bp, synthetic construct
  source 1..75: mol_type = other DNA
taggtgatactcagaacagcgtacgtggcgaggaaaatattgtaagaggacagtattctgaactgcagaatcacc

SEQ ID NO: 119192 - DNA, 75 bp, synthetic construct
  source 1..75: mol_type = other DNA
aatacctggcgcgataccctcgcctcactccaactgacaccgctggccatacattacggtagctgggacgctcaa

SEQ ID NO: 119193 - DNA, 75 bp, synthetic construct
  source 1..75: mol_type = other DNA
ctcaacaaccgcattatgtcatgaagctggcccagatggaatccggtgctgccaggcagtggctacccataacct

SEQ ID NO: 119194 - DNA, 75 bp, synthetic construct
  source 1..75: mol_type = other DNA
ttatcagttgcgctataacggcaataacgccctgatgttcgcgacatatcaggacaagatgctggtgttttccag

SEQ ID NO: 119195 - DNA, 75 bp, synthetic construct
  source 1..75: mol_type = other DNA
ttaccgctgacctgaaaattaaggacaatattagcagtagtggcggattttctgaaagcaacagcacgaaaaaaa

SEQ ID NO: 119196 - DNA, 75 bp, synthetic construct
  source 1..75: mol_type = other DNA
attatgacgatgaagaggctgatgaggcagatgtcgagataatcggttttgtgttctggtactcggtattgcgat

SEQ ID NO: 119197 - DNA, 75 bp, synthetic construct
  source 1..75: mol_type = other DNA
gtcggattattttttccgcgtgtcgctggcgatgcaaaacaaaacgctgcttttctccctcgatgacacgctggt

SEQ ID NO: 119198 - DNA, 75 bp, synthetic construct
  source 1..75: mol_type = other DNA
atgagtggtgaaaaaaaggcgaaaggctggcggttttatggccttgtaggttttggggcaatagcactgctttcc

SEQ ID NO: 119199 - DNA, 75 bp, synthetic construct
  source 1..75: mol_type = other DNA
tcgactcttcctggggccaccgtcgcgacgtcgcaggttatgcggcgggtctggaactgttcgaccgccgtctgc

SEQ ID NO: 119200 - DNA, 75 bp, synthetic construct
  source 1..75: mol_type = other DNA
cggctcgcttcaatccggaaaccttagaacgtgttttacgcgtggtgcgtcatcgtggtttccacgtctgttcaa

SEQ ID NO: 119201 - DNA, 75 bp, synthetic construct
  source 1..75: mol_type = other DNA
ttataaggatgaatggggcgataaacataaatcagaggttgacgtcagaagtcatgacatcatgcttggtgtgac

SEQ ID NO: 119202 - DNA, 75 bp, synthetic construct
  source 1..75: mol_type = other DNA
gtttgtgaagtatggactgcgcaacctgaaagaaggggcgaaattccgtaaagggattgagaagctgttaagcga

SEQ ID NO: 119203 - DNA, 75 bp, synthetic construct
  source 1..75: mol_type = other DNA
acccattatcaggacaagatgctggttttttccagcacagatatgttgtttaaaggcgaccagcaggataccgaa

SEQ ID NO: 119204 - DNA, 75 bp, synthetic construct
  source 1..75: mol_type = other DNA
aaaacaggtttttatatgaccggtaaggcggggacttccgttttatctctttccaaccagcgtcttatcgatggt

SEQ ID NO: 119205 - DNA, 75 bp, synthetic construct
  source 1..75: mol_type = other DNA
ctgatgctgaatgcgtactatgacttccggaatgacagcgcattcacaccatgggtatctgcagggattggctac

SEQ ID NO: 119206 - DNA, 75 bp, synthetic construct
  source 1..75: mol_type = other DNA
acggatcggcgaactgtacgccatcgaggcagagataaggggaatgacggcggaacagcgccttgccgaacgtca

SEQ ID NO: 119207 - DNA, 75 bp, synthetic construct
  source 1..75: mol_type = other DNA
cgcaaaaggtaggtgctgaaaaagctcgtgaaatattcggtccaattgcaggtgcctatgatatgagagtaggtg

SEQ ID NO: 119208 - DNA, 75 bp, synthetic construct
  source 1..75: mol_type = other DNA
gtggtgagcggggagcgctactgtacagcctgatcgggacgtgcaaactgaataacgtggatccagaaagctacc

SEQ ID NO: 119209 - DNA, 75 bp, synthetic construct
  source 1..75: mol_type = other DNA
ggcacgataaacaaggccatctttcacattatatggtgctgatccagcgcagcggcttaagcaaattgctggagc

SEQ ID NO: 119210 - DNA, 75 bp, synthetic construct
  source 1..75: mol_type = other DNA
attgggttaggccggaggagaattttgaagtcgttgtgcgagaaaatctcgatgataaaggagagcaatgtctta

SEQ ID NO: 119211 - DNA, 75 bp, synthetic construct
  source 1..75: mol_type = other DNA
gtatccatgtaagagttataaatatgagagcaaagtgtttttttttagggggcgagacagccattatatcaatcc

SEQ ID NO: 119212 - DNA, 75 bp, synthetic construct
  source 1..75: mol_type = other DNA
actatctgtttgaagccggtggcgcagcggtgctgggcagtattcagccgcaacccatcgatgctgacgccgacg

SEQ ID NO: 119213 - DNA, 75 bp, synthetic construct
  source 1..75: mol_type = other DNA
cgccagtacgccagcgcatcgtggtcagcgccaggttgctgggttttggctaccagcggttaatgccttcttttg

SEQ ID NO: 119214 - DNA, 75 bp, synthetic construct
  source 1..75: mol_type = other DNA
aagagatgctttcgcacatcagccaggaaaacgacaagttgaacggggcgttagatggtgcagccggactgtgtt

SEQ ID NO: 119215 - DNA, 75 bp, synthetic construct
  source 1..75: mol_type = other DNA
tgattattatgactttttgctacgggtggcctatctgagcaaagactacagcaaagacttctatgacggttatcg

SEQ ID NO: 119216 - DNA, 75 bp, synthetic construct
  source 1..75: mol_type = other DNA
atgagatcaccttatgagttatctgaaaaagaatttgaatccctgctactggcagcagaaaagaaatatgattcc

SEQ ID NO: 119217 - DNA, 75 bp, synthetic construct
  source 1..75: mol_type = other DNA
cgcattgcaaacactgaataaaacgcgaccggcaatggtggatgtaattccggtcggtggtgtggttccggttta

SEQ ID NO: 119218 - DNA, 75 bp, synthetic construct
  source 1..75: mol_type = other DNA
tatcaagacatatgcttcgtcgatcgctgactgtaatatctaattatctggaaaactataaccggatattcgctc

SEQ ID NO: 119219 - DNA, 75 bp, synthetic construct
  source 1..75: mol_type = other DNA
cagccagttaagcaagacggaaatcagtagcatcaagataaatagtgaaactattcctgtttatcagttgcgcta

SEQ ID NO: 119220 - DNA, 75 bp, synthetic construct
  source 1..75: mol_type = other DNA
cggggcgttagatggtgcagccgggctgtgctggtatgaagactcaaaattacaaaccccgctatttgttggtca

SEQ ID NO: 119221 - DNA, 75 bp, synthetic construct
  source 1..75: mol_type = other DNA
gtgatgttcgtgattatcgaagcatcttaaatgcttcaaggggggtagattatatattccatgcggcggctttga

SEQ ID NO: 119222 - DNA, 75 bp, synthetic construct
  source 1..75: mol_type = other DNA
gaacatattattgaaaaagcgcgcgtacactatgccagcaggcagaagtgctttatcttatccgcgcccccgaaa

SEQ ID NO: 119223 - DNA, 75 bp, synthetic construct
  source 1..75: mol_type = other DNA
tatccagcactgccaccgtggcgcttaccgtgaataacaccatggtgatggccacagtggattacgtggatgaca

SEQ ID NO: 119224 - DNA, 75 bp, synthetic construct
  source 1..75: mol_type = other DNA
atttcagaaacagcagtgcattcacgccatggatatctgctggtctgggttatgctcgggttcatcataaaactt

SEQ ID NO: 119225 - DNA, 75 bp, synthetic construct
  source 1..75: mol_type = other DNA
gtgctcggtacggaaaatgttctagaagcagcaataacaaatgaggttagcagagtcgtatgcctcagtaccgat

SEQ ID NO: 119226 - DNA, 75 bp, synthetic construct
  source 1..75: mol_type = other DNA
ttttgttttctgtccgcaaatcgttcgcaagaatcacaaggcgggtattaactacgcggtaagctccatcggagc

SEQ ID NO: 119227 - DNA, 75 bp, synthetic construct
  source 1..75: mol_type = other DNA
gaaggggcatgggcggataaatataaaggcggtgacaaaagtgatacggtttttggcgcaggccttgcggtggga

SEQ ID NO: 119228 - DNA, 75 bp, synthetic construct
  source 1..75: mol_type = other DNA
gtgcaaaaatcggtgttaagtgcctatggtgatcagggcggctttgtgctggctccgcaggataacctcttttga

SEQ ID NO: 119229 - DNA, 75 bp, synthetic construct
  source 1..75: mol_type = other DNA
ccttatctgcctcgcgcagaacagcgtgaactggggcaatatatccgcttatccatgctgcgtagtgtgctggcg

SEQ ID NO: 119230 - DNA, 75 bp, synthetic construct
  source 1..75: mol_type = other DNA
ctgcgtaataaagatgccctggtgttgcagagtgtttcgtctgttgagctgccttatgaagcagtcaatcctatt

SEQ ID NO: 119231 - DNA, 75 bp, synthetic construct
  source 1..75: mol_type = other DNA
tacatctttataaagatattgaatctaatggcagcaattttagattaaaaagtaattaccgccaccacattacat

SEQ ID NO: 119232 - DNA, 75 bp, synthetic construct
  source 1..75: mol_type = other DNA
tattattttcgtggcgcaaccttccgatgggcaaaaaaaacgcgctgagaaatcgggcgtcactttgctgtacac

SEQ ID NO: 119233 - DNA, 75 bp, synthetic construct
  source 1..75: mol_type = other DNA
gacccgaattttgcgaccaccatgactaacgcgcttgcgggtaagcaaccgaaagatgccaccctgacggcgctg

SEQ ID NO: 119234 - DNA, 75 bp, synthetic construct
  source 1..75: mol_type = other DNA
ttacgcacgtggtaatgcggatacaaaatacaatattgaaaaacatcctgctggctactggcgtgatgatctgaa

SEQ ID NO: 119235 - DNA, 75 bp, synthetic construct
  source 1..75: mol_type = other DNA
tgggcatatctaaggcaatgatggaaaaagttattgttgcaaaatcacgtaatcttgacagttcaaaaacagtta

SEQ ID NO: 119236 - DNA, 75 bp, synthetic construct
  source 1..75: mol_type = other DNA
gacccaggctctggctgatgagaacaaaactggcttttatgtgaccggtaaagcaggtgcttctgttatgtcact

SEQ ID NO: 119237 - DNA, 75 bp, synthetic construct
  source 1..75: mol_type = other DNA
attgcgcagaaagtgctgagatgcaaagaaataaccatttttatatcaatatgaatgtgcggctggaagagcaat

SEQ ID NO: 119238 - DNA, 75 bp, synthetic construct
  source 1..75: mol_type = other DNA
atgacgttcacgcgcgaaggccgtccctgtgtctttgaacccaggggattctacaccgcaagcaaaactggcgta

SEQ ID NO: 119239 - DNA, 75 bp, synthetic construct
  source 1..75: mol_type = other DNA
atggcaaaagtaatctttgaatttaacaatacagaaaatattgagtttcaggaaaatggaggttttgccgtaaat

SEQ ID NO: 119240 - DNA, 75 bp, synthetic construct
  source 1..75: mol_type = other DNA
tggtgggcgcagcctgtgtatttgcagtaaatgcaggtgctgaggaaggtaaaagcggtttttatctgaccggta

SEQ ID NO: 119241 - DNA, 75 bp, synthetic construct
  source 1..75: mol_type = other DNA
tactgtttagtcagttaaataaactggtggacgtcgcacacgttgccatctgccagagcacaaccacatcacaac

SEQ ID NO: 119242 - DNA, 75 bp, synthetic construct
  source 1..75: mol_type = other DNA
cggcgtaatgggcaatcgcggccaggtgaattacagcgctgccaaagccggaattatcggcgcaacaaaagcgct

SEQ ID NO: 119243 - DNA, 75 bp, synthetic construct
  source 1..75: mol_type = other DNA
cgactcgtgaatcgattcgccaggtgaatcgtgccggagggcctgaaaccttaatgaagattaaagggggtgata

SEQ ID NO: 119244 - DNA, 75 bp, synthetic construct
  source 1..75: mol_type = other DNA
aatgttaatagcgacaaaactgtgatttgcggtactcgctacggcaacgtgatggcttcacgtggttccgttatt

SEQ ID NO: 119245 - DNA, 75 bp, synthetic construct
  source 1..75: mol_type = other DNA
agtgataaattgaggttttatattggagatgttagggactttagcagtatacggaatgcaagtagaggtgttgat

SEQ ID NO: 119246 - DNA, 75 bp, synthetic construct
  source 1..75: mol_type = other DNA
cgacagcggtggcgaacatgcggcggtgttgtactcgctgaccggcacatgccgtctgaacaatgtagagccaga

SEQ ID NO: 119247 - DNA, 75 bp, synthetic construct
  source 1..75: mol_type = other DNA
ccgttcccgaatcactcccccgcgatgaaaaacggctgctgccggcagcatcatgctgcccggaatgtggaggct

SEQ ID NO: 119248 - DNA, 75 bp, synthetic construct
  source 1..75: mol_type = other DNA
accgggaaacaggcgtaacctgttcgagaaatattacgaatatccattactctcctgcgtgcaggctggcgcatt

SEQ ID NO: 119249 - DNA, 75 bp, synthetic construct
  source 1..75: mol_type = other DNA
cctgctggaagatttaatggaagccggaccactcaaagccacgccgtcgctgtcctttctcgggctggccgtgat

SEQ ID NO: 119250 - DNA, 75 bp, synthetic construct
  source 1..75: mol_type = other DNA
gtgaaggacgacaggcgccgtatttacggcgtggaaggtgcggtggactacctgatcccggatactgactggagt

SEQ ID NO: 119251 - DNA, 75 bp, synthetic construct
  source 1..75: mol_type = other DNA
atttgttttatgttctgcattaacattatttttctttataaaatcaataagtgcagaaaatgcatgggcgtcaac

SEQ ID NO: 119252 - DNA, 75 bp, synthetic construct
  source 1..75: mol_type = other DNA
gctgaaagacgcactggctcagttaatccccggccttgatgtcagcagccagagccgaaccaactacggtatgaa

SEQ ID NO: 119253 - DNA, 75 bp, synthetic construct
  source 1..75: mol_type = other DNA
tgccacgcgaaccacagacgcatttctggaaacggagtgcgtggaaaatgtcgccacaaccgaaatcatcaaagc

SEQ ID NO: 119254 - DNA, 75 bp, synthetic construct
  source 1..75: mol_type = other DNA
agaccattccccttgccaattccatggcccaaaagccctgcacagcagcaagcagatgataatgctgcaaaagca

SEQ ID NO: 119255 - DNA, 75 bp, synthetic construct
  source 1..75: mol_type = other DNA
gccgcgcggcgaactggcggcagtgtatgaccgcagcaatacacaggtgcgcagctttacttacgatgataaata

SEQ ID NO: 119256 - DNA, 75 bp, synthetic construct
  source 1..75: mol_type = other DNA
atggcaaaaatatgacgtgaaggaatcaagtccatcgaaagcgacagcttacattagctgggcgccggaaccgtg

SEQ ID NO: 119257 - DNA, 75 bp, synthetic construct
  source 1..75: mol_type = other DNA
cacgctgaacccgcaaaaagcgcgcgttctgctgcagcttgctctgacgcaaaccaaagatccgcagcaaatcca

SEQ ID NO: 119258 - DNA, 75 bp, synthetic construct
  source 1..75: mol_type = other DNA
aagctacctacgcaatgtacttgacgtcatagccgactggccgttgaaccgggtcagcgaactgctcccgtggcg

SEQ ID NO: 119259 - DNA, 75 bp, synthetic construct
  source 1..75: mol_type = other DNA
ccagatgctacccttgcaactcttaaatctcttggtaaatccagaggcgggcttattttaatttcaggtgcaact

SEQ ID NO: 119260 - DNA, 75 bp, synthetic construct
  source 1..75: mol_type = other DNA
aagctacctacgcaatgtacttgacgtcatagcggactggccgttgaaccgggtcagcgaactgctcccctggcg

SEQ ID NO: 119261 - DNA, 75 bp, synthetic construct
  source 1..75: mol_type = other DNA
tgcttacttcctcgacctgacggtgaaatgcgacaaaccggtggtgatggtcggcgcaatgcgtccgtccacgtc

SEQ ID NO: 119262 - DNA, 75 bp, synthetic construct
  source 1..75: mol_type = other DNA
ggtttagatttctttaattatgttgatatttttaacaacccagaatattaccaaggccaaatagaaataggattt

SEQ ID NO: 119263 - DNA, 75 bp, synthetic construct
  source 1..75: mol_type = other DNA
cgataatggtaagagaaaacttacatgcaatattttgtgcaatgatgggacaccatcaataccttctaagataag

SEQ ID NO: 119264 - DNA, 75 bp, synthetic construct
  source 1..75: mol_type = other DNA
gcaggcacagtattctggatgactcagccagagcctgatgtcggaccgaccgccgaggagatagctgcacgggca

SEQ ID NO: 119265 - DNA, 75 bp, synthetic construct
  source 1..75: mol_type = other DNA
gctgggctgaagcagataacaacatcgccgaaaatgccctgcggatggtcagcccggggcgtaaaaacttcctgt

SEQ ID NO: 119266 - DNA, 75 bp, synthetic construct
  source 1..75: mol_type = other DNA
cggacaataacacagcggaaagagcgcttcgtgcattctgtctcggaaagaaaaattacgtgttcttcggtagcg

SEQ ID NO: 119267 - DNA, 75 bp, synthetic construct
  source 1..75: mol_type = other DNA
ccgctatgtccttgacgtcatagccgactggccgataaaccgggtcggcgaactactcccctggcgcgtagcact

SEQ ID NO: 119268 - DNA, 75 bp, synthetic construct
  source 1..75: mol_type = other DNA
gcaccgccgacatgaaaggcttttttgcgtttatccttgatgcgctacgcgatgtcgacgtcacgaaactgaaaa

SEQ ID NO: 119269 - DNA, 75 bp, synthetic construct
  source 1..75: mol_type = other DNA
tggcgaaccaacatcgctacaaccggtacgcgcacataaaggtcacatctccaacgccatccgaatcatgggcca

SEQ ID NO: 119270 - DNA, 75 bp, synthetic construct
  source 1..75: mol_type = other DNA
taatgttctgagttcttccattgatgaaatcagcgggcaactgggtaaggagctggcaccacatattcaacaggt

SEQ ID NO: 119271 - DNA, 75 bp, synthetic construct
  source 1..75: mol_type = other DNA
acggagtgcgtggaaaatgtcgccacaaccgaaatcattaaagcaactgaagaaagtaacggccatcgtgtcagt

SEQ ID NO: 119272 - DNA, 75 bp, synthetic construct
  source 1..75: mol_type = other DNA
aggggccattcaggaggtgtttggtgcgctggggctgaaagcgggtgtgatggccggaaaaagcaaccaggagca

SEQ ID NO: 119273 - DNA, 75 bp, synthetic construct
  source 1..75: mol_type = other DNA
gacggatgaccttgcggcctggtttaagaatggtgggctggaaaaaatccgggcatttattcgtgatgatgccct

SEQ ID NO: 119274 - DNA, 75 bp, synthetic construct
  source 1..75: mol_type = other DNA
ttgccggaattacacaaaaagccattgagtgggggctggcggatgatccgcgagaggaccgacgggaagtgctgg

SEQ ID NO: 119275 - DNA, 75 bp, synthetic construct
  source 1..75: mol_type = other DNA
actggactctatagatccttttaatatcgaccatattgaagtgatctccggtgcgacgtccctgtacggcggcgg

SEQ ID NO: 119276 - DNA, 75 bp, synthetic construct
  source 1..75: mol_type = other DNA
ccaatgccattcgcattctgggtcagtcggggcattccagcgatccgtcgcgcggagttaacgctatcgaactga

SEQ ID NO: 119277 - DNA, 75 bp, synthetic construct
  source 1..75: mol_type = other DNA
ggacgttgttcttcctgtttgcctgcctgctggcttatcttggttgtgctgggagtaaaacatattctggttatt

SEQ ID NO: 119278 - DNA, 75 bp, synthetic construct
  source 1..75: mol_type = other DNA
gcaccgtaaaccagcccagctacggcttggctgggatgaggaagacgggattgtactggagttcgctacggaaga

SEQ ID NO: 119279 - DNA, 75 bp, synthetic construct
  source 1..75: mol_type = other DNA
actccagtcattggccgaccgtcggctttacctcgcaaaacaggccgggtgcaatcgggtattcgcgagcgataa

SEQ ID NO: 119280 - DNA, 75 bp, synthetic construct
  source 1..75: mol_type = other DNA
gctgctggggattgtgttaccgatcggtttggtatggtgtgtggccccgctgctgatgagctggctgagtcgtca

SEQ ID NO: 119281 - DNA, 75 bp, synthetic construct
  source 1..75: mol_type = other DNA
ccggcattcagcaatttgtttattcagactgagctggctcctgagcgtgacgctattctttgccaccggcgcccg

SEQ ID NO: 119282 - DNA, 75 bp, synthetic construct
  source 1..75: mol_type = other DNA
agttgcttttgatgagcgtggcctgtctttatcttgatgaccgcgcagggggtattaatgagcagcttaaccagc

SEQ ID NO: 119283 - DNA, 75 bp, synthetic construct
  source 1..75: mol_type = other DNA
gtggatacccctgccccggatattcaacttctgtccaacggccattatcatctgatgctgaccgcagccggcggc

SEQ ID NO: 119284 - DNA, 75 bp, synthetic construct
  source 1..75: mol_type = other DNA
taatgacgccaacccaggtgccgccgcaaccgcaatcagcgccgcagcaggcaccgactgtaccgctcccggaaa

SEQ ID NO: 119285 - DNA, 75 bp, synthetic construct
  source 1..75: mol_type = other DNA
gatacatagaccagcttaatgctggaaacggcctgtcgcaggaggcaaaggataacattgttaacgccgcaaaaa

SEQ ID NO: 119286 - DNA, 75 bp, synthetic construct
  source 1..75: mol_type = other DNA
ttggttaaaaaaagtggcagcgtgggttacctgtacaaagccgattcagttggtgactcatgggatgcggcgctt

SEQ ID NO: 119287 - DNA, 75 bp, synthetic construct
  source 1..75: mol_type = other DNA
ttcgcatcggcgtcgagggtgacacctgcgacggtcgcgtcatcagtgcgaccgatattcaggacatggccgacg

SEQ ID NO: 119288 - DNA, 75 bp, synthetic construct
  source 1..75: mol_type = other DNA
ggccagaaggtttacacctcgatggaaattcgtccgaactttgccaacaccggcaaatgtcacctcatcgggctg

SEQ ID NO: 119289 - DNA, 75 bp, synthetic construct
  source 1..75: mol_type = other DNA
tatattgcggaacatgatgatgcgctggcgtttgcgcgtattaatcgccagctgatcgctttgcgcataatgcaa

SEQ ID NO: 119290 - DNA, 75 bp, synthetic construct
  source 1..75: mol_type = other DNA
ataacgtccagtacgctccggcgcgtggtcgttttaaagtttatctgatcgacgaagtgcatatgctgtcgcgcc

SEQ ID NO: 119291 - DNA, 75 bp, synthetic construct
  source 1..75: mol_type = other DNA
atggaatttcacgaaaacaaagccaaagcaccgtttattggacttgtgcaactctggcaggcagtgaggcgttgg

SEQ ID NO: 119292 - DNA, 75 bp, synthetic construct
  source 1..75: mol_type = other DNA
atttggctgttgccagccctcctctgcatcacccatgaccttctcaataaacctctgcgccgtcgcctgaagccg

SEQ ID NO: 119293 - DNA, 75 bp, synthetic construct
  source 1..75: mol_type = other DNA
atgaagctaaaggtattttctttaactactgcaattactcataccacgaaataaaagacgaagaggaagaacaaa

SEQ ID NO: 119294 - DNA, 75 bp, synthetic construct
  source 1..75: mol_type = other DNA
ggataaaacgcaccggcactgactttagtgttcatgccctattaccggatgcgtggccgtctttttctattgctt

SEQ ID NO: 119295 - DNA, 75 bp, synthetic construct
  source 1..75: mol_type = other DNA
ttgtcgccttaatcagcagccagcaaatggctctgactcacctctcactaaaagtcgcaagcctcaccggctgcg

SEQ ID NO: 119296 - DNA, 75 bp, synthetic construct
  source 1..75: mol_type = other DNA
gttgttcagatgactacctgtggctgccgcttgccgtttgccactatgttgaaacgacgggggatatggaggctc

SEQ ID NO: 119297 - DNA, 75 bp, synthetic construct
  source 1..75: mol_type = other DNA
gctgctcggctggtgtgagcgggtgccggaagcggatgaggtgctgcctgcgccgctgccgccgtaccgggtact

SEQ ID NO: 119298 - DNA, 75 bp, synthetic construct
  source 1..75: mol_type = other DNA
aagctacctacgcaatgtacttgacgtcatagctgactggccggtgaaccgggtcagcgaactgctcccatggcg

SEQ ID NO: 119299 - DNA, 75 bp, synthetic construct
  source 1..75: mol_type = other DNA
ccactaaaggacgtgatgatagcggtttgtgaagaagaaggtctgacacaagcccagtttatcgagaggctcctt

SEQ ID NO: 119300 - DNA, 75 bp, synthetic construct
  source 1..75: mol_type = other DNA
tgtaacaacaattcatggtaattcgcttcaaggtgccatatatgcacttcagcagatagctcttggtagcaatag

SEQ ID NO: 119301 - DNA, 75 bp, synthetic construct
  source 1..75: mol_type = other DNA
taccgaaggtttcgatattgaaaacggtaaaaaagtgcagacttatccggggcgtttcccaatgggtaagtccga

SEQ ID NO: 119302 - DNA, 75 bp, synthetic construct
  source 1..75: mol_type = other DNA
gccggtttaattattcctgtcgcgcggctgcgtccggtgctaacgctcaaaaacagtggagggaaaaaaggatga

SEQ ID NO: 119303 - DNA, 75 bp, synthetic construct
  source 1..75: mol_type = other DNA
aaatcattaaagcaactgaagaaagtaacggccatcgtgtcagtctgccgttatcggttttcaatccccaggact

SEQ ID NO: 119304 - DNA, 75 bp, synthetic construct
  source 1..75: mol_type = other DNA
aaagtgaatgagtacacctatgaatataaacaaaaatcaaaccgttctcacagaaaaaattatgactccctacaa

SEQ ID NO: 119305 - DNA, 75 bp, synthetic construct
  source 1..75: mol_type = other DNA
aaagcactggtagatgcgggctatgatggcatcgttagcgctggcgtgggtaacggcaacctgtataaatccgtg

SEQ ID NO: 119306 - DNA, 75 bp, synthetic construct
  source 1..75: mol_type = other DNA
aagctacctacgcaatgtacttgacgtcatagcagactggccggtgaaccgggtcagcgaactgctcccttggcg

SEQ ID NO: 119307 - DNA, 75 bp, synthetic construct
  source 1..75: mol_type = other DNA
gcgccagaaaaatcggtgtgtaaggagtgcctgaaaagggcgcaggaagccgccgccgcttttgcgcctcgtgga

SEQ ID NO: 119308 - DNA, 75 bp, synthetic construct
  source 1..75: mol_type = other DNA
agctggtcggtcaggtttactaccgcgatgagtcgttgcgattcttcccgttcccgacggtaaatgcgaacaaac

SEQ ID NO: 119309 - DNA, 75 bp, synthetic construct
  source 1..75: mol_type = other DNA
tcgtgctggtggctgtgctcgttctgttacttctgcgcaaatatacccggctggagttcgtaggccatgccagcc

SEQ ID NO: 119310 - DNA, 75 bp, synthetic construct
  source 1..75: mol_type = other DNA
tcgtggtggtggctgtgctcgttctgttactgctgcgcaaatatacccggctggagttcgttgcccatgccagcc

SEQ ID NO: 119311 - DNA, 75 bp, synthetic construct
  source 1..75: mol_type = other DNA
cgctatgtccttgacgtcatagccgactggccgataaaccgggtcggcgaactgctcccctggcgcgtagcactg

SEQ ID NO: 119312 - DNA, 75 bp, synthetic construct
  source 1..75: mol_type = other DNA
gcgcaacgctatttccgcaattcgaagaaggggcgtcgcttaatcaatgaaggcgagttagaggctttgtggctg

SEQ ID NO: 119313 - DNA, 75 bp, synthetic construct
  source 1..75: mol_type = other DNA
catcgactacacgcagcaacagaagattgctgccgggaaggcgatatctgccgacgccattcctggtggttcggt

SEQ ID NO: 119314 - DNA, 75 bp, synthetic construct
  source 1..75: mol_type = other DNA
cagtcgggaaccgttttatttttgctgctgtcaggacaccgacgaagacaggagtaccgtgctgtacttgcagga

SEQ ID NO: 119315 - DNA, 75 bp, synthetic construct
  source 1..75: mol_type = other DNA
gccagaacgtctggatgctgctggtgatgggcgttgttttcttcgctatctactttgtggtgttcagtgtggtta

SEQ ID NO: 119316 - DNA, 75 bp, synthetic construct
  source 1..75: mol_type = other DNA
aattttggctatgaagagatgttgagcgagctggaagctatcgtcgcggatgctgaaacgcgtttagccgaggat

SEQ ID NO: 119317 - DNA, 75 bp, synthetic construct
  source 1..75: mol_type = other DNA
tgctggtgttgctgttaggcgcgctgatgggaacgctcgccggggtgctgcgcggcgtgtttaatgtaccaagtt

SEQ ID NO: 119318 - DNA, 75 bp, synthetic construct
  source 1..75: mol_type = other DNA
atgctccgtttacttcgtcattatttttactttgttcccgcgcagttatcaaaagcaaaaggaataggtaaaata

SEQ ID NO: 119319 - DNA, 75 bp, synthetic construct
  source 1..75: mol_type = other DNA
aacgagaaacgaaaacgccgcctgaagaaaattatcccgcaactgaaaatgaaccgccccggaaatcctggagac

SEQ ID NO: 119320 - DNA, 75 bp, synthetic construct
  source 1..75: mol_type = other DNA
cagaatgggagttctcattcaggtggggcgtcaagttggtatgaatacaaacatttccgagtggaaaacgaaagt

SEQ ID NO: 119321 - DNA, 75 bp, synthetic construct
  source 1..75: mol_type = other DNA
cggctggacatcatgggaaccggtacgctgaacatcgatgaatcccggcagcttcaactgataacgcagtactat

SEQ ID NO: 119322 - DNA, 75 bp, synthetic construct
  source 1..75: mol_type = other DNA
ccgcagacccatcttgcggggttcagtggtgtactgcaggcggatgcatacgccgggttcaacgagctgtaccgg

SEQ ID NO: 119323 - DNA, 75 bp, synthetic construct
  source 1..75: mol_type = other DNA
atgcatcaggatatcaaagagtacagagccgggaaccgttgcgcagcgtattcgcttggcgcatccagagcagaa

SEQ ID NO: 119324 - DNA, 75 bp, synthetic construct
  source 1..75: mol_type = other DNA
ctgatccacgccctgcaggaaaagctgagcaaccgggagcgcgaaatagaccatctgcaggcgcagctggataaa

SEQ ID NO: 119325 - DNA, 75 bp, synthetic construct
  source 1..75: mol_type = other DNA
aaacgggaatagctggtggagattttgaggatgtattcgaagtggatgatggtgcgacaccagatgaaatacagg

SEQ ID NO: 119326 - DNA, 75 bp, synthetic construct
  source 1..75: mol_type = other DNA
tcagtaagggaacgcagcatggccgcgatgcgctggaactggtatttgaagacggcagcgatgcaccgttcatga

SEQ ID NO: 119327 - DNA, 75 bp, synthetic construct
  source 1..75: mol_type = other DNA
gcttacgcttaaaagcatggctgaggctatgggcatgacctcgtcttatctttcagcgatcgaaactggtaaaag

SEQ ID NO: 119328 - DNA, 75 bp, synthetic construct
  source 1..75: mol_type = other DNA
ctcattcactctttctcctaatatgttcaattgcccagagaatttattgacatgcccgataactctgagcacacc

SEQ ID NO: 119329 - DNA, 75 bp, synthetic construct
  source 1..75: mol_type = other DNA
agctctcgaaaaccttggtttgggagaaggttcatttgggttcagaaatctggttgccttcacaacggctggagt

SEQ ID NO: 119330 - DNA, 75 bp, synthetic construct
  source 1..75: mol_type = other DNA
atgccagttagccgttatctctgcattttcataaacgttggtttgggagaagcaacatttggcgctcaaaattgc

SEQ ID NO: 119331 - DNA, 75 bp, synthetic construct
  source 1..75: mol_type = other DNA
ttcactgctgtcgggctgggtggatgcatgctgccggctactgtctccgctggaagaggcgcttcatggctatgt

SEQ ID NO: 119332 - DNA, 75 bp, synthetic construct
  source 1..75: mol_type = other DNA
cggggctgctggcccgcgtgctgacctcgaagtatgcagagcacaccccgctgtatcaccagtcagaaatatacg

SEQ ID NO: 119333 - DNA, 75 bp, synthetic construct
  source 1..75: mol_type = other DNA
gcgtcttactcggcttaccgttcgggcgacaggttagttcgatgtatgacgatttacacgccgggcgtaatttgg

SEQ ID NO: 119334 - DNA, 75 bp, synthetic construct
  source 1..75: mol_type = other DNA
gtaactgaaatcgcgattgacagagctaaacgtttagatgttaatccagctgagagatggcctaatgaaatagga

SEQ ID NO: 119335 - DNA, 75 bp, synthetic construct
  source 1..75: mol_type = other DNA
tgtttgcgctggatgtggctgcacggcaccgggtgccgtttgcgatgcctgagtccgatgtggtgtctatgctca

SEQ ID NO: 119336 - DNA, 75 bp, synthetic construct
  source 1..75: mol_type = other DNA
gtgctgtttttgatcgcttcggcggtgatgtttatcggcctaacgtggctgaaaaccaaacgtcggctggattag

SEQ ID NO: 119337 - DNA, 75 bp, synthetic construct
  source 1..75: mol_type = other DNA
atggcagttgaaacatacagctggcgctcgcagctcggtgctggggcgattgaatatagtcaaacggtgcgcgct

SEQ ID NO: 119338 - DNA, 75 bp, synthetic construct
  source 1..75: mol_type = other DNA
aatgatagcaatcaacccatatctgttgtggaatttggtgatgtttatatttctgaaatcaatgccaaatccaag

SEQ ID NO: 119339 - DNA, 75 bp, synthetic construct
  source 1..75: mol_type = other DNA
aattatcgtagcattccccgtagtgatgccatgtggcaactggctgtccagctgggaaatagtggatttatcagg

SEQ ID NO: 119340 - DNA, 75 bp, synthetic construct
  source 1..75: mol_type = other DNA
aaccagtggccggcactgacgtactatgcgaacgatggctgggtggaaatcgataacaacatcgctgaaaatgcc

SEQ ID NO: 119341 - DNA, 75 bp, synthetic construct
  source 1..75: mol_type = other DNA
cagtgaggttcgcttacagcccggacagaaaaggcatccatccgcagactcatcttgcttgcttcagcggtgtgc

SEQ ID NO: 119342 - DNA, 75 bp, synthetic construct
  source 1..75: mol_type = other DNA
cacttgatgaactcaggcaggaaggattcaaagactgccttgccagactggctctttttattcctgatatgcggg

SEQ ID NO: 119343 - DNA, 75 bp, synthetic construct
  source 1..75: mol_type = other DNA
tgatcccaactggtctgcatcaggtgctgaacaccattgcctggttccagattggtgaatttaccaacgcggcag

SEQ ID NO: 119344 - DNA, 75 bp, synthetic construct
  source 1..75: mol_type = other DNA
ttgtggcactggatcaggttcctgacgaagcattcgccagcaaagcggtgggtgacggtgtggagcgtgaaaccg

SEQ ID NO: 119345 - DNA, 75 bp, synthetic construct
  source 1..75: mol_type = other DNA
aagcgaatatcaggatcggcggcacgatagatccgtcctggcgaaattcagtcgaaggactgaaaaaagggcttt

SEQ ID NO: 119346 - DNA, 75 bp, synthetic construct
  source 1..75: mol_type = other DNA
gtactacagcccgggttacggccctgcttcactgtacggctacaaaggcaggggccgcacctttggtctgagtta

SEQ ID NO: 119347 - DNA, 75 bp, synthetic construct
  source 1..75: mol_type = other DNA
aagcgaatatccggatcggaggcacgatagatccgtcgtggaaaaaatcggttgatgggttgaagcacggattat

SEQ ID NO: 119348 - DNA, 75 bp, synthetic construct
  source 1..75: mol_type = other DNA
aggcgataaaagagaaatcccgcacctacattgatggacttcatgcagcagatccggggcagggtaattcggatc

SEQ ID NO: 119349 - DNA, 75 bp, synthetic construct
  source 1..75: mol_type = other DNA
acctgtcaatcgcaaggcttgttcctgcatgtatgaaagtaaaagaattggatgctttcttaaaaaggattaatt

SEQ ID NO: 119350 - DNA, 75 bp, synthetic construct
  source 1..75: mol_type = other DNA
tatttgataactacagatcctataaaaaaggaatttataaagaacatcgcaagatggctcctcctgtttattatt

SEQ ID NO: 119351 - DNA, 75 bp, synthetic construct
  source 1..75: mol_type = other DNA
gtgggggatggctatatggaacgcttcaggggaactggtattgacaaacgaatcaagaatattaacagacattgt

SEQ ID NO: 119352 - DNA, 75 bp, synthetic construct
  source 1..75: mol_type = other DNA
tatgcagaggttaaaagacggctggctgcgggagacaaaatccatcagcaccttaaacctgacgcgctgacattg

SEQ ID NO: 119353 - DNA, 75 bp, synthetic construct
  source 1..75: mol_type = other DNA
accccgctgtaccgccagtctgaaatgtacggccgccagggcgtggagctgagtcgttcactgctgtcgggctgg

SEQ ID NO: 119354 - DNA, 75 bp, synthetic construct
  source 1..75: mol_type = other DNA
tccaatggcatgaaatcgaaatcagtcgatacccgcagtatatatcgtgaactgggcgcaacgctgagttacaac

SEQ ID NO: 119355 - DNA, 75 bp, synthetic construct
  source 1..75: mol_type = other DNA
tggttggcgggatgctgctttctgttgctgttaccgcgttcctgaccggtgtgactgagccgctggaattcctgt

SEQ ID NO: 119356 - DNA, 75 bp, synthetic construct
  source 1..75: mol_type = other DNA
gttaccacagcaacgggctgggcggtcacattgaaaccgggatgcgatttaccgatggtaactggaacctgacgc

SEQ ID NO: 119357 - DNA, 75 bp, synthetic construct
  source 1..75: mol_type = other DNA
ctgttgctgcgattcggtcagccagatttacttaacgttgcgtttattgcccaggcgggcggcgcgatttttgat

SEQ ID NO: 119358 - DNA, 75 bp, synthetic construct
  source 1..75: mol_type = other DNA
acggcccgtgacgtgctggcacccaaatttggggcaatgaaatcacacagatcctgccaggctattccatccacc

SEQ ID NO: 119359 - DNA, 75 bp, synthetic construct
  source 1..75: mol_type = other DNA
aaacgattgaaaatatttctctggaaaagtttgcaggtacaaagggagataaagcattaatcataaaacgtgatt

SEQ ID NO: 119360 - DNA, 75 bp, synthetic construct
  source 1..75: mol_type = other DNA
gatggtagtaatgagtttttctattacaggccggaagtattcgacatggtagaagaagcatataaagagattgtt

SEQ ID NO: 119361 - DNA, 75 bp, synthetic construct
  source 1..75: mol_type = other DNA
cagtagcaaaattgcatggactgggcatactgatgcatgacaatgcatggcatcctcagattctctggtacctca

SEQ ID NO: 119362 - DNA, 75 bp, synthetic construct
  source 1..75: mol_type = other DNA
tcgaaggccatcccatgcgtttttctgacgatggctggtttgacgcgactgcggcagctgacaagttcaacaagg

SEQ ID NO: 119363 - DNA, 75 bp, synthetic construct
  source 1..75: mol_type = other DNA
ttccaggcagaaggatgctattcacccgaaatggacgttatctttgaagaatatgcccttattgacattgtgtag

SEQ ID NO: 119364 - DNA, 75 bp, synthetic construct
  source 1..75: mol_type = other DNA
gatgaagaccctgtcgcgacactcagagttggcgaaggcgttcgcgtacgcacttaaccagtggccggcactgac

SEQ ID NO: 119365 - DNA, 75 bp, synthetic construct
  source 1..75: mol_type = other DNA
cgctgaaaatgccctgcgggcggtcagtctgggtcgtaaaaacttcctgttcttcggttcggatcatggaggaga

SEQ ID NO: 119366 - DNA, 75 bp, synthetic construct
  source 1..75: mol_type = other DNA
tccagaaaactaccttcgccatgtgtttggcgtcatagctgactggccggtcaaccatgtcagcgaactgcttcc

SEQ ID NO: 119367 - DNA, 75 bp, synthetic construct
  source 1..75: mol_type = other DNA
atggccatgcagcgcggacatatgaacgttattaatactatttttaacgcattacccactctgtttaatacgttt

SEQ ID NO: 119368 - DNA, 75 bp, synthetic construct
  source 1..75: mol_type = other DNA
catgccgccgtaatgactcccgcaggcccgttattcagcgccgatgtaatgagcgaaatgattaaagatattacc

SEQ ID NO: 119369 - DNA, 75 bp, synthetic construct
  source 1..75: mol_type = other DNA
gatgcaatgataaaatatgatctagctcgtttcggtatgcctggttcttctgttggtgttaacgtaaataacctg

SEQ ID NO: 119370 - DNA, 75 bp, synthetic construct
  source 1..75: mol_type = other DNA
cgtgttgcaggagaaaatggattacccatatgggcactaatacctccaccatcacatgaagaacttattcaacag

SEQ ID NO: 119371 - DNA, 75 bp, synthetic construct
  source 1..75: mol_type = other DNA
tgaaattgccattggtgaggtgccgttaaccttcatcgttgatgcagatcaatggctgttacagggacaggcctc

SEQ ID NO: 119372 - DNA, 75 bp, synthetic construct
  source 1..75: mol_type = other DNA
ggcgttggcctcaacacggttttacgtcacttaaaaaactcagaccgcagtcggtaacctcgcgcatacaaccgg

SEQ ID NO: 119373 - DNA, 75 bp, synthetic construct
  source 1..75: mol_type = other DNA
tgtccggccgacctggagctcattcctggagctcgaaaaggccgatccggactttatggcgaagcgtgaggacat

SEQ ID NO: 119374 - DNA, 75 bp, synthetic construct
  source 1..75: mol_type = other DNA
tcatctggatgcgcagaccgttatgcgccttaagcagtacaggatcgaccatataaatcatcatcctgacaaacc

SEQ ID NO: 119375 - DNA, 75 bp, synthetic construct
  source 1..75: mol_type = other DNA
tgttatcacttacgtgccagaactgaatgcatttcgtggcaaattcctgggcttgtcaggttattgtgattttgt

SEQ ID NO: 119376 - DNA, 75 bp, synthetic construct
  source 1..75: mol_type = other DNA
ccaatctttgatgatgatggcaaagtcatcggcgtggtgtcggtgggttaccttgtcagtaaaattgatagctgg

SEQ ID NO: 119377 - DNA, 75 bp, synthetic construct
  source 1..75: mol_type = other DNA
gagaacccgcatcacctgcaccagccgtaccggctgccggggcagcagtatgataaggagtcggggctgtactat

SEQ ID NO: 119378 - DNA, 75 bp, synthetic construct
  source 1..75: mol_type = other DNA
cggcgattgtgggcaacttactcgacaatgccttcgaagccagtctgcgcaacgataaagggaataagatcgtcg

SEQ ID NO: 119379 - DNA, 75 bp, synthetic construct
  source 1..75: mol_type = other DNA
ctacaaatgctttctgtccgatagctatgaaggaaatttatgaatcaaatggaatgaattttgacaatgctaagg

SEQ ID NO: 119380 - DNA, 75 bp, synthetic construct
  source 1..75: mol_type = other DNA
cttcatgttcgtgatatggccatgaatcaggcaaaaattattgcctctagtgacagcatcatcactgcagtgaaa

SEQ ID NO: 119381 - DNA, 75 bp, synthetic construct
  source 1..75: mol_type = other DNA
cttcgccatgtgcctggcgtcatagcagactggccggtcaaccgggtcagcgaactgcttccgtggcgcatagca

SEQ ID NO: 119382 - DNA, 75 bp, synthetic construct
  source 1..75: mol_type = other DNA
gctctggccatggtggtgagcggggagcgctactgtacagcctgatcgggacgtgcaaactgaatgacgtggatc

SEQ ID NO: 119383 - DNA, 75 bp, synthetic construct
  source 1..75: mol_type = other DNA
gacagcgacgcatcatcacccaggaggacccggtggagggggaagtcgaaggggccatccacacctcggtgaccg

SEQ ID NO: 119384 - DNA, 75 bp, synthetic construct
  source 1..75: mol_type = other DNA
cagtggattatcgatatgggggaaacctatgactataaccactatgtcgctttgatctggccagaacacgaggat

SEQ ID NO: 119385 - DNA, 75 bp, synthetic construct
  source 1..75: mol_type = other DNA
catatatcacagtacgcaattgaagattgtcttgataaacaccaattgatacaggatctggagtctgctctattc

SEQ ID NO: 119386 - DNA, 75 bp, synthetic construct
  source 1..75: mol_type = other DNA
gaggacggttgtggcgcacgtcttcggggaacgcactctggccacactgagggtttttttgagcctgctgtcggc

SEQ ID NO: 119387 - DNA, 75 bp, synthetic construct
  source 1..75: mol_type = other DNA
acagccgttcagaagtgcagacccgcgtgctgaacatgttccgcgaagcccggcgggtgggggcgtcggatattc

SEQ ID NO: 119388 - DNA, 75 bp, synthetic construct
  source 1..75: mol_type = other DNA
gtggacccgtttatggccaatgacatcgtgccgtttgaggatgcaaatgcacaggaggcgaagcatggccggtga

SEQ ID NO: 119389 - DNA, 75 bp, synthetic construct
  source 1..75: mol_type = other DNA
tttacgcgtatgacaggatacggaggacagttgtggcgcacgttttcggtgaacgcactctggccacactggcgc

SEQ ID NO: 119390 - DNA, 75 bp, synthetic construct
  source 1..75: mol_type = other DNA
tgtattttgctgggaatgcgcgacggtacgtcgttctcacacggcctgatcgacttcatcgtactgtctggtaac

SEQ ID NO: 119391 - DNA, 75 bp, synthetic construct
  source 1..75: mol_type = other DNA
gaaagtgttggcatgcgccagcagtctgttcaataccttgagtccggacgcgccacccgtaccggtttcatcctt

SEQ ID NO: 119392 - DNA, 75 bp, synthetic construct
  source 1..75: mol_type = other DNA
aatggacgaacattggggctatttttgtgctaaaaaacgtcagcgctggctggttgacacctatgacaagatacg

SEQ ID NO: 119393 - DNA, 75 bp, synthetic construct
  source 1..75: mol_type = other DNA
caggacgatccacctgctgatgataaattgcaggcgctggcgagtgccctgaacgatctggaagcgcgggtgggc

SEQ ID NO: 119394 - DNA, 75 bp, synthetic construct
  source 1..75: mol_type = other DNA
tgttttacgcgtatgacaggatacggaggacggttgtggcgcacgtctgcactctggccacactggagcgtcttc

SEQ ID NO: 119395 - DNA, 75 bp, synthetic construct
  source 1..75: mol_type = other DNA
tactgcttcaggcgcaaatccgaatgaccttgcgcgtattgctattggtgcaattaagaactttgatataaaggc

SEQ ID NO: 119396 - DNA, 75 bp, synthetic construct
  source 1..75: mol_type = other DNA
ttggcaacgcttgtagaatggcggatttggtttgaagcctattttttactctgctatgtaccgtgcttaatttac

SEQ ID NO: 119397 - DNA, 75 bp, synthetic construct
  source 1..75: mol_type = other DNA
gctttcggtgtgcatctcaacggttgttaacctgcttactatctgcccgttgcgtaacagtgattcttttgtgac

SEQ ID NO: 119398 - DNA, 75 bp, synthetic construct
  source 1..75: mol_type = other DNA
caccggccactatgggtcaaaacacaccagcaaccacaggcgtaccgtcttatctgctgccccagcagcaacaaa

SEQ ID NO: 119399 - DNA, 75 bp, synthetic construct
  source 1..75: mol_type = other DNA
tgcgaagtcaaccaagatctacacgcaaaatcatatagattgggttgtcgttccccatggagaaattaaagccag

SEQ ID NO: 119400 - DNA, 75 bp, synthetic construct
  source 1..75: mol_type = other DNA
atggacaaggtgaagacgttaatcatcgccgttgttgtttgcattattgccggactgaccgccgtaacatgttat

SEQ ID NO: 119401 - DNA, 75 bp, synthetic construct
  source 1..75: mol_type = other DNA
tacgtgcacgacgccaccggaaccgccagcagcattaatggagccacctgtagacttactgccagtgctcaatca

SEQ ID NO: 119402 - DNA, 75 bp, synthetic construct
  source 1..75: mol_type = other DNA
taggcagggttaatcctgatgatatgcctgcaatttattgtagaagtaaaattcatttatctgccagttggtttg

SEQ ID NO: 119403 - DNA, 75 bp, synthetic construct
  source 1..75: mol_type = other DNA
attggtactgctgctgaatactacgatttttttgcttacggcacagcggcagtattattttttggtcatttattt

SEQ ID NO: 119404 - DNA, 75 bp, synthetic construct
  source 1..75: mol_type = other DNA
gcgaggagtttatcccgctggtcaacaagggcggcggcgcgggcattcaggtcactgcttatacccagaccctga

SEQ ID NO: 119405 - DNA, 75 bp, synthetic construct
  source 1..75: mol_type = other DNA
ggggcgttatgcgacaagattggtcgtaaacctgtttatattataggtgctggattacaagttatcatgattatt

SEQ ID NO: 119406 - DNA, 75 bp, synthetic construct
  source 1..75: mol_type = other DNA
gcttatctatccctcagagaacaactaaaaacgaaagacgctcagattactggtcttcaggactacatcaaaact

SEQ ID NO: 119407 - DNA, 75 bp, synthetic construct
  source 1..75: mol_type = other DNA
gcgttccgtgtctgggactccgtactgtctgaagaagccgtgctggcgtttgaatacggttatgccaccgcagaa

SEQ ID NO: 119408 - DNA, 75 bp, synthetic construct
  source 1..75: mol_type = other DNA
tccaatattattcacttaaataccacgactaaaaacccagcgtttgaggaggaaaaagaagtacgattagtttat

SEQ ID NO: 119409 - DNA, 75 bp, synthetic construct
  source 1..75: mol_type = other DNA
ctgactcggttgacgctaactggcgttcgacgtttcagcagttacctggtacgggagtcaaaccggatcaattcc

SEQ ID NO: 119410 - DNA, 75 bp, synthetic construct
  source 1..75: mol_type = other DNA
tttgttccatcttgaagatgaatatagaaaacctatcccatttggtgcgatagttcgagtcgttagtgatagtga

SEQ ID NO: 119411 - DNA, 75 bp, synthetic construct
  source 1..75: mol_type = other DNA
gtgaaaatattgatacctgggcctggcgacccgataaactcaataatcaactgacgccactgcgtggtaaaccgc

SEQ ID NO: 119412 - DNA, 75 bp, synthetic construct
  source 1..75: mol_type = other DNA
actggtcgaatggtttttaacgccgcagggacagagtctggtggaagatgtgggctatgtgccgctgtatccaac

SEQ ID NO: 119413 - DNA, 75 bp, synthetic construct
  source 1..75: mol_type = other DNA
tattcccaaaattgcgctgatgccgcaaagcaccagcgatgtgctgacgttacttgccgcgactctggagatgca

SEQ ID NO: 119414 - DNA, 75 bp, synthetic construct
  source 1..75: mol_type = other DNA
gagaaatcgggcgtcactttgctgtacacgccatttgcccgtgaagcgtttgttttcatcgtcaatgcggataat

SEQ ID NO: 119415 - DNA, 75 bp, synthetic construct
  source 1..75: mol_type = other DNA
ccgtagcgagtgttgatggaaacaaagaagtagtagcttcctcatcgtccaagcaagtagatatggctgatgttt

SEQ ID NO: 119416 - DNA, 75 bp, synthetic construct
  source 1..75: mol_type = other DNA
agaataaacagtttgcatttttccaaagactggcatttccgctgcgtatctttttgctgattctggtgttctcaa

SEQ ID NO: 119417 - DNA, 75 bp, synthetic construct
  source 1..75: mol_type = other DNA
cgtagcaaagaggtttcgcaccctactcaagtggccccggactacataagccgctcattctctgctgtacgtgac

SEQ ID NO: 119418 - DNA, 75 bp, synthetic construct
  source 1..75: mol_type = other DNA
tgtcgaagacgaacgtccttcccagagcaccttagatgactggaaaaatgacgctctacgcgtaaaagatttttt

SEQ ID NO: 119419 - DNA, 75 bp, synthetic construct
  source 1..75: mol_type = other DNA
gtaaggccggacatgtgtcgcttcgcagggcgttgtatatgcccgcaatggtagccaccagtaagactgagtggg

SEQ ID NO: 119420 - DNA, 75 bp, synthetic construct
  source 1..75: mol_type = other DNA
gaatagcaaaaaatcagtccaaggtagaaatttaccaagataaagcaatgatatataccacaacagtaccagctg

SEQ ID NO: 119421 - DNA, 75 bp, synthetic construct
  source 1..75: mol_type = other DNA
caaagtaccagcgatgtgctgacgttgcttgccgcgaccctggagatgcaggagcagtatgccgatcgtccaatc

SEQ ID NO: 119422 - DNA, 75 bp, synthetic construct
  source 1..75: mol_type = other DNA
gccgtactgtactgatatcggtaagatggttcaggcaccgattttccacgttaacgcggatgatccggaagccgt

SEQ ID NO: 119423 - DNA, 75 bp, synthetic construct
  source 1..75: mol_type = other DNA
tgagataagggctttggctgctcacttatttgataaacaaggtattgatccacaaggaagaatggcacatagcga

SEQ ID NO: 119424 - DNA, 75 bp, synthetic construct
  source 1..75: mol_type = other DNA
gaaacaggaattcctccaggatgtggggctgttcggtgcccgttatgcgcacatcaacacgccaaaaggtgtctt

SEQ ID NO: 119425 - DNA, 75 bp, synthetic construct
  source 1..75: mol_type = other DNA
tgcatacctggtttcccgcctgggaaatcacccattgaaagacctggaagtaagagactttgcattaatactgga

SEQ ID NO: 119426 - DNA, 75 bp, synthetic construct
  source 1..75: mol_type = other DNA
tcagataccggatatgggagcattcgcttctggctcgggatggttcaggctaccaggtggatatattgttcagtt

SEQ ID NO: 119427 - DNA, 75 bp, synthetic construct
  source 1..75: mol_type = other DNA
caggccagctatatgtacagcgacaaccattatctggccgagatggcgaaaatcctcggcaaacccgaagaagcc

SEQ ID NO: 119428 - DNA, 75 bp, synthetic construct
  source 1..75: mol_type = other DNA
cagcttcgatcacgaatttaacgatacctttactgtgcgtcagaacctgcgctttgctgaaaacaaaacctcgca

SEQ ID NO: 119429 - DNA, 75 bp, synthetic construct
  source 1..75: mol_type = other DNA
tcagcaacaaaacgtcggggtatcagattaaaggcatgggttgatcgatatctgaaaatacaggacacacgactg

SEQ ID NO: 119430 - DNA, 75 bp, synthetic construct
  source 1..75: mol_type = other DNA
ctcacctgaaacttataacgatgatgagcaggagttgattactcgctttcgagcagcttcgttagatgtgaaaaa

SEQ ID NO: 119431 - DNA, 75 bp, synthetic construct
  source 1..75: mol_type = other DNA
atccgccttattgacgcgtgcagaaatcagcaagccaaaaatttatggtgtgtttccgtttatactgggattcgc

SEQ ID NO: 119432 - DNA, 75 bp, synthetic construct
  source 1..75: mol_type = other DNA
cattggtgaacaagaagagcaggcgctgaaaaagatcgcccaggcgcttcagttgtcactggatgcttatctcta

SEQ ID NO: 119433 - DNA, 75 bp, synthetic construct
  source 1..75: mol_type = other DNA
cctttgcgccgttctcgggtgagattgcacaaatgagtgcaaatatccgcgcccgttatgaagcgtcaccgcgtt

SEQ ID NO: 119434 - DNA, 75 bp, synthetic construct
  source 1..75: mol_type = other DNA
gtctggatatcgctgaccaggatggcattggtccggatgaagaagcacagctcaagaaaattgcgcaggcgcttc

SEQ ID NO: 119435 - DNA, 75 bp, synthetic construct
  source 1..75: mol_type = other DNA
ttgctcaaccttaatcggcataatcttcgggtatctcccagcccgcaaggcagcaaggatggacccggttatttc

SEQ ID NO: 119436 - DNA, 75 bp, synthetic construct
  source 1..75: mol_type = other DNA
gcattttactccgcaagcagcattcagcacgcccgtctggatcagccaggcgcaaggtatccgtgctggccctca

SEQ ID NO: 119437 - DNA, 75 bp, synthetic construct
  source 1..75: mol_type = other DNA
tacgccacggcgatggcggtactggtttcgttggggctggtgctccttcggctccgtggggctgccaccgagaag

SEQ ID NO: 119438 - DNA, 75 bp, synthetic construct
  source 1..75: mol_type = other DNA
taatttcgatcgcctgaccgtctggcaagacggcaagaaagttgacttcacactggaggcgtacagtattcccgg

SEQ ID NO: 119439 - DNA, 75 bp, synthetic construct
  source 1..75: mol_type = other DNA
gtgcctgcgctcggccctatcgccggagcattgatcggcgagttcttgggatggcaggcgatattcattactttg

SEQ ID NO: 119440 - DNA, 75 bp, synthetic construct
  source 1..75: mol_type = other DNA
tggattccattccgcgggtattaatcgccaataatccctcattaaaagagtttgcccagcaaattagcaagcagg

SEQ ID NO: 119441 - DNA, 75 bp, synthetic construct
  source 1..75: mol_type = other DNA
agtgccgcgcatttgtatatgttgtataacgattttttccgtaagcaataatttgcaactgctggcggatgcggc

SEQ ID NO: 119442 - DNA, 75 bp, synthetic construct
  source 1..75: mol_type = other DNA
ccactaatcacaacgtcatcggtaacgcaaacactcaacaatattatgagcaagtttgaaaaaggaacaccgggg

SEQ ID NO: 119443 - DNA, 75 bp, synthetic construct
  source 1..75: mol_type = other DNA
aacagtggggctacgtcggtgctaaatcacgtcagcgctggctgttttacgcgtatggcagtctccggaagacgg

SEQ ID NO: 119444 - DNA, 75 bp, synthetic construct
  source 1..75: mol_type = other DNA
ttttgacttcagcgatgcgctggatgatgacggcgtttattcttatcgcctgaccggtcttgcgcgttctgccaa

SEQ ID NO: 119445 - DNA, 75 bp, synthetic construct
  source 1..75: mol_type = other DNA
catcctcggtaagccggaagaggccaaacgctatcgccagttggcacagcagctcgcggactacatcaacacctg

SEQ ID NO: 119446 - DNA, 75 bp, synthetic construct
  source 1..75: mol_type = other DNA
aaaagggttatcgcattgattatgcgcattttaccccgcaagcaaaattcagcacgcccgtctggataagccagg

SEQ ID NO: 119447 - DNA, 75 bp, synthetic construct
  source 1..75: mol_type = other DNA
gcgtgccggaatatggcgcgacccgcgataaagcccacaatactgagaatggcgagatgctgtttacagtgaaaa

SEQ ID NO: 119448 - DNA, 75 bp, synthetic construct
  source 1..75: mol_type = other DNA
tgcgcggcggtaaaattatgattgttggtactgtacccggcgattcggcaatcaatttcctcaaaatcaatcgcg

SEQ ID NO: 119449 - DNA, 75 bp, synthetic construct
  source 1..75: mol_type = other DNA
tgcgacagtggttattaacggcgcaaaagaagacactattgcacgctgtcagcaatttaccgaagacatgggcgc

SEQ ID NO: 119450 - DNA, 75 bp, synthetic construct
  source 1..75: mol_type = other DNA
cgttcgcaccccgtcagccctgacggaggaagcgctgaaacggatcggcgaactgtacgccatcgaggtagagat

SEQ ID NO: 119451 - DNA, 75 bp, synthetic construct
  source 1..75: mol_type = other DNA
gtgttggattccaccaccttaagcattgagcaagtgattgaaaaagcgctacaatacgcgcgccagaaattggct

SEQ ID NO: 119452 - DNA, 66 bp, synthetic construct
  source 1..66: mol_type = other DNA
atgccactgctggataagctgcgtgagcagtacggggtcggaccgctatgcagcgaactgcatatt

SEQ ID NO: 119453 - DNA, 75 bp, synthetic construct
  source 1..75: mol_type = other DNA
gtacgtgaaaaacatgcctgtactcagtgcgatgccatcgtgcaggcagccgcgccttcacggcccatcgagcgg

SEQ ID NO: 119454 - DNA, 75 bp, synthetic construct
  source 1..75: mol_type = other DNA
atcaattgtatcttgcaatgccaaatccggatactcactgggcaagagagtgccagactgataactttcatacac

SEQ ID NO: 119455 - DNA, 75 bp, synthetic construct
  source 1..75: mol_type = other DNA
tgtgtgttgctactgaaggggataccgttgacggcagagtaattgaacggcagtggattatagatatgggggaaa

SEQ ID NO: 119456 - DNA, 75 bp, synthetic construct
  source 1..75: mol_type = other DNA
caagcaaatcgctgaaattgtctttgtgccgaccggagagaatttagcgattatcgaacataccgatgtcgatga

SEQ ID NO: 119457 - DNA, 75 bp, synthetic construct
  source 1..75: mol_type = other DNA
tgtccatcactaataactctcacgttgcgggtattacgttgactcagggttatgagtgggaagatatcgacgaca

SEQ ID NO: 119458 - DNA, 75 bp, synthetic construct
  source 1..75: mol_type = other DNA
attgcaagctgggatgatgttgcattagctgtagttgtgcacatccgaatactgataatgctatgcagaccaccg

SEQ ID NO: 119459 - DNA, 75 bp, synthetic construct
  source 1..75: mol_type = other DNA
aacacacaaccaatccgcttcacatgccagagcgccaccggcggcacgggacatggacaccggaatgccttatag

SEQ ID NO: 119460 - DNA, 75 bp, synthetic construct
  source 1..75: mol_type = other DNA
cgatcgctatgagcctgtcatcaacgacagttatcaggcactggctgagcactatggcacggttatcatcccggc

SEQ ID NO: 119461 - DNA, 75 bp, synthetic construct
  source 1..75: mol_type = other DNA
cggaggacggttgtggcgcacgtcttcggtgaacgcactctggccacactggagcgtcttctgagcctgctgtcg

SEQ ID NO: 119462 - DNA, 75 bp, synthetic construct
  source 1..75: mol_type = other DNA
agctcaagttcgaccagaagctgactaaccgttgtatcggactgacgttacacatcagcgcctcaaccgtttttg

SEQ ID NO: 119463 - DNA, 75 bp, synthetic construct
  source 1..75: mol_type = other DNA
gttgataccaatgatgatggtgtgccagatgcttacggtcctgtttacaatgataacggggttgttattgatacc

SEQ ID NO: 119464 - DNA, 75 bp, synthetic construct
  source 1..75: mol_type = other DNA
agctcaagttcgacaagaagctgactcaccgttgtatcggactgacgttacacatcagcgcctcaaccgtttttg

SEQ ID NO: 119465 - DNA, 75 bp, synthetic construct
  source 1..75: mol_type = other DNA
ctcacaaagaaaaagcccgaatggctgcatacctggtttcccgtctgggaaaccacccattgaaagaactggaag

SEQ ID NO: 119466 - DNA, 75 bp, synthetic construct
  source 1..75: mol_type = other DNA
cgatacaaaaacattactggggcataaagtccaggcaaccaccgatcgctataacgatactcgaggtcaggaatg

SEQ ID NO: 119467 - DNA, 75 bp, synthetic construct
  source 1..75: mol_type = other DNA
gttattgagcatatccaggactggccggcaaaccgggtacgcgatctgttgccctggaaagttgatctgacctct

SEQ ID NO: 119468 - DNA, 75 bp, synthetic construct
  source 1..75: mol_type = other DNA
tcgctgtcgttctcaaaatcggtggagctgcatgacaaaggtaagcgtgcagtgagaaccgtattgacgaagtga

SEQ ID NO: 119469 - DNA, 75 bp, synthetic construct
  source 1..75: mol_type = other DNA
tatgactggatacggaggacagttgtggcgcacgttttcggtgaacgcactctggccacactggcgcgtcttctg

SEQ ID NO: 119470 - DNA, 75 bp, synthetic construct
  source 1..75: mol_type = other DNA
ccccttccggggtatcctgcaggcggatgcgttcacaggttacgacaggttgttcagtgcagaacgtgaaggtgg

SEQ ID NO: 119471 - DNA, 75 bp, synthetic construct
  source 1..75: mol_type = other DNA
acgcgcttcgcggtactgttcacagcgactacgcggcgcatctttccgccacgcttaccggccttagcgagtgtg

SEQ ID NO: 119472 - DNA, 75 bp, synthetic construct
  source 1..75: mol_type = other DNA
gtgccgaccggagagaatttagcgattatcgaacataccgatgtcgatgaaagcctgaaagggcaagggattggt

SEQ ID NO: 119473 - DNA, 75 bp, synthetic construct
  source 1..75: mol_type = other DNA
ctgataacttccaagataacatgaaaaattatcttgaaatgacaggacaaacagaagatggggtacgaatcacca

SEQ ID NO: 119474 - DNA, 75 bp, synthetic construct
  source 1..75: mol_type = other DNA
ggccatgaatggcgtcggatgtcgcgccagtgcacgcattatgggcgttggcctcaacacggttttacatcactt

SEQ ID NO: 119475 - DNA, 75 bp, synthetic construct
  source 1..75: mol_type = other DNA
atcaggagaaatttagcaaaagaccattttacggtaccaaaaacacaggcggggactaatcgtgtaattcacctt

SEQ ID NO: 119476 - DNA, 75 bp, synthetic construct
  source 1..75: mol_type = other DNA
gccgagaatggactggtcgttaaccacattgcccgcagcttaaaactcaataaaaccgaaaccttagggctggtg

SEQ ID NO: 119477 - DNA, 75 bp, synthetic construct
  source 1..75: mol_type = other DNA
gtatccgtgaaatgtctgataacgatccgcgcgtggtggcgctggtcattcgccagtggataaataacgatcatg

SEQ ID NO: 119478 - DNA, 75 bp, synthetic construct
  source 1..75: mol_type = other DNA
aagaggacctgccctacaccaacagcttattaatcatcagcttaatattgatggtcgtggcggtgatcgttatgg

SEQ ID NO: 119479 - DNA, 75 bp, synthetic construct
  source 1..75: mol_type = other DNA
atcagcaatcgtccatgcgccagttgcgaagggacgcgtctgcgtcgtgaagcgcgccacgtctatgtcgagaat

SEQ ID NO: 119480 - DNA, 75 bp, synthetic construct
  source 1..75: mol_type = other DNA
attaactacctggcctcaccggatcaaaccgaaggctttgacgatctgatcaaaaactgccgcgagcagcacgag

SEQ ID NO: 119481 - DNA, 75 bp, synthetic construct
  source 1..75: mol_type = other DNA
cgcccgattaccgtttttctctggctaatgagcgtacctttctggcgtggatccgaactgcgctgggttttctgg

SEQ ID NO: 119482 - DNA, 75 bp, synthetic construct
  source 1..75: mol_type = other DNA
tattattattttttatgaagagaaatacttttcagtttggttaaatagtcatgtggattcttcacatcactctat

SEQ ID NO: 119483 - DNA, 75 bp, synthetic construct
  source 1..75: mol_type = other DNA
gtagcaacgcgcaggatcgctggcatcttggcgtgatggcaggttacgctaatcagcacagtaatactcagagta

SEQ ID NO: 119484 - DNA, 75 bp, synthetic construct
  source 1..75: mol_type = other DNA
cacccgattaccgcttctcgttggctaatgagcgtacatttttggcgtggatccgtactgcattagggtttctgg

SEQ ID NO: 119485 - DNA, 75 bp, synthetic construct
  source 1..75: mol_type = other DNA
gctttcaggaatagccgcagttcaggccgccgactggccgcgtcagattactgacagccgtggcactcataccct

SEQ ID NO: 119486 - DNA, 75 bp, synthetic construct
  source 1..75: mol_type = other DNA
tgacagaattttgcggctgaaaaagttagaatccatgccgcgcgatgcaagtttgtgggacccagaattttacga

SEQ ID NO: 119487 - DNA, 75 bp, synthetic construct
  source 1..75: mol_type = other DNA
aaacatgactcattgattttgcatcattcatacaatgtaaaagatataacatctaaaaaattagagaaagctgtc

SEQ ID NO: 119488 - DNA, 75 bp, synthetic construct
  source 1..75: mol_type = other DNA
agggcacgaacgttcaagggccggtgacggtcagctaaatactcaggctaaccgctatgtattgcagctaggcgg

SEQ ID NO: 119489 - DNA, 75 bp, synthetic construct
  source 1..75: mol_type = other DNA
acacctgcccgaccggacgcacaatttacgacagcgtgtataacgatctgattaactatctggcttcacccgatc

SEQ ID NO: 119490 - DNA, 75 bp, synthetic construct
  source 1..75: mol_type = other DNA
acgcccttctattaacaggacttttgctttcaggaatagccgcagttcaggccgccgactggccgcgtcagatta

SEQ ID NO: 119491 - DNA, 75 bp, synthetic construct
  source 1..75: mol_type = other DNA
attgaggggctttctcctgccatctcaattgagcagaaatcgacgtctcataacccgcgttctacggtggggaca

SEQ ID NO: 119492 - DNA, 75 bp, synthetic construct
  source 1..75: mol_type = other DNA
gtgaagatatgcactactggttacaaagggctaagtcagaattaatatcggcacacacaattgatgacctcgtcg

SEQ ID NO: 119493 - DNA, 75 bp, synthetic construct
  source 1..75: mol_type = other DNA
attggcgcaggccttgttggcgttatgtatgttctggatgaaccctccatcggcttgcatcagcgcgataacgaa

SEQ ID NO: 119494 - DNA, 75 bp, synthetic construct
  source 1..75: mol_type = other DNA
gctcggcaatggaacatcggcgcttgccggcgccactctctgcggcgcggcggcgttgtttattgctgcgcttat

SEQ ID NO: 119495 - DNA, 75 bp, synthetic construct
  source 1..75: mol_type = other DNA
tgaagatttacccggaccctgtgctaaatccgggagccagggaagagctgaatgcggcttccagcatatggctga

SEQ ID NO: 119496 - DNA, 75 bp, synthetic construct
  source 1..75: mol_type = other DNA
tcaccatcacctttgatcgtgaagtggcgctggcgcgtgaagatgcgcagtttattacctgggagcatccgctga

SEQ ID NO: 119497 - DNA, 75 bp, synthetic construct
  source 1..75: mol_type = other DNA
gcagcggctcgcgcaacccgaggacttcgatttcctgcaccgcatcggcgagagctacgccacgctgcgccgcta

SEQ ID NO: 119498 - DNA, 75 bp, synthetic construct
  source 1..75: mol_type = other DNA
gccaatgtgattcgccgacgtgaagaaacggcagcgacgcgttcgttactcaataccgctaaagtcatggaaaac

SEQ ID NO: 119499 - DNA, 75 bp, synthetic construct
  source 1..75: mol_type = other DNA
aaacctttaaccgccagcttaacgcggttaaccgtcacaccggcagcaagctggttaacgcggtgcagcaggatg

SEQ ID NO: 119500 - DNA, 75 bp, synthetic construct
  source 1..75: mol_type = other DNA
caaacttgaagaatgagattgtggctttatttaaggcttctcaattgatacctttttttggcagtggatttacta

SEQ ID NO: 119501 - DNA, 75 bp, synthetic construct
  source 1..75: mol_type = other DNA
tgttattaaatccggctccggcattgcgtgagttagatatgtcttatgcctgcaaatgtgatttctttattccga

SEQ ID NO: 119502 - DNA, 75 bp, synthetic construct
  source 1..75: mol_type = other DNA
tatcctaattacaggtcgacgtttcagcggaaaatctgtacttttatttcaaattattgaggcaaaaaaagaata

SEQ ID NO: 119503 - DNA, 75 bp, synthetic construct
  source 1..75: mol_type = other DNA
tgggtaatgtcacctttgatggtcgccatcttgagttcctcgacctgctggcaatcaccattccatcgacgttaa

SEQ ID NO: 119504 - DNA, 75 bp, synthetic construct
  source 1..75: mol_type = other DNA
ctgttaagcaagctgaccactgctggaatcaacggccagttccgcacgctgcgccacattatccgcacaatggtt

SEQ ID NO: 119505 - DNA, 75 bp, synthetic construct
  source 1..75: mol_type = other DNA
ctgttttgtgtgtgctgcgctgcttttttgtgcgcttgcgggcttcaggcgtgcggatgcctccggcgcaggccg

SEQ ID NO: 119506 - DNA, 75 bp, synthetic construct
  source 1..75: mol_type = other DNA
gagggcgggtgctgttcggcatgacacggcatcttatggataacgtggccggacaatgtggcgcaacatggcaat

SEQ ID NO: 119507 - DNA, 75 bp, synthetic construct
  source 1..75: mol_type = other DNA
tcgccgatacaaaaaacaataaatcaggaattatttcaagcattaaaaaaagaatttccttttaaaaagattgtt

SEQ ID NO: 119508 - DNA, 75 bp, synthetic construct
  source 1..75: mol_type = other DNA
ttgatgatgttgatttaagtacatattatattttttcagatgtgttttgcatgccatcaattgaaaaatctgaag

SEQ ID NO: 119509 - DNA, 75 bp, synthetic construct
  source 1..75: mol_type = other DNA
tacgccagaattcaccagaaaacaaccggtatcagtacctgggattatgagtacggaagcagtgtgatcctaccc

SEQ ID NO: 119510 - DNA, 75 bp, synthetic construct
  source 1..75: mol_type = other DNA
ataggtcttttacaaattatcatgaaagagtttggggagaacgtgttgattttgaatccaagccggatcttttag

SEQ ID NO: 119511 - DNA, 75 bp, synthetic construct
  source 1..75: mol_type = other DNA
gaatttttgtttgaagatagtgagatatataactatcgagtatatgcttatagttgggggcgttatcatgaccct

SEQ ID NO: 119512 - DNA, 75 bp, synthetic construct
  source 1..75: mol_type = other DNA
gagtggggcgataaatataaatcagaagttgatgttaaaagtcatgacatcatgcttggtgtgacttataacttc

SEQ ID NO: 119513 - DNA, 75 bp, synthetic construct
  source 1..75: mol_type = other DNA
tttgaaacgcctcacaatgatcgagaaagacctacacacgcagttagccagtatctggtgtgacgtaggcgagta

SEQ ID NO: 119514 - DNA, 75 bp, synthetic construct
  source 1..75: mol_type = other DNA
ggcttccgtctatcgtaccgcgttgtcgaacaacgatattgcgatggctggtggtcagatcaccgaccagaacac

SEQ ID NO: 119515 - DNA, 75 bp, synthetic construct
  source 1..75: mol_type = other DNA
aggggccaggcgtggtacatggatatgatgtgcgaagcgcgtggcgcggcggatcttcaaagtcaaggagcaatg

SEQ ID NO: 119516 - DNA, 75 bp, synthetic construct
  source 1..75: mol_type = other DNA
cccttgccgatgctgttatcccttcctcaggttcagtaaacgttgtattccagaatcaggcaactggccccattg

SEQ ID NO: 119517 - DNA, 75 bp, synthetic construct
  source 1..75: mol_type = other DNA
gctatggctggtgggcagatcaccgaccagaacacggacggaaatattacgctaagcggcaccacatcgcagcct

SEQ ID NO: 119518 - DNA, 75 bp, synthetic construct
  source 1..75: mol_type = other DNA
tagggctcgagtacatcaagcgcaacggcaaagccattctcaatgctcagtggctgcaagccagcatggattcgc

SEQ ID NO: 119519 - DNA, 75 bp, synthetic construct
  source 1..75: mol_type = other DNA
tgaagatggtggaacaagagcccgcatcggttcaactatctatgcaggacgctattatgctggcgtgcaggctat

SEQ ID NO: 119520 - DNA, 75 bp, synthetic construct
  source 1..75: mol_type = other DNA
aatcaggatgcggcgtattatcagatacgcccggaaggtggctggttacctgcagccagtgtaaaaaaggtatcg

SEQ ID NO: 119521 - DNA, 75 bp, synthetic construct
  source 1..75: mol_type = other DNA
ttcaccctggaatttttgggaaggaccctgagctaatacctatcaaaaacgcgttcatagatcactggcgctacg

SEQ ID NO: 119522 - DNA, 75 bp, synthetic construct
  source 1..75: mol_type = other DNA
ttctggcgataccggtagcagcacgatttcactgttgaaaaacaaagcgttgccggtaggtacgctgttggtgga

SEQ ID NO: 119523 - DNA, 75 bp, synthetic construct
  source 1..75: mol_type = other DNA
ggcgggatgcgccagtccggcattctggctgccgccgggatatatgccctgaaaaataacgttgcgcgcttgcag

SEQ ID NO: 119524 - DNA, 75 bp, synthetic construct
  source 1..75: mol_type = other DNA
ttacgaagtatgaaacgcttatggtcaaatcagcgaggtttgataagacgccgtgaaggtgaagcccagttgatc

SEQ ID NO: 119525 - DNA, 75 bp, synthetic construct
  source 1..75: mol_type = other DNA
aagctgacgaaaaactgtctgcggaactgtcgcgtctggaagcactgcgcgcggtgaacccgaacattcgtgacg

SEQ ID NO: 119526 - DNA, 75 bp, synthetic construct
  source 1..75: mol_type = other DNA
gttaatagatgtcttgatagtaaaactcttgagactaaaaatgtatttcattcaatatgcagataaagaaagtaa

SEQ ID NO: 119527 - DNA, 75 bp, synthetic construct
  source 1..75: mol_type = other DNA
tcatttacaatcgtggggcgtcattagctcttcctaaaccaaatgatccgatagatagccgacgagaaatgagag

SEQ ID NO: 119528 - DNA, 75 bp, synthetic construct
  source 1..75: mol_type = other DNA
gaaaaataacgtcgcacgcttgcaggaagaccacgacaacgccgcctggatggcggagcagttgcgtgaagcagg

SEQ ID NO: 119529 - DNA, 75 bp, synthetic construct
  source 1..75: mol_type = other DNA
tgcggtgctgggcagcattcagccgcaacccatcgatgcggctaccgacggcacgctgccattggataaagtggc

SEQ ID NO: 119530 - DNA, 75 bp, synthetic construct
  source 1..75: mol_type = other DNA
aggaaaagacagccctattgattcctatgtcctgattcaggcagcagatacggatctggcatttgccaccagtat

SEQ ID NO: 119531 - DNA, 75 bp, synthetic construct
  source 1..75: mol_type = other DNA
tgttatcacgcattgcagaaatcagaaaggattattaccgttctttaaccataaccaacggtgagcctaatgcac

SEQ ID NO: 119532 - DNA, 75 bp, synthetic construct
  source 1..75: mol_type = other DNA
acagaaaagtggcagggatccagcgctattactccagtgcggaagatatgcaggcaggccgtgaagccggaaaac

SEQ ID NO: 119533 - DNA, 75 bp, synthetic construct
  source 1..75: mol_type = other DNA
ttgtgacgctgaataaagcaccagcgagctttgacctgattgatggggtaaagcgaccagataacgtggtgaagg

SEQ ID NO: 119534 - DNA, 75 bp, synthetic construct
  source 1..75: mol_type = other DNA
ggcgaggggcgcaccggcgtgcgttcggaaggaacggtctacaccggttttaccttctttcgcaaagtgtctcag

SEQ ID NO: 119535 - DNA, 75 bp, synthetic construct
  source 1..75: mol_type = other DNA
tatacgccaggacggttcagctttaacgtccgtggcgggcgctgcgaggcctgtcagggcgatggcgtgatcaaa

SEQ ID NO: 119536 - DNA, 75 bp, synthetic construct
  source 1..75: mol_type = other DNA
ggatgatgggcgagggattgactctggtcgctctattttaagcgagcaaggatatgcaacggaggatcatgctca

SEQ ID NO: 119537 - DNA, 75 bp, synthetic construct
  source 1..75: mol_type = other DNA
taaccagtaccagaagtgatgttgctgcgagttcgctggcagttaaaaaagcctacgatctggcgaaaagcaaat

SEQ ID NO: 119538 - DNA, 75 bp, synthetic construct
  source 1..75: mol_type = other DNA
acaccaccaacgggctggctaaaatgcaatggtgcagcattttcttctgaaatgtatcccaaactggcaaaggcc

SEQ ID NO: 119539 - DNA, 75 bp, synthetic construct
  source 1..75: mol_type = other DNA
gcattattagccgtttttgggtcctttgagctgggacaacagttaaagactagtctatccgcaagattgtctcta

SEQ ID NO: 119540 - DNA, 75 bp, synthetic construct
  source 1..75: mol_type = other DNA
gctttgctgagcgctttagtgtcgatccaaacaagttgttcgataccctaaaagcaacagcattcaagcaacgtg

SEQ ID NO: 119541 - DNA, 75 bp, synthetic construct
  source 1..75: mol_type = other DNA
actaccaggaagcgcacgagcaagcctccactgctggtggttctgcgaatgccgaacctgctgccgccgaagacg

SEQ ID NO: 119542 - DNA, 75 bp, synthetic construct
  source 1..75: mol_type = other DNA
taacccgcattgcctctcggtacggtgttgatagcaccaagttttttgaaaccttgaaagcaacagcgtttaagc

SEQ ID NO: 119543 - DNA, 75 bp, synthetic construct
  source 1..75: mol_type = other DNA
tgacccttcagattctgaaccttcaaaatctgaaccgtcagaatctgtatgttcaggcgtgtttgacccttcaga

SEQ ID NO: 119544 - DNA, 75 bp, synthetic construct
  source 1..75: mol_type = other DNA
agatggtggataacgtgttgtcccagccggaaggtaaacgcctgatgctgctcgcgccaatcattaaagagcgca

SEQ ID NO: 119545 - DNA, 75 bp, synthetic construct
  source 1..75: mol_type = other DNA
ctggaggaatactggcgcattcacccagatacgaaaacaaaaaatggaataaagtgttattactgtggctctaac

SEQ ID NO: 119546 - DNA, 75 bp, synthetic construct
  source 1..75: mol_type = other DNA
cgtgcataaagtggtgctttacggttctggcaaggaaaatatcgaattcaaatacatgaacgatcgtggcgatac

SEQ ID NO: 119547 - DNA, 75 bp, synthetic construct
  source 1..75: mol_type = other DNA
tcatgatgttttcagcctcggcaatggctaagattggctatgttgatgagcatcaaaaggaagttgacctaaaaa

SEQ ID NO: 119548 - DNA, 75 bp, synthetic construct
  source 1..75: mol_type = other DNA
catgctgccggctgctgtctccgctggaagaggcgcttcatggctatgtcatgactgacggcaaactccatgccg

SEQ ID NO: 119549 - DNA, 75 bp, synthetic construct
  source 1..75: mol_type = other DNA
acgacattcctacattggtgggttagcaaagcgctcccccataaggttacagatcccttcatcaggccattggca

SEQ ID NO: 119550 - DNA, 75 bp, synthetic construct
  source 1..75: mol_type = other DNA
tgagcaaaacatgcaggtttgcgtaccgtctaccccggcacaggtttaccacatgctgcgtcgtcaggcgttgcg

SEQ ID NO: 119551 - DNA, 75 bp, synthetic construct
  source 1..75: mol_type = other DNA
attataaatatgcgcatcttgcctcaaaagcagaaagattaaataattatattttagcagagaaactatggcgaa

SEQ ID NO: 119552 - DNA, 75 bp, synthetic construct
  source 1..75: mol_type = other DNA
ctctatatcggcgaaccgagcgccgaagccgttgccgcgcaaatgccggatctgattttaattagcgcaaccggc

SEQ ID NO: 119553 - DNA, 75 bp, synthetic construct
  source 1..75: mol_type = other DNA
gactggcaacagtcagacatgtcagaaaaaatgttttttgtccggctatatctgaaagctgtatttgtgagtgtt

SEQ ID NO: 119554 - DNA, 75 bp, synthetic construct
  source 1..75: mol_type = other DNA
ctctatgaagacttcttaaccgatcctgattcggttgacgctaactggcgttcgacgttccagcagttacctggt

SEQ ID NO: 119555 - DNA, 75 bp, synthetic construct
  source 1..75: mol_type = other DNA
ccggcagacagaacatggcgaccacagccgttgctgaaaccgctggtggacggcccgcagagcgccgtcgtgacg

SEQ ID NO: 119556 - DNA, 75 bp, synthetic construct
  source 1..75: mol_type = other DNA
gccattggtgaggtgccgttaccaacccgcagctgcgtgaacatctcgcgcaacaaatgggggctgattgtggga

SEQ ID NO: 119557 - DNA, 75 bp, synthetic construct
  source 1..75: mol_type = other DNA
tgagccgagcagcaacaaagtgctgccaatcaccattcacggtgacgccgcagtgaccgggcagggcgtggttca

SEQ ID NO: 119558 - DNA, 75 bp, synthetic construct
  source 1..75: mol_type = other DNA
gactgaaactgttcactcaggcaatcagcggggcaccttataccgcccttgcggtaccgctggcgttatctgccg

SEQ ID NO: 119559 - DNA, 75 bp, synthetic construct
  source 1..75: mol_type = other DNA
acagagggggggatagtctgttgtcgacagataacgccgtccggcaaggagcgattaatggtaaatttaccagtc

SEQ ID NO: 119560 - DNA, 75 bp, synthetic construct
  source 1..75: mol_type = other DNA
cataacagatcgacaacgccacagctcgaaaaacagaaggagcgtattaagctttttactcaggcgataagcgga

SEQ ID NO: 119561 - DNA, 75 bp, synthetic construct
  source 1..75: mol_type = other DNA
ggtgacggcggccatcgtgctatggaacacggtctatctggagcgggccgcgaacgccttgcgtggccacggtca

SEQ ID NO: 119562 - DNA, 75 bp, synthetic construct
  source 1..75: mol_type = other DNA
cgaagcccttcagcattgtggtgacgcaaccggaaatgcgtttcctggttatcgccggggccggtcaaaaagcgg

SEQ ID NO: 119563 - DNA, 75 bp, synthetic construct
  source 1..75: mol_type = other DNA
gcgggaatcccgtggcgatattggtaaaggaatggagagcgtaccttcgggtggtggcagtcaggatattattgc

SEQ ID NO: 119564 - DNA, 75 bp, synthetic construct
  source 1..75: mol_type = other DNA
tatgcaggccgcccggcctccgcctctccggcggtaggggatatgtccgttcaccagaaacagcagcaagatctg

SEQ ID NO: 119565 - DNA, 75 bp, synthetic construct
  source 1..75: mol_type = other DNA
gaagaagtacattaaattctgccaggaagaagataagtccaccaaccgcccgtatacctcacgttatatcggttc

SEQ ID NO: 119566 - DNA, 75 bp, synthetic construct
  source 1..75: mol_type = other DNA
ttatcgacaagacagggatccgcactcatattcctgttggctcggttgcctgcatcatgctggaacctggtaccc

SEQ ID NO: 119567 - DNA, 75 bp, synthetic construct
  source 1..75: mol_type = other DNA
acacctgcccgaccggacgcgctatctacgatagtgtgtacaacgatctgattaactacctggcttcaccggatc

SEQ ID NO: 119568 - DNA, 75 bp, synthetic construct
  source 1..75: mol_type = other DNA
cttgttcataattctattctaataatagcgccaatcttactgctaataaaatttaaattcatttacactgccaaa

SEQ ID NO: 119569 - DNA, 75 bp, synthetic construct
  source 1..75: mol_type = other DNA
tttgttaaaatcacctgcccaattcaatttaatgactataataaattaaaaaataccgctaagaatttctgtaaa

SEQ ID NO: 119570 - DNA, 75 bp, synthetic construct
  source 1..75: mol_type = other DNA
atagttggcaattctggctttattgtgccaaaaaatgattccaaagcattatcaaaatcaatatgcgatgcatta

SEQ ID NO: 119571 - DNA, 75 bp, synthetic construct
  source 1..75: mol_type = other DNA
gcgaggttcaacagaaactcgacctgttcgctaatgaaaaactgaaagccgcattgaaagcgcgcgatatcgttg

SEQ ID NO: 119572 - DNA, 75 bp, synthetic construct
  source 1..75: mol_type = other DNA
ggaggagctggatgctgcctccaccctctggctgacaaaagcgcgttaccagtacctcctccggcttgatgcaca

SEQ ID NO: 119573 - DNA, 75 bp, synthetic construct
  source 1..75: mol_type = other DNA
cgaccaccggtctgcacttcgccgatattcagcaactgctcgacgtgctgcataaactgcgcgatcagggcaata

SEQ ID NO: 119574 - DNA, 75 bp, synthetic construct
  source 1..75: mol_type = other DNA
atttcgctgctaaaaaacaaagcgctgcctgtaggcacgctgttgctggagctgatttacgtggttgaagcacag

SEQ ID NO: 119575 - DNA, 75 bp, synthetic construct
  source 1..75: mol_type = other DNA
tgcaacccgatggcattcctggcggaacaagcgggcggtaaagcgagcgatggcaaagagcgtattctggatatc

SEQ ID NO: 119576 - DNA, 75 bp, synthetic construct
  source 1..75: mol_type = other DNA
ctgctgaaaggtgggatttatctctacccaagcaccgccagccacccggacggtaaactgcgtttactgtatgag

SEQ ID NO: 119577 - DNA, 75 bp, synthetic construct
  source 1..75: mol_type = other DNA
gctgatgcttctgccgtcatcgggattgtagggcttgcggcgatgcactctctggcatatggcattccgatgata

SEQ ID NO: 119578 - DNA, 75 bp, synthetic construct
  source 1..75: mol_type = other DNA
ccggcgacctataccggcgtgtttacgcctgtgcgcgaactgtttgcgggcgtaccggaatcccgtgcgcgcggc

SEQ ID NO: 119579 - DNA, 75 bp, synthetic construct
  source 1..75: mol_type = other DNA
tcgagtgggaggccaaaggggtcactcctatcctttacaccgtaccggcgggctccactgatcattcagtgctgc

SEQ ID NO: 119580 - DNA, 75 bp, synthetic construct
  source 1..75: mol_type = other DNA
agccgtgtgcgcaaatttaaagcgggggatcgggtaaatatcgaacctggcgttccttgcggtcactgtcgttac

SEQ ID NO: 119581 - DNA, 75 bp, synthetic construct
  source 1..75: mol_type = other DNA
ggatcagcgatacagaaagcgaattgggacttggaaccgttgtcgcggtggatgcgcgaactgtcactttacttt

SEQ ID NO: 119582 - DNA, 75 bp, synthetic construct
  source 1..75: mol_type = other DNA
ccgccacgcgccgcgcgtcctgctggctgacgaagtgggtttagggaaaaccattgaagccgggatgatcctgca

SEQ ID NO: 119583 - DNA, 75 bp, synthetic construct
  source 1..75: mol_type = other DNA
cgcctgtgcgcgaactgtttgcgggcgtaccggaatcccgtgcgcgcggctatacgccaggacgtttcagcttta

SEQ ID NO: 119584 - DNA, 75 bp, synthetic construct
  source 1..75: mol_type = other DNA
aatcggcatttaacctgaatatcctgattggctgcggtgttgacggatacgacgactggaaagactggaaacctt

SEQ ID NO: 119585 - DNA, 75 bp, synthetic construct
  source 1..75: mol_type = other DNA
aacacggagatcccttcttatgaagaagggatctcgctctttgatgttgaagccactctgcaaccgaatggggtg

SEQ ID NO: 119586 - DNA, 75 bp, synthetic construct
  source 1..75: mol_type = other DNA
ctgatgctgctcgcgccaatcattaaagagcgcaaaggcgaacacaccaaaacgctggagaacctggcaagccag

SEQ ID NO: 119587 - DNA, 75 bp, synthetic construct
  source 1..75: mol_type = other DNA
ttgaagttgagctgcatctttgcatcagggatgatgaactcaagactgcaaaggtgaaattacgaagtcttaagg

SEQ ID NO: 119588 - DNA, 75 bp, synthetic construct
  source 1..75: mol_type = other DNA
cggcattgttgccaacaacacgtatccggcggatttcatctaccagaacatgatgattgagagcaacatcattca

SEQ ID NO: 119589 - DNA, 75 bp, synthetic construct
  source 1..75: mol_type = other DNA
gttcgacgccacattggatttgttggaacggcgcctaccgggacagcgtatagccgtccgtcgcgcgctggaaca

SEQ ID NO: 119590 - DNA, 75 bp, synthetic construct
  source 1..75: mol_type = other DNA
ccgcaatccggcatcaattcatcaaggcaatcctccgaaggggtatcgttgtccttggatgaggcgttgtcaaaa

SEQ ID NO: 119591 - DNA, 75 bp, synthetic construct
  source 1..75: mol_type = other DNA
gttaaacaggcaccttatctggtcatgcgcggcggtaaaattatgattgttggtactgtacccggcgattcggca

SEQ ID NO: 119592 - DNA, 75 bp, synthetic construct
  source 1..75: mol_type = other DNA
tctagtaatactagtgatacaaataagctatcgactgttataaacccgcatgactaccattacttgaaatttgaa

SEQ ID NO: 119593 - DNA, 75 bp, synthetic construct
  source 1..75: mol_type = other DNA
tgctggccgccacaccgaaagctgtcaaggctgcatatgacctggctaacgggaagtatacggcccaggatgcaa

SEQ ID NO: 119594 - DNA, 75 bp, synthetic construct
  source 1..75: mol_type = other DNA
aagcagacagataaacgccagagcatctggaattctggcaaagtcaggttctttcttgtgctttttccattgatg

SEQ ID NO: 119595 - DNA, 75 bp, synthetic construct
  source 1..75: mol_type = other DNA
ggaatgggtacaaaagcgcatgacctttttgtgctgcctttgtgcagaaaacaccacgacgaactgcatgcggat

SEQ ID NO: 119596 - DNA, 75 bp, synthetic construct
  source 1..75: mol_type = other DNA
cgctgaccctgctggaaaaactgaatgaactggacgccgacgaccaggctgacatctgcgaagcgcttcacgacc

SEQ ID NO: 119597 - DNA, 75 bp, synthetic construct
  source 1..75: mol_type = other DNA
cagtatgccgttgcccgatatcaatgggtttatgtcgtctgctaaaaatgcgatcggagccgtaatcaatagttt

SEQ ID NO: 119598 - DNA, 75 bp, synthetic construct
  source 1..75: mol_type = other DNA
ttcatcttttgccagtggtgccgttccggcggcatcacaaccgctggcggatgatcctgccgttcgggccgtgtt

SEQ ID NO: 119599 - DNA, 75 bp, synthetic construct
  source 1..75: mol_type = other DNA
agctgctgattaactggtcgccggcaggtctgctctataaagcctttgcagctgcgctgaaatatcttggtgttg

SEQ ID NO: 119600 - DNA, 75 bp, synthetic construct
  source 1..75: mol_type = other DNA
ttggctgacgttcttactggtgtgccgatggtggcggattatccttcgctcaatctggggcaggcggtgatggtc

SEQ ID NO: 119601 - DNA, 75 bp, synthetic construct
  source 1..75: mol_type = other DNA
atgcggatccgctggcgttcgaagaaaagcatgcgtaatctgccgtccggggtcgttcctgccgttcgccatccg

SEQ ID NO: 119602 - DNA, 75 bp, synthetic construct
  source 1..75: mol_type = other DNA
ccatgatgccgatacttgttatcgcgtgctcggtcagatgcacagcctgtacaaaccgcgtccgggacgtgtaaa

SEQ ID NO: 119603 - DNA, 75 bp, synthetic construct
  source 1..75: mol_type = other DNA
caacatgcgcacactgggcgcactacgcccggataaacgccgccgcatcgcgcgcgaaacgttggaaatctacag

SEQ ID NO: 119604 - DNA, 75 bp, synthetic construct
  source 1..75: mol_type = other DNA
ccgcaatgaggcagtgatccgtcgtgctggtggagtggaatgtcttgaaagctggttacttcgtgaaaaaggctg

SEQ ID NO: 119605 - DNA, 75 bp, synthetic construct
  source 1..75: mol_type = other DNA
taaaccacatcactgccaccgccgccttgtgatagaatacttgaatgagcattgggatactgattttgaggttaa

SEQ ID NO: 119606 - DNA, 75 bp, synthetic construct
  source 1..75: mol_type = other DNA
ctcatgtcagccccggtaaaggtctggtgattcaccatgaatcctgccgtaacatccgtggttaccagaaagagc

SEQ ID NO: 119607 - DNA, 75 bp, synthetic construct
  source 1..75: mol_type = other DNA
gatcatcgaagagatgctggtttccaccaccagtgaacgtcagggccgcgtaattgaccgcgaccaggcggggtc

SEQ ID NO: 119608 - DNA, 75 bp, synthetic construct
  source 1..75: mol_type = other DNA
atggatcaaaaacgacttacccacctacgacagctagaggcggaaagcatccacatcattcgcgaggtggcggca

SEQ ID NO: 119609 - DNA, 75 bp, synthetic construct
  source 1..75: mol_type = other DNA
catcgatgatgtggtggatttcctgaaaaacgcccgtgataacgaccagtatgttgagtcaccgaccatccgcag

SEQ ID NO: 119610 - DNA, 75 bp, synthetic construct
  source 1..75: mol_type = other DNA
tcacaacgaacttcatgcagatccgctggcgttcgaagaaaagtatggttcccaggttgatttgatttttcgttt

SEQ ID NO: 119611 - DNA, 75 bp, synthetic construct
  source 1..75: mol_type = other DNA
cggcaaactgtgggagcagggcgttgaaggcattgaaaagtacaatgacatcaacaaagtcgaaccgatgaaccg

SEQ ID NO: 119612 - DNA, 75 bp, synthetic construct
  source 1..75: mol_type = other DNA
ttttatccgggtacgctgcctttccctctgctgcatgttgatactggctggaaattccgcgagatgtatgagttt

SEQ ID NO: 119613 - DNA, 75 bp, synthetic construct
  source 1..75: mol_type = other DNA
ggggagttgttgcctaagtttggtccccatgacttacggcgtactgccagcaccttgctacatgaggccgggtac

SEQ ID NO: 119614 - DNA, 75 bp, synthetic construct
  source 1..75: mol_type = other DNA
gcagcagatgcagcgccgtgaagaggtaaatatcaacgtgcaccgggagcgcggggaggatgttgagccgggaga

SEQ ID NO: 119615 - DNA, 75 bp, synthetic construct
  source 1..75: mol_type = other DNA
aacccgtaaatgggaacccggcatggcggaagaagaaacgcgtttctttggcttaaaaagggaatgtgggttaca

SEQ ID NO: 119616 - DNA, 75 bp, synthetic construct
  source 1..75: mol_type = other DNA
ctggattaatggggagcatacggatctgattccgttctccccgtcgaagtttgagaggtggatggaagacagtaa

SEQ ID NO: 119617 - DNA, 75 bp, synthetic construct
  source 1..75: mol_type = other DNA
acaacagccacaacagccacaacagccacaccacaacagccagtgtcttctgtcatcaatgataagaagtcagat

SEQ ID NO: 119618 - DNA, 75 bp, synthetic construct
  source 1..75: mol_type = other DNA
gagaagtatggctcccagctggagctgatatttcgttttatcgatcgtgcgctggcaataggcgtgctggcctga

SEQ ID NO: 119619 - DNA, 75 bp, synthetic construct
  source 1..75: mol_type = other DNA
ctggcgttcgaagaaaagtatggttcccaggttgatttgatttttcgttttcttgatcacgcctttgcaacaggc

SEQ ID NO: 119620 - DNA, 75 bp, synthetic construct
  source 1..75: mol_type = other DNA
taatctgcccggtgaatatgtgctttcttccagcttcggtattcaggcggcggtcagcctgcatctggtgaatca

SEQ ID NO: 119621 - DNA, 75 bp, synthetic construct
  source 1..75: mol_type = other DNA
acaccatgacgaactgcatgtggataccgtggcatttgaagagaagtatggttcccaactggagctgatatttcg

SEQ ID NO: 119622 - DNA, 75 bp, synthetic construct
  source 1..75: mol_type = other DNA
cgaccacgccgatgagctttaccgcagctgcctcgcacgtttcggggatgacggtgaaaacctgctgacaagccc

SEQ ID NO: 119623 - DNA, 75 bp, synthetic construct
  source 1..75: mol_type = other DNA
gcaagatggggctgtcatacgtcattactggtaccaaaggagcgatcagttttacccaagagcggatggcagaga

SEQ ID NO: 119624 - DNA, 75 bp, synthetic construct
  source 1..75: mol_type = other DNA
tacccggcggtggtgttcgatgaccgggaagtggtgtacggcaccaccgatgtggcacaggctgaacgactccgg

SEQ ID NO: 119625 - DNA, 75 bp, synthetic construct
  source 1..75: mol_type = other DNA
taatctgccgtccggggtcgttcctgccgttcgccagccgctggaggacgataaagcatttctgccgtttttcag

SEQ ID NO: 119626 - DNA, 75 bp, synthetic construct
  source 1..75: mol_type = other DNA
gtaaatgagaaatacacacgctgggtaaagacacagccgtgtgcgtgttgtggtaagccagcggacgatcctcat

SEQ ID NO: 119627 - DNA, 75 bp, synthetic construct
  source 1..75: mol_type = other DNA
taatctgccgtccggggtcgttcctgccgttcgccagccgctggaggatgataaagcattcctgccgtttttcag

SEQ ID NO: 119628 - DNA, 75 bp, synthetic construct
  source 1..75: mol_type = other DNA
gccttaccggaaagtgcagcccgtaaggcactgagattaccgaagcctgttgtgcaggcggtcacccgggaaagt

SEQ ID NO: 119629 - DNA, 75 bp, synthetic construct
  source 1..75: mol_type = other DNA
tacgccccaaacgtcgtcgctgggttaatgaaaagtacacgcgctgggttaagacacagccttgcgcgtgttgtg

SEQ ID NO: 119630 - DNA, 75 bp, synthetic construct
  source 1..75: mol_type = other DNA
gcgcggtctgccgtccggagtcgttcctgccgttcgccagccattggcggaggataaatcattactgccattttt

SEQ ID NO: 119631 - DNA, 75 bp, synthetic construct
  source 1..75: mol_type = other DNA
gatacgtggcagtccggcagaggaacggctcgcagtcagaaaagccagaagcgtccagttgatgcagtcgttgta

SEQ ID NO: 119632 - DNA, 75 bp, synthetic construct
  source 1..75: mol_type = other DNA
accgatgtggccggactttgaagagggctggaaagtctcgcgcgtgctggacaccatcgcactctcacaccagca

SEQ ID NO: 119633 - DNA, 75 bp, synthetic construct
  source 1..75: mol_type = other DNA
atgggcattatgtcatgtctgaaatttttctggtgcctgtatgccattcgccagtctctcagcggcattgtccat

SEQ ID NO: 119634 - DNA, 75 bp, synthetic construct
  source 1..75: mol_type = other DNA
catcataccgggagaacagaccgccaccagcatactgaagcagcgcacaaaaaatattgcgctaccgcctcacac

SEQ ID NO: 119635 - DNA, 75 bp, synthetic construct
  source 1..75: mol_type = other DNA
actgtggctaaccaccggacagggagagccaggtccaaacattgaacctaaaaaaaatatcaattccgtgaactc

SEQ ID NO: 119636 - DNA, 75 bp, synthetic construct
  source 1..75: mol_type = other DNA
ggcctccagtgcggcccgtgcggcatggggtaactcctcctacaaaattatcctcaaacagagtgcgaaggagtt

SEQ ID NO: 119637 - DNA, 75 bp, synthetic construct
  source 1..75: mol_type = other DNA
tttcctgctgactggataattcagtgcgcactagaaaccggtgtttcgttgctttggttagctacaggacaggga

SEQ ID NO: 119638 - DNA, 75 bp, synthetic construct
  source 1..75: mol_type = other DNA
gctggctggcgtacaggatgcgaaattatacaaaggcatcaccgaccgggagccggagaactggcgcgactacct

SEQ ID NO: 119639 - DNA, 75 bp, synthetic construct
  source 1..75: mol_type = other DNA
cggtcacgcctgcgtgggcgcgcgcgtcgaccgccagccgtacccgctatcgcagccgctctccagtggtcaaac

SEQ ID NO: 119640 - DNA, 75 bp, synthetic construct
  source 1..75: mol_type = other DNA
ttggcactgcgataaccagttgcgtgatcagttcacggaacggttggaatcaatggcaacggataactgtgccca

SEQ ID NO: 119641 - DNA, 75 bp, synthetic construct
  source 1..75: mol_type = other DNA
gaaattggtcttggcaacgcgatgagcgtggtggtcgcgaagaatctccagcagggagacggttccattccaccg

SEQ ID NO: 119642 - DNA, 75 bp, synthetic construct
  source 1..75: mol_type = other DNA
caatgattctgacacctgttatcgcgtgctcgggcaaatgcatagcctgtacaagccgcgtccgggtcgcgtgaa

SEQ ID NO: 119643 - DNA, 75 bp, synthetic construct
  source 1..75: mol_type = other DNA
cctgtggcatttgaagcgaaatacggtgaccaactggtcttggtgtttcggtttatagatcgtgcgctggcaatc

SEQ ID NO: 119644 - DNA, 75 bp, synthetic construct
  source 1..75: mol_type = other DNA
accagccacgtgacaaaatgacggaagtcatcatttttgcgggtagtgatgcctgggcacatgcgaaacagtggc

SEQ ID NO: 119645 - DNA, 75 bp, synthetic construct
  source 1..75: mol_type = other DNA
tatccggccgtggtctttgatgatcgtgacgtggtctacggtaccacggatgtggcagaggccgcacaactgaga

SEQ ID NO: 119646 - DNA, 75 bp, synthetic construct
  source 1..75: mol_type = other DNA
cgccggggtaaaagattttgaagaaaaacacggtagtcagttgttgttgctgattcgttttttaatgcacgcgag

SEQ ID NO: 119647 - DNA, 75 bp, synthetic construct
  source 1..75: mol_type = other DNA
agcaacttgctcatcaaaacctgtcagcatggatgattgacgtcatcggtcacgcaataagcggtacgcaggagc

SEQ ID NO: 119648 - DNA, 75 bp, synthetic construct
  source 1..75: mol_type = other DNA
gtccagtggcattctgtggcggatctgcagccatcaaaggctatatcgtcagggggacggtacaggaatggagga

SEQ ID NO: 119649 - DNA, 75 bp, synthetic construct
  source 1..75: mol_type = other DNA
gggccaaagcaactggcagatctggctaatatccgcattgtcgacgatgaacgtcgttttgcgcgcgtctatctc

SEQ ID NO: 119650 - DNA, 75 bp, synthetic construct
  source 1..75: mol_type = other DNA
tgcgtcgttcgctgggattacgtgcggaaaaaatccgcccggtgtaccgcgaaagcgacatcataccgggagaac

SEQ ID NO: 119651 - DNA, 75 bp, synthetic construct
  source 1..75: mol_type = other DNA
ggtgctgatggtgggattggtagtacgtataacattatgggctggagatataaaggaatagccagtgcactgcaa

SEQ ID NO: 119652 - DNA, 75 bp, synthetic construct
  source 1..75: mol_type = other DNA
atgtctgtggacttaaaaggtatcatgtccgcgctgctgacaccttttgatgcagaacaaaagctggatcaagaa

SEQ ID NO: 119653 - DNA, 75 bp, synthetic construct
  source 1..75: mol_type = other DNA
cggagtcgcaaatcgactgggctatgatgctgtttcggctgttacgcctttctattatcccttctcttttgaaga

SEQ ID NO: 119654 - DNA, 75 bp, synthetic construct
  source 1..75: mol_type = other DNA
acatcaacatcaggtcattcatcgaaacctcacaccagatgcgattctcatcactaaagggggtatagctcgcat

SEQ ID NO: 119655 - DNA, 75 bp, synthetic construct
  source 1..75: mol_type = other DNA
ctacgagtgtctgaccagcaagtatccgttcgacgatcccacgccgccgatcaagactcaacccaaggaccccaa

SEQ ID NO: 119656 - DNA, 75 bp, synthetic construct
  source 1..75: mol_type = other DNA
tatatcttgggtatggagaaacattacgagctaatacagaagttacattgagtagcactggttacttttacgaga

SEQ ID NO: 119657 - DNA, 75 bp, synthetic construct
  source 1..75: mol_type = other DNA
tatatgtttggattcactagagtaatgtttaataactggcttggtatattattttctagtgtatttactgttatt

SEQ ID NO: 119658 - DNA, 75 bp, synthetic construct
  source 1..75: mol_type = other DNA
ttatcttcgcgctggcgacagtactgctggcaagcgtgttgtctttcttctggtatcgtcgatatttgcgctcgc

SEQ ID NO: 119659 - DNA, 75 bp, synthetic construct
  source 1..75: mol_type = other DNA
tgtcggcgcttctgacaccgtttgattctgaacaaaagttggataaagaaagtctgcggcggttagtccgtttta

SEQ ID NO: 119660 - DNA, 75 bp, synthetic construct
  source 1..75: mol_type = other DNA
tctggttattgcttttattttatctgttttaggccaagtggaaattgttgccactgcaaatgggaaattaacaca

SEQ ID NO: 119661 - DNA, 75 bp, synthetic construct
  source 1..75: mol_type = other DNA
cttatcgacgttgccgaaatgtacccagtacctccgcgccccgaaacgcaagggttaaccgaaacctacgtcggc

SEQ ID NO: 119662 - DNA, 75 bp, synthetic construct
  source 1..75: mol_type = other DNA
tttactgataaggggaaaatcccaagccaccgtctttctgatattcgttcttatcactcacatattgacaaagcc

SEQ ID NO: 119663 - DNA, 75 bp, synthetic construct
  source 1..75: mol_type = other DNA
cctcaaaactcggtatatggggacactcactaggtgctatttttgttcttgattgtttaaaaaataattcatgtt

SEQ ID NO: 119664 - DNA, 75 bp, synthetic construct
  source 1..75: mol_type = other DNA
cgtgccgcctgatagtgaagaaaaatggtactgaaatttataaccgaactgccctggataatacgctgatttaca

SEQ ID NO: 119665 - DNA, 75 bp, synthetic construct
  source 1..75: mol_type = other DNA
gtgcgggtattacttcgatctgttccggtaccggaacttgggctggtggtccttaagcctggtcgtgaatccatg

SEQ ID NO: 119666 - DNA, 75 bp, synthetic construct
  source 1..75: mol_type = other DNA
cgctggcggaggataaatcattactgccatttttcagcgacgaacgagtgattcgtgctgctggtggcgctggcg

SEQ ID NO: 119667 - DNA, 75 bp, synthetic construct
  source 1..75: mol_type = other DNA
aaatcatataatagcgggaagaatattggaagtcatccagatatgactgacagagaaattatggagtctagagca

SEQ ID NO: 119668 - DNA, 75 bp, synthetic construct
  source 1..75: mol_type = other DNA
atgaaacgtttaatatctctgttcttgatgttttttagtttttcttgtttttctgctactgagcttgaaataaaa

SEQ ID NO: 119669 - DNA, 75 bp, synthetic construct
  source 1..75: mol_type = other DNA
cagccatcgctctggacgcgcccggtattaaaagcaaacgcccaatcactgcccgatagcgcactccagcacctc

SEQ ID NO: 119670 - DNA, 75 bp, synthetic construct
  source 1..75: mol_type = other DNA
tatgacggtcgcggagatcgtcgaaagggaagagtgggtcggatttcgcgccagagaaaccgcagcactggaagc

SEQ ID NO: 119671 - DNA, 75 bp, synthetic construct
  source 1..75: mol_type = other DNA
aaaccgttaagtgaagaggtcgaggaagtgctggaagaacgcgatgcgctgtatcgcgaagttgcgcacattatc

SEQ ID NO: 119672 - DNA, 75 bp, synthetic construct
  source 1..75: mol_type = other DNA
agcagctcttaagcaagctgtggctatgggaaggcaaagcagaaagctatggctgggggagtaattcaacacagg

SEQ ID NO: 119673 - DNA, 75 bp, synthetic construct
  source 1..75: mol_type = other DNA
gtaacgccatcaatcaaaagtcggacaatggatctcaagattcagcagcagctttccaactttgtgaccactgaa

SEQ ID NO: 119674 - DNA, 75 bp, synthetic construct
  source 1..75: mol_type = other DNA
tcctcatcgcgtacctctgcggctccatttccagtgccattctggtttgccgcttgtgtgggctgcccgatccgc

SEQ ID NO: 119675 - DNA, 75 bp, synthetic construct
  source 1..75: mol_type = other DNA
tatgctctcttgcctgatcctgctgcgtcatcatgacaacatccagcgtctgtggcgtcgccaggagacaaaaat

SEQ ID NO: 119676 - DNA, 75 bp, synthetic construct
  source 1..75: mol_type = other DNA
atggctaaactgaacaagaaacaacttgctttactcaaggaaatgcctgccgatcaactcatgcaaataatttgt

SEQ ID NO: 119677 - DNA, 75 bp, synthetic construct
  source 1..75: mol_type = other DNA
agaacaactcatgcaaataatttgtgatattgcagaggataatggtcaggcaaaatcctttcttattaataaata

SEQ ID NO: 119678 - DNA, 75 bp, synthetic construct
  source 1..75: mol_type = other DNA
atgaaaaagattttactcgcattaacgctactattttcttcatgtgctttcgcagggtcagagcttgaattaaat

SEQ ID NO: 119679 - DNA, 75 bp, synthetic construct
  source 1..75: mol_type = other DNA
tagctttaattcttttagtaaagatgtctatcgtgaacaaaatagtgatatatataaaatattttttaaaattgc

SEQ ID NO: 119680 - DNA, 75 bp, synthetic construct
  source 1..75: mol_type = other DNA
aaatatcccggaagcggaagactggaaagagaagcacgcaggtaaagcgccggtacgcacgatggtggatattct

SEQ ID NO: 119681 - DNA, 75 bp, synthetic construct
  source 1..75: mol_type = other DNA
cttcacggcaactattaccccaatcctgccgaagaggttttaccggcttcaattgcgacattcgaagcgcgcgac

SEQ ID NO: 119682 - DNA, 75 bp, synthetic construct
  source 1..75: mol_type = other DNA
atcgacggcaaaccatttagcggtgccgtgccatttggcagcgccaaaaacgatttagtcaaaaccaaaagttaa

SEQ ID NO: 119683 - DNA, 75 bp, synthetic construct
  source 1..75: mol_type = other DNA
gccccgcccgggggattgatcttatcggcacctttgcatccgtggctgttggttttttgattgtcggtctggcac

SEQ ID NO: 119684 - DNA, 75 bp, synthetic construct
  source 1..75: mol_type = other DNA
agcagcggcggcgactttctgcaccgctattccgtgccgggacattccgaatacaaccagatgaacacggcgctg

SEQ ID NO: 119685 - DNA, 75 bp, synthetic construct
  source 1..75: mol_type = other DNA
gaaaagcaagaagtactattcgaaaacataaaaaatgaaaaagcaataattttttcatcaataaaagtagttaat

SEQ ID NO: 119686 - DNA, 75 bp, synthetic construct
  source 1..75: mol_type = other DNA
cgctatcttggcacggcgctgtactggatagctgccagtatcaatatcaggccgggccatgattattatttttac

SEQ ID NO: 119687 - DNA, 75 bp, synthetic construct
  source 1..75: mol_type = other DNA
agctgcgcgaccagacctccgaatcactcgggcaacttgctcaccaaaacctgtctgcatggatgattgacgtca

SEQ ID NO: 119688 - DNA, 75 bp, synthetic construct
  source 1..75: mol_type = other DNA
atgcataccactcgactgaagaaggtcggcggctcagtaatgctgaccgttccacctgcactgctgaatgctctg

SEQ ID NO: 119689 - DNA, 75 bp, synthetic construct
  source 1..75: mol_type = other DNA
aacatttcactgtttacggaacgagtggatgtggacatacagtgtcctatgcagtgtgtccgagtggtagtactt

SEQ ID NO: 119690 - DNA, 75 bp, synthetic construct
  source 1..75: mol_type = other DNA
cgtcaggcaaccagctgggccacagcggccaaactgtatattgccgcgaactacgacaccctgctggcctcagcc

SEQ ID NO: 119691 - DNA, 75 bp, synthetic construct
  source 1..75: mol_type = other DNA
ctgttctttatcggcatcttaccgatcatcttcgccctctggctgcggaaaaacatcccggaagcggaagactgg

SEQ ID NO: 119692 - DNA, 75 bp, synthetic construct
  source 1..75: mol_type = other DNA
gttccgggcaggtgagcaggaacagacaccgccggagggatttgaatcatcaggttccgagacggtactgggtac

SEQ ID NO: 119693 - DNA, 75 bp, synthetic construct
  source 1..75: mol_type = other DNA
atgactgccgatttaaaaggcattatgtctgctctgctgacacctgttgatgcagaacaaaagctggatcaagac

SEQ ID NO: 119694 - DNA, 75 bp, synthetic construct
  source 1..75: mol_type = other DNA
ccgggcagcaagcagactgggctatgatgctgtttcagcagtgacacctttttattatcccttttcttttgaaga

SEQ ID NO: 119695 - DNA, 75 bp, synthetic construct
  source 1..75: mol_type = other DNA
gtgagccgtgttcctgacggcgttgctgaatacagcgtatgggggctgaagctgccgacgctgcgccagcgcctg

SEQ ID NO: 119696 - DNA, 75 bp, synthetic construct
  source 1..75: mol_type = other DNA
gtgaaatcatgctgccatcctccggcaccacactgataagcctggttgacggaaagggtaatccggtcagcgtgg

SEQ ID NO: 119697 - DNA, 75 bp, synthetic construct
  source 1..75: mol_type = other DNA
cgatcagcggcgggcaatgctacaggattgggcggacatgattgacgagtggacaatcaggaagccccgcctcaa

SEQ ID NO: 119698 - DNA, 75 bp, synthetic construct
  source 1..75: mol_type = other DNA
agagagcgtgtggatcaaaacgaccagcaataccagtctggatgtgacaggcaaggttcgcgcagcgacggtgaa

SEQ ID NO: 119699 - DNA, 75 bp, synthetic construct
  source 1..75: mol_type = other DNA
gttttcactattactggctgctttcagttttgtaagtacaatggggctggcgaacgcagtcccccccattaaaaa

SEQ ID NO: 119700 - DNA, 75 bp, synthetic construct
  source 1..75: mol_type = other DNA
agcatggatgattgacgtcatccgtcacgcaatgaatggcacacaggagcgggaattatcgctagctgaattatc

SEQ ID NO: 119701 - DNA, 75 bp, synthetic construct
  source 1..75: mol_type = other DNA
acgcgcgaagtgcttgatacctgtcaggtgattgccgaagcaccgcaaggttcgattgccgcctacgtgatctcg

SEQ ID NO: 119702 - DNA, 75 bp, synthetic construct
  source 1..75: mol_type = other DNA
tcagtattccataacggcagaatattggtggaaccggaacccaaaaacatgcgcagtcttccgtccggcgtcgtt

SEQ ID NO: 119703 - DNA, 75 bp, synthetic construct
  source 1..75: mol_type = other DNA
aacagctcgataacaaagatatcgccgactacgaacacaaccagctgatgcgccgcctgcgccagttgatcgccc

SEQ ID NO: 119704 - DNA, 75 bp, synthetic construct
  source 1..75: mol_type = other DNA
gtacatcgcatcgggcgtactgcgcgagcggggaatagcggtctggcgatcagtttctgtgctccggaagaggcg

SEQ ID NO: 119705 - DNA, 75 bp, synthetic construct
  source 1..75: mol_type = other DNA
acgaaggataaatgcagcaaatgcctgagtggctgtaagtttcgcaataacgtcggctcccttttcgggttcctt

SEQ ID NO: 119706 - DNA, 75 bp, synthetic construct
  source 1..75: mol_type = other DNA
tgttcgtgctgtggtaagccagctgacgatccccatcacctgattggtcatgctcagggcggaatggggacaaaa

SEQ ID NO: 119707 - DNA, 75 bp, synthetic construct
  source 1..75: mol_type = other DNA
aatgtgtgttcgcaggtgcgccacaatggcgagattgttccgcttgatgacaccatgctgcggcgtattaaacgg

SEQ ID NO: 119708 - DNA, 75 bp, synthetic construct
  source 1..75: mol_type = other DNA
acccgttgaaaaatcagcaaccacccggcaggcagagcacagtaatccgctggagtgcgacactctgtgttttat

SEQ ID NO: 119709 - DNA, 75 bp, synthetic construct
  source 1..75: mol_type = other DNA
gcatgttgtggtaagccagctgacgatccacatcacctgattggtcatggtcagggaggaatgggaacaaaggcc

SEQ ID NO: 119710 - DNA, 75 bp, synthetic construct
  source 1..75: mol_type = other DNA
gaacaactggaagagaatctcggctacaaactgcccgtcgaatttgttccggtgcgttttacctcgtggatgggc

SEQ ID NO: 119711 - DNA, 75 bp, synthetic construct
  source 1..75: mol_type = other DNA
cgatgagcgggtgattcgtgctgctggtggtgctggtgcattgtctgactggctgttacgccacgttaaatcctg

SEQ ID NO: 119712 - DNA, 75 bp, synthetic construct
  source 1..75: mol_type = other DNA
tattgatatccgtcaggagagcacgcgtcataccgaagcattaggcgaactgacccgctacctcggtatcggcga

SEQ ID NO: 119713 - DNA, 75 bp, synthetic construct
  source 1..75: mol_type = other DNA
gatgccttaccggaaagtgcagcccgtaaggtactgagattaccgaagacggttgtgccgtctgtcacccgggaa

SEQ ID NO: 119714 - DNA, 75 bp, synthetic construct
  source 1..75: mol_type = other DNA
accgtggcatttgaagagaagtatggctttcaactggagctgatgtttcgttttatcgatcgtgcgctggcaaca

SEQ ID NO: 119715 - DNA, 75 bp, synthetic construct
  source 1..75: mol_type = other DNA
gaggatgcagaaaaattgcatgaagttggaataacgatagatgctgagaataggatcaggcgcctcacacccgcc

SEQ ID NO: 119716 - DNA, 75 bp, synthetic construct
  source 1..75: mol_type = other DNA
aaaagtacacgcgctgggttaagacgcagccgtgtgcatgttgtggtaagccagccgacgatcctcatcacctga

SEQ ID NO: 119717 - DNA, 75 bp, synthetic construct
  source 1..75: mol_type = other DNA
aaacagctgccgcagtgaaggagtgttacatcaatgccttcaactggatggccgagcagctaaaccggcgcatgg

SEQ ID NO: 119718 - DNA, 75 bp, synthetic construct
  source 1..75: mol_type = other DNA
gtggctggttcgtaatgacctggcggatgccttaccggaaagtgcagcccgtaaggccctgagattaccgaagcc

SEQ ID NO: 119719 - DNA, 75 bp, synthetic construct
  source 1..75: mol_type = other DNA
tggatgatcggatcctggcgctgcaatcagtggggatcttcaccgatccacagtcgtatattacttacgcgaccg

SEQ ID NO: 119720 - DNA, 75 bp, synthetic construct
  source 1..75: mol_type = other DNA
tgaactgctggcgctggttggcgaagaaggtgccgcagaaccgtatcgctatctgatgaaaaacctgcgttctcg

SEQ ID NO: 119721 - DNA, 75 bp, synthetic construct
  source 1..75: mol_type = other DNA
aatgtggcattcgaagagaagtatggctcccagctggagctgatatttcgttttatcgatcgtgcgctgacgatt

SEQ ID NO: 119722 - DNA, 75 bp, synthetic construct
  source 1..75: mol_type = other DNA
tggcacccgaacggttcaggctggtttgcccaaaacctgtacctcgatgcggcgcaatatatccgccaggatatt

SEQ ID NO: 119723 - DNA, 75 bp, synthetic construct
  source 1..75: mol_type = other DNA
tggatcacttgcaaaaaggcacggtatcactggatgcgctgaatactttggtgatggatgaggccgaccgcatgc

SEQ ID NO: 119724 - DNA, 75 bp, synthetic construct
  source 1..75: mol_type = other DNA
aatgctggaacaggcacataaaggattgccggacgatccggcactgatccgacaactggcctacgtgaaccagcg

SEQ ID NO: 119725 - DNA, 75 bp, synthetic construct
  source 1..75: mol_type = other DNA
gatcccggcagatttacgtatcttgcaggcgcgggatctgttcgtcgctcaggcgtcgttaaccggtgagtctct

SEQ ID NO: 119726 - DNA, 75 bp, synthetic construct
  source 1..75: mol_type = other DNA
gtgccgctggaagcagagatggcgacgttgtgcattgatggcgggaaaaaagccaaaatgcgaccgggtgatgtg

SEQ ID NO: 119727 - DNA, 75 bp, synthetic construct
  source 1..75: mol_type = other DNA
gcggcgaaagtgtgccatgaagtgggactggacgcgggagaggtggttactggtagtgatattgaaacgctatct

SEQ ID NO: 119728 - DNA, 75 bp, synthetic construct
  source 1..75: mol_type = other DNA
ttcccggcctaccctgacggtttctaacctgaacggtatggtcaccgggatggcggaagagctgcagagtctggt

SEQ ID NO: 119729 - DNA, 75 bp, synthetic construct
  source 1..75: mol_type = other DNA
gcgtggcgcagtcaagctgtcgaaacagaaagtgatcgtcaaacatctggatgccattcagaactttggcgctat

SEQ ID NO: 119730 - DNA, 75 bp, synthetic construct
  source 1..75: mol_type = other DNA
catttgaagataagtatggctcccaactggagctgatatttcgttttatcgatcgcgcgctggcaattggcgtac

SEQ ID NO: 119731 - DNA, 75 bp, synthetic construct
  source 1..75: mol_type = other DNA
gtgccgctggaagccgaaatggcaacgttatgtatcgatggcgggaaaaaagccaaaatgcgcccgggtgatgta

SEQ ID NO: 119732 - DNA, 75 bp, synthetic construct
  source 1..75: mol_type = other DNA
ggtacgtcgtcgataaagaggtcgagaataacattctggttgtcgcgcagggtcatgagcatccacgtctgatgt

SEQ ID NO: 119733 - DNA, 75 bp, synthetic construct
  source 1..75: mol_type = other DNA
ggtgatgagattggcgagcaccaggggctgatgtatcacaccctcggacagcgtaaaggcctgggcatcggtggc

SEQ ID NO: 119734 - DNA, 75 bp, synthetic construct
  source 1..75: mol_type = other DNA
gcgtggcctggacagcaataaagaccagagctacttcctttatacgctcagccatgagcaaattgcgcaaagcct

SEQ ID NO: 119735 - DNA, 75 bp, synthetic construct
  source 1..75: mol_type = other DNA
agccaaaatgcgaccgggtgatgtgttaggtgcgttgacgggcgatattggtcttgatggcgcagatattggcaa

SEQ ID NO: 119736 - DNA, 75 bp, synthetic construct
  source 1..75: mol_type = other DNA
accgtggcatttgaagagaagtatggctcccagctggagctgatatttcgttttatcgatcgtgcgctggcaaca

SEQ ID NO: 119737 - DNA, 75 bp, synthetic construct
  source 1..75: mol_type = other DNA
gtgctgtgcccgacccgtgaactggcggatcaggttgccggagagttgcgccggctggcgcgttttctgccgaat

SEQ ID NO: 119738 - DNA, 75 bp, synthetic construct
  source 1..75: mol_type = other DNA
ggatcagccgcgtcagcatattgttgattcgctttatgctggtgatgacgccggtggtgctgctcatcaacggtt

SEQ ID NO: 119739 - DNA, 75 bp, synthetic construct
  source 1..75: mol_type = other DNA
gaaaaaggtgctggcgctgaaagtggatcctgagtcgccggagtcttttatgttacgcccaaaacgtcgccgctg

SEQ ID NO: 119740 - DNA, 75 bp, synthetic construct
  source 1..75: mol_type = other DNA
tggcagggccggaaatatgaggtgtatcctgttcagggagcagggtttgaaatgaaaggcaagggaggcagcgcc

SEQ ID NO: 119741 - DNA, 75 bp, synthetic construct
  source 1..75: mol_type = other DNA
gaacgaaaaaggtgaagcagtcacctggcaggggcggcagtatcaggcctatcccattcagggaagtggatttga

SEQ ID NO: 119742 - DNA, 75 bp, synthetic construct
  source 1..75: mol_type = other DNA
gtgaccgctttttctaccctgaacgttttgcctcccgcccagctcactaaccttaatgagttgggttatttaacc

SEQ ID NO: 119743 - DNA, 75 bp, synthetic construct
  source 1..75: mol_type = other DNA
tggtcagcattaccgttgatccggagtcaccggaatcattcatgaagcggcctaaacgtcgccgctgggtgaatg

SEQ ID NO: 119744 - DNA, 75 bp, synthetic construct
  source 1..75: mol_type = other DNA
tgtgcgtgctgtggtaagccagctgacgatccccatcacctgataggtcatggtcagggcggaatgggaacaaag

SEQ ID NO: 119745 - DNA, 75 bp, synthetic construct
  source 1..75: mol_type = other DNA
atgctattcagaactttggcgcaatggatattctgtgcactgataaaaccggcaccctgacacaggataaaattg

SEQ ID NO: 119746 - DNA, 75 bp, synthetic construct
  source 1..75: mol_type = other DNA
gagagcgacatcgtaccgggagaacagacagccaccagcatactgaagcagcgcacaaaaaatattgtgctaccg

SEQ ID NO: 119747 - DNA, 75 bp, synthetic construct
  source 1..75: mol_type = other DNA
cagcgccagaaaccacaacgggaagagatgcccgtatacacgcgctgggtaaaaacgcagaaatgcatgacgtgt

SEQ ID NO: 119748 - DNA, 75 bp, synthetic construct
  source 1..75: mol_type = other DNA
atgggcaccaccgtggtgagcggcacggcacaagcaatggtgattgctacaggtgccaatacctggtttggtcaa

SEQ ID NO: 119749 - DNA, 75 bp, synthetic construct
  source 1..75: mol_type = other DNA
tggtgtctgccgtccggagtcgttcctgccgttcgccagccgttggcggaagataaatcattactcccatttttc

SEQ ID NO: 119750 - DNA, 75 bp, synthetic construct
  source 1..75: mol_type = other DNA
gaccgccaccagcatactgaaacagcgcacaaaaaatcttgtgctgccgacccaccagcaacagaaccgaccaca

SEQ ID NO: 119751 - DNA, 75 bp, synthetic construct
  source 1..75: mol_type = other DNA
ctgctgggctgttgtaaataatgtggtggatgccatgaccgaaaatatggcgcgtcgaatcctgaaacttccggg

SEQ ID NO: 119752 - DNA, 75 bp, synthetic construct
  source 1..75: mol_type = other DNA
actattaaatggtcaatcgcttggcaacgttctgctggcggggggcttaggcgcagataactgcgtggaagcggc

SEQ ID NO: 119753 - DNA, 75 bp, synthetic construct
  source 1..75: mol_type = other DNA
gttcgcagtcaccgatgcgcagggcatcattattcttcatagcgaccccgataaggtcgggcgtgcgctctattc

SEQ ID NO: 119754 - DNA, 75 bp, synthetic construct
  source 1..75: mol_type = other DNA
gtcgccgctgggtaaatgataaatacacacgctgggtaaagacacagccgtgtgcgtgttgtggtaagccagcgg

SEQ ID NO: 119755 - DNA, 75 bp, synthetic construct
  source 1..75: mol_type = other DNA
tggctgttgccaatcctgagctgactatagctcacccggaaaccggaaacccgacaaaactttctgatctcctgg

SEQ ID NO: 119756 - DNA, 75 bp, synthetic construct
  source 1..75: mol_type = other DNA
aagggcagcagtgcctgtccgtcgctgacggtgtcgaatctgttcggtctggtcaccggtatggcggaggacctg

SEQ ID NO: 119757 - DNA, 75 bp, synthetic construct
  source 1..75: mol_type = other DNA
gaaaaaggtaatgtgcttatccgcgctctggagtcgggaagccgcgtagggatggggatgcgaatgcaccatgta

SEQ ID NO: 119758 - DNA, 75 bp, synthetic construct
  source 1..75: mol_type = other DNA
gtcgccgttggataaatgagaaatacacacgctgggtaaagacacagccgtgtgcgtgttgtggtcagccagccg

SEQ ID NO: 119759 - DNA, 75 bp, synthetic construct
  source 1..75: mol_type = other DNA
agaaaaagtacggctctcagattgagttaatttttcgttttcttgatcacgcctttgcaaccggcgtgctcgggt

SEQ ID NO: 119760 - DNA, 75 bp, synthetic construct
  source 1..75: mol_type = other DNA
caccacaggaaaagacggtggtcagcattgccgttgatcctgagtctccggaatcttttatgaaacgacctaaac

SEQ ID NO: 119761 - DNA, 75 bp, synthetic construct
  source 1..75: mol_type = other DNA
cacacgctgggttaagacgcagccgtgcgcatgttgtggaaagccagctgatgatccgcatcacctgattggcca

SEQ ID NO: 119762 - DNA, 75 bp, synthetic construct
  source 1..75: mol_type = other DNA
gattaaccactcattacagctggtaagccaggatgcaaacagccgggagatccagttacgctttactgccaacga

SEQ ID NO: 119763 - DNA, 75 bp, synthetic construct
  source 1..75: mol_type = other DNA
tggcaggggcggcagtatcaggcataccccattcaggggacgggatttgaactgaatggcaagggcagtgctgcc

SEQ ID NO: 119764 - DNA, 75 bp, synthetic construct
  source 1..75: mol_type = other DNA
cggtacagggtggtgagcggtattttttctgcaatgagctgaatgaaaaaggggaggcggttacctggcaggggc

SEQ ID NO: 119765 - DNA, 75 bp, synthetic construct
  source 1..75: mol_type = other DNA
cgttgcgggcaatccggaggcggacccggagcaggagctgagtgaccgctgggtggtggagcagatgtcagagct

SEQ ID NO: 119766 - DNA, 75 bp, synthetic construct
  source 1..75: mol_type = other DNA
acgcaaagagaagttggtggcgttggggcatctggcagcaggtgtcgcccacgaaatccgtaacccgctttcatc

SEQ ID NO: 119767 - DNA, 75 bp, synthetic construct
  source 1..75: mol_type = other DNA
cgcgcgcaggcgtttggctttaaccgttcaacgggagactggcgggcgctggtggccgacccggccattgatgta

SEQ ID NO: 119768 - DNA, 75 bp, synthetic construct
  source 1..75: mol_type = other DNA
tgtcggtgatggccagccccaacggtaacctggatgaagtgcatgaaggtctgctgctgcaggcggtcagggcat

SEQ ID NO: 119769 - DNA, 75 bp, synthetic construct
  source 1..75: mol_type = other DNA
gtgctggcactgcgacaaccagttgcgggagcagacatctgattcactggagcaacttgctcagcagaatctggc

SEQ ID NO: 119770 - DNA, 75 bp, synthetic construct
  source 1..75: mol_type = other DNA
agccggaggactggttgcgcgaagtgatcgtgaagctcaatgactggccgtcgaaccgtgtgcatgaactgctgc

SEQ ID NO: 119771 - DNA, 75 bp, synthetic construct
  source 1..75: mol_type = other DNA
atcaggatgattcatcgtttgagtgcgaactggatgacattgaggtaataggccgcgcactgaaaatcattaaga

SEQ ID NO: 119772 - DNA, 75 bp, synthetic construct
  source 1..75: mol_type = other DNA
gggagttatcgctggctgaattatcctggtgggcagtctgcaatcaggtagcggacgcactgccggaggcagtat

SEQ ID NO: 119773 - DNA, 75 bp, synthetic construct
  source 1..75: mol_type = other DNA
cttgtatctcctgaaattgacaaggcaactctcaacggaggtttgctgatcgatgctggaaaagcaatcattgat

SEQ ID NO: 119774 - DNA, 75 bp, synthetic construct
  source 1..75: mol_type = other DNA
tttccatccccgcgtttgcccgactggtgcgcggcaacacgctggtgttgaaacagcaaacctttattgagtcag

SEQ ID NO: 119775 - DNA, 75 bp, synthetic construct
  source 1..75: mol_type = other DNA
aagggcagcagtgcctggccgtcgctgacggtgtcgaatctgttaggtctggtcaccggaatggcggaggacctg

SEQ ID NO: 119776 - DNA, 75 bp, synthetic construct
  source 1..75: mol_type = other DNA
aagggcagcagtgcctgcccgtcgctgacggtgtcgaatctgttgggtctggtcaccgggatggcggaggacctg

SEQ ID NO: 119777 - DNA, 75 bp, synthetic construct
  source 1..75: mol_type = other DNA
cgcccgtcgctgacggtgtcgaatctgttcggtctggtcaccggaatggcggaggacctgcagagcctggtgggg

SEQ ID NO: 119778 - DNA, 75 bp, synthetic construct
  source 1..75: mol_type = other DNA
atgcggccatgtttcgttcttccgctgctactccagcaccagatactccctcagaaccagctgaaccgccacttt

SEQ ID NO: 119779 - DNA, 75 bp, synthetic construct
  source 1..75: mol_type = other DNA
gcgaatcttcggtagcgataaggatatgacggctgagaagaaatcatttattgctgaacatcgtcattttacgca

SEQ ID NO: 119780 - DNA, 75 bp, synthetic construct
  source 1..75: mol_type = other DNA
gtggaaaaagaaaattattatcatcgtgatagctatgtacagtctgttatatcgaatatgacagcaaaatcattg

SEQ ID NO: 119781 - DNA, 75 bp, synthetic construct
  source 1..75: mol_type = other DNA
gttagccactgtgtgcggcgttgactggcagcaggagccttacgaacaactggctgtgattgccaacgttgcgac

SEQ ID NO: 119782 - DNA, 75 bp, synthetic construct
  source 1..75: mol_type = other DNA
acattgataatcaggcgctgataaccccactgaccccagagcaaaatcagcaacgcttcaatttccgccgtctgc

SEQ ID NO: 119783 - DNA, 75 bp, synthetic construct
  source 1..75: mol_type = other DNA
gctggcattaacccgcgccgccagaccgattacccatcgcactgtgctggtgggcaatgcggcgcaaactctgca

SEQ ID NO: 119784 - DNA, 75 bp, synthetic construct
  source 1..75: mol_type = other DNA
ttcgataaacccaccacggatatccgtaaggacagatgcagcaagtgcatgcgcgggtgtgaactgcgcaggaat

SEQ ID NO: 119785 - DNA, 75 bp, synthetic construct
  source 1..75: mol_type = other DNA
tggcggatgagttcgataaacccaccacggatatccgtaaggacagatgcagcaagtgcatgcgcgggtgtgaac

SEQ ID NO: 119786 - DNA, 75 bp, synthetic construct
  source 1..75: mol_type = other DNA
cattgatcgtaatcgtgaggctcaggcccgtagcgttgagcaggttaaccgctacagaacggctttggctttagc

SEQ ID NO: 119787 - DNA, 75 bp, synthetic construct
  source 1..75: mol_type = other DNA
tgggggccacggtggtccgccgccgggtgtatgcccgttttctggatgcggtgaattttgtcgcgggcaatccgg

SEQ ID NO: 119788 - DNA, 75 bp, synthetic construct
  source 1..75: mol_type = other DNA
tgctgacggccatgacggcctcgtttgtgctggccacaccgaccgagacggacggggcgctgtttcccggtcgta

SEQ ID NO: 119789 - DNA, 75 bp, synthetic construct
  source 1..75: mol_type = other DNA
cacgcgctgggtaaagacacagccgtgtacatgttgtggtaagccagcagacgatccccatcacctgattggtca

SEQ ID NO: 119790 - DNA, 75 bp, synthetic construct
  source 1..75: mol_type = other DNA
aacagctgccgcagtgaaggagtgttacatcaatgccttcaactggatggccgagcagctaaaccggcgcatggc

SEQ ID NO: 119791 - DNA, 75 bp, synthetic construct
  source 1..75: mol_type = other DNA
cctcacgcccaccagcaacagaacccaccacaggaaaagacggtggtcagcattgccgttgatccggagtctcct

SEQ ID NO: 119792 - DNA, 75 bp, synthetic construct
  source 1..75: mol_type = other DNA
cgtgctgaccaccgggtacggtgaaatacgcgccgaccagctgctggtcgccactggcagggcaccgaacacgcg

SEQ ID NO: 119793 - DNA, 75 bp, synthetic construct
  source 1..75: mol_type = other DNA
aaactggagttcggcaggagtaagaatttacagtacattaattagtgcttttaaatggatgtctccgcttccgtt

SEQ ID NO: 119794 - DNA, 75 bp, synthetic construct
  source 1..75: mol_type = other DNA
gttacggtaccggcgcaatggtgttgtgctggcactgcgacaaccagctgcgtgaccagacatccgaatcactcg

SEQ ID NO: 119795 - DNA, 75 bp, synthetic construct
  source 1..75: mol_type = other DNA
aatgaccgggttgatgcttatatgctggcttgctatggcgcgcttaaagcaccggagccatggcttcctccaccg

SEQ ID NO: 119796 - DNA, 75 bp, synthetic construct
  source 1..75: mol_type = other DNA
ctattttcgccttatctggcgtgatttttacatgcattttttcttataaagtgagaaaactataccctgacgatt

SEQ ID NO: 119797 - DNA, 75 bp, synthetic construct
  source 1..75: mol_type = other DNA
gtgctggccacaccgacggaaacggatggcgccgtttttccggggcgcatcatgctggccaacacctgcacctgg

SEQ ID NO: 119798 - DNA, 75 bp, synthetic construct
  source 1..75: mol_type = other DNA
ggctgacagcactcgcgaaaaaaacaggctggaaaaatacctggcaacagacacaccttctgttatagctgaatc

SEQ ID NO: 119799 - DNA, 75 bp, synthetic construct
  source 1..75: mol_type = other DNA
catcacagtgaaaccgtcatacatcgctacggtaccggcgcgatggtattgtgctggcactgcgacaaccagctg

SEQ ID NO: 119800 - DNA, 75 bp, synthetic construct
  source 1..75: mol_type = other DNA
acgcctgcggtagagtcagctatagagaagttcgaacacgactggaatgccgcatttggcactactcatctctaa

SEQ ID NO: 119801 - DNA, 75 bp, synthetic construct
  source 1..75: mol_type = other DNA
acgctccgggcgcaatccgtctgtgctggcactgtgataaccagctgcgcgatcagttcacggaacggctggaat

SEQ ID NO: 119802 - DNA, 75 bp, synthetic construct
  source 1..75: mol_type = other DNA
agcatggatgattgacgtcatacgccatgcaatgaatggcacacaggagcgggaattatcgctggctgaattatc

SEQ ID NO: 119803 - DNA, 75 bp, synthetic construct
  source 1..75: mol_type = other DNA
accccattcaggggagcggttttgaactgaatggcaaaggggccagcgccagaccagtgctgagcgtgtccaatc

SEQ ID NO: 119804 - DNA, 75 bp, synthetic construct
  source 1..75: mol_type = other DNA
acgctgcactgtccggatcgcgttgctaacgtttctcgtactcaggataacgttgccgtaacgctggagagtggc

SEQ ID NO: 119805 - DNA, 75 bp, synthetic construct
  source 1..75: mol_type = other DNA
cataactgttgatccggagtctcctgctcaatacctcagacgccagaaaccacaacgtgaagagatgccgatata

SEQ ID NO: 119806 - DNA, 75 bp, synthetic construct
  source 1..75: mol_type = other DNA
accgtggcatttgaagagaagtatggttcccaactggagctgatatttcattttatcgatcgcgcactggcgatt

SEQ ID NO: 119807 - DNA, 75 bp, synthetic construct
  source 1..75: mol_type = other DNA
ttgctgtctgtcggcttccccggatattcacgctttctcttattattctgggcgcagcgttcagatacagccagg

SEQ ID NO: 119808 - DNA, 75 bp, synthetic construct
  source 1..75: mol_type = other DNA
aagccgtgcagcgaatgccttcgatgtcgaaggcggaaccgcagcaatgttagttagtgtagcaatgaatgacga

SEQ ID NO: 119809 - DNA, 75 bp, synthetic construct
  source 1..75: mol_type = other DNA
gctatgcagccatgagcgataacaccttcggtgcgccaaaaaatctgctgctggcgggcgtggtattagttttaa

SEQ ID NO: 119810 - DNA, 75 bp, synthetic construct
  source 1..75: mol_type = other DNA
ctcaacaacgtcacgattaatcagaactgtcggattctgggaaaactgtcagctaaccagattgaaggtgatatt

SEQ ID NO: 119811 - DNA, 75 bp, synthetic construct
  source 1..75: mol_type = other DNA
tatggatcgtatgcgcctgggtaacagtctgtgggtgatcttcaactgggacagttatcgtagtcgggtaacggg

SEQ ID NO: 119812 - DNA, 75 bp, synthetic construct
  source 1..75: mol_type = other DNA
gagctggcagagaatggcatcatcgttggtcgtgaccgactggcacgtcttcgtaaggagctaaggctacgctgt

SEQ ID NO: 119813 - DNA, 75 bp, synthetic construct
  source 1..75: mol_type = other DNA
tttaagagattatgcaaaattaaaaatgaaagaactattttcgatgttagatgatgatggttataaaaaaatcat

SEQ ID NO: 119814 - DNA, 75 bp, synthetic construct
  source 1..75: mol_type = other DNA
ctcttgataacaaactggcagataatagaataaatataacaccaatggggataaagatacatgaaatagtcaatg

SEQ ID NO: 119815 - DNA, 75 bp, synthetic construct
  source 1..75: mol_type = other DNA
atttatttttgtctttacctataaatcaaaatttaaccctacctttcatgtatcgctacttcgagatgttatatg

SEQ ID NO: 119816 - DNA, 75 bp, synthetic construct
  source 1..75: mol_type = other DNA
cggcagattatcattcccccggtgctgtttcgcgggacgaaacaccagaatttcaacagcccgaatcagcagtcg

SEQ ID NO: 119817 - DNA, 75 bp, synthetic construct
  source 1..75: mol_type = other DNA
gccacggtgaacctgattaacggcagcggtaggccggtgagcgtggccatcactgcacaccccgcgccggaccgg

SEQ ID NO: 119818 - DNA, 75 bp, synthetic construct
  source 1..75: mol_type = other DNA
cacatttagcggaagaaatgaatgaagtgatattaaaaatacaaaacatacaaaatgaaactatagaatttaagg

SEQ ID NO: 119819 - DNA, 75 bp, synthetic construct
  source 1..75: mol_type = other DNA
ggaagccatactgcgctacgggcgcaacctgctgaagatggatgcgttcggttgcaccagtcgcggtcaggccca

SEQ ID NO: 119820 - DNA, 75 bp, synthetic construct
  source 1..75: mol_type = other DNA
agaagccattgtggataacggggccagctttgagccgcagtcaggcaccctgaacagtgttatccctccggcagt

SEQ ID NO: 119821 - DNA, 75 bp, synthetic construct
  source 1..75: mol_type = other DNA
aggcattaggtttaccagcacaggacacacaacacattattagtatgtcgctgtttgcctctggtgtggcatcga

SEQ ID NO: 119822 - DNA, 75 bp, synthetic construct
  source 1..75: mol_type = other DNA
acttcttttgatggctgtcgttcattgatatatttacctagcggtgatgttttttatatttcagatatctataaa

SEQ ID NO: 119823 - DNA, 75 bp, synthetic construct
  source 1..75: mol_type = other DNA
gtgtgaatgcgaactccgggacgctcaacaacgtcacgattaatgagaactgtcagattaaggggaaactgtcag

SEQ ID NO: 119824 - DNA, 75 bp, synthetic construct
  source 1..75: mol_type = other DNA
gacaggggacgctgacactgacattcaccgtatcttcatcaggagcgaataactggacaccaacaaccagtatca

SEQ ID NO: 119825 - DNA, 75 bp, synthetic construct
  source 1..75: mol_type = other DNA
gtggaaaagaaccattaacaattattattcccgctattgaacatggtatgcttggctctaatctacatatgattg

SEQ ID NO: 119826 - DNA, 75 bp, synthetic construct
  source 1..75: mol_type = other DNA
actgggcgtggaagtgacgaaggcaaagccggtgacgcgcaccattacatccgcgaacattgaccgcctgcgggt

SEQ ID NO: 119827 - DNA, 75 bp, synthetic construct
  source 1..75: mol_type = other DNA
cgactgtttgcggtgagtatcacgtcatccggcaaccccccgacgttttccctgacgccggaagggaagctgaca

SEQ ID NO: 119828 - DNA, 75 bp, synthetic construct
  source 1..75: mol_type = other DNA
atatttccttgctaaagagcaggaggaagaatgtaactgccctgtctgtcagctttcccgacaaattaatttaat

SEQ ID NO: 119829 - DNA, 75 bp, synthetic construct
  source 1..75: mol_type = other DNA
gtatcttcatcaggagcgaataactggacaccaacaaccagtatcagcgatctgctggttgtggtgatgaagaaa

SEQ ID NO: 119830 - DNA, 75 bp, synthetic construct
  source 1..75: mol_type = other DNA
aattcaatggaattatcagaatcacaattagctaatgggtattctaaccgccaatggccttctcagattccagtt

SEQ ID NO: 119831 - DNA, 75 bp, synthetic construct
  source 1..75: mol_type = other DNA
tcgcctgttccgctgtgtctccatccgggaaaacacggacggcacctttgccatcacggcggtgcagcacgtacc

SEQ ID NO: 119832 - DNA, 75 bp, synthetic construct
  source 1..75: mol_type = other DNA
tgatagtgacatatcgaagaaaaaactttcttgataaagtactatcagcccttctcaatcaaacagttcctttac

SEQ ID NO: 119833 - DNA, 75 bp, synthetic construct
  source 1..75: mol_type = other DNA
ttttgctaaaaatgagatgagaacaaaaataaaatttgggaaactaattctgttcgcatccctggcaacgcagtt

SEQ ID NO: 119834 - DNA, 75 bp, synthetic construct
  source 1..75: mol_type = other DNA
ccacaaaggctgtggaagctgcgtgcggcggtgttcggtggtggcgcattgcagatggtgatttgcggcggcctg

SEQ ID NO: 119835 - DNA, 75 bp, synthetic construct
  source 1..75: mol_type = other DNA
atggtactttctgattgttattcactggctaacgagcagtctggacatgcccgtctcggtgatccgcgtcgtaca

SEQ ID NO: 119836 - DNA, 75 bp, synthetic construct
  source 1..75: mol_type = other DNA
tttgattccttattaaatcaacatgatgagttatgtcttcttgcaaaacaaattatcgataaacacaaaattaat

SEQ ID NO: 119837 - DNA, 75 bp, synthetic construct
  source 1..75: mol_type = other DNA
ttagccttttcagcaatactcatatatgccttaagaactgctaaagaaccttatattttaatcttgcttttttca

SEQ ID NO: 119838 - DNA, 75 bp, synthetic construct
  source 1..75: mol_type = other DNA
ccagcgcacaaggcaagcccccgctggatattcacgttctgccgcgtgataagcactggcaaaagctgctgatgg

SEQ ID NO: 119839 - DNA, 75 bp, synthetic construct
  source 1..75: mol_type = other DNA
tcaacaatgtcacgattaaccagaactgtacgattaagggcatgctggaggcgacccaggtcagaggggatttcg

SEQ ID NO: 119840 - DNA, 75 bp, synthetic construct
  source 1..75: mol_type = other DNA
atgtcgttttgttggaatgaaattaactctggtgtcaagtctttaattctcatgttatgtatgttgtctttaatg

SEQ ID NO: 119841 - DNA, 75 bp, synthetic construct
  source 1..75: mol_type = other DNA
aatccgactttagacataaaacaacattatatacaattaacttcatgcttagcttatgtgctgtcatagtaactg

SEQ ID NO: 119842 - DNA, 75 bp, synthetic construct
  source 1..75: mol_type = other DNA
atgtttgttggtcagggcgatcagatattcatgaatgaagtgttcctgaaatatctgacggctcccaccattacc

SEQ ID NO: 119843 - DNA, 75 bp, synthetic construct
  source 1..75: mol_type = other DNA
gcaaatgggccgcagtgcctttgcggtgctgctgttccaggatatcgcggcgatcccgctggtggcgatgatccc

SEQ ID NO: 119844 - DNA, 75 bp, synthetic construct
  source 1..75: mol_type = other DNA
aaaggtaattttaagcaatctttaattacagtagatgctttaaaaagcgcacgatcgttgatgaataatgataaa

SEQ ID NO: 119845 - DNA, 75 bp, synthetic construct
  source 1..75: mol_type = other DNA
aatatctgacggctcccaccattaccagcggcggtaatcctccggcattttccctgacaccggacgggcggctga

SEQ ID NO: 119846 - DNA, 75 bp, synthetic construct
  source 1..75: mol_type = other DNA
aagccgtgcggcaaatgcttttgatgtggacggcgaaacggcagccatgctggtgagtgtggcgatgaatgacga

SEQ ID NO: 119847 - DNA, 75 bp, synthetic construct
  source 1..75: mol_type = other DNA
gtgaagtcaccctcccggaaaagggcacatccacggtgaatctgataaacggcagtggtaagccggtgagtgtgg

SEQ ID NO: 119848 - DNA, 75 bp, synthetic construct
  source 1..75: mol_type = other DNA
tcaaaacagcgaactgatttaccgtcttgaagatcgtccgccgcttcctcaaaccctgtttgccgcctgtcagca

SEQ ID NO: 119849 - DNA, 75 bp, synthetic construct
  source 1..75: mol_type = other DNA
aggcgctgggtttaccggcacaagacacgcaacacattattagtatgtcgctgtttgcctccggtgtggcatcga

SEQ ID NO: 119850 - DNA, 75 bp, synthetic construct
  source 1..75: mol_type = other DNA
atctggctgagcgatagcgccgaaggcaatctgcgtagcgcgattgcggtaagccgtgcggcaaatgcttttgat

SEQ ID NO: 119851 - DNA, 75 bp, synthetic construct
  source 1..75: mol_type = other DNA
tcagggacctgtcacgcctgggctggacggatgaacgcattggtacagagctggggatggaccaggatgaagtgc

SEQ ID NO: 119852 - DNA, 75 bp, synthetic construct
  source 1..75: mol_type = other DNA
gctacggcatgggaaaacgcctgggggccgcggatgtggacaagtgggcgctgtatgccatcgggcagtactgtg

SEQ ID NO: 119853 - DNA, 75 bp, synthetic construct
  source 1..75: mol_type = other DNA
ggacaccaacaaccagtatcagcgatctgctggttgttgtgatgaagaaagccaccgcaggcatcagtatcagct

SEQ ID NO: 119854 - DNA, 75 bp, synthetic construct
  source 1..75: mol_type = other DNA
gcgggcgataaacagctatggccagcagggtgaacctgccaccaccaccttccggattgccgcaccggcagcacc

SEQ ID NO: 119855 - DNA, 75 bp, synthetic construct
  source 1..75: mol_type = other DNA
ctttaatgactttgtctttatgggatgatgttgcaacaaagtttcttcatgcagctggaattatatctgcattgt

SEQ ID NO: 119856 - DNA, 75 bp, synthetic construct
  source 1..75: mol_type = other DNA
gcctgagcgcactgtacatgctgaaggtgcagaaaacgaaaaacggtattccgtatgttgccggtattggtgcag

SEQ ID NO: 119857 - DNA, 75 bp, synthetic construct
  source 1..75: mol_type = other DNA
ccggattaacgcacctgcaaaacccgccaccattgagctgacgccggggtattttcagataacggcggtcccgcg

SEQ ID NO: 119858 - DNA, 75 bp, synthetic construct
  source 1..75: mol_type = other DNA
ccatcacagaaacccgcaatgaaatcacacagacggtcagtaaaacgctggaggaccagagcgccaccatacagc

SEQ ID NO: 119859 - DNA, 75 bp, synthetic construct
  source 1..75: mol_type = other DNA
tgtggcgcaggggaatcagctgttcatgaacgacgtgttcctgaagcgtctgtttgcggtgagtatcacgtcatc

SEQ ID NO: 119860 - DNA, 75 bp, synthetic construct
  source 1..75: mol_type = other DNA
accgacccgcagaacggctggcagacctccacggaactggtggaagacccggaagccatactgcgctacgggcgc

SEQ ID NO: 119861 - DNA, 75 bp, synthetic construct
  source 1..75: mol_type = other DNA
gattatcctcttcgccctggcgacggtcttgctggcaagcgtgttgtcattcttctggtatcgccgctatctgcg

SEQ ID NO: 119862 - DNA, 75 bp, synthetic construct
  source 1..75: mol_type = other DNA
gcggtaattgctatatcgccttatgaagtagctaaaggtaaagttttggttctaacaccaaacttgacacttgca

SEQ ID NO: 119863 - DNA, 75 bp, synthetic construct
  source 1..75: mol_type = other DNA
aattaacagttatggccagcagggcgaaccggccaccaccaccttccggattaacgcgccagcaaaacccgccac

SEQ ID NO: 119864 - DNA, 75 bp, synthetic construct
  source 1..75: mol_type = other DNA
ttattctcgttggtaatctgggccaggacccggaagtacgctacatgccaaatggtggcgcagttgccaacatta

SEQ ID NO: 119865 - DNA, 75 bp, synthetic construct
  source 1..75: mol_type = other DNA
ctcttgaatccggctcgcgcgtcggtatggggatgcgcatgcatcatgcgcagcagcaggccttactggaagaaa

SEQ ID NO: 119866 - DNA, 75 bp, synthetic construct
  source 1..75: mol_type = other DNA
ccagcgcgcgcattgccgggtgattgtcgccccgaaacgctgttacgaaccgcaggcgttgctgaataacaaaag

SEQ ID NO: 119867 - DNA, 75 bp, synthetic construct
  source 1..75: mol_type = other DNA
gatatttactcctcatgccgtctgatagtgcggaaaaacggtgctgaaatttataaccgtaccgcgctggataat

SEQ ID NO: 119868 - DNA, 75 bp, synthetic construct
  source 1..75: mol_type = other DNA
ttctgcttataaactcggaaccgaaaatcgagaacgtgctgaattattcttaggtgcgtttgttgcattttctag

SEQ ID NO: 119869 - DNA, 75 bp, synthetic construct
  source 1..75: mol_type = other DNA
ccatgcagatgctgggtggtcgccagggcggcggcgcaccggcaggcggtaacgtcggtggcggtcagccgcagg

SEQ ID NO: 119870 - DNA, 75 bp, synthetic construct
  source 1..75: mol_type = other DNA
tgaaatgattcttagtattgcgtcggactatgcggaatatgtggcagagacgcgttacagaagaaaattcacgga

SEQ ID NO: 119871 - DNA, 75 bp, synthetic construct
  source 1..75: mol_type = other DNA
tatggcggagtggtgggtgtgtctgacgatgccgcagaaagaggtggaggcgattgcccggtttaagactctcag

SEQ ID NO: 119872 - DNA, 75 bp, synthetic construct
  source 1..75: mol_type = other DNA
tgccgcaccggcagcgccgtcacggattgagctgacaccgggctattttcagataacagcggtcccgcgtcttgc

SEQ ID NO: 119873 - DNA, 75 bp, synthetic construct
  source 1..75: mol_type = other DNA
cagaaccacttatcagcaactctcacattgcgctttgcgaagatgccgccaaccatatcggacgtgtgctgcgta

SEQ ID NO: 119874 - DNA, 75 bp, synthetic construct
  source 1..75: mol_type = other DNA
cctgctactcagccgctggaaagccaccgatctgttcctgaaagatattcaggtgctggtttctgaactgtcgat

SEQ ID NO: 119875 - DNA, 75 bp, synthetic construct
  source 1..75: mol_type = other DNA
ttgtcatactgttagcctggtttctctcaggtaaatactttattgagtcgcctcgatggttggcggggaaaggac

SEQ ID NO: 119876 - DNA, 75 bp, synthetic construct
  source 1..75: mol_type = other DNA
ttcttccgaagcagacaaaatgaacaacatgatactttggagaacagtgttatagatgcaattaattgtgctgca

SEQ ID NO: 119877 - DNA, 75 bp, synthetic construct
  source 1..75: mol_type = other DNA
gatggtggtggagggcagcggcgaatatagctggctgctgaccaccgaagaaggaacgcagtacaaaggccatgt

SEQ ID NO: 119878 - DNA, 75 bp, synthetic construct
  source 1..75: mol_type = other DNA
aacggtgaatgctatccgtcaggttcccctacatccacgactgatcgaactagggctacttgagtatgtggatgc

SEQ ID NO: 119879 - DNA, 75 bp, synthetic construct
  source 1..75: mol_type = other DNA
tgtttcatctgatggcaaataaatgccatcttgaatcaataaccattcctgaacttgatttcataatcgaaggtg

SEQ ID NO: 119880 - DNA, 75 bp, synthetic construct
  source 1..75: mol_type = other DNA
aatgcccggcaatctgtatttgatgcggcggaaatacaagatttccgacacgcgaatgttgatcgaaagggcgct

SEQ ID NO: 119881 - DNA, 75 bp, synthetic construct
  source 1..75: mol_type = other DNA
aatccaccgaccggcagacgccggttgatgacggccagtctgttcagtcagatgaaaccctgaccgcggtcgtga

SEQ ID NO: 119882 - DNA, 75 bp, synthetic construct
  source 1..75: mol_type = other DNA
gatgtggacaaatgggcgctgtatgtcatcggccagcattgcgatcagtcggtgccggacggttttggcggcaca

SEQ ID NO: 119883 - DNA, 75 bp, synthetic construct
  source 1..75: mol_type = other DNA
tcttatcgcgactgggccttaaccactcgtggcggtgtgcagttcgacctgcttgcaggcatgaatgataaggcg

SEQ ID NO: 119884 - DNA, 75 bp, synthetic construct
  source 1..75: mol_type = other DNA
cgttccagtggtctgccgccgggggaatacaccctgacggtcagggcgattaacagttatggccagcagggggaa

SEQ ID NO: 119885 - DNA, 75 bp, synthetic construct
  source 1..75: mol_type = other DNA
aaaactcgatcccaggttgaatgcatttatcgaagagaaaacgaaaacatctttgcttagtaagaggaagcaaat

SEQ ID NO: 119886 - DNA, 75 bp, synthetic construct
  source 1..75: mol_type = other DNA
gtgattgatgcgattggtgagggaccgatagaaggcccggtgaaaggcctgcagagtattctggtgaacaaaacc

SEQ ID NO: 119887 - DNA, 75 bp, synthetic construct
  source 1..75: mol_type = other DNA
cacgccgaaggtggtgaagggcgtgagcttcctgcttcgccttaccgtggcagcggacgacggcagtgagcggct

SEQ ID NO: 119888 - DNA, 75 bp, synthetic construct
  source 1..75: mol_type = other DNA
actgtcggattctgggaaaactgtcagctaaccagattgaaggtgatattgtcaaaacggtgggaaaagcctttc

SEQ ID NO: 119889 - DNA, 75 bp, synthetic construct
  source 1..75: mol_type = other DNA
tggaagaaggatttgaggaaagaatacacacgccggtaggcgttagatccctggtggaggactcgcatctgatga

SEQ ID NO: 119890 - DNA, 75 bp, synthetic construct
  source 1..75: mol_type = other DNA
aaaaaatggaagttttatcttgcataatccactttactctaactcattcccttctttatattcacatgaattatt

SEQ ID NO: 119891 - DNA, 75 bp, synthetic construct
  source 1..75: mol_type = other DNA
taatatgccgcgctgcaacaacgaaggtgcgccattgggagaagcacaacaggttatttttatcgctgttgatgc

SEQ ID NO: 119892 - DNA, 75 bp, synthetic construct
  source 1..75: mol_type = other DNA
acgtaacaagctctcaaatgaccatgcaggatctgcaaacgcatctcgattactgtgcggaacagttacgcaagc

SEQ ID NO: 119893 - DNA, 75 bp, synthetic construct
  source 1..75: mol_type = other DNA
tggcgcaggtgaaatgggacacgccgcgggtggtgaagggcgtgcgcttcagtctgcgcctgaccagcggaagcg

SEQ ID NO: 119894 - DNA, 75 bp, synthetic construct
  source 1..75: mol_type = other DNA
cgcctcgcagatttatgacgaaatcagcggcaccctgaccgggtttgaggatatcagtctggacaatttcaccac

SEQ ID NO: 119895 - DNA, 75 bp, synthetic construct
  source 1..75: mol_type = other DNA
atgattcatccaggttcttttttagataaagcaattaacaatacaagaggtaaaaatgttaatactaatattaaa

SEQ ID NO: 119896 - DNA, 75 bp, synthetic construct
  source 1..75: mol_type = other DNA
agttatagatatgcctgccggacaggggacgctgacactgacattcaccgtatcttcatcaggagcgaataactg

SEQ ID NO: 119897 - DNA, 75 bp, synthetic construct
  source 1..75: mol_type = other DNA
gcaatgatggtgaagggtatctggaatttttccgggaaaaaataggaaaactgcatctggctcaggggttgtggg

SEQ ID NO: 119898 - DNA, 75 bp, synthetic construct
  source 1..75: mol_type = other DNA
tgaagcgactgtttgcggtgagtatcacgtcatccggcaaccccccgacgttttccctgacgccggaagggaagc

SEQ ID NO: 119899 - DNA, 75 bp, synthetic construct
  source 1..75: mol_type = other DNA
gaactcaccaaacggctgatcgccggtcattttggcgaggcattgacggcggatgcgtggcgtaaggaccgttag

SEQ ID NO: 119900 - DNA, 75 bp, synthetic construct
  source 1..75: mol_type = other DNA
aaattctggattttccactgcgcctgaacaccgacctggaaccggaacagcgtcgcaaacagattattgaaacga

SEQ ID NO: 119901 - DNA, 75 bp, synthetic construct
  source 1..75: mol_type = other DNA
tcttatataaaagaaaacaaaaaacacttatctacggaagatgctgaagctttaagagattatgcaaaattaaaa

SEQ ID NO: 119902 - DNA, 75 bp, synthetic construct
  source 1..75: mol_type = other DNA
acatgctgaaggtgcagaaaacgaaaaacggcattccgtatgttgccggtattggtgcggggattgaggatgctg

SEQ ID NO: 119903 - DNA, 75 bp, synthetic construct
  source 1..75: mol_type = other DNA
actctaaatatatctggcccagacatgattatgcgacaaatgaaaaaatactataaatctctagggcgcataggt

SEQ ID NO: 119904 - DNA, 75 bp, synthetic construct
  source 1..75: mol_type = other DNA
agtgatgattaacgcttttggctatgctgttcagcaaatgatggttaatcactcaataaaagaaataatttcaat

SEQ ID NO: 119905 - DNA, 75 bp, synthetic construct
  source 1..75: mol_type = other DNA
acgctcaataatgtcaccattaacgagaactgtgtcatcagagggaaactgtctgcaaaccagattgaaggcgac

SEQ ID NO: 119906 - DNA, 75 bp, synthetic construct
  source 1..75: mol_type = other DNA
tgtacccgaaaaactacctacctccctatactatgaaatcgactcgcgagttttttttcatggatgggataataa

SEQ ID NO: 119907 - DNA, 75 bp, synthetic construct
  source 1..75: mol_type = other DNA
agaactgtgtcatcagagggaaactgtctgcaaaccagattgaaggcgacctggtgaagacggtggggaaagcct

SEQ ID NO: 119908 - DNA, 75 bp, synthetic construct
  source 1..75: mol_type = other DNA
cgtaattattttaagttctgatggtgcgcattctatcggtaaggataatttaagaaagttatatgtgcactcggc

SEQ ID NO: 119909 - DNA, 75 bp, synthetic construct
  source 1..75: mol_type = other DNA
caaagcaacaacaaaaagaaaggcaagaacaaaaaataagaataaatctcttcaggaattagatgagaaaaaaaa

SEQ ID NO: 119910 - DNA, 75 bp, synthetic construct
  source 1..75: mol_type = other DNA
gtgaacaggtactggaaatcgtcgcggaagaggcgaaaggcaagattaaattaatcgctcacgtaggttgcgtca

SEQ ID NO: 119911 - DNA, 75 bp, synthetic construct
  source 1..75: mol_type = other DNA
tggtggaaccggaaccaaaaagcatgcgtaatctgccatccggagtcgttcctgccgttcgccagtcgctggcgg

SEQ ID NO: 119912 - DNA, 75 bp, synthetic construct
  source 1..75: mol_type = other DNA
ttatgagttacatcgactgaaagaacatggcttaacgcgcggggcactcaacgattatcacagccgctataaact

SEQ ID NO: 119913 - DNA, 75 bp, synthetic construct
  source 1..75: mol_type = other DNA
atgaatcagcaacgatttgatgaaagcactctaatccgtatcttcgcgctttatgagttacatcgactgaaagaa

SEQ ID NO: 119914 - DNA, 75 bp, synthetic construct
  source 1..75: mol_type = other DNA
aaggatgttaatgagcgtgattttattgaacgttatttttctaatatgaacattaaaattcatacaaaaaaaggt

SEQ ID NO: 119915 - DNA, 75 bp, synthetic construct
  source 1..75: mol_type = other DNA
taatctgccgtccggggtcgttcctgccgttcgccagccgctgggggatgaaaaagcatttctgccctttttcag

SEQ ID NO: 119916 - DNA, 75 bp, synthetic construct
  source 1..75: mol_type = other DNA
ttgtatcaggtggtaaaaagatgccaaagaggcaaattccggggcatctggtaataaatttatgggatacgtcag

SEQ ID NO: 119917 - DNA, 75 bp, synthetic construct
  source 1..75: mol_type = other DNA
gcgactaaaggcggtcagccaccactattcagtggtagcgggatgtctgttcatgatgttgttcgccaggagatg

SEQ ID NO: 119918 - DNA, 75 bp, synthetic construct
  source 1..75: mol_type = other DNA
gtgagggaacacacccaggccagccaggtcgcgtatatcaatggtgaaggggacggcgaattcgtgctcaccacg

SEQ ID NO: 119919 - DNA, 75 bp, synthetic construct
  source 1..75: mol_type = other DNA
agcatgggtgattgacgtcatacgccatgcaatgaatggcacgcaggagcgggaattatcgctggctgaattatc

SEQ ID NO: 119920 - DNA, 75 bp, synthetic construct
  source 1..75: mol_type = other DNA
ttgatgatctctaaacaatggtttgagcctgccgattcccggcagatgcattactccacgctgctacaccagatt

SEQ ID NO: 119921 - DNA, 75 bp, synthetic construct
  source 1..75: mol_type = other DNA
caaagataaagctctggcggaagcagctgccctgcttatattaagggaaaagttcaatgccctctgggacaacag

SEQ ID NO: 119922 - DNA, 75 bp, synthetic construct
  source 1..75: mol_type = other DNA
ggctatagattaagtcgtgaaatacacaataatttaacaaacgattattatttagcactttcctctaccaaaggc

SEQ ID NO: 119923 - DNA, 75 bp, synthetic construct
  source 1..75: mol_type = other DNA
ggcaaattatctgactttttgcttgtcagttataacgtaccaagaacattgattattgcttgcttccatatcttt

SEQ ID NO: 119924 - DNA, 75 bp, synthetic construct
  source 1..75: mol_type = other DNA
gacctctatctgcaggatcgcaagctggcaggcattcttgtggagctgactggcaaaactggcgatgcggcgcaa

SEQ ID NO: 119925 - DNA, 75 bp, synthetic construct
  source 1..75: mol_type = other DNA
ctgccagtggcctcatggtgactaccaccacagtgaaaccgtcatacatcgttacggtaccggcgcaatggtatt

SEQ ID NO: 119926 - DNA, 75 bp, synthetic construct
  source 1..75: mol_type = other DNA
gctgggagcgtctgtgcggcctgccggatgaatgtattcccgcagggacacagacccttcgccagcgtcagcaac

SEQ ID NO: 119927 - DNA, 75 bp, synthetic construct
  source 1..75: mol_type = other DNA
ttgttctatggacataaattcatatggtgatatatcttataatttgttagtgcataaagaaaattcttcgagcga

SEQ ID NO: 119928 - DNA, 75 bp, synthetic construct
  source 1..75: mol_type = other DNA
tggttaacttctataccggagtcggaagttgccggaccctgcagatgaaggcgcattacagaaatcgtggtctgt

SEQ ID NO: 119929 - DNA, 75 bp, synthetic construct
  source 1..75: mol_type = other DNA
tcctcaacggtgcgcacaccgcgctggtgccggtggcgttccaggcagggctggataccgtaggtgaagcgatga

SEQ ID NO: 119930 - DNA, 75 bp, synthetic construct
  source 1..75: mol_type = other DNA
ccgttcatgctggcccctgaactggtcaatgacccgcgggccgtcacgctgcatatttcaccggatatcgatgaa

SEQ ID NO: 119931 - DNA, 75 bp, synthetic construct
  source 1..75: mol_type = other DNA
agtgaccttgttccttcggttcctgccaccagcatcatccaggataaggcgaaaaaggtgctggcgctgaaagtg

SEQ ID NO: 119932 - DNA, 75 bp, synthetic construct
  source 1..75: mol_type = other DNA
agtcccgtatatgctagatccgcagcttgttaatgatgaacgaatgattacattcaagttaacgcctgatattga

SEQ ID NO: 119933 - DNA, 75 bp, synthetic construct
  source 1..75: mol_type = other DNA
aatctttgcttccggcctgctggcgggcgctgatggtggtatcggtagtacctacaacatcatgggctggcgtta

SEQ ID NO: 119934 - DNA, 75 bp, synthetic construct
  source 1..75: mol_type = other DNA
atgaatcagcaacgatttgatgacagcactctaatccgtatcttcgcccttcatgagttacatcgactgaaatca

SEQ ID NO: 119935 - DNA, 75 bp, synthetic construct
  source 1..75: mol_type = other DNA
cgccagcgcttaattgttttgctttctcaccctgccaaccgacgtgaccacaccaacgttttgatgcacgttcag

SEQ ID NO: 119936 - DNA, 75 bp, synthetic construct
  source 1..75: mol_type = other DNA
agctgcgcctggacaaatatccgctcaacgtgctgattgttgacgatattaaaccgtataaagaacgcaaagtgg

SEQ ID NO: 119937 - DNA, 75 bp, synthetic construct
  source 1..75: mol_type = other DNA
cggtgaaaccctgcgttttaacccgtttgcgaacatcaccgatattgaccagtcagcggagcgtgtccgtgacca

SEQ ID NO: 119938 - DNA, 75 bp, synthetic construct
  source 1..75: mol_type = other DNA
cgttgtagtgatgtatttaggcggttatgtcgcaccaggggcaacgcaatttttagctggagccggtgtaggctt

SEQ ID NO: 119939 - DNA, 75 bp, synthetic construct
  source 1..75: mol_type = other DNA
ttcaatcaggacagaaaaaacaatatttagaacttcagcgtatcagagataatataagttataataatttctttt

SEQ ID NO: 119940 - DNA, 75 bp, synthetic construct
  source 1..75: mol_type = other DNA
taccggcatagatgagtctctctatgaaaagtatataatctttatcactcttaaggcaatccctcccctgaagta

SEQ ID NO: 119941 - DNA, 75 bp, synthetic construct
  source 1..75: mol_type = other DNA
gcgacaaagggtgggcagccgccgttatttggcggacaagggatgtccattcatgatgtcgtccgccaagaaatg

SEQ ID NO: 119942 - DNA, 75 bp, synthetic construct
  source 1..75: mol_type = other DNA
ccgcctgttctgccattgcggatattcagggcggctttggcattttatacatcagcccgcttaaggccctgatta

SEQ ID NO: 119943 - DNA, 75 bp, synthetic construct
  source 1..75: mol_type = other DNA
gcaaggacaaggtactgattttgtattaaccggcccgtgggaaattttaacctattggttgagtaccgtattaca

SEQ ID NO: 119944 - DNA, 75 bp, synthetic construct
  source 1..75: mol_type = other DNA
ggagctgcgttcaggtacagccaggaggagctcacatacagcctcctcaatgcatcactctggttcagcatgaca

SEQ ID NO: 119945 - DNA, 75 bp, synthetic construct
  source 1..75: mol_type = other DNA
tggtggagccggaaccaaaaagcatgcgagctctgccgtccggggttgtacctgccgttcaccagccgctggcgg

SEQ ID NO: 119946 - DNA, 75 bp, synthetic construct
  source 1..75: mol_type = other DNA
ggcaatttgctcatcaaaacctgtcagcatggatgattgacgtcatacgccacgcaatgaatggcacacaggagc

SEQ ID NO: 119947 - DNA, 75 bp, synthetic construct
  source 1..75: mol_type = other DNA
cagcgacgaacgagtgattcgtgctgctggtggcgctggcgcattgtctgattggttactgcgccatgttaaatc

SEQ ID NO: 119948 - DNA, 75 bp, synthetic construct
  source 1..75: mol_type = other DNA
gcgggcgaacgatgcggttaaccgctacaaattgctgaaaaaagatgcgcgtaccatcgccgcccagcaggtagc

SEQ ID NO: 119949 - DNA, 75 bp, synthetic construct
  source 1..75: mol_type = other DNA
tttttggctcacgttcatcagaaaattctaagacagatattgttgtgatgcttcaggttcgcaaagtaccaagat

SEQ ID NO: 119950 - DNA, 75 bp, synthetic construct
  source 1..75: mol_type = other DNA
tacagttcgctagtaaagcagaaaaactcaacagaagatgttgttttgataggaaaaatgatttcagatgaagtt

SEQ ID NO: 119951 - DNA, 75 bp, synthetic construct
  source 1..75: mol_type = other DNA
cttgctggatggctacggttcgccggatcgtaaaagcggaagtcttgctggatggctacggttcgccggatctca

SEQ ID NO: 119952 - DNA, 75 bp, synthetic construct
  source 1..75: mol_type = other DNA
atgaatcagaatctgctggtgacaaagcgcgacggtagcacagagcgcatcaatctcgacaaaatccatcgtgtt

SEQ ID NO: 119953 - DNA, 75 bp, synthetic construct
  source 1..75: mol_type = other DNA
taatctgccgtccggggtcgttcctgccgttcgccagccgctgggggatgataaatcatttctgccctttttcag

SEQ ID NO: 119954 - DNA, 75 bp, synthetic construct
  source 1..75: mol_type = other DNA
cgtgccggtatcggtatcaacgccgggcgtattcgtgcactgggtagcccgattcgcggcggcgaagcattccac

SEQ ID NO: 119955 - DNA, 75 bp, synthetic construct
  source 1..75: mol_type = other DNA
atctcagcaaacacgcgtttatcgcgttcctgggcgcactgctgtttttcgttgcagctgaacctgctctggcgt

SEQ ID NO: 119956 - DNA, 75 bp, synthetic construct
  source 1..75: mol_type = other DNA
gctggattatcaggattacccgatcccggccgccaaacgtggagcgatggggcgtcgtacgctgggtattggtgt

SEQ ID NO: 119957 - DNA, 75 bp, synthetic construct
  source 1..75: mol_type = other DNA
cgaaagagcaaggcgcgtgcccgtggtttaacgaaaccacttacgcgaaagggatcctgccgatcgatacctata

SEQ ID NO: 119958 - DNA, 75 bp, synthetic construct
  source 1..75: mol_type = other DNA
cgtacttctgttacaggaccatttgcatataccgcttccattatcggcctggtcggtgcaggcgcgatgttgatc

SEQ ID NO: 119959 - DNA, 75 bp, synthetic construct
  source 1..75: mol_type = other DNA
tttgagtttaaaaacaggttcaattgatgcaatttatacattactttcaactgataacagattttctgttgtatc

SEQ ID NO: 119960 - DNA, 75 bp, synthetic construct
  source 1..75: mol_type = other DNA
gtgtcaaatatgccagtatgaatatggggaccatgtattatcaaaaacctgatatatatctaggtagtaacaaaa

SEQ ID NO: 119961 - DNA, 75 bp, synthetic construct
  source 1..75: mol_type = other DNA
gatgagtatttacccgagacgttgctgacgcaggaatatggattacgtgcttttaatattgaacgcgtgacggag

SEQ ID NO: 119962 - DNA, 75 bp, synthetic construct
  source 1..75: mol_type = other DNA
taatctgccgtccggggtcgttcctgccgttcgccagccgctgggggatgagaaaacatttctgccctttttcag

SEQ ID NO: 119963 - DNA, 75 bp, synthetic construct
  source 1..75: mol_type = other DNA
accgcgtgaccggcgaaatctatgagagcgcccagttcctctatattctggttgctgcgtgcctgttctcgaact

SEQ ID NO: 119964 - DNA, 75 bp, synthetic construct
  source 1..75: mol_type = other DNA
taatctgccgtccggggtcgttcctgccgttcgccagccgctgggggatgacaaaccatttctgccatttttcag

SEQ ID NO: 119965 - DNA, 75 bp, synthetic construct
  source 1..75: mol_type = other DNA
gcagagtttgccattacgccagttgttggggccgaagtggtcaccggttcttcgcgaatgaaagcaggtacggcg

SEQ ID NO: 119966 - DNA, 75 bp, synthetic construct
  source 1..75: mol_type = other DNA
agtatgcctccctgcgccggaccggcatgcagatggaggatattcttgacgagaaaatcgccacgctgtcgccct

SEQ ID NO: 119967 - DNA, 75 bp, synthetic construct
  source 1..75: mol_type = other DNA
ggctttggcgccgccaatatgttctacgatccggctgacagagacgacctttgtctcgatcctagacgcattgca

SEQ ID NO: 119968 - DNA, 75 bp, synthetic construct
  source 1..75: mol_type = other DNA
cggactggccagagaatttccggaatactgcgatctggaaaccgtcattgcactgaccgacgatgaccgtatccg

SEQ ID NO: 119969 - DNA, 75 bp, synthetic construct
  source 1..75: mol_type = other DNA
cgataaccagttgcgtgatcagttcacggaacggctggaatcaatggcaacggataactgtgcccactgggtgtt

SEQ ID NO: 119970 - DNA, 75 bp, synthetic construct
  source 1..75: mol_type = other DNA
gttaaggaatatattaataaatttcctgaagttattaattaccataacacccacgaaaatttaggaggggcagga

SEQ ID NO: 119971 - DNA, 75 bp, synthetic construct
  source 1..75: mol_type = other DNA
tttttgtgttgcctttgtgcagaaagcatcacgacgagctgcatgcggataccgtggcatttgaagagatgtatg

SEQ ID NO: 119972 - DNA, 75 bp, synthetic construct
  source 1..75: mol_type = other DNA
agtcatcgggcattatctgaacataaaacactatcaataagttggagtcattaccacattgttgaaggcgcaaac

SEQ ID NO: 119973 - DNA, 75 bp, synthetic construct
  source 1..75: mol_type = other DNA
ttttcacactaccgctgtgtcgggagcatcacaacgagcttcatgcggatccgctggcattcgaagaaaagcatg

SEQ ID NO: 119974 - DNA, 75 bp, synthetic construct
  source 1..75: mol_type = other DNA
gattaccggttaatggcaaaaggctgggcgcgctgctgttattcctcgcttgccctgaaagcggttcagttatcg

SEQ ID NO: 119975 - DNA, 75 bp, synthetic construct
  source 1..75: mol_type = other DNA
atggggcaggttatgcccggatgggaaaaggtaaaaaaacgcctggatggaatggccgggatgctgttggctgat

SEQ ID NO: 119976 - DNA, 75 bp, synthetic construct
  source 1..75: mol_type = other DNA
atcccgattagtggtgtacttattattatatacaccatagatatggttttaaccgaacttaaacaaccactctaa

SEQ ID NO: 119977 - DNA, 75 bp, synthetic construct
  source 1..75: mol_type = other DNA
gcctcatcgctaactttgcaacagtgccattgaaacctatagaagacattgctgatgaactgcgcggggccgact

SEQ ID NO: 119978 - DNA, 75 bp, synthetic construct
  source 1..75: mol_type = other DNA
tacgtcggatcaatgctcgagcgtgtcggaatcaaatcaacccgtttcgagtctgcaaaatcttacctcaactgg

SEQ ID NO: 119979 - DNA, 75 bp, synthetic construct
  source 1..75: mol_type = other DNA
atgtgccaacgcgtggcgctggagcgtcaactggacagcgaagaacgcgccttactgattgaacgttcgcaaacg

SEQ ID NO: 119980 - DNA, 75 bp, synthetic construct
  source 1..75: mol_type = other DNA
ctggcgcgccggggagcaggagcagacaccaccggaaggctttgagtcctccggagctgaaaccgcactgggcgt

SEQ ID NO: 119981 - DNA, 75 bp, synthetic construct
  source 1..75: mol_type = other DNA
tgatcaatgcgggtatttgcgcggtcattgtaattgctctgatgttttaccaacgtggcggtgccagacatcgcc

SEQ ID NO: 119982 - DNA, 75 bp, synthetic construct
  source 1..75: mol_type = other DNA
ttcagtcttcgcctgaccagcgggagtggcgatgacagccgtctggtgaccaccgtcatcactgcggatacagag

SEQ ID NO: 119983 - DNA, 75 bp, synthetic construct
  source 1..75: mol_type = other DNA
gcaggcgaactattaaaatatccgtttattgaactgttgattaatgagaattacccgcatctcaatgaaggaaaa

SEQ ID NO: 119984 - DNA, 75 bp, synthetic construct
  source 1..75: mol_type = other DNA
atcccgggtcatccactccgttcagctatttcatgaggatggcgtcagggggaggtgatgtcaggatcaagttcc

SEQ ID NO: 119985 - DNA, 75 bp, synthetic construct
  source 1..75: mol_type = other DNA
tgcagtgagcatcacctcgtccggcaatcccccgacgttctccctgacgccggagggcaggctgacggcccgcaa

SEQ ID NO: 119986 - DNA, 75 bp, synthetic construct
  source 1..75: mol_type = other DNA
ccgtatcttcatcaggagcgaataactggacaccaacaaccagtatcagcgatctgctggttgtggtgatgaaaa

SEQ ID NO: 119987 - DNA, 75 bp, synthetic construct
  source 1..75: mol_type = other DNA
atgagctgggttcaagcgagaaacgtgcggcggatatgattccgccgttattgttccctcggctcaagaatttat

SEQ ID NO: 119988 - DNA, 75 bp, synthetic construct
  source 1..75: mol_type = other DNA
tgcggcgagagatgatcttgcgcactctgctgtcagtactaatactcctcaagaaggttcgccgctgagcctcgt

SEQ ID NO: 119989 - DNA, 75 bp, synthetic construct
  source 1..75: mol_type = other DNA
gctggatgacgaacaggccgcgattaaagccgaaagctgcgatgactgcggcacttacctgaaaattctctatca

SEQ ID NO: 119990 - DNA, 75 bp, synthetic construct
  source 1..75: mol_type = other DNA
caggcaactggcgctggggcgttacacgctgacggtccgggcggtaaatgcccggggacagcagggcgatccggc

SEQ ID NO: 119991 - DNA, 75 bp, synthetic construct
  source 1..75: mol_type = other DNA
atgagtattcgcataatcccgcaagatgagctgggttcgagcgagaaacgtacggcggatatgattccgccgtta

SEQ ID NO: 119992 - DNA, 75 bp, synthetic construct
  source 1..75: mol_type = other DNA
tttttctttactttcattttctgtcggcggtgacggagacatacatcagatggaaaaaatcacaacgggtgtgtc

SEQ ID NO: 119993 - DNA, 75 bp, synthetic construct
  source 1..75: mol_type = other DNA
ccgtataaagaacgcaaagtggcaatcctcaacggtgcgcacaccgcgctggtgccggtggcgttccaggcaggg

SEQ ID NO: 119994 - DNA, 75 bp, synthetic construct
  source 1..75: mol_type = other DNA
aaatattccggaagcagaagactggaaagaaaaacatgaagggaaagagcctgtccgtaccatggtggatatttt

SEQ ID NO: 119995 - DNA, 75 bp, synthetic construct
  source 1..75: mol_type = other DNA
ttattgaaagctggccaaaacacctgcgaaataaagccagtgggtttcttatttccggtttttctgttggtgcag

SEQ ID NO: 119996 - DNA, 75 bp, synthetic construct
  source 1..75: mol_type = other DNA
tcagaaccgtattgatatttactgagagctcagatcaactttccagggcaacagatcgcgtacccggtttgccgg

SEQ ID NO: 119997 - DNA, 75 bp, synthetic construct
  source 1..75: mol_type = other DNA
atgaataccctacaaaataaaacgccatggtataagcatttaaatcgtagccagtggcgtgcattttctgccgcc

SEQ ID NO: 119998 - DNA, 75 bp, synthetic construct
  source 1..75: mol_type = other DNA
cgcaaaccttatgggtaagtgagcgtcctccgatacgtttacgagccatgcagacgcaatggggaaactgttctg

SEQ ID NO: 119999 - DNA, 75 bp, synthetic construct
  source 1..75: mol_type = other DNA
tgtctgcgctgaaaaaacgtgggcgctggatataccagcaactgcgtgatttcagggagcaacagacacacattg

SEQ ID NO: 120000 - DNA, 75 bp, synthetic construct
  source 1..75: mol_type = other DNA
gatcagaagtttgaccgacaggtcatgatcccggctctgctgtttaaaggaagcaggaaggaacattatggcagt

SEQ ID NO: 120001 - DNA, 75 bp, synthetic construct
  source 1..75: mol_type = other DNA
cgcgcatcacctgtaacgcttacctgaccacgcagcgtaaggcgtgggatgttctcagcgatttctgctcggcga

SEQ ID NO: 120002 - DNA, 75 bp, synthetic construct
  source 1..75: mol_type = other DNA
gtgctgctatttttgtttcatttatggttcagagtagcggtaaacgttggccgacaggcgtcatgctgatggttg

SEQ ID NO: 120003 - DNA, 75 bp, synthetic construct
  source 1..75: mol_type = other DNA
ccgggaagtggtaataacccgggaggtacaagttacacgggttatggttttgaagttcgcaaaaacggtgtatta

SEQ ID NO: 120004 - DNA, 75 bp, synthetic construct
  source 1..75: mol_type = other DNA
gggtgctcatcaaggtgcatccggactgccgggttattgtctctgtacctccagaaacaccggagcacgaggtat

SEQ ID NO: 120005 - DNA, 75 bp, synthetic construct
  source 1..75: mol_type = other DNA
ttcagggagcaacagacacacattgttccgcgtcagtatgtcagcggagaaagccattattatctcggtaagcaa

SEQ ID NO: 120006 - DNA, 75 bp, synthetic construct
  source 1..75: mol_type = other DNA
cctgatcgctttcgaccattacagcatctgtgcgcgttattgcggcgaaagcatatcccgcgccattgcatttgg

SEQ ID NO: 120007 - DNA, 75 bp, synthetic construct
  source 1..75: mol_type = other DNA
gcatatcccgcgccattgcatttggcggtgcgttcaacgtggatttatgggagtacgtcatggaccgggaataca

SEQ ID NO: 120008 - DNA, 75 bp, synthetic construct
  source 1..75: mol_type = other DNA
tgtctgcgctgaaaaaacgagggcgttggatataccagcaactgcgcgacttcagggagcaacaaacacatatcg

SEQ ID NO: 120009 - DNA, 75 bp, synthetic construct
  source 1..75: mol_type = other DNA
cagacgcaatggggaaactgttctgcaaaaggctgcctgacacttaacccgtggctggtaaaggcttcctcggaa

SEQ ID NO: 120010 - DNA, 75 bp, synthetic construct
  source 1..75: mol_type = other DNA
gataccgtggtatttgaagagaagtatggctcccagttggagctgatatttcgttttattgatcgtgcgctggca

SEQ ID NO: 120011 - DNA, 75 bp, synthetic construct
  source 1..75: mol_type = other DNA
gggcgcactgctgttattcctcgcttgccctgaaagcggttcagctatcgctgcggcatattccggcatcgcagc

SEQ ID NO: 120012 - DNA, 75 bp, synthetic construct
  source 1..75: mol_type = other DNA
gtgatccgtcgtgctggtggcgtggaatgtcttgaaagctggttacttcgtgaaaaaggctgccagtggcctcat

SEQ ID NO: 120013 - DNA, 75 bp, synthetic construct
  source 1..75: mol_type = other DNA
tggtcgagcaggttgctaatgacctggatgcgattctcgaaaaagggatgcgcgaacgcgaagctgtacgcccgt

SEQ ID NO: 120014 - DNA, 75 bp, synthetic construct
  source 1..75: mol_type = other DNA
tgcatcgactatgtattgctccatgagttatgccatgtcgctgagcacaatcacagcgagaaattttaccggctg

SEQ ID NO: 120015 - DNA, 75 bp, synthetic construct
  source 1..75: mol_type = other DNA
cgctggcaggctggctggcctggaaggtcgcccaccccccggtgcactacttctcaacagagaacggcgttatca

SEQ ID NO: 120016 - DNA, 75 bp, synthetic construct
  source 1..75: mol_type = other DNA
atgggacaggttatgccgggctgggaaaaggtcaagaaacggctggatggcatggctgggatgttgttggctgat

SEQ ID NO: 120017 - DNA, 75 bp, synthetic construct
  source 1..75: mol_type = other DNA
gttaagacgcagccgtgcgcatgttgtggaaagtctgctgatgatcctcaccacctgataggtcacggtcaggga

SEQ ID NO: 120018 - DNA, 75 bp, synthetic construct
  source 1..75: mol_type = other DNA
ttcccgtccaaccctgacggtttctaacctgcacggtatggtcaccgggatggcggaagagctgcagagtctggt

SEQ ID NO: 120019 - DNA, 75 bp, synthetic construct
  source 1..75: mol_type = other DNA
taatcggcgaactgtacgccattaagcacgaaatacgcgggttgccggtgcctgaacgcctggcggtcaggcaaa

SEQ ID NO: 120020 - DNA, 75 bp, synthetic construct
  source 1..75: mol_type = other DNA
cctcgttggtctgatattatgggtaaaaataagctggcagacgtttataaacggctgtatttactggtggtgtac

SEQ ID NO: 120021 - DNA, 75 bp, synthetic construct
  source 1..75: mol_type = other DNA
ggttttaccaagcaggggacgcatcaggcgatggatgatatccgtgagtcggtggcagaactggcttactatcgc

SEQ ID NO: 120022 - DNA, 75 bp, synthetic construct
  source 1..75: mol_type = other DNA
atgaaaaccgtttctcagaatacccccacaatttattcagctacaacaccagagaatagcctgcaacaactggtt

SEQ ID NO: 120023 - DNA, 75 bp, synthetic construct
  source 1..75: mol_type = other DNA
gtatctggaatctgtacactctgaacaacggcggggcatttatggctcccgaaccggatgacgatgatgtcgaaa

SEQ ID NO: 120024 - DNA, 75 bp, synthetic construct
  source 1..75: mol_type = other DNA
gtatctggaatctgtacaccctgaacaacggcggggcatttatggcccccgaaccggatgacgatgatgtcgaaa

SEQ ID NO: 120025 - DNA, 75 bp, synthetic construct
  source 1..75: mol_type = other DNA
gtatctggaatctgtacacgctgaacaacggcggggcatttatggcgcccgaaccggatgacgatgatgtcgaaa

SEQ ID NO: 120026 - DNA, 75 bp, synthetic construct
  source 1..75: mol_type = other DNA
gtatctggaatctgtacacactgaacaacggcggggcatttatggcacccgaaccggatgacgatgatgtcgaaa

SEQ ID NO: 120027 - DNA, 75 bp, synthetic construct
  source 1..75: mol_type = other DNA
caaaagatagcatggcatataaacaattggggaatgctgtaagcgttccagtcattaaaaatatttttcttgata

SEQ ID NO: 120028 - DNA, 75 bp, synthetic construct
  source 1..75: mol_type = other DNA
tcggatacggcaaaagcgttcgcatacctgctgaaacagtgggatggcctgaacgtgtattgcaacaatggttgg

SEQ ID NO: 120029 - DNA, 75 bp, synthetic construct
  source 1..75: mol_type = other DNA
ttgagcatattcaggactggccggcaaaccgggtacgcgatctgttgccctggaaagttgatctgacctctcagt

SEQ ID NO: 120030 - DNA, 75 bp, synthetic construct
  source 1..75: mol_type = other DNA
atgaacggtaaccgcgctgaaatgagcccggaagccgccggcattaccgcctgcctgatgacgtacagccatcac

SEQ ID NO: 120031 - DNA, 75 bp, synthetic construct
  source 1..75: mol_type = other DNA
gcctgccgtacggagtgttatgccatgacggttcattattaccgtctgcgggattacgccctgcaacatccggaa

SEQ ID NO: 120032 - DNA, 75 bp, synthetic construct
  source 1..75: mol_type = other DNA
ccggggttacttgcccgcgtgttaacgggaaaatactgcgaacacctgccactgtatcgtcagagtgaaatcttt

SEQ ID NO: 120033 - DNA, 75 bp, synthetic construct
  source 1..75: mol_type = other DNA
ctcaccggaccatcagggtaaacatccggagcaacaccttcgtcccttccggggtatcctgcaggcagatgcgtt

SEQ ID NO: 120034 - DNA, 75 bp, synthetic construct
  source 1..75: mol_type = other DNA
gggaacggtatggaaattgaaccctggctgaaggcggctgtgcgcaaagaatttgtcgatgataaccgggtgaag

SEQ ID NO: 120035 - DNA, 75 bp, synthetic construct
  source 1..75: mol_type = other DNA
ttcacgacccacactgacggtttctaacctggacggtatggtcaccggaatggcggaagatctgcagagtctggt

SEQ ID NO: 120036 - DNA, 63 bp, synthetic construct
  source 1..63: mol_type = other DNA
atgaaaattatcacccgaggtgaagccatgcgtattcaccaacagcatcctgcatcccgtctt

SEQ ID NO: 120037 - DNA, 75 bp, synthetic construct
  source 1..75: mol_type = other DNA
gtgcaggatattcccggtgtgctggccgtgtttgctgaacgccgtaaggacagttttggcccgtatgtccgactg

SEQ ID NO: 120038 - DNA, 75 bp, synthetic construct
  source 1..75: mol_type = other DNA
ccggacagtcgcagcatgaacctgtccaatgcggtgtcggtcgtggtgtatgaagcctggcggcagttggggtat

SEQ ID NO: 120039 - DNA, 75 bp, synthetic construct
  source 1..75: mol_type = other DNA
atgaacggcaaccgcgctgaaatgagcccggaagcagccggcattaccgcctgtctgatggcatacagtcatcat

SEQ ID NO: 120040 - DNA, 75 bp, synthetic construct
  source 1..75: mol_type = other DNA
ttcacgaccaaccctgacggtttctaacctggacggtatggtcaccggaatggcggaagatgtgcagagtctggt

SEQ ID NO: 120041 - DNA, 75 bp, synthetic construct
  source 1..75: mol_type = other DNA
gcctgaaggcggctgtgcgcaaagaatttgtcgatgataaccgggtgaaagtgaataatgacggtaattttgtca

SEQ ID NO: 120042 - DNA, 75 bp, synthetic construct
  source 1..75: mol_type = other DNA
atggaatcgaaattattcgatacccgcagtatatatcgtgaactgggcgcaacgctgagttacaacatgcgtctg

SEQ ID NO: 120043 - DNA, 75 bp, synthetic construct
  source 1..75: mol_type = other DNA
ttcacgacctaccctgacggtttctaacctggacggtatggtcaccggaatggcggaagatttgcagagtctggt

SEQ ID NO: 120044 - DNA, 75 bp, synthetic construct
  source 1..75: mol_type = other DNA
gcagtatatatcgtgaactgggtgcaacgctgagttacaacatgcgtctggggaacggcatggaagttgagccgt

SEQ ID NO: 120045 - DNA, 75 bp, synthetic construct
  source 1..75: mol_type = other DNA
atccacaaccatgcgaatgtcttctcccgcaccgggctggatattggcgcgcgcttctttatgcagcatctgcca

SEQ ID NO: 120046 - DNA, 75 bp, synthetic construct
  source 1..75: mol_type = other DNA
gcgcttctttatgcagcatctgccagagaatctcgaaggtgagattgtcgatctcggttgcggtaatggcgttat

SEQ ID NO: 120047 - DNA, 75 bp, synthetic construct
  source 1..75: mol_type = other DNA
cgatcgtgaatacgtcgccagctgctttaacacctatggctgcttctggggtgcagaacgtcaggtcgttgcaac

SEQ ID NO: 120048 - DNA, 75 bp, synthetic construct
  source 1..75: mol_type = other DNA
ccatcgaacgggggatcgccggaccggggctgctggcccgagtgctgacctcaaagtatgcagagcacacaccgc

SEQ ID NO: 120049 - DNA, 75 bp, synthetic construct
  source 1..75: mol_type = other DNA
ggaaaatcacctgatgctggatgtgtcgcaaagcgatagcgaagcagaattgcgcggtaaccggaaaattgccgc

SEQ ID NO: 120050 - DNA, 75 bp, synthetic construct
  source 1..75: mol_type = other DNA
ttgaactggctgaggccctgctgaaacaacgtgaacaggacagcgatcgttacagtgggcgggaagacgatcctc

SEQ ID NO: 120051 - DNA, 75 bp, synthetic construct
  source 1..75: mol_type = other DNA
atcagcaacatgcgctgaccgataacgtcgcctgggagatgttccaccacgcccgccgctgtctgaaaatcaacg

SEQ ID NO: 120052 - DNA, 75 bp, synthetic construct
  source 1..75: mol_type = other DNA
catgaaagttgcaggaagagtgacaggcggcttacaccagcgcccggaatataacgtggcgttgagcgaaccgac

SEQ ID NO: 120053 - DNA, 75 bp, synthetic construct
  source 1..75: mol_type = other DNA
cgcgaaaaatggctggtggaggtcgatggcagccagattgaaatcgctctcgatcagggcgaggtgaaagccggt

SEQ ID NO: 120054 - DNA, 75 bp, synthetic construct
  source 1..75: mol_type = other DNA
gcatccaacacctatgaccacctgatcattcgcggctttgcggcagaaggccaaagccagaataactatctgaat

SEQ ID NO: 120055 - DNA, 75 bp, synthetic construct
  source 1..75: mol_type = other DNA
tgcgtcgttgaagcgccagcgccctcacgtcctatcgaccggggcatcgccgggccgggtctgctggcccgcgtg

SEQ ID NO: 120056 - DNA, 75 bp, synthetic construct
  source 1..75: mol_type = other DNA
tgatgacgaaacatgggtactgttcaatgccatgaacggtaaccgcgctgaaatgagcccggaagctgccggtat

SEQ ID NO: 120057 - DNA, 75 bp, synthetic construct
  source 1..75: mol_type = other DNA
ctacctccgctatgcccttgacgtcatagccgactggccgataaaccgggtcggcgaactgctcccctggcgcgt

SEQ ID NO: 120058 - DNA, 75 bp, synthetic construct
  source 1..75: mol_type = other DNA
ggttgaaggcggtgagattcgtgcgcgtggcgtagagctggaagcgaaagcggcactatcggcgagtgttaacgt

SEQ ID NO: 120059 - DNA, 75 bp, synthetic construct
  source 1..75: mol_type = other DNA
gctccttggtctgatattatgggtaaaaataagctggcagacgtttataaacggctgtatttactggtggtgtac

SEQ ID NO: 120060 - DNA, 75 bp, synthetic construct
  source 1..75: mol_type = other DNA
atgaacggcaaaggagccagtgcaagaccaacgctgaaagtctctaatctgcacggcatggtcaccgggatggcg

SEQ ID NO: 120061 - DNA, 75 bp, synthetic construct
  source 1..75: mol_type = other DNA
atgttaaaacagcaagatatgacagaaacggcgaaagttgtttttaatgaattaagcatcgaaccggcaacagtc

SEQ ID NO: 120062 - DNA, 75 bp, synthetic construct
  source 1..75: mol_type = other DNA
ctggcctgttgtcggtgcgaccatatcgtgcaggcaacagtaccttcaaaacccattgcacgcagttatgccgga

SEQ ID NO: 120063 - DNA, 75 bp, synthetic construct
  source 1..75: mol_type = other DNA
agcggtttcttgacgttactgaccactcccgcctgattatgctcagcgaccagtttcactggtcccttctggtca

SEQ ID NO: 120064 - DNA, 75 bp, synthetic construct
  source 1..75: mol_type = other DNA
ggaaaatctcaaaattgaagggattctggaaaagctgaagatcacgccggagccgcgtgatgaatcaatccgtct

SEQ ID NO: 120065 - DNA, 75 bp, synthetic construct
  source 1..75: mol_type = other DNA
acatataaggattataagaataagcgttggttgattggtttaggtgcgaatgtcttacgtgcacttggattagaa

SEQ ID NO: 120066 - DNA, 75 bp, synthetic construct
  source 1..75: mol_type = other DNA
ttctccctgcgtactggcgtaacccgccgccagctgtttccagacgccatttacttcattgaacgggagttctga

SEQ ID NO: 120067 - DNA, 75 bp, synthetic construct
  source 1..75: mol_type = other DNA
agggcgtatctggacgtatgtccgggatgatcgcaatgtgggttcgtcatctcctccagcggtctggttcgcgta

SEQ ID NO: 120068 - DNA, 75 bp, synthetic construct
  source 1..75: mol_type = other DNA
gaaaaagaattgcgtaaagcgcgggagatcgcctttgaggagctcggctcccaggcgcgggcactgggggccgat

SEQ ID NO: 120069 - DNA, 75 bp, synthetic construct
  source 1..75: mol_type = other DNA
ctttgcccgtcagggtgtcgaactgagccgtgcgttactctccaactgggttgacgagctcctgccatggaacgt

SEQ ID NO: 120070 - DNA, 75 bp, synthetic construct
  source 1..75: mol_type = other DNA
ccggtgccaaagcccgtgacatccacacttccacgctggaactgttcgaaaaagtgctcggcccgaccaccacca

SEQ ID NO: 120071 - DNA, 75 bp, synthetic construct
  source 1..75: mol_type = other DNA
cgcttcgtgcagtctgtctcggaaagaaaaattacgtgttcttcggtagcgatcacggcggcgagcgtggagcac

SEQ ID NO: 120072 - DNA, 75 bp, synthetic construct
  source 1..75: mol_type = other DNA
ccggggcgcatcatgctggctaatacctgcacctggacctatcgcggtgatgagtgcggttatcacggtccggct

SEQ ID NO: 120073 - DNA, 75 bp, synthetic construct
  source 1..75: mol_type = other DNA
gatgacggtctggcggaggcggataataatgctgcggaaagagcgcttcgtgcagtctgtctcggaaagaaaact

SEQ ID NO: 120074 - DNA, 75 bp, synthetic construct
  source 1..75: mol_type = other DNA
aaatatatcgctgtacaggatttcctgacgtggtggtgtcgggcgtgctggccgacggtattccgtgggatatgc

SEQ ID NO: 120075 - DNA, 75 bp, synthetic construct
  source 1..75: mol_type = other DNA
agaaaataaaacagatgcaaatcagcctcaccggtgagccggttctccggctgaccggactgtcagcggcaacac

SEQ ID NO: 120076 - DNA, 75 bp, synthetic construct
  source 1..75: mol_type = other DNA
tgctgtacatcacttgaaattcaagtcagtgctatgggcgtggcaacaccagaagagtggatgtggcttgaatcc

SEQ ID NO: 120077 - DNA, 75 bp, synthetic construct
  source 1..75: mol_type = other DNA
cttcggctggatggaccgtctgtgcgaagactactgcggtggtatctggaatctgtacaccctgaacaacggcgg

SEQ ID NO: 120078 - DNA, 75 bp, synthetic construct
  source 1..75: mol_type = other DNA
gctgacagccatgacggcctcgtttgtgctggctacaccgaccgagacggatggggcgctgtttcccggtcgtat

SEQ ID NO: 120079 - DNA, 75 bp, synthetic construct
  source 1..75: mol_type = other DNA
ttccgtgggaaatgccgtaccgctgcccggacattgtctggaacccgtaccgccgtaaattcagtatccttgtgc

SEQ ID NO: 120080 - DNA, 75 bp, synthetic construct
  source 1..75: mol_type = other DNA
accctgaaaaccgccacgccgtattacgcgaaatagcggccgacccggcattacagcaataccgggcgcggaata

SEQ ID NO: 120081 - DNA, 75 bp, synthetic construct
  source 1..75: mol_type = other DNA
gagcatatccaggattggccggcaaaccgggtacgcgatctgttgccctggaaagttgatctgacctctcagtaa

SEQ ID NO: 120082 - DNA, 75 bp, synthetic construct
  source 1..75: mol_type = other DNA
aagccgccggtattgccgcctgtctgatgacgtacagccatcatgcctgtcgtatggaatgttatgccatgacgg

SEQ ID NO: 120083 - DNA, 75 bp, synthetic construct
  source 1..75: mol_type = other DNA
gctgacagccatgacggcctcgtttgtgctggcaacaccgaccgagacggatggggcgctgtttcccggtcgaat

SEQ ID NO: 120084 - DNA, 75 bp, synthetic construct
  source 1..75: mol_type = other DNA
aagatcgaagaagatgaacgggaaatagaacatctgcgggctcagatagaaaaactgcgccggatgctgttcggt

SEQ ID NO: 120085 - DNA, 75 bp, synthetic construct
  source 1..75: mol_type = other DNA
gcgtggccagaaaaaaataattttcagcacatgatttcagtaaatcatcgtgaaaatgaatacgttatgttttaa

SEQ ID NO: 120086 - DNA, 75 bp, synthetic construct
  source 1..75: mol_type = other DNA
ccaagtttttactcttatattggatttgctgataattttgtgcttaaaaaacctgatgtgatttctgatcccaag

SEQ ID NO: 120087 - DNA, 75 bp, synthetic construct
  source 1..75: mol_type = other DNA
cgggctgatcggcacctgccgactgaacggtatcgatccggaagcgtatctgcgccatatcctgagcgtgctgcc

SEQ ID NO: 120088 - DNA, 75 bp, synthetic construct
  source 1..75: mol_type = other DNA
actgtatcgtcagagtgaaatatttgcccgacagggtgccgaactgagccgtgcattactctccaactgggttga

SEQ ID NO: 120089 - DNA, 75 bp, synthetic construct
  source 1..75: mol_type = other DNA
cgaccctacgaagaagaacgtctattttcatggaggcgggaggctagccagcaggcgtatcatgtcccgatgttt

SEQ ID NO: 120090 - DNA, 75 bp, synthetic construct
  source 1..75: mol_type = other DNA
gcgttttctgcgggaatttacctgtgaccgtcctgacctgttcaaacgcagccccgtaaaccggcatgcggtact

SEQ ID NO: 120091 - DNA, 75 bp, synthetic construct
  source 1..75: mol_type = other DNA
accacacaacataaaatcggggcaacagcagctctgtcaggaatttacgacgcgatacatcgcgacggcactgag

SEQ ID NO: 120092 - DNA, 75 bp, synthetic construct
  source 1..75: mol_type = other DNA
ggtgacccagcctggatacgtcgatatgtatgtcttgtcgcgaaccggcgacggcactccgcctcaatcactact

SEQ ID NO: 120093 - DNA, 75 bp, synthetic construct
  source 1..75: mol_type = other DNA
aaaaagccgctgccgcaatggaagccgggcgctttgcagacgaaattactccggtgagcgtaccacaaggtaaaa

SEQ ID NO: 120094 - DNA, 75 bp, synthetic construct
  source 1..75: mol_type = other DNA
ttatcggcacttgccttctgaacgacattgatccggaagcgtatctgcgccatatgctgagcttactgccggaat

SEQ ID NO: 120095 - DNA, 75 bp, synthetic construct
  source 1..75: mol_type = other DNA
tgccgctattgcactatggccggtcggtcgtcgcgtggtatcggtagaaacagcgcaagctgcgcgtgaagccaa

SEQ ID NO: 120096 - DNA, 75 bp, synthetic construct
  source 1..75: mol_type = other DNA
atgcgtaccgttttgaacattctgaactttgtgcttggcggatttgccaccactctgggctggctgttggcgact

SEQ ID NO: 120097 - DNA, 75 bp, synthetic construct
  source 1..75: mol_type = other DNA
ttatcggcacttgccttctgaacgacattgatccggaagcgtatctgcgccatattctgagcatactgccggaat

SEQ ID NO: 120098 - DNA, 75 bp, synthetic construct
  source 1..75: mol_type = other DNA
gaagcagcgttctttcagtggctctggctggaagatcagcttaacgctggcaacctgccggaaggcagcgatcag

SEQ ID NO: 120099 - DNA, 75 bp, synthetic construct
  source 1..75: mol_type = other DNA
atcgccatgcgcgccatggaaacagtttatgtcagaggatttgaaccgccccggaaatcctggagactaaactcc

SEQ ID NO: 120100 - DNA, 75 bp, synthetic construct
  source 1..75: mol_type = other DNA
cagagctgcgccactgatgcagtcactgtatgactggatacagactcagatgaaaacactgtcgcatcactcgga

SEQ ID NO: 120101 - DNA, 75 bp, synthetic construct
  source 1..75: mol_type = other DNA
ttcacgaccgaccctgacggtttctaacctggacggtatggtcaccggaatggcggaagatatgcagagtctggt

SEQ ID NO: 120102 - DNA, 75 bp, synthetic construct
  source 1..75: mol_type = other DNA
gcgccgcccctttcattacgcggacgttctgatgggggcttctgtcttttcagacctgtcatttgtctgttactg

SEQ ID NO: 120103 - DNA, 75 bp, synthetic construct
  source 1..75: mol_type = other DNA
actgaacggcaaaggcagtgctgcccgtccgacactgacggtttctaacctgcacggcatggtcaccgggatggc

SEQ ID NO: 120104 - DNA, 75 bp, synthetic construct
  source 1..75: mol_type = other DNA
atcccattcaggggagtggttttgaactgaatggcaaaggcaccagtacgcgccccacactgacgccccacgctg

SEQ ID NO: 120105 - DNA, 75 bp, synthetic construct
  source 1..75: mol_type = other DNA
atgctctgctggcggatatgaatagtcagggtcaggtgcagatggcgatgaacggcggcatctatgatgaaagct

SEQ ID NO: 120106 - DNA, 75 bp, synthetic construct
  source 1..75: mol_type = other DNA
tttcattacgcggacgttctgatgggggcttctgtttcttcatgcctgtcatttgtctgttactgatgttgttcc

SEQ ID NO: 120107 - DNA, 75 bp, synthetic construct
  source 1..75: mol_type = other DNA
aggttccccgccagttgcgacagtcacgtcatcgtcgtccgttaccagcacatcttccccgtgaaatacaccgct

SEQ ID NO: 120108 - DNA, 75 bp, synthetic construct
  source 1..75: mol_type = other DNA
gcagtatatatcgtgaactgggcgcaacgctgagttacaacatgcgtctggggaacggtatggaaattgaaccct

SEQ ID NO: 120109 - DNA, 75 bp, synthetic construct
  source 1..75: mol_type = other DNA
atgccagttgggaacatgaaagtggtttctatctggacggtgtcgtgaagctgaaccgttttgaaagtaacgtag

SEQ ID NO: 120110 - DNA, 75 bp, synthetic construct
  source 1..75: mol_type = other DNA
acttatttaagtgatattggttgtctggagattcagggggccagtctactgagttacaacatgcgtctggggaac

SEQ ID NO: 120111 - DNA, 75 bp, synthetic construct
  source 1..75: mol_type = other DNA
ttgagcgcagttatgccagttcgtggcttcttgcccacgttgtcaccggaaaatacgcggaccatctgccgttat

SEQ ID NO: 120112 - DNA, 75 bp, synthetic construct
  source 1..75: mol_type = other DNA
gcagaggtccggggctgttcagcagaacagcgtctggcggcaagaaaaagccagagccgcgccactgatgcagtc

SEQ ID NO: 120113 - DNA, 75 bp, synthetic construct
  source 1..75: mol_type = other DNA
gtggaaggacattcgtgagcgtctcaacagcaaccagacctgcattgtccgctattactacaacatcaccacgtt

SEQ ID NO: 120114 - DNA, 75 bp, synthetic construct
  source 1..75: mol_type = other DNA
cgcgcatttgccagcgttggtgtggatccggcattgatgggaattgcgccggtgtatgcgacccgccgttgcctg

SEQ ID NO: 120115 - DNA, 75 bp, synthetic construct
  source 1..75: mol_type = other DNA
ttgtttgcggtgacagtgattcgcgattatgggcgcgagactgccgccgccagacaaacgctgctggaaaaaggc

SEQ ID NO: 120116 - DNA, 75 bp, synthetic construct
  source 1..75: mol_type = other DNA
gtgaatggctgcatttactggtggtgcaccacgctggaaggcatgcgggatttaatcaggtcccagccggtctat

SEQ ID NO: 120117 - DNA, 75 bp, synthetic construct
  source 1..75: mol_type = other DNA
actggcgcacggcctttcgtgcagccggtggtgtcctgagcgacgagctgaaacagcgccacattgagcgcgtgg

SEQ ID NO: 120118 - DNA, 75 bp, synthetic construct
  source 1..75: mol_type = other DNA
gggcagtggtaaaacaaggactgcccggctgtgggtctacgtccgtgatgaccgtaatgccggttcacagatgcc

SEQ ID NO: 120119 - DNA, 75 bp, synthetic construct
  source 1..75: mol_type = other DNA
gccgggagctggtacaggaatatgacaatctggccgtggtgctgaattttgaacgcgaacgcctgaaaggggcgt

SEQ ID NO: 120120 - DNA, 75 bp, synthetic construct
  source 1..75: mol_type = other DNA
caggaggcctgggaagaacataaggaaaaagcccgtattgaccatgttgtccagaagctggcggctattcgcgag

SEQ ID NO: 120121 - DNA, 75 bp, synthetic construct
  source 1..75: mol_type = other DNA
caaaatgtgactgtattgttgaagcaccggcgccgtcccgcccgatagggcgtggtatcgcgggccccggattac

SEQ ID NO: 120122 - DNA, 75 bp, synthetic construct
  source 1..75: mol_type = other DNA
ggaccggaaaggtatccatccacagaatcacctggccggttacagcggtgtgcttcaggcagatgcttacggtgg

SEQ ID NO: 120123 - DNA, 75 bp, synthetic construct
  source 1..75: mol_type = other DNA
ctccccttgtttgctgttgctgctgatgactgcgcgctctcagatccgtcgctgacagtacaggcgtataccgtt

SEQ ID NO: 120124 - DNA, 75 bp, synthetic construct
  source 1..75: mol_type = other DNA
cactgaaatatcaggcacgtccgaagattgccccggagtttattccgcgtgaaatcaacccggaaatggagaatc

SEQ ID NO: 120125 - DNA, 75 bp, synthetic construct
  source 1..75: mol_type = other DNA
aattaatccgcgtattcatcccaacgtcgcctcacgcaaaattcgtaacggtgttgggattaataaacatgggaa

SEQ ID NO: 120126 - DNA, 75 bp, synthetic construct
  source 1..75: mol_type = other DNA
tggcaggggcggaagtatgaggcgtacccgattgacggcagcggctttgagatgaacgggaaagggagcagtgcc

SEQ ID NO: 120127 - DNA, 75 bp, synthetic construct
  source 1..75: mol_type = other DNA
tgtactggcaaaaagccaatggcgaagcgtggggaactttacatgctctgctggcggatatgaatagtcagggtc

SEQ ID NO: 120128 - DNA, 75 bp, synthetic construct
  source 1..75: mol_type = other DNA
tgacgatttttggtctttccaaagtaatttatatcagacaattattactgtgctcattgcgctcaatgggatagt

SEQ ID NO: 120129 - DNA, 75 bp, synthetic construct
  source 1..75: mol_type = other DNA
cctttgccatcatcattgccccgctaatggtacgactgggttatgacagtattactaccgtcctggtgacctata

SEQ ID NO: 120130 - DNA, 75 bp, synthetic construct
  source 1..75: mol_type = other DNA
tgcaacaacccactaggcaagcgaaacaagccgctaacacgctggaggagcaagagaatgctatccaaagtctga

SEQ ID NO: 120131 - DNA, 75 bp, synthetic construct
  source 1..75: mol_type = other DNA
cgccatatcctgagcgtactgccggaatggccttccaaccgagttgatgaactcctgccatggaacgtagtactc

SEQ ID NO: 120132 - DNA, 75 bp, synthetic construct
  source 1..75: mol_type = other DNA
gacgcatcgaatctcgtgcacggactgggtcgccaggtggtgagaccattgccacgctggagcaagaaacgaaac

SEQ ID NO: 120133 - DNA, 75 bp, synthetic construct
  source 1..75: mol_type = other DNA
gcttggcgatctggtcggtgttaaccgccaggttaccgtgctggcattccagttcggcgatggcttcagtcacat

SEQ ID NO: 120134 - DNA, 75 bp, synthetic construct
  source 1..75: mol_type = other DNA
caaatcggttttgccagttcgtggatgaacccgttttgtgtggttgttgctcaggggattgccggcgttccggtg

SEQ ID NO: 120135 - DNA, 75 bp, synthetic construct
  source 1..75: mol_type = other DNA
ggctttaccaagcaggggacgcatcaggcgatggatgatatccgtgagtcggtggcagaactggcttactaccgc

SEQ ID NO: 120136 - DNA, 75 bp, synthetic construct
  source 1..75: mol_type = other DNA
tcgctaaacagcgtgatccgccatgcgatcaaaaagcgtaaagtgttcccgacagacgactcggtgaaaaaagtg

SEQ ID NO: 120137 - DNA, 75 bp, synthetic construct
  source 1..75: mol_type = other DNA
gcctggcaggaaatctttgccgctgcacgggatatcaaatgattgtaaatacggtgctggattgcgagaaaacga

SEQ ID NO: 120138 - DNA, 75 bp, synthetic construct
  source 1..75: mol_type = other DNA
tcgaatgcaccattaacgggatgccttttcagcttcacgccgcaccaggcatgccgctctcggaattactccgcg

SEQ ID NO: 120139 - DNA, 75 bp, synthetic construct
  source 1..75: mol_type = other DNA
accgggtcagaaaaaggcgaaaacagggcgtatctggacgtatgtccgggatgatcgcaatgtgggttcgtcatc

SEQ ID NO: 120140 - DNA, 75 bp, synthetic construct
  source 1..75: mol_type = other DNA
ccggaacgtagcagcatgcttcatcgaacagattttcacgatgattaccaaacggtaatggcatacaaagtttct

SEQ ID NO: 120141 - DNA, 75 bp, synthetic construct
  source 1..75: mol_type = other DNA
atgagcaacatcgacatcgacacactggcgctgcgtgaggcggcagaacgtgcaattccggcaatggaacgcctg

SEQ ID NO: 120142 - DNA, 75 bp, synthetic construct
  source 1..75: mol_type = other DNA
ggtatcgatccggaagcgtatctgcgccatatcctcaacgtcctgccggaatggccttctaaccgtgttgatgaa

SEQ ID NO: 120143 - DNA, 75 bp, synthetic construct
  source 1..75: mol_type = other DNA
cgtgtgggtgatatgtacacatcaagcgatatttttgattctgttcgcttcagcggtgtgcggttgtttcgtgat

SEQ ID NO: 120144 - DNA, 75 bp, synthetic construct
  source 1..75: mol_type = other DNA
aatgcacaggtagccctgttaaatacacagctaagcgaatttgccccaaccatgccccaaaacgaggtggtgcaa

SEQ ID NO: 120145 - DNA, 75 bp, synthetic construct
  source 1..75: mol_type = other DNA
gggccccggattacttgcccgcgtgttaacgggaaaatactgcgaacatctgccactgtatcgtcagagtgaaat

SEQ ID NO: 120146 - DNA, 75 bp, synthetic construct
  source 1..75: mol_type = other DNA
ttgcagaactggaaagccagctccgtcagaaagaccagcaactgagtctggttgaagagacggaggccttcctgc

SEQ ID NO: 120147 - DNA, 75 bp, synthetic construct
  source 1..75: mol_type = other DNA
ttgtgagtttcaccggagtatcgtgaacagatgcgccgatgagattcgcaaggctggcgtcaaagtcagcatcaa

SEQ ID NO: 120148 - DNA, 75 bp, synthetic construct
  source 1..75: mol_type = other DNA
gctgaatttattgctgcctttaatccaaaggttgctttggcactactggatgaatgggaaagaaaccagcaatac

SEQ ID NO: 120149 - DNA, 75 bp, synthetic construct
  source 1..75: mol_type = other DNA
gagagcgtagtgcgctgctgtacgggctgatcggcgcctgccgactgaacggtatcgatccggaagcgtatctgc

SEQ ID NO: 120150 - DNA, 75 bp, synthetic construct
  source 1..75: mol_type = other DNA
gaggaaaatgacaaagagattttgcgccgcgccaaagctattttctgtgctggaacaccaggtgatcgcgttccc

SEQ ID NO: 120151 - DNA, 75 bp, synthetic construct
  source 1..75: mol_type = other DNA
catcaggcgatggatgatatccgtgaatcggtggcggaactggcttactaccgcgagcattttatcaagctgtaa

SEQ ID NO: 120152 - DNA, 75 bp, synthetic construct
  source 1..75: mol_type = other DNA
aaatcccgcgaccaggagaacgaggaaattgcgctaacggtagggaagctgcgcgttgagctggaaggcaaagac

SEQ ID NO: 120153 - DNA, 75 bp, synthetic construct
  source 1..75: mol_type = other DNA
tgctcaatgatccagcacttaaccggcacaatattcaggttgctgatgacgcaagatttgttttaaatgcgggga

SEQ ID NO: 120154 - DNA, 75 bp, synthetic construct
  source 1..75: mol_type = other DNA
gtggggagactgggactcatataaaccacaccgtggcgcacgtggttatgaggtccgactaagtagtcaggccat

SEQ ID NO: 120155 - DNA, 75 bp, synthetic construct
  source 1..75: mol_type = other DNA
agaaatcacgccgtcaacggaactgcgcaaagcctttcacggcgaagtcgtcgattttgcaacctttcgcgagca

SEQ ID NO: 120156 - DNA, 75 bp, synthetic construct
  source 1..75: mol_type = other DNA
aatggcggggcatttatggcacccgaaccgaatgacgatgatgacgaaacatgggtgctgttcaatgccatgaac

SEQ ID NO: 120157 - DNA, 75 bp, synthetic construct
  source 1..75: mol_type = other DNA
acggggattaccagagtcagagcgtcttgaagtcaggcagcagcgaagcaaagcgttactgacgtcgctgcatga

SEQ ID NO: 120158 - DNA, 75 bp, synthetic construct
  source 1..75: mol_type = other DNA
tacaccctgaacaacggtggcgcatttatagcacccgaaccggatgacgatgatgacgatgatgacgaaacatgg

SEQ ID NO: 120159 - DNA, 75 bp, synthetic construct
  source 1..75: mol_type = other DNA
ctggaatctgtacaccctgaacaacggcggggcatttatggcacccgaaccggatgacgatgatgacgaaacatg

SEQ ID NO: 120160 - DNA, 75 bp, synthetic construct
  source 1..75: mol_type = other DNA
agccgacgaaaatattgatttcaaggctggaggcaccttccaggctatcgcaagcaactttgatttcaagaaggg

SEQ ID NO: 120161 - DNA, 75 bp, synthetic construct
  source 1..75: mol_type = other DNA
gttgcgtcagacccgcccccgtaagccgttccctgaatcactaccccgtgacgaaaagcgactgttgcccgcggc

SEQ ID NO: 120162 - DNA, 75 bp, synthetic construct
  source 1..75: mol_type = other DNA
gttgcgtcagacccgcgcccgtaagccgttccctgaatcactaccccgtgacgaaaagcgactgttgccggcggc

SEQ ID NO: 120163 - DNA, 75 bp, synthetic construct
  source 1..75: mol_type = other DNA
aatccagactgggcgaagcgttcagctatgtactgaatgaaccgccccgggtttcctggagagtgttttatctgt

SEQ ID NO: 120164 - DNA, 75 bp, synthetic construct
  source 1..75: mol_type = other DNA
agtacaggatattccctgtgtgctggccgtgtttgcagaacgccggaaggacagttttggtccgtatgtccggct

SEQ ID NO: 120165 - DNA, 75 bp, synthetic construct
  source 1..75: mol_type = other DNA
accggcaaataccgctggcacggcagtgctgaggcgtataccggtagtgaagtacaggatattcccggtgtgctg

SEQ ID NO: 120166 - DNA, 75 bp, synthetic construct
  source 1..75: mol_type = other DNA
cactagccaatgatgtcaatgttacatcgcaggatatttttaacgaccagagtattgagattggtgcaaatcaga

SEQ ID NO: 120167 - DNA, 75 bp, synthetic construct
  source 1..75: mol_type = other DNA
cgaaacttgcagccgcttatccgtcaggcgtgatccctgatatgcgtggctggacgattaagggcaaacccgcca

SEQ ID NO: 120168 - DNA, 75 bp, synthetic construct
  source 1..75: mol_type = other DNA
agtaactcataccaggtacaaggggcggttggtctgggcattggcacgatggcgaatacgaactctgctggcgcg

SEQ ID NO: 120169 - DNA, 75 bp, synthetic construct
  source 1..75: mol_type = other DNA
atgggtactgttcaatgccatgaacggcaaccgcgctgaaatgagcccggaagccgccggtattgccgcctgtct

SEQ ID NO: 120170 - DNA, 75 bp, synthetic construct
  source 1..75: mol_type = other DNA
gttgcgtcagacccgctcccgtaagccgttccctgaatcactaccccgtgacgaaaagcgactgttgcctgcggc

SEQ ID NO: 120171 - DNA, 75 bp, synthetic construct
  source 1..75: mol_type = other DNA
ccatattctgagcgtactgccggaatggccctccaaccgtgttgacgaactcctgccatggaacgtagtactcac

SEQ ID NO: 120172 - DNA, 75 bp, synthetic construct
  source 1..75: mol_type = other DNA
acgcctggcggtcaggcaaatgcagagtaaaccgctactgacttccctgtataagctgatgcaggagaaagaaca

SEQ ID NO: 120173 - DNA, 75 bp, synthetic construct
  source 1..75: mol_type = other DNA
tgcatcccgtctttttccgttctgtaccggcaaataccgctggcacggcagcactgaaacgtataccggtcgtga

SEQ ID NO: 120174 - DNA, 75 bp, synthetic construct
  source 1..75: mol_type = other DNA
taccacgacccgacgtgtcatgttttccgctgaaatcgacactctctatggaataacgactgttacatcggaggc

SEQ ID NO: 120175 - DNA, 75 bp, synthetic construct
  source 1..75: mol_type = other DNA
ccaggcggcttcacagaaatggacgatgccactgcgggactggcgtatggcaatgagccgctttattatcgagtt

SEQ ID NO: 120176 - DNA, 75 bp, synthetic construct
  source 1..75: mol_type = other DNA
atgaaaccaatcattatacctgcattgtttgtatctttatttgcattccaacctgcttatgcagtcggggcctac

SEQ ID NO: 120177 - DNA, 75 bp, synthetic construct
  source 1..75: mol_type = other DNA
cccgaggctgtcgcgcaggccattaaaactcgtttcctgctttggtacggtcagtggtttctggacaccacagaa

SEQ ID NO: 120178 - DNA, 75 bp, synthetic construct
  source 1..75: mol_type = other DNA
aacagcacttccgagtcactggcggcaacgccaaaagccgttaaggccgcgtatgacctggctaacgggaaatac

SEQ ID NO: 120179 - DNA, 75 bp, synthetic construct
  source 1..75: mol_type = other DNA
gtgcagcctcctcggcaatggcggcaggcaattccgcgaaggcggccaaaacgtctgagacaaacgctaagtcct

SEQ ID NO: 120180 - DNA, 75 bp, synthetic construct
  source 1..75: mol_type = other DNA
gcaatggtttctcgataccaccgaagggactccgtggatccagtctgtgctcggtaagcagaagccggaaaccta

SEQ ID NO: 120181 - DNA, 75 bp, synthetic construct
  source 1..75: mol_type = other DNA
gttgcgtcagacccgcacccgtaagccgttccctgaatcactaccccgtgacgaaaagcgactgttgccagcggc

SEQ ID NO: 120182 - DNA, 75 bp, synthetic construct
  source 1..75: mol_type = other DNA
tgcttgtcgcaatatgggtgttatcctctgagtcttttattatttataacataataggggtttttcataaggtgt

SEQ ID NO: 120183 - DNA, 75 bp, synthetic construct
  source 1..75: mol_type = other DNA
gcaataataaaatcattactgatactgactgcggtaatattcatctcgccggagctgtcattgaagtaatgggga

SEQ ID NO: 120184 - DNA, 75 bp, synthetic construct
  source 1..75: mol_type = other DNA
cccggtgtgctggccgtgtttgcagaacgccgtaaggacagttttggtccgtatgtccggctgatgagcgtcacc

SEQ ID NO: 120185 - DNA, 75 bp, synthetic construct
  source 1..75: mol_type = other DNA
ggcggtctggttcgcctactcaccggatcatcaggggaaacatccggagcagcactttcgtcccttccggggtat

SEQ ID NO: 120186 - DNA, 75 bp, synthetic construct
  source 1..75: mol_type = other DNA
acagcgtcctctggggttcggtgatgatttacctgctctttggcgcaggctgctggtttacttttcgcaccgggt

SEQ ID NO: 120187 - DNA, 75 bp, synthetic construct
  source 1..75: mol_type = other DNA
ccgatgtttgatccgctgcgctacccggacatcggccagcaactcgcacctgatacgtgggatgatgtttcgcag

SEQ ID NO: 120188 - DNA, 75 bp, synthetic construct
  source 1..75: mol_type = other DNA
ccgccggggtatgggcggggggcattgaaacaccttcggtggaaactccatcggaaggctctaaattttttggtt

SEQ ID NO: 120189 - DNA, 75 bp, synthetic construct
  source 1..75: mol_type = other DNA
taagcgtcggtgaagtcctgcctgcacgcgatcttcagttcgtcgataaatatattttcgacaacggccagggcg

SEQ ID NO: 120190 - DNA, 75 bp, synthetic construct
  source 1..75: mol_type = other DNA
tccacagtgggtgaccctggagccccgagtcttcggctggatggaccgtctttgcgaagactactgtggtggtat

SEQ ID NO: 120191 - DNA, 75 bp, synthetic construct
  source 1..75: mol_type = other DNA
cgtgacgaggcgctggatgctatcgctaagaaagcgatggcgcgtaaaaccggtgcccgtggtctgcgttccatc

SEQ ID NO: 120192 - DNA, 75 bp, synthetic construct
  source 1..75: mol_type = other DNA
aacccgcaaagagcagcaaccgctggccagttttcagaatgaggttcagccgagcacgcgacatttttatgatgc

SEQ ID NO: 120193 - DNA, 75 bp, synthetic construct
  source 1..75: mol_type = other DNA
atggcaagtgaacgccagacgcgcggacgaccttcaaagattgatttgctcccggatgcggtccgggagcaactg

SEQ ID NO: 120194 - DNA, 75 bp, synthetic construct
  source 1..75: mol_type = other DNA
atgaaaacattgtctcagaacaccaccgcttcggcctcagcaccggagactgacctgcaacaactggttgccacc

SEQ ID NO: 120195 - DNA, 75 bp, synthetic construct
  source 1..75: mol_type = other DNA
tattgccgcctgtctgatgacgtacagccatcatgcctgtcgtacggaatgttatgccatgacggtccattatta

SEQ ID NO: 120196 - DNA, 75 bp, synthetic construct
  source 1..75: mol_type = other DNA
aattcttgcaggttgatacctctaagatcctgttcatctgtggcggcgcatttgctggcctggataaagtgattg

SEQ ID NO: 120197 - DNA, 75 bp, synthetic construct
  source 1..75: mol_type = other DNA
gattggtccgactggctctggtaaaacgttgctggcggaaacgttggcgcgtctgctggacgttccgttcactat

SEQ ID NO: 120198 - DNA, 75 bp, synthetic construct
  source 1..75: mol_type = other DNA
ccatgcgtattcaccaacagtatcctgcatcccgtctttttccgttctgcaccggcaaataccgctggcacggca

SEQ ID NO: 120199 - DNA, 75 bp, synthetic construct
  source 1..75: mol_type = other DNA
gagcgcagcgttatctctaaattcggggatgccaaagaccagtggttctcttcctttatgctgcgcatcaacgat

SEQ ID NO: 120200 - DNA, 75 bp, synthetic construct
  source 1..75: mol_type = other DNA
attctgaataaacagaaacaaacgggcgtttatgttcaggatcaggcgcagtgggataaagtgctggtcacccta

SEQ ID NO: 120201 - DNA, 75 bp, synthetic construct
  source 1..75: mol_type = other DNA
tatcgaactactcgggaagtactgctcctgggggatttacggcgaatatttcaacagcaacgagccgtcactgac

SEQ ID NO: 120202 - DNA, 75 bp, synthetic construct
  source 1..75: mol_type = other DNA
tgatcacaacttctttgaatcctggctgggaatgaaagtccaggcggtggatatgaccgaactgcgtcgccgtat

SEQ ID NO: 120203 - DNA, 75 bp, synthetic construct
  source 1..75: mol_type = other DNA
ctggttttgacttcagtgatgcgctggatgatgacggcgtttactcttatcgtctgactggtattgcgcgttcag

SEQ ID NO: 120204 - DNA, 75 bp, synthetic construct
  source 1..75: mol_type = other DNA
tttactcttatcgcctgaccggtcttgcgcgttctgccaatgcccagcagaaagggtcagaagagcagcgttatg

SEQ ID NO: 120205 - DNA, 75 bp, synthetic construct
  source 1..75: mol_type = other DNA
tgaagcgaatcagtgaactgtacgccatcgaggatgaaatacggggattaccggagtcagagcgtcttgcagtca

SEQ ID NO: 120206 - DNA, 75 bp, synthetic construct
  source 1..75: mol_type = other DNA
tggctaacggtgaaaccgtactgcgtgatgcatccggcgaaaaacgcatcaagggtgaaaaagacggtcgtatgc

SEQ ID NO: 120207 - DNA, 75 bp, synthetic construct
  source 1..75: mol_type = other DNA
cggggcgctgtttcccggtcgcatcatgctggcgaacacctgtatgtgggattaccggggagatgaatgcgggta

SEQ ID NO: 120208 - DNA, 75 bp, synthetic construct
  source 1..75: mol_type = other DNA
agcctcttcgaaccggaggttgcctccggagaagacgtgactcaggctgaacagccacaacagccacaacagcca

SEQ ID NO: 120209 - DNA, 75 bp, synthetic construct
  source 1..75: mol_type = other DNA
gtctactctaccgaaacggcaatggcgaagctggcattgaccgaatggctggtaagcaaagcctggcagccgttt

SEQ ID NO: 120210 - DNA, 75 bp, synthetic construct
  source 1..75: mol_type = other DNA
cgatcgtgaatacgtcgccagctgctttaacacttatggctgcttctggggcacagaacgtcaggtcgttgcaac

SEQ ID NO: 120211 - DNA, 75 bp, synthetic construct
  source 1..75: mol_type = other DNA
aaatccttctctggtaaggactggaaagtgacagcccgtgccggtctgggctaccagttcgacctgctggctaac

SEQ ID NO: 120212 - DNA, 75 bp, synthetic construct
  source 1..75: mol_type = other DNA
cggcgcgttgacggaagcaggatgctgggctcatgcacggcgcaaaatccacgatgtatatatcagtaccaaaag

SEQ ID NO: 120213 - DNA, 75 bp, synthetic construct
  source 1..75: mol_type = other DNA
tacagcacatccggcaattggcgtacagcagactcggtatgaacctcgggaagtccgaaaagtgttatttgatga

SEQ ID NO: 120214 - DNA, 75 bp, synthetic construct
  source 1..75: mol_type = other DNA
ttttggactcaaagggttacctgggttagtaaactcacttgcacgctatccacaagaagccttgcccatcacgaa

SEQ ID NO: 120215 - DNA, 75 bp, synthetic construct
  source 1..75: mol_type = other DNA
ttgatatttactgagaggtcagatcaactttccagggcaacagatcgcgtacccggtttgccggccagtcctgga

SEQ ID NO: 120216 - DNA, 75 bp, synthetic construct
  source 1..75: mol_type = other DNA
ctatgtactgaatcagtgggatgccctctgttattacagtgatgacggtctggcggaggcggataataatgctgc

SEQ ID NO: 120217 - DNA, 75 bp, synthetic construct
  source 1..75: mol_type = other DNA
tttggtctgggaaaaagagagataaccgttaaggcactttcggaaaaatggttggaccttaagaaaattgagata

SEQ ID NO: 120218 - DNA, 75 bp, synthetic construct
  source 1..75: mol_type = other DNA
gagcatactgccggaatggccctccaaccgtgttgacgaactcctgccatggaacgtagtactcaccaataaata

SEQ ID NO: 120219 - DNA, 75 bp, synthetic construct
  source 1..75: mol_type = other DNA
cccatcgtgtcgaaactggctccggcattggttttggtgcgacggtaaaagcgaaatctgacaaagcaagcgaag

SEQ ID NO: 120220 - DNA, 75 bp, synthetic construct
  source 1..75: mol_type = other DNA
gaaaaaatcgccgattccggtgctggatttagcgccattaggcattgagccaatctgttatctgacagaagaaat

SEQ ID NO: 120221 - DNA, 75 bp, synthetic construct
  source 1..75: mol_type = other DNA
atgaatattcagtgcaaacgcgtttatgatccggctgaacagagcgatggttatcgcgtactggtcgaccgcctc

SEQ ID NO: 120222 - DNA, 75 bp, synthetic construct
  source 1..75: mol_type = other DNA
tgggagtaagcgcatagcagagttagaaagtgattctcaggaacaaaagttagttgaagcaatcattgttgcgat

SEQ ID NO: 120223 - DNA, 75 bp, synthetic construct
  source 1..75: mol_type = other DNA
atgtatccgctcaactggtcaacgagtgagaacggcgagtgggaaacgttcatgctgcaggagatggtttgcggt

SEQ ID NO: 120224 - DNA, 75 bp, synthetic construct
  source 1..75: mol_type = other DNA
ctgttgatgccctgaaaagccaggctgaaatgacaagacttggccctcagtatcaaattgacgtcaagcttcggg

SEQ ID NO: 120225 - DNA, 75 bp, synthetic construct
  source 1..75: mol_type = other DNA
cacctcagagaattcggcagaacagagaaacaaaaatgtacctttgtttttcaacctgaagtgtcagcgaaagta

SEQ ID NO: 120226 - DNA, 75 bp, synthetic construct
  source 1..75: mol_type = other DNA
ctgggggaagtcagcgcagaacaactggaactggtgagcagcgccctgaaagtgatccgcacagaacgggtaaaa

SEQ ID NO: 120227 - DNA, 75 bp, synthetic construct
  source 1..75: mol_type = other DNA
gctgatgcaggagaaagaacacacattatcgaaaaaatgtcgtctgagagatgcgttccggtatatcaggaagca

SEQ ID NO: 120228 - DNA, 75 bp, synthetic construct
  source 1..75: mol_type = other DNA
catctcccccgtgaaatataccgcctggagcctgaagaaagctgttgcccggagtgtggcggtgagctggattat

SEQ ID NO: 120229 - DNA, 75 bp, synthetic construct
  source 1..75: mol_type = other DNA
aattcttgcaggttgatacctctaagatcctgtttatttgtggcggtgcgtttgccggtctggataaagtgattt

SEQ ID NO: 120230 - DNA, 75 bp, synthetic construct
  source 1..75: mol_type = other DNA
actcaccggatcatcagggtaaacatccggagcagcaccttcgtcccttccggggtatcctgcaggcagatgcgt

SEQ ID NO: 120231 - DNA, 75 bp, synthetic construct
  source 1..75: mol_type = other DNA
gagcgaagaagccctgattcagatccttaaagagccgaaaaacgccctgaccaagcaatatcaggcgctgtttaa

SEQ ID NO: 120232 - DNA, 75 bp, synthetic construct
  source 1..75: mol_type = other DNA
catgcgcggcgcaaaatccacgatgtatatatcagtaccaaaagcgcgacggcggaagaagccctgaaactaatc

SEQ ID NO: 120233 - DNA, 75 bp, synthetic construct
  source 1..75: mol_type = other DNA
aacggtatcgatccggaagcgtatctgcgccatattctgagcgtactgccggaatggccctccaaccgtgttgac

SEQ ID NO: 120234 - DNA, 75 bp, synthetic construct
  source 1..75: mol_type = other DNA
aacaacatcgcagagaacgccttacggggagtggccgtaggccggaaaaactggatgttcgcgggttccgacagc

SEQ ID NO: 120235 - DNA, 75 bp, synthetic construct
  source 1..75: mol_type = other DNA
tgaataacggagccatacagccttccagtgagcagggctacggaaaagcttttgcggatgttgttagcgtgttgc

SEQ ID NO: 120236 - DNA, 75 bp, synthetic construct
  source 1..75: mol_type = other DNA
tgtactgcagtaatggctgggtggaaatcgacaacaacatcgcagagaacgccttacggggagtagccgtaggcc

SEQ ID NO: 120237 - DNA, 75 bp, synthetic construct
  source 1..75: mol_type = other DNA
cgaagagctggtcagaacaggcggtctgtcaggcggtgcggctgacaccatcaaacgtgaaatactggggattag

SEQ ID NO: 120238 - DNA, 75 bp, synthetic construct
  source 1..75: mol_type = other DNA
cgacgaacaatatcgccagcttgctgctgtcgcccacagtctggagatgggcgtgctgaccgaagtcagtaatga

SEQ ID NO: 120239 - DNA, 75 bp, synthetic construct
  source 1..75: mol_type = other DNA
tgccagagctgcttatgacgcaggcgctatttacggcggattgatttttgttgcgacatcaccgcgctgcgtcag

SEQ ID NO: 120240 - DNA, 75 bp, synthetic construct
  source 1..75: mol_type = other DNA
atttataaacattacgcttcagcaatttcggtgctgactgatgaaaaatatttccaggggagttttgatttcctc

SEQ ID NO: 120241 - DNA, 75 bp, synthetic construct
  source 1..75: mol_type = other DNA
gctgacagccatgacggcctcgtttgtgctggccacaccgaccgagacggatggggcgctgtttcccggtcgcat

SEQ ID NO: 120242 - DNA, 75 bp, synthetic construct
  source 1..75: mol_type = other DNA
accacgctgatcgcggcaccatctggctggaaggccaggctatctcaccgaaaaataccgcccacgcgcaacaac

SEQ ID NO: 120243 - DNA, 75 bp, synthetic construct
  source 1..75: mol_type = other DNA
ctgagcgacaaacctgttgccgcgttcaaaaattacggcaaaaaaggaacgatcgcgccgtttgatctcgaagta

SEQ ID NO: 120244 - DNA, 75 bp, synthetic construct
  source 1..75: mol_type = other DNA
atgaaatccatggacaaaatttcaacgggcattgcctacggcacctccgcaggtagtgccgggtactggttttta

SEQ ID NO: 120245 - DNA, 75 bp, synthetic construct
  source 1..75: mol_type = other DNA
gctcgctacaaatcaggatttacccagcgagacgtttgatttagcggtgattgccacgggtcacgtctggcctga

SEQ ID NO: 120246 - DNA, 75 bp, synthetic construct
  source 1..75: mol_type = other DNA
aaaaagtgttgctttcacgttggctactgactcgaccgcaatttctgatcctcgacgagccaacccgcggcattg

SEQ ID NO: 120247 - DNA, 75 bp, synthetic construct
  source 1..75: mol_type = other DNA
tatctcaccgaaaaataccgcccatgcacaacaactcggcatcggcaccgtctatcaggaagtcaacctgctacc

SEQ ID NO: 120248 - DNA, 75 bp, synthetic construct
  source 1..75: mol_type = other DNA
ctacgctcgccacatcaggcttcggttcttggcattggcttctgcccggaagacaggaaaaccgatggcatcatc

SEQ ID NO: 120249 - DNA, 75 bp, synthetic construct
  source 1..75: mol_type = other DNA
cgacagcggtaagggaattgcggcggatcagcttgaagccatcttcactccgtacttcaccaccaaagccgaagg

SEQ ID NO: 120250 - DNA, 75 bp, synthetic construct
  source 1..75: mol_type = other DNA
ggggagtctgctgtttggcctgctgacgtatcttactaacctgtatttcaaaatcagagaggaccgtcgtaaggc

SEQ ID NO: 120251 - DNA, 75 bp, synthetic construct
  source 1..75: mol_type = other DNA
catacaccacgtcagcagtggggacgggatactggttactgcagctgctggacaaagtctctccgtcccagtggg

SEQ ID NO: 120252 - DNA, 75 bp, synthetic construct
  source 1..75: mol_type = other DNA
tgctggggagtctgctgtttggcctgctgacgtatctgacaaacctttatttcaagattaaagaagataagcgta

SEQ ID NO: 120253 - DNA, 75 bp, synthetic construct
  source 1..75: mol_type = other DNA
gacaaagtctctccgtcccagtgggtggcaataggtgtgctggggagtctgctgtttggcctgctgacgtatctg

SEQ ID NO: 120254 - DNA, 75 bp, synthetic construct
  source 1..75: mol_type = other DNA
gcctacggcacctccgcaggcagtgctggctactggtttttacagctgctcgataaagtcacgccctcacagtgg

SEQ ID NO: 120255 - DNA, 75 bp, synthetic construct
  source 1..75: mol_type = other DNA
gagtttctctccggtggcaatcagcaaaaagtgctgctctcacgctggctactgacccggccgcaatttctgatc

SEQ ID NO: 120256 - DNA, 75 bp, synthetic construct
  source 1..75: mol_type = other DNA
caggtgtgtcatacaccacgtcagcggtgggaacgggctactggttcctgcagttgctggacaggggtttccccg

SEQ ID NO: 120257 - DNA, 75 bp, synthetic construct
  source 1..75: mol_type = other DNA
atgcaggatatccacgaagaaagtcttaacgagtcggttaaatcagagcagtcaccgcgggtggtactctgggaa

SEQ ID NO: 120258 - DNA, 75 bp, synthetic construct
  source 1..75: mol_type = other DNA
ggcctgctgacgtatctgacaaatctttatttcaagattaaagaagataagcgtaaggctgcgaaaggtgaataa

SEQ ID NO: 120259 - DNA, 75 bp, synthetic construct
  source 1..75: mol_type = other DNA
cacagtgggcggcaattggagtgctgggtagcctggtatttggcctgctgacgtacctgacaaacctttatttca

SEQ ID NO: 120260 - DNA, 75 bp, synthetic construct
  source 1..75: mol_type = other DNA
gcccgcagggcgtgcctcgtgagaaagagcgctatctcaacacctacccggcagtgtggatgagcggcgatttcg

SEQ ID NO: 120261 - DNA, 75 bp, synthetic construct
  source 1..75: mol_type = other DNA
attggtgaattcaccaacgcggcgggaacggttttccacggtgatatcaaccgcttctatgccggtgacggcacc

SEQ ID NO: 120262 - DNA, 75 bp, synthetic construct
  source 1..75: mol_type = other DNA
aggtgctgctgttcagctctgcggatctccatcagtggacgagtatgggtgaaatcgccggccacggcatcaatg

SEQ ID NO: 120263 - DNA, 75 bp, synthetic construct
  source 1..75: mol_type = other DNA
ggcgaccagcatattctaatctgctgtccgcaggggattgcccgtgaggaagagtgctacctgaacacctacccg

SEQ ID NO: 120264 - DNA, 75 bp, synthetic construct
  source 1..75: mol_type = other DNA
atgcgacgctgttgtgccttatctggtgcacgctttacaacgggggaaactatgaatactaaccaacaccagaaa

SEQ ID NO: 120265 - DNA, 75 bp, synthetic construct
  source 1..75: mol_type = other DNA
gctgtttggcctgctgacgtatctgactaacctgtatttcaaaatcagagaggaccggcgtaaggcggcgcgggg

SEQ ID NO: 120266 - DNA, 75 bp, synthetic construct
  source 1..75: mol_type = other DNA
gaaggtttttgcgctggatgtggctgcccggcaccgggtgcagtttgcgatgcctgaagtggatgcggtagccat

SEQ ID NO: 120267 - DNA, 75 bp, synthetic construct
  source 1..75: mol_type = other DNA
ggggagtctgctgtttggcctgctgacgtatctgactaacctgtatttcaaaatcagagaggacaggcgtaaggc

SEQ ID NO: 120268 - DNA, 75 bp, synthetic construct
  source 1..75: mol_type = other DNA
ggaaattaatgagtcgcgcaccgtcctgaaaacggaagacaacagctactcgtttgacgtttttattgatgcccg

SEQ ID NO: 120269 - DNA, 75 bp, synthetic construct
  source 1..75: mol_type = other DNA
cggttggttacgaccgattcctcgcaaagaacaacaagaaattgccgaacgctttatccgccagcttagcattcg

SEQ ID NO: 120270 - DNA, 75 bp, synthetic construct
  source 1..75: mol_type = other DNA
cacctccggacagatcgtcacatttaactcaccggatctctcctggttcggcagtggatcgctattgttcctgcc

SEQ ID NO: 120271 - DNA, 75 bp, synthetic construct
  source 1..75: mol_type = other DNA
tatttccccagcccgtggtcaggattactggaagcgaaaattgatgcctgtaacgtcggaattataggcacatcc

SEQ ID NO: 120272 - DNA, 75 bp, synthetic construct
  source 1..75: mol_type = other DNA
aggtcgcgtatatcaatggtgaggggacggcgaattcgtgctcaccacggcgcacggcgaactgcgcgccgacaa

SEQ ID NO: 120273 - DNA, 75 bp, synthetic construct
  source 1..75: mol_type = other DNA
tggcaatgcgtcgtgttgaagagagtgtcgttaatcaagggtggatcacgctgcaggaagccgggatcaatctcg

SEQ ID NO: 120274 - DNA, 75 bp, synthetic construct
  source 1..75: mol_type = other DNA
gtgcagaaattggcaaggctatggcacaggccatcgcaaagcctgcttcccgttcacgccggcgtcttacgtttg

SEQ ID NO: 120275 - DNA, 75 bp, synthetic construct
  source 1..75: mol_type = other DNA
tctcggtatgtccaccgatacagccgaagaagagccagagcaacaggataacggccagagcaacacgaagggaac

SEQ ID NO: 120276 - DNA, 75 bp, synthetic construct
  source 1..75: mol_type = other DNA
gtacaacccgccgtaaacaagctgaaaaagcggaaacggggcaaagcaactgcctttcttgccattgtcgcggtc

SEQ ID NO: 120277 - DNA, 75 bp, synthetic construct
  source 1..75: mol_type = other DNA
gcattgaaataccgccgatttattgtacgtatctcgaatggctacaaaagcaagatgccagccatctacaacgtt

SEQ ID NO: 120278 - DNA, 75 bp, synthetic construct
  source 1..75: mol_type = other DNA
tcacactgatgacacaccagtaaaagtactggcaccgggcaggaagaaggcgaaaacaggatatatctggacgta

SEQ ID NO: 120279 - DNA, 75 bp, synthetic construct
  source 1..75: mol_type = other DNA
tactcgccgaaccggcaggggaaacacccggagcaacacctccgccccttccggggtatcctgcaggcggatgcg

SEQ ID NO: 120280 - DNA, 75 bp, synthetic construct
  source 1..75: mol_type = other DNA
gatttctattgccctattccctacgagcccttacacatcgtcaccgatcaggcattaaatgctgagattcaaaaa

SEQ ID NO: 120281 - DNA, 75 bp, synthetic construct
  source 1..75: mol_type = other DNA
atctttgcccgccagggtgtcgaactgagccgtgccttactctccaactgggttgatgcgtgctgccagttaatg

SEQ ID NO: 120282 - DNA, 75 bp, synthetic construct
  source 1..75: mol_type = other DNA
tgatgaacacccgcaaggttcacactgatgacacactgaaccgccccgggtttcctggagagtgttttatctgtg

SEQ ID NO: 120283 - DNA, 75 bp, synthetic construct
  source 1..75: mol_type = other DNA
gccatacagtgatgaggaaaactcaaaaatgatgctggcaaatattgccagtattgaaataccgccgatttattg

SEQ ID NO: 120284 - DNA, 75 bp, synthetic construct
  source 1..75: mol_type = other DNA
ggtgaagagggccttttggatcgggtatttagattgatagtagaggaaatcaagtttgctgatccagactggagc

SEQ ID NO: 120285 - DNA, 75 bp, synthetic construct
  source 1..75: mol_type = other DNA
gctcgtaccactctggaaaacagcatcaatattcccccaacgctccataagaatcagggcgagatcatcaatctg

SEQ ID NO: 120286 - DNA, 75 bp, synthetic construct
  source 1..75: mol_type = other DNA
gctgtttgggctgctgacatatctgacgaacctgtatttcaagattaaagaagataagcgtaaggctgcgagagg

SEQ ID NO: 120287 - DNA, 75 bp, synthetic construct
  source 1..75: mol_type = other DNA
ctggatggcggtagtgtagccgtgctgccagtaattgactccactaatcagtaccttcttgatcgtatcgaagag

SEQ ID NO: 120288 - DNA, 75 bp, synthetic construct
  source 1..75: mol_type = other DNA
gctgcggcggcggataatgcacctggtaaagatcgtaatgtggattataccgaaaactcacgacaggcaatggct

SEQ ID NO: 120289 - DNA, 75 bp, synthetic construct
  source 1..75: mol_type = other DNA
catccccctttaatgtctcctccggcgatgcccggcaacccacactggctgttcacagtcaggagtttcgtactg

SEQ ID NO: 120290 - DNA, 75 bp, synthetic construct
  source 1..75: mol_type = other DNA
atggccttttttctttccggtagcacagatctgtcttggttggatatgtatcagatggaaaaaatatcaacagga

SEQ ID NO: 120291 - DNA, 75 bp, synthetic construct
  source 1..75: mol_type = other DNA
aaagcagcgcaagcgggcagtaaagaaggtgaagtaacgctggcgcatattctggtaaatacgcaagcgggtaaa

SEQ ID NO: 120292 - DNA, 75 bp, synthetic construct
  source 1..75: mol_type = other DNA
agcagactggaatgaccatcaatcaatatctgcgacaggtcagagtgtgtcatgcgcaatatctcctccagcata

SEQ ID NO: 120293 - DNA, 75 bp, synthetic construct
  source 1..75: mol_type = other DNA
actgtatatgtcgcctggcggtgtgactgagctaatccacttttttatcgccgaatacagtgacaatcagcgcgc

SEQ ID NO: 120294 - DNA, 75 bp, synthetic construct
  source 1..75: mol_type = other DNA
tacacactgaacaacggtggcgcatttatggcccccgaaccggatgaagatgatggaaaaacctgggtactgttc

SEQ ID NO: 120295 - DNA, 75 bp, synthetic construct
  source 1..75: mol_type = other DNA
ctggatggcggtagtgtagccgtgctgccagttattgactccacgaatcagtaccttcttgatcgtatcggagag

SEQ ID NO: 120296 - DNA, 75 bp, synthetic construct
  source 1..75: mol_type = other DNA
accggaagtgtgtattcgcaaagaagcgattgaagagacagggtatgaagttggcgaagtacggaaattatttga

SEQ ID NO: 120297 - DNA, 75 bp, synthetic construct
  source 1..75: mol_type = other DNA
atggacaaaatttcaacaggcattgcctacggcacctccgcaggcagtgctggctactggtttttacagctgctc

SEQ ID NO: 120298 - DNA, 75 bp, synthetic construct
  source 1..75: mol_type = other DNA
cttaaaaaatcgcgtaaggggctggtgattattgtggccgctttccttctgctggccgccggggtgtctgtctac

SEQ ID NO: 120299 - DNA, 75 bp, synthetic construct
  source 1..75: mol_type = other DNA
ccgcgtgttaacgggaaaatactgcgaacacctgccactgtatcgtcagagtgaaatctttgcccgacagggtgt

SEQ ID NO: 120300 - DNA, 75 bp, synthetic construct
  source 1..75: mol_type = other DNA
aatcacggctcccggagttggccgtcagtgggtgacactggtcggcttttttgtttttctttactttcattttct

SEQ ID NO: 120301 - DNA, 75 bp, synthetic construct
  source 1..75: mol_type = other DNA
ccggcttattagcaatagggattatctgtaccgtgccaattatggcgcgctggaagaagctgataatgtggcaaa

SEQ ID NO: 120302 - DNA, 75 bp, synthetic construct
  source 1..75: mol_type = other DNA
ctgtttggcctgctgacgtatctgactaacctttatttcaagattaaagaagataagcgtaaggtggcgcgggga

SEQ ID NO: 120303 - DNA, 75 bp, synthetic construct
  source 1..75: mol_type = other DNA
tgacgaacaatatcgccagcttgccgccgtcgcccacagtctggagatgggtgtgctgaccgaagtcagtaatga

SEQ ID NO: 120304 - DNA, 75 bp, synthetic construct
  source 1..75: mol_type = other DNA
tcaccatgttctcgtttatgggcgcagaaattgtcaccattgccgccgcggaatctgacacgccggaaaaacata

SEQ ID NO: 120305 - DNA, 75 bp, synthetic construct
  source 1..75: mol_type = other DNA
tggcaggggcgacagtatcaggcgtatcccattcaggggagtggtttcgaactgaatggcaaaggtaccagtacg

SEQ ID NO: 120306 - DNA, 75 bp, synthetic construct
  source 1..75: mol_type = other DNA
aagattgtgggatagcggcggctttatgcccaacggcttcggtgcggtattaagcgcgatgttgatcaccatgtt

SEQ ID NO: 120307 - DNA, 75 bp, synthetic construct
  source 1..75: mol_type = other DNA
gccagtggtgccgttccggcggcatcacaaccgctggcggatgatcctgccgttcgggccgtgttccgcaatgag

SEQ ID NO: 120308 - DNA, 75 bp, synthetic construct
  source 1..75: mol_type = other DNA
ccgcagtcttgctaccctttgacccagtgcgtgatgaagttgtgctgattgagcagattcggattgccgcatacg

SEQ ID NO: 120309 - DNA, 75 bp, synthetic construct
  source 1..75: mol_type = other DNA
agttaggcggcgggctgaagtcacgccacgtcaccatgttgtctattgccggtgttatcggcgcaagtctgtttg

SEQ ID NO: 120310 - DNA, 75 bp, synthetic construct
  source 1..75: mol_type = other DNA
ggtaaaatcaaccgcagtaaaaccccgtacgtggcggtgttactctccaccggagcggcatttttaacggtggtg

SEQ ID NO: 120311 - DNA, 75 bp, synthetic construct
  source 1..75: mol_type = other DNA
caggaactggccgaccaattgttcccctacctgaccatggtcgaagggctgaagctcgcggcgcagaccttcagc

SEQ ID NO: 120312 - DNA, 75 bp, synthetic construct
  source 1..75: mol_type = other DNA
agtgtagcgaactgagtgcggtcagtgcctcctttgtgctctccacaccgacggaaacggatggtgctgtttttc

SEQ ID NO: 120313 - DNA, 75 bp, synthetic construct
  source 1..75: mol_type = other DNA
actgggctaaagaagaatttggggacttagcaccaagtgagcgagttctgaaaaaatacgcgcaagggaaaatga

SEQ ID NO: 120314 - DNA, 75 bp, synthetic construct
  source 1..75: mol_type = other DNA
ctgaactcggcgctgtataccgcttccagaatgctctactccttaagccgtcgcggtgatgctcccgcggtaatg

SEQ ID NO: 120315 - DNA, 75 bp, synthetic construct
  source 1..75: mol_type = other DNA
attatcgctgccactcaccagaatcttgaacagcgggtgcaggaaggtaagttccgtgaggatctgttccaccgc

SEQ ID NO: 120316 - DNA, 75 bp, synthetic construct
  source 1..75: mol_type = other DNA
agctggaaaacacctgccgctggctaacggtgatggccgccgggcaggaagtgttgattcaggatttgcccggtg

SEQ ID NO: 120317 - DNA, 75 bp, synthetic construct
  source 1..75: mol_type = other DNA
ggggcataaacaagaagcggcgagactgcttggttggggacgtaacacactgacacgtaagttaaaagagttggg

SEQ ID NO: 120318 - DNA, 75 bp, synthetic construct
  source 1..75: mol_type = other DNA
gtggtcagccagccgacgatccccatcacctgattggtcacggtcagggagggatgggaacaaaggcccacgata

SEQ ID NO: 120319 - DNA, 75 bp, synthetic construct
  source 1..75: mol_type = other DNA
aacggtgatggccgccgggcaggaagtgttgattcaggatttgcctggcgaactgtttgaatcaaccgtagcgga

SEQ ID NO: 120320 - DNA, 75 bp, synthetic construct
  source 1..75: mol_type = other DNA
taccgctgtgtcgggaacatcacaacgagcttcatgcggatccgctggcattcgaagaaaagcatggttcccagg

SEQ ID NO: 120321 - DNA, 75 bp, synthetic construct
  source 1..75: mol_type = other DNA
gcgaaaaaggtgctggcgctgaaagtggatccggagtcgccggagtcttttatgttacgcccaaaacgtcgccgc

SEQ ID NO: 120322 - DNA, 75 bp, synthetic construct
  source 1..75: mol_type = other DNA
cattgccgttgatccggaatctccggctcagtatctccagcgccagaaaccacaacgggaagagatgcctgtata

SEQ ID NO: 120323 - DNA, 75 bp, synthetic construct
  source 1..75: mol_type = other DNA
gagtctccggaatctttcatgaaacgacctaaacgtcgccgctgggtaaatgagaaatacacacgctgggtaaag

SEQ ID NO: 120324 - DNA, 75 bp, synthetic construct
  source 1..75: mol_type = other DNA
acggcccgacgaccgatatcatcggcgaagcgccagccatgcaggacgtgttccgtattatcggtcggctttcgc

SEQ ID NO: 120325 - DNA, 75 bp, synthetic construct
  source 1..75: mol_type = other DNA
cacgacgagctgcatgcggataccgtggcatttgaagagaagtatggctcccagctggagttgatatttcgtttt

SEQ ID NO: 120326 - DNA, 75 bp, synthetic construct
  source 1..75: mol_type = other DNA
gcgcatgacctgtttgtgttgcctttgtgcagaaaacaccacgacgatgtgcatgcggatactgtggcatttgaa

SEQ ID NO: 120327 - DNA, 75 bp, synthetic construct
  source 1..75: mol_type = other DNA
cccagtgggtggcaataggtgtgctggggagtctgctgtttggcctgctgacgtatctgacaaacctttatttca

SEQ ID NO: 120328 - DNA, 75 bp, synthetic construct
  source 1..75: mol_type = other DNA
caaatggaatgacaactggggcacctgtacattacagggctgtagcggcaaccgcagccagtcggattccggtgc

SEQ ID NO: 120329 - DNA, 75 bp, synthetic construct
  source 1..75: mol_type = other DNA
gctgtttggcctgctgacgtatcttactaacctgtatttcaaaatcagagaggaccgtcgtaaggcggcgcgggg

SEQ ID NO: 120330 - DNA, 75 bp, synthetic construct
  source 1..75: mol_type = other DNA
gagcctgctgtttggtctgctgacatacctgacgaacctgtatttcaggattaaagaggaccggcgtaagtcggc

SEQ ID NO: 120331 - DNA, 75 bp, synthetic construct
  source 1..75: mol_type = other DNA
catacaccacgtcagcggtggggacgggatactggttactgcaactgctggacaaagtctctccgtcccagtggg

SEQ ID NO: 120332 - DNA, 75 bp, synthetic construct
  source 1..75: mol_type = other DNA
atgaaatcaatggacaaaatctcaactggcattgcttacggaacatccgctggtagtgcgggatactggttttta

SEQ ID NO: 120333 - DNA, 75 bp, synthetic construct
  source 1..75: mol_type = other DNA
ataaagtcgccggtatccgtgcggtagaaattggctctttcctgttaggccgcgatccgaaaaccggtaaacaac

SEQ ID NO: 120334 - DNA, 75 bp, synthetic construct
  source 1..75: mol_type = other DNA
gggtttccccgtctcaggtgggcggcaataggcgtgcgtgggagtctgctgtttgggctgctgacatatctgact

SEQ ID NO: 120335 - DNA, 75 bp, synthetic construct
  source 1..75: mol_type = other DNA
ttggcgaagtacgcaaattatttgaactgtatatgtcgcctggcggtgtgaccgagctaatccacttttttatcg

SEQ ID NO: 120336 - DNA, 75 bp, synthetic construct
  source 1..75: mol_type = other DNA
acaccgttaacgcccaccgtcggcccatctccagttctttgctggcctttggtgggcaaaaagactccccgagta

SEQ ID NO: 120337 - DNA, 75 bp, synthetic construct
  source 1..75: mol_type = other DNA
cagaacagcaaaaaaagctggccgaccctgctttccgcgctcgtgcgcaaggtttagcggcggtggactctggca

SEQ ID NO: 120338 - DNA, 75 bp, synthetic construct
  source 1..75: mol_type = other DNA
cggcaataggcgtgctggggagtctgctgtttgggctgctgacgtacctgacaaacctgtatttcaaaatcagag

SEQ ID NO: 120339 - DNA, 75 bp, synthetic construct
  source 1..75: mol_type = other DNA
cccagtgggtggcaataggcgtattgggtagcttggtgtttggcttgctgacgtatctgacaaacctttatttca

SEQ ID NO: 120340 - DNA, 75 bp, synthetic construct
  source 1..75: mol_type = other DNA
gctgtttggcctgctgacgtatctgacaaacctttatttcaagattaaagaagataagcgcaaggctgcaagagg

SEQ ID NO: 120341 - DNA, 75 bp, synthetic construct
  source 1..75: mol_type = other DNA
cgccctcacagtgggcagcaataggtgtgctgggtagcctggtatttggcctgctgacgtacctgacaaaccttt

SEQ ID NO: 120342 - DNA, 75 bp, synthetic construct
  source 1..75: mol_type = other DNA
tggctggtcgatgtcaccgcgaatgacagcacaactggcctgtgatgcactgcaaatggcgttgtggcggagaag

SEQ ID NO: 120343 - DNA, 75 bp, synthetic construct
  source 1..75: mol_type = other DNA
atgcttttgaccctgctttaaacggtttacgtctgaatattgcgctggatgatgacgggaaatccttctgggtgc

SEQ ID NO: 120344 - DNA, 75 bp, synthetic construct
  source 1..75: mol_type = other DNA
gcgctaaatatttttggtcgggtctatctggcgcatgaagggatcaacgcgcaaatcagcgtacctgcgagctat

SEQ ID NO: 120345 - DNA, 75 bp, synthetic construct
  source 1..75: mol_type = other DNA
gcgtggaagaagtcagggccggagatggcttcgctggaagcctggctggaagaacatgagaaatacaggagtgtt

SEQ ID NO: 120346 - DNA, 75 bp, synthetic construct
  source 1..75: mol_type = other DNA
gtacgaaggcatcctggacagcaacccggccatcaccgtgctgcatggtgaagcgcgtttcaaggacgaccagag

SEQ ID NO: 120347 - DNA, 75 bp, synthetic construct
  source 1..75: mol_type = other DNA
ctgtaccgtgccgattatggcgcgctggaaaaagctggtattgtggcaaaaaacacccgttcataatacgcgctg

SEQ ID NO: 120348 - DNA, 75 bp, synthetic construct
  source 1..75: mol_type = other DNA
cccgtcgcgaagcgattgaagaggcggggctgatagtcaaacggaccaaaccggtgttaagtttcctggcaagcc

SEQ ID NO: 120349 - DNA, 75 bp, synthetic construct
  source 1..75: mol_type = other DNA
gaaagagaacgcggcgaatattaaagggttaacctttacctacgaaccgaaagtattgcgtcacttcaccgcaaa

SEQ ID NO: 120350 - DNA, 75 bp, synthetic construct
  source 1..75: mol_type = other DNA
gaaagagaacgcggcgaatattaaaggtttaacctttacctatgagccaaaagtattgcgtcacttcaccgcaaa

SEQ ID NO: 120351 - DNA, 75 bp, synthetic construct
  source 1..75: mol_type = other DNA
agctgtataaagtcgccggtatccgtgcggtagaaattggctctttcctgttaggccgcgatccgaaaaccggta

SEQ ID NO: 120352 - DNA, 75 bp, synthetic construct
  source 1..75: mol_type = other DNA
gaaatacaaccagctgtatccggaccagttcctgccactgcagcgtgacatgattggtaagtttggtgcggccaa

SEQ ID NO: 120353 - DNA, 75 bp, synthetic construct
  source 1..75: mol_type = other DNA
ccaacgacgcgctgaaagccagaatgctggccgaaaacgaacctcgtaccaccatttcgttctataaatattttc

SEQ ID NO: 120354 - DNA, 75 bp, synthetic construct
  source 1..75: mol_type = other DNA
ggcgggattattgaatacgctcgtaaggcgcgtgaacaaggtttgcctgtccgctttattggtaaaaattttgtt

SEQ ID NO: 120355 - DNA, 75 bp, synthetic construct
  source 1..75: mol_type = other DNA
ttagaacgcggtattgaagaagttggcccgaataacgtgccatatatcgttgcgaccatcaccagtaactccgca

SEQ ID NO: 120356 - DNA, 75 bp, synthetic construct
  source 1..75: mol_type = other DNA
ctgtctgatgacgtacagccatcacgcctgtcgtacagagaattatgccatgacggttcattattaccgtctacg

SEQ ID NO: 120357 - DNA, 75 bp, synthetic construct
  source 1..75: mol_type = other DNA
gctcgccgccgtgggcaagatggacgctatcaactggcaaacggcatgggggcgatgcttgatgccgacgacgcg

SEQ ID NO: 120358 - DNA, 75 bp, synthetic construct
  source 1..75: mol_type = other DNA
tgacggttcattattaccgtctacgggattacgccctgcagcatccggaatgcagcgccattatgcgcatcatcg

SEQ ID NO: 120359 - DNA, 75 bp, synthetic construct
  source 1..75: mol_type = other DNA
tgccgcctgtctgatggcgtacagtcatcacgcctgtcgtacagagaattatgccatgacggtccactattaccg

SEQ ID NO: 120360 - DNA, 75 bp, synthetic construct
  source 1..75: mol_type = other DNA
gaggcggtttgatggtgttaatgtatggcagcgttatacaactgccggaacaggtacaacccttaaaggccgcac

SEQ ID NO: 120361 - DNA, 75 bp, synthetic construct
  source 1..75: mol_type = other DNA
gcgtactcatgacgctatcgacggcaaaccatttagcggtgccgtgccatttggcagcgccaaaaacgatttagt

SEQ ID NO: 120362 - DNA, 75 bp, synthetic construct
  source 1..75: mol_type = other DNA
tcagtttacggatttgcaggatcaggtgattgcgaatctgttcaagctatatccgtgggaatttatgttgcgcga

SEQ ID NO: 120363 - DNA, 75 bp, synthetic construct
  source 1..75: mol_type = other DNA
tgggcggcttctggatgcgtgagcttggtctgtatgacgatgccggaacactgattgcggtatccaacatggcag

SEQ ID NO: 120364 - DNA, 75 bp, synthetic construct
  source 1..75: mol_type = other DNA
gtgctggagttgctttcccctgcccaaaggccgctgcaaatcacgcgtgatttgagcgccttctggaaaggagcg

SEQ ID NO: 120365 - DNA, 75 bp, synthetic construct
  source 1..75: mol_type = other DNA
acgggcgtaatgctgatggtggtcgtgttgtttgctttcctctactcatggccgattcaggcactgctgccaacg

SEQ ID NO: 120366 - DNA, 75 bp, synthetic construct
  source 1..75: mol_type = other DNA
gcctgtcgtatggagaattatgccatgacggtccattattaccggttgcgggattacgccctgcagcatccggaa

SEQ ID NO: 120367 - DNA, 75 bp, synthetic construct
  source 1..75: mol_type = other DNA
gaatacccgcctggaagtagttaccgaaggcgtgctgacgcggatgatccagcgtgacccggaactgagcggtgt

SEQ ID NO: 120368 - DNA, 75 bp, synthetic construct
  source 1..75: mol_type = other DNA
attaagaattattggtgaagttgatggcgatgatgaagccatcttcagaccgatacaaaaatacatcaatggcac

SEQ ID NO: 120369 - DNA, 75 bp, synthetic construct
  source 1..75: mol_type = other DNA
gaagataatgctgtcggtgtgcttgaggtttttgctggcggcaattttgcaggcacgcaacgctataccacacgt

SEQ ID NO: 120370 - DNA, 75 bp, synthetic construct
  source 1..75: mol_type = other DNA
atggtggccacactgaaaatccccatggaacggcgtaataaacggacaggcaggagagagaaagcgcggatctgg

SEQ ID NO: 120371 - DNA, 75 bp, synthetic construct
  source 1..75: mol_type = other DNA
cgtcgctggaaacgtggctgctgccacatatggccggcgtacattcgctgcgtggcctgaaatctcttgatgttt

SEQ ID NO: 120372 - DNA, 75 bp, synthetic construct
  source 1..75: mol_type = other DNA
gtgcaatttttactgtgtttgctaggaggaaagtcgtgggatgcatgtgtgaatagctacagaaatgcattggca

SEQ ID NO: 120373 - DNA, 75 bp, synthetic construct
  source 1..75: mol_type = other DNA
aagtcgcgaagcgggaaggtgcgttggaattgtccgcattgcggaaaaatcacctggcagtacaacccatatgat

SEQ ID NO: 120374 - DNA, 75 bp, synthetic construct
  source 1..75: mol_type = other DNA
tagtaatgatgatggttatgcctgtgagttatgctgcatgttatggcgagttgtcagcacagcataatttggttg

SEQ ID NO: 120375 - DNA, 75 bp, synthetic construct
  source 1..75: mol_type = other DNA
gtttgctgatggaattactgcaatggggatgcagcgatccggcgcagatgagttggcttgatcaaccgccagcgg

SEQ ID NO: 120376 - DNA, 75 bp, synthetic construct
  source 1..75: mol_type = other DNA
cacttttaaatatcactgacagcagtaaaggatacacaaatttaaaagaaattgcggcgaagtcaaaacttacag

SEQ ID NO: 120377 - DNA, 75 bp, synthetic construct
  source 1..75: mol_type = other DNA
cttacaaagcgatctttccggtttgctgatggaattactgcaatggggatgcagcgatccggcgcagatgagctg

SEQ ID NO: 120378 - DNA, 75 bp, synthetic construct
  source 1..75: mol_type = other DNA
cgaacgggtcttacacggttgattacccagcgagttagtcaggcgtcgatgacgcagcgtgccgggcgcgccggg

SEQ ID NO: 120379 - DNA, 75 bp, synthetic construct
  source 1..75: mol_type = other DNA
ctggaaagtcatccttacctggcaacgccggcgaaggtggcgattttatcgaaacccttaccgctggcggagcaa

SEQ ID NO: 120380 - DNA, 75 bp, synthetic construct
  source 1..75: mol_type = other DNA
cagacaaacgctgctggaaaaaggcagtgtacttattcgtgctcttgaatccggctcgcgcgtcggcatggggat

SEQ ID NO: 120381 - DNA, 75 bp, synthetic construct
  source 1..75: mol_type = other DNA
gttcaggcattggcgaattatacggtgcagtttgccgacaaccgccagtatgttgttggcgcgacgctaccggtg

SEQ ID NO: 120382 - DNA, 75 bp, synthetic construct
  source 1..75: mol_type = other DNA
gcatcagcttctggccgcagcagtttggcctcattccacagtgggttaccctggacccccgtgtcttcggctgga

SEQ ID NO: 120383 - DNA, 75 bp, synthetic construct
  source 1..75: mol_type = other DNA
gattttctcttaccttgaatgctacattggagataagaaacaagcattatattatagaagtcgcaacagtgccgt

SEQ ID NO: 120384 - DNA, 75 bp, synthetic construct
  source 1..75: mol_type = other DNA
tgtcattaattcaacgacatggctggcagggaaccgaagaagggaaacatactggcaatatggcggatgaaccgg

SEQ ID NO: 120385 - DNA, 75 bp, synthetic construct
  source 1..75: mol_type = other DNA
gcaccgggcagaaaaaaggcaaaaacaggacgcatctggacgtatgtccgggatgaccggaatgcgggctcatca

SEQ ID NO: 120386 - DNA, 75 bp, synthetic construct
  source 1..75: mol_type = other DNA
tccgttgcgcattgtcattttgctgctcggtttcctcatcatcaaaatcgccatgctgtggctgattgcccgacc

SEQ ID NO: 120387 - DNA, 75 bp, synthetic construct
  source 1..75: mol_type = other DNA
atttcgttacagtaaaacctgcgtcgaacctgaattaccgggttgaggccgttatcgtagcggggctcggtcccg

SEQ ID NO: 120388 - DNA, 75 bp, synthetic construct
  source 1..75: mol_type = other DNA
ccggagcggcgaaagcggaagtgctgattaacgccatcgacgatccgcaaaccaacctgcaactgacggagatgg

SEQ ID NO: 120389 - DNA, 75 bp, synthetic construct
  source 1..75: mol_type = other DNA
atgctgttcggtacctgttctgaaaaactgcgtcgtgaagttgaacaggctgaggccctgctgaaacaacgcgaa

SEQ ID NO: 120390 - DNA, 75 bp, synthetic construct
  source 1..75: mol_type = other DNA
ggtgagctggattatctgggggaagtcagtgcagaacaactggaactggtgagcagcgctctgaaagtgatccgc

SEQ ID NO: 120391 - DNA, 75 bp, synthetic construct
  source 1..75: mol_type = other DNA
tacggttccagcgccacttatgtcattgaaagctggccaaaacatctgcgtaacaaagccagtggttttctgatt

SEQ ID NO: 120392 - DNA, 75 bp, synthetic construct
  source 1..75: mol_type = other DNA
gctgacagccatgacggcctcgtttgtgctggcgacaccgaccgagacggatggggcgctgtttcccggtcggat

SEQ ID NO: 120393 - DNA, 75 bp, synthetic construct
  source 1..75: mol_type = other DNA
gccatgaacggtaaccgcgctgaaatgagcccggaagctgccggtattgccgcctgtctgatgacgtacagtcat

SEQ ID NO: 120394 - DNA, 75 bp, synthetic construct
  source 1..75: mol_type = other DNA
tgctgctgatgagcgagcgcaaggcccagtctctcggcctgccggtgctcgcgcgcatcgcgggctatgccagcg

SEQ ID NO: 120395 - DNA, 75 bp, synthetic construct
  source 1..75: mol_type = other DNA
ctgttcggtcttgtcaccgggatggcggaggatttgcagagcctggtgggtgccacggtggtccgccgccgggtg

SEQ ID NO: 120396 - DNA, 75 bp, synthetic construct
  source 1..75: mol_type = other DNA
gtggggcgcactctgttattacagtgttgacggtcaggcggaggcagacataatgccgcggaaaaagccctttgt

SEQ ID NO: 120397 - DNA, 75 bp, synthetic construct
  source 1..75: mol_type = other DNA
aatatcgtgatgacactggcggcggccactgcgctgtggttctgcttcgccggtaacctgcaaaatgccgcaatc

SEQ ID NO: 120398 - DNA, 75 bp, synthetic construct
  source 1..75: mol_type = other DNA
aattatccgccgcgatgcgaagaagggcctggcgaccctgtgtatcggcggcgggctgggtgtggctctggccat

SEQ ID NO: 120399 - DNA, 75 bp, synthetic construct
  source 1..75: mol_type = other DNA
ctgggtgaagtcagtgctgagcagttggaactggtgagtagcgccctgaaagtgatccgcactgttcgggtaaaa

SEQ ID NO: 120400 - DNA, 75 bp, synthetic construct
  source 1..75: mol_type = other DNA
caaaggggacgcctggtattcagatgtatgaggcatataacaatggctacccttacacctatggcaatgtgcttc

SEQ ID NO: 120401 - DNA, 75 bp, synthetic construct
  source 1..75: mol_type = other DNA
caggagaaagaacacacgttatcgaaaaaatgccgtctgagagatgcgttccggtatatcaggaagcactgggtt

SEQ ID NO: 120402 - DNA, 75 bp, synthetic construct
  source 1..75: mol_type = other DNA
cagacgttttgatggtgtgtctgtctggcagcgttacacaaccacagggaaatcagaaactacacagggacgcac

SEQ ID NO: 120403 - DNA, 75 bp, synthetic construct
  source 1..75: mol_type = other DNA
acgtagtcagcaactgttaaaacgcttaaacgtacgtggcggtgaggcagacagttcgcttatcgcgccgctact

SEQ ID NO: 120404 - DNA, 75 bp, synthetic construct
  source 1..75: mol_type = other DNA
accgccagtcagaaatataccgtcgtcagggtgtggaggtgagccgcgccacgctggggtgtcaacgccacgatt

SEQ ID NO: 120405 - DNA, 75 bp, synthetic construct
  source 1..75: mol_type = other DNA
ggtctggttcgcctactcaccggaccatcagggtaaacatccggagcaacaccttcgtcccttccggggtatcct

SEQ ID NO: 120406 - DNA, 75 bp, synthetic construct
  source 1..75: mol_type = other DNA
aacggtatcgatccggaagcgtatctgcgccatattctgagcgtactgccggaatggccttccaaccgagttggc

SEQ ID NO: 120407 - DNA, 75 bp, synthetic construct
  source 1..75: mol_type = other DNA
ccgctggcccaaaggcgaaaggttaattgccgaagcgttaggcttcaagcctgagcaaatctggccttcgcgcta

SEQ ID NO: 120408 - DNA, 75 bp, synthetic construct
  source 1..75: mol_type = other DNA
aacatctgagggcccagatagaaaaactgcgccggatgttgttcggtacccgttctgaaaaactgcagcgtgagg

SEQ ID NO: 120409 - DNA, 75 bp, synthetic construct
  source 1..75: mol_type = other DNA
tctggggctgagacctgaaggaaaagaaatttccgtgaaagtacccaaaacagtggatgagttaatcgaaattat

SEQ ID NO: 120410 - DNA, 75 bp, synthetic construct
  source 1..75: mol_type = other DNA
aggaatgcagcgttataccaccagaacaggcaatgtttatatgcgcaacctttctggcacctggaatggctcaga

SEQ ID NO: 120411 - DNA, 75 bp, synthetic construct
  source 1..75: mol_type = other DNA
ttgttcagcaattccatccactaccgaaatttggcgacagttatatgctgattggaagttggctggtgaacgatc

SEQ ID NO: 120412 - DNA, 75 bp, synthetic construct
  source 1..75: mol_type = other DNA
cgcatggttattattgtcagcaacgtggcgtccgttgagctgagtattgatgccagcacagtgatggcgacgcag

SEQ ID NO: 120413 - DNA, 75 bp, synthetic construct
  source 1..75: mol_type = other DNA
tggacaacgaccgcttgcaacaaatgctaccagaagcgcccgtcgtcatctcagaagggcgctcgtttccggttg

SEQ ID NO: 120414 - DNA, 75 bp, synthetic construct
  source 1..75: mol_type = other DNA
tggcgttggcgctattgctggacgtgcaacaagggctgcgcgatgacttaaagctgctgattatgtcggctacgc

SEQ ID NO: 120415 - DNA, 75 bp, synthetic construct
  source 1..75: mol_type = other DNA
cggctgtgtgccgattaccacggtggtatctggaacttttcgacgctcagcaacggcggtgcttttatggctccc

SEQ ID NO: 120416 - DNA, 75 bp, synthetic construct
  source 1..75: mol_type = other DNA
ccatcacgcaaaatatcgtggacttcgactccccgaccgcatcgagcgctgcacgcgctgcctgggggaactcgt

SEQ ID NO: 120417 - DNA, 75 bp, synthetic construct
  source 1..75: mol_type = other DNA
gccagcctcgtccctgatgaacagcgcatcagcttctggccgcagcactttggtctcattccacagtgggtgacc

SEQ ID NO: 120418 - DNA, 75 bp, synthetic construct
  source 1..75: mol_type = other DNA
gttgatattctgcgcgaatgcaatgacgaactcgctaaactggaaaccctcgacaccggaaaagcgtattcagaa

SEQ ID NO: 120419 - DNA, 75 bp, synthetic construct
  source 1..75: mol_type = other DNA
gtggctattcagcatggttcgttcattgaagatgataaacaacacgtcgtttttcaccgcgataacgcaagtgaa

SEQ ID NO: 120420 - DNA, 75 bp, synthetic construct
  source 1..75: mol_type = other DNA
ttgagtacatgcaagcgcgccggcaggagggggtcgatatccacgatgcggtatacggactggcgtgccgcaact

SEQ ID NO: 120421 - DNA, 75 bp, synthetic construct
  source 1..75: mol_type = other DNA
ggctgcatgcgcaacgttacattcctggtcagccggaactcgcactgaacgatctcacgcgctcaatcaatattg

SEQ ID NO: 120422 - DNA, 75 bp, synthetic construct
  source 1..75: mol_type = other DNA
agaccgttgctgacggtgtccaatctgttcggtctggtcaccgggatggcggaagacctgcagagtctggtgggg

SEQ ID NO: 120423 - DNA, 75 bp, synthetic construct
  source 1..75: mol_type = other DNA
atgccatgacgatccattattaccggttgcgggattacgccctgcagcatccggaatgcagcgccattatgcgca

SEQ ID NO: 120424 - DNA, 75 bp, synthetic construct
  source 1..75: mol_type = other DNA
ccggtcgaatctatattcagaacgttgaccactgcaatacccatagcccgtttgatccggccatcgcgccagtgc

SEQ ID NO: 120425 - DNA, 75 bp, synthetic construct
  source 1..75: mol_type = other DNA
cgggctgatcccggcgctggaaggcagccagatcccgttgcgtgagacgtcatttgtttatacccgccgcgaacc

SEQ ID NO: 120426 - DNA, 75 bp, synthetic construct
  source 1..75: mol_type = other DNA
gtcaccgcgggtggtgctctgggaaattgacctgacggtgcagggcggtgagcggtattttttctgtaatgagct

SEQ ID NO: 120427 - DNA, 75 bp, synthetic construct
  source 1..75: mol_type = other DNA
caatgccatgaacggcaaccgcgctgaaatgagcccggaagccgctggcattgctgcctgtctgatgacgtacag

SEQ ID NO: 120428 - DNA, 75 bp, synthetic construct
  source 1..75: mol_type = other DNA
ttcattccatctcgtatccagcaagctgattggcgatcagctggaccgggggctgtctgagttccgctggcaggg

SEQ ID NO: 120429 - DNA, 75 bp, synthetic construct
  source 1..75: mol_type = other DNA
atgaaaatcatcacccgtggcgaagccatgcgtattcaccgtcagcatccagcatcccgtctttttccgttctgt

SEQ ID NO: 120430 - DNA, 75 bp, synthetic construct
  source 1..75: mol_type = other DNA
cgcgggccccggattacttgcccgcgtgttaacgggacaatactgcgaacacctgccactgtatcgtcagagtga

SEQ ID NO: 120431 - DNA, 75 bp, synthetic construct
  source 1..75: mol_type = other DNA
agcactgaaactgcctgacgaatccgcaaaggccaatgaagttctgggcgaaatgagcttcccgcagttcagccg

SEQ ID NO: 120432 - DNA, 75 bp, synthetic construct
  source 1..75: mol_type = other DNA
aagtagttggcgatgtcattgctaactcaggctctcatgcagctttagatacgttatttcttacttcgggagcac

SEQ ID NO: 120433 - DNA, 75 bp, synthetic construct
  source 1..75: mol_type = other DNA
acctcaaccgtcgatatcgttaccggtgcggacgtgctggagtactacgccgggctgatcccgtcgctggaaggc

SEQ ID NO: 120434 - DNA, 75 bp, synthetic construct
  source 1..75: mol_type = other DNA
tgatggaagcaaaggtcgatgcgtgtaacgtgggtattatgggaacatccttgagcggactggatgcggcaatgg

SEQ ID NO: 120435 - DNA, 75 bp, synthetic construct
  source 1..75: mol_type = other DNA
gctacgcacccgccagccgccttatctcgatatcccgttggttgataccagcgcggctggcgatctgggcgaggc

SEQ ID NO: 120436 - DNA, 75 bp, synthetic construct
  source 1..75: mol_type = other DNA
atgagcgggcttagaaattgggtggtgtggtcgctatatgacggcagcgggtacgccgttaaagattgggcggac

SEQ ID NO: 120437 - DNA, 75 bp, synthetic construct
  source 1..75: mol_type = other DNA
ggtgtgctggccgtgtttgctgaacgccgtaaggacagttttggtccgtatgtccggctgatgagcgtcaccctg

SEQ ID NO: 120438 - DNA, 75 bp, synthetic construct
  source 1..75: mol_type = other DNA
tacagtctgaacaacggcggagcatttatggcccccgaaccggatgacgatgatggcgaaaactgggtactgttc

SEQ ID NO: 120439 - DNA, 75 bp, synthetic construct
  source 1..75: mol_type = other DNA
tccgccatgcgacgatctcgccgtgtctggcgctcgctggttcgctgacaagcgaaaaaaagatccaggcttcca

SEQ ID NO: 120440 - DNA, 75 bp, synthetic construct
  source 1..75: mol_type = other DNA
gccgctatttcggcctgtaccaatgcctgatgagtgggaagatagtaagcagcacgcgaagttaggcgggaagtc

SEQ ID NO: 120441 - DNA, 75 bp, synthetic construct
  source 1..75: mol_type = other DNA
atgagcaaggctaaacactggttaaataattggcttagaagttgggttgtgtggtcgctgtacgacggcagcggc

SEQ ID NO: 120442 - DNA, 75 bp, synthetic construct
  source 1..75: mol_type = other DNA
ccgcgttaaagctggctgaaatttacagcgaagcgggcctgccggacggcgtatttaacgtgctgccgggcgtag

SEQ ID NO: 120443 - DNA, 75 bp, synthetic construct
  source 1..75: mol_type = other DNA
gtttgcactggatgtggctgcacggcaccgggtgcagttttcgatgcctgagtccgatgcggtgtctatgctcaa

SEQ ID NO: 120444 - DNA, 75 bp, synthetic construct
  source 1..75: mol_type = other DNA
aacgtattggtttgatgcattttgatggagtactggacgaaatcagctctatcatggggaccgatataactgctc

SEQ ID NO: 120445 - DNA, 75 bp, synthetic construct
  source 1..75: mol_type = other DNA
tggaccgtctgtgcgaagactactgcggaggcatctggaatctgtacaccctgaacaacggtggagcatttatgg

SEQ ID NO: 120446 - DNA, 75 bp, synthetic construct
  source 1..75: mol_type = other DNA
aacacaaacggcgacatatgagcataatttcaacgattcatcatgtgtgagtacaaataccatcactcccatgaa

SEQ ID NO: 120447 - DNA, 75 bp, synthetic construct
  source 1..75: mol_type = other DNA
atgaagcacgccagcagaacacattaagcgcggcagaacgccgtcagtggtttgacgtgcttcttgccgggcagc

SEQ ID NO: 120448 - DNA, 75 bp, synthetic construct
  source 1..75: mol_type = other DNA
gtacacgagaaactgtcgggaacaacgcgtcattccactgccacaacggaaacgggtatagctcaaacatcgacc

SEQ ID NO: 120449 - DNA, 75 bp, synthetic construct
  source 1..75: mol_type = other DNA
gtactaatacaatagcgcagatagacccttcggatattgtgattggactctataatgacaccatcaaacttaagt

SEQ ID NO: 120450 - DNA, 75 bp, synthetic construct
  source 1..75: mol_type = other DNA
aaccacaacctgcaaaccggacgatttattaattactttagagagtattcccgtttcacaattaccagccacagg

SEQ ID NO: 120451 - DNA, 75 bp, synthetic construct
  source 1..75: mol_type = other DNA
cctggattggggaggcggttgccaccgctgctgctgacggtgtgacgttctctgttccggtcacaccacatacgt

SEQ ID NO: 120452 - DNA, 75 bp, synthetic construct
  source 1..75: mol_type = other DNA
tgacacctgcggccagtaatgcaaaagtgaatgtttctgcggggggcggcggttcagtgatgattaatggagttg

SEQ ID NO: 120453 - DNA, 75 bp, synthetic construct
  source 1..75: mol_type = other DNA
ttaaatgtgcgtggtggcgaggcagacagttcgcttatcgcgccgcttctcgccagggcgtttgccgatcgtatt

SEQ ID NO: 120454 - DNA, 75 bp, synthetic construct
  source 1..75: mol_type = other DNA
tggaccgtctgtgcgaagactactgcggaggcatctggaatctgtacaccctgaacaacgggggtgcatttatgg

SEQ ID NO: 120455 - DNA, 75 bp, synthetic construct
  source 1..75: mol_type = other DNA
gcacaggaaggacagagaaagcgcggatctgggaagtgacggacagaacggtcaggacctggattggggaggcgg

SEQ ID NO: 120456 - DNA, 75 bp, synthetic construct
  source 1..75: mol_type = other DNA
gcaaagtcaaaacttacagatacaacggtttcaattccgataactgccagttactacgtctacgatacaaacaaa

SEQ ID NO: 120457 - DNA, 75 bp, synthetic construct
  source 1..75: mol_type = other DNA
tggaccgtctgtgcgaagactactgcggaggtatctggaatctgtacaccctgaacaacggcggggcatttatgg

SEQ ID NO: 120458 - DNA, 75 bp, synthetic construct
  source 1..75: mol_type = other DNA
cacgctacccggtgtggcgttgtatgcatggcttcaggccgaacaacgacaaccgagcgcctggcaacatcgtgc

SEQ ID NO: 120459 - DNA, 75 bp, synthetic construct
  source 1..75: mol_type = other DNA
ttattgggtgcgggcgaacgcggtgccgatggtgcgcgatggcaaaatcagtggctatatgtcgattcgcacgcg

SEQ ID NO: 120460 - DNA, 75 bp, synthetic construct
  source 1..75: mol_type = other DNA
cctactatctccgggcagcggagacgaagttccccctgcctcctgcactggatttacccctgacgctgcgtaact

SEQ ID NO: 120461 - DNA, 75 bp, synthetic construct
  source 1..75: mol_type = other DNA
tagctaacggacagactattgagccttacgctcacgttcaggataatgaaccgccccgggaatcctggagactaa

SEQ ID NO: 120462 - DNA, 75 bp, synthetic construct
  source 1..75: mol_type = other DNA
gccaaacagagccgttatccgaagaaaaatacaaccgcgtcgtaatgtatggcgtagaaggcattcgtggtgtaa

SEQ ID NO: 120463 - DNA, 75 bp, synthetic construct
  source 1..75: mol_type = other DNA
tctcgttatacactacacggactaggaataactggtgtacatactgaagaaaacctgctaccagctccttcatcg

SEQ ID NO: 120464 - DNA, 75 bp, synthetic construct
  source 1..75: mol_type = other DNA
tggaccgtctgtgcgaagactactgcggaggaatctggaatctgtacaccctgaacaacggtggcgcatttatgg

SEQ ID NO: 120465 - DNA, 75 bp, synthetic construct
  source 1..75: mol_type = other DNA
cagtcatatattacttacgcgaccgcgctggcttatcgtggcgaaaaagcacgcctccagcattatctaattgaa

SEQ ID NO: 120466 - DNA, 75 bp, synthetic construct
  source 1..75: mol_type = other DNA
gtttgcgctggatgtggctgcccggcaccgggtgcagttttcgatgcctgagtccgatgcggtcacaatgctgaa

SEQ ID NO: 120467 - DNA, 75 bp, synthetic construct
  source 1..75: mol_type = other DNA
cgaatacggtttcaattttcacaccatgtacggagagccgtactggtgtgaagatgcttactacaagttgaccct

SEQ ID NO: 120468 - DNA, 75 bp, synthetic construct
  source 1..75: mol_type = other DNA
ggcgacggatgacgagatcgcagcggtagagccgctgtacaaggcgctgaatgccggacgtacaaataagcgtat

SEQ ID NO: 120469 - DNA, 75 bp, synthetic construct
  source 1..75: mol_type = other DNA
gccaatgctgccaacgatattcgcaagctgattgatgccagtgctgataaggtgcaatccggttcgcaacaggta

SEQ ID NO: 120470 - DNA, 75 bp, synthetic construct
  source 1..75: mol_type = other DNA
ggaacaggccgatgggctttccagcctgacccgtgcagtggatgagcttaacctcatcacccagaaaaatgccga

SEQ ID NO: 120471 - DNA, 75 bp, synthetic construct
  source 1..75: mol_type = other DNA
taattatctgtcggacgttgcacgccgttcacgctggatccggggtgactggcaactgcttaactggctgaaacc

SEQ ID NO: 120472 - DNA, 75 bp, synthetic construct
  source 1..75: mol_type = other DNA
atcggcactgggtacgaatgcagtagccgatctcgggcaaaaactcggcgtagataccagtgctgcttccaacat

SEQ ID NO: 120473 - DNA, 75 bp, synthetic construct
  source 1..75: mol_type = other DNA
tgacctgcgaatttgcgtcatccagtgagattatcccttccatttcaatcgaaaatattctgactcgcgcggcct

SEQ ID NO: 120474 - DNA, 75 bp, synthetic construct
  source 1..75: mol_type = other DNA
cctctacaatccggacaagcccgatcgcccagtgaacagcccgaaggctgtttatcagatcgaacctgctgctct

SEQ ID NO: 120475 - DNA, 75 bp, synthetic construct
  source 1..75: mol_type = other DNA
ggtccggtaacgtgctgagtccggccaaactccgcgacaagtggacccagctcgaaatcaaccggaacaagcaac

SEQ ID NO: 120476 - DNA, 75 bp, synthetic construct
  source 1..75: mol_type = other DNA
aaccagttagcggcgagcaactggaatcagcgctcggcacaaatgcggtgtccgatctcgggcaaaaactgggcg

SEQ ID NO: 120477 - DNA, 75 bp, synthetic construct
  source 1..75: mol_type = other DNA
ggtgttaagcaactggcggatgaccgcacgctgctgatggcgggggtaagtcacgacttgcgcacgccgctgacg

SEQ ID NO: 120478 - DNA, 75 bp, synthetic construct
  source 1..75: mol_type = other DNA
cggaccggtcacatcatttttaaacgccttgatcttgttgataagcttaacgacattatctgccgtcaatatggt

SEQ ID NO: 120479 - DNA, 75 bp, synthetic construct
  source 1..75: mol_type = other DNA
tgtggattcgcatgggaagatgcccgatgtggtgttgcactttactgagaaaaactggctgctactggtggagtc

SEQ ID NO: 120480 - DNA, 75 bp, synthetic construct
  source 1..75: mol_type = other DNA
gaaagcaccgaatttacaaaaagaattaacgtgatcggcgtgaccgaccagaaaggcgaaaaaatcctcccggac

SEQ ID NO: 120481 - DNA, 75 bp, synthetic construct
  source 1..75: mol_type = other DNA
gtcggcgctcggcacaaacgcggtgtccgatctcgggcaaaaactcggcgtagataccagtgttgcttccaacat

SEQ ID NO: 120482 - DNA, 75 bp, synthetic construct
  source 1..75: mol_type = other DNA
cagcaagaatgccaacagaacacatttatctcgggcaatcgtccgggcgaattggcgaatggatttcacagctcc

SEQ ID NO: 120483 - DNA, 75 bp, synthetic construct
  source 1..75: mol_type = other DNA
actggcgtgctgtcgttgcaatcgccgccaagaatgcgaggttgtgctgggcatcattacattacggcgatgact

SEQ ID NO: 120484 - DNA, 75 bp, synthetic construct
  source 1..75: mol_type = other DNA
caatttgctggatatcgggcgtgatattgtcgagcagaaagtgaaacgcccactgccggagcgaatgctgcgcga

SEQ ID NO: 120485 - DNA, 75 bp, synthetic construct
  source 1..75: mol_type = other DNA
caatggtcgtctggaaggcgatcgtgacaaagtgctgagagatcccctcataatttccccaaagcgtaaccatgt

SEQ ID NO: 120486 - DNA, 75 bp, synthetic construct
  source 1..75: mol_type = other DNA
ttcccgacagccatctgtgctgcgggtcggcgggaacgtatgcattaacgcatcccgatctggcgcgccagctgc

SEQ ID NO: 120487 - DNA, 75 bp, synthetic construct
  source 1..75: mol_type = other DNA
accgcagccaacgactgatggaactgaaagggattggtcccacaacggcctgtgcgctggtcgccagtatcggta

SEQ ID NO: 120488 - DNA, 75 bp, synthetic construct
  source 1..75: mol_type = other DNA
acagaagaattctttgccgcttcaggttcagcaatgcgttgatgatctgctggaacacattaatcgcattgaaga

SEQ ID NO: 120489 - DNA, 75 bp, synthetic construct
  source 1..75: mol_type = other DNA
ctggagtggtataagcggtgctcatgctccggcatttattcgttcacgacgggatacgaccgacgcaaactggtc

SEQ ID NO: 120490 - DNA, 75 bp, synthetic construct
  source 1..75: mol_type = other DNA
tatgagcaggataaaacctacaaaattacagttctgcataccaatgatcatcatggtcatttctggcgtaatgaa

SEQ ID NO: 120491 - DNA, 75 bp, synthetic construct
  source 1..75: mol_type = other DNA
tacggtgaatatggcctggcggcgcaaaaaacgctggtggatgggatccgcaaagaggttgcggttgaaggcggc

SEQ ID NO: 120492 - DNA, 75 bp, synthetic construct
  source 1..75: mol_type = other DNA
aactggaggtgaagattggcgaagtcaatggccgtctggaaggtgaccgtgataaggtccgttttgtgcagacca

SEQ ID NO: 120493 - DNA, 75 bp, synthetic construct
  source 1..75: mol_type = other DNA
tacagtagtggcggaaaatcaaagcttggcaggataacaaaagcgggtgatgcctatctgcgaaccctactggtc

SEQ ID NO: 120494 - DNA, 75 bp, synthetic construct
  source 1..75: mol_type = other DNA
aagagaaaacagcaacgtataatcgtctgcgaggattgatatctgaattcggtgtcatcgcgccacaaagtgctg

SEQ ID NO: 120495 - DNA, 75 bp, synthetic construct
  source 1..75: mol_type = other DNA
gaagggtgttggccccacaacggcctgtgcgctggtcgccagtatcggtaatgcacatgattttaagaatgggcg

SEQ ID NO: 120496 - DNA, 75 bp, synthetic construct
  source 1..75: mol_type = other DNA
gttcagcaatgtgttgatgatttgctggagcacgttgctcgcatcgaagccaacatagctgaatatgaccgaatt

SEQ ID NO: 120497 - DNA, 75 bp, synthetic construct
  source 1..75: mol_type = other DNA
acatagtatttccctcatttgtttcaagcctgccgatgtgtaatgacccaaagacaatactagaactggatcgtt

SEQ ID NO: 120498 - DNA, 75 bp, synthetic construct
  source 1..75: mol_type = other DNA
acgccatcgcaatatagtagcggcggaaaatcaaagcttggcaggataacgaaggcgggcgattcgtatctacga

SEQ ID NO: 120499 - DNA, 75 bp, synthetic construct
  source 1..75: mol_type = other DNA
cctgagagggttgatctctgaattcggcgtcattgctccacaaagtacagatgccctgcgccacatggtatctga

SEQ ID NO: 120500 - DNA, 75 bp, synthetic construct
  source 1..75: mol_type = other DNA
caaaaaaacatagcttaaccgcaggctttcatataaaaaggcgatccggtgggatatctaaaacatctaaggata

SEQ ID NO: 120501 - DNA, 75 bp, synthetic construct
  source 1..75: mol_type = other DNA
atacggggctagcgggtcctataaatcattccttgccggatcgtgggcgtgccatgttgccactggtcgccagtg

SEQ ID NO: 120502 - DNA, 75 bp, synthetic construct
  source 1..75: mol_type = other DNA
attggcatagctgatagaaatattaaggtcaatttgatacttctggttcaggatattgaacttaagaaagttaat

SEQ ID NO: 120503 - DNA, 75 bp, synthetic construct
  source 1..75: mol_type = other DNA
cccgtcaggaagtaaaaaatattctgtgcatcaaggcagacagttcgctacaggacatgatcaacgctggaaaat

SEQ ID NO: 120504 - DNA, 75 bp, synthetic construct
  source 1..75: mol_type = other DNA
atccatccgtgggtatcaacgtttacggcagtgataataacgtgacgctggatggaaagttaactgttgtatcag

SEQ ID NO: 120505 - DNA, 75 bp, synthetic construct
  source 1..75: mol_type = other DNA
atcgacagcattcctgccgagacgctgcgcatcctgagcaacatggaatggccgggcaacgtgcgtgagctggaa

SEQ ID NO: 120506 - DNA, 75 bp, synthetic construct
  source 1..75: mol_type = other DNA
tgccagtttacctccctgtgttatcgggatggaggcatgctccggggctcactactgggcaaggttgtttcggca

SEQ ID NO: 120507 - DNA, 75 bp, synthetic construct
  source 1..75: mol_type = other DNA
atgcctcgttggcaacgttggttgagtgataatggcataacacaaagcatgtcccgacgtggtaactgcttagat

SEQ ID NO: 120508 - DNA, 75 bp, synthetic construct
  source 1..75: mol_type = other DNA
accctgatggagcccagattttcgtagttgatgtcggacgctcataccaaggtatttcggaacaatatactaata

SEQ ID NO: 120509 - DNA, 75 bp, synthetic construct
  source 1..75: mol_type = other DNA
actactgggcaaggttgtttcggcagtatggtcatgagccgcgcctgatggctgctaagtttgtatcgccttact

SEQ ID NO: 120510 - DNA, 75 bp, synthetic construct
  source 1..75: mol_type = other DNA
tgcaggactgcgaaatgtatacttgcaacggaatgaagatcagttgattaagagagttaagcacgggaatgaaat

SEQ ID NO: 120511 - DNA, 75 bp, synthetic construct
  source 1..75: mol_type = other DNA
gggatggaagcatgctccggggctcattactgggcaagattgtttcggcagtatggtcatgagccacgtctgatg

SEQ ID NO: 120512 - DNA, 75 bp, synthetic construct
  source 1..75: mol_type = other DNA
gattacgtggtaaaggggattattccggcatcgtcgctatgcagcatatacggggcaagcggttcctataaatca

SEQ ID NO: 120513 - DNA, 75 bp, synthetic construct
  source 1..75: mol_type = other DNA
gtacaagagtctggtagcttctctagtgtagaggaactgctttctacacttgccgtatcttctcctgcttccata

SEQ ID NO: 120514 - DNA, 75 bp, synthetic construct
  source 1..75: mol_type = other DNA
gatcgcaggtgtccaggaagcacggttactttcagagaatttcgaactgctggaggactggagcgagcaactacc

SEQ ID NO: 120515 - DNA, 75 bp, synthetic construct
  source 1..75: mol_type = other DNA
cgttgccgaagggtccggacgtgcacaaacatttcgcaccattctgaccgtatccagcactgccactgtggcgct

SEQ ID NO: 120516 - DNA, 75 bp, synthetic construct
  source 1..75: mol_type = other DNA
gatcttgctaacggaaaatatacagcgcaggatgccacaacagcgcgaaaaggccttgtccagcttagtagtgca

SEQ ID NO: 120517 - DNA, 75 bp, synthetic construct
  source 1..75: mol_type = other DNA
tctaatgattattctggacacgctggcgcgttgctttggcggcaatgacgaaaatgactcccgtgacatgggggc

SEQ ID NO: 120518 - DNA, 75 bp, synthetic construct
  source 1..75: mol_type = other DNA
tcctcccgttgaactggagcgcatcgaagaggctggcaacaagacggagaatcatgctgcgctatggggatgtat

SEQ ID NO: 120519 - DNA, 75 bp, synthetic construct
  source 1..75: mol_type = other DNA
actgtatctgatatggaggctaataacttagggcaggcttatggcaaagaactgtatgaacgatatcatccggta

SEQ ID NO: 120520 - DNA, 75 bp, synthetic construct
  source 1..75: mol_type = other DNA
attgatgctctccccccgcggggtgaagtttcttcaaaagccaataacgatctgctttccgcaggcatggaactg

SEQ ID NO: 120521 - DNA, 75 bp, synthetic construct
  source 1..75: mol_type = other DNA
gcagtggcaccgagccgaatcgcgcctggttccaggtagaagacgatggcccgggtattgcgccagaacaacgta

SEQ ID NO: 120522 - DNA, 75 bp, synthetic construct
  source 1..75: mol_type = other DNA
atcgctgcccgtcaggtggagcgggaaacgggtaaacctgtacgcatgattattctggatacgctggcgcgttgc

SEQ ID NO: 120523 - DNA, 75 bp, synthetic construct
  source 1..75: mol_type = other DNA
aatgaaaaacttcagccgctggctacgcaagctggaaaaagacggggttatttatatcgacggtgatgatgtagg

SEQ ID NO: 120524 - DNA, 75 bp, synthetic construct
  source 1..75: mol_type = other DNA
attccgccgccgctgcgtgaatatggcgcttcggaggtgcgttccgttacccgcgcctttaaccatatggcggct

SEQ ID NO: 120525 - DNA, 75 bp, synthetic construct
  source 1..75: mol_type = other DNA
aaaacaataatgcacaggtagctttgttaaatacacagttaagcgagtttgccccaaccatgccccataacgaag

SEQ ID NO: 120526 - DNA, 75 bp, synthetic construct
  source 1..75: mol_type = other DNA
tgcgctttgtaccagtcaaagacgaaagccagcaggcaatgcaatgcttacatcggacaagacagggatttatcc

SEQ ID NO: 120527 - DNA, 75 bp, synthetic construct
  source 1..75: mol_type = other DNA
caacaggcgctggatgccgcgttcggtggtggtgctgacgttatcaaaaagctgtacggccagcaggataaatta

SEQ ID NO: 120528 - DNA, 75 bp, synthetic construct
  source 1..75: mol_type = other DNA
ccaaaattggcactggatggttgtcgataaacaaaacgaaagtgtcgaggtgataggcattcagtcggagaaact

SEQ ID NO: 120529 - DNA, 75 bp, synthetic construct
  source 1..75: mol_type = other DNA
ttttgccagatggctgctatcttccctgggaagtagatagctggactctggttaaccagcaaacaagctggctga

SEQ ID NO: 120530 - DNA, 75 bp, synthetic construct
  source 1..75: mol_type = other DNA
tgcggcggctgtctggggcgtggcgcagtccatcgcgggcgtggtgggtccggcgtatgagatgaacgccgcgct

SEQ ID NO: 120531 - DNA, 75 bp, synthetic construct
  source 1..75: mol_type = other DNA
tcgagctgggtatgggcgcacgtccggaggcgattttgttcgccatcactaccgccgggagtaacgttgtctctg

SEQ ID NO: 120532 - DNA, 75 bp, synthetic construct
  source 1..75: mol_type = other DNA
ccggataacggcgtttattccgcgcttgagctgggtatgggcgcccgtcctgaggcaattttgttcgccatcact

SEQ ID NO: 120533 - DNA, 75 bp, synthetic construct
  source 1..75: mol_type = other DNA
accagtggcatggcgatatcgctacgtgaaaaaaggcgttacggactttcaggagaagatgtgggttggtgactg

SEQ ID NO: 120534 - DNA, 75 bp, synthetic construct
  source 1..75: mol_type = other DNA
ggggctgataaggctgcgagaataatcgcagtatgtcggggtattcggcatattctgactccagtagcgtggatc

SEQ ID NO: 120535 - DNA, 75 bp, synthetic construct
  source 1..75: mol_type = other DNA
tcgcggtatgccgagggattcgtcacatacttacgcctgttgcctggatcatttgtactgcattagtggcgggta

SEQ ID NO: 120536 - DNA, 75 bp, synthetic construct
  source 1..75: mol_type = other DNA
ttttcgctgaaggctatgctgggcgtagcctgtattatgtgcggattaacgctgattttcatgccgattgcaaaa

SEQ ID NO: 120537 - DNA, 75 bp, synthetic construct
  source 1..75: mol_type = other DNA
ccctgggaagtagatagctggactctggttaaccagcaaacaagctggctgaaccgccccgggaatcctggagac

SEQ ID NO: 120538 - DNA, 75 bp, synthetic construct
  source 1..75: mol_type = other DNA
ttctcgcggctctgtcctcacgtcaaaggcccgttgcgcgggcagtctatcgagctggagccgtggcagcagttc

SEQ ID NO: 120539 - DNA, 75 bp, synthetic construct
  source 1..75: mol_type = other DNA
attaagcctgggttatgcggcgagtcatctaccgccgatgacgcacttatgggattttatcgcggcgctgttagc

SEQ ID NO: 120540 - DNA, 75 bp, synthetic construct
  source 1..75: mol_type = other DNA
agcggttcctataaatcgttcctcgcgtgttcctgggcgtgtcatgttgccacgggtcgccactggggaggccgc

SEQ ID NO: 120541 - DNA, 75 bp, synthetic construct
  source 1..75: mol_type = other DNA
cgtgttgcactgaaaaaaccagaagtcgcaggcttgtaccatctggtagccagtggtaccacaacctggcacgat

SEQ ID NO: 120542 - DNA, 75 bp, synthetic construct
  source 1..75: mol_type = other DNA
cgcgtggcgcagaacaagcccgaggttgctggtttgtaccatctggttgccagcggtaccacaacctggtacgac

SEQ ID NO: 120543 - DNA, 75 bp, synthetic construct
  source 1..75: mol_type = other DNA
ttccttgctggttcgtgggcgtgtcacgtttcaacgggtcgccactggggaggccgcagggttgcacatggtgcg

SEQ ID NO: 120544 - DNA, 75 bp, synthetic construct
  source 1..75: mol_type = other DNA
tcgatgtttccgtcgatcgtgaaaaactggcctcaaccatccagaaagcgcggggtattccgtcgcagtgggtgg

SEQ ID NO: 120545 - DNA, 75 bp, synthetic construct
  source 1..75: mol_type = other DNA
ccctttctactggggatcaattgctggctaatcgtcttccctataacactattgagcaaattcttacacgtcgaa

SEQ ID NO: 120546 - DNA, 75 bp, synthetic construct
  source 1..75: mol_type = other DNA
aatgaaaaacttcagccgctggctacgcaagctggaaaaagacgccgttatttatatcgacggtgatgatgtagg

SEQ ID NO: 120547 - DNA, 75 bp, synthetic construct
  source 1..75: mol_type = other DNA
tctctcaacctgtggatgagagacttacgcgtgcagccatatttctggttgtgactattaatcccggtaaagcgg

SEQ ID NO: 120548 - DNA, 75 bp, synthetic construct
  source 1..75: mol_type = other DNA
ccatacccgtgccattcacagcattgacactgacattaagctcaaccgcgcattgtgggtgatggcggaaacatt

SEQ ID NO: 120549 - DNA, 75 bp, synthetic construct
  source 1..75: mol_type = other DNA
tgcggtatctgcgctgatggcgttcggcaccttccaggctgagcatgaggattttgctttcgatatgagcgacag

SEQ ID NO: 120550 - DNA, 75 bp, synthetic construct
  source 1..75: mol_type = other DNA
caaatcaaggcgctggcgcagacgtatcagatgccgattatcggttacacgccagaaaccaacggctatccgtat

SEQ ID NO: 120551 - DNA, 75 bp, synthetic construct
  source 1..75: mol_type = other DNA
aaaagctaagccggactgcaaattaccggagaaggcgatggactacctgaagcggaacgaactgataagcgcgga

SEQ ID NO: 120552 - DNA, 75 bp, synthetic construct
  source 1..75: mol_type = other DNA
cagatattttcaaaaatacagcaggtaaaaaaaccataaaagttacacttacatttgatccaccagttagacaca

SEQ ID NO: 120553 - DNA, 75 bp, synthetic construct
  source 1..75: mol_type = other DNA
taacgtcgtgatgcagagtgacgcgaacgccaatatcaagccgaacaagaaaaaatcaccgaacaagatagaccc

SEQ ID NO: 120554 - DNA, 75 bp, synthetic construct
  source 1..75: mol_type = other DNA
atgtacatttaccggatcatttagcagtgatggagcttcctcccgctttatcggcagagcgtgaattaggttgct

SEQ ID NO: 120555 - DNA, 75 bp, synthetic construct
  source 1..75: mol_type = other DNA
gtgatttaagacgcaatctcactttgcaggaacgaaagctctggcgatatcttcgcagccgacgttttagtgatt

SEQ ID NO: 120556 - DNA, 75 bp, synthetic construct
  source 1..75: mol_type = other DNA
cgccaaccaacggtgcttgtggcattgttccggcagtgctggcttactatgaccactttattgagtccgtcagcc

SEQ ID NO: 120557 - DNA, 75 bp, synthetic construct
  source 1..75: mol_type = other DNA
tatcaccgttccagaacaaaggcaaagcgcagctggaagtgaaaataggcgaaaccaatggtcgtctggaaggcg

SEQ ID NO: 120558 - DNA, 75 bp, synthetic construct
  source 1..75: mol_type = other DNA
aaaagctggggtatgaaatgaaaaacttccggcgctggctgtacaagctggaaaaagatggggttattcgtatcg

SEQ ID NO: 120559 - DNA, 75 bp, synthetic construct
  source 1..75: mol_type = other DNA
tactaaacaacgttgctggcgtgggggcgtggttcaaaaatcctggtgcagaaaacagcgcatcaagaattgcgg

SEQ ID NO: 120560 - DNA, 75 bp, synthetic construct
  source 1..75: mol_type = other DNA
agctggatggtgggcagcatgatttggcagttgcctatgataccaggcgcactagctggcttgagtcgcagggct

SEQ ID NO: 120561 - DNA, 75 bp, synthetic construct
  source 1..75: mol_type = other DNA
caagatttaatctcttgtcagaatgaggtgatgcaaaaaataaaatcaaatgcgcgtgatttaagacgcaatctc

SEQ ID NO: 120562 - DNA, 75 bp, synthetic construct
  source 1..75: mol_type = other DNA
tgcggcgcgtttgtcaaagagtatgggcagatgctgaaaaacgatgcgttatatgccgataaagcgcgtcaggtc

SEQ ID NO: 120563 - DNA, 75 bp, synthetic construct
  source 1..75: mol_type = other DNA
ttgatgccaaacttccagccgttggcaattttccgcgagttccagccggaaggttgggttgaagtggtcaacaaa

SEQ ID NO: 120564 - DNA, 75 bp, synthetic construct
  source 1..75: mol_type = other DNA
cacggaacagattattcacctggctggcgaagggactataactccagaaataagccaacggcatcagagatcggg

SEQ ID NO: 120565 - DNA, 75 bp, synthetic construct
  source 1..75: mol_type = other DNA
cctacccgcaatttgccaacgttagctttgtggcgaaagacggcaaactgaacgacctgaaaatcaaaggcgaac

SEQ ID NO: 120566 - DNA, 75 bp, synthetic construct
  source 1..75: mol_type = other DNA
gccatgttgccactggtcgccagtggggaggccgcagggttgcacatggtgcggttctctatgtggttggtgaag

SEQ ID NO: 120567 - DNA, 75 bp, synthetic construct
  source 1..75: mol_type = other DNA
gtggagtgcttatcagaccattcaggagaatatgctgaaaggcggaatttccggtcgcagtgccagagggaaacg

SEQ ID NO: 120568 - DNA, 75 bp, synthetic construct
  source 1..75: mol_type = other DNA
cgttgttaaagctgaacagaaagacaatgacagtgtgtatgtggaacttgatgagtatgttgttacccgagagct

SEQ ID NO: 120569 - DNA, 75 bp, synthetic construct
  source 1..75: mol_type = other DNA
gcaggaacgaaagctctggcgatatcttcgcagccgacgttttggtgatttcaaatttcgccgtcaacatccggt

SEQ ID NO: 120570 - DNA, 75 bp, synthetic construct
  source 1..75: mol_type = other DNA
gagtcattgtaccaacagaagattatataatcggcacaagcggcgttaaatataaatttggtgtatcaacgtcaa

SEQ ID NO: 120571 - DNA, 75 bp, synthetic construct
  source 1..75: mol_type = other DNA
tattcttaatcttatcctgttagggaaagttaaattcattgatgctaaatacaatacgcaatttagtttaaatta

SEQ ID NO: 120572 - DNA, 75 bp, synthetic construct
  source 1..75: mol_type = other DNA
tgacttcagtgatgacggataatccacaggaacgaaccaaagcggcaacctgtgccatgctgggggtgaatgctg

SEQ ID NO: 120573 - DNA, 75 bp, synthetic construct
  source 1..75: mol_type = other DNA
cgcggtgagcggttattatcaggtcgcacagacgctggcggataaacgccaaaaacaacaggcgcaggccgccgc

SEQ ID NO: 120574 - DNA, 75 bp, synthetic construct
  source 1..75: mol_type = other DNA
acgtctgagacgaatgcggataacagcgcacaggcggcagcagactcacaaactgcatcggcaaactccgcgaca

SEQ ID NO: 120575 - DNA, 75 bp, synthetic construct
  source 1..75: mol_type = other DNA
gggtacgacacacagcttgattatgtcgttaagggcgtgattccggctaattcattgtgcagcacatacggcgcg

SEQ ID NO: 120576 - DNA, 75 bp, synthetic construct
  source 1..75: mol_type = other DNA
gagggtggtcgagttatcgcagaaagttctcgtgcacagataaatattagcgcaaatacatacgggtcagcattt

SEQ ID NO: 120577 - DNA, 75 bp, synthetic construct
  source 1..75: mol_type = other DNA
ttacttcaggttcgtctgccagaacggctgcgtctgtggccagtctctgggggaagtgcgtgttccacaccgggg

SEQ ID NO: 120578 - DNA, 75 bp, synthetic construct
  source 1..75: mol_type = other DNA
caccgatgttgtggttggttaccgcgttgatactggagacagtaaccctgacagggctaacctcagagttaacgt

SEQ ID NO: 120579 - DNA, 75 bp, synthetic construct
  source 1..75: mol_type = other DNA
ggttgacctgaactactccaactcaacggcaccatcaggtgatactgaggcagggagtctgtattcagggattgg

SEQ ID NO: 120580 - DNA, 75 bp, synthetic construct
  source 1..75: mol_type = other DNA
tatgctgtgctggtctttgaagaggcgcacaaagcagggattcaccttgcactcaacaagctcaatgcagtacca

SEQ ID NO: 120581 - DNA, 75 bp, synthetic construct
  source 1..75: mol_type = other DNA
ggctctatttatcgctgcacaactgggtttgtttctaccgggcaacctgcatcagaaaacgtgaatctgaccatg

SEQ ID NO: 120582 - DNA, 75 bp, synthetic construct
  source 1..75: mol_type = other DNA
acgggtgaatatcctgaagggtgaacagcgtcgtgtcagtggcagtgcccgggtttccctcaaacgtcgtatctg

SEQ ID NO: 120583 - DNA, 75 bp, synthetic construct
  source 1..75: mol_type = other DNA
ccaaactatcagggagtaacagcgatatgcagtcagccgtgaacattaacagtgcagcaagcggcggaacgcgca

SEQ ID NO: 120584 - DNA, 75 bp, synthetic construct
  source 1..75: mol_type = other DNA
gacggccaccatttctgtggatggtggtgtgttcaataacgaaggaaccgttactggtcaggtagggacaactgt

SEQ ID NO: 120585 - DNA, 75 bp, synthetic construct
  source 1..75: mol_type = other DNA
aatgtttacggtgaaaccaagttagctggagaaaaagcattacaagagcattgtgcgaagcaccttatttttcgt

SEQ ID NO: 120586 - DNA, 75 bp, synthetic construct
  source 1..75: mol_type = other DNA
acgaaaacaaagaaataacagcaatcaaagtaaaaggagcaaatgccatgcattcattagacagttattttcagc

SEQ ID NO: 120587 - DNA, 75 bp, synthetic construct
  source 1..75: mol_type = other DNA
ccgacagtgatgtcagcccggtatgggataacggcgatgtcattaccgccgaaggggagatgctggcattgccat

SEQ ID NO: 120588 - DNA, 75 bp, synthetic construct
  source 1..75: mol_type = other DNA
tcactctgacgctgctttacaacggttattgacacgtttcaacgatcctgaagggtggagtaatctggcgaaaaa

SEQ ID NO: 120589 - DNA, 75 bp, synthetic construct
  source 1..75: mol_type = other DNA
ttgttacgtgcactggcgggactgaataaggccaacggtaaggtatttcttgatggtgtcaacctaatgcaaatg

SEQ ID NO: 120590 - DNA, 75 bp, synthetic construct
  source 1..75: mol_type = other DNA
gaacgggtgctgcgctggcgctggacggtgcgacatttagttcagaaacaaccctgaataacggaaccaacacca

SEQ ID NO: 120591 - DNA, 75 bp, synthetic construct
  source 1..75: mol_type = other DNA
acgcgcaaaggggtgatgattttcgctgcgacagtcgaacacgcaaaagagattgtcggcttgctgcccgctgag

SEQ ID NO: 120592 - DNA, 75 bp, synthetic construct
  source 1..75: mol_type = other DNA
gcatgaaaggccagtactggcaggggcgtgaaaaagtgttcgattacgaaggtcgttttcgtctggcgcacgaat

SEQ ID NO: 120593 - DNA, 75 bp, synthetic construct
  source 1..75: mol_type = other DNA
acgcgttctgcatgaagtgtgcccgtggtggcgcggtcagacggtacaggatcgctgctacggcatgtttaccga

SEQ ID NO: 120594 - DNA, 75 bp, synthetic construct
  source 1..75: mol_type = other DNA
tcgagcagctttttatccgcccgcatacgcgcacaccgggcatccctctgcgctggatcaccgccgccgatatcc

SEQ ID NO: 120595 - DNA, 75 bp, synthetic construct
  source 1..75: mol_type = other DNA
cggttacggcactatcggcagttaagcctccagttgccaaaagggaacgatccggcatatcagaaaacagaatag

SEQ ID NO: 120596 - DNA, 75 bp, synthetic construct
  source 1..75: mol_type = other DNA
tatccaggggtgtgacgcgataaagcaggccacaggggccacggtactggtggttcaccattccggcaaggatga

SEQ ID NO: 120597 - DNA, 75 bp, synthetic construct
  source 1..75: mol_type = other DNA
ctggaagagaacgtacacgatattctctgctcggcgctggtggatgactgtattgagcgagcgaaaagtatcaag

SEQ ID NO: 120598 - DNA, 75 bp, synthetic construct
  source 1..75: mol_type = other DNA
atggagaaaaaatccccggcctacttttgctgtcgggatatgcaggtaattcactctgacgctgctttacaacgg

SEQ ID NO: 120599 - DNA, 75 bp, synthetic construct
  source 1..75: mol_type = other DNA
tgctgatgccggtgcggaggcccagcgtctggcccgtggttatcttggtctggggacgcttgccacaaaaaacag

SEQ ID NO: 120600 - DNA, 75 bp, synthetic construct
  source 1..75: mol_type = other DNA
tgatcattaattccgccaataaaaatattgccaatttagtcggggcgatgctggttaaagtgattggctcagtca

SEQ ID NO: 120601 - DNA, 75 bp, synthetic construct
  source 1..75: mol_type = other DNA
atgctgaaaactgattccctgcgtgaagccatgacccgttcatgtcgatggtgtcaggccaacccggaaaaattc

SEQ ID NO: 120602 - DNA, 75 bp, synthetic construct
  source 1..75: mol_type = other DNA
aagagtacattgaagataattacccgaatgcctatccggcaagattttttgcaaatccaacgaaaatacaagagt

SEQ ID NO: 120603 - DNA, 75 bp, synthetic construct
  source 1..75: mol_type = other DNA
agttccgaatcagtcgggaacattcagaggctacggcgctggttgcagcatgtacgaagatgaaggacgcggagg

SEQ ID NO: 120604 - DNA, 75 bp, synthetic construct
  source 1..75: mol_type = other DNA
tatccaggggtgtgacgcgataaagcaggccacgggggccacggttctggttgtgcatcattccggcaaggatga

SEQ ID NO: 120605 - DNA, 75 bp, synthetic construct
  source 1..75: mol_type = other DNA
cggaaataaattaaagcgtgccgaacgactggccattattgataacgtacgagtagatctatgcaaacaggcatt

SEQ ID NO: 120606 - DNA, 75 bp, synthetic construct
  source 1..75: mol_type = other DNA
ggcggcgggtgtaactgatgcgaattattaccccgaagggatgcacagccatatgcgggagaactggcgcgaata

SEQ ID NO: 120607 - DNA, 75 bp, synthetic construct
  source 1..75: mol_type = other DNA
tcttctttaaatatggcggtgagggggggattgactcgcttcgctcgccctgcgggcagcccgctcactgcgttc

SEQ ID NO: 120608 - DNA, 75 bp, synthetic construct
  source 1..75: mol_type = other DNA
gcttacgtccatgctcaacactggattgaaagcgaaggacgaaaacacggcgataacgtaccacctgtttacctg

SEQ ID NO: 120609 - DNA, 75 bp, synthetic construct
  source 1..75: mol_type = other DNA
aattgatgaccagcttttaaaccgactccgtcagtctctggaccccaccgctctgggacaattccagtacatctc

SEQ ID NO: 120610 - DNA, 75 bp, synthetic construct
  source 1..75: mol_type = other DNA
ggacataaacatcacttctggtataacacagcaggatgcggattcccgatatatccaggatatcaggctgggagc

SEQ ID NO: 120611 - DNA, 75 bp, synthetic construct
  source 1..75: mol_type = other DNA
acaagtatggcgatcaaccgataagagctattaccatacagataattgctaatcagtttggtggggctgcaacgg

SEQ ID NO: 120612 - DNA, 75 bp, synthetic construct
  source 1..75: mol_type = other DNA
gcgtggaaatatttttgaaatctatcaaccatctgtgcacggtatttgggaattataccaggatttagaagggat

SEQ ID NO: 120613 - DNA, 75 bp, synthetic construct
  source 1..75: mol_type = other DNA
cgctgaaaaatcagaaaattggttcgttgggtatggacgtgtatgagaacgaacgcgatctgttctttgaagata

SEQ ID NO: 120614 - DNA, 75 bp, synthetic construct
  source 1..75: mol_type = other DNA
gagctggaattttttgactttctgctgacggaaaaaaccgctaaaactgccaatggctgcgaagcggtatgtatt

SEQ ID NO: 120615 - DNA, 75 bp, synthetic construct
  source 1..75: mol_type = other DNA
gcgaccaggcaaacctgcgccgcgaacatgtgctggcggtacgttactgcgtgtgcacggcgctggatgaagctg

SEQ ID NO: 120616 - DNA, 75 bp, synthetic construct
  source 1..75: mol_type = other DNA
tgtaatgctaaagttgcatcataatacagattttttggaaggtgaaagaaagaaaaaaataaatcatagaattca

SEQ ID NO: 120617 - DNA, 75 bp, synthetic construct
  source 1..75: mol_type = other DNA
atgaatgaaaaaataacaaatgcaggttttgtaatgagcgaaagctttattaaggaaagtatttcaaatataatt

SEQ ID NO: 120618 - DNA, 75 bp, synthetic construct
  source 1..75: mol_type = other DNA
gataattacttaaatgatatcattgcgttatcagaaaattatgtagtaatgttaaaactacatcacaatacagat

SEQ ID NO: 120619 - DNA, 75 bp, synthetic construct
  source 1..75: mol_type = other DNA
taacgtaactgtgcgtcttggtgaatacttcctgccgcagttcccgaccggggacatgagcaccgaagattatct

SEQ ID NO: 120620 - DNA, 75 bp, synthetic construct
  source 1..75: mol_type = other DNA
acggagcgacggtaatcactcaacacccgaaatggcgaagcaatggcctttcagtggtaaaccgtgcatcaatcc

SEQ ID NO: 120621 - DNA, 75 bp, synthetic construct
  source 1..75: mol_type = other DNA
gagcctcataactatggagcatggcgttctttaggagatctttgtttaacatatggtgattatgccagaaaaaaa

SEQ ID NO: 120622 - DNA, 75 bp, synthetic construct
  source 1..75: mol_type = other DNA
acatgtgttggcggtgcgctactgcctgtgtacgtcgcttgatgaagccgccaacaacaccacctggggacgacg

SEQ ID NO: 120623 - DNA, 75 bp, synthetic construct
  source 1..75: mol_type = other DNA
gcgtacaactacaccctgagccacggcagtgccgatgaaaactggtacctcaccagtgaagcgggttaccgtgcc

SEQ ID NO: 120624 - DNA, 75 bp, synthetic construct
  source 1..75: mol_type = other DNA
cccgacaatgacggttacggcgcgggcataaaggacagtcttcgcaaggaggagagcaaggtggtagttgaggac

SEQ ID NO: 120625 - DNA, 75 bp, synthetic construct
  source 1..75: mol_type = other DNA
tgccgctgtcagtggtacccggagcgacggaaaggcattccgtatcggaggcggtcaggcggatgccctgatgct

SEQ ID NO: 120626 - DNA, 75 bp, synthetic construct
  source 1..75: mol_type = other DNA
cgctggcgctgaacaatgcgatcatcaacagcgatatcatcgcacagtctggtacccaagtgcgcctgactggca

SEQ ID NO: 120627 - DNA, 75 bp, synthetic construct
  source 1..75: mol_type = other DNA
atgcctgttatgttaaatctctcaaatggacggatgttgccagaaagtgaactggaggcgttacgtaatgtagca

SEQ ID NO: 120628 - DNA, 75 bp, synthetic construct
  source 1..75: mol_type = other DNA
gatgaagttgaccttgagaaaggaatatgggagattccagctgaaaggatgaaaatgcgcaggcctcatattgta

SEQ ID NO: 120629 - DNA, 75 bp, synthetic construct
  source 1..75: mol_type = other DNA
ggtgactaaaggtgcagaaggggtggtggtctgttatcgaggacaagttcaccattttgctggaatgtctgtgaa

SEQ ID NO: 120630 - DNA, 75 bp, synthetic construct
  source 1..75: mol_type = other DNA
gcggcaaagatgcggtgaggtctatcgctatgcgatcataactggccgcgctgaatacaatccagcgcctgattt

SEQ ID NO: 120631 - DNA, 75 bp, synthetic construct
  source 1..75: mol_type = other DNA
atacgcaaaaattgctcaggatttagcggaaaagtctaaaggaaagaaaattcaaggtgttgatgaagctctggc

SEQ ID NO: 120632 - DNA, 75 bp, synthetic construct
  source 1..75: mol_type = other DNA
tcagtggtgcactgctgtcctcaccctgcacgctggtgagtaatgaggtgccgttaagcctccggccggagaatc

SEQ ID NO: 120633 - DNA, 75 bp, synthetic construct
  source 1..75: mol_type = other DNA
ccgttccggttactccggtcggtgcacgaattaagtttatccgatctgagattttggaaatctataaaaacaaag

SEQ ID NO: 120634 - DNA, 75 bp, synthetic construct
  source 1..75: mol_type = other DNA
aattgctacacagattagtgaaaaacagaagaaaatagaggagatgaaaaaagtattcaagcatcattcttatca

SEQ ID NO: 120635 - DNA, 75 bp, synthetic construct
  source 1..75: mol_type = other DNA
ggaacagtgttgagcatcaatggcgataacatcgtcctgaataacgagggtacaaccacggcaacgggtaacggt

SEQ ID NO: 120636 - DNA, 75 bp, synthetic construct
  source 1..75: mol_type = other DNA
cagtacagctgcaaccgtcaccggcacaaaccgtctgggagcattctccgttgtggcgggtaaggctgataatgt

SEQ ID NO: 120637 - DNA, 75 bp, synthetic construct
  source 1..75: mol_type = other DNA
ggccggagaaagccaaagaggttgttcgccgggaagggctggcggtttatatgatcaccaaagaaggcgatagct

SEQ ID NO: 120638 - DNA, 75 bp, synthetic construct
  source 1..75: mol_type = other DNA
tcacaggcgccgacactgaaatgggccagtctgaaactggcgaaactggggcgatggcatgacagcaaacgcaca

SEQ ID NO: 120639 - DNA, 75 bp, synthetic construct
  source 1..75: mol_type = other DNA
ccgacgccgttgcggcgaagttctgcgatatgccgttgctaccggacgcgcaaaatataactttgctcctgatct

SEQ ID NO: 120640 - DNA, 75 bp, synthetic construct
  source 1..75: mol_type = other DNA
tgcctagaaaaagatgttttcccatatataggtcagcgccctattgagcagatagaaccgctggagttgctcacc

SEQ ID NO: 120641 - DNA, 75 bp, synthetic construct
  source 1..75: mol_type = other DNA
cgggagtaaaatcaaacgtatcgaacgattagcaattatcgacagcgtccgcgttgacctgtgtaaacgggcatt

SEQ ID NO: 120642 - DNA, 75 bp, synthetic construct
  source 1..75: mol_type = other DNA
tttacgccaggtctgggggatgatagtgccacgctaaaatcaaaggtgtttgcttgggcatacgaaatatctgcc

SEQ ID NO: 120643 - DNA, 75 bp, synthetic construct
  source 1..75: mol_type = other DNA
gaaataacttcgcgaaaacgatgttacgtctggcaaaagagcgcgaagaattagccgttattaatgatcagtttg

SEQ ID NO: 120644 - DNA, 75 bp, synthetic construct
  source 1..75: mol_type = other DNA
gtttgccgccgtcattgttgcaggcgtcggctgatcttggcgcacgtccacgacaaacctttcgctatgtggtgc

SEQ ID NO: 120645 - DNA, 75 bp, synthetic construct
  source 1..75: mol_type = other DNA
cagggcaggtaggttgggaactacagcgttctctggctcctctgggtaacttaattgcgctcgacgttcactcta

SEQ ID NO: 120646 - DNA, 75 bp, synthetic construct
  source 1..75: mol_type = other DNA
tcactattgggcgccgttgttgggcttgatgacgggggcaagggttaacgagattgcacagttaatgctggacga

SEQ ID NO: 120647 - DNA, 75 bp, synthetic construct
  source 1..75: mol_type = other DNA
atgaatataacataaacggtcagagatttacatttaaaggagcaggaattgatatcggaaaagaaagcattgtaa

SEQ ID NO: 120648 - DNA, 75 bp, synthetic construct
  source 1..75: mol_type = other DNA
actgatgcgatgggttgccagaaagatattgcagagaagatacaaaaacagggaggtgattatttattcgcggta

SEQ ID NO: 120649 - DNA, 75 bp, synthetic construct
  source 1..75: mol_type = other DNA
atgattgaagtgatgggggatattcagttggaagatttcgaccgtgatttcctccgggcttatgagagcaagttg

SEQ ID NO: 120650 - DNA, 75 bp, synthetic construct
  source 1..75: mol_type = other DNA
ggagtcagagacgggcgcatttctgcgtccctgctcaatcttgcgagtgaattgtttactgcggtaacagccggg

SEQ ID NO: 120651 - DNA, 75 bp, synthetic construct
  source 1..75: mol_type = other DNA
aacctactgcaaaaagaaaataccgctactgggttgcgtacaaaaagccacgtcatattgctgctttaattctaa

SEQ ID NO: 120652 - DNA, 75 bp, synthetic construct
  source 1..75: mol_type = other DNA
ccaacgtatgtcgcaatctacatcacagaagtcgagggccctcgcgcacgcctcgccctatgaacagcaggtggc

SEQ ID NO: 120653 - DNA, 75 bp, synthetic construct
  source 1..75: mol_type = other DNA
tgcttgttgtctttaaactgttcggtcgtacatggacgcttgaccttaaggataacgaccatacagacccccgct

SEQ ID NO: 120654 - DNA, 75 bp, synthetic construct
  source 1..75: mol_type = other DNA
tacccaagtgaaggtgaatggttaccgtatcgaactgggggaagtcaaaagccaccttgaacagctcgacagcgt

SEQ ID NO: 120655 - DNA, 75 bp, synthetic construct
  source 1..75: mol_type = other DNA
cgtatcgaactgggggaagtcaaaagccaccttgaacagctcgacagcgtagggagtgccgccgtggtgtgccac

SEQ ID NO: 120656 - DNA, 75 bp, synthetic construct
  source 1..75: mol_type = other DNA
gggaagccgttggtgcatacaatgccggattcaaaaagagtgaacgccagaaccggaggcgtcttgcctatgcat

SEQ ID NO: 120657 - DNA, 75 bp, synthetic construct
  source 1..75: mol_type = other DNA
cgccagagaatgacgaagaagaacgtcagcgcattgttcaggtattgcgagaaaccaatggcattgttgccgggc

SEQ ID NO: 120658 - DNA, 75 bp, synthetic construct
  source 1..75: mol_type = other DNA
aactgcatttgagcaaatgaaagacggtgtaatggtgattaacaccagccgcggcgctctgattgactctcaggc

SEQ ID NO: 120659 - DNA, 75 bp, synthetic construct
  source 1..75: mol_type = other DNA
cggcgttaaatatatcgccctgcgctgtgccggtttcaataacgtcgaccttgacgcggcaaaagaactggggct

SEQ ID NO: 120660 - DNA, 75 bp, synthetic construct
  source 1..75: mol_type = other DNA
cgtacccgtgacgccaacttctctctggaaggcctgactggctttaccatgtatggcaaaacggcaggtgttatc

SEQ ID NO: 120661 - DNA, 75 bp, synthetic construct
  source 1..75: mol_type = other DNA
agcaggtcgccgaccttaaccaacagctcaaaaaaactattaaagatgcaagcgaagcgcgcgtggcatttgcta

SEQ ID NO: 120662 - DNA, 75 bp, synthetic construct
  source 1..75: mol_type = other DNA
cgtgcgctgtttaatccggcgaattacgacatcattgtccgcacgctgaccatggctgtggcagtcactatcgcc

SEQ ID NO: 120663 - DNA, 75 bp, synthetic construct
  source 1..75: mol_type = other DNA
actcataagcagaatctgataaagagattacgggtacataatgaagttgagttgttgtacaaggggatgcttctg

SEQ ID NO: 120664 - DNA, 75 bp, synthetic construct
  source 1..75: mol_type = other DNA
tacttttattttttattatatcattatttgttaatgtttaccttgtttataaagttgacgccaaacatcaacttc

SEQ ID NO: 120665 - DNA, 75 bp, synthetic construct
  source 1..75: mol_type = other DNA
atgatgaataaattcagttatgtcaatcgtatgcttcggcgcgtttttgtttttagttttatcacggtcccatca

SEQ ID NO: 120666 - DNA, 75 bp, synthetic construct
  source 1..75: mol_type = other DNA
aaaacagacaggctgggtgattgtggtgctggtagtggcgctgaatatctggttactggtgggaacggcactggg

SEQ ID NO: 120667 - DNA, 75 bp, synthetic construct
  source 1..75: mol_type = other DNA
gccgtcgccattgcgttgaaaactggggcatcgtccgtacgtttttatccacgttattgtagtggtcaagtaata

SEQ ID NO: 120668 - DNA, 75 bp, synthetic construct
  source 1..75: mol_type = other DNA
aagaaagttcgctgaatctggatgcgtacaactggaaagaggatggcatcagcgataaaggcgtgatgctgaact

SEQ ID NO: 120669 - DNA, 75 bp, synthetic construct
  source 1..75: mol_type = other DNA
cattaatggaggggcgatcgatgaaaagttctttgtagaaaattcatggtattttgagaatttcatgtcgttgac

SEQ ID NO: 120670 - DNA, 75 bp, synthetic construct
  source 1..75: mol_type = other DNA
gtgcttgcgttaatatcaaacacattgctaatgggatggtattatttttcttactttgttttatttattagatgc

SEQ ID NO: 120671 - DNA, 75 bp, synthetic construct
  source 1..75: mol_type = other DNA
aaacaaagctaccgatgagcgttggttctgccggatatgacacgcaactggattacgtggttaaggggattattc

SEQ ID NO: 120672 - DNA, 75 bp, synthetic construct
  source 1..75: mol_type = other DNA
ctttggatcgataaagttttgtcgcacggctgggcttacggtcacggcggtacggcgccgcgtggcaaacatttg

SEQ ID NO: 120673 - DNA, 75 bp, synthetic construct
  source 1..75: mol_type = other DNA
acatcagcggcaccggtgctgtggctatggaaggtgataagaacgcgcagctggttaacaatggcaccatcaacc

SEQ ID NO: 120674 - DNA, 75 bp, synthetic construct
  source 1..75: mol_type = other DNA
acggcaccacgcacgtcattttcgaaccattggatttcattgcaaggctggccgccctggtaccgaagcccagag

SEQ ID NO: 120675 - DNA, 75 bp, synthetic construct
  source 1..75: mol_type = other DNA
gtactggcagaagggatcgccgtacgtttctggacgctgcaaaaagttatcgacaacatccatcgcgccgccgat

SEQ ID NO: 120676 - DNA, 75 bp, synthetic construct
  source 1..75: mol_type = other DNA
ttaccgtatcgctgtcggttcacaggcggggcgaaaggtgttcactttgcaaactctgccgaccagtggtgatcc

SEQ ID NO: 120677 - DNA, 75 bp, synthetic construct
  source 1..75: mol_type = other DNA
gatatacagcgaacgccgatgtaaatggcgctcgtaacattttagctgcggggcacgccgttcttgcctgtggag

SEQ ID NO: 120678 - DNA, 75 bp, synthetic construct
  source 1..75: mol_type = other DNA
aacgcggagagatcagaaagcgttatcgtgaagggcaggaagatcaactgggggctctgggcctggttactaatg

SEQ ID NO: 120679 - DNA, 75 bp, synthetic construct
  source 1..75: mol_type = other DNA
taatgaagtcggagcctgggtaattcattactcaactgactacgtcttccctggaactggtgacatgccatggct

SEQ ID NO: 120680 - DNA, 75 bp, synthetic construct
  source 1..75: mol_type = other DNA
ccagcgaaaaagtgctggatcttgatctgcgcaaacccggcgatctggcgcgtagccatttactgcatcgcctga

SEQ ID NO: 120681 - DNA, 75 bp, synthetic construct
  source 1..75: mol_type = other DNA
ctggcgctgcgcggacacacgggcctggccaccactcgggtcgaagcagactataaacggttaaaaacgctcatt

SEQ ID NO: 120682 - DNA, 75 bp, synthetic construct
  source 1..75: mol_type = other DNA
atcgcccaccgggtgggtcgctatctggaacggcaaggcctgctggaacgggatgtcgaaaacagctatctggcc

SEQ ID NO: 120683 - DNA, 75 bp, synthetic construct
  source 1..75: mol_type = other DNA
gatgagcgttggatctaccggatacgacacacagcttgattacgtggtaaaggggattattccggcatcgtcgct

SEQ ID NO: 120684 - DNA, 75 bp, synthetic construct
  source 1..75: mol_type = other DNA
ctgcagcggctgcggcggcgccatgaaagtcatcgcctgcattgaagaccctatagtgatcaagcagatccttga

SEQ ID NO: 120685 - DNA, 75 bp, synthetic construct
  source 1..75: mol_type = other DNA
gtgaaggccaataagcaaaacaaagaggaacacgctattccaaatattgttttaagccggattgatgaacgcttg

SEQ ID NO: 120686 - DNA, 75 bp, synthetic construct
  source 1..75: mol_type = other DNA
gggcgtatttcccttctggaattacagcttgggttatcggctgaatacgcgctttttttctgtgtcatgtgttgc

SEQ ID NO: 120687 - DNA, 75 bp, synthetic construct
  source 1..75: mol_type = other DNA
tcatgcaccaaaatgaaggacgcggaggaactcaaagaagccgcatatgacttacgcgtggtggagctttttacc

SEQ ID NO: 120688 - DNA, 75 bp, synthetic construct
  source 1..75: mol_type = other DNA
ttggtgaaggcggtatcggcgttccgcgtcgtgtaaaagcctgggaggttgtgcacggtgagcaggtgaaaaatc

SEQ ID NO: 120689 - DNA, 75 bp, synthetic construct
  source 1..75: mol_type = other DNA
cgggtatcggtaaaaattatcggtgaaagtgcctcccgtcgcctgcaactctcccgtggcgacattgacattgcc

SEQ ID NO: 120690 - DNA, 75 bp, synthetic construct
  source 1..75: mol_type = other DNA
tgttcacttccacatgctgtttctcgacggtgtgtatgtcgagcaatcccacggctcagcgcgtttccgctgggt

SEQ ID NO: 120691 - DNA, 75 bp, synthetic construct
  source 1..75: mol_type = other DNA
ggtcacatgaacatcagtaattcttcccacaacggagccgttaatatgtggggcggaaatggtcgttttatcaat

SEQ ID NO: 120692 - DNA, 75 bp, synthetic construct
  source 1..75: mol_type = other DNA
cttcacgtccaggtctgggtaaggtgtccggtttcttctggcgtaatccggggctggggctgtttttgctgctgc

SEQ ID NO: 120693 - DNA, 75 bp, synthetic construct
  source 1..75: mol_type = other DNA
attatggagactattatgatgttgattattatgataacaatttgaaaaatgaagtttttgactggattggtaaat

SEQ ID NO: 120694 - DNA, 75 bp, synthetic construct
  source 1..75: mol_type = other DNA
gctcactcattcgcagagcattacatcattgcacaggccaaaaaagcaggcgatccagtccctcccgtttatctg

SEQ ID NO: 120695 - DNA, 75 bp, synthetic construct
  source 1..75: mol_type = other DNA
ttctgccggatatgacacgcaactggattacgtggttaaggggattattccggcagtatcgctgtgcagcatata

SEQ ID NO: 120696 - DNA, 75 bp, synthetic construct
  source 1..75: mol_type = other DNA
cggggcgagcggttcctataaatcattccttgccggatcgtgggcgtgtcacgtttccacgggccgccagtgggg

SEQ ID NO: 120697 - DNA, 75 bp, synthetic construct
  source 1..75: mol_type = other DNA
tgccggcgatcagaatgccttcttctggaaccaggataacggggtcatcaacttcgatcacgacagcgccagtgc

SEQ ID NO: 120698 - DNA, 75 bp, synthetic construct
  source 1..75: mol_type = other DNA
aacggggcaggggcaacaaggtcagggtggctgatgaaccggcaacaccagcacaacggcgagcgtcgatgacat

SEQ ID NO: 120699 - DNA, 75 bp, synthetic construct
  source 1..75: mol_type = other DNA
gtgggggcttacggcatcattaaccaatactgtctgaaaatgattggtggaccgattggtggcatgatttcagat

SEQ ID NO: 120700 - DNA, 75 bp, synthetic construct
  source 1..75: mol_type = other DNA
tttttgtcagcaagctaaagagcagccagagaaaaagtatgtttttattatagatgaaatcaatcgtgccaatct

SEQ ID NO: 120701 - DNA, 75 bp, synthetic construct
  source 1..75: mol_type = other DNA
ttgctctggatcatgacagaacggtggcgatagctgaagaagccatgaaagctttcgggcaggggcgaaaagttc

SEQ ID NO: 120702 - DNA, 75 bp, synthetic construct
  source 1..75: mol_type = other DNA
gcaaatgcgcatcgacggtacaactggggtagtagaccagtacaacctggtcgccagacgaagaagttcagacaa

SEQ ID NO: 120703 - DNA, 75 bp, synthetic construct
  source 1..75: mol_type = other DNA
tagctaaaaatggactaccttttctaattgtctccctcatatgtggttatgctacagatgctattcctatcttct

SEQ ID NO: 120704 - DNA, 75 bp, synthetic construct
  source 1..75: mol_type = other DNA
acttattggtgagggatttgaccaccctccgctggatacgctgattcttgccatgcctgtgtcatggaaagggac

SEQ ID NO: 120705 - DNA, 75 bp, synthetic construct
  source 1..75: mol_type = other DNA
cagtcgctgattctgccgccaccggcacgccaggcgctggcacaggcggcactgacttaccgttatggtgacgaa

SEQ ID NO: 120706 - DNA, 75 bp, synthetic construct
  source 1..75: mol_type = other DNA
ccgttgcacttaggccacctgcgtttaatgactcaggcggctgaaattggtgcggtaattatgccgcctgttccg

SEQ ID NO: 120707 - DNA, 75 bp, synthetic construct
  source 1..75: mol_type = other DNA
gatgtcacagatatcgaaacgcatctggtgatgagtcaggcagcccgccagactttatctctcgaaacggatttt

SEQ ID NO: 120708 - DNA, 75 bp, synthetic construct
  source 1..75: mol_type = other DNA
tggcaagaccatcgtgcgcgtcaacatcagcgatgcagtaaaacgtgctgacgccattatgagcaaaattgaagc

SEQ ID NO: 120709 - DNA, 75 bp, synthetic construct
  source 1..75: mol_type = other DNA
tagtatccattccttttgttaatcaaaagctatctatatttgagtaccaggttgccagcaagcaggtgaatagaa

SEQ ID NO: 120710 - DNA, 75 bp, synthetic construct
  source 1..75: mol_type = other DNA
aagagtatgggcagatgctgaaaaacgatgcgttatatgccgataaagcgcgtcaggtcagtgaactggcggtcg

SEQ ID NO: 120711 - DNA, 75 bp, synthetic construct
  source 1..75: mol_type = other DNA
ctggccctggtgctgtataattttatttttgatctcaaggcgtactgggcttataaatgcgtcacgaagaatatc

SEQ ID NO: 120712 - DNA, 75 bp, synthetic construct
  source 1..75: mol_type = other DNA
actctgctcgataacctccagcgtgaaggatttcatcctttctttgcctgccagacccgcgttcgtgatgtgggt

SEQ ID NO: 120713 - DNA, 75 bp, synthetic construct
  source 1..75: mol_type = other DNA
cagctggagaacgccattcagcggggaatgattttaaaccgcgacggcgttatttaccccgacgcgttaggcctg

SEQ ID NO: 120714 - DNA, 75 bp, synthetic construct
  source 1..75: mol_type = other DNA
ggcgataaaaaactggccttccactgcccgtgtaccctacaacatgcgcaaaagctgaacggcgaagtggaaaaa

SEQ ID NO: 120715 - DNA, 75 bp, synthetic construct
  source 1..75: mol_type = other DNA
attgacggagatgtgaagcttaaccgggcactgtgggtgatggcggaagccatgctcagtggtttccggcctgcg

SEQ ID NO: 120716 - DNA, 75 bp, synthetic construct
  source 1..75: mol_type = other DNA
gtctttaaaaatcattcacgccggcgaccagttatttatccgcattctgaaagcggaagataagctggaactgtg

SEQ ID NO: 120717 - DNA, 75 bp, synthetic construct
  source 1..75: mol_type = other DNA
gagtacttatcagactatccaggagaatatgctgaaaggcgggatttccggccgcagtgcaaaaggaaaacgtat

SEQ ID NO: 120718 - DNA, 75 bp, synthetic construct
  source 1..75: mol_type = other DNA
aataatggttctgtttcagtagatgatattacgactaccggggttgatgttgcatctgtcgatgtgtctgcatct

SEQ ID NO: 120719 - DNA, 75 bp, synthetic construct
  source 1..75: mol_type = other DNA
atgtctgcttttaaaaagtcacttcttgttgctggtgtagcaatgattctttccaataacgtgtttgctgatgaa

SEQ ID NO: 120720 - DNA, 75 bp, synthetic construct
  source 1..75: mol_type = other DNA
cgccagccgacgctcagcagctattaccctcttgataacgaagctccaggcggtatctacgagcttatcgcgcag

SEQ ID NO: 120721 - DNA, 75 bp, synthetic construct
  source 1..75: mol_type = other DNA
gaagataatctctttgctgctgtcacgaacggtgcaatagtgatccacacccaacgcctgaaatcagatccaggg

SEQ ID NO: 120722 - DNA, 75 bp, synthetic construct
  source 1..75: mol_type = other DNA
cgacaaccgacgctcagcagctattaccctcttgataatgaagcccctggcggtatctacgagctcatcgcgcaa

SEQ ID NO: 120723 - DNA, 75 bp, synthetic construct
  source 1..75: mol_type = other DNA
accacctgtccttctggtgtgcgctatcacaatttgctggatatcgggcgtgatattgtcgagcagaaagtgaaa

SEQ ID NO: 120724 - DNA, 75 bp, synthetic construct
  source 1..75: mol_type = other DNA
atgtctggaaatataggggcaaatccatttacctctgcaacgctaagtagcactaactggcaatacgcctgttcc

SEQ ID NO: 120725 - DNA, 75 bp, synthetic construct
  source 1..75: mol_type = other DNA
ccgggccattcacagcattgataccgacattaagctcaaccgcgcattgtgggtgatggcagaaacgatgctgga

SEQ ID NO: 120726 - DNA, 75 bp, synthetic construct
  source 1..75: mol_type = other DNA
ttgatgatgtgataaatcagacggttaatcgtgttcttgaccagtttgcgataacccttcctgaagatctctttg

SEQ ID NO: 120727 - DNA, 75 bp, synthetic construct
  source 1..75: mol_type = other DNA
cactatgttcccggtattttcggtgaagacaagcatacttcccgcagccaacgctatacgtacattcccaccatc

SEQ ID NO: 120728 - DNA, 75 bp, synthetic construct
  source 1..75: mol_type = other DNA
cgcatctatctgattaaacaggtgctggaaggcaacgaagttacgcttaaaacgcaggagcatctcgatcgctgt

SEQ ID NO: 120729 - DNA, 75 bp, synthetic construct
  source 1..75: mol_type = other DNA
tgcggtgattatgcctcccgttccggcgttttatcatcgcccgcaatcccttgatgatgtgataaatcagacggt

SEQ ID NO: 120730 - DNA, 75 bp, synthetic construct
  source 1..75: mol_type = other DNA
ccaccggcacgccaggcgctggcacaggctgcgctggcttaccgttatggtgacgaacatcagccggtcaccacc

SEQ ID NO: 120731 - DNA, 75 bp, synthetic construct
  source 1..75: mol_type = other DNA
atgctcgatgaattactggcaaccggtgcggttatctggtcggggcaaaaaaaactgggtgaagatgacggcctg

SEQ ID NO: 120732 - DNA, 75 bp, synthetic construct
  source 1..75: mol_type = other DNA
atgctaccaacactggcatcaatccatttcgagtcacttaatgtcaaatggtcgccagaacaacaaaaatctttt

SEQ ID NO: 120733 - DNA, 75 bp, synthetic construct
  source 1..75: mol_type = other DNA
caggctgatatcgcctgttatgcctccaaaaatggtggacggggccgggtgacggtttacgaaccacagcaagct

SEQ ID NO: 120734 - DNA, 75 bp, synthetic construct
  source 1..75: mol_type = other DNA
agcatcgacacggacattaggctcaaccgcgcattgtgggtgatggcagaaacgctgctggagagcatgcgctga

SEQ ID NO: 120735 - DNA, 75 bp, synthetic construct
  source 1..75: mol_type = other DNA
gcggaacagcccaccggcacaggggaaagacaccgtttctgaaatgtggccagaaagaacgctggaaatgacgtg

SEQ ID NO: 120736 - DNA, 75 bp, synthetic construct
  source 1..75: mol_type = other DNA
atgcgattagcaagtcgttttggttatgcgaaccagatacgccgtgaccgtccgctgacacacgaagaactgatg

SEQ ID NO: 120737 - DNA, 75 bp, synthetic construct
  source 1..75: mol_type = other DNA
gcagcattactttgaaaaatacaatttgcgaggtaatgccaggctggcaattcgtatgctgcgttgcgaactctg

SEQ ID NO: 120738 - DNA, 75 bp, synthetic construct
  source 1..75: mol_type = other DNA
tcggcaagcctgattactcccatatcgtaagggacaccacggccactatcagcatcacagccgctgaaatggccg

SEQ ID NO: 120739 - DNA, 75 bp, synthetic construct
  source 1..75: mol_type = other DNA
ggatatggctttgcggggatgtatgacagcggcggctatatcccgcgcgggcagtttggcatcgtcggtgaaaac

SEQ ID NO: 120740 - DNA, 75 bp, synthetic construct
  source 1..75: mol_type = other DNA
gcgactcggtggggatgaatttggtctgctgctaccagactgtaatgttgaaagcgcgcgttttatcgctacacg

SEQ ID NO: 120741 - DNA, 75 bp, synthetic construct
  source 1..75: mol_type = other DNA
attaaaactgctccagaattcaaagtccttcggcttatcagaaattattttcatcatgtcggggacgtcgacgaa

SEQ ID NO: 120742 - DNA, 75 bp, synthetic construct
  source 1..75: mol_type = other DNA
accgccgacattctgacgccacaacgccgggaggattacggtaaggacctgtggagtacttatcagaccatccag

SEQ ID NO: 120743 - DNA, 75 bp, synthetic construct
  source 1..75: mol_type = other DNA
atgttacggtgaaccagacagataacgtgacaggacgggagtttacctctgccacgctaagtagcactaactggc

SEQ ID NO: 120744 - DNA, 75 bp, synthetic construct
  source 1..75: mol_type = other DNA
gatacgctttctggcatcggcgtcgatctgatttatggcgatgtgattgccgatgcccaaccgctggatttgctg

SEQ ID NO: 120745 - DNA, 75 bp, synthetic construct
  source 1..75: mol_type = other DNA
gaggttataagagatatccaatattcccgtttgtctttatttagtggcgatacatctacagccagtaaattgata

SEQ ID NO: 120746 - DNA, 75 bp, synthetic construct
  source 1..75: mol_type = other DNA
ggacattcaccttcaggatgcaggcggccggggtgttgcgtcatatgcaggacggacaaccggtgtataccggcg

SEQ ID NO: 120747 - DNA, 75 bp, synthetic construct
  source 1..75: mol_type = other DNA
aagacttctgatattccggggactctgcagacgatgttcagtggtgaaggtccgtcctggctgcagacaatgaca

SEQ ID NO: 120748 - DNA, 75 bp, synthetic construct
  source 1..75: mol_type = other DNA
ttggtgaagtgcgtgtgccgcacaaaggtgatgtagtgtgcaaggtgattgaaggggcttacgaagtattaggga

SEQ ID NO: 120749 - DNA, 75 bp, synthetic construct
  source 1..75: mol_type = other DNA
taaagttctggtactgactgaacgtacagatcatctggatgatatagcctcagtgatgaacacactgaaattgtc

SEQ ID NO: 120750 - DNA, 75 bp, synthetic construct
  source 1..75: mol_type = other DNA
tggccctgctgaaatcaccgatggtgacgggttaagtgtgcggattactccagcaggaactatcacgtttcagta

SEQ ID NO: 120751 - DNA, 75 bp, synthetic construct
  source 1..75: mol_type = other DNA
ttactagatgttacagaacacatcgagactagaagaggaattactgacaaagtaacacaagaaacaaatatgtta

SEQ ID NO: 120752 - DNA, 75 bp, synthetic construct
  source 1..75: mol_type = other DNA
cgtggtgatggcacactttccggttaccgctggggcgtgtcgcgtaaagcgcaactgctgcgccgcgaagctgaa

SEQ ID NO: 120753 - DNA, 75 bp, synthetic construct
  source 1..75: mol_type = other DNA
cgtgccattcacagcatcgacaccgacattaagctcaatcgcgcattgtgggtgatggcagaaacgctactggag

SEQ ID NO: 120754 - DNA, 75 bp, synthetic construct
  source 1..75: mol_type = other DNA
atgtaaaccagatacgccgtgaccgccccttaactcgtgaagaactgatgcaggtcgtccccagcgtattcggag

SEQ ID NO: 120755 - DNA, 75 bp, synthetic construct
  source 1..75: mol_type = other DNA
gagtgctggatcgtctggggatcagcgtcatgccagctaacgaagcaggctgttgtggcgcggtggactatcatc

SEQ ID NO: 120756 - DNA, 75 bp, synthetic construct
  source 1..75: mol_type = other DNA
ccaccgtcacgccaggcgctggcacaggcggcactgacttaccgttatggtgacgaacatcagcccgtcaccacc

SEQ ID NO: 120757 - DNA, 75 bp, synthetic construct
  source 1..75: mol_type = other DNA
attatcctgctcaactcccacgatggcaccagttcgtatcagatgttgccgggactatttcgtgcggtttgtcag

SEQ ID NO: 120758 - DNA, 75 bp, synthetic construct
  source 1..75: mol_type = other DNA
ccaatttgtcaggagaaggggttatgccccatgtgaccgaaaagatgctggggcatgagttgggaggtgtaatgg

SEQ ID NO: 120759 - DNA, 75 bp, synthetic construct
  source 1..75: mol_type = other DNA
atgatcgggtatatatgagttgcctgaaggacgccaacccacctgccagcaccattacgctggaagtcgtggatc

SEQ ID NO: 120760 - DNA, 75 bp, synthetic construct
  source 1..75: mol_type = other DNA
tcggttatctcgccaccaatggcctaaataacttagtcccagacttccagattttagagaatgctgatcactatg

SEQ ID NO: 120761 - DNA, 75 bp, synthetic construct
  source 1..75: mol_type = other DNA
ggaaaacaatggctaccaggggaaagtagtaacctttagtggcacaaacaatacaccgcaggcaaacaagatcta

SEQ ID NO: 120762 - DNA, 75 bp, synthetic construct
  source 1..75: mol_type = other DNA
ggccgccggggatacaccagacacatgctgcgtctgcggcgggccggggagataaccggacaacatgtccctgaa

SEQ ID NO: 120763 - DNA, 75 bp, synthetic construct
  source 1..75: mol_type = other DNA
tcggttatctcgccacaaatggcctaaataatttagttccagaattccagattctagataatgctgatcactatg

SEQ ID NO: 120764 - DNA, 75 bp, synthetic construct
  source 1..75: mol_type = other DNA
acgctggaatccttagccgaacagctggcgatgagtccgttccatttgcatagattgtttaaagcgactaccgga

SEQ ID NO: 120765 - DNA, 75 bp, synthetic construct
  source 1..75: mol_type = other DNA
ggatgcggacgatttcctgaactctcaggagaatgagatgaacgcatccccatccattaaatacggtgcacaatg

SEQ ID NO: 120766 - DNA, 75 bp, synthetic construct
  source 1..75: mol_type = other DNA
gccacaaatggcctaaataatttagttcctgaattccaaattttagataatgcagatcactatggagacttttaa

SEQ ID NO: 120767 - DNA, 75 bp, synthetic construct
  source 1..75: mol_type = other DNA
gatccacataaaggtaaatggtataatgaatttgtatctttaccaatgaccaagtatgggaaagtaatattggtt

SEQ ID NO: 120768 - DNA, 75 bp, synthetic construct
  source 1..75: mol_type = other DNA
atttcacgttgataacaaagccgatttaataagcttattacaaagctctgttttaggaacagaaatcggcaattt

SEQ ID NO: 120769 - DNA, 75 bp, synthetic construct
  source 1..75: mol_type = other DNA
tgccgtattttacgatgcatttgaatcattttttgatgaaaaactcgacgctgttagcgacttcggaacatcgag

SEQ ID NO: 120770 - DNA, 75 bp, synthetic construct
  source 1..75: mol_type = other DNA
tcgtggacatggttttggcgctggctccgctcattcggtttggaatgcactaactcaaagtaaggccgtcacaac

SEQ ID NO: 120771 - DNA, 75 bp, synthetic construct
  source 1..75: mol_type = other DNA
ttgtcagaatcgaaaaagcagtgagagcaacaaaacgtaaatacagccataagctaaaagattattcaagagaat

SEQ ID NO: 120772 - DNA, 75 bp, synthetic construct
  source 1..75: mol_type = other DNA
gacgcaacacctgatgaaattcatgacgaagcaaaagaaattttctttaaccactgcaattactcataccacgaa

SEQ ID NO: 120773 - DNA, 75 bp, synthetic construct
  source 1..75: mol_type = other DNA
ttggttatctcgccaccaatggcctaaataatttagttcctgaattccatttagataatgatgatcactatggag

SEQ ID NO: 120774 - DNA, 75 bp, synthetic construct
  source 1..75: mol_type = other DNA
agtgcccttgaagagcggatgaagcaaaagacggatatcaccgagctgtttaccatccgctggaaagttatttaa

SEQ ID NO: 120775 - DNA, 75 bp, synthetic construct
  source 1..75: mol_type = other DNA
cacagccggtgcccatgcacggcagggttgatcaggtgtaccaaaccaagaatggggttctcattcccttggaca

SEQ ID NO: 120776 - DNA, 75 bp, synthetic construct
  source 1..75: mol_type = other DNA
attcgtttacagggatgcccggtcggctgtgcctggtgtgataccaaacacacgtgggaaaagcttgaggatcgg

SEQ ID NO: 120777 - DNA, 75 bp, synthetic construct
  source 1..75: mol_type = other DNA
tcaaaatggcggttttcttgatgactggcaaaaagctaatgatctgtcaaaagcaagatttacagcacaagaaca

SEQ ID NO: 120778 - DNA, 75 bp, synthetic construct
  source 1..75: mol_type = other DNA
accttgatgaatttggggccgcatctggaacggcatcagaaaaaagtgcggctataaaacaaaggattcttcaaa

SEQ ID NO: 120779 - DNA, 75 bp, synthetic construct
  source 1..75: mol_type = other DNA
atgattggtgcaacaccttatcatgccaaatattttgcgcatgaactttccattctccattcaaacaatggtgtg

SEQ ID NO: 120780 - DNA, 75 bp, synthetic construct
  source 1..75: mol_type = other DNA
ccattcttcgcctgccagacccgcgtgcgcgacccgggccgccggggatacacaaaacacatgctgcgtctgcgg

SEQ ID NO: 120781 - DNA, 75 bp, synthetic construct
  source 1..75: mol_type = other DNA
gataaccggacaacatgtccctgaaattattctgctcaactcccatgacggtacctccagctaccagatgctgcc

SEQ ID NO: 120782 - DNA, 75 bp, synthetic construct
  source 1..75: mol_type = other DNA
cgtgtggtagatggtgaagcttgtaaacgtctgttcaacttgtctgcaataaccaacgaaaagctggataattcg

SEQ ID NO: 120783 - DNA, 75 bp, synthetic construct
  source 1..75: mol_type = other DNA
ttggggggagaccgctgttgttgaatatgttcgtgccgagcgagtggcgggagattcaaaatttaatggctggaa

SEQ ID NO: 120784 - DNA, 75 bp, synthetic construct
  source 1..75: mol_type = other DNA
atcatcttcacggagtcgatgcgaactcaacagtaccttgcacattttctggaaaacaatggctaccagggaaaa

SEQ ID NO: 120785 - DNA, 75 bp, synthetic construct
  source 1..75: mol_type = other DNA
gtttttttaagaaatgctgaaggttccagagtatgtagtttatatgatgaaatggctctttctcgtataataaat

SEQ ID NO: 120786 - DNA, 75 bp, synthetic construct
  source 1..75: mol_type = other DNA
accaacatggtcagtttattagattccatattggccttgaagatataaatgatctactggccgatctgacccaag

SEQ ID NO: 120787 - DNA, 75 bp, synthetic construct
  source 1..75: mol_type = other DNA
tgggggaagtgcgtgttccacaccggggagacgtggtggagaaagttattgaaggggcttacgaagtggtgggcg

SEQ ID NO: 120788 - DNA, 75 bp, synthetic construct
  source 1..75: mol_type = other DNA
ttccgtcgggagatctaccgtgagctggggatctctctctactccaatgaagccgctgaagaggccgggctgcgt

SEQ ID NO: 120789 - DNA, 75 bp, synthetic construct
  source 1..75: mol_type = other DNA
ttgatgatgtgataaatcaaacggttaaccgtgtacttgatcagtttacgataacccttcccgaagatctctttg

SEQ ID NO: 120790 - DNA, 75 bp, synthetic construct
  source 1..75: mol_type = other DNA
cctacgtactttaataaaacctccattccttcagattgttggcaaattctctttttttcacccgatcattttaat

SEQ ID NO: 120791 - DNA, 75 bp, synthetic construct
  source 1..75: mol_type = other DNA
tgggccgaaatgggggcaaccagcggtggcggttattcgctcactaaagtgaatataaataatgaaagctggcct

SEQ ID NO: 120792 - DNA, 75 bp, synthetic construct
  source 1..75: mol_type = other DNA
cggtgtttctgcaggttggtgacaatattggtattatcgggggaggtaaacataaaccctgtggcaatattgata

SEQ ID NO: 120793 - DNA, 75 bp, synthetic construct
  source 1..75: mol_type = other DNA
cggggcgggctttccattcgcgcctggctgcctgtgccggtaacgcgggcgcagggcacgacaaaagaagggtaa

SEQ ID NO: 120794 - DNA, 75 bp, synthetic construct
  source 1..75: mol_type = other DNA
aaaaagagctggaatgtattaaggagacgatttctaagtattgcgcaaagttcacccaaaaagaagccatcttaa

SEQ ID NO: 120795 - DNA, 75 bp, synthetic construct
  source 1..75: mol_type = other DNA
gatggtttactgacccgtgcggcagacgtggtgctgaaagaacgccgcccgctggtgctctgcgtgcgtgaaaca

SEQ ID NO: 120796 - DNA, 75 bp, synthetic construct
  source 1..75: mol_type = other DNA
atgttgtaaagaaaattgaactggtgctgaaaacaatcgcgcggacggattcttatttaaattcagccaatacta

SEQ ID NO: 120797 - DNA, 75 bp, synthetic construct
  source 1..75: mol_type = other DNA
gacactattttcaccgtattgacaagcccaaatgtatcttctgctcacttctgggggcatatggcagacacggca

SEQ ID NO: 120798 - DNA, 75 bp, synthetic construct
  source 1..75: mol_type = other DNA
cgcacgatatccatcgttggatgagcttcaatctttatacaaccgctatccgaatggctctatcgtcaatgagat

SEQ ID NO: 120799 - DNA, 75 bp, synthetic construct
  source 1..75: mol_type = other DNA
gtaatgatccgaatccaaccggaaaatatgagtccattcatcatagatatttctacaggggaacatgatgattat

SEQ ID NO: 120800 - DNA, 75 bp, synthetic construct
  source 1..75: mol_type = other DNA
tgcagcgtatcgtggataaccataacgggatgctggagcttggcaccagcgagcggggcgggctttccattcgcg

SEQ ID NO: 120801 - DNA, 75 bp, synthetic construct
  source 1..75: mol_type = other DNA
ggtcctgttctggaaagccacgagcgttttccggagcgcgccaatatcggttttatgcaagtggttaagcgcgag

SEQ ID NO: 120802 - DNA, 75 bp, synthetic construct
  source 1..75: mol_type = other DNA
agcgtcacgttgtcgcgtgcgacagcacaagtgcgcacgccgagtgatttcaaaagctcgacagcagatgatctg

SEQ ID NO: 120803 - DNA, 75 bp, synthetic construct
  source 1..75: mol_type = other DNA
tgaccaacgtcattatcgccatcgccctgtcacactgggcgtggtacgcgcgcatggtgcgcagccttgtgattt

SEQ ID NO: 120804 - DNA, 75 bp, synthetic construct
  source 1..75: mol_type = other DNA
atagtgctggcacccaaacaatatatgccagtgccacttctgataaagcaaatatcaaaggtggcaagcaaacgg

SEQ ID NO: 120805 - DNA, 75 bp, synthetic construct
  source 1..75: mol_type = other DNA
ggcaataaaaacaaagatcaatgaaggcggtacgctgacagttaacgataatggcaaagcgacagatatcgtcca

SEQ ID NO: 120806 - DNA, 75 bp, synthetic construct
  source 1..75: mol_type = other DNA
actgaaatcggtggtgccacaggcgttggcgtacgtattctggatagccagagcggcgaagtgactttaggtact

SEQ ID NO: 120807 - DNA, 75 bp, synthetic construct
  source 1..75: mol_type = other DNA
tgcgtctgcggcgtgacggggagataaccggacaacatgtccctgaaattattctgctcaactcccatgacggta

SEQ ID NO: 120808 - DNA, 75 bp, synthetic construct
  source 1..75: mol_type = other DNA
gagtgcaatgccatcattgagcagtttatcgactacctgcgcaccgggcaggagatgccgatggaaatggcggat

SEQ ID NO: 120809 - DNA, 75 bp, synthetic construct
  source 1..75: mol_type = other DNA
atatatcgacggaattgacatccgaaaacaacttagaaaaattggtgtcggtgatgatgactcaattgccatact

SEQ ID NO: 120810 - DNA, 75 bp, synthetic construct
  source 1..75: mol_type = other DNA
tccctactcaggatgcgctggtcaccctttccagcagttggcagggccatgccattgacggctggccagtgcaaa

SEQ ID NO: 120811 - DNA, 75 bp, synthetic construct
  source 1..75: mol_type = other DNA
tgggcgaagaagggcgaatcaataccgttaaccatcaaggtcacggatgatgcgggcagacctgccgcctatgaa

SEQ ID NO: 120812 - DNA, 75 bp, synthetic construct
  source 1..75: mol_type = other DNA
aactatattctgaatgggttatacgcaatagtctatattggatgactccgcttactcgatggaaactccatgaag

SEQ ID NO: 120813 - DNA, 75 bp, synthetic construct
  source 1..75: mol_type = other DNA
cgcgttaaccgacgctgacggcagcaaaattctgaccatcactcgcccggagacccatggcaccaaaacagcgat

SEQ ID NO: 120814 - DNA, 75 bp, synthetic construct
  source 1..75: mol_type = other DNA
gctggtgctggcgacgctggatatcggtcatatgatgctacacgtcgcggggatgtccttcctcggcctcggcgt

SEQ ID NO: 120815 - DNA, 75 bp, synthetic construct
  source 1..75: mol_type = other DNA
aacgatctgtgggcacagaatgtaatgtggctttcaccggaaacctcagagcggagcaggaagaggccgtttcgt

SEQ ID NO: 120816 - DNA, 75 bp, synthetic construct
  source 1..75: mol_type = other DNA
gtcgcgcctgctttcgccggatgcgcagcactggctgggcaccgatcacttagggcgtgatattttctcgcggct

SEQ ID NO: 120817 - DNA, 75 bp, synthetic construct
  source 1..75: mol_type = other DNA
gatgaattccatcacctgctggcccgtcactcccctgccgggcgggtggagaaatttgaatacgccgccgcacac

SEQ ID NO: 120818 - DNA, 75 bp, synthetic construct
  source 1..75: mol_type = other DNA
tatggggcttcactttgccttacagccggaaacgtaattccgcagatctacagtcgcgacatgcgctctgtgggc

SEQ ID NO: 120819 - DNA, 75 bp, synthetic construct
  source 1..75: mol_type = other DNA
agccgcttcttttatgacgcctttccgggaatgcgtctgcgccacccggtgactgacgataccagcgatgaccgt

SEQ ID NO: 120820 - DNA, 75 bp, synthetic construct
  source 1..75: mol_type = other DNA
tggtgacgaacatcagccggtcaccaccgctgacattctgacccctcgacgcggggaggattacggtgaggacct

SEQ ID NO: 120821 - DNA, 75 bp, synthetic construct
  source 1..75: mol_type = other DNA
gggtggtgctggaaatcaccgcaggacgggattttgacccggtgaaccgtgggctactgcaacgcttcgcctgcc

SEQ ID NO: 120822 - DNA, 75 bp, synthetic construct
  source 1..75: mol_type = other DNA
ctactgcgtaccggcgggcatctgctggtactggcgctggctttctggttatggcagggaatgcagggcagccag

SEQ ID NO: 120823 - DNA, 75 bp, synthetic construct
  source 1..75: mol_type = other DNA
tccgctgacccgtgaagagctgatgcaccatgtgcccgggattttcggggaagataaacacacctcccggagccg

SEQ ID NO: 120824 - DNA, 75 bp, synthetic construct
  source 1..75: mol_type = other DNA
caccacgggcagatggaatatgtggctgacccggcggcgctgcagtacctgcagagtctggaatacgcagaaaat

SEQ ID NO: 120825 - DNA, 75 bp, synthetic construct
  source 1..75: mol_type = other DNA
tggtgacgaacatcagcccgtcaccaccgctgacattctgacccctcgacgccgggaggattacggtgaggacct

SEQ ID NO: 120826 - DNA, 75 bp, synthetic construct
  source 1..75: mol_type = other DNA
ttttactatcatggtccacaggataaccgcgagcgctactaccgggtctcatttcgcgaggtccccactcgtaac

SEQ ID NO: 120827 - DNA, 75 bp, synthetic construct
  source 1..75: mol_type = other DNA
tggtgacgaacatcagccggtcaccaccgctgacattctgaccccacgacgctgggaggattacggtgaggacct

SEQ ID NO: 120828 - DNA, 75 bp, synthetic construct
  source 1..75: mol_type = other DNA
tgctgccttcggagcttgcattagacaaaaagaagctaactaagaaaaaacagtcagcaagaatgggagggatat

SEQ ID NO: 120829 - DNA, 75 bp, synthetic construct
  source 1..75: mol_type = other DNA
caccaaaatgttcctgtggatggtagatggaaaaataaaacggttgcagcaaaggcaatagaggcagatttagtc

SEQ ID NO: 120830 - DNA, 75 bp, synthetic construct
  source 1..75: mol_type = other DNA
taaatgacgttgaaaagggggggcgtccggttttccctttgatgccattccatgtctttcctgagtatatggcat

SEQ ID NO: 120831 - DNA, 75 bp, synthetic construct
  source 1..75: mol_type = other DNA
cgctatccctttaccgacagcccgcaggaggtcagcgcggacgattttaaccgtatctttgccagcggcgggggg

SEQ ID NO: 120832 - DNA, 75 bp, synthetic construct
  source 1..75: mol_type = other DNA
accgcatcacgtttgagcgcgacagccagtaccggatcacaggtgtcagtcacaccgacgggatccggcttaaac

SEQ ID NO: 120833 - DNA, 75 bp, synthetic construct
  source 1..75: mol_type = other DNA
tgacgcactttcacgtcacgtcgaaccggaacaggcgctgcattgggcgctgtctggcggtgaagattacgagtt

SEQ ID NO: 120834 - DNA, 75 bp, synthetic construct
  source 1..75: mol_type = other DNA
atccggtaaccggcgcgtactgcgacgaacgtaccgactttacgctgggccagaccctccccctctccttcaccc

SEQ ID NO: 120835 - DNA, 75 bp, synthetic construct
  source 1..75: mol_type = other DNA
tgacctgtatgccggaggccaccggctgaaacaggccggaaacacgcagtatgactatgacgccgcaggccggat

SEQ ID NO: 120836 - DNA, 75 bp, synthetic construct
  source 1..75: mol_type = other DNA
gcttctaaagccgctatagaagcggcacgcaccaatatcattcaggcgcaaactcgcgtcgaagcccggctgatc

SEQ ID NO: 120837 - DNA, 75 bp, synthetic construct
  source 1..75: mol_type = other DNA
gaattagcgcaaagccgcccgcgcaagactctcacttccgccacgaaatccaacggtttggccatcagcatgcct

SEQ ID NO: 120838 - DNA, 75 bp, synthetic construct
  source 1..75: mol_type = other DNA
atggcctgtgtaccgccagggttaacggtctggaggaaaccatcctctacagccgggacgccgcaggccgcctgg

SEQ ID NO: 120839 - DNA, 75 bp, synthetic construct
  source 1..75: mol_type = other DNA
gagtatttccgtgggctaaccagtcacctgcgtgcccaggtctggggcttcaccctgccttacagccgcaggcgt

SEQ ID NO: 120840 - DNA, 75 bp, synthetic construct
  source 1..75: mol_type = other DNA
aaatcaccgccagcccgcgcatccgccaggacacctcgacgctgctgactaacgggccgtgggcgctgtttcacc

SEQ ID NO: 120841 - DNA, 75 bp, synthetic construct
  source 1..75: mol_type = other DNA
gcatccgtccgtggccccgcagtgggtgacgcggacgaatcatgcggtgagcgacctgacgggccgtccgctgat

SEQ ID NO: 120842 - DNA, 75 bp, synthetic construct
  source 1..75: mol_type = other DNA
tctggggctttactctgccatacagccgcaggcgtcacgccagtgattcgcagtcactgcatgcgctctgtggtc

SEQ ID NO: 120843 - DNA, 75 bp, synthetic construct
  source 1..75: mol_type = other DNA
gcgtcattatttcgtctgcagcgcaattaagcctcggttatgcggcgggtcatctgccgccgatgatgcagtttt

SEQ ID NO: 120844 - DNA, 75 bp, synthetic construct
  source 1..75: mol_type = other DNA
cgtggtgggttgtcgggttactggcggtggcggctatcgtggcgtggtggctgttgcgcccggcaggtgtgccgg

SEQ ID NO: 120845 - DNA, 75 bp, synthetic construct
  source 1..75: mol_type = other DNA
tcccgaagccagaactatacgtatatccccaccatcaccgtgctggaaagtctgcagcgggaaggcttccagcca

SEQ ID NO: 120846 - DNA, 75 bp, synthetic construct
  source 1..75: mol_type = other DNA
atggatcgcgtcagtgcaggcgcatcgcttctgtttcccgccggtccggtattaatggaatttgccacgatggtt

SEQ ID NO: 120847 - DNA, 75 bp, synthetic construct
  source 1..75: mol_type = other DNA
atgtatgccagctataaggcgagtgattatgtggaggagaaacagaaccagcttgaatcatggataaacagcttt

SEQ ID NO: 120848 - DNA, 75 bp, synthetic construct
  source 1..75: mol_type = other DNA
aacagctaaaacgtaatattaacggcgtggttaaagccgagcagaccgacgacgaaagcgcctggatagaactgg

SEQ ID NO: 120849 - DNA, 75 bp, synthetic construct
  source 1..75: mol_type = other DNA
tgtatatcctaaaaaatacggacagtcctattacgcctgttcccaaaaagtctcacagggtcttgattatacccg

SEQ ID NO: 120850 - DNA, 75 bp, synthetic construct
  source 1..75: mol_type = other DNA
aggcaacgctgttggcggaaaaaggccgtgaaaatagtatgcgtgaaaaaacgcttaaggcgcagattgaaggct

SEQ ID NO: 120851 - DNA, 75 bp, synthetic construct
  source 1..75: mol_type = other DNA
gaacgcttgcgctgtacaactggcaagacgatgaactgaacatccggcgtctggaggcgattcagcatgtggctc

SEQ ID NO: 120852 - DNA, 75 bp, synthetic construct
  source 1..75: mol_type = other DNA
ttcgagcgctacaatttaaagcgaatgaacggctgaacggctgggttgaggatcagcgtaagaaagtgtctgatc

SEQ ID NO: 120853 - DNA, 75 bp, synthetic construct
  source 1..75: mol_type = other DNA
cggcgatgcgtttgattccgaccggatgctggaggatgaaactctgtccttaagtctgaccggcactaacgggca

SEQ ID NO: 120854 - DNA, 75 bp, synthetic construct
  source 1..75: mol_type = other DNA
gattacgtggtaaaggggattattccggcatcgtcgctatgcagcatatacggggcgagcggttcctataaatcg

SEQ ID NO: 120855 - DNA, 75 bp, synthetic construct
  source 1..75: mol_type = other DNA
tctattgttcaggatgttttttctaaacatagcaacattaagcataaaattatcaataataaaaaaagaactctt

SEQ ID NO: 120856 - DNA, 75 bp, synthetic construct
  source 1..75: mol_type = other DNA
aacgtatccatacccgggccattcacagcattgataccgacattaagctcaatcgcgcattgtgggtgatggcag

SEQ ID NO: 120857 - DNA, 75 bp, synthetic construct
  source 1..75: mol_type = other DNA
cgccggtaagcgctgcgctgcatctggcaatgacccggcgtgtacatgccatgtatgcgcgtcatgccgggacat

SEQ ID NO: 120858 - DNA, 75 bp, synthetic construct
  source 1..75: mol_type = other DNA
gttgatgaaatggtcatcgcttcccgccaggttgaacgggaaacgggtaaaccggtacgcatgattattctggat

SEQ ID NO: 120859 - DNA, 75 bp, synthetic construct
  source 1..75: mol_type = other DNA
cgttaccgctatgacgctgatggcctgtgtaccgccagggtcaacggcctggaggaaaccatcctctacagccgg

SEQ ID NO: 120860 - DNA, 75 bp, synthetic construct
  source 1..75: mol_type = other DNA
ctgagcctgtatctggcagcagaagccccggtcagcagcacccttcatctgatgatgacaaagcgtctggctgcg

SEQ ID NO: 120861 - DNA, 75 bp, synthetic construct
  source 1..75: mol_type = other DNA
tggtgacgaacatcagccagtcaccaccgctgacattctgacccctcgacgcagggaggattacggtgaggacct

SEQ ID NO: 120862 - DNA, 75 bp, synthetic construct
  source 1..75: mol_type = other DNA
accgctgacattcttacgccacgacgcagggaggattacggtaaggacctgtggagcgcatatcagaccatccag

SEQ ID NO: 120863 - DNA, 75 bp, synthetic construct
  source 1..75: mol_type = other DNA
tgactatctggcgagcaaaacggtagattccgccacacacgaaagctggcgcacagtatgtcaaacgctaccgct

SEQ ID NO: 120864 - DNA, 75 bp, synthetic construct
  source 1..75: mol_type = other DNA
tggtgacgaacatcagccagtcaccaccgctgacattctgaccccgcgacgctgggaggattacggtgaggacct

SEQ ID NO: 120865 - DNA, 75 bp, synthetic construct
  source 1..75: mol_type = other DNA
gggcagccaacgacaaagccattgcacagatgctggcatcaaaaaagtctggcccccccgccgccaggctgggcg

SEQ ID NO: 120866 - DNA, 75 bp, synthetic construct
  source 1..75: mol_type = other DNA
agccggggaatcattatctggtctataacgacaaattcattaagattagcgattcctgtccggctaagccccctt

SEQ ID NO: 120867 - DNA, 75 bp, synthetic construct
  source 1..75: mol_type = other DNA
ctatgatgagcgcggcctgctcagcaacatcaccgaccctgccgggcagacgtggacacagcagtgcgatgaacg

SEQ ID NO: 120868 - DNA, 75 bp, synthetic construct
  source 1..75: mol_type = other DNA
accattacgcacatcatccgggggacagacattaccggactttgctttctgttgctgatggcaggctgcatgaca

SEQ ID NO: 120869 - DNA, 75 bp, synthetic construct
  source 1..75: mol_type = other DNA
cagaggcgatgcgtgaagtggataactggatcagcatgagtattgagactcataagccagtttacctgcgggata

SEQ ID NO: 120870 - DNA, 75 bp, synthetic construct
  source 1..75: mol_type = other DNA
tgatccctgcgtggaacgcctgtttgaaggtttcgccttttccatgggacggctgcgccagaaaatcgacgatga

SEQ ID NO: 120871 - DNA, 75 bp, synthetic construct
  source 1..75: mol_type = other DNA
ctcgcgcagtatgctcataacacccgtatcgatctacccgcattgcgttggtttacgcagttggcgttgccagtg

SEQ ID NO: 120872 - DNA, 75 bp, synthetic construct
  source 1..75: mol_type = other DNA
accgctacgataaagacacgctgcaactgacagcagtcattaacccgcagggcgagtcttatctttatattctgg

SEQ ID NO: 120873 - DNA, 75 bp, synthetic construct
  source 1..75: mol_type = other DNA
ggacgtgtttctgattgcaggtgtggccatgtggtcatctgccaacagcactccgtggatcatcggtattgccgc

SEQ ID NO: 120874 - DNA, 75 bp, synthetic construct
  source 1..75: mol_type = other DNA
tctctcatggcaatctggctaactatctccatttcgccgccgaacgttactttacagcgcaggaccgggctgcgc

SEQ ID NO: 120875 - DNA, 75 bp, synthetic construct
  source 1..75: mol_type = other DNA
tggcttatggtataagcgacacgaataaaccacatgcccaatggcagttctcttcagacatacctaaaacaatcg

SEQ ID NO: 120876 - DNA, 75 bp, synthetic construct
  source 1..75: mol_type = other DNA
cagtgaagtggcgcagtgcggcaacggcgcgcgctgctttgcccgttttgtgcgcctgaaagggctgaccaataa

SEQ ID NO: 120877 - DNA, 75 bp, synthetic construct
  source 1..75: mol_type = other DNA
ccatacccgtgccattcacagcattgacacggacattaagctcaatcgcgcgttgtgggtgatggcggaaacgtt

SEQ ID NO: 120878 - DNA, 75 bp, synthetic construct
  source 1..75: mol_type = other DNA
aaccagctactggatattctcagacataaagcattaacgcagatggcacaggagagtggcggggtagtgcaaccg

SEQ ID NO: 120879 - DNA, 75 bp, synthetic construct
  source 1..75: mol_type = other DNA
ttgaaaaaatgccttattggattaatttcagaaaaacaacagcctatgacatcaatcatacgcaagcaaacatgc

SEQ ID NO: 120880 - DNA, 75 bp, synthetic construct
  source 1..75: mol_type = other DNA
atgaaatacgccacatgcttaactgacgatcaacgctggcaatctgtcttagcccgcgactcgaatgccgacggc

SEQ ID NO: 120881 - DNA, 75 bp, synthetic construct
  source 1..75: mol_type = other DNA
acagcgcgcctgccgatcttacgtttcagcaacatgtgcgtgaagtgatcgccagcctcaatcaacgcgatacgc

SEQ ID NO: 120882 - DNA, 75 bp, synthetic construct
  source 1..75: mol_type = other DNA
tgtcagacaattgctcttgttcctggtcgtctaaaaaacatacattatctgttcagaagtatacagacggttgac

SEQ ID NO: 120883 - DNA, 75 bp, synthetic construct
  source 1..75: mol_type = other DNA
ttttttccgcgaaggagagttaaaactcagtactgtaaaattagcatggtcgaagcacttttcttcgtggcttgt

SEQ ID NO: 120884 - DNA, 75 bp, synthetic construct
  source 1..75: mol_type = other DNA
gctgcactacgatgcggcgggccagatggccggggaggaggactggtcggggcgcagaaccgtctatatccgcga

SEQ ID NO: 120885 - DNA, 75 bp, synthetic construct
  source 1..75: mol_type = other DNA
atgcgattagccagtcgttttggttatgcgaaccaggtacgtcgtgatcgtccgctgacacacgaagaactgatg

SEQ ID NO: 120886 - DNA, 75 bp, synthetic construct
  source 1..75: mol_type = other DNA
ttcaataccagaaagaaagcgtcgagcgagctttaacgtgcgctaactgcggtcagaagctgcatgtgctggaag

SEQ ID NO: 120887 - DNA, 75 bp, synthetic construct
  source 1..75: mol_type = other DNA
aaaagagcgaaatcgttattattacagtcgtgccaagctggttgagcttacgggaatgccgaacatgcatatgtt

SEQ ID NO: 120888 - DNA, 75 bp, synthetic construct
  source 1..75: mol_type = other DNA
ccatcagttagtcgaacagcaccgccagcacgccctcgaacgcattgacgcccgcatcgaggaaagccgtcaacg

SEQ ID NO: 120889 - DNA, 75 bp, synthetic construct
  source 1..75: mol_type = other DNA
ctgtgccgcccgtttacaggattgaggcaccgatgcagatcatcatccagacgcagcctggacaaagtgcgcagg

SEQ ID NO: 120890 - DNA, 75 bp, synthetic construct
  source 1..75: mol_type = other DNA
agatgaagactacatatacagtcaactgaaaaaggctgaacaaagcaacgaacgtgaaaagagattgcaagcaat

SEQ ID NO: 120891 - DNA, 75 bp, synthetic construct
  source 1..75: mol_type = other DNA
gcggcttgaactggaagataaaagtggcaggacagtactaacttacatcgtgcgctttgggaatattgccgcagt

SEQ ID NO: 120892 - DNA, 75 bp, synthetic construct
  source 1..75: mol_type = other DNA
tttaattacttgctcaattattgtattatattttgctagtttttttattgccttcacttatcattctgatagtaa

SEQ ID NO: 120893 - DNA, 75 bp, synthetic construct
  source 1..75: mol_type = other DNA
atgccccgtctctgctctgcagaacgcctctctgaaagtatggttgatgaaatatttcagaagggggaggcatga

SEQ ID NO: 120894 - DNA, 75 bp, synthetic construct
  source 1..75: mol_type = other DNA
gctggggcgcgtttggtgatgtgatacgtcagggtgaaacaggccaggttaaccagttactggatattctcagac

SEQ ID NO: 120895 - DNA, 75 bp, synthetic construct
  source 1..75: mol_type = other DNA
cattggcaatacagatgttagacgtgcgctggataaagatattcaaaccgcaagcaaggtgaaaggattggatat

SEQ ID NO: 120896 - DNA, 75 bp, synthetic construct
  source 1..75: mol_type = other DNA
aaactacgcgattacccaggtaaactacagggtcagttcactggtcagtgatacagccaggctggcgcattattc

SEQ ID NO: 120897 - DNA, 75 bp, synthetic construct
  source 1..75: mol_type = other DNA
tgccattcacagcatcgacaccgacattaagctcaatcgcgcattgtgggtgatggcagaaacgctactggagag

SEQ ID NO: 120898 - DNA, 75 bp, synthetic construct
  source 1..75: mol_type = other DNA
atgtggtggacagagtcattgaaggggcttacgaggtggtgggcgtgtttgaccggatagaggagaagcgtgatg

SEQ ID NO: 120899 - DNA, 75 bp, synthetic construct
  source 1..75: mol_type = other DNA
cgtttaaaagaggggatgaccggcgaaggcgctgcacggcagaatgccatcaatgcgtcgcttgcacagggcgtt

SEQ ID NO: 120900 - DNA, 75 bp, synthetic construct
  source 1..75: mol_type = other DNA
catattcgtttacgcgtttatgagcgtggggcaggagaaacccaggcctgcggcagcggcgcgtgtgcggcggtg

SEQ ID NO: 120901 - DNA, 75 bp, synthetic construct
  source 1..75: mol_type = other DNA
gtggtcagggccgggagcagtcagataacgaatggcatgacgcgattaactggctgggggactggtgcagtgaag

SEQ ID NO: 120902 - DNA, 75 bp, synthetic construct
  source 1..75: mol_type = other DNA
ttttatggcgaccactattactggattagccctttatacgaaaatgttatctgaatacgtggttttcatatgttg

SEQ ID NO: 120903 - DNA, 75 bp, synthetic construct
  source 1..75: mol_type = other DNA
ggggcgcatgtctggatattttttgcctcacgagtttcggcccgcgaagctcgccgtctggggactgctattatt

SEQ ID NO: 120904 - DNA, 75 bp, synthetic construct
  source 1..75: mol_type = other DNA
cgtctgaacactccggactggcttggtggtcagggccgggagcaggcagataatgaatggtatgaagcgattaac

SEQ ID NO: 120905 - DNA, 75 bp, synthetic construct
  source 1..75: mol_type = other DNA
tttgaggttgagccgttcccgcaaacctatctgagattcagtccggcggcgaaatcgttcgaagtttttgttaac

SEQ ID NO: 120906 - DNA, 75 bp, synthetic construct
  source 1..75: mol_type = other DNA
caagaattgttaagagaggtatcatcatctgcattgatgtagttatggtgatattctcattttggttgtcttatt

SEQ ID NO: 120907 - DNA, 75 bp, synthetic construct
  source 1..75: mol_type = other DNA
aaaaaatggtttctcaatccggtaacaaatgccattcacgtatgtcaaatcattacgccagtaaataacagcgcg

SEQ ID NO: 120908 - DNA, 75 bp, synthetic construct
  source 1..75: mol_type = other DNA
agaactagggcatcattccattggactgattgatataaacaattttgtgaccaaagatgagccaaatgatatgaa

SEQ ID NO: 120909 - DNA, 75 bp, synthetic construct
  source 1..75: mol_type = other DNA
gtggttgattttgcaaacggtattgatgttgcacaggagcataaccgcacggccggggggcgcacgtttttccgg

SEQ ID NO: 120910 - DNA, 75 bp, synthetic construct
  source 1..75: mol_type = other DNA
aaagattcagtctttactttagataatagacgactttatgctgccaaaacagccggtgtatcgaagatcccttcg

SEQ ID NO: 120911 - DNA, 75 bp, synthetic construct
  source 1..75: mol_type = other DNA
cattatctgccggagttccagctacagaaccccgccaataaaaaccgcgctgtctatcgtcagtgggctaaagca

SEQ ID NO: 120912 - DNA, 75 bp, synthetic construct
  source 1..75: mol_type = other DNA
atgtagtaaccggtgatgattatttgaaacaaatgtcagaaaatcttttaagagttttgggcaacttccctggag

SEQ ID NO: 120913 - DNA, 75 bp, synthetic construct
  source 1..75: mol_type = other DNA
ttgaggggacaaacccgagtcttgccattgtggatgaatatcacctgcacccagacaacggggtttattccgcgc

SEQ ID NO: 120914 - DNA, 75 bp, synthetic construct
  source 1..75: mol_type = other DNA
gggcaaacgcgccagcgtcgttgcgctggatagcgggctgcatgtgcaacaaatctggattcagggtcaattagc

SEQ ID NO: 120915 - DNA, 75 bp, synthetic construct
  source 1..75: mol_type = other DNA
ctcgcgctattcggcaactgaaacaactgcgtgtggatctgcctggctggcgtaaagtcctggaaggaaagcgtt

SEQ ID NO: 120916 - DNA, 75 bp, synthetic construct
  source 1..75: mol_type = other DNA
cctgtaaacagcactatgattattgctgccagatcctggacggcgaagaggtcaacgattcaatttttgtactga

SEQ ID NO: 120917 - DNA, 75 bp, synthetic construct
  source 1..75: mol_type = other DNA
ggtcaaagtgaactcgatgaaccttgttcatcatcgacggataaaaaacaatctttgtgggtaaggttgatttca

SEQ ID NO: 120918 - DNA, 75 bp, synthetic construct
  source 1..75: mol_type = other DNA
acagattgaagaggaagcaacccgtacacttaaacgtttccttgctgctcggcgggtggtggatgtcactgatcc

SEQ ID NO: 120919 - DNA, 75 bp, synthetic construct
  source 1..75: mol_type = other DNA
ggccgccggggatacaccaaacacatgctgcgtctgcggcgggccggagagataaacggagagcatgtccctgaa

SEQ ID NO: 120920 - DNA, 75 bp, synthetic construct
  source 1..75: mol_type = other DNA
acagcggtgcgtgcagtggcaagtgcttgcgccgccaataagttagcgatcgttataccttgtcatcgggtggta

SEQ ID NO: 120921 - DNA, 75 bp, synthetic construct
  source 1..75: mol_type = other DNA
gccatcgggtggttttccatcatggggatatggctttgcggggatgtatgacagcggcgggtatatcccgcgcgg

SEQ ID NO: 120922 - DNA, 75 bp, synthetic construct
  source 1..75: mol_type = other DNA
atgcgaaccagatacgccgtgaccgccccttaacccgtgaagaactgatgcaggtcgtccccagcgtattcgggg

SEQ ID NO: 120923 - DNA, 75 bp, synthetic construct
  source 1..75: mol_type = other DNA
tgaacagggcagactggcagaaaaacaccgcccggacggtagcgtatggcgctatgcgcgggacagggaaagatc

SEQ ID NO: 120924 - DNA, 75 bp, synthetic construct
  source 1..75: mol_type = other DNA
atggggcagaccacgcgctaccgtcacggggcgttcgacctgctgcgggaggtggaagacgcgggcgggcagcgg

SEQ ID NO: 120925 - DNA, 75 bp, synthetic construct
  source 1..75: mol_type = other DNA
gattatagctatctgaataataatacctctgtcgatcgcgtctattctggcgggcaccccttttatattaccgtc

SEQ ID NO: 120926 - DNA, 75 bp, synthetic construct
  source 1..75: mol_type = other DNA
agaccatccaggagaatatgctgaaaggcggaatttccggccgcagtgcaaaaggaaaacgtatccacacccgtg

SEQ ID NO: 120927 - DNA, 75 bp, synthetic construct
  source 1..75: mol_type = other DNA
gccatcacgcctgtcgtacagagaattatgccatgacggttcattattaccggctgcgggattatgccctgcagc

SEQ ID NO: 120928 - DNA, 75 bp, synthetic construct
  source 1..75: mol_type = other DNA
gtctgaaaacaataatgcacaggtagctttgttaaatacacagttaagcgagtttgccccaaccatgccccataa

SEQ ID NO: 120929 - DNA, 75 bp, synthetic construct
  source 1..75: mol_type = other DNA
agaattcggcagaacagagaaacaaaaatgtacctttgtttttcaacctgaagtgtcagcgaaagtaaaaaatta

SEQ ID NO: 120930 - DNA, 75 bp, synthetic construct
  source 1..75: mol_type = other DNA
ttttactaatatatctcatatatcgtggttttccagttctgatagtatcccctttgatggcaatgctggctgtct

SEQ ID NO: 120931 - DNA, 75 bp, synthetic construct
  source 1..75: mol_type = other DNA
cgaaccgcttaagcccgtgttccagtggattggcgacaaagtgcaggcgctgtggggctggtttactgatctgct

SEQ ID NO: 120932 - DNA, 75 bp, synthetic construct
  source 1..75: mol_type = other DNA
ttaccaatatttaatacatctacccaagttggttatggtggggtaattaaagtccttcctgtgtttacccttatt

SEQ ID NO: 120933 - DNA, 75 bp, synthetic construct
  source 1..75: mol_type = other DNA
ttgtgatttctgattatagcggggcaatatttgacgctgtttattttaaaaaaccaataatactattgaataata

SEQ ID NO: 120934 - DNA, 75 bp, synthetic construct
  source 1..75: mol_type = other DNA
ctgtgtcaacgatccgttatcagtgcaggaaaatgcctgttagcgtaaaagcaaaacacaaatctatccatgcaa

SEQ ID NO: 120935 - DNA, 75 bp, synthetic construct
  source 1..75: mol_type = other DNA
atgaacaatcaaaatacccgcctaattcgcttgccagaagttatgaacagaaccggctatggcaaggcctggatt

SEQ ID NO: 120936 - DNA, 75 bp, synthetic construct
  source 1..75: mol_type = other DNA
gatatggctaacgaatttcgtgatctgcttgttgagaaattcaaagacagcaaagtagaaacctttattggtact

SEQ ID NO: 120937 - DNA, 75 bp, synthetic construct
  source 1..75: mol_type = other DNA
tgtagcggcatgtctttacagcatgggcacgatgaaaaaggcgaatggctgaaaatcacctattacgatgaagat

SEQ ID NO: 120938 - DNA, 75 bp, synthetic construct
  source 1..75: mol_type = other DNA
ccattaccatcgtactgaacattggattgttgtttcggggacagctaaagttcatcttgaggagaaaacttatct

SEQ ID NO: 120939 - DNA, 75 bp, synthetic construct
  source 1..75: mol_type = other DNA
atgccatcttgttaaatctcaataaggctatcgatgcccactatcagtggctggtgagtatgtttcacagcgtgg

SEQ ID NO: 120940 - DNA, 75 bp, synthetic construct
  source 1..75: mol_type = other DNA
gttgctgaaaaaagcgcagttgaagtccacggtgatgccacaggttcagcaatatgcgtgggataaagcggcaaa

SEQ ID NO: 120941 - DNA, 75 bp, synthetic construct
  source 1..75: mol_type = other DNA
tttacgatatctacccgtacttgtgtggcacggtttttatcctcggaagctggttgcgctacgattacgggcagt

SEQ ID NO: 120942 - DNA, 75 bp, synthetic construct
  source 1..75: mol_type = other DNA
tagcaaggcatggatttatcgccttatggggcaaggtaaatttcctgcatcagttaaaattggctcgcgagctat

SEQ ID NO: 120943 - DNA, 75 bp, synthetic construct
  source 1..75: mol_type = other DNA
cgatctcttctttagatctcaatgcgctgagtaatcttcccgcagccaaagacgttgacgccgagcaatccgcac

SEQ ID NO: 120944 - DNA, 75 bp, synthetic construct
  source 1..75: mol_type = other DNA
ctgcatcgggttacggggcgacttatgtaaggaacaggcagatggcagctcagccagagaccgtacagcaggaaa

SEQ ID NO: 120945 - DNA, 75 bp, synthetic construct
  source 1..75: mol_type = other DNA
tggaagggcatggatctataaactcattgcccaagggcgttttcctaaacctgtaaaaattggctcgcgagctat

SEQ ID NO: 120946 - DNA, 75 bp, synthetic construct
  source 1..75: mol_type = other DNA
atgttttatgaagggagcaatgcctcagcatcaggttacgggatcacttacgtaagggacaggcagatggcagct

SEQ ID NO: 120947 - DNA, 75 bp, synthetic construct
  source 1..75: mol_type = other DNA
gcgtatcagggcgacgtcttctggtgcggatatcctgatcctcgccattttgttaattcagtgcattcttgggtt

SEQ ID NO: 120948 - DNA, 75 bp, synthetic construct
  source 1..75: mol_type = other DNA
tacgggcatttaacaggtgatgtggtattacgtacactggcgacgtctctggccaactggacgcgtgattacgaa

SEQ ID NO: 120949 - DNA, 75 bp, synthetic construct
  source 1..75: mol_type = other DNA
ccgaaaaattacaagaactggccgaccataatatgtatcaggccaaacaccagcgcgccaaaaagctggtgaaat

SEQ ID NO: 120950 - DNA, 75 bp, synthetic construct
  source 1..75: mol_type = other DNA
atgtttagaggctattattaattctcacagtgatagcaattttacttacatagatcatgcgatattcagtcaatg

SEQ ID NO: 120951 - DNA, 75 bp, synthetic construct
  source 1..75: mol_type = other DNA
ctggaaaaatttaatttaaatcgcttccgtttccgtggtgcgctttccactgccagcatcgatgactttacccgt

SEQ ID NO: 120952 - DNA, 75 bp, synthetic construct
  source 1..75: mol_type = other DNA
gaacctttaattatttgtaatgaagaacatcggtttttagttgcagagcaattgaggtcagaaaaaagaaatacc

SEQ ID NO: 120953 - DNA, 75 bp, synthetic construct
  source 1..75: mol_type = other DNA
cggcatggtgcgcggcgacgagaaagcccttttccgggactgcatttatgagttaccgctgcgctatatgattaa

SEQ ID NO: 120954 - DNA, 75 bp, synthetic construct
  source 1..75: mol_type = other DNA
gacaaaatcagagctgggaaatcgtcgttttcgatgaacaggggcggcgttgctgcacctgtcggctgggcacag

SEQ ID NO: 120955 - DNA, 75 bp, synthetic construct
  source 1..75: mol_type = other DNA
atgatggataacgataattctcttaataagcgccccacgtttaaaagagcacgcaacatcagtatgaccagcata

SEQ ID NO: 120956 - DNA, 75 bp, synthetic construct
  source 1..75: mol_type = other DNA
aactctcgctgcactgaatgcaatacgtaataagtcaaaacaatcaaaattaattttggttcttgcagctgatca

SEQ ID NO: 120957 - DNA, 75 bp, synthetic construct
  source 1..75: mol_type = other DNA
tagaccagacatacttgaggcctgtaaaaaatcaatgattgaacttaatggagatcttgattttattcgtatcaa

SEQ ID NO: 120958 - DNA, 75 bp, synthetic construct
  source 1..75: mol_type = other DNA
tgtcgatgttcttaaaagagagaaacgtactgaacatctctctcatcgagaagaatatagaccttggggacgctt

SEQ ID NO: 120959 - DNA, 75 bp, synthetic construct
  source 1..75: mol_type = other DNA
ctaaaacctctaataatcagtaatgatgagcatcgttttattgttgccgagcagttacgtacgtcaggaattaat

SEQ ID NO: 120960 - DNA, 75 bp, synthetic construct
  source 1..75: mol_type = other DNA
ccgcaacggtcgaacacgcaaaagagattgtgggattactgcctgccgaagatgcagcactgattactggcgaca

SEQ ID NO: 120961 - DNA, 75 bp, synthetic construct
  source 1..75: mol_type = other DNA
gaagagagccagtatcagcaaatccttactcacctgacaaaagtgaatccccacttacgcctgttggggctgacc

SEQ ID NO: 120962 - DNA, 75 bp, synthetic construct
  source 1..75: mol_type = other DNA
tgccagtaatgcagcatccggcgcaggataaagaaacccagcagaagctggcagaacttgagaaaaaaaccggta

SEQ ID NO: 120963 - DNA, 75 bp, synthetic construct
  source 1..75: mol_type = other DNA
cgcgcaaagcagggattaaccttgctcttaacaaacttaactccgtgccaacaacggcctatcccacaccagccc

SEQ ID NO: 120964 - DNA, 75 bp, synthetic construct
  source 1..75: mol_type = other DNA
ggtgatattggtccacgcgagcttgggatactctatttctctgatgctttcggttctcctggtagctttgttcgc

SEQ ID NO: 120965 - DNA, 75 bp, synthetic construct
  source 1..75: mol_type = other DNA
ccaaagcggctgcggcgatccgtaaaatcacaattgaagcgaaccagacagctgattttgaagataatgacttca

SEQ ID NO: 120966 - DNA, 75 bp, synthetic construct
  source 1..75: mol_type = other DNA
cgtcaacggcaggcattactggcagaaggtgtgatggtatcgggaagcgggcaaatcgacttacagcgttatcgc

SEQ ID NO: 120967 - DNA, 75 bp, synthetic construct
  source 1..75: mol_type = other DNA
ttcactgaccggaccggatttacagcgtcagcgacaggcattactggcagaaggtgtgatggtgtcgggaagcgg

SEQ ID NO: 120968 - DNA, 75 bp, synthetic construct
  source 1..75: mol_type = other DNA
acgcggtcatggaacgtacggcagatgctgttgtggtgccgatggatgcgggctggagcgatgtcggttcctggt

SEQ ID NO: 120969 - DNA, 75 bp, synthetic construct
  source 1..75: mol_type = other DNA
gcacaggcccgggaacgcatcgataccgattatcagcgcctcaaaaaactcatctggtcggagggtgacagttaa

SEQ ID NO: 120970 - DNA, 75 bp, synthetic construct
  source 1..75: mol_type = other DNA
aattggaccagttaatataccaccagtgaatatgtgtggcgatggacagggtaaaacggttattgtgtttgataa

SEQ ID NO: 120971 - DNA, 75 bp, synthetic construct
  source 1..75: mol_type = other DNA
gggtgttaatgaaattatcagtaagattggtgccgatgctgtggcattgcctgagaatttccgcattcatgatct

SEQ ID NO: 120972 - DNA, 75 bp, synthetic construct
  source 1..75: mol_type = other DNA
agtaataaactcgaacatacgctgcacaatttaccggcgggtgactgggcggcggggagcgcggtattgcctgta

SEQ ID NO: 120973 - DNA, 75 bp, synthetic construct
  source 1..75: mol_type = other DNA
acaatttaccagcgggtgactggcggcgggcgagcggggtattgcctgtattcctggccgtgaagaagagtttcg

SEQ ID NO: 120974 - DNA, 75 bp, synthetic construct
  source 1..75: mol_type = other DNA
agcagtacaggaagaaatggctaacgaatttcgtgatctgctagttgaaaaattcaaagacagcaaagtaaaaac

SEQ ID NO: 120975 - DNA, 75 bp, synthetic construct
  source 1..75: mol_type = other DNA
tccacggcgcgcggtcttcgaaaacccgcagcatccttatacgcgtaaattactggcggcagttccggtcgctga

SEQ ID NO: 120976 - DNA, 75 bp, synthetic construct
  source 1..75: mol_type = other DNA
acctgattggggtgggtgaaatccgcgatcaggagacggctgaggctgccattgccgccggagaatccggtcacg

SEQ ID NO: 120977 - DNA, 75 bp, synthetic construct
  source 1..75: mol_type = other DNA
cacttgttcggcatgttaacgccgcactggatgtacgcgtggtttttgccagtggcagcgaaacaactaatggcg

SEQ ID NO: 120978 - DNA, 75 bp, synthetic construct
  source 1..75: mol_type = other DNA
agtacgcttaaccgctcgcgacagttcaatcagccattttatctggttttcgctcgctgtactgaccggttgtat

SEQ ID NO: 120979 - DNA, 75 bp, synthetic construct
  source 1..75: mol_type = other DNA
cagcggagatgcctccggccgctatggcctgcaacgaggtcagcgtgttcgcctgcgctgccacctgatacaggg

SEQ ID NO: 120980 - DNA, 75 bp, synthetic construct
  source 1..75: mol_type = other DNA
tacctatatgtccctgtgtcagggaaaaaggtatggcagcttcgctacaagattgacggtaaggagaaaatcctg

SEQ ID NO: 120981 - DNA, 75 bp, synthetic construct
  source 1..75: mol_type = other DNA
ctgatagcgtatggtttttcagcgctttgttgcatcactgtagtgactcgggttgtcgctggtgtttcattgttt

SEQ ID NO: 120982 - DNA, 75 bp, synthetic construct
  source 1..75: mol_type = other DNA
agagctattagaagaagtctgggatgtttttgggcaattttctgcctggaaactgaggaacatgacacacgaaga

SEQ ID NO: 120983 - DNA, 75 bp, synthetic construct
  source 1..75: mol_type = other DNA
ggacaggtcagctttgatgacttcagcggtgggcttaaaatgaccgctcgcgaagtgatggatattgacgaagcc

SEQ ID NO: 120984 - DNA, 75 bp, synthetic construct
  source 1..75: mol_type = other DNA
tgcgggtgcacagcgactactcgatgatcgatggcctggccaaaaccgcgccgctggtaaaaaaggcggcggcgt

SEQ ID NO: 120985 - DNA, 75 bp, synthetic construct
  source 1..75: mol_type = other DNA
gcggcaaacgctccctgatggagtctgtcgaagcgaaaaccaaagacattatgccagtggcatttgaatttaaat

SEQ ID NO: 120986 - DNA, 75 bp, synthetic construct
  source 1..75: mol_type = other DNA
caacatcatcctgctcgaaaaacgcagaatcgccgatcaggttgccaccctgtaccgccgtcatgacatcacccg

SEQ ID NO: 120987 - DNA, 75 bp, synthetic construct
  source 1..75: mol_type = other DNA
ttgttatacacctcgtataactcaagacctgttgccccctgcgtattgtctgtcagcgcggttaacccgttgtgt

SEQ ID NO: 120988 - DNA, 75 bp, synthetic construct
  source 1..75: mol_type = other DNA
aagtcactggcagaatggattgaagactgggccgactaccttgtgggctttgatgctaatggtgacaccattcag

SEQ ID NO: 120989 - DNA, 75 bp, synthetic construct
  source 1..75: mol_type = other DNA
tcgataccttgtcacccggcaaacttcaggcattgcgccgcgatattcagtttatttttcaggacccttacgctt

SEQ ID NO: 120990 - DNA, 75 bp, synthetic construct
  source 1..75: mol_type = other DNA
gcggcaaacgctccctgatggaatctgtcgaagcgaagaccaaagacattatgccagtggcatttgaatttaaat

SEQ ID NO: 120991 - DNA, 75 bp, synthetic construct
  source 1..75: mol_type = other DNA
cgcggttgatggagagcgaagcgcggcgctttattgcgctggtggatgagttttacgagcgccatgtcaaattag

SEQ ID NO: 120992 - DNA, 75 bp, synthetic construct
  source 1..75: mol_type = other DNA
ggcgacgcccttcgctgggccggtgatcctgagcttgccaagcagttcgatgctgagggggaaatacatgcaaat

SEQ ID NO: 120993 - DNA, 75 bp, synthetic construct
  source 1..75: mol_type = other DNA
tattatggctctgccaacacatccactgagcggcagagcgcctaccccgtcatgcgtctggtggcgttaatggta

SEQ ID NO: 120994 - DNA, 75 bp, synthetic construct
  source 1..75: mol_type = other DNA
gctgggtgaaaaatcacttgcgtcttagcagtaaattcaatggattcctgactttttatctctacccggtgctcg

SEQ ID NO: 120995 - DNA, 75 bp, synthetic construct
  source 1..75: mol_type = other DNA
gggcgcggaacgttacctgaaggatgactggcacggcctgcaactttttgccattgatggcgcacagttcaggac

SEQ ID NO: 120996 - DNA, 75 bp, synthetic construct
  source 1..75: mol_type = other DNA
tgccagtgtgtatgctgccgatagtggcaaatgcacaagaagcaacggtgaaagatgtgcatgatgcgcctgcag

SEQ ID NO: 120997 - DNA, 75 bp, synthetic construct
  source 1..75: mol_type = other DNA
tggacgctgcgcgatgtggagatggggtataaccacgactctaacgggcgttcagacccgacctcccgcagctgg

SEQ ID NO: 120998 - DNA, 75 bp, synthetic construct
  source 1..75: mol_type = other DNA
agtgccatgattcaacagtctgctggcaatatccagttttcaggatgcaatggtcaatccgttaatcttaaagtg

SEQ ID NO: 120999 - DNA, 75 bp, synthetic construct
  source 1..75: mol_type = other DNA
acaccgatcgcaattttcgatatagcggttaacgggagctataaagaacaggaaagcggtgaagtcaaggaatat

SEQ ID NO: 121000 - DNA, 75 bp, synthetic construct
  source 1..75: mol_type = other DNA
gggtgagcaatatgacccggtactgccatccgccctgcgccagtctcagcccgtaaaccgttaccggcctcactt

SEQ ID NO: 121001 - DNA, 75 bp, synthetic construct
  source 1..75: mol_type = other DNA
aaccagcgaaagtggcccaggctgataacacctttgccaaagagagcggggcgaacgtggactggcgcaagtttg

SEQ ID NO: 121002 - DNA, 75 bp, synthetic construct
  source 1..75: mol_type = other DNA
gtggaatggctcttccgccagaccgcacagacatggggcgcggaacgttacctgaaggatgactggcacggcctg

SEQ ID NO: 121003 - DNA, 75 bp, synthetic construct
  source 1..75: mol_type = other DNA
gctggagatcaaccatggctggaagccgccagtgcgcaaagccagcgtaactatcagatttcggcactggtgttt

SEQ ID NO: 121004 - DNA, 75 bp, synthetic construct
  source 1..75: mol_type = other DNA
tacgtgtcgatgcagttaaaatgtcaacaaacaacgcaactgatgtaggtcaaggtaattatagcgcatcttttg

SEQ ID NO: 121005 - DNA, 75 bp, synthetic construct
  source 1..75: mol_type = other DNA
cagaaagtggtcaacatgaccatctatgacgctgagcactataccgacgagcagaaagagcaaatcatcgcatca

SEQ ID NO: 121006 - DNA, 75 bp, synthetic construct
  source 1..75: mol_type = other DNA
cgctaaccaaccaacgctaccgggtggtggatgaacagggccgggactgccctgactgggtgccgggtgaattat

SEQ ID NO: 121007 - DNA, 75 bp, synthetic construct
  source 1..75: mol_type = other DNA
ctcgatggcaaggcaaatcctaaagcaatggattgctatgtggaaaatcaaggtattttctctgaagataaaata

SEQ ID NO: 121008 - DNA, 75 bp, synthetic construct
  source 1..75: mol_type = other DNA
catcactgaattgcgcgacatgatgctcgatggtcgcttcaaagtattcaatacctgtgagccattctttgagga

SEQ ID NO: 121009 - DNA, 75 bp, synthetic construct
  source 1..75: mol_type = other DNA
aagaaaaacgccattatgatggtcgattttgcgcttgaagcccaacggcacggtaacctgacgccgcaggaagct

SEQ ID NO: 121010 - DNA, 75 bp, synthetic construct
  source 1..75: mol_type = other DNA
cttggcgcgctgccgctgatgttgagtaccggggtcggcgcggaactgcgtcgtccgttaggtatcggcatggtc

SEQ ID NO: 121011 - DNA, 75 bp, synthetic construct
  source 1..75: mol_type = other DNA
agcgagcagcaatttttgacgctcccggacgagcgctggtatcgcaccggcgatctcggctgctactggccagat

SEQ ID NO: 121012 - DNA, 75 bp, synthetic construct
  source 1..75: mol_type = other DNA
gtggcagctttctaatagcgaagagtcatcgccgtttcgtgaaactaattacgaaccgcaattattcctcggttt

SEQ ID NO: 121013 - DNA, 75 bp, synthetic construct
  source 1..75: mol_type = other DNA
cggtatgccgccgggaccggcggccattggtgcacgtccgtatatgggctttgatcaggtggcagagcaggagat

SEQ ID NO: 121014 - DNA, 75 bp, synthetic construct
  source 1..75: mol_type = other DNA
atagagttaaacatagcaaaagggttaaaaataaaaccgagaaaggttatataaggctatctaataccgatgacg

SEQ ID NO: 121015 - DNA, 75 bp, synthetic construct
  source 1..75: mol_type = other DNA
acccgctatgatttccgctcgtatttgctgcaccagcagaagatcaatcaaccactgagagacgacgcgcgcgct

SEQ ID NO: 121016 - DNA, 75 bp, synthetic construct
  source 1..75: mol_type = other DNA
ccggcgcccccattcccgaaggcttgctgcatgaaggcattttccgtatcgctctgcaacagccgcaggcgctgg

SEQ ID NO: 121017 - DNA, 75 bp, synthetic construct
  source 1..75: mol_type = other DNA
atgaatcaaaatccattctcattctatgactttcttggatatttaataccaggtggtttttttatcctattaatg

SEQ ID NO: 121018 - DNA, 75 bp, synthetic construct
  source 1..75: mol_type = other DNA
cgccgcaggtctggatagatcatctggcgttcgagcatcacggcgaggtctggctacaatgggacagcaacgacg

SEQ ID NO: 121019 - DNA, 75 bp, synthetic construct
  source 1..75: mol_type = other DNA
agcgaaaactgctacatcaacagcgacgagaagctggtggcggccatcggcgtggagaacctggtgattgtcagc

SEQ ID NO: 121020 - DNA, 75 bp, synthetic construct
  source 1..75: mol_type = other DNA
tctttgcccgtacggtgtttgtgctgctgcacaatctgtgtccggattgtttccgcattcattccactgccggtg

SEQ ID NO: 121021 - DNA, 75 bp, synthetic construct
  source 1..75: mol_type = other DNA
ttgacaataagttagtgacttttggcatcgtcccgaccaaacctgaaactgggtatggctatattaaaaagggcg

SEQ ID NO: 121022 - DNA, 75 bp, synthetic construct
  source 1..75: mol_type = other DNA
gctggctgctctaaagtctctagaactccatggcgatcatcatatgctggttcttgctgctgaccatgctattca

SEQ ID NO: 121023 - DNA, 75 bp, synthetic construct
  source 1..75: mol_type = other DNA
agaaaacatcaaagaaataaaactaaaaaatgagacaacatatgtttctcttcctaatccaaccattttaataac

SEQ ID NO: 121024 - DNA, 75 bp, synthetic construct
  source 1..75: mol_type = other DNA
gcaggcgcaggatacgctgaactactacaaaaatcaggcgggtagccttgattcttatctccagcgttatcagga

SEQ ID NO: 121025 - DNA, 75 bp, synthetic construct
  source 1..75: mol_type = other DNA
tatccccggatgactggtcagcactggaagaggctgaacatcagctttactggctgcgtgcacttgccggtggac

SEQ ID NO: 121026 - DNA, 75 bp, synthetic construct
  source 1..75: mol_type = other DNA
agtaggtacgccgaaaggcaaaagtgacaacgtcccggtgcaggttttctgccctgcctgcggctttgccaacac

SEQ ID NO: 121027 - DNA, 75 bp, synthetic construct
  source 1..75: mol_type = other DNA
taatggagcatactaatgaggccatagttgtacctatggatggtgattggagtgacgtgggctcttgggcatcat

SEQ ID NO: 121028 - DNA, 75 bp, synthetic construct
  source 1..75: mol_type = other DNA
catctgatgcggttgttgttcctctggatgcaggatggagtgatgtaggctcttggtcctctgtttgggatgttg

SEQ ID NO: 121029 - DNA, 75 bp, synthetic construct
  source 1..75: mol_type = other DNA
ggctttcagcaggtgctggaacgtgctggctatctggcgaaggagcataccaaagctcgcggcaccggtgagcgc

SEQ ID NO: 121030 - DNA, 75 bp, synthetic construct
  source 1..75: mol_type = other DNA
gctcctttgcatgtggtgggaaacttgtaacttttggcattcctcctctaacacctgagaccggatatggttaca

SEQ ID NO: 121031 - DNA, 75 bp, synthetic construct
  source 1..75: mol_type = other DNA
ggtatcggtctgttcattggcatgatggggctgaaaaacgcaggtgtgattgtcgctaacccggaaacgctggtg

SEQ ID NO: 121032 - DNA, 75 bp, synthetic construct
  source 1..75: mol_type = other DNA
acaatgccgtcgctcctgacaggcaatttttcgcgcaaggcagcgcagaagaatcgacaagcttaatgcagctcg

SEQ ID NO: 121033 - DNA, 75 bp, synthetic construct
  source 1..75: mol_type = other DNA
ggatctggatatcaaaattgatcgtacagaagcatttaacctgtttatcaagaaatttcagtctgttatcttgct

SEQ ID NO: 121034 - DNA, 75 bp, synthetic construct
  source 1..75: mol_type = other DNA
ttgcggagggtaagtggtatcctttgtcctaccggcagtgggtggagcaacaggcggtacagggagacagagctg

SEQ ID NO: 121035 - DNA, 75 bp, synthetic construct
  source 1..75: mol_type = other DNA
ttgttgcattgagcgaaaaaatgaaagcggttgatgacaatgccagtaagaaaaaagatgagtctgcattgtata

SEQ ID NO: 121036 - DNA, 75 bp, synthetic construct
  source 1..75: mol_type = other DNA
tcgcgccattgttgcattgagcgaaaaaatgaaagcggttgatgacaatgccagtaagaaaaagatgaaccgtca

SEQ ID NO: 121037 - DNA, 75 bp, synthetic construct
  source 1..75: mol_type = other DNA
ttatacccaaaagacagggaatctctaaagaccctctgtgtgcgaggaattccaccaaaacaaggagatttatgg

SEQ ID NO: 121038 - DNA, 75 bp, synthetic construct
  source 1..75: mol_type = other DNA
ataagatggaggccatcggctcgacgtataggaaattgaaaaaccagacgataccgctgtccacgccttatgcca

SEQ ID NO: 121039 - DNA, 75 bp, synthetic construct
  source 1..75: mol_type = other DNA
gcgtacttctgggtatcctcggcttcttcatcattgctattctggcctcgcgcaacattcacgcagcggtgctgg

SEQ ID NO: 121040 - DNA, 75 bp, synthetic construct
  source 1..75: mol_type = other DNA
gagcgtatctcaggcatgatttcggtgcttaccgataagatggaggccatcggctcgacgtataggaaattgaaa

SEQ ID NO: 121041 - DNA, 75 bp, synthetic construct
  source 1..75: mol_type = other DNA
accgaaggtattgcgctgggctttatctcctactgcgtgatgaagattggtaccggacgtctgcgtgaccttagc

SEQ ID NO: 121042 - DNA, 75 bp, synthetic construct
  source 1..75: mol_type = other DNA
aaccggcgcgcaagggcaaatggaagctattcaggccgctaaccagcttgccagtgctcaaacaaaccagctgct

SEQ ID NO: 121043 - DNA, 75 bp, synthetic construct
  source 1..75: mol_type = other DNA
tatagtggcattgtttccgcaccgccgagtgtgacaagtgttgtcggtcaggtggatttggcgggttcttttaac

SEQ ID NO: 121044 - DNA, 75 bp, synthetic construct
  source 1..75: mol_type = other DNA
tcgcagaagaaggccaacgacgcgctgtttaaggggctggagcagcagcaagacaacttgcaggccgacgctcga

SEQ ID NO: 121045 - DNA, 75 bp, synthetic construct
  source 1..75: mol_type = other DNA
ctgccgtcagaggcaaaacaaccaaaaccgccgaaggaatgctcaccaacatgctcggagatattgcagcagaag

SEQ ID NO: 121046 - DNA, 75 bp, synthetic construct
  source 1..75: mol_type = other DNA
tccacggtttcgccgatcgagctggaaaacgctgtacgtggacgtgcagataccggctttggtgtgatgaccgaa

SEQ ID NO: 121047 - DNA, 75 bp, synthetic construct
  source 1..75: mol_type = other DNA
gacaaacgctacatcgcaggagtgacttgtcaacggatttatgaatctttaagagataaaaaatatcagatgtag

SEQ ID NO: 121048 - DNA, 75 bp, synthetic construct
  source 1..75: mol_type = other DNA
aggagaaagagcataacaaagcgttttaccagttgtgctgtcatatggaaccgcagtaccaccagcttgagttcg

SEQ ID NO: 121049 - DNA, 75 bp, synthetic construct
  source 1..75: mol_type = other DNA
ttggatggaactggagtagcggagcctataacgcaactattggtggggcatcaacgttaattcttcattttaata

SEQ ID NO: 121050 - DNA, 75 bp, synthetic construct
  source 1..75: mol_type = other DNA
tcggagatattgcagcagaagctcagctttatgctgaaattgctgacaaacgctacatcgcaggagtgacttgtc

SEQ ID NO: 121051 - DNA, 75 bp, synthetic construct
  source 1..75: mol_type = other DNA
cgcgaaaacctacagcgggagatgttggtgcactgtcgttatctggtggtcaattgaatggtgcactgggcatcg

SEQ ID NO: 121052 - DNA, 75 bp, synthetic construct
  source 1..75: mol_type = other DNA
cgtggggagagctacaaagtctccattcttgacgaaaacatcgcccatgatgacaagccaggtctgtacttccat

SEQ ID NO: 121053 - DNA, 75 bp, synthetic construct
  source 1..75: mol_type = other DNA
gatatgaccaatatccccgatgggatggaatggggcgtcattgatactaacctgataaatatcactgttggcccc

SEQ ID NO: 121054 - DNA, 75 bp, synthetic construct
  source 1..75: mol_type = other DNA
tggcaaggatccagttcgcctttacagtttcatttcacattatctttccggcgatcaccattgggcttgccagtt

SEQ ID NO: 121055 - DNA, 75 bp, synthetic construct
  source 1..75: mol_type = other DNA
tttatcatcaggagacgtcacaaaatgcaaaatatagtgaaacagacaagaaaaaagtcaccttaaccaggaaat

SEQ ID NO: 121056 - DNA, 75 bp, synthetic construct
  source 1..75: mol_type = other DNA
aatgaatcgtgtacatgccggatttaccgcaacgaccgaaatcatccgatctgcgttaccgactggatggatgaa

SEQ ID NO: 121057 - DNA, 75 bp, synthetic construct
  source 1..75: mol_type = other DNA
aaaatatgccatacgccttgacgcagcgcagcataccgcaaatcttgccgctgccgtcagaggcaaaacaaccaa

SEQ ID NO: 121058 - DNA, 75 bp, synthetic construct
  source 1..75: mol_type = other DNA
agtgatgtatgacaacaagatccatgtgctgaaaaacgcgctcgggttacataccgccgtttcgcgtgtgcaggg

SEQ ID NO: 121059 - DNA, 75 bp, synthetic construct
  source 1..75: mol_type = other DNA
agtgttagctcgcgtgcatggacgttgcggaacaacaaagtggcagaggcctccaactgatgaagactatgagat

SEQ ID NO: 121060 - DNA, 75 bp, synthetic construct
  source 1..75: mol_type = other DNA
cttgcagctcttttgccttggcgggcgtggctcatgctgattcccagtgtgggcctttccacttgggcacgagcc

SEQ ID NO: 121061 - DNA, 75 bp, synthetic construct
  source 1..75: mol_type = other DNA
gggcgggctgacgcgcagtatggagtacgatgctgccggacgtgtcatcagtctgactaacgagaacggcagcca

SEQ ID NO: 121062 - DNA, 75 bp, synthetic construct
  source 1..75: mol_type = other DNA
atcgcctcaccgcaggtaatgatggttttatgcatattaatggtgtaaagccagaaaaccagaaaatgacctttc

SEQ ID NO: 121063 - DNA, 75 bp, synthetic construct
  source 1..75: mol_type = other DNA
atctgaaaagtatcctttatataatgaggagctattgtcatggctttctctacctgctgccgatattcgccagag

SEQ ID NO: 121064 - DNA, 75 bp, synthetic construct
  source 1..75: mol_type = other DNA
agatgggcttcccgggctacttcctcatcgttatggaatttatccagtggtcgaaagataacggtgtaccggtag

SEQ ID NO: 121065 - DNA, 75 bp, synthetic construct
  source 1..75: mol_type = other DNA
tttccggcgcgctgctggagatgcatggatttatggggcatcccggctggttctggatgtttgtgattgaaggat

SEQ ID NO: 121066 - DNA, 75 bp, synthetic construct
  source 1..75: mol_type = other DNA
tccatgttatgcgctttgtctccggaagcgttcaaagtaataaaaccataaatattacggggcgtgttaatccct

SEQ ID NO: 121067 - DNA, 75 bp, synthetic construct
  source 1..75: mol_type = other DNA
gtgaggaggcgtaacgcgagaggcggtataagcagaacagtctcggtgtatctcgatgaagatacaaataaccga

SEQ ID NO: 121068 - DNA, 75 bp, synthetic construct
  source 1..75: mol_type = other DNA
atatattcctgagatattttatgaggcctgcaaacatctccagtcattttttttatcatcaggagacgtcacaaa

SEQ ID NO: 121069 - DNA, 75 bp, synthetic construct
  source 1..75: mol_type = other DNA
gccactcatcagagttgaaaccgccaccggtgagctggcgaaaacgcagcgccgcagcctggcggatgcccttca

SEQ ID NO: 121070 - DNA, 75 bp, synthetic construct
  source 1..75: mol_type = other DNA
ctggtagctcaaagactaaacgagggattaaaaactctatcaactatattacgcgtgaaggtgagattaccttac

SEQ ID NO: 121071 - DNA, 75 bp, synthetic construct
  source 1..75: mol_type = other DNA
ggaaccctggctgcctggcaacaagctcaacaaactctcatgagtactatcggggataaagagcgtgtatttacg

SEQ ID NO: 121072 - DNA, 75 bp, synthetic construct
  source 1..75: mol_type = other DNA
gacgcatttgctggtagtggtaccacaggcttagccactctgctctgtgaccgccctacactcgaaatgaagcga

SEQ ID NO: 121073 - DNA, 75 bp, synthetic construct
  source 1..75: mol_type = other DNA
accaacattcccgacggtatggactggggcgtcattgatggcaacctgataaacatcgcagttggtccgagtgat

SEQ ID NO: 121074 - DNA, 75 bp, synthetic construct
  source 1..75: mol_type = other DNA
agatgcaatgttcaccacgtcttctgagaaccgtgaatactgcattaagccgatgaactgcccgggtcacgtaca

SEQ ID NO: 121075 - DNA, 75 bp, synthetic construct
  source 1..75: mol_type = other DNA
gagtaaagaagtctgggccaacggcggcgaagtgctggtgctcaactttgaagacggttgctcgaccactaacat

SEQ ID NO: 121076 - DNA, 75 bp, synthetic construct
  source 1..75: mol_type = other DNA
ccggtgtcagcctgccaccgtttgcggatgcacatcacctggtggcacagggacagaccctgcaggatgtggatg

SEQ ID NO: 121077 - DNA, 75 bp, synthetic construct
  source 1..75: mol_type = other DNA
cgataacattggtggtgtatattacaggccggttcagaaatacattaacgggacatggtataacgtggcgcaggt

SEQ ID NO: 121078 - DNA, 75 bp, synthetic construct
  source 1..75: mol_type = other DNA
agcacactttgcgtcgcgtcccatatatgctggtctgtggtgataaagcatatatgctggtctgtggtgataaag

SEQ ID NO: 121079 - DNA, 75 bp, synthetic construct
  source 1..75: mol_type = other DNA
gattacgtcgatgacaaaatcgcagagcatgagcagtcccgccaccatcctgacgccacgctgacagaaaaaggt

SEQ ID NO: 121080 - DNA, 75 bp, synthetic construct
  source 1..75: mol_type = other DNA
tatgaaccttagtcacggtattgatattgcgtaccaggatacccggaactggaaaaaactggtagcggagcgctg

SEQ ID NO: 121081 - DNA, 75 bp, synthetic construct
  source 1..75: mol_type = other DNA
tcgcgctttcctggcgctaagcattctttcgagttcagcgatatcacgcgggctaatttgcactatgttgagaag

SEQ ID NO: 121082 - DNA, 75 bp, synthetic construct
  source 1..75: mol_type = other DNA
atgaggtggaatggcacaagagacttacaaaagaatcaggaaaaacgcctgattgatgagagccccaagccactg

SEQ ID NO: 121083 - DNA, 75 bp, synthetic construct
  source 1..75: mol_type = other DNA
aatcagaaaccacacagggacgcacttttgagcgcgtctacgccgggagcaaatggaccgaatggcgagaagtat

SEQ ID NO: 121084 - DNA, 75 bp, synthetic construct
  source 1..75: mol_type = other DNA
gcgcctttgacatggactactgcgtgcaactcgctttcgagaatatcaactccagcgaagtgaacggttacggcg

SEQ ID NO: 121085 - DNA, 75 bp, synthetic construct
  source 1..75: mol_type = other DNA
gtgaagccctgctgatagccacgcacaccacgtaccgtgagggacgtcagatgttgcctgccgacctgcagacgg

SEQ ID NO: 121086 - DNA, 75 bp, synthetic construct
  source 1..75: mol_type = other DNA
gacaacgagcgtaaggttccggtaatgattcaccgcgcaattctggggtcgatggaacgtttcatcggtatcctg

SEQ ID NO: 121087 - DNA, 75 bp, synthetic construct
  source 1..75: mol_type = other DNA
tcggctctgttagtgacccgttccgaacagggtatgtcgctgctgcaaccgggtaaagcgccgctgcatatgcca

SEQ ID NO: 121088 - DNA, 75 bp, synthetic construct
  source 1..75: mol_type = other DNA
gcagccaacgccattacgaccacgctgtcagtcccatggatgttgcgctggacattggtccaggtctggcgaaag

SEQ ID NO: 121089 - DNA, 75 bp, synthetic construct
  source 1..75: mol_type = other DNA
aaacgtattggcagcgacgaaatgtgggatcgtgctgaggcggacctggcggttgcgctggaagaaaacaacatc

SEQ ID NO: 121090 - DNA, 75 bp, synthetic construct
  source 1..75: mol_type = other DNA
cgccaagtagaaaagttttacttacccttgatgaggaaacgaataaattattacttggagccagagagcgtagtg

SEQ ID NO: 121091 - DNA, 75 bp, synthetic construct
  source 1..75: mol_type = other DNA
ggcgcactggaagcggtcgactgggtggtgtcgtttgaagaagacacgccgcagcgcttgatcgccgggatcttg

SEQ ID NO: 121092 - DNA, 75 bp, synthetic construct
  source 1..75: mol_type = other DNA
agccaggcgtttgattcgggttctcagggtcagattgttgcgttcaatgcgcagagtaaaaattttaccagtcag

SEQ ID NO: 121093 - DNA, 75 bp, synthetic construct
  source 1..75: mol_type = other DNA
aaaacgttgtgatattgaatcgtatatccagacatatacgacagtttctgcaacggatgcctataaaaaccggac

SEQ ID NO: 121094 - DNA, 75 bp, synthetic construct
  source 1..75: mol_type = other DNA
atgcgacttcgtttctgtgccaacgcatccgaccatcaccaaactgcgggtgctttcccgtaaccaacagttgat

SEQ ID NO: 121095 - DNA, 75 bp, synthetic construct
  source 1..75: mol_type = other DNA
cactgttcgccctttcccgcgacaacagtctgccggaagcccgccgccagagggcgtatgaaatggcggaatcca

SEQ ID NO: 121096 - DNA, 75 bp, synthetic construct
  source 1..75: mol_type = other DNA
catccgactatcaccaaattacgggtactttcccgcaaccaacagctgatccgtctggatttcgaagaaggtttc

SEQ ID NO: 121097 - DNA, 75 bp, synthetic construct
  source 1..75: mol_type = other DNA
gaggcagggacgctgaccggtgagaaggcccggggcgaaaagacggtgaatgccctgatggatacgttccctgaa

SEQ ID NO: 121098 - DNA, 75 bp, synthetic construct
  source 1..75: mol_type = other DNA
tggcgaaacagtagtggctctatcgcttcatttgaccgcaactatccggaagaaggaagttatggtcagggattc

SEQ ID NO: 121099 - DNA, 75 bp, synthetic construct
  source 1..75: mol_type = other DNA
tatgctggtctgtggtgataaagaggtggaatcaggcaaagttgccgttcgcacccgccgtggtaaagacctggg

SEQ ID NO: 121100 - DNA, 75 bp, synthetic construct
  source 1..75: mol_type = other DNA
ggttgcggaaatcgagtttgatcctgacatgtacgaaccgttgccggtttacaaaccagcagccagccgtatgca

SEQ ID NO: 121101 - DNA, 75 bp, synthetic construct
  source 1..75: mol_type = other DNA
tactttcccgcaaccagcagctgattcgtctggatttcgaagaaggtttcgaaggtgttgatccgcagccgttgc

SEQ ID NO: 121102 - DNA, 75 bp, synthetic construct
  source 1..75: mol_type = other DNA
atgattgagattatgtatcaaggtacatttactgtttctggtaagtataccgttgattttttaggccaagctaaa

SEQ ID NO: 121103 - DNA, 75 bp, synthetic construct
  source 1..75: mol_type = other DNA
aatccgcataatctcggtggattgctacattttccgttagtcaaaactttggaacaacttaccgatttgccgacc

SEQ ID NO: 121104 - DNA, 75 bp, synthetic construct
  source 1..75: mol_type = other DNA
atgaacgcatttgatccgcaagctgaagattctactaccactatcgggcgcaacttgcgcagccgcccgctggcg

SEQ ID NO: 121105 - DNA, 75 bp, synthetic construct
  source 1..75: mol_type = other DNA
gcgattgcttctggtcgcggcattgcggcggcagcgcagggtgaactggcgggcgcggatgcgagaactattttt

SEQ ID NO: 121106 - DNA, 75 bp, synthetic construct
  source 1..75: mol_type = other DNA
taccttgacgttttagaaatgaaaagcaatcacgacttagcacaatcaattgtttattcaataacatctggaaat

SEQ ID NO: 121107 - DNA, 75 bp, synthetic construct
  source 1..75: mol_type = other DNA
gttaaatcttggggagtacggacaaatccttgttaatttaaagataaaacatatatccgaggaaaataatcgcaa

SEQ ID NO: 121108 - DNA, 75 bp, synthetic construct
  source 1..75: mol_type = other DNA
agaatgaaggaattactcaggcagcaatgattgagaggctgattgaaagggaatctgcgaaactaggaatcgacg

SEQ ID NO: 121109 - DNA, 75 bp, synthetic construct
  source 1..75: mol_type = other DNA
atttccgctgtggtgccagtgctagaaaaagtatcggatgaaaatcaaaccgcctccataagcataaaatctaaa

SEQ ID NO: 121110 - DNA, 75 bp, synthetic construct
  source 1..75: mol_type = other DNA
ctctcgtttactaatatcgttaacgaaggtatggcgcgacaggtagcacaacaattacgtaaagccttaagctaa

SEQ ID NO: 121111 - DNA, 75 bp, synthetic construct
  source 1..75: mol_type = other DNA
cggagaaagccctgcgccgcatgctgccgtgggtggagtggcttttcagcgcgccgtttctactgctgaccgccg

SEQ ID NO: 121112 - DNA, 75 bp, synthetic construct
  source 1..75: mol_type = other DNA
gcccgttcttatcggctggcgattgttcacggcaatgggccgcaggtggggctgctggcattgcagaatctggcg

SEQ ID NO: 121113 - DNA, 75 bp, synthetic construct
  source 1..75: mol_type = other DNA
aggagccagcggcatttcatgttgagttactggcggcgcactaccgccatgatgcaggtttacttggggctgcgt

SEQ ID NO: 121114 - DNA, 75 bp, synthetic construct
  source 1..75: mol_type = other DNA
gcgattgcttccggtcgtggcattgcggctgcggcgcagggtgagctggcgggggcgaatgcgaaaaccattttt

SEQ ID NO: 121115 - DNA, 75 bp, synthetic construct
  source 1..75: mol_type = other DNA
aggcagataacgaccggattcagatccggtctttctggatatccgaaagaaaagcaccctatgtttatagtttct

SEQ ID NO: 121116 - DNA, 75 bp, synthetic construct
  source 1..75: mol_type = other DNA
agatactggaatgggcagatcgtagtcaggcatggattattgaagatgattatgacagtgagtttcgctatcacg

SEQ ID NO: 121117 - DNA, 75 bp, synthetic construct
  source 1..75: mol_type = other DNA
atgccgataatatgcgagccgtcagtgtgcttaacctgggtactattgatgaaccaggtcacgcagataacaccg

SEQ ID NO: 121118 - DNA, 75 bp, synthetic construct
  source 1..75: mol_type = other DNA
gaccaaagtttatatgtttgaagatttaagacatgtaatttctctacctgttgtatatttcaaactggaacaata

SEQ ID NO: 121119 - DNA, 75 bp, synthetic construct
  source 1..75: mol_type = other DNA
gtgactaattttcagctaagtatgctctgcctggcgattacgctggttatctattttcttaacaaacgcctttat

SEQ ID NO: 121120 - DNA, 75 bp, synthetic construct
  source 1..75: mol_type = other DNA
aaagggaacgtcaagtttgtggccggcgttctgctggttttcaacgaccgggttatcgatgccactctggcaagc

SEQ ID NO: 121121 - DNA, 75 bp, synthetic construct
  source 1..75: mol_type = other DNA
aaagattcgagtccagctacaaagttaatgaaacaacaggttgctgggagtctacctattcaaaaaacaaaggag

SEQ ID NO: 121122 - DNA, 75 bp, synthetic construct
  source 1..75: mol_type = other DNA
gcgcaaaccaacgcgcgacgagcgccacgctatccgtgactttttaatcagcattgagcgttgggggacagaaga

SEQ ID NO: 121123 - DNA, 75 bp, synthetic construct
  source 1..75: mol_type = other DNA
ttcagcgtaagggactggctgctgctccggaggagacccgcaactatattccgcgggtgctggcgaacctgcctt

SEQ ID NO: 121124 - DNA, 75 bp, synthetic construct
  source 1..75: mol_type = other DNA
ttattacgctgatcgggctgaaagtggcgtcatgggtgcgggggctgacaaaagccctcagtggccccggaggcc

SEQ ID NO: 121125 - DNA, 75 bp, synthetic construct
  source 1..75: mol_type = other DNA
gaaactgatcccgcccgatccggggatgacgctggcgaaagcgtttgaagccgagccgcagctgccggaaatcta

SEQ ID NO: 121126 - DNA, 75 bp, synthetic construct
  source 1..75: mol_type = other DNA
agttactttatagaggtggcgattgtcgataaatcgggggcgccaaggatccggctggctaatgaggggcagcaa

SEQ ID NO: 121127 - DNA, 75 bp, synthetic construct
  source 1..75: mol_type = other DNA
gcgccgctttattgcgatgaagagggcaaacatccggtcacccagtttgataaaagcgacgttgaatacgccgga

SEQ ID NO: 121128 - DNA, 75 bp, synthetic construct
  source 1..75: mol_type = other DNA
gaccttcggtaagaactccagtatcgttaaatggattgttctggctgaggtgctggtcggtgcggtcatgtacat

SEQ ID NO: 121129 - DNA, 75 bp, synthetic construct
  source 1..75: mol_type = other DNA
agaaaactttatttatatcagcaatattttttttaaatataaaacaacggaacgaaaaaaatcattcaataaata

SEQ ID NO: 121130 - DNA, 75 bp, synthetic construct
  source 1..75: mol_type = other DNA
ctcagtggcattctacctctttcatcttacttgccattcttccgttcttagctggtttgcttgcaggatggcagc

SEQ ID NO: 121131 - DNA, 75 bp, synthetic construct
  source 1..75: mol_type = other DNA
tggcgcgaaaagaaacccggcaacaatttgcggcaattccttctctgattaaaaaccgaaaagttcctctctgga

SEQ ID NO: 121132 - DNA, 75 bp, synthetic construct
  source 1..75: mol_type = other DNA
atttcaagaatttcaaaaatcaacattatatccctctcactttaaacaataaatcctcttggctcattggtgaaa

SEQ ID NO: 121133 - DNA, 75 bp, synthetic construct
  source 1..75: mol_type = other DNA
gtacaagcagaacggtttcagtgtatctcgatgaagatacaaataaccgacttattcgggcgaaagaccgtagtg

SEQ ID NO: 121134 - DNA, 75 bp, synthetic construct
  source 1..75: mol_type = other DNA
gatggtgactattcaaacatgaaaatggacatgggcctgatgccttcccgtgatggtaacaattacggctttgag

SEQ ID NO: 121135 - DNA, 75 bp, synthetic construct
  source 1..75: mol_type = other DNA
tcaactggctggatgagtttgacgatccgcaacttgcccggcagttgtacaccgaagcttttccgttggtggata

SEQ ID NO: 121136 - DNA, 75 bp, synthetic construct
  source 1..75: mol_type = other DNA
gacctgatggcaagcggtaacaccacggttaaggcgaccttcggtaaggactccagtgttgttaaatgggttgtt

SEQ ID NO: 121137 - DNA, 75 bp, synthetic construct
  source 1..75: mol_type = other DNA
gcatgaacaagccattaaaattgctttgcgcatgctggaacagggcattgatcgtgacctggtgctcgcagccac

SEQ ID NO: 121138 - DNA, 75 bp, synthetic construct
  source 1..75: mol_type = other DNA
gaaggcgacggaaacgtgcaaacgcgacttggggtgaaaacctacctgaacagccatcaccagcgtgacgatggt

SEQ ID NO: 121139 - DNA, 75 bp, synthetic construct
  source 1..75: mol_type = other DNA
cttacttaaataggactctgggcagtgagatatatggggaaataattcttcagcagataatagtttttcatcttc

SEQ ID NO: 121140 - DNA, 75 bp, synthetic construct
  source 1..75: mol_type = other DNA
tacatgatgaccaaaaacgttaagttcctcgccggttttgccattatctccgtgtttattaccgtgggtatggca

SEQ ID NO: 121141 - DNA, 75 bp, synthetic construct
  source 1..75: mol_type = other DNA
gttaaagaaccgtctggcgctggatatctgcacgctgatttttaatctgcaaacctccggtattgcgctgaaatt

SEQ ID NO: 121142 - DNA, 75 bp, synthetic construct
  source 1..75: mol_type = other DNA
taaggcgaccttcggtaaggactccagtgttgttaaatgggttgttctggctgaagtcctggtcggtgcggtcat

SEQ ID NO: 121143 - DNA, 75 bp, synthetic construct
  source 1..75: mol_type = other DNA
aaaactgatatcaatagacttgatatcaacaatgaagcgcgcagtcaaggtttcgatactcgagaaccattcatt

SEQ ID NO: 121144 - DNA, 75 bp, synthetic construct
  source 1..75: mol_type = other DNA
gtcgttacacattcacggatgcgttaacgtcggaaacattcgaggtatttattggctacaaagttctccgagaac

SEQ ID NO: 121145 - DNA, 75 bp, synthetic construct
  source 1..75: mol_type = other DNA
gcacatttgtcagtgagcggatatatccgcaacaatctactgtacaagttgtagcttttgccggtgaaagtcagc

SEQ ID NO: 121146 - DNA, 75 bp, synthetic construct
  source 1..75: mol_type = other DNA
taagcaatatgccattccctcaacccttggctggcgtaacggcgataacgcctggtatgacttcatcatggatat

SEQ ID NO: 121147 - DNA, 75 bp, synthetic construct
  source 1..75: mol_type = other DNA
cttccctcagatggctctggctgctggcggtcaggacctcatgcagtccgggaatgataccgtcaaagccacctt

SEQ ID NO: 121148 - DNA, 75 bp, synthetic construct
  source 1..75: mol_type = other DNA
tggaagatgagcaagggatagccgacacgctagtctacatgttgcagcaggaaggttttgccgtcgaggtctttg

SEQ ID NO: 121149 - DNA, 75 bp, synthetic construct
  source 1..75: mol_type = other DNA
gcttctgttggtcaaggcacggacctgatggctaaaggtaacgatacggttaaggcgaccttcggtaaggactcc

SEQ ID NO: 121150 - DNA, 75 bp, synthetic construct
  source 1..75: mol_type = other DNA
acactgcagaacgtcagccggaacgcgacatcactccggttatgtcaacgccaagattattggccgtttttcgcc

SEQ ID NO: 121151 - DNA, 75 bp, synthetic construct
  source 1..75: mol_type = other DNA
gcgattgggcaatctgaattatttagcgccctgattgtggaagacaaagacaaactgtttttgtcggagctggcg

SEQ ID NO: 121152 - DNA, 75 bp, synthetic construct
  source 1..75: mol_type = other DNA
aacaaaaataaagaatcgcataatcaaatgcgtattatgcccaataatactatgggattttataacacaaaaact

SEQ ID NO: 121153 - DNA, 75 bp, synthetic construct
  source 1..75: mol_type = other DNA
gttctcagggctgtggtcgccgttgcaaacgcgctgattgcaattctggaactgattcgccagttcatcgactga

SEQ ID NO: 121154 - DNA, 75 bp, synthetic construct
  source 1..75: mol_type = other DNA
atcgaaatcaaacaaacaggtgataagtcttttaatattacactggttggcagagataaaccttcacgaaaagaa

SEQ ID NO: 121155 - DNA, 75 bp, synthetic construct
  source 1..75: mol_type = other DNA
agcgcgcgtcattttgctggcgggagaggaacagcaaatataagtatacccgttgtatctgtccagactttgaaa

SEQ ID NO: 121156 - DNA, 75 bp, synthetic construct
  source 1..75: mol_type = other DNA
aaacgggaatagctggtggagattttgaggatgtattcgaagtgggcgatgacgcgacacctgatgaagtttatg

SEQ ID NO: 121157 - DNA, 75 bp, synthetic construct
  source 1..75: mol_type = other DNA
aagatattgcgaaaaggctgaatccgatgatatcggggtggctgaattattacgcgaaatactacaagtcagcga

SEQ ID NO: 121158 - DNA, 75 bp, synthetic construct
  source 1..75: mol_type = other DNA
atgcgccgggcagagatatcggccccggcgatgttcggcagactgccggaccagcgggactatgtgcgctggcga

SEQ ID NO: 121159 - DNA, 75 bp, synthetic construct
  source 1..75: mol_type = other DNA
caaaagatagtatgtcaataagtaaattacatgacctcagatgggaatttgtgatctgtaaatcatgtgggagaa

SEQ ID NO: 121160 - DNA, 75 bp, synthetic construct
  source 1..75: mol_type = other DNA
cgttatattactaccggtagtgtcgacgaacaaaacaccatcagcgataaaaccgtttttaaatttttcggtgcc

SEQ ID NO: 121161 - DNA, 75 bp, synthetic construct
  source 1..75: mol_type = other DNA
tgctgccgtttggtctgcatcacattctggtggcattaattcgctttaccgacgcaggcggtacgcaggaagttt

SEQ ID NO: 121162 - DNA, 75 bp, synthetic construct
  source 1..75: mol_type = other DNA
ttagggcttttatcgcgtttgattgttgacaagtggtcacctattgaattagcctttctattgttaggtgaccac

SEQ ID NO: 121163 - DNA, 75 bp, synthetic construct
  source 1..75: mol_type = other DNA
aggggcgttttctggtgctgccggaaggcgtgaaagcggacacgaactggacgttcgacaacggcaggaagaacg

SEQ ID NO: 121164 - DNA, 75 bp, synthetic construct
  source 1..75: mol_type = other DNA
agaagaaactgtcctgcgtcaaagtgaacccgaaagcgggagcttacggggaggaagggaactggatggtactgg

SEQ ID NO: 121165 - DNA, 75 bp, synthetic construct
  source 1..75: mol_type = other DNA
atggcaagccctataaacagcggaataatgatggcaaatctctgcccttccacctttttggataaaaatataaat

SEQ ID NO: 121166 - DNA, 75 bp, synthetic construct
  source 1..75: mol_type = other DNA
tgtggcaggcgtggctgaaccagcagacgtggcttgggcaggggcggcatattgtactgccggacggaacggatg

SEQ ID NO: 121167 - DNA, 75 bp, synthetic construct
  source 1..75: mol_type = other DNA
cggatgaccatcatcgtcccgaaggcggagatctcattgcgcttgcgccgggggagtcaacaaccttagagatgt

SEQ ID NO: 121168 - DNA, 75 bp, synthetic construct
  source 1..75: mol_type = other DNA
tgattttgcgaaagcactacatcaaaaaccaattcttgagcgcataaaacaggaccttgccgacgccccgatgac

SEQ ID NO: 121169 - DNA, 75 bp, synthetic construct
  source 1..75: mol_type = other DNA
ttaatattactctggttggtagagataaacgtttacgaaaagaaactccatattcaggagtggctgtagcgacta

SEQ ID NO: 121170 - DNA, 75 bp, synthetic construct
  source 1..75: mol_type = other DNA
tttccgttgtcgccgcaaacgcggattcaggcacaggcgagcggttattggctggagcgggagcagtggctggcg

SEQ ID NO: 121171 - DNA, 75 bp, synthetic construct
  source 1..75: mol_type = other DNA
gtggcaccggcacgcagattaacggtgatgacgccacggcaaacaacaacggcaaaaccaccgttgacggcaagg

SEQ ID NO: 121172 - DNA, 75 bp, synthetic construct
  source 1..75: mol_type = other DNA
aaaattcgcgaaactacctttacctacagccaaaatgccgatgggagctacaccttaacggcgcctgagggcaag

SEQ ID NO: 121173 - DNA, 75 bp, synthetic construct
  source 1..75: mol_type = other DNA
gcattatcagtcgtaatggtgtgctgtccatggggatgctggcagaaccgaaagaaatcagggtggacctggggg

SEQ ID NO: 121174 - DNA, 75 bp, synthetic construct
  source 1..75: mol_type = other DNA
ttatcaacggggatgtcaccagtgcgggtgctgttaaaaatggaacgatcaggatactcgaaaatggtgcgctgg

SEQ ID NO: 121175 - DNA, 75 bp, synthetic construct
  source 1..75: mol_type = other DNA
aaaaagatctaagttatagtcaaaagacacctgaacaattggttgcacaggtatgctttaatgatgatgattgtg

SEQ ID NO: 121176 - DNA, 75 bp, synthetic construct
  source 1..75: mol_type = other DNA
tggcgaccggggccgcgctgggcgcagtggctgcgcggcttgcgacgtgtaccgcagcgcagccgggaactcacc

SEQ ID NO: 121177 - DNA, 75 bp, synthetic construct
  source 1..75: mol_type = other DNA
taaaggatatgcgtttgatttcttctgtctggaaccgatgagccatgcgccggatgaccatcatcgcccggaagg

SEQ ID NO: 121178 - DNA, 75 bp, synthetic construct
  source 1..75: mol_type = other DNA
gggttgctgcatggaggagcatccgtggtactggccgaaagtatcggttccgttgccggttatttatgtaccgaa

SEQ ID NO: 121179 - DNA, 75 bp, synthetic construct
  source 1..75: mol_type = other DNA
gcgagttactctcaaagagtttggatggtgccatttcatcaatatcgggtttaaaaaactcaggaaatacctttt

SEQ ID NO: 121180 - DNA, 75 bp, synthetic construct
  source 1..75: mol_type = other DNA
ttaatagtattgttatgaagaatacggattataaacacgtaattcctgcagatatagagaataatatatatgatt

SEQ ID NO: 121181 - DNA, 75 bp, synthetic construct
  source 1..75: mol_type = other DNA
cggtattccggcaaattcctgtttagatgccccgggcgcacataaagcgggctatgctatccgccgttcggagaa

SEQ ID NO: 121182 - DNA, 75 bp, synthetic construct
  source 1..75: mol_type = other DNA
caagccaatgaagtttcaaagcaggagctgcacgcaggtgggcgtaagctgattgaaaaaattgaagattatcag

SEQ ID NO: 121183 - DNA, 75 bp, synthetic construct
  source 1..75: mol_type = other DNA
ggacaacgtagccgattcaaagccgccgggcgtaccgctgaagtggaagcaatcggcaaggctctggagatgacc

SEQ ID NO: 121184 - DNA, 75 bp, synthetic construct
  source 1..75: mol_type = other DNA
ctcaggatccgattgggctgaaggggggatggaacctgtatacatatccgctgagcccggtgaatagcatggatc

SEQ ID NO: 121185 - DNA, 75 bp, synthetic construct
  source 1..75: mol_type = other DNA
caaccctggtctttcatccgccggaacgggttttccctttgctcatccggcaaaccgcttctggaaggtgatata

SEQ ID NO: 121186 - DNA, 75 bp, synthetic construct
  source 1..75: mol_type = other DNA
cttaatcaacataacctgcaggttgttatcgggccacaagttcagtcagtaaaagatgaaatggccggtctgatg

SEQ ID NO: 121187 - DNA, 75 bp, synthetic construct
  source 1..75: mol_type = other DNA
cctaaaaagaaaatcgtcaaaattagagattccggtttaacacggaaagtcatatcagcgctaacgggtgaccct

SEQ ID NO: 121188 - DNA, 75 bp, synthetic construct
  source 1..75: mol_type = other DNA
cctaaaaagaaaatcgtcaaaattagagattccggtttgacacggaaagtcatatcagccgaaccgtctggtcag

SEQ ID NO: 121189 - DNA, 75 bp, synthetic construct
  source 1..75: mol_type = other DNA
ggtagaacagtgcctggaattctctccccgctatgccgtaatggacgatgaagcgagtgcgaaacttcttaaaac

SEQ ID NO: 121190 - DNA, 75 bp, synthetic construct
  source 1..75: mol_type = other DNA
aaggtgtattcaaagggcgacaaaaagatgacgagatccgcaggaaggtcgctgagtatttggctaaggggacat

SEQ ID NO: 121191 - DNA, 75 bp, synthetic construct
  source 1..75: mol_type = other DNA
gattatgtttatttaaaaaatgccggtagccgaccgctggcttttctctccggctgggccagcttctgggccaac

SEQ ID NO: 121192 - DNA, 75 bp, synthetic construct
  source 1..75: mol_type = other DNA
gtcagataacggccatccggtgtcggttgtcagaacactggcggaatttaatccgcaattaatcagccacaccct

SEQ ID NO: 121193 - DNA, 75 bp, synthetic construct
  source 1..75: mol_type = other DNA
tgtatcactgtgctcgcccggaaaaccgtcataaaattaaaggtctactgatttctggcctgatcgcctgtgttg

SEQ ID NO: 121194 - DNA, 75 bp, synthetic construct
  source 1..75: mol_type = other DNA
taaccggcctcggcttcactgtcatgtccgttctcggtgtcaccatcggtaataccgacggtaatatcatcgact

SEQ ID NO: 121195 - DNA, 75 bp, synthetic construct
  source 1..75: mol_type = other DNA
gccggatattcccctgtatttaatagtgccgataccattgttcctgatgtaacggcacattacgatcagcagggt

SEQ ID NO: 121196 - DNA, 75 bp, synthetic construct
  source 1..75: mol_type = other DNA
atcaggcacaaacgaatcaccttgaaattgttctgcatctcagggcggatctgttctggtttcgcggtcattttg

SEQ ID NO: 121197 - DNA, 75 bp, synthetic construct
  source 1..75: mol_type = other DNA
attcaagaggaaagtcgaggtatgttttccttcaagagaggacagaaatacacactcagcgatcatatttttatt

SEQ ID NO: 121198 - DNA, 75 bp, synthetic construct
  source 1..75: mol_type = other DNA
agctcgacgaagattctgtcgcagaaaaacttgtaatgcttgaagaaaaaacaagcggtttaattaaatggtcag

SEQ ID NO: 121199 - DNA, 75 bp, synthetic construct
  source 1..75: mol_type = other DNA
atgaaaactgaactgaccctaaatgtcctgcagaccatgaacgcacaggaatatgaagatatccgggctgccgga

SEQ ID NO: 121200 - DNA, 75 bp, synthetic construct
  source 1..75: mol_type = other DNA
tggttgacatgagtgcattcctggacttcactcacatacctctggtgcttctcaaccagtgcgaccccggctcgc

SEQ ID NO: 121201 - DNA, 75 bp, synthetic construct
  source 1..75: mol_type = other DNA
gatcaattgattgccgtttctcagcacaccttacgcgtggtagcgctggcaccggaaaaagagggggcattgcag

SEQ ID NO: 121202 - DNA, 75 bp, synthetic construct
  source 1..75: mol_type = other DNA
caatgcgccggagttcctcacgccacggcgctgatagtaattattcttttgattctatgccgcgtttatccaact

SEQ ID NO: 121203 - DNA, 75 bp, synthetic construct
  source 1..75: mol_type = other DNA
cagcagataaccgacaattacacgcatcttcgtcagcaggaagataccctggcgaaaatgaccgcccggacgtgg

SEQ ID NO: 121204 - DNA, 75 bp, synthetic construct
  source 1..75: mol_type = other DNA
atgtcggagaaaaaagagttcaccaaagaaaccatgctgcgcgccgcggacgagatctattttgtgccggaaggt

SEQ ID NO: 121205 - DNA, 75 bp, synthetic construct
  source 1..75: mol_type = other DNA
ctgaaagccgcattctgcgagcacgagcagtctgtcagagcggaactgagcgcaagcgcgaggagaatcagcgac

SEQ ID NO: 121206 - DNA, 75 bp, synthetic construct
  source 1..75: mol_type = other DNA
actgacgtcaccgctaatctgcgaatataaaaccattcatgaatataatgtatcccgtttttctgtcttttttaa

SEQ ID NO: 121207 - DNA, 75 bp, synthetic construct
  source 1..75: mol_type = other DNA
tggtgttgaactcgtttgatgtccgaattggtaaagaagatattttgtttaaaaaggaagtgctgttctcattga

SEQ ID NO: 121208 - DNA, 75 bp, synthetic construct
  source 1..75: mol_type = other DNA
ggaatatgaagaaatccgtgctgcgggaagcgatatgcgccgtaatctcactcacgaggtgatgcgtaaagtgga

SEQ ID NO: 121209 - DNA, 75 bp, synthetic construct
  source 1..75: mol_type = other DNA
tgataaacagcgcgggtgatttcggaccgatgctgtttggtaccggtgaacgtctgctgttgccgtttggtctgc

SEQ ID NO: 121210 - DNA, 75 bp, synthetic construct
  source 1..75: mol_type = other DNA
tagtagccatgatgtcatcaccctcatcccggcattgggtaaccccgtgttgcaggctatatttacctggatgag

SEQ ID NO: 121211 - DNA, 75 bp, synthetic construct
  source 1..75: mol_type = other DNA
ctatatatactttaagtgacgatgacaatcaccaccataataactccccagttccggatgatggcggtgatacgc

SEQ ID NO: 121212 - DNA, 75 bp, synthetic construct
  source 1..75: mol_type = other DNA
atgaaaataaaatgtggttaccacctttgcaataaagacgttgaagaaagcaaaaccattaaaagaccacttcat

SEQ ID NO: 121213 - DNA, 75 bp, synthetic construct
  source 1..75: mol_type = other DNA
ggccgtggtcgatatcaatggccacgggattagcacctccggtagctatcgcaactattacgagctggacggcaa

SEQ ID NO: 121214 - DNA, 75 bp, synthetic construct
  source 1..75: mol_type = other DNA
cttcatttcatgcgtggagttatcccaacgacggaaatgaaaaaatattgtaatgaaatctgtgccgaaaaagac

SEQ ID NO: 121215 - DNA, 75 bp, synthetic construct
  source 1..75: mol_type = other DNA
atatcattagcgctacacattccactaaatatcattatccttctttctgaaagtgaagaggcaaatgatgagttt

SEQ ID NO: 121216 - DNA, 75 bp, synthetic construct
  source 1..75: mol_type = other DNA
gcaagggctgaatgccggcttcatcacccgtaacggggtgctgtcgatgagcctgctgagtgaaccgaaagaagt

SEQ ID NO: 121217 - DNA, 75 bp, synthetic construct
  source 1..75: mol_type = other DNA
catcagaaaccggtccgctctttaccaaagaatcgtctgacactgtgggtattgtcagcattccgggtgttgaag

SEQ ID NO: 121218 - DNA, 75 bp, synthetic construct
  source 1..75: mol_type = other DNA
gcgtggtgcgtctgcatctgccagttacgcctttgatgccattcagaccaacctaggtgtgtctcgttcgtacaa

SEQ ID NO: 121219 - DNA, 75 bp, synthetic construct
  source 1..75: mol_type = other DNA
gagggttgcgcggaacagcagtattcctgtgcctgtatcagaagttagcgccactgtgacacaaaaagaaatcca

SEQ ID NO: 121220 - DNA, 75 bp, synthetic construct
  source 1..75: mol_type = other DNA
atctggtatccgtgacggtgattgccccgacggcgctggaagccgacgcctgggatactggcttaatggtgctcg

SEQ ID NO: 121221 - DNA, 75 bp, synthetic construct
  source 1..75: mol_type = other DNA
ttgattcaacgtcagtgtatctgagtggctcttattcaaaatatgcgcgctatgataaagctgactattcagctt

SEQ ID NO: 121222 - DNA, 75 bp, synthetic construct
  source 1..75: mol_type = other DNA
taaaagcttccttatcagcgaaaaaattaaagcgcaagattgttggtttttgcgtgatggtgaccgggcagacta

SEQ ID NO: 121223 - DNA, 75 bp, synthetic construct
  source 1..75: mol_type = other DNA
atggtgatggataagaaaataaaatgtgcttatcacctttgcaataaagatgttgaagaaagcaaagcgattgaa

SEQ ID NO: 121224 - DNA, 75 bp, synthetic construct
  source 1..75: mol_type = other DNA
taatcatatagcaaacatcataaaacaagaacagctttctaatgtcattttcattaacagatttcttaaagaaga

SEQ ID NO: 121225 - DNA, 75 bp, synthetic construct
  source 1..75: mol_type = other DNA
tctccccgagagcgtgtcagagtcaatccaaagaatgtgtctgatattttgtctcgttataagggtgatgatttc

SEQ ID NO: 121226 - DNA, 75 bp, synthetic construct
  source 1..75: mol_type = other DNA
atgctatatgccaatacaataacttccttggaaacatatttatgtgacagatttatttccctaattcatggtagc

SEQ ID NO: 121227 - DNA, 75 bp, synthetic construct
  source 1..75: mol_type = other DNA
tgctggcgggcgcgggttccggtaaaactcgtgttatcaccaataaaatcgcccatctgatccgcggttgcggtt

SEQ ID NO: 121228 - DNA, 75 bp, synthetic construct
  source 1..75: mol_type = other DNA
ggatgtcgattctgaaagcgggctttgtggcttccgttccggcggtttgtggttttatcggtggtgtgctgggtg

SEQ ID NO: 121229 - DNA, 75 bp, synthetic construct
  source 1..75: mol_type = other DNA
ggatgtcgattctgaaagcgggctttgtggcttccgttccggcggtttgcggttttatcggcggtgtgttggggg

SEQ ID NO: 121230 - DNA, 75 bp, synthetic construct
  source 1..75: mol_type = other DNA
ggccttgatcccgtgggaatgggttatgtgttctctgctttctcatgggcttatgtaatagggcagatcccaggt

SEQ ID NO: 121231 - DNA, 75 bp, synthetic construct
  source 1..75: mol_type = other DNA
ccggtttatctggtgcaggcgcgcgggatgtcgattctgaaagcggggtttgttgcgtctgttccggcggtttgc

SEQ ID NO: 121232 - DNA, 75 bp, synthetic construct
  source 1..75: mol_type = other DNA
ctcaggcttatctattgagcaaaacggacccttctcgttgggattatggtgttaatggggggcgtctgaaatatt

SEQ ID NO: 121233 - DNA, 75 bp, synthetic construct
  source 1..75: mol_type = other DNA
caatacaggacagccttcgcagggaagatataaaggtggtggttgaagacggcccggatatgaagatccggctgg

SEQ ID NO: 121234 - DNA, 75 bp, synthetic construct
  source 1..75: mol_type = other DNA
ttaccgttcttgaaggcaaaacgatgggaaccttctggcgtgccagcattccgggcattgacgccaaacgtagtg

SEQ ID NO: 121235 - DNA, 75 bp, synthetic construct
  source 1..75: mol_type = other DNA
ttacgaccaggggaggtccagtatgacttttctgtagggcgtcggtcgtcgggcagtgatatcggacaccctttc

SEQ ID NO: 121236 - DNA, 75 bp, synthetic construct
  source 1..75: mol_type = other DNA
ctacctgcggacataatggtcaagtgcatggctgaaacgggcgtaaatcttgaatggttggcgacaggacaggga

SEQ ID NO: 121237 - DNA, 75 bp, synthetic construct
  source 1..75: mol_type = other DNA
tgggccgtaagcatgggcgctctgattgctgggccgggcgggtactgcaaaaagcagaaggtgttattgagggga

SEQ ID NO: 121238 - DNA, 75 bp, synthetic construct
  source 1..75: mol_type = other DNA
gtatggttatctgaatacacagaaaatagcattaatattaatatggagaacgttccagataacttggatttcaat

SEQ ID NO: 121239 - DNA, 75 bp, synthetic construct
  source 1..75: mol_type = other DNA
agaggtaaaagtggtggttgaagacggcccggatatgaagctcaggctggccgaaatcaccgctgccgtgaatcc

SEQ ID NO: 121240 - DNA, 75 bp, synthetic construct
  source 1..75: mol_type = other DNA
gcgaccaggcaaacctgcgccgcgagcatgtgctggcggttcgctattgcttgtgtacggcgctggatgaagccg

SEQ ID NO: 121241 - DNA, 75 bp, synthetic construct
  source 1..75: mol_type = other DNA
tcagcaagctgttcaacctggtccagccagacatcgcctgcttcggtgaaaaagattttcagcaactggcgctga

SEQ ID NO: 121242 - DNA, 75 bp, synthetic construct
  source 1..75: mol_type = other DNA
tccatcagtaaaagagatctacccgaacggtacagaaacccacacctatgttgacgttccggggctgtccaccat

SEQ ID NO: 121243 - DNA, 75 bp, synthetic construct
  source 1..75: mol_type = other DNA
gcaacggtggacaacaaaggcggcatgaccgtcaccgatcctgactccatcggtattcagatagacggcgacaag

SEQ ID NO: 121244 - DNA, 75 bp, synthetic construct
  source 1..75: mol_type = other DNA
gcgcccggtctgtacaaggttttaagttcgattgccgacaaattgcaggctggcgaacgggatctcgatgaaatt

SEQ ID NO: 121245 - DNA, 75 bp, synthetic construct
  source 1..75: mol_type = other DNA
aacttggcagtgggtaagaagaataacagcaacgagttggacaaggcgtttcattcagacagtggtctgttctgg

SEQ ID NO: 121246 - DNA, 75 bp, synthetic construct
  source 1..75: mol_type = other DNA
atgaaaaaggcttccgcgccgatgatattcagattcgcgatgccgacacgttgctggaagtcactgaaaaaagca

SEQ ID NO: 121247 - DNA, 75 bp, synthetic construct
  source 1..75: mol_type = other DNA
tgatgatggcgatgtattaagctctgcgggtgagaccgtattattatcgtcaggtgcgattatcaacggggatgt

SEQ ID NO: 121248 - DNA, 75 bp, synthetic construct
  source 1..75: mol_type = other DNA
attccgttcagcataggagacaagcgtcagtacgtaaactcgtcagcagcctacagcagtgtgtcaggaacatct

SEQ ID NO: 121249 - DNA, 75 bp, synthetic construct
  source 1..75: mol_type = other DNA
accagcatggttgaaaagtgccggtgtgccattgcgactggacggttacgcggcagaatttgacgagaggcaggg

SEQ ID NO: 121250 - DNA, 75 bp, synthetic construct
  source 1..75: mol_type = other DNA
gtaaacaacaacggcaaaaccaccgttgacggcaaggattccaccggtacggaaatcaacggtaataacgggaaa

SEQ ID NO: 121251 - DNA, 75 bp, synthetic construct
  source 1..75: mol_type = other DNA
tatcaccggcgacagcgcgacggtggataacaagggcaccatgaccgtcaccgatccggagtccatcggtatcca

SEQ ID NO: 121252 - DNA, 75 bp, synthetic construct
  source 1..75: mol_type = other DNA
tgccggatttatttcaaacaatggtgttctgctgatgaacatgctggctgagccgacatctgtcagcgtggatac

SEQ ID NO: 121253 - DNA, 75 bp, synthetic construct
  source 1..75: mol_type = other DNA
tcaccgatccggattccatcggtattcagatcgacggcgacaaggcggttgtcaacaacgacggtgacaacacga

SEQ ID NO: 121254 - DNA, 75 bp, synthetic construct
  source 1..75: mol_type = other DNA
tatttctattatatgtttggatcaataaacatgcatttcataatgaatatcttaataactcaggagtgatagcag

SEQ ID NO: 121255 - DNA, 75 bp, synthetic construct
  source 1..75: mol_type = other DNA
tacccgtggaggccagcctttctctgtcgtttgctcgatggccagatataacccggaacggattaaccatgcgct

SEQ ID NO: 121256 - DNA, 75 bp, synthetic construct
  source 1..75: mol_type = other DNA
aagaaaatattttatcaagaaaagatttttatacacatgtatcttcatttggtgatatccgaattcgtaatcagg

SEQ ID NO: 121257 - DNA, 75 bp, synthetic construct
  source 1..75: mol_type = other DNA
ccggctttattgcccgtaacggggtgttatcaatgagtctgctgagtgaaccgaaagaagtgaaggtcagcctgg

SEQ ID NO: 121258 - DNA, 75 bp, synthetic construct
  source 1..75: mol_type = other DNA
aattcaaagccgcattggccgcgaaacaggtgcagattggctgctggtcagcgctctctaatcctattagcacag

SEQ ID NO: 121259 - DNA, 75 bp, synthetic construct
  source 1..75: mol_type = other DNA
ccagaatattactatgtgatcgcgcttgctggtcagtccaatggtatgtcatacggtgaggggctgccattaccg

SEQ ID NO: 121260 - DNA, 75 bp, synthetic construct
  source 1..75: mol_type = other DNA
cagtctgacagcgcgcctcgatgctgatggctacagtcagaccagcattatcagtgtcctggcgatggagggcgc

SEQ ID NO: 121261 - DNA, 75 bp, synthetic construct
  source 1..75: mol_type = other DNA
gacacgtgctggccagccgttctctgttgttcgcagcatggaagaatttaacccggcgttgatctcccacacgct

SEQ ID NO: 121262 - DNA, 75 bp, synthetic construct
  source 1..75: mol_type = other DNA
gaatattactttgtcattgcgctggccgggcagtccaactcgatgtcttttggcgaggggctgccgctgccggat

SEQ ID NO: 121263 - DNA, 75 bp, synthetic construct
  source 1..75: mol_type = other DNA
gccgctgccgcgccagtgggtgaacaatggttttgccggctggaatggtcaggcacgcattgagcagccgcagga

SEQ ID NO: 121264 - DNA, 75 bp, synthetic construct
  source 1..75: mol_type = other DNA
ttgctggaagtcactgaaaacagtaaacgcgccgtgattctggtagccgcctggcttggcgacgctcgcctgatc

SEQ ID NO: 121265 - DNA, 75 bp, synthetic construct
  source 1..75: mol_type = other DNA
gcctgttgaagctgatgctcgtcgttatctggaatggggggcgacgtttgtggccgtcggtagcgatctcggcgt

SEQ ID NO: 121266 - DNA, 75 bp, synthetic construct
  source 1..75: mol_type = other DNA
gtgcttccggggaaaataagtgacttcattacaactctcaatcgtccatcgactgccgcagaactatcgctggtc

SEQ ID NO: 121267 - DNA, 75 bp, synthetic construct
  source 1..75: mol_type = other DNA
atcatcgcccggaagggggtgatctcattgcgctagcaccaggggaatcaacaacttcagagatgtcgttgcggg

SEQ ID NO: 121268 - DNA, 75 bp, synthetic construct
  source 1..75: mol_type = other DNA
ttgtaaatcgccatgatgagtttgcggcgacatgccgattgaaaaattttggtgtggcaattgccgagcccttct

SEQ ID NO: 121269 - DNA, 75 bp, synthetic construct
  source 1..75: mol_type = other DNA
gcgccaaacgatatctccacgttcattcctcagttgatggctctgaaggggagcgtcagcgcgccagtggtgcgt

SEQ ID NO: 121270 - DNA, 75 bp, synthetic construct
  source 1..75: mol_type = other DNA
tgggtaaaggcgaaattaccgaaatcaataccggacatgccgggcaattgctgcgcttattgagcgttgatgccc

SEQ ID NO: 121271 - DNA, 75 bp, synthetic construct
  source 1..75: mol_type = other DNA
tctaccatccatttaaagtgcgattttatgaatactattcacccagaggcattccggatggtgtttccgcagcat

SEQ ID NO: 121272 - DNA, 75 bp, synthetic construct
  source 1..75: mol_type = other DNA
catcgtcagaactgacacaagacgaagcagtgaaagctcttggattcctgaaacaaaaagccactgaacagaagg

SEQ ID NO: 121273 - DNA, 75 bp, synthetic construct
  source 1..75: mol_type = other DNA
tgatggcatggactttgagcaggacgatgaatcctgtacatgtcggatttaccgcaaagaccgtaatcatccgat

SEQ ID NO: 121274 - DNA, 75 bp, synthetic construct
  source 1..75: mol_type = other DNA
cacttaccttcaccgttagccaaacctgcgggtgaaccactaccggtaaacgttaaggttgatggcaatctcaac

SEQ ID NO: 121275 - DNA, 75 bp, synthetic construct
  source 1..75: mol_type = other DNA
gtggtcgcggtggattactttgataaagatctgtgcggcgatctgacgaatctggacggtatcgcacagaccgtg

SEQ ID NO: 121276 - DNA, 75 bp, synthetic construct
  source 1..75: mol_type = other DNA
ctggaacttatccagaaacatattcgcgaccgtgatttaatcagtctggtcgacaggatcactacgcttttggtt

SEQ ID NO: 121277 - DNA, 75 bp, synthetic construct
  source 1..75: mol_type = other DNA
ggcatcagtaccgatgatggttcacaagcctggcgctatttcccggaaaacctgatggggaaagagttagtcgat

SEQ ID NO: 121278 - DNA, 75 bp, synthetic construct
  source 1..75: mol_type = other DNA
caactttccggcggtgaatggcaacgcgtacgtcttgctgcggtggtgctgcaaatcacaccacaagccaatccc

SEQ ID NO: 121279 - DNA, 75 bp, synthetic construct
  source 1..75: mol_type = other DNA
taagcgttatattgccgcaaagtaaaagcggccagacatcttcaacgtgggacgcttttgcgtatacattagcga

SEQ ID NO: 121280 - DNA, 75 bp, synthetic construct
  source 1..75: mol_type = other DNA
atcgacaaaggcgatgtaaccggcggtgacgtctggctgaaacagggcggtgccagctggttgggcgagaagcaa

SEQ ID NO: 121281 - DNA, 75 bp, synthetic construct
  source 1..75: mol_type = other DNA
acgaattcatcacctttcccgactacggagcgcatcagcttccgtggctggccggacgcacaaatacgttgcgca

SEQ ID NO: 121282 - DNA, 75 bp, synthetic construct
  source 1..75: mol_type = other DNA
cagggctcaactggagcagttgttaaggctgaaccgccccgggtttcctggagagtattttatctgtgaactcag

SEQ ID NO: 121283 - DNA, 75 bp, synthetic construct
  source 1..75: mol_type = other DNA
ttgcttaccgcgtcgatgaagcaggcaaagatgccttacgaaacggtattccgtgcgccactggaaatcgccgac

SEQ ID NO: 121284 - DNA, 75 bp, synthetic construct
  source 1..75: mol_type = other DNA
ttgcgccgcgctgacgtggccgctatccgagtcttcctttggaattatcaataccgacgctgtgccataaccggg

SEQ ID NO: 121285 - DNA, 75 bp, synthetic construct
  source 1..75: mol_type = other DNA
accgcaaagatcgcaatcacccgatctgcgttaccgagtggatggatgaatgtcgccgcgcaccattcaaaaccc

SEQ ID NO: 121286 - DNA, 75 bp, synthetic construct
  source 1..75: mol_type = other DNA
ttgagcggtaaattcagctttatcaatggtgatctgcaaagcgaaccactgacagcgagctggtttaatcagcca

SEQ ID NO: 121287 - DNA, 75 bp, synthetic construct
  source 1..75: mol_type = other DNA
aagacctgctggaaaaagcagcaaccgaaccggcgcaccgtccggcctttttccgtactctactggaatccaccg

SEQ ID NO: 121288 - DNA, 75 bp, synthetic construct
  source 1..75: mol_type = other DNA
atcaccatagcgatagacggcgatggcctgggtaaagcaacggcggatctgatgtacgagtattatggtattacc

SEQ ID NO: 121289 - DNA, 75 bp, synthetic construct
  source 1..75: mol_type = other DNA
tctgacaccatgttttatgagcgctcccgtaaggggatttgggaagttctctgcaaaggttatcgactcggcaac

SEQ ID NO: 121290 - DNA, 75 bp, synthetic construct
  source 1..75: mol_type = other DNA
atggctggtggtcgtaagattaagtgcgtcaccagtgatccacgttggcgcgatatggttatcaggtatcgatac

SEQ ID NO: 121291 - DNA, 75 bp, synthetic construct
  source 1..75: mol_type = other DNA
cctgtactttgataaacgtgcttatgccaacgttcaagccgcagaggccgtaaaatctggtcgtatgagactgga

SEQ ID NO: 121292 - DNA, 75 bp, synthetic construct
  source 1..75: mol_type = other DNA
caccgctattatgacccgctgcaggggaggtatatcactcaggatccgattgggctgaaggggggatggaatttt

SEQ ID NO: 121293 - DNA, 75 bp, synthetic construct
  source 1..75: mol_type = other DNA
tttactagctatgaggtgataaatgatgctaataaacatggggtggtacctttaagattcatttatttagatacc

SEQ ID NO: 121294 - DNA, 75 bp, synthetic construct
  source 1..75: mol_type = other DNA
gccgaaagcggcggcggatgctctgattcatgcgtaccgccgccagtacacggggctgaatgttacatacccggc

SEQ ID NO: 121295 - DNA, 75 bp, synthetic construct
  source 1..75: mol_type = other DNA
gaagggaatccgctgagcagtcaggaagtactggaaggcggtgaatcgctgatattatcggaggtcgcagagccg

SEQ ID NO: 121296 - DNA, 75 bp, synthetic construct
  source 1..75: mol_type = other DNA
cgcgccggaatttctcgacgtgctcaagttgcgggccgcgcccgccgccaagggcactgttgcaaatagtcggtg

SEQ ID NO: 121297 - DNA, 75 bp, synthetic construct
  source 1..75: mol_type = other DNA
acacaacgaaggtcagtttgaagtgctggtgccgctgcgcaacgcgaagtttgccttccagccggactggcctgc

SEQ ID NO: 121298 - DNA, 75 bp, synthetic construct
  source 1..75: mol_type = other DNA
accgcttgatagcactctgaaaaatttgagcggcaaattcagctttatcaatggcgatctacaaagcgaatcact

SEQ ID NO: 121299 - DNA, 75 bp, synthetic construct
  source 1..75: mol_type = other DNA
aacaaccataattcacaggttatattcgatgaaaacttccatttataccccaatgaattaccagaatcatcacag

SEQ ID NO: 121300 - DNA, 75 bp, synthetic construct
  source 1..75: mol_type = other DNA
catttcatgatgttaatcttgatatgtgtgagataaagaattgcaattttgacaattcagaaatgaatttcattt

SEQ ID NO: 121301 - DNA, 75 bp, synthetic construct
  source 1..75: mol_type = other DNA
atcgaaaatatttcttttttaaacgcatatcacaaagaaaagaaaggaaaggaaacaacgacattgttacatttg

SEQ ID NO: 121302 - DNA, 75 bp, synthetic construct
  source 1..75: mol_type = other DNA
taacaatttcaaaataaaaaaaccttttgttttgattttaaaaataaatctttttgtaatgccaggttgcaatat

SEQ ID NO: 121303 - DNA, 75 bp, synthetic construct
  source 1..75: mol_type = other DNA
tttcgttcgtatcttaatgaacaacttacgttgctgtatcaggattatggtgcgcatatctctgtgcaaccctcg

SEQ ID NO: 121304 - DNA, 75 bp, synthetic construct
  source 1..75: mol_type = other DNA
gagtgcacagcctgagttcacgcttaaccttacgcttttcgacaggcgaccgctgcacccgcaaatcaaccagat

SEQ ID NO: 121305 - DNA, 75 bp, synthetic construct
  source 1..75: mol_type = other DNA
cgtgccaatccaggccgatagaattactattagtaagcttgcgaaatttacatttgtacgagtaataagaccggt

SEQ ID NO: 121306 - DNA, 75 bp, synthetic construct
  source 1..75: mol_type = other DNA
tggtaaagaaaactatcagcaaaccggaagatctgattggcaaacgcatcgccgtaccgtttatctccaccaccc

SEQ ID NO: 121307 - DNA, 75 bp, synthetic construct
  source 1..75: mol_type = other DNA
cactactctactgactacgtatttccggggactggtgaaataccatggcaggaggcggatgcaaccgcaccgcta

SEQ ID NO: 121308 - DNA, 75 bp, synthetic construct
  source 1..75: mol_type = other DNA
caggcaggtgcgccgcgatccccgtcaacttcaggccgccctcgccgggcgtctgccggggtggatggtgccgca

SEQ ID NO: 121309 - DNA, 75 bp, synthetic construct
  source 1..75: mol_type = other DNA
cacgttttgttacaacgtcacgaattttcgactctgacgttacttgacctctttacccacccttctcctgcagcc

SEQ ID NO: 121310 - DNA, 75 bp, synthetic construct
  source 1..75: mol_type = other DNA
gttggtgttcatttactgccagataatgaacaagacttggttcagcaacaatttgttcagtttgcatcaaatttg

SEQ ID NO: 121311 - DNA, 75 bp, synthetic construct
  source 1..75: mol_type = other DNA
gtttcccgcgatacggtggtgccggaaagtgggcagactgaaccagtctactgtgtggccacaacgtcaggctca

SEQ ID NO: 121312 - DNA, 75 bp, synthetic construct
  source 1..75: mol_type = other DNA
acaataaacaactataacgcacagattatattcgaagaggatttaaatttatatcccagtgaattatctcaatca

SEQ ID NO: 121313 - DNA, 75 bp, synthetic construct
  source 1..75: mol_type = other DNA
ttacgttgctgtatcaggattatggtgcgcatatctctgtgcaaccctcgcagcatgaaatcccttatccttatg

SEQ ID NO: 121314 - DNA, 75 bp, synthetic construct
  source 1..75: mol_type = other DNA
cgtaccgtccgcccggacgtggtggtgaatgccgccgcgcacacggcagtggacaaggccgaaagcgagcgggag

SEQ ID NO: 121315 - DNA, 75 bp, synthetic construct
  source 1..75: mol_type = other DNA
cagggcaggtgggttgggaacttcagcgcgcactcgctccattaggtaatttaattgcccttgatgtgcattcca

SEQ ID NO: 121316 - DNA, 75 bp, synthetic construct
  source 1..75: mol_type = other DNA
catcgtcagaactgacacagggcgaagcagtgaaagctcttggattcctgaaacaaaaagccactgaacagaagg

SEQ ID NO: 121317 - DNA, 75 bp, synthetic construct
  source 1..75: mol_type = other DNA
catcgtcagaactgacacacgccgaagcagtgaaagctcttggattcctgaaacaaaaagccactgaacagaagg

SEQ ID NO: 121318 - DNA, 75 bp, synthetic construct
  source 1..75: mol_type = other DNA
ggcaggctacatgcggtggcctctgacgttaacgatccggcaacgacgtgtacctgtgcgctgtacggctttcag

SEQ ID NO: 121319 - DNA, 75 bp, synthetic construct
  source 1..75: mol_type = other DNA
atggttacacggacagaccaactactaagaaaagcgatgcggggatatctggaatatctcggcaatacgccgttg

SEQ ID NO: 121320 - DNA, 75 bp, synthetic construct
  source 1..75: mol_type = other DNA
tggccgattatctggccggcgtcgccacggtggagaaaacaaaacgacctcgccctgttcgccgtcgtcagcggc

SEQ ID NO: 121321 - DNA, 75 bp, synthetic construct
  source 1..75: mol_type = other DNA
atccgaaggcgaactgcgctttaactgggattttgtcgccgcgctgtttcctgccgggcaggtggagcgccagtt

SEQ ID NO: 121322 - DNA, 75 bp, synthetic construct
  source 1..75: mol_type = other DNA
cgcagattctctggcatggtggcaggcgcaacttgatgatattcctccggctcctgcattgccgctgcgctgctt

SEQ ID NO: 121323 - DNA, 75 bp, synthetic construct
  source 1..75: mol_type = other DNA
cgtatattcaggaactggcgacaatttgccaacagcttgcacagcgcttacagcgccggtacgcttgcgcgcagc

SEQ ID NO: 121324 - DNA, 75 bp, synthetic construct
  source 1..75: mol_type = other DNA
ggaacacctcggcaatatgccgctggcggaacggattacaaacgctgctgcattcgaagatgtttatcgctttct

SEQ ID NO: 121325 - DNA, 75 bp, synthetic construct
  source 1..75: mol_type = other DNA
gattggcgtggcctgttcaatggcggcggcagggttaactgaactactgggcggcagtccggcgcaggtatgcaa

SEQ ID NO: 121326 - DNA, 75 bp, synthetic construct
  source 1..75: mol_type = other DNA
gtgaagaacgcgagaatgagcacccgcatttcagcggacatgacttaacgttatcgcaaattcttcgcggcgccc

SEQ ID NO: 121327 - DNA, 75 bp, synthetic construct
  source 1..75: mol_type = other DNA
tctgacaccatgttttatgaacgttcccgcaaagggatctgggaagttctctgcaaaggttatcgactcggtaac

SEQ ID NO: 121328 - DNA, 75 bp, synthetic construct
  source 1..75: mol_type = other DNA
gtggacgatgtgttatctgttgatgcgaacgcgcgtgaagtcgccagaaaagaggtgatgcgtctcgcaagctga

SEQ ID NO: 121329 - DNA, 75 bp, synthetic construct
  source 1..75: mol_type = other DNA
tgtgtatacacctgttgaggtggttgattttattattcacagtgtgaatgacgtgcttaaacaggaattcggaca

SEQ ID NO: 121330 - DNA, 75 bp, synthetic construct
  source 1..75: mol_type = other DNA
gcggaaggtccgttcccggaacactacgagccaatcgaaacgccgctgggcactaacccgctgcatccgaacgtg

SEQ ID NO: 121331 - DNA, 75 bp, synthetic construct
  source 1..75: mol_type = other DNA
tatgagtctgtaaaaatgcgtgctgacggcattactacggcagaaggtaagcagcagattattgtgcaattatac

SEQ ID NO: 121332 - DNA, 75 bp, synthetic construct
  source 1..75: mol_type = other DNA
actctgaaagtgcaggacccgaaaatcgaccgtgtgcgcacccgcgcctggaccaaagtgaagagcggaaaataa

SEQ ID NO: 121333 - DNA, 75 bp, synthetic construct
  source 1..75: mol_type = other DNA
cgcccggatgtggtggcgcatatttccgaccatgtgttctatgccaatgcgaacaaagaagctacgccgctggta

SEQ ID NO: 121334 - DNA, 75 bp, synthetic construct
  source 1..75: mol_type = other DNA
tcagccattcactggcactggcggcgtcactggatgcgcaggggtacagcgttaatgacatcatccatatcctga

SEQ ID NO: 121335 - DNA, 75 bp, synthetic construct
  source 1..75: mol_type = other DNA
aggttatatagctaacactctgacgccgaatgtcggtgatgcaaactcgcaaacgccggaatataaagcgttctt

SEQ ID NO: 121336 - DNA, 75 bp, synthetic construct
  source 1..75: mol_type = other DNA
atgggtcataccttcctactgtcggtggagtagagaattcaattcgcagtatagctgcagagcttgttaaagaag

SEQ ID NO: 121337 - DNA, 75 bp, synthetic construct
  source 1..75: mol_type = other DNA
agccagagcagtttgtggaaatcggggagtcgctggcgaataaacttggcattgcccagggcgataccgtgaaag

SEQ ID NO: 121338 - DNA, 75 bp, synthetic construct
  source 1..75: mol_type = other DNA
gtttaccgcaacctatccagcacaatctgggatacgctgaccttgagcaaaatggcgtggtgtccattttactta

SEQ ID NO: 121339 - DNA, 75 bp, synthetic construct
  source 1..75: mol_type = other DNA
gttgctcaacgcaattgctcagccggaacagtttgtggaaatcagcgaaacgctggcggcggcgaaaggcattaa

SEQ ID NO: 121340 - DNA, 75 bp, synthetic construct
  source 1..75: mol_type = other DNA
ggatctgcgcgaaccgcaatgtgtggaagatgtgttgtctgtcgatgccagtgcgcgtgatgtcgccagaaaaga

SEQ ID NO: 121341 - DNA, 75 bp, synthetic construct
  source 1..75: mol_type = other DNA
ccatcgacactggacgatttgtactgtctcgtatcaataatgaaaattatcagtttcatcatataagatttgaat

SEQ ID NO: 121342 - DNA, 75 bp, synthetic construct
  source 1..75: mol_type = other DNA
gcgtgccggaattcccgaccgacagcaaaaacggcagcttcctgttcccgggcggctacattgagaatgcggatc

SEQ ID NO: 121343 - DNA, 75 bp, synthetic construct
  source 1..75: mol_type = other DNA
cggaaaaaccatgccacgagcgctgattggttcctgtctgctggttctggtgctctacaccctgctggcgctggt

SEQ ID NO: 121344 - DNA, 75 bp, synthetic construct
  source 1..75: mol_type = other DNA
gattatgtttatctgaaaaatgccggaagccgaccgctggcgttcctctccggctgggccagcttctgggccaac

SEQ ID NO: 121345 - DNA, 75 bp, synthetic construct
  source 1..75: mol_type = other DNA
gccggataactggacgatgaacggcgagtatggcagcgagttcggcggctttttccccgtccaggtccgtttcac

SEQ ID NO: 121346 - DNA, 75 bp, synthetic construct
  source 1..75: mol_type = other DNA
atccgggctgccggaagtgatgaacgtcgtgagctgacacacgccgtgatgcgggagctggatgcgccggacaac

SEQ ID NO: 121347 - DNA, 75 bp, synthetic construct
  source 1..75: mol_type = other DNA
gtttgtcattggcgggttaattgtgatcccgcaaatgtgcgtctatgcggagctatcaaccgcttatccggaaaa

SEQ ID NO: 121348 - DNA, 75 bp, synthetic construct
  source 1..75: mol_type = other DNA
agcctcattctggtcgcctcaacctttgtctgggcaccgattcccggccttatctgcgccgtcatcgttattgct

SEQ ID NO: 121349 - DNA, 75 bp, synthetic construct
  source 1..75: mol_type = other DNA
cgctggcgattgtcagcaatcttggctttttaacgcctatcgatcctctgctcggtaaatttatcgccgccggat

SEQ ID NO: 121350 - DNA, 75 bp, synthetic construct
  source 1..75: mol_type = other DNA
gaagcaccgcgcggtatgctctctcactggatggtgatcaaagacggtatcatcagcaactaccaggcggtcgtc

SEQ ID NO: 121351 - DNA, 75 bp, synthetic construct
  source 1..75: mol_type = other DNA
ctttttaacgcctatcgatccgttgctcggtaaatttatcgccgccggattaattatcgcctttatgttgctaca

SEQ ID NO: 121352 - DNA, 75 bp, synthetic construct
  source 1..75: mol_type = other DNA
attatttatcatgttgttaaccgtcatattcggactcaatatctccgatatcacttagtgggtctactccctcca

SEQ ID NO: 121353 - DNA, 75 bp, synthetic construct
  source 1..75: mol_type = other DNA
cagtggcaggcgtggcacgacaccttaacgcgtttatataaccgtggcgcactgttcgaaaaagcccgtccgctc

SEQ ID NO: 121354 - DNA, 75 bp, synthetic construct
  source 1..75: mol_type = other DNA
ctttttaacgcctatcgatcctctgctcggtaaatttatcgctgccggattaattatcgcctttatgctgctgca

SEQ ID NO: 121355 - DNA, 75 bp, synthetic construct
  source 1..75: mol_type = other DNA
tctgggatacgctgaccttgcgcaaaatggggtggtgtccattttacttaccgggtctggtggccctttccgtga

SEQ ID NO: 121356 - DNA, 75 bp, synthetic construct
  source 1..75: mol_type = other DNA
tcaccgcgcggtacgctggttcacttcgcaaccggaacacgccagcaatactgaaccgcaggttaccgtcagcgt

SEQ ID NO: 121357 - DNA, 75 bp, synthetic construct
  source 1..75: mol_type = other DNA
atgaccacaccctcagatttgaacatttaccaactgattgacacccaaaatggtcgggtcactccgcgtatttat

SEQ ID NO: 121358 - DNA, 75 bp, synthetic construct
  source 1..75: mol_type = other DNA
aagtgtgggcgttctgtattactgacaaagccgcctctgatgaagttaaagccgcttttgaaaacagcgccaccc

SEQ ID NO: 121359 - DNA, 75 bp, synthetic construct
  source 1..75: mol_type = other DNA
atacggcgatcacgcttaacagtgaggaatcaccgctggtaacgccagcatttatcaaaatgaagctggcggagt

SEQ ID NO: 121360 - DNA, 75 bp, synthetic construct
  source 1..75: mol_type = other DNA
gctggtcttatggcattaacggcgagttgatcgatgtaccgctggaacctcgcgcctacccacaagggctgtgta

SEQ ID NO: 121361 - DNA, 75 bp, synthetic construct
  source 1..75: mol_type = other DNA
gcaaaaacaggctgaaatggcactgaatctgttgattaatcgttatcagatgaaacatgcaggtaaaccggagag

SEQ ID NO: 121362 - DNA, 75 bp, synthetic construct
  source 1..75: mol_type = other DNA
cagcggcagcgcagggtgaactggcgggcgcggatgcgagaactattttcacacgcgccgggcagggcgatgagc

SEQ ID NO: 121363 - DNA, 75 bp, synthetic construct
  source 1..75: mol_type = other DNA
gctccatacttctcaagcgtactgattgcacttgtcggcatttacatgggctatcacggctggatcggcgtaacg

SEQ ID NO: 121364 - DNA, 75 bp, synthetic construct
  source 1..75: mol_type = other DNA
gcttccaccggagaaagaaattcgcgtttgggacagtaatgccgaaatttgctatttcgtactgccgcaacgccc

SEQ ID NO: 121365 - DNA, 75 bp, synthetic construct
  source 1..75: mol_type = other DNA
gggagaaatatcaacgcatgttgaacgtctggcattcttgcccgcgtcagtatcatctgagcactaacgaaatta

SEQ ID NO: 121366 - DNA, 75 bp, synthetic construct
  source 1..75: mol_type = other DNA
cgggtgcggaacatttctccgggacgctttcaggaagcgtagaaaatggtttgctgacggcttccatgaagcagg

SEQ ID NO: 121367 - DNA, 75 bp, synthetic construct
  source 1..75: mol_type = other DNA
atttactgagaggtcagatcaactttccagggcaacagatcgcgtacccggtttgccggccaatcctggatatgc

SEQ ID NO: 121368 - DNA, 75 bp, synthetic construct
  source 1..75: mol_type = other DNA
cggctatcccggtgagaccggaattattcctgaaacaatgcaacgtgtttacttaaaccagcgagtagggaaatt

SEQ ID NO: 121369 - DNA, 75 bp, synthetic construct
  source 1..75: mol_type = other DNA
acgtgccaaacgagaagtatctaaagctagaaagattagctattgatgcaagtcaaaagataggaaggagcataa

SEQ ID NO: 121370 - DNA, 75 bp, synthetic construct
  source 1..75: mol_type = other DNA
aaaagacaatgacttcattactcacgtagagaatgttctaattataaacgataaatttagtagtgtaagcgacat

SEQ ID NO: 121371 - DNA, 75 bp, synthetic construct
  source 1..75: mol_type = other DNA
tgttctttctcacgttagaaacatacttcggggtgttttcctttaaaagaaaaggaaaaataaattatggcaaaa

SEQ ID NO: 121372 - DNA, 75 bp, synthetic construct
  source 1..75: mol_type = other DNA
tgcagattgtcgacggcaaagtggcgtggagcgcggctgcctgcgagcaatgtgatacctgcctgaagatgtgtc

SEQ ID NO: 121373 - DNA, 75 bp, synthetic construct
  source 1..75: mol_type = other DNA
tgtcccagagatcgaaatttggggggatggtaattcgcgccgtgagtttatgtatgcagaagatttagctgatct

SEQ ID NO: 121374 - DNA, 75 bp, synthetic construct
  source 1..75: mol_type = other DNA
cgaactggcgcgtgaaagcggcaccagcgaggctagcgtcacacgtctgtgccgaacgctggggtgtaagggcta

SEQ ID NO: 121375 - DNA, 75 bp, synthetic construct
  source 1..75: mol_type = other DNA
aggccgtctacttatatcaaattatggcgtcagtggtgcgaattgggcatatcttctgtcatatgttatttattt

SEQ ID NO: 121376 - DNA, 75 bp, synthetic construct
  source 1..75: mol_type = other DNA
tgatttgcgcattcatgtacccagcaatgaggactgtccacggcgataagtggaaacttgcgacaaccgctgaat

SEQ ID NO: 121377 - DNA, 75 bp, synthetic construct
  source 1..75: mol_type = other DNA
atggtatgaaatagctcgcctcgagaactggttcgaacgtggtctggtgatcttacccagcaatagtggacacgc

SEQ ID NO: 121378 - DNA, 75 bp, synthetic construct
  source 1..75: mol_type = other DNA
agccgaagacctggcgtgtgaagcgtcattcgcccggggattacgcgcgatgattggtggtattttaactgcatc

SEQ ID NO: 121379 - DNA, 75 bp, synthetic construct
  source 1..75: mol_type = other DNA
tgcgtaacccacaggtcgccgccatgcttaaaaataagcatatgacgatcactgaatttgttgcccagcggatgc

SEQ ID NO: 121380 - DNA, 75 bp, synthetic construct
  source 1..75: mol_type = other DNA
atggcggcagtggcgggcgtgctgctcggtcagttctacggcgtaattaacccttacatcggctttatggccggg

SEQ ID NO: 121381 - DNA, 75 bp, synthetic construct
  source 1..75: mol_type = other DNA
agcattggttattgtgttatcagcgatgattcaaaagctgagcgcaggtgtaacgacgatgctctttatgcttta

SEQ ID NO: 121382 - DNA, 75 bp, synthetic construct
  source 1..75: mol_type = other DNA
cctatttaccggatgcgctgacctgggagcttagccagcgttacgatttatacgatctcgctcttctgtctgata

SEQ ID NO: 121383 - DNA, 75 bp, synthetic construct
  source 1..75: mol_type = other DNA
acgtcgaacctgcgtaaatattccattcttggcgccttaacgttgtatctggacttcatcaacctgttcctgatg

SEQ ID NO: 121384 - DNA, 75 bp, synthetic construct
  source 1..75: mol_type = other DNA
ccgcctcgattgccagtactttcgtcgttactgccgggatgttcggcgcaatgagcctgtacggttacaccacca

SEQ ID NO: 121385 - DNA, 75 bp, synthetic construct
  source 1..75: mol_type = other DNA
gccgcaggcggcaccccggtaatgtcgaaaaccggacacgcctttattaaagaacggatgcgcaaggaagacgcc

SEQ ID NO: 121386 - DNA, 75 bp, synthetic construct
  source 1..75: mol_type = other DNA
cgaataagattattcattgcctttatatcacaacctttacgctaatgtttttcagcacaaatttgaaaggtgaaa

SEQ ID NO: 121387 - DNA, 75 bp, synthetic construct
  source 1..75: mol_type = other DNA
ctgcagatgcaggcttcgctgtcacaccgcccgcagccgaaagctgggcagagcccatgcccatgacggagaccg

SEQ ID NO: 121388 - DNA, 75 bp, synthetic construct
  source 1..75: mol_type = other DNA
acaggatgcgggcgtcgatgtgctggatattggcatgtccggcaccgaagagatctatttcgccacgttccatct

SEQ ID NO: 121389 - DNA, 75 bp, synthetic construct
  source 1..75: mol_type = other DNA
accgagccggtggtgcgcctgaacgtggaatcccgcgccgacaccgcgctgatggaagcccgaacgaaggacatt

SEQ ID NO: 121390 - DNA, 75 bp, synthetic construct
  source 1..75: mol_type = other DNA
atggactggcatgtatttatcctcattaatatttttggttttgtcattccgctggtgaatgaagagaccggggaa

SEQ ID NO: 121391 - DNA, 75 bp, synthetic construct
  source 1..75: mol_type = other DNA
gacgcccggtgatggtgcgccggttccggacggcgtacaacgaagtcgcccgtaaaaacgcaaaatcaaccctgt

SEQ ID NO: 121392 - DNA, 75 bp, synthetic construct
  source 1..75: mol_type = other DNA
tgtgagctgcaaggctcaaagcgtaatgctgatggattagggatgctggtggcacaggcggcacatgctttcctt

SEQ ID NO: 121393 - DNA, 75 bp, synthetic construct
  source 1..75: mol_type = other DNA
ataaagaacctgttcagcaggtactttctgtttgtactttgtctcaggaattacttacgaagcataacttcgata

SEQ ID NO: 121394 - DNA, 75 bp, synthetic construct
  source 1..75: mol_type = other DNA
ccgtgggcagcttgctaaaaatgcctccaacgcgaatagtccaggtttcatttctatcggtattagttggatatt

SEQ ID NO: 121395 - DNA, 75 bp, synthetic construct
  source 1..75: mol_type = other DNA
ctttaaagcctatgatattcgcgggaaattaggcgaagaactgaatgaagatattgcctggcgcattggtcgcgc

SEQ ID NO: 121396 - DNA, 75 bp, synthetic construct
  source 1..75: mol_type = other DNA
gtgcagcgtctggcggaagccaacgacttcccgccggtgaacgagtctgcacgcggcagctacaagcagatcgat

SEQ ID NO: 121397 - DNA, 75 bp, synthetic construct
  source 1..75: mol_type = other DNA
ccctgcagatgcagggagcactgccagccccgaccgggaataacagacagcctgcgaaaaccctgccttcacctc

SEQ ID NO: 121398 - DNA, 75 bp, synthetic construct
  source 1..75: mol_type = other DNA
tacattgtcggcctgctggcagaagcgttcctcgaaaaaaatcccggcgcgaagatcatccacgatccacgtctc

SEQ ID NO: 121399 - DNA, 75 bp, synthetic construct
  source 1..75: mol_type = other DNA
agtggcgctgacctttgggtggtgcaaaaggatactctgggtccttatgcagagtcgtccagcctcaacgatgac

SEQ ID NO: 121400 - DNA, 75 bp, synthetic construct
  source 1..75: mol_type = other DNA
ggaagggatttgttacgagcagcgtgattacgccatcaaggtattgcgaggctataacagcgacgtggagggcgc

SEQ ID NO: 121401 - DNA, 75 bp, synthetic construct
  source 1..75: mol_type = other DNA
catctcagacaaccctatctacgagaaatggtatgttgagtcagaagacgaagatcagttctacgtaatggctaa

SEQ ID NO: 121402 - DNA, 75 bp, synthetic construct
  source 1..75: mol_type = other DNA
taaacgctgggatgatctgcgtcgtctggcgaaaaaagcgaaggagcaggtctcggcgcgggtgaattttttcac

SEQ ID NO: 121403 - DNA, 75 bp, synthetic construct
  source 1..75: mol_type = other DNA
ttgatttcttcctgtcagggctacgcggggggattactgaaaaatccccacctgtaccgcagctatggcccatac

SEQ ID NO: 121404 - DNA, 75 bp, synthetic construct
  source 1..75: mol_type = other DNA
aaccgaataaaacatatcttgaggcggtactccgtacggcgttgttaggaaagacagaagacgaatacgttgatt

SEQ ID NO: 121405 - DNA, 75 bp, synthetic construct
  source 1..75: mol_type = other DNA
gcgtgtttttctttatgtgttatcgcgaaccggaaacggtacggcatcgcaacccctgctggataaggtggcagc

SEQ ID NO: 121406 - DNA, 75 bp, synthetic construct
  source 1..75: mol_type = other DNA
tggagtttactctttcgtttacggtaagactttccatgttaaacgtctacaaatgcaaggcaacaaactagctgt

SEQ ID NO: 121407 - DNA, 75 bp, synthetic construct
  source 1..75: mol_type = other DNA
attctgctcctgcttaccgatacgctggcacgcagcattggaacaacagaaatcccacttggcattctgaccgct

SEQ ID NO: 121408 - DNA, 75 bp, synthetic construct
  source 1..75: mol_type = other DNA
aatcagttccagtgacttgatggtctatcagaaatatttgcgtatgacctcgcaggcgcaggtcagccagtctct

SEQ ID NO: 121409 - DNA, 75 bp, synthetic construct
  source 1..75: mol_type = other DNA
tgcgcctgaatgttgaatcgcgcggtgattttcagctcatggaaaaaaaaacaaatgatatattatcaattttaa

SEQ ID NO: 121410 - DNA, 75 bp, synthetic construct
  source 1..75: mol_type = other DNA
tacattaacgaaggtaatcaggatcaactctacgtaatgggtaaggcattgattcatgaatcaataaagtataac

SEQ ID NO: 121411 - DNA, 75 bp, synthetic construct
  source 1..75: mol_type = other DNA
agtgcctgaagaagttgacgaccaggactatgagtttgagtcttacgatttggaagttgaagccttagcacaggc

SEQ ID NO: 121412 - DNA, 75 bp, synthetic construct
  source 1..75: mol_type = other DNA
tcgtgtggaagtcctggatatcgctgccagcgcgggaccaggaacattccttgtttcagattttgcagaaacggt

SEQ ID NO: 121413 - DNA, 75 bp, synthetic construct
  source 1..75: mol_type = other DNA
cgattcatgaaggcgctggagtggacaggaattgttgagctgaccagttaccagcgtcctggtggtggtaccgga

SEQ ID NO: 121414 - DNA, 75 bp, synthetic construct
  source 1..75: mol_type = other DNA
atggggcttgctggaaggaagtttgcagaaaaaaactttgatgcttttgaaaaaaataatagactagcatcaata

SEQ ID NO: 121415 - DNA, 75 bp, synthetic construct
  source 1..75: mol_type = other DNA
acttattataagggaaagcagaccacaaaaactaaaatgataaagtggatacaaattcttttatataagttagca

SEQ ID NO: 121416 - DNA, 75 bp, synthetic construct
  source 1..75: mol_type = other DNA
cacggcagcaggcagaactttaccggaagtgggcggagatggataagctcatcctgacggatggtgatgttatcg

SEQ ID NO: 121417 - DNA, 75 bp, synthetic construct
  source 1..75: mol_type = other DNA
gaaagaatgcccggggctgacagtccacaggaacttatgaaaagggcaaaggagtatcaggataagtataagtaa

SEQ ID NO: 121418 - DNA, 75 bp, synthetic construct
  source 1..75: mol_type = other DNA
atgattttgaacaactccagtcactggctgaccgtcggctttatctcgctaaacaggcagggcgcaatcgggtgt

SEQ ID NO: 121419 - DNA, 75 bp, synthetic construct
  source 1..75: mol_type = other DNA
gcttatatttccagccagcgtaatcatctggagaacgtcgccagcgcgttggataaacaactgcaatataacgtt

SEQ ID NO: 121420 - DNA, 75 bp, synthetic construct
  source 1..75: mol_type = other DNA
ggcacaggcggctcatgccttccttctttggcatggcgttctgcctgatgtagaaccggtcatcaaactattgca

SEQ ID NO: 121421 - DNA, 75 bp, synthetic construct
  source 1..75: mol_type = other DNA
aaagggttctatcaacacatatcaagaagggccgaggttatgcctacagtatgtcgcacttcaagaaagaacccg

SEQ ID NO: 121422 - DNA, 75 bp, synthetic construct
  source 1..75: mol_type = other DNA
atccggcgcagcatctggatggcgttgtcgcctcacccgtaaagaatcactaccccgcgttaccgctggagcggt

SEQ ID NO: 121423 - DNA, 75 bp, synthetic construct
  source 1..75: mol_type = other DNA
atgtcgttaatctctgctttatcgtggtattgctttttttccaccttgctcacctggcgtgaagtagtggtgctg

SEQ ID NO: 121424 - DNA, 75 bp, synthetic construct
  source 1..75: mol_type = other DNA
tcagtgaggggagtctgctttcccgcgaaaatgaatccctggataatgaaattaccgccgcgctggaagttggtt

SEQ ID NO: 121425 - DNA, 75 bp, synthetic construct
  source 1..75: mol_type = other DNA
taagagtacgacgatacgcatcagtgcctcgctgggggtaagtagcagcgaggaaaccggtgattatgattttga

SEQ ID NO: 121426 - DNA, 75 bp, synthetic construct
  source 1..75: mol_type = other DNA
tttaatcgatcagtataatattaaagctaaggtaacagtgttaggtgggattggattggatcttaatgagttttc

SEQ ID NO: 121427 - DNA, 75 bp, synthetic construct
  source 1..75: mol_type = other DNA
atctggaacgtctgtcttttatccgtcctggtttacgtattctgctcatcggcgctggtggagcatctcgcggcg

SEQ ID NO: 121428 - DNA, 75 bp, synthetic construct
  source 1..75: mol_type = other DNA
agatggacgcttgctgggtgacaataccgatggtgtaggcttgttaagcgatctggaacgtctgtcttttatccg

SEQ ID NO: 121429 - DNA, 75 bp, synthetic construct
  source 1..75: mol_type = other DNA
aagggcagtttatcgagggctactacattgtcggcctgctggcagaagcattcctcgaaaaaaatcccggcgcga

SEQ ID NO: 121430 - DNA, 75 bp, synthetic construct
  source 1..75: mol_type = other DNA
gggggcagatggtgaaggcggggctgaggtgtattcagccgcaaccacgcgtgaccaggccagaatcgtgtttga

SEQ ID NO: 121431 - DNA, 75 bp, synthetic construct
  source 1..75: mol_type = other DNA
tattgtttactaccctgctggcaggcattgcctttcctgcacaggctgaaagcggacacggtgcattttccgtgg

SEQ ID NO: 121432 - DNA, 75 bp, synthetic construct
  source 1..75: mol_type = other DNA
ggagcggaaacaccatgtccgtgcctcctgtcaccccacaggcagacatgcagcagcttgcccgtgacctgaaag

SEQ ID NO: 121433 - DNA, 75 bp, synthetic construct
  source 1..75: mol_type = other DNA
atggccaactattgcctgaaaaagggtaacgatatgaaaaaattaacctgctttaaagcctatgatattcgcggg

SEQ ID NO: 121434 - DNA, 75 bp, synthetic construct
  source 1..75: mol_type = other DNA
ccctcggcgcacccgtggaattaatcaaagtgcacaacacgccggacggcaatttccccaacggtattcctaacc

SEQ ID NO: 121435 - DNA, 75 bp, synthetic construct
  source 1..75: mol_type = other DNA
cctatgatattcgcgggaaattaggcgaagaactgaatgaagatattgcctggcgtattgggcgtgcctatggcg

SEQ ID NO: 121436 - DNA, 75 bp, synthetic construct
  source 1..75: mol_type = other DNA
atgtcattatcatatccggattcatgcaggaacgaccagaacttgtatatcgtgataatacagattcttccgcca

SEQ ID NO: 121437 - DNA, 75 bp, synthetic construct
  source 1..75: mol_type = other DNA
gctctgggccatcagggtaatgtcaaaagccccacttatacgctggtcgaaccctatacgctcgacaacttaatg

SEQ ID NO: 121438 - DNA, 75 bp, synthetic construct
  source 1..75: mol_type = other DNA
cacaaacatcccttttctattattcaggtcgaccttgaccattttaaagcgattaacgaccgctttggtcaccag

SEQ ID NO: 121439 - DNA, 75 bp, synthetic construct
  source 1..75: mol_type = other DNA
atttaacctgctgtatcagaaggaagaaatacaactcttacagaggccggtatgggaaagtggcgggtaatgtgc

SEQ ID NO: 121440 - DNA, 75 bp, synthetic construct
  source 1..75: mol_type = other DNA
gaaaaacgctgggcgaactggtgcgtgaccgcatggcggcatttccggcgagcggggagattaacagcaaactgg

SEQ ID NO: 121441 - DNA, 75 bp, synthetic construct
  source 1..75: mol_type = other DNA
gggaggcagagcagaaagcccgtgcgtaccaggcgctggtcgcccaggctgaaatcgaactggcgttccattcac

SEQ ID NO: 121442 - DNA, 75 bp, synthetic construct
  source 1..75: mol_type = other DNA
tcctaacccgttgttacctgaatgtcgcgatgacacccgcaacgcggtaatcgaacatggcgcggatatgggtat

SEQ ID NO: 121443 - DNA, 75 bp, synthetic construct
  source 1..75: mol_type = other DNA
aaggtcaaattcagcgactgcattcctgtatcgcaaatatccgcagggactaccttcacaaagtcacaacgaccg

SEQ ID NO: 121444 - DNA, 75 bp, synthetic construct
  source 1..75: mol_type = other DNA
ttcatatcatccctacccgagaaaatgagggggaaaatggcgatatagggccactacgcccctttacgcttaatc

SEQ ID NO: 121445 - DNA, 75 bp, synthetic construct
  source 1..75: mol_type = other DNA
tgataattctcccttgaagagattaacgtttgatgattattctgtaaaacttacgacgatgattaaaaataaaat

SEQ ID NO: 121446 - DNA, 75 bp, synthetic construct
  source 1..75: mol_type = other DNA
atgcgattatctgttcagtgctctgcgtcgactggaaatccggggcgtgacagagaacggtacagatgctgacag

SEQ ID NO: 121447 - DNA, 75 bp, synthetic construct
  source 1..75: mol_type = other DNA
atcaggaaagcctgtggctggcgtctggctgggtggttgaaaccgcaggggacatctcgcatctggacgcccctg

SEQ ID NO: 121448 - DNA, 75 bp, synthetic construct
  source 1..75: mol_type = other DNA
caaagcatcacagaccgcggcaaacacaaagccgatcgagataaaggctgttgctggtacaggcaaaaagaaaaa

SEQ ID NO: 121449 - DNA, 75 bp, synthetic construct
  source 1..75: mol_type = other DNA
taagcggttggacctatccaataaaacttaattccgatgataattcatttctatggagggtgatgaactgttggg

SEQ ID NO: 121450 - DNA, 75 bp, synthetic construct
  source 1..75: mol_type = other DNA
taaaaaccgtggcaaccagtctgcgccgtcaggaactgagcgcaaaagcctcccagaagttcagcccgatcagtt

SEQ ID NO: 121451 - DNA, 75 bp, synthetic construct
  source 1..75: mol_type = other DNA
gcggcgaaaacctgaaggaaaccgggtttgacccctggagcgcaacgcagtttagcctggctctggcagaagagg

SEQ ID NO: 121452 - DNA, 75 bp, synthetic construct
  source 1..75: mol_type = other DNA
attggccaatgactggcttcaagatgaagaagatgaagaaattacagaagatatgtttgttagcagaataaatct

SEQ ID NO: 121453 - DNA, 75 bp, synthetic construct
  source 1..75: mol_type = other DNA
attttttcacttccatttattactcctggcagtattaatcgcgttcgtctggatgaaattatgccatcttggcga

SEQ ID NO: 121454 - DNA, 75 bp, synthetic construct
  source 1..75: mol_type = other DNA
atggaagtagataagaatgatagatatacctggcaacaggcttttgaaaatctgcgatttttatgtagtcatatg

SEQ ID NO: 121455 - DNA, 75 bp, synthetic construct
  source 1..75: mol_type = other DNA
aaaaatatctacagtcaatgcactgaggatatttaattcatcttttggtgctatttttcgccgttctgaagaaaa

SEQ ID NO: 121456 - DNA, 75 bp, synthetic construct
  source 1..75: mol_type = other DNA
atgaaagaagtggagtctctggtttatggtgggcgttttcatcacagcaatcatccggttatgaactggatgatg

SEQ ID NO: 121457 - DNA, 75 bp, synthetic construct
  source 1..75: mol_type = other DNA
ctggactatcagcgcaaaattgcctgaatgcgagcatccggcgcgtacaccaagaacctttcgacaaaaggtctg

SEQ ID NO: 121458 - DNA, 75 bp, synthetic construct
  source 1..75: mol_type = other DNA
aggctaaccctgggcttggtatctgtaagcgctgggatgatcttcgccgcctggctaagaaggccaaagaacagg

SEQ ID NO: 121459 - DNA, 75 bp, synthetic construct
  source 1..75: mol_type = other DNA
ctcgcaagttattcccggcaactatggcaattttgattccagatatgtgaaagatgttcgacttggttcacagca

SEQ ID NO: 121460 - DNA, 75 bp, synthetic construct
  source 1..75: mol_type = other DNA
ctgacaggaatcatcacaggcagcatgtctgccagcgacgcaatgcgcagtataggcatgacggtcctgaacagc

SEQ ID NO: 121461 - DNA, 75 bp, synthetic construct
  source 1..75: mol_type = other DNA
atgttggatctgtttgctgatgctgaaccgtggcaagaacccctggcacctggcgcggtgatcctgcgccgtttt

SEQ ID NO: 121462 - DNA, 75 bp, synthetic construct
  source 1..75: mol_type = other DNA
ctatcgaacagcaatatcgggatcagcgcaacgcggcgatgtgggaagagtgggcgcagcagaacgcggccacac

SEQ ID NO: 121463 - DNA, 75 bp, synthetic construct
  source 1..75: mol_type = other DNA
atcaaccgcgtcgcaggggctattgccgcatcacttgttgttgactggggtaaggcgtttctcgttgctgctgac

SEQ ID NO: 121464 - DNA, 75 bp, synthetic construct
  source 1..75: mol_type = other DNA
ctcaagagtctgttaaccaaaaactcgatgaactgaagcagaaagccgaactgtcagccggaagcgttggtgagt

SEQ ID NO: 121465 - DNA, 75 bp, synthetic construct
  source 1..75: mol_type = other DNA
gacagcctctcagacaatgcagagcctgatgcgtatcagttcggcaactggcggttctcttcaggacactgcgaa

SEQ ID NO: 121466 - DNA, 75 bp, synthetic construct
  source 1..75: mol_type = other DNA
ctgactggcattgtcaccggaagtatgtcggccagcgatgcgatgcgcagtatcggtatgaccgtgctgaacagc

SEQ ID NO: 121467 - DNA, 75 bp, synthetic construct
  source 1..75: mol_type = other DNA
aaccctggcaagaaccgctggcttccggcgcagtgatcctgcgccgttttgcttttgatatcgcagaagatctga

SEQ ID NO: 121468 - DNA, 75 bp, synthetic construct
  source 1..75: mol_type = other DNA
gcttaatgccatccagaaacaaaccagctcagtaaatgcagagttcgaaaaacttcctcgtactctggctcaagc

SEQ ID NO: 121469 - DNA, 75 bp, synthetic construct
  source 1..75: mol_type = other DNA
ctatcgagcagcagtatcgtgatcagcgtaacgctgcaatgtgggaagaatgggcgcaacagaacgcggccactc

SEQ ID NO: 121470 - DNA, 75 bp, synthetic construct
  source 1..75: mol_type = other DNA
catggggcaagcggcacaaactgctgctatcggcacggtgacagcagtgcagacggcagcagtggcaacacagac

SEQ ID NO: 121471 - DNA, 75 bp, synthetic construct
  source 1..75: mol_type = other DNA
gcttttaacgctgcggagcaactaatccgcgatattaatgacgttgccagccagtcgccgtttcgccagatggtc

SEQ ID NO: 121472 - DNA, 75 bp, synthetic construct
  source 1..75: mol_type = other DNA
tgttttatcacggtattcaaccgttgaaagcggggtttcatcccataagcgctaacttaagggttgtggtattac

SEQ ID NO: 121473 - DNA, 75 bp, synthetic construct
  source 1..75: mol_type = other DNA
gctgtcatgcttgccgccgttctgaagacgcgcggtaacgtcgtgcagatattcaaaatatcgaggtctcaacat

SEQ ID NO: 121474 - DNA, 75 bp, synthetic construct
  source 1..75: mol_type = other DNA
gtatctgttacgaattgcgtgattacgcaatcaaggtcctgcgcggcctggttaaagacgatacgttttttgcca

SEQ ID NO: 121475 - DNA, 75 bp, synthetic construct
  source 1..75: mol_type = other DNA
ttattttgcacagagtgctgatcctgatgtgctggatgtgaaagcctacgggccggaaacgcattcacaggaagg

SEQ ID NO: 121476 - DNA, 75 bp, synthetic construct
  source 1..75: mol_type = other DNA
cgcattgtcggcggtaacagcctgccgacggcaatccatgcgttgcgcgttgctatcgacgatgatggcaaataa

SEQ ID NO: 121477 - DNA, 75 bp, synthetic construct
  source 1..75: mol_type = other DNA
aactcgacaggagcgaaagagttggggctggcttacagcttgttccactggggacctctgccgtgggccacttac

SEQ ID NO: 121478 - DNA, 75 bp, synthetic construct
  source 1..75: mol_type = other DNA
atgagcgcacgttcacgggcactgatccccctcagcgcagaacaacaggccgccatgcaggctgtggctgtcaca

SEQ ID NO: 121479 - DNA, 75 bp, synthetic construct
  source 1..75: mol_type = other DNA
gtaaaattgacacggacccggtaaatcctgaaaaccagattcaggtttatgtagagaacgaagatggctctcacg

SEQ ID NO: 121480 - DNA, 75 bp, synthetic construct
  source 1..75: mol_type = other DNA
tcactgaaaggccttgagcgggcttacaaaaacttcttccagaagcgggctgcttttccccgattcaaaaagcgg

SEQ ID NO: 121481 - DNA, 75 bp, synthetic construct
  source 1..75: mol_type = other DNA
tgaaacgcgaaaccctgaatctgcgcatcaggcccgccgagcgcgatcttatcgatcgggctgcgaaagccagag

SEQ ID NO: 121482 - DNA, 75 bp, synthetic construct
  source 1..75: mol_type = other DNA
gctatttttgaatcgtctggatcagccccccgcgcccaatgctgcattacgcaaaaccatgcaaacacccgcgcc

SEQ ID NO: 121483 - DNA, 75 bp, synthetic construct
  source 1..75: mol_type = other DNA
ctgggctggatgcgctaccggaacagccgtcaggtcacgggagttgtgaaaaatgtcactgtcagccagtcctgc

SEQ ID NO: 121484 - DNA, 75 bp, synthetic construct
  source 1..75: mol_type = other DNA
cctattcgtactttttacgggcattacatatgcgcagattggtcagaaatcatcatcaaagccgtgttcctggca

SEQ ID NO: 121485 - DNA, 75 bp, synthetic construct
  source 1..75: mol_type = other DNA
atgaaagatttaactcaactactcagcagcttaaagaggttgatggttgcagatcactaccctttagccagcccg

SEQ ID NO: 121486 - DNA, 75 bp, synthetic construct
  source 1..75: mol_type = other DNA
agtcctgcggtaagtggtacatcagtattcagacagaaagtgaagtatccactccggctcacccttcagcatcaa

SEQ ID NO: 121487 - DNA, 75 bp, synthetic construct
  source 1..75: mol_type = other DNA
gcttatttaacaaacatttttcacctgaactccagcgatgggcgcagcaacaagacaatcagtatgaactctatt

SEQ ID NO: 121488 - DNA, 75 bp, synthetic construct
  source 1..75: mol_type = other DNA
ttattccagagattattgaaatagatttaattgaaactagcgatagtgttcctaaagaactttgtccagttgaag

SEQ ID NO: 121489 - DNA, 75 bp, synthetic construct
  source 1..75: mol_type = other DNA
gcgcagcacattctgaatttctataattttgttcctcacgtaaaaggcgccctggcaggccagcctattgagctg

SEQ ID NO: 121490 - DNA, 75 bp, synthetic construct
  source 1..75: mol_type = other DNA
gctcaggtgtggggctctatatggctggcgctgacggcgagggcggggcggaggtttattccgctgcaaccaccc

SEQ ID NO: 121491 - DNA, 75 bp, synthetic construct
  source 1..75: mol_type = other DNA
gatttctccttcaccgttgacgaccgttaccgcgtggacgtgaaaggtgatggttttggtttatttcacatcaac

SEQ ID NO: 121492 - DNA, 75 bp, synthetic construct
  source 1..75: mol_type = other DNA
attatcattttcttttatcaaaaagaaaaattattctgctgattatactattgatgagtatatgggaaatgctgg

SEQ ID NO: 121493 - DNA, 75 bp, synthetic construct
  source 1..75: mol_type = other DNA
cctctatcaggcttgaatccggactgacagtacagttttcccctccagcggcagccagtgtcagtgttcagctcg

SEQ ID NO: 121494 - DNA, 75 bp, synthetic construct
  source 1..75: mol_type = other DNA
actggcgtttttatctctgcgagccgggggtgattaccgtggccgatttaccggcgggctggggggtgctgtatg

SEQ ID NO: 121495 - DNA, 75 bp, synthetic construct
  source 1..75: mol_type = other DNA
tgatagccaatgcggttatctgttctgcgatagcaatccgcgtcggaaccttccggagaaatggatcgcaacacc

SEQ ID NO: 121496 - DNA, 75 bp, synthetic construct
  source 1..75: mol_type = other DNA
ttccggcgtaacggttcacaacaccgaagatggggggggtggcttgcttatttcctgattgttgctgcagccagt

SEQ ID NO: 121497 - DNA, 75 bp, synthetic construct
  source 1..75: mol_type = other DNA
tacagatctcttcccactcacccgttcagaggtgaatacgtgtaaaaaaatagcacttgattactggcaccagcc

SEQ ID NO: 121498 - DNA, 75 bp, synthetic construct
  source 1..75: mol_type = other DNA
ggcttcccgactgactgggaaaaccaggaaaaatacaaaggcggctggatccgtaaaatcaatggcaaactgcaa

SEQ ID NO: 121499 - DNA, 75 bp, synthetic construct
  source 1..75: mol_type = other DNA
ttccggcgtaacggttctcaacaccgaagatggggaggctggcttgcttattttctgattgttgctgcggccagt

SEQ ID NO: 121500 - DNA, 75 bp, synthetic construct
  source 1..75: mol_type = other DNA
catcagtaacagacaaatgacaggtctgaaaagacagaagcccccatcagaacgtccgcgtaatgaaaggggcgg

SEQ ID NO: 121501 - DNA, 75 bp, synthetic construct
  source 1..75: mol_type = other DNA
atggtaactcatgagctttttttgcttattgccaatgcgattatttgttcgggaatagcaattcgcgttgtcaca

SEQ ID NO: 121502 - DNA, 75 bp, synthetic construct
  source 1..75: mol_type = other DNA
gatattacgtcagctaaaagaagatgcagaaaactatttgggcgaagaagtcactgaagcggtgattagcgttcc

SEQ ID NO: 121503 - DNA, 75 bp, synthetic construct
  source 1..75: mol_type = other DNA
acaaatacaattaagaaaaacgtaaaacctaaatatggcgatgcggcatttttagagtacactcgactaatagtt

SEQ ID NO: 121504 - DNA, 75 bp, synthetic construct
  source 1..75: mol_type = other DNA
ctcctaataatgataaagcagccagccactctaaagatgaaaatttagccacaaatacaattaagaaaaacgtaa

SEQ ID NO: 121505 - DNA, 75 bp, synthetic construct
  source 1..75: mol_type = other DNA
aaaaataaaacgtgaatcaaaatatgctgctgtgcaaaaaacaagacgaatcagaatagcatttacttcattgaa

SEQ ID NO: 121506 - DNA, 75 bp, synthetic construct
  source 1..75: mol_type = other DNA
taactggggtcaaagaatgggactcattatctaaagccaaataccttaaagagttatgtgatactttttattcac

SEQ ID NO: 121507 - DNA, 75 bp, synthetic construct
  source 1..75: mol_type = other DNA
ggcgaccgcgttcgtggcgtgctctattccgttcgcccggaagcgcgtggcgcgcaactgttcgtcacccgttcc

SEQ ID NO: 121508 - DNA, 75 bp, synthetic construct
  source 1..75: mol_type = other DNA
gcgtattgatgttcgttttacgtacgacattaacggtattcttgatgtcgatatcagcgtgccactgacaggtgc

SEQ ID NO: 121509 - DNA, 75 bp, synthetic construct
  source 1..75: mol_type = other DNA
cgcacgactcgcaaaactcacaaaatcaaactgtgctgctagatccaacacagtttgatgccatcgttaccgcca

SEQ ID NO: 121510 - DNA, 75 bp, synthetic construct
  source 1..75: mol_type = other DNA
gccggttatacaccaaaacatagtgagtgttttgaaatacaaaactttactgattctgcacgcctgattgacgca

SEQ ID NO: 121511 - DNA, 75 bp, synthetic construct
  source 1..75: mol_type = other DNA
tgcatgacgcacaaaacttacaaaatcaaactgtattgctagacgctggtcagttcaatgcgcttgtaaccatga

SEQ ID NO: 121512 - DNA, 75 bp, synthetic construct
  source 1..75: mol_type = other DNA
cgataccgcgtgtgggtcaggaggtgattgtagacttcctcaacggcgatccggaccagccgatcattatggggc

SEQ ID NO: 121513 - DNA, 75 bp, synthetic construct
  source 1..75: mol_type = other DNA
gatattgtcgatatcctgatcgatgcatattgctcacgtcgggatcttcctgaaaatattgaatggcgtgaaccg

SEQ ID NO: 121514 - DNA, 75 bp, synthetic construct
  source 1..75: mol_type = other DNA
ggatcctcgatgacggcggcagggaagagtttcgccagtttgcgcaaaacgtgggggtgaaatatatcgcccgta

SEQ ID NO: 121515 - DNA, 75 bp, synthetic construct
  source 1..75: mol_type = other DNA
ctggcgatgatgcagacgccgcaccacttcttctcgccggatccgtttgaacgcaacctgggggcgtttccgtaa

SEQ ID NO: 121516 - DNA, 75 bp, synthetic construct
  source 1..75: mol_type = other DNA
acgattatttggtcgtataccggcaatgcatttaaacccggatgaagtcattgcccagggcgcggctattcaggc

SEQ ID NO: 121517 - DNA, 75 bp, synthetic construct
  source 1..75: mol_type = other DNA
atggggcggtgaatataacaatgcatccccactcgccagaaaaatatgtagaattgttcagaatggcaagaaaaa

SEQ ID NO: 121518 - DNA, 75 bp, synthetic construct
  source 1..75: mol_type = other DNA
ataatttcttcagcagttaatccagtaatgaacagaatattccaaaaaatgaaggaatcagactcacatggaaat

SEQ ID NO: 121519 - DNA, 75 bp, synthetic construct
  source 1..75: mol_type = other DNA
gacagtgataactatcacctggctgtctacggaaaccaccagtcaggtaaactgggaatacgtggaggtgtgagc

SEQ ID NO: 121520 - DNA, 75 bp, synthetic construct
  source 1..75: mol_type = other DNA
tgaaagccgtattcactctgcgccggttctggctgctgcggtggatctggtcacaaccaacgccaccggcctgat

SEQ ID NO: 121521 - DNA, 75 bp, synthetic construct
  source 1..75: mol_type = other DNA
tggcagcactcttcaaaaaaatgtaacatttaacgcccattttcgcgtctatgtaaaattcaaaagccgcccggc

SEQ ID NO: 121522 - DNA, 75 bp, synthetic construct
  source 1..75: mol_type = other DNA
tacagagccagcacctgaacagcctgcagtatgaccgcgattacacctggaacgacaacggcgaactcatccgca

SEQ ID NO: 121523 - DNA, 75 bp, synthetic construct
  source 1..75: mol_type = other DNA
tgctgacgttttaaacagtccctacctgacatttggtgtaacctataacggtgttgactatgaaaacagcgatgt

SEQ ID NO: 121524 - DNA, 75 bp, synthetic construct
  source 1..75: mol_type = other DNA
ggtcagaaaatttgggaaagcgatgatattaatacaaaagttttttgcaacagggccgtcaattggtcagaaagc

SEQ ID NO: 121525 - DNA, 75 bp, synthetic construct
  source 1..75: mol_type = other DNA
acagtgaaagactttgccgccactcgcggtgtaagcgagcgtctggtctggcaatggcttgatgagggaatcctc

SEQ ID NO: 121526 - DNA, 75 bp, synthetic construct
  source 1..75: mol_type = other DNA
tcaaactgtgctgctagatccaacacagtttgatgccatcgttaccgccatgctgccagctctacagacaatgat

SEQ ID NO: 121527 - DNA, 75 bp, synthetic construct
  source 1..75: mol_type = other DNA
tgccggaagatacacaattataccaggatgcgctgacaggctttcttttcagtatgccggaaaaaacagcatctg

SEQ ID NO: 121528 - DNA, 75 bp, synthetic construct
  source 1..75: mol_type = other DNA
atgctcattttgatgccgcttgccgagcatttgcactgacacacaatctggaagatgtggccgctgccgttggta

SEQ ID NO: 121529 - DNA, 75 bp, synthetic construct
  source 1..75: mol_type = other DNA
cctttaagagagcgcatcagggccttcagtaaggctcccgttccgtccactgttgccgataaagacggcgacgaa

SEQ ID NO: 121530 - DNA, 75 bp, synthetic construct
  source 1..75: mol_type = other DNA
tgctgattgaaacacagggcgaggtctgcctcctcccccttcccggtgatgcagcagagcggttgttcccgtcga

SEQ ID NO: 121531 - DNA, 75 bp, synthetic construct
  source 1..75: mol_type = other DNA
gaagtggcggcctttgccgctggcgctgaagcacaactttcaggagaactggcggtctgtgccggatcgtgcggc

SEQ ID NO: 121532 - DNA, 75 bp, synthetic construct
  source 1..75: mol_type = other DNA
taatattgttatttttttattcctgcacagctgttcccgccactatgttcatattgagcctggtatttcagtgga

SEQ ID NO: 121533 - DNA, 75 bp, synthetic construct
  source 1..75: mol_type = other DNA
caaggtttatatgcgatgcgtgacgtgcaggtagcgcgcctggctctgtttcatggcgatcaagaaaaggcaaaa

SEQ ID NO: 121534 - DNA, 75 bp, synthetic construct
  source 1..75: mol_type = other DNA
tttactggatacacgaagtgataagccgttcccgatggaagttttcgggatgtcgacacctgcctatcttgcgcg

SEQ ID NO: 121535 - DNA, 75 bp, synthetic construct
  source 1..75: mol_type = other DNA
tattcgctgtaaaaggaaaccaggggcggctaaataaagccttcgaggaaaaatttccgctgaaagaattaaata

SEQ ID NO: 121536 - DNA, 75 bp, synthetic construct
  source 1..75: mol_type = other DNA
ttattggccgcggcgatcgtgtcggaatagacaaactgcgagaaatctatgtctccttcattggcagaaagaatc

SEQ ID NO: 121537 - DNA, 75 bp, synthetic construct
  source 1..75: mol_type = other DNA
gggtcgtagccatattgaaggggcgagcaaacaaagtgattttgtccaggcgggtcatcagtatggttttaataa

SEQ ID NO: 121538 - DNA, 75 bp, synthetic construct
  source 1..75: mol_type = other DNA
ctcaaccttcttcgcagtggtaagaaatatcatcttcccgttggtgttctgggacagcgcagcaatactgacttg

SEQ ID NO: 121539 - DNA, 75 bp, synthetic construct
  source 1..75: mol_type = other DNA
ggcggtctgcgccggatcgtgcgggccaggtaacctgcacttaatcaatggcctgtttgattgccaccgcaatca

SEQ ID NO: 121540 - DNA, 75 bp, synthetic construct
  source 1..75: mol_type = other DNA
gtcagtttctgcacgtgtagccccgtggttcttgcgccgcgcgctgttgccgggtcaggaaattattcacacttc

SEQ ID NO: 121541 - DNA, 75 bp, synthetic construct
  source 1..75: mol_type = other DNA
tgatcaagcaacgcccttatgagaattgcggtgctttcatgtccaccctgaatgccatttccggggcgattcaga

SEQ ID NO: 121542 - DNA, 75 bp, synthetic construct
  source 1..75: mol_type = other DNA
gatgaagataaacacaccatggatatcgccgttgaagccggtaacctggcgcaggcgattggccgtaacggtcag

SEQ ID NO: 121543 - DNA, 75 bp, synthetic construct
  source 1..75: mol_type = other DNA
ggcgctgattaaaaacctccgcaaacaaattcctgatttgcagcgaactatcctggctcagcgccgtgacctgca

SEQ ID NO: 121544 - DNA, 75 bp, synthetic construct
  source 1..75: mol_type = other DNA
cggtttgatcgattacaatcctgctcaggagatggctggggcagttgcttcaagtaatcgtgtccatcgaccagc

SEQ ID NO: 121545 - DNA, 75 bp, synthetic construct
  source 1..75: mol_type = other DNA
accgatcgcaaggaccaccagacccgtatcaggaaactcgctgaacacgctccgccagcccgatttgcgcaggat

SEQ ID NO: 121546 - DNA, 75 bp, synthetic construct
  source 1..75: mol_type = other DNA
ggccagtgaacaggttcagctgctgtcgtcggcggaactgagcgacaagcgtctgctgttgctgtcagtactgcc

SEQ ID NO: 121547 - DNA, 75 bp, synthetic construct
  source 1..75: mol_type = other DNA
accggtaccctgagcgggattatggccgccgtcatttccatggtggccatgatccaggattcattcatcctgctg

SEQ ID NO: 121548 - DNA, 75 bp, synthetic construct
  source 1..75: mol_type = other DNA
ctatcgaagactgtctgaacacgctatcccgtttctctgtcgcaagcagttttgttgaatattgcgatttacgta

SEQ ID NO: 121549 - DNA, 75 bp, synthetic construct
  source 1..75: mol_type = other DNA
ggaattttggggggctaccgctgatttttttcaattcagaagtccattgggatagcgtaaagaaacgattttcat

SEQ ID NO: 121550 - DNA, 75 bp, synthetic construct
  source 1..75: mol_type = other DNA
ttgctcaagggcaaaagcacatggcgcgaatctttctgattcatgctctatctttctgcgccgtcttttccgtgc

SEQ ID NO: 121551 - DNA, 75 bp, synthetic construct
  source 1..75: mol_type = other DNA
catattgctcacgtcgggatcttcctgaaaatattgaatggcgtgaaccgacactccagcggcatttacgcatcg

SEQ ID NO: 121552 - DNA, 75 bp, synthetic construct
  source 1..75: mol_type = other DNA
cttcagcgcgaagtacagaaatcgcgccccatcggagtttgctatcttgacggccaaccctattcacaaggggcg

SEQ ID NO: 121553 - DNA, 75 bp, synthetic construct
  source 1..75: mol_type = other DNA
ctggctggtcgcgcgactcgaaggtcagcttacacggcttaataaccagcaaattatccagcatattcaacaaac

SEQ ID NO: 121554 - DNA, 75 bp, synthetic construct
  source 1..75: mol_type = other DNA
attccgttcgcccggaagcgcgtggcgcgcagcttttcgtcacccgttccaaaccggaaatgctgatcgaactgt

SEQ ID NO: 121555 - DNA, 75 bp, synthetic construct
  source 1..75: mol_type = other DNA
taaaacagtgagccgccgtgactttgacgccgcctttgccaaaagctggggaaaagagaacgtgaaagcagttaa

SEQ ID NO: 121556 - DNA, 75 bp, synthetic construct
  source 1..75: mol_type = other DNA
gaaaattccttgcggataactacggtaaaacagtgagccgccgtgactttgatgccgcctttgccaaaagctggg

SEQ ID NO: 121557 - DNA, 75 bp, synthetic construct
  source 1..75: mol_type = other DNA
ctgagcatgatccatcgtgcgtgtttttcgaccttgatgcagggcatacggggttaaagggttatgccagcaatg

SEQ ID NO: 121558 - DNA, 75 bp, synthetic construct
  source 1..75: mol_type = other DNA
tgttgatgaacgccgctggatgcgctttggctgcgccacccgcccaatcccaaacttgccagaggcacgcgccag

SEQ ID NO: 121559 - DNA, 75 bp, synthetic construct
  source 1..75: mol_type = other DNA
aaatacagcagtcgttgtccaaattaagccttttaaaaattcatccacgcgatgaacagataaaccaggccttta

SEQ ID NO: 121560 - DNA, 75 bp, synthetic construct
  source 1..75: mol_type = other DNA
cagccatcttttagtttatgagatgcaggacaaaggtcggcatcttacatcaaaacaaatagaaaattttctgaa

SEQ ID NO: 121561 - DNA, 75 bp, synthetic construct
  source 1..75: mol_type = other DNA
ccgacgccatcaacgttctggccctcaacatgggccggatcgtcgttgatatcgacggcattgaactcactgacc

SEQ ID NO: 121562 - DNA, 75 bp, synthetic construct
  source 1..75: mol_type = other DNA
ggcttttcatctggaaaaactggctgaatacggtgcgactgagcatcatcggcgcagttttgggcctgtcaaacg

SEQ ID NO: 121563 - DNA, 75 bp, synthetic construct
  source 1..75: mol_type = other DNA
gatgcagtggtggtcggattatctggatatgtgcagtgaaatctgggtgcccccgtacatctggagtcagcaaaa

SEQ ID NO: 121564 - DNA, 75 bp, synthetic construct
  source 1..75: mol_type = other DNA
aattaaaaatagatttgcttgataataaaaatagcgtgattgcacatatgtttaatggtgataataatgtttgta

SEQ ID NO: 121565 - DNA, 75 bp, synthetic construct
  source 1..75: mol_type = other DNA
atgatcgaatttgtttatccacacacgcagctggttgcgggtgtggatgaagttggacgcgggccgttggttggc

SEQ ID NO: 121566 - DNA, 75 bp, synthetic construct
  source 1..75: mol_type = other DNA
tgtccgtattttcccggaaagccagatagtaaactttgggcaaatcgcaatgaattccatttcaacattcgcacc

SEQ ID NO: 121567 - DNA, 75 bp, synthetic construct
  source 1..75: mol_type = other DNA
aatttcgggcaaattgctgcaaactctattgctacttatcgaccaaaagctgcatttagcgtatctactataaaa

SEQ ID NO: 121568 - DNA, 75 bp, synthetic construct
  source 1..75: mol_type = other DNA
cgcgccctgcggcgtatcaatatgttgcaacaggaaatagacgaatattacgcccacttccgcgtgtcgaataat

SEQ ID NO: 121569 - DNA, 75 bp, synthetic construct
  source 1..75: mol_type = other DNA
tcgagccatataccgtcgatgctcgccgctgtatctcttatctcaccatcgaactggaaggggcgatcccggaag

SEQ ID NO: 121570 - DNA, 75 bp, synthetic construct
  source 1..75: mol_type = other DNA
ggcggaattgctgccgtgtttgatgaaactgacagtatcgattcacatgtggaagatacgttggttgccggtgcc

SEQ ID NO: 121571 - DNA, 75 bp, synthetic construct
  source 1..75: mol_type = other DNA
tgctgattgaaacacagggcgaggtctgcctccttccccttcccggtgatgcagcagagcggttgtttccatcgg

SEQ ID NO: 121572 - DNA, 75 bp, synthetic construct
  source 1..75: mol_type = other DNA
gctggagtgtctggtctatggctggtcggcggcagaagatatcaccagacgtatgccttatgcccacggcgtcag

SEQ ID NO: 121573 - DNA, 75 bp, synthetic construct
  source 1..75: mol_type = other DNA
ccgatgccatcaacgtactggccctcaacatgggccggatcgctgtggatattgacggtattgaactgaccgatt

SEQ ID NO: 121574 - DNA, 75 bp, synthetic construct
  source 1..75: mol_type = other DNA
attaacttcagaaatcggatctggacgatacctgccacacgcgaagcgattgcaggcgtacgttattccagtcga

SEQ ID NO: 121575 - DNA, 75 bp, synthetic construct
  source 1..75: mol_type = other DNA
ggcgcagcacattaccattaccgccgaaacccagggtgcgaaagtcgagtttactgttgaacaactacagcagag

SEQ ID NO: 121576 - DNA, 75 bp, synthetic construct
  source 1..75: mol_type = other DNA
tcggcgctggtggagcatctcgcggcgtactactgccactcctttccctggactgtgcggtgacaatcactaatc

SEQ ID NO: 121577 - DNA, 75 bp, synthetic construct
  source 1..75: mol_type = other DNA
ggaatggcgggcagctgatcagcaaaatactggcaataaccccggataaactggtgctggatttcggcagccagg

SEQ ID NO: 121578 - DNA, 75 bp, synthetic construct
  source 1..75: mol_type = other DNA
acacgaaacaagatatctgcggtcatggtttccgggcaatggcgtgtagcgcgctgatggaatccggtttatggt

SEQ ID NO: 121579 - DNA, 75 bp, synthetic construct
  source 1..75: mol_type = other DNA
ggctgcggaggtcgcagaacgtattcgcctgaagttaaatgaaaaagagatgttgatcgccaagagtacgacgat

SEQ ID NO: 121580 - DNA, 75 bp, synthetic construct
  source 1..75: mol_type = other DNA
gccggttgacagcaataattactggtatggcgtgctgggaatgagtattcccgtgcgttcaatgcagcaattttt

SEQ ID NO: 121581 - DNA, 75 bp, synthetic construct
  source 1..75: mol_type = other DNA
gtgcatcatggattaatcgattttaatccggcagcaaacttggacggagtgacggctccgccagtaaaacgtcac

SEQ ID NO: 121582 - DNA, 75 bp, synthetic construct
  source 1..75: mol_type = other DNA
gtataagccaatgtgtgaaaacacggtcaataaggcactgcggggtgatgggttacgacacgaaaaaggatatct

SEQ ID NO: 121583 - DNA, 75 bp, synthetic construct
  source 1..75: mol_type = other DNA
aagtcttattaataacattgaaacgataagttcgacaccacttacgcggcaagcacagggactacttaatcaaat

SEQ ID NO: 121584 - DNA, 75 bp, synthetic construct
  source 1..75: mol_type = other DNA
cccgacggtggagcggcagttacagcagattattttctctctcgagcgagaagcccgggagaaagcagacaaagt

SEQ ID NO: 121585 - DNA, 75 bp, synthetic construct
  source 1..75: mol_type = other DNA
tgaatatttacagcttccggcattcatcaccgcgccccctcccgccttatggttcgtgcaacggcgcagatattt

SEQ ID NO: 121586 - DNA, 75 bp, synthetic construct
  source 1..75: mol_type = other DNA
tatgacaggacaggacctttccgggttcgttctaaccttgtcaaggttttatttcgaagatctacttaatataaa

SEQ ID NO: 121587 - DNA, 75 bp, synthetic construct
  source 1..75: mol_type = other DNA
aaataataaaaacctgcgttatatcattgatggattaaataatatttcatttcttgattgtagtgtcgatatccg

SEQ ID NO: 121588 - DNA, 75 bp, synthetic construct
  source 1..75: mol_type = other DNA
ggccgcttttatgcaggcattgcgtgagttgtgcgatacacacgggatcctgctggttgccgacgaagtacagac

SEQ ID NO: 121589 - DNA, 75 bp, synthetic construct
  source 1..75: mol_type = other DNA
tatcagttcgaagtatttcaatacgagacgcttaaccccaaaaaaatgtcacacacgccttatttaaagagccac

SEQ ID NO: 121590 - DNA, 75 bp, synthetic construct
  source 1..75: mol_type = other DNA
gtgcagatgtgcatatttttgccggaagcgatccggcgcataccgcaactgccaccagtggtatcagtgccgcca

SEQ ID NO: 121591 - DNA, 75 bp, synthetic construct
  source 1..75: mol_type = other DNA
atatcgccgtagcattaggcaatgccccttgggatgaaacgattttgacagcgctggaagtcgtaaaggtgagca

SEQ ID NO: 121592 - DNA, 75 bp, synthetic construct
  source 1..75: mol_type = other DNA
ccggcgagacggaccttgcgctgcccgacccgctgccgttcattctctcccgcacctacagcagctaccggacga

SEQ ID NO: 121593 - DNA, 75 bp, synthetic construct
  source 1..75: mol_type = other DNA
atgattaaaaccaccacagaaaagcgcgcggacaggcgcatttttgccggaagcgatccggtgtataccgcaaca

SEQ ID NO: 121594 - DNA, 75 bp, synthetic construct
  source 1..75: mol_type = other DNA
gaaggggaatacctatctgacgccgcagcaacaaacggcagaactgactgaaccgccccgggaatcctggagact

SEQ ID NO: 121595 - DNA, 75 bp, synthetic construct
  source 1..75: mol_type = other DNA
aaacattgctaaccctatcgccacaatttgggccggtgcaatgatgctcgattttctcggcaatggcgatgagcg

SEQ ID NO: 121596 - DNA, 75 bp, synthetic construct
  source 1..75: mol_type = other DNA
tccgatcttggcccggcctgcaccggcaccattggcattgccccatccgccaacctgaatccggaacgcactttc

SEQ ID NO: 121597 - DNA, 75 bp, synthetic construct
  source 1..75: mol_type = other DNA
tgtcacggaaaccgcaagtgagctggtacggctgggacggcgaccgcctgaccacaatacagaacgacagaaccc

SEQ ID NO: 121598 - DNA, 75 bp, synthetic construct
  source 1..75: mol_type = other DNA
ctgataaaccgttacaacgtagtgcgagttatgatccagttgtaacactacctattgcactcttgctacaggaag

SEQ ID NO: 121599 - DNA, 75 bp, synthetic construct
  source 1..75: mol_type = other DNA
atgcgcactttgatgcggcttgccgagcatttgcaattgagcacaatcttgaagatgtggccgctgccgttggta

SEQ ID NO: 121600 - DNA, 75 bp, synthetic construct
  source 1..75: mol_type = other DNA
attatatggtggtgttgaatcatggaacaacagttgatggcgaagaaaaaaatattatttctgccgtgtttttaa

SEQ ID NO: 121601 - DNA, 75 bp, synthetic construct
  source 1..75: mol_type = other DNA
ttgcgggaaaagcgccattgccggggaaatagaaattgcgatgaaagctattggtgtgccggttcaatggactaa

SEQ ID NO: 121602 - DNA, 75 bp, synthetic construct
  source 1..75: mol_type = other DNA
agcggagttgctgcattgctccaatattgctcttcaaaaatggatctgccatcaaataatgatacttatcacgaa

SEQ ID NO: 121603 - DNA, 75 bp, synthetic construct
  source 1..75: mol_type = other DNA
gggaagcgaatatacagccatctatgagccaaatagcaaagtcagagagatagctataaatgattatggatttag

SEQ ID NO: 121604 - DNA, 75 bp, synthetic construct
  source 1..75: mol_type = other DNA
gccaccatctgggcgcaggcgggccagtcaatcccggcaaccggcaccacccacgccgactatttctacggcacc

SEQ ID NO: 121605 - DNA, 75 bp, synthetic construct
  source 1..75: mol_type = other DNA
atggtgtaggcaaaggttacttgtgttcatttgcaaaagatgatttcggggtaactcatgtaagcgcaagcgaac

SEQ ID NO: 121606 - DNA, 75 bp, synthetic construct
  source 1..75: mol_type = other DNA
ccggtgcgattaacgtccgggcccttaatgggggccggatcgtcgtggatatcgacggtattgaactcgccagcc

SEQ ID NO: 121607 - DNA, 75 bp, synthetic construct
  source 1..75: mol_type = other DNA
cgttttgtgggcaaaccgaatcggttaaaaagcatggtcagggaaaagctaaacatcagcgttatcggtgccaga

SEQ ID NO: 121608 - DNA, 75 bp, synthetic construct
  source 1..75: mol_type = other DNA
atatgcgtgaacaggtggcggaactggccaataccatgtgcgacctgcgcacaaccatgaatgagatggagcagc

SEQ ID NO: 121609 - DNA, 75 bp, synthetic construct
  source 1..75: mol_type = other DNA
caacagcaccgacatgcttaacaatccatatctaacctttggtgtcacttataatggtatggactatgaagggat

SEQ ID NO: 121610 - DNA, 75 bp, synthetic construct
  source 1..75: mol_type = other DNA
ctgcgtacaatggttaatcgatcagggggtgttgtttgatactcacattcagccaaatggcaaagaaagctacca

SEQ ID NO: 121611 - DNA, 75 bp, synthetic construct
  source 1..75: mol_type = other DNA
ggaaggttcaacattttatgcccagggcggtattgccgccgtgtttgatgaaactgacagcattgactcgcatgt

SEQ ID NO: 121612 - DNA, 75 bp, synthetic construct
  source 1..75: mol_type = other DNA
gatgtacaaaccaactgtgcgcatcgtggaagttaatgtgccacgcgtcgctggcattcgcatcaaaggagacgc

SEQ ID NO: 121613 - DNA, 75 bp, synthetic construct
  source 1..75: mol_type = other DNA
ttatcatacatcactaagaaactcccccccattcaatcaaattttcaaagtaaatggagcaactattaaatcaaa

SEQ ID NO: 121614 - DNA, 75 bp, synthetic construct
  source 1..75: mol_type = other DNA
caaaattccagagaacgcgcaacctgggcaaaaaatttgggagagcggagatattaatatcacagtttattgtga

SEQ ID NO: 121615 - DNA, 75 bp, synthetic construct
  source 1..75: mol_type = other DNA
aattgcagaactggaagcacgggaaataaaaccagccaaaggcgaagttcttgtcgttgtatctggttttactgg

SEQ ID NO: 121616 - DNA, 75 bp, synthetic construct
  source 1..75: mol_type = other DNA
atggcacgctcagggccgacggaatcactggcctgtgaccagacccgggggggtatcatccggcgtaaaaaaacg

SEQ ID NO: 121617 - DNA, 75 bp, synthetic construct
  source 1..75: mol_type = other DNA
caaaccgatttaatatattccaatccagatcataaaaagagcgtcttctgcatttgcatttgtgaagtcgctaat

SEQ ID NO: 121618 - DNA, 75 bp, synthetic construct
  source 1..75: mol_type = other DNA
tacgtgttcttcggtagcgatcacggcggcgagcgtggtgcactgttgtacgggctgatcggcacctgccggttg

SEQ ID NO: 121619 - DNA, 75 bp, synthetic construct
  source 1..75: mol_type = other DNA
aagatgttcgacttggttcacagcaatattatggagtgaacaactggcaaacatggaatttccagtgcccgtcag

SEQ ID NO: 121620 - DNA, 75 bp, synthetic construct
  source 1..75: mol_type = other DNA
gcagtacgtaacggcacaaatatcagcgaacatcatttcattcagatgtccgatacaaactactaccacactgtt

SEQ ID NO: 121621 - DNA, 75 bp, synthetic construct
  source 1..75: mol_type = other DNA
aagaacgccagaaaaagctgcagcagcaaacggcgcttgtgcgtgcagaactgtaccgggcgggaatttctgcga

SEQ ID NO: 121622 - DNA, 75 bp, synthetic construct
  source 1..75: mol_type = other DNA
tgccgcaggcgcggtgctgcgagtactggcatccggtccgctggcgatgctgcgcgttgccctgtatgccgtatc

SEQ ID NO: 121623 - DNA, 75 bp, synthetic construct
  source 1..75: mol_type = other DNA
aagtgcaggcgctgtggggctggtttactgatttgctgacgcccgttaagtcgacttctgccgaactgcagagcg

SEQ ID NO: 121624 - DNA, 75 bp, synthetic construct
  source 1..75: mol_type = other DNA
agttgatgcgctcagaaacagggtgttaagcgtgcttcctggaatggtggcgcaacgacaagagaactctttgca

SEQ ID NO: 121625 - DNA, 75 bp, synthetic construct
  source 1..75: mol_type = other DNA
agccactgtgccgcccgtttacaggattgaggcaccgacgcagatcatcatccagacgcagccaggacaaagtgc

SEQ ID NO: 121626 - DNA, 75 bp, synthetic construct
  source 1..75: mol_type = other DNA
acagtggcaaagatggcgtttacttccacttaagagataatgtagatgccttcttaaccttatcagcaactgaac

SEQ ID NO: 121627 - DNA, 75 bp, synthetic construct
  source 1..75: mol_type = other DNA
gcttcaaaagtgcttaagtcgggtaatgctttacggaaatttagtgtgaatcctaacaagaagggcacttactaa

SEQ ID NO: 121628 - DNA, 75 bp, synthetic construct
  source 1..75: mol_type = other DNA
ctggtaaaacagcaactacaaaagatgacggtgtaacttctaaaaagaatatcggtaacgttacaacagaaaata

SEQ ID NO: 121629 - DNA, 75 bp, synthetic construct
  source 1..75: mol_type = other DNA
cttactaatgagcaacttcaagcccgtatcaattgtggtaaaagtgtcaaagttgagaatggaaaaagcaccttc

SEQ ID NO: 121630 - DNA, 75 bp, synthetic construct
  source 1..75: mol_type = other DNA
gggcaaaccgtcacagataatgtgcaaagagcacccagaacaattactattagtggtgtcgttgtagttggctat

SEQ ID NO: 121631 - DNA, 75 bp, synthetic construct
  source 1..75: mol_type = other DNA
tgttaagaatggtgaaagtaccttcacagactcagctaattcaggtgctgcaaaggtactcaagtcgggtaatgc

SEQ ID NO: 121632 - DNA, 75 bp, synthetic construct
  source 1..75: mol_type = other DNA
cggctgttgtggctgcggttacagtcggcctaggcaccttagcggtggcgatggctgcagtgctggggccgctgg

SEQ ID NO: 121633 - DNA, 75 bp, synthetic construct
  source 1..75: mol_type = other DNA
atgatttactctaaccaaatcaaatatagtggcaaagatggtatctattttcaccttagagataatgtagaatct

SEQ ID NO: 121634 - DNA, 75 bp, synthetic construct
  source 1..75: mol_type = other DNA
aataacggaatcaatgattgtaaaaactgaagaatgtacttatgaccatgtcaggggaaattttgttataaaaga

SEQ ID NO: 121635 - DNA, 75 bp, synthetic construct
  source 1..75: mol_type = other DNA
cggttagttagtgaaaaatcacctcacccactgacacgagagaaactaacggcatcaatggttgtaagtgctgat

SEQ ID NO: 121636 - DNA, 75 bp, synthetic construct
  source 1..75: mol_type = other DNA
tgaaggatatcggcctatttcggcagttatcaccacgcttgcgactcacgcttatctggatgttgtcgcgcagtc

SEQ ID NO: 121637 - DNA, 75 bp, synthetic construct
  source 1..75: mol_type = other DNA
aggtgctgcaaagctactcaaggcgggtaacgctctacggaaatactctgtgaaccctaacaagcgcggtactta

SEQ ID NO: 121638 - DNA, 75 bp, synthetic construct
  source 1..75: mol_type = other DNA
gcaatgcgctggatatgtggacggagcggttagggatactggcgggaacacatgaaaacgtaaccacgctaccag

SEQ ID NO: 121639 - DNA, 75 bp, synthetic construct
  source 1..75: mol_type = other DNA
cggtgatttacctgatggttggcatggctggggcaaccagtgcaatggaggtatccagttgcatgatgctctctg

SEQ ID NO: 121640 - DNA, 75 bp, synthetic construct
  source 1..75: mol_type = other DNA
tcaaagcggcggcaggtcccgtcagtgcagcgttcgaaccgcttaagcctgtgttccagtggattggcgacaaag

SEQ ID NO: 121641 - DNA, 75 bp, synthetic construct
  source 1..75: mol_type = other DNA
cggttagttagtgaaaaatcacctcacccacaggcatactcttgtattcttgatgcctgtggcgtttttacaaat

SEQ ID NO: 121642 - DNA, 75 bp, synthetic construct
  source 1..75: mol_type = other DNA
atgatttacactaatcagcttcgttacactggcaaagatggcatctatttccacttaagagataatgtagatgcc

SEQ ID NO: 121643 - DNA, 75 bp, synthetic construct
  source 1..75: mol_type = other DNA
cagtggtgtcgttgtagttggctatgaaggaagcttattattaactcgtcagggtcaattagtagaaaacttcat

SEQ ID NO: 121644 - DNA, 75 bp, synthetic construct
  source 1..75: mol_type = other DNA
ccatctacaaggccaaccagataatttcttgtcactatcagctactgagaacatggaatttgatagccctatgat

SEQ ID NO: 121645 - DNA, 75 bp, synthetic construct
  source 1..75: mol_type = other DNA
cccatcaatgattattaaaccagaagagtgtaaatatgacccttcaaggggaagctttattataaaagatagtta

SEQ ID NO: 121646 - DNA, 75 bp, synthetic construct
  source 1..75: mol_type = other DNA
caaaaaggaacaggaaaagtatggcactggcagcgatatgcagcgcggtatccaggcggcaacggctgcgcttca

SEQ ID NO: 121647 - DNA, 75 bp, synthetic construct
  source 1..75: mol_type = other DNA
tagtatgctgcttatttgatgtccttgcattggaacgtttagttcgtgaagacttacctcatccattgacacgag

SEQ ID NO: 121648 - DNA, 75 bp, synthetic construct
  source 1..75: mol_type = other DNA
actgacggagaaggttgttgctaaggttgtgggtaagtctgaatcagcagcggcaaaagttggtacagatattgt

SEQ ID NO: 121649 - DNA, 75 bp, synthetic construct
  source 1..75: mol_type = other DNA
cgccctggttcggtgatccctgtagtagtgatgcgtgatgataagcagttaacgctgcaggtcaccattcaggaa

SEQ ID NO: 121650 - DNA, 75 bp, synthetic construct
  source 1..75: mol_type = other DNA
taaagcggcggcgctgggttccaccttcctgactctgggtgctgcgccggaggtcgcagccagtgcagcaaacgc

SEQ ID NO: 121651 - DNA, 75 bp, synthetic construct
  source 1..75: mol_type = other DNA
gtgaccgaagatacttacgaatatttgctgctaaatggtgaggaatcttttaacgatctcggcgagccagagtgg

SEQ ID NO: 121652 - DNA, 75 bp, synthetic construct
  source 1..75: mol_type = other DNA
ccgcagtagcaaatgatattgttaaggcacttggaggcaattttacccgccatgatggctggtttgaaagtgata

SEQ ID NO: 121653 - DNA, 75 bp, synthetic construct
  source 1..75: mol_type = other DNA
tttgcgccgtacggcatcactgacgggaaatgtcctgaaaactgtagcaggtgtgccggttgcactattgcggtc

SEQ ID NO: 121654 - DNA, 75 bp, synthetic construct
  source 1..75: mol_type = other DNA
acaggatatcttcgacaaaattctgcaaaacatcagcgatccgacgctagccgccacgttgaaaaacaccatcaa

SEQ ID NO: 121655 - DNA, 75 bp, synthetic construct
  source 1..75: mol_type = other DNA
ctcggtggcgtggtggagggattcaaagcggcggcaggtcccgtcagtgccgcattcgaaccacttaagcctgtg

SEQ ID NO: 121656 - DNA, 75 bp, synthetic construct
  source 1..75: mol_type = other DNA
gctgttcaacaacgcaccaccgtgggactcgtcggtctggctgtggcgctttattctggcattaactggacggga

SEQ ID NO: 121657 - DNA, 75 bp, synthetic construct
  source 1..75: mol_type = other DNA
ccgctgatggatattctgtacactgtgaaaagcatcacgggggcgttgcgccgctgggtggaagctaacccggaa

SEQ ID NO: 121658 - DNA, 75 bp, synthetic construct
  source 1..75: mol_type = other DNA
atgctggaaaaagtagaaaatcaaaaccatgccaaatgggaggtccataattttaccatgggctaccagcggcaa

SEQ ID NO: 121659 - DNA, 75 bp, synthetic construct
  source 1..75: mol_type = other DNA
ctgttttgcgcggcgtggattgccaccgccgaatataaagacgacccgcgaatgccggggaaaacacagccttaa

SEQ ID NO: 121660 - DNA, 75 bp, synthetic construct
  source 1..75: mol_type = other DNA
atgacgcaggaaaacgagatcaaacgtcccacccaggatctggagcacgagccaattaagcatctggataatagc

SEQ ID NO: 121661 - DNA, 75 bp, synthetic construct
  source 1..75: mol_type = other DNA
gggcttgcttcatcgggcaacgctgcgggtttacttactgcaccgttgtcatctttgcgccgcacggcatcactg

SEQ ID NO: 121662 - DNA, 75 bp, synthetic construct
  source 1..75: mol_type = other DNA
atagcggatttgaagcatttcttggcgcagaaaatacagacgaagaggagtctgacagtgacgattccgcttttg

SEQ ID NO: 121663 - DNA, 75 bp, synthetic construct
  source 1..75: mol_type = other DNA
gaaagtctctgcacaagactattgaaaaaaatgaagtgaaaacggcaaaaaaatgccgggtccggttccggccct

SEQ ID NO: 121664 - DNA, 75 bp, synthetic construct
  source 1..75: mol_type = other DNA
ggcaattgccttaatttgacgaaaattatccctcaggcttctgttcgttatgacgttaacgagcaacgtctggat

SEQ ID NO: 121665 - DNA, 75 bp, synthetic construct
  source 1..75: mol_type = other DNA
ggatattgcgcgggaggtggcacgccagcttgatgaacgtgaacgcagactgaaggcaaaggccaggagtaacta

SEQ ID NO: 121666 - DNA, 75 bp, synthetic construct
  source 1..75: mol_type = other DNA
gactactcaaaagttgtggctcaacttgtaagtcttattactaacattgaaacgataagttcgacacaacttacg

SEQ ID NO: 121667 - DNA, 75 bp, synthetic construct
  source 1..75: mol_type = other DNA
gaagaaatcgcgaagctggaagtgaccggcgaatccggcgcaggtctggtgaaagtgaccatcaacggcgcacac

SEQ ID NO: 121668 - DNA, 75 bp, synthetic construct
  source 1..75: mol_type = other DNA
atgtttgacacaaagcaaattagatactcaggtaaagatggtatctattttcaccttagagataatatagatgcc

SEQ ID NO: 121669 - DNA, 75 bp, synthetic construct
  source 1..75: mol_type = other DNA
cacttggctgcctatgaaaaatcgaaaggtcctgaggctttaggttttaagcccgcccgtcaggcaccaccgcca

SEQ ID NO: 121670 - DNA, 75 bp, synthetic construct
  source 1..75: mol_type = other DNA
cggtgatgttgttttcgacgggagttatgccgtttggtttactgatgaccttatttagctcgctgtggctgatct

SEQ ID NO: 121671 - DNA, 75 bp, synthetic construct
  source 1..75: mol_type = other DNA
gacgcctgccagctataatctggcggttcgccgcgctgcgccagcagtagtcaacgtctataaccgtggtttaaa

SEQ ID NO: 121672 - DNA, 75 bp, synthetic construct
  source 1..75: mol_type = other DNA
ctccaataaccccatcaatgattgttaaaccagaagagtgtaaatatgaccctgcaaggggaagctttattataa

SEQ ID NO: 121673 - DNA, 75 bp, synthetic construct
  source 1..75: mol_type = other DNA
atgccattaatctcggatattaattcatcttcgttcagtcctggcgtggaggctcttcgtgcgcaaattgtagcc

SEQ ID NO: 121674 - DNA, 75 bp, synthetic construct
  source 1..75: mol_type = other DNA
gcttcaaaggtgcttaagtcgggtaatgctttacggaagtactctgtgaatccgaataagaagggcacttattga

SEQ ID NO: 121675 - DNA, 75 bp, synthetic construct
  source 1..75: mol_type = other DNA
ggttcttcgtgctcaagttgcagccactgggcgtggagaatttacaatgggtggtgaaactgtcagaattgaata

SEQ ID NO: 121676 - DNA, 75 bp, synthetic construct
  source 1..75: mol_type = other DNA
ctcttccgagcaggtgatgcagcaggcggacagcgcgctctaccaggcaaaaagacaagggcgcaaccaagttat

SEQ ID NO: 121677 - DNA, 75 bp, synthetic construct
  source 1..75: mol_type = other DNA
acggattggggggggaggaattcgctgtgttgttggaagcggcatcgatagaagacgcccaagtatgggcggagc

SEQ ID NO: 121678 - DNA, 75 bp, synthetic construct
  source 1..75: mol_type = other DNA
ctcgcaaaggcgagatggtgctgattattgaaggccataaagcccaggatgacgaactgcccgccgatgcgctgc

SEQ ID NO: 121679 - DNA, 75 bp, synthetic construct
  source 1..75: mol_type = other DNA
agcgaatacgcgcaaaagcgggcgctgaaacctctcctgaccatgccttatgatgccgatcaaaactggcatttt

SEQ ID NO: 121680 - DNA, 75 bp, synthetic construct
  source 1..75: mol_type = other DNA
atgaactgtcagaaagcctggggaaaatcgcccagctctacaaaatacctacccgcaatattgaacagctcggcg

SEQ ID NO: 121681 - DNA, 75 bp, synthetic construct
  source 1..75: mol_type = other DNA
tgccgcattcgaaccacttaagcccgtgtttcagtggattggtgacaaagtgcaggctctgtggggctggtttac

SEQ ID NO: 121682 - DNA, 75 bp, synthetic construct
  source 1..75: mol_type = other DNA
caaacgctggcagtccaacgcctggaagaacaacaaaaatatttgcagaagcaaacggcgcttgtgcgtgcagaa

SEQ ID NO: 121683 - DNA, 75 bp, synthetic construct
  source 1..75: mol_type = other DNA
gagcttatcgatgcctcgccgtatgcgaaaaagtacacctccggtgtgctgtcgttcgcggaggctgaactgccg

SEQ ID NO: 121684 - DNA, 75 bp, synthetic construct
  source 1..75: mol_type = other DNA
ccgccgtctctgagcaggtacagacaaacctgaccgccaccgagacgcgcgtcactgagctggaaaccgccttcg

SEQ ID NO: 121685 - DNA, 75 bp, synthetic construct
  source 1..75: mol_type = other DNA
aagaaaaaaacattaagtgaacgttatttagttgacgcgattaatgatgaatatcgcagaaatagtggtgttgat

SEQ ID NO: 121686 - DNA, 75 bp, synthetic construct
  source 1..75: mol_type = other DNA
ttgttgtaagtgcgacggcgctggcctccggaggtgcattaactatattaaagcaatttataaaacatgcatcac

SEQ ID NO: 121687 - DNA, 75 bp, synthetic construct
  source 1..75: mol_type = other DNA
gcaaacctgtagcgggatttctgatttgcaggtgccgctgcgtgacttgtggaatccggctatccagcgtgtgct

SEQ ID NO: 121688 - DNA, 75 bp, synthetic construct
  source 1..75: mol_type = other DNA
gacagccatttatcggtttcgtactgctggtgcggtttatcaaaaaatggtggcttcaggggcaaacgcgcagag

SEQ ID NO: 121689 - DNA, 75 bp, synthetic construct
  source 1..75: mol_type = other DNA
cggcagggagcggggacggcgctggagaaccattttgcggtgatcccggcagacagaacatggcgaccacagccg

SEQ ID NO: 121690 - DNA, 75 bp, synthetic construct
  source 1..75: mol_type = other DNA
ttgccaaccacgctactgccaatggaaaacggtgctatggacttcgccgcattggttgaaggtggtgcgcgcatg

SEQ ID NO: 121691 - DNA, 75 bp, synthetic construct
  source 1..75: mol_type = other DNA
cagccgctgatggatattctgtacacggtgaaaagcgtcacgggagcgttgcgtcgctgggtggaagctaacccg

SEQ ID NO: 121692 - DNA, 75 bp, synthetic construct
  source 1..75: mol_type = other DNA
ctcttatatccagcgacaccacttacctataaaaatcatttggtcattctgaaggcgttggttattttaaagcaa

SEQ ID NO: 121693 - DNA, 75 bp, synthetic construct
  source 1..75: mol_type = other DNA
ggcagcgatctctatcgcgccgggcagtccgtagaacgcaccgcgcagcaggcagcagcatttgttaaggcgtat

SEQ ID NO: 121694 - DNA, 75 bp, synthetic construct
  source 1..75: mol_type = other DNA
gccggtaagaaagaccagccgggcgacctgttctcagtggcaacccttgccgagctggaattcgaagacctgccc

SEQ ID NO: 121695 - DNA, 75 bp, synthetic construct
  source 1..75: mol_type = other DNA
gcgaggatggctactggacgcacccagaatacgccaacctgtttggggatagagaggcaatttcagctgatgagt

SEQ ID NO: 121696 - DNA, 75 bp, synthetic construct
  source 1..75: mol_type = other DNA
ttcagtgccattgaaaccgaactcgccgacgtcaaaaaagcgctggctgaacaggccgacgccacctcgcagcaa

SEQ ID NO: 121697 - DNA, 75 bp, synthetic construct
  source 1..75: mol_type = other DNA
cggcaaatgtcacctcatcgggctggcggtaaccgatgacccggcaagcctcggtaccgaatacctgcaattctg

SEQ ID NO: 121698 - DNA, 75 bp, synthetic construct
  source 1..75: mol_type = other DNA
cggcggcaaatgcaggcccgacgggtgttacagcagatgagtgatgaacggttgagggagactgggttaagctgg

SEQ ID NO: 121699 - DNA, 75 bp, synthetic construct
  source 1..75: mol_type = other DNA
cggcggcaaatgcaggcccgacgggtgttacagcagatgagtgatgaacggttgagggagaatgggttacgctgg

SEQ ID NO: 121700 - DNA, 75 bp, synthetic construct
  source 1..75: mol_type = other DNA
atgttactcatctcctggtatgtgattcgccggatggttagcaacatgtatgttctgcaaagctcgttgcagtgg

SEQ ID NO: 121701 - DNA, 75 bp, synthetic construct
  source 1..75: mol_type = other DNA
gcgatactgccgcacgaagccggatattcgctgaaagcgatcgccgtgacgctatggcgactggggttaagcagg

SEQ ID NO: 121702 - DNA, 75 bp, synthetic construct
  source 1..75: mol_type = other DNA
tgcggcacagtttcaacagaataaccctgctgtcatggcttggaagcctggcgttgctgacaaccgcagcgaccg

SEQ ID NO: 121703 - DNA, 75 bp, synthetic construct
  source 1..75: mol_type = other DNA
cagacaatgttggcggggctgctagggcagcctaccgattgtatatgctatttaagcaaaaatttgctaatagtg

SEQ ID NO: 121704 - DNA, 75 bp, synthetic construct
  source 1..75: mol_type = other DNA
acccgacgagtgttacagcagatgagtgatgagcggttgagggatatcgggttacgcagggaggatgtggagtga

SEQ ID NO: 121705 - DNA, 75 bp, synthetic construct
  source 1..75: mol_type = other DNA
cggcggcaaatgcaggcccgacgggtgttacagcagatgagtgatgaacggttgagggaaagtgggttaggctgg

SEQ ID NO: 121706 - DNA, 75 bp, synthetic construct
  source 1..75: mol_type = other DNA
tgagctggaattcgaggacgtccccgataccatgctcaacagcctgaccgacaaggtcaaagccattttcaaccg

SEQ ID NO: 121707 - DNA, 75 bp, synthetic construct
  source 1..75: mol_type = other DNA
ctggttcagctttgccatgagtggtctctgttgcttggctggttgcctgcatcctggaatgaacagacgctgccg

SEQ ID NO: 121708 - DNA, 75 bp, synthetic construct
  source 1..75: mol_type = other DNA
attcttctaaagggaagaattgaagaaattcaaaaagatattgatgaggcaaatgcttctaaaagaaaactgctt

SEQ ID NO: 121709 - DNA, 75 bp, synthetic construct
  source 1..75: mol_type = other DNA
ggcagtaccctagactacatctatcgcaaccagcctcagggcagcacctcgttggggcgcctcattgataaaaac

SEQ ID NO: 121710 - DNA, 75 bp, synthetic construct
  source 1..75: mol_type = other DNA
gtgatttaattaccagaaataatcttgaagaagtttactcacctttattacgactactgaaaaaaataaaagaca

SEQ ID NO: 121711 - DNA, 75 bp, synthetic construct
  source 1..75: mol_type = other DNA
ggcaaacaaccttccggaactgcagcgccagctaaagctgacagcgggcaatgatgcgctcggttccatgcagaa

SEQ ID NO: 121712 - DNA, 75 bp, synthetic construct
  source 1..75: mol_type = other DNA
tgctgacgctgattggtttctgagatgtttcatcaaatggagtaaagagaagtcaccttattttattaatgacac

SEQ ID NO: 121713 - DNA, 75 bp, synthetic construct
  source 1..75: mol_type = other DNA
cgcggcattcattgccagtttgcctatcaactgaactccacaccagaaaacgaaacggtgcgctttaccttgtat

SEQ ID NO: 121714 - DNA, 75 bp, synthetic construct
  source 1..75: mol_type = other DNA
ggattggcttgattaaaagaaataactttgccaaacagttgatacttgatgagttatcacaagaggatatgaagt

SEQ ID NO: 121715 - DNA, 75 bp, synthetic construct
  source 1..75: mol_type = other DNA
aacacgatccttattgctgcgctgataatatggaccgcaaacctattgaagatgtgatcttcgaaattaataact

SEQ ID NO: 121716 - DNA, 75 bp, synthetic construct
  source 1..75: mol_type = other DNA
agtttggcgatgacgcagcgaaactggcaaacaacctgccggaactacagcgccagctaaaactgacagcgggca

SEQ ID NO: 121717 - DNA, 75 bp, synthetic construct
  source 1..75: mol_type = other DNA
cgctggatatgtggacggagcggttagggatactggcgggaacacatgaaaacgtaaccacgctaccagtagcca

SEQ ID NO: 121718 - DNA, 75 bp, synthetic construct
  source 1..75: mol_type = other DNA
ccggaatgatgggcgttgctgccgcgccagcagagtttccaccgttgcaccctttggcacttcccgcgaaaggcg

SEQ ID NO: 121719 - DNA, 75 bp, synthetic construct
  source 1..75: mol_type = other DNA
ctgcaactttcagagttatggaggctgcagccgggtgacggggtgaatgtccaggggcagttagtaagacgcatc

SEQ ID NO: 121720 - DNA, 75 bp, synthetic construct
  source 1..75: mol_type = other DNA
tataaccaggaattgtcgaaacaggaggtgcgcctgaagcgactgggggaagctcagcgcaggatgaatgcggcg

SEQ ID NO: 121721 - DNA, 75 bp, synthetic construct
  source 1..75: mol_type = other DNA
agctcgcccgccgcattcatctctccacccgccagttgctgctccagttgcggcctcccgcgcttgatgaactga

SEQ ID NO: 121722 - DNA, 75 bp, synthetic construct
  source 1..75: mol_type = other DNA
gtcgaatcatcacggcgcgctgattcaggcggggcgacgccggtctatctggaagcttcacgcaacccgtttggt

SEQ ID NO: 121723 - DNA, 75 bp, synthetic construct
  source 1..75: mol_type = other DNA
gttgaacgccaagttatccgaaaacctgcaacgcagaatttcgagaaaatcaataacttagggtttgctgttact

SEQ ID NO: 121724 - DNA, 75 bp, synthetic construct
  source 1..75: mol_type = other DNA
ataaagaagtcctagaggataaaataaaaaaaatacctaacactgaaacaaaaaaaatatttcttatggctatca

SEQ ID NO: 121725 - DNA, 75 bp, synthetic construct
  source 1..75: mol_type = other DNA
tgttaagatgtttaaagcacttgaattagatgcgctgaaatctcagcgtatctattttgaccaatatggacgcga

SEQ ID NO: 121726 - DNA, 75 bp, synthetic construct
  source 1..75: mol_type = other DNA
gctatcaactggcaaacggcatgggggcgatgctcgatgccgacgatgcgctaagccgccacgaatggttgatcg

SEQ ID NO: 121727 - DNA, 75 bp, synthetic construct
  source 1..75: mol_type = other DNA
gaaggcgtgttgacgcgcatgatccagcgtgaccctgaactgagcggcgttggattggtgatcctcgatgagttt

SEQ ID NO: 121728 - DNA, 75 bp, synthetic construct
  source 1..75: mol_type = other DNA
aacgattggacttgttcgtgcgctgaccgtgggcgtggcgtaccagacgacggtaggtggcattatgaacacttc

SEQ ID NO: 121729 - DNA, 75 bp, synthetic construct
  source 1..75: mol_type = other DNA
acgtagtcagcaactgttaaaacgtttaaacgtacgcggcggtgaggcagacagttcgcttatcgcgccgctact

SEQ ID NO: 121730 - DNA, 75 bp, synthetic construct
  source 1..75: mol_type = other DNA
agctggctggatcaaccgccaacggtgaatctactggccgcgaaacgcctgttacggatgctgggggcgctggac

SEQ ID NO: 121731 - DNA, 75 bp, synthetic construct
  source 1..75: mol_type = other DNA
gcgagaacaagcaactgattactctacatcatcgcaaatccgtagatagccattcaatgacgcgtctgttaggtg

SEQ ID NO: 121732 - DNA, 75 bp, synthetic construct
  source 1..75: mol_type = other DNA
tccggtgctggttgaattgggtgttcttgaagaagaacaaaaagcagctttgacactgcctaaaccgaataacac

SEQ ID NO: 121733 - DNA, 75 bp, synthetic construct
  source 1..75: mol_type = other DNA
tgacgcaacgtgccgggcgtgccgggcgtctggagccgggtatctgcctgcatttaatcgccaaagaacaagcag

SEQ ID NO: 121734 - DNA, 75 bp, synthetic construct
  source 1..75: mol_type = other DNA
ttcctggttgctggagaaactcggcattgtcagtaaagaggccgcaaaggcaaaactaccggaaagcgtgacgcg

SEQ ID NO: 121735 - DNA, 75 bp, synthetic construct
  source 1..75: mol_type = other DNA
ttattacaacctcatgaaaataactatcaggaaattctggaggaaacaataaaagaaatacctgatactgaaacg

SEQ ID NO: 121736 - DNA, 75 bp, synthetic construct
  source 1..75: mol_type = other DNA
aaagaagaaaatgaaaaactgcgtcaggaacgtttagccgttaacccgtatgcagactttgaagaaaccgactgg

SEQ ID NO: 121737 - DNA, 75 bp, synthetic construct
  source 1..75: mol_type = other DNA
aagacaattaacctgaaatctacaggggggattgttgaagcgtcgttgccaactttcttaatgaaagatggcaaa

SEQ ID NO: 121738 - DNA, 75 bp, synthetic construct
  source 1..75: mol_type = other DNA
agcgatcacttataaccgctctgattgctcatatctttctgatgaacaattcagcgaagcgccacaggttatcga

SEQ ID NO: 121739 - DNA, 75 bp, synthetic construct
  source 1..75: mol_type = other DNA
ctccatgacatgcaggtgcgtgttgatactagtgaacggcaaagttttgatgctacatgtcgctttcaatatatt

SEQ ID NO: 121740 - DNA, 75 bp, synthetic construct
  source 1..75: mol_type = other DNA
aaaggtaatattaaacgtaagatcaaaacgcataataaacaggttatctaccatgtcgtccgactgacggataat

SEQ ID NO: 121741 - DNA, 75 bp, synthetic construct
  source 1..75: mol_type = other DNA
tgccttttcgtgaaggtgagcggcgtcgtcagaaaaccacgctgacagagcagaaatacagccgccagcgggaac

SEQ ID NO: 121742 - DNA, 75 bp, synthetic construct
  source 1..75: mol_type = other DNA
acgtctttatcctgtgaagtatcagcctgtggagagagcttcaaaacagcttaaaactattatagagcttattaa

SEQ ID NO: 121743 - DNA, 75 bp, synthetic construct
  source 1..75: mol_type = other DNA
aagtccagaatcgttcggggatgggaggcgtgagctatcaggggccgaatggttacggcacgctctgcccgaaag

SEQ ID NO: 121744 - DNA, 75 bp, synthetic construct
  source 1..75: mol_type = other DNA
tgatggccctgcggccttgttcacagcaatgagccgcgttctggttaacggtggcaacgaccagcaggatctctc

SEQ ID NO: 121745 - DNA, 75 bp, synthetic construct
  source 1..75: mol_type = other DNA
acctcgatggtctgaacatccactgcgctatcgtagacgagctgcatgctcacaaaacccgtgacgtctgggacg

SEQ ID NO: 121746 - DNA, 75 bp, synthetic construct
  source 1..75: mol_type = other DNA
ggcggcaaaactctggcgaaccgataacggacatgttcatgctgattttaaattctggctcccggaaggacggct

SEQ ID NO: 121747 - DNA, 75 bp, synthetic construct
  source 1..75: mol_type = other DNA
cagtgtggcactcacggaactggcgcaacaagccgggttacccaattccacgacccaccgcctgctaaccacgat

SEQ ID NO: 121748 - DNA, 75 bp, synthetic construct
  source 1..75: mol_type = other DNA
ttaaaacgattctcgaacttatcagacgtggagacgtgactgaaattgttcatgctggcgaccctgatgaagaag

SEQ ID NO: 121749 - DNA, 75 bp, synthetic construct
  source 1..75: mol_type = other DNA
ctgcctccttccccttcccggtgatgcagcagagcgcttgttcccgtcggtgcggtttcgtgtcagggaacgcag

SEQ ID NO: 121750 - DNA, 75 bp, synthetic construct
  source 1..75: mol_type = other DNA
cagaaatacagccgccagcgggaacgtgagaattcatcgttcgtgtccatctatatagatgggcgcgattgtgag

SEQ ID NO: 121751 - DNA, 75 bp, synthetic construct
  source 1..75: mol_type = other DNA
tcagtaactcttcttgtccggctataccgttggggccttatgatgtctcctggaatgaaagtcgggttgtgcgtg

SEQ ID NO: 121752 - DNA, 75 bp, synthetic construct
  source 1..75: mol_type = other DNA
accaccttaatcccttttttaatccgccttgtctatacaccaaaggtatatgttgttaaaggaaagaataaatgg

SEQ ID NO: 121753 - DNA, 75 bp, synthetic construct
  source 1..75: mol_type = other DNA
cagccattaagtcacattttaaatattattctgtctactggaatagtggtaatttctattcaatagctgccagca

SEQ ID NO: 121754 - DNA, 75 bp, synthetic construct
  source 1..75: mol_type = other DNA
tacggcagactgacggagaagacggaccgcatcccgacgggtgtgatacggacggacgacgagcggacccaccac

SEQ ID NO: 121755 - DNA, 75 bp, synthetic construct
  source 1..75: mol_type = other DNA
tgcttgctgcgcttgttcgtgtcgcggattttgtcactgatccaacgattaaaaaattgttgaaggataaggata

SEQ ID NO: 121756 - DNA, 75 bp, synthetic construct
  source 1..75: mol_type = other DNA
ttgtggtgcgcgtcgatgccagcgcattgcagcccattgattcaacgtgtcgctttcagtatgtgttgaatatgt

SEQ ID NO: 121757 - DNA, 75 bp, synthetic construct
  source 1..75: mol_type = other DNA
tggtttcaacccagattaccactacggacctgggagatgtgggggctacctatgtaggtcctaaatacaataact

SEQ ID NO: 121758 - DNA, 75 bp, synthetic construct
  source 1..75: mol_type = other DNA
cagatgtatacgcctatggggattccaagcttcctggcaaaattagtgtttagcctggaggttgttaccccagca

SEQ ID NO: 121759 - DNA, 75 bp, synthetic construct
  source 1..75: mol_type = other DNA
gtttgttactgctgatgtttgcgggggagggcgcgcaggcggcgaaaaagattgccacgttgcatacgatttcgg

SEQ ID NO: 121760 - DNA, 75 bp, synthetic construct
  source 1..75: mol_type = other DNA
aaacaactgcacgacatggtggtgcaggtggataccagcagcaggcagccgattgattccacctgccgcttccag

SEQ ID NO: 121761 - DNA, 75 bp, synthetic construct
  source 1..75: mol_type = other DNA
agaacttgattctgcttgtctggcgaaattgccgcagacggagcaatcgccagctgctccaaaaaccctcgcgca

SEQ ID NO: 121762 - DNA, 75 bp, synthetic construct
  source 1..75: mol_type = other DNA
tgatttaaaagtcactgtaaccggggatgtgcaggggtgtccgtggttagtgtcaagccagattactaccacgga

SEQ ID NO: 121763 - DNA, 75 bp, synthetic construct
  source 1..75: mol_type = other DNA
tgatgcagcaaaaagaagtggtcgccacgccgaaggcgctgaaaaaagcgctggaacatgaaaaaacgccggaac

SEQ ID NO: 121764 - DNA, 75 bp, synthetic construct
  source 1..75: mol_type = other DNA
atctgcaatccacaggggggatcattgaggcaaccctgtcgacctatttaatggaaagtcagaagttgtgtgatg

SEQ ID NO: 121765 - DNA, 75 bp, synthetic construct
  source 1..75: mol_type = other DNA
ggcaattacttgttgatgaggtcctggaatatgacagtaatacaaaacctgttaaacgcgccctgataaacgata

SEQ ID NO: 121766 - DNA, 75 bp, synthetic construct
  source 1..75: mol_type = other DNA
aacttccagcagtctactatctctaccagcgtaacggcgtctactacttccgtcttcgggtcagacaatcaaaca

SEQ ID NO: 121767 - DNA, 75 bp, synthetic construct
  source 1..75: mol_type = other DNA
aggactgttgatgtagatattagattgactacagagggacaggattttgcctgtgcactagagagcaaagatgtt

SEQ ID NO: 121768 - DNA, 75 bp, synthetic construct
  source 1..75: mol_type = other DNA
atgttcacgcgtcgggcgcgcacctggtcctggcttggacttgatggctgggaagcgcaaaacaaagccctggcc

SEQ ID NO: 121769 - DNA, 75 bp, synthetic construct
  source 1..75: mol_type = other DNA
gctttggtgcttccagcctgctggcaagcctgctgaaagcgctgggccacggcgacggtaagagcgccagcagct

SEQ ID NO: 121770 - DNA, 75 bp, synthetic construct
  source 1..75: mol_type = other DNA
gcagctggcattttttgtcgcaggcaaagaagctaccgctgcctgggttgaagaagcgaccaactcaggttgcct

SEQ ID NO: 121771 - DNA, 75 bp, synthetic construct
  source 1..75: mol_type = other DNA
ccgctgaattcgactggacgcaggcgcagctggcattttttgtcgcaggcaaagaagctaccgctgcctgggttg

SEQ ID NO: 121772 - DNA, 75 bp, synthetic construct
  source 1..75: mol_type = other DNA
gcctagcattaccatagcgagcctctttgagcaatacgaagcggagaacgctcagaactggaagcctgctacctt

SEQ ID NO: 121773 - DNA, 75 bp, synthetic construct
  source 1..75: mol_type = other DNA
tgctggtgttgctattaggggcgctgatgggaacgctcgccggggtgctacgtggcgtgtttaacgtaccaagtt

SEQ ID NO: 121774 - DNA, 75 bp, synthetic construct
  source 1..75: mol_type = other DNA
cgatgtgggccacgacctgctgataagcagccagcaggacaccagtaagtacgacagtaaacagaccagcgtggc

SEQ ID NO: 121775 - DNA, 75 bp, synthetic construct
  source 1..75: mol_type = other DNA
acacgattctggtcgttttgattacaccaaatgtgcttaattccggctccagtgcagtaataaaaaatgtgaact

SEQ ID NO: 121776 - DNA, 75 bp, synthetic construct
  source 1..75: mol_type = other DNA
tattaacggtgtctcgtttgatggttctaaaaacattgagttaacggcggaagatttaaatctacaggaattcat

SEQ ID NO: 121777 - DNA, 75 bp, synthetic construct
  source 1..75: mol_type = other DNA
ttgaaccgtacaaccatcaccaagctttttgatgagacgtgtgatgcaattcgagacaggatgcacacattaact

SEQ ID NO: 121778 - DNA, 75 bp, synthetic construct
  source 1..75: mol_type = other DNA
atatagcctcagaaaagggcatgtttcattatatgcaattgattgagcaaggttttatcagcaatatgaagatgg

SEQ ID NO: 121779 - DNA, 75 bp, synthetic construct
  source 1..75: mol_type = other DNA
aacagcgaagtggaaggcgcggtaaaagacgatacctttttcgccatcatcttcaccctggataaggatgatgat

SEQ ID NO: 121780 - DNA, 75 bp, synthetic construct
  source 1..75: mol_type = other DNA
ttctgtcggctgtgttcgtaatgactatggtatgccagagcaaatccagttctggtcggtggccgacaacgtccg

SEQ ID NO: 121781 - DNA, 75 bp, synthetic construct
  source 1..75: mol_type = other DNA
gataaggcatgggcaaacggaacggctgcatcccttaccggaaaaccggctacagttgaagcagcagcaactgat

SEQ ID NO: 121782 - DNA, 75 bp, synthetic construct
  source 1..75: mol_type = other DNA
accagatggttataaaggcattacgtgaagcgcgggttgctggccacatcacccaagaagagctaggcaaggcgc

SEQ ID NO: 121783 - DNA, 75 bp, synthetic construct
  source 1..75: mol_type = other DNA
tggaacgtatgatacagttcttgtacttgaagataagaaaacagggaagctgggttttccggcaagggttaagaa

SEQ ID NO: 121784 - DNA, 75 bp, synthetic construct
  source 1..75: mol_type = other DNA
ctttcagcatggaatggctacgtgtggcaactggatattcccgacctctgttatctggactatgacctgctggaa

SEQ ID NO: 121785 - DNA, 75 bp, synthetic construct
  source 1..75: mol_type = other DNA
catttgcggcaatttcgatttccggaccgatttcacgtattaccgatgatcgcgtaaccgagtttggtgcgatgg

SEQ ID NO: 121786 - DNA, 75 bp, synthetic construct
  source 1..75: mol_type = other DNA
caaaaaacgctggatatcacacagcagctacgcgaaaaatacaaagcaattacttacaaccgttcagattgttca

SEQ ID NO: 121787 - DNA, 75 bp, synthetic construct
  source 1..75: mol_type = other DNA
atggtcgcacccattcccgcaaaacgcggtagaaaacctgccgcaaccagcgcccccgcgactggacaggttcag

SEQ ID NO: 121788 - DNA, 75 bp, synthetic construct
  source 1..75: mol_type = other DNA
tatgttgcccattcgaaagtgctgtcgttgcaatcgacgggcggaacgattgagaaaacgctgcccaccttcttg

SEQ ID NO: 121789 - DNA, 75 bp, synthetic construct
  source 1..75: mol_type = other DNA
tcgcgtatcagcgttaccagcctgatttcagcctccgcccagggtaaaaaagcggtcgatgcgttagcggggcag

SEQ ID NO: 121790 - DNA, 75 bp, synthetic construct
  source 1..75: mol_type = other DNA
ctcaaaaacaaggaaggtgggccgtcttcgcctgaagaacgccagttttataaacgctgccggatagttgcccgt

SEQ ID NO: 121791 - DNA, 75 bp, synthetic construct
  source 1..75: mol_type = other DNA
cgaggttaatctggaaggaaagcgtattggctacgtgattaaaacagaaaataaagaaacccccattcactgtgg

SEQ ID NO: 121792 - DNA, 75 bp, synthetic construct
  source 1..75: mol_type = other DNA
tgggtcttggtgctgacgccaatacggtaacacgcgctgacgtgcttagagtccgtgatgtcctccagcagttac

SEQ ID NO: 121793 - DNA, 75 bp, synthetic construct
  source 1..75: mol_type = other DNA
cagcagctttctccagagccgtaatttgttagcgattgttcaccctatcctgcgcaatttaatggaagagtctgg

SEQ ID NO: 121794 - DNA, 75 bp, synthetic construct
  source 1..75: mol_type = other DNA
aaaaaggggggtttttgattggagtgcatggtgaagaaccttcagataacgcgatagtagaagcgatatttaagt

SEQ ID NO: 121795 - DNA, 75 bp, synthetic construct
  source 1..75: mol_type = other DNA
aagcgactgcatgacatggtggtgcgtgtcgataccagcagccgccagcccattgattccacctgccgcttccag

SEQ ID NO: 121796 - DNA, 75 bp, synthetic construct
  source 1..75: mol_type = other DNA
actactcggcagcatttttaaccggtagccaggccgcgtgtaaagcagcctgtaacgcctttaccgatgcagtgc

SEQ ID NO: 121797 - DNA, 75 bp, synthetic construct
  source 1..75: mol_type = other DNA
cgctggcgcgttcagttgccgatgccgtctatggcttctccatgacgcgtgcttacaccattcctgcaaaagcca

SEQ ID NO: 121798 - DNA, 75 bp, synthetic construct
  source 1..75: mol_type = other DNA
tctcaacaactggattccccctgtccttcatgcggcaaacaaattgttatcaggccgaaaggctatttctgtacc

SEQ ID NO: 121799 - DNA, 75 bp, synthetic construct
  source 1..75: mol_type = other DNA
ttactacaccatgaccggagtttttcagcgtggtgctgatgttctcagggcgaactggaaaccaggtgaatttgc

SEQ ID NO: 121800 - DNA, 75 bp, synthetic construct
  source 1..75: mol_type = other DNA
ccgacagccagtgtgcctgatgttaacgcactcagcaccgacgagcgcaatgtttacctggcgatcgcacaacac

SEQ ID NO: 121801 - DNA, 75 bp, synthetic construct
  source 1..75: mol_type = other DNA
gctggcgatgctgcgcgttgctctgtatgccgtatctggtctgttaggtgctctgcttagtccgataggtcttgt

SEQ ID NO: 121802 - DNA, 75 bp, synthetic construct
  source 1..75: mol_type = other DNA
agacactcaaactcaatatcatatcgatagtatgatcaagtcattagaagatattatttttaaacatattccgga

SEQ ID NO: 121803 - DNA, 75 bp, synthetic construct
  source 1..75: mol_type = other DNA
tatgtaccgccaccgtcagaaaccaactattcagcggcatttttaaccggtagccaggcagcgtgtaaagcggcc

SEQ ID NO: 121804 - DNA, 75 bp, synthetic construct
  source 1..75: mol_type = other DNA
gtctccagagtaagcactacacacttgatgtaggtgaagttataaacagttataatattgaccctctttgtgaat

SEQ ID NO: 121805 - DNA, 75 bp, synthetic construct
  source 1..75: mol_type = other DNA
acacccttccggcagtgaaaaaggcgctggcaaatcccaaaaataaccgtgacttcagaggactctatctcaagg

SEQ ID NO: 121806 - DNA, 75 bp, synthetic construct
  source 1..75: mol_type = other DNA
cgtgctggagaaggtgaatgcattgccgcaggataagcgcctgtctgctatgaccatgttgtttggtaaagagtt

SEQ ID NO: 121807 - DNA, 75 bp, synthetic construct
  source 1..75: mol_type = other DNA
gatctggcggtacttaaaattaatgccactggcggtttacctaccattccaatcaatgcacgtcgcgtaccgcac

SEQ ID NO: 121808 - DNA, 75 bp, synthetic construct
  source 1..75: mol_type = other DNA
tcctgtacaggatgtgaatttaaaatctggaatgagttttctggcaagaaaatcacccaggcacaggccgaaaaa

SEQ ID NO: 121809 - DNA, 75 bp, synthetic construct
  source 1..75: mol_type = other DNA
ccattatattatctgtggcaagcggctctgtgctggctgataatcactcattttctgtcggttatgcacagagta

SEQ ID NO: 121810 - DNA, 75 bp, synthetic construct
  source 1..75: mol_type = other DNA
cccattacatgcgcagagtggcggcatggatcaactgcaagggatcgtggttaacgaagtgtcgcctgatggccc

SEQ ID NO: 121811 - DNA, 75 bp, synthetic construct
  source 1..75: mol_type = other DNA
ccgacccggctatggcgaagcgtttaggcgcagcctgcggcgttgttttccagcacccgacagagaaaacgctct

SEQ ID NO: 121812 - DNA, 75 bp, synthetic construct
  source 1..75: mol_type = other DNA
aagaggctgcaaaggcgaaactgccggaaagagtgacgcgtcagcaaaccgtcgtccgtccacgcagtttctggg

SEQ ID NO: 121813 - DNA, 75 bp, synthetic construct
  source 1..75: mol_type = other DNA
tttttttcttgggttagttttaaaaatcgctgatgatattgaaaggaatagatctactaaaacgcaggtttattc

SEQ ID NO: 121814 - DNA, 75 bp, synthetic construct
  source 1..75: mol_type = other DNA
gtttcgcgtaccggttcttatctctcatcaaccgccgggatcacgcttggcgatccgatggcgtatctggtggca

SEQ ID NO: 121815 - DNA, 75 bp, synthetic construct
  source 1..75: mol_type = other DNA
ctccctgcccttactgtggtaagcagattgctatcaggccaaaaggttatttctgtacaggatgtgaatttaaaa

SEQ ID NO: 121816 - DNA, 75 bp, synthetic construct
  source 1..75: mol_type = other DNA
tcctgaattgattgaaaagcaaatgacgaaggatgcgatgggaaccatccagcgcgtgctggagaaggtgaacgc

SEQ ID NO: 121817 - DNA, 75 bp, synthetic construct
  source 1..75: mol_type = other DNA
caaggcacgatcagccgcattgatgtgctggatagcgatattcctgctgacaccggtgttaaaatcggtacaccg

SEQ ID NO: 121818 - DNA, 75 bp, synthetic construct
  source 1..75: mol_type = other DNA
agaatccgacatcaacaaagactcactttctgctcagtggttgctggtcaaaaccggaacgcagaacaccttcag

SEQ ID NO: 121819 - DNA, 75 bp, synthetic construct
  source 1..75: mol_type = other DNA
aaaaactgatggaaaatgaagggctaactttacagaaacaaaaaaccaatattgttactaaagaagagttccttt

SEQ ID NO: 121820 - DNA, 75 bp, synthetic construct
  source 1..75: mol_type = other DNA
tgcctccgttaacgccgaatttgcgcgtgaactgaaattgccgccgcatattcgtagcctcgggctgatttctgc

SEQ ID NO: 121821 - DNA, 75 bp, synthetic construct
  source 1..75: mol_type = other DNA
gatcatcatccagacgcagccaggacaaagtgcgcaggatattgcgcgggaggtggcacgccagcttgatgaacg

SEQ ID NO: 121822 - DNA, 75 bp, synthetic construct
  source 1..75: mol_type = other DNA
tattatcagaccaaaaggttatttttgcacaggatgtgaatttaaaatctggaagaacttctctggtaaggctct

SEQ ID NO: 121823 - DNA, 75 bp, synthetic construct
  source 1..75: mol_type = other DNA
gaaaactgtagcaggtgtgccggttgcactgttgcggtctggattatccggtttacgtgcggttgctgtgatgtt

SEQ ID NO: 121824 - DNA, 75 bp, synthetic construct
  source 1..75: mol_type = other DNA
tacgcttggcgatccgatggcgtatttggtggcgccgccgctggaagcgacctacggcattgatgcagcgttgaa

SEQ ID NO: 121825 - DNA, 75 bp, synthetic construct
  source 1..75: mol_type = other DNA
attcaaatcttaaacaatttaatcaaggattcgatattataatagaagacaccacatttcaaatgtactcaccta

SEQ ID NO: 121826 - DNA, 75 bp, synthetic construct
  source 1..75: mol_type = other DNA
ctacaggcgaccggggatattgcaatcgcttcccatctgctaaatcaccattcactcacggcgacccgtcgctac

SEQ ID NO: 121827 - DNA, 75 bp, synthetic construct
  source 1..75: mol_type = other DNA
gtccattattgcggataataatattcagaccctgcgtcggttcttcgatgcggagctggatgaagaaagtatccg

SEQ ID NO: 121828 - DNA, 75 bp, synthetic construct
  source 1..75: mol_type = other DNA
ttgaactgctctgtaaaattcgcacaggagaaacactgacgacaaaagaagtggttgttaatgagaagaaaacaa

SEQ ID NO: 121829 - DNA, 75 bp, synthetic construct
  source 1..75: mol_type = other DNA
cagaagaatgctgttgtcagtaatgccagtcaggcaatccaagaacagcgcatgaaaaatatcttaaacagaata

SEQ ID NO: 121830 - DNA, 75 bp, synthetic construct
  source 1..75: mol_type = other DNA
tacagttgaagcggcagcaactgatgataaaaaaacggctgcgccgttgccgtttaacctggtcagactccagca

SEQ ID NO: 121831 - DNA, 75 bp, synthetic construct
  source 1..75: mol_type = other DNA
tcatattatcgaatcacaaccgccggaaaactataatcctgaatacaaagcctggaaggttgaaacgcttccttt

SEQ ID NO: 121832 - DNA, 75 bp, synthetic construct
  source 1..75: mol_type = other DNA
tcctgttggtacagcaatatcaagctgcgtgccgaccgccaggtaataagcaaaagctacggcctagatgaaaaa

SEQ ID NO: 121833 - DNA, 75 bp, synthetic construct
  source 1..75: mol_type = other DNA
gacggttgaagagtttattaatgagctttacggtgaactgagcggcatgattacagatgttgacctgggcgagat

SEQ ID NO: 121834 - DNA, 75 bp, synthetic construct
  source 1..75: mol_type = other DNA
gtatagcggttaatcctgatatgacagcattatggtctgaaaaacagtctgccattgaaaatggcgacctgacgg

SEQ ID NO: 121835 - DNA, 75 bp, synthetic construct
  source 1..75: mol_type = other DNA
gcgtgctgatgtgaccgaaattattcatgcaggcgatcctgatgacgaaggacagctacttgtcgatgaggtcct

SEQ ID NO: 121836 - DNA, 75 bp, synthetic construct
  source 1..75: mol_type = other DNA
ccagttaccggattcaacatgccccggcgttaccagtgtgccttctaccagcccttacggttgggattgttatga

SEQ ID NO: 121837 - DNA, 75 bp, synthetic construct
  source 1..75: mol_type = other DNA
gctgcaaggtatgcgcaaaccggttaacgacctgtcccgtggcgcactggttgacgatatcgtctacaccatcgc

SEQ ID NO: 121838 - DNA, 75 bp, synthetic construct
  source 1..75: mol_type = other DNA
ttattacattattcaaacagttgcccataccccctgaaaaagaaatcattgaaataataaccgcgcagaatagcg

SEQ ID NO: 121839 - DNA, 75 bp, synthetic construct
  source 1..75: mol_type = other DNA
ttatgggttggccgcaagtcagaccatttagcggtgcctatctgtgtgtggtatattttttcatcatgagtggct

SEQ ID NO: 121840 - DNA, 75 bp, synthetic construct
  source 1..75: mol_type = other DNA
cctgtccttcatgcggcaaacaaattgttatcaggccgaaaggctatttctgtaccggatgtgaatttaaaatat

SEQ ID NO: 121841 - DNA, 75 bp, synthetic construct
  source 1..75: mol_type = other DNA
taactttcgaatgtaaagaaattgagaattgcaattttactaaggcaacagttgataatgtcatatttaaatgtc

SEQ ID NO: 121842 - DNA, 75 bp, synthetic construct
  source 1..75: mol_type = other DNA
agatatagctgttaatccagatatgacagcattatgggctgaaaagcaggctgccattgaaaatggcgacctgac

SEQ ID NO: 121843 - DNA, 75 bp, synthetic construct
  source 1..75: mol_type = other DNA
cattttgaactgaaatatttcagaagcaataaaaatttaggaccatcaggtgctagaaatattggagttagttta

SEQ ID NO: 121844 - DNA, 75 bp, synthetic construct
  source 1..75: mol_type = other DNA
gcggatattcagaaaacagggttctttgtgtatggcactgggtaagggctttttagttatagctattctttgtgg

SEQ ID NO: 121845 - DNA, 75 bp, synthetic construct
  source 1..75: mol_type = other DNA
ggttctgacgagtcgcttactctggatgagcatgagcggatattcagaaaacagggttctttgtgtatggcactg

SEQ ID NO: 121846 - DNA, 75 bp, synthetic construct
  source 1..75: mol_type = other DNA
cccggcagaagtgcgtgccggcctggatgcgatggttgcgcatattgaaaatggtgcggcgttccagtgggcgaa

SEQ ID NO: 121847 - DNA, 75 bp, synthetic construct
  source 1..75: mol_type = other DNA
gttattattgagactcatagtgatcatcttcttaatggcataagagtaattgcacgcacagatccaacttttgat

SEQ ID NO: 121848 - DNA, 75 bp, synthetic construct
  source 1..75: mol_type = other DNA
ctgttgagcagattgaagttgctgaagcggcaaaaagaaatctgatagggaacttaccagttgaaccattaaaga

SEQ ID NO: 121849 - DNA, 75 bp, synthetic construct
  source 1..75: mol_type = other DNA
cgtaaaaatgctaaatcaacgctttgctctggcgtggggctttatatggctggcgccgacggcgagggcggtgcg

SEQ ID NO: 121850 - DNA, 75 bp, synthetic construct
  source 1..75: mol_type = other DNA
gcgtgacgcgtcagcaacccgcaacagtgaatgcagacggcaaagtgatgatgccatcaggtggttttccgtcat

SEQ ID NO: 121851 - DNA, 75 bp, synthetic construct
  source 1..75: mol_type = other DNA
tttagccaaaatattcttgatacagttgacttctcgcagagtcaacttggtcatagtaattttcgcgaatgtcag

SEQ ID NO: 121852 - DNA, 75 bp, synthetic construct
  source 1..75: mol_type = other DNA
gatagactaatactgaaagatggtaatccaaacaaagacgacccaagaatacatcataattataataatgtcagg

SEQ ID NO: 121853 - DNA, 75 bp, synthetic construct
  source 1..75: mol_type = other DNA
gcgcgacagggcgtggagctgagccgcaataccctggtgcgctgggtatcagaaatggcagacaaactccgtcct

SEQ ID NO: 121854 - DNA, 75 bp, synthetic construct
  source 1..75: mol_type = other DNA
aatctttattactatacttctgacattttttgtccctaaattatatgatatacgttggttgttggctgtttcggt

SEQ ID NO: 121855 - DNA, 75 bp, synthetic construct
  source 1..75: mol_type = other DNA
attggcgatatccgcatcactggtggagatggaggcgacggtcagtccggaaatatcggcgtcagcggtgaaggc

SEQ ID NO: 121856 - DNA, 75 bp, synthetic construct
  source 1..75: mol_type = other DNA
tgccacaccggttccttttgatatttcacttcaaaactgcgttcgtgtgactaatattgagacaaaattagtttc

SEQ ID NO: 121857 - DNA, 75 bp, synthetic construct
  source 1..75: mol_type = other DNA
cgattcagcacgctatcgaaagttgctgatgatgaaacaccatggaatcaggtgttcaccagtgcacattatcca

SEQ ID NO: 121858 - DNA, 75 bp, synthetic construct
  source 1..75: mol_type = other DNA
ttattattgtgcatctgttaggtacacatattaaatataaataccgctatccggaaaataacggcaagtttgatg

SEQ ID NO: 121859 - DNA, 75 bp, synthetic construct
  source 1..75: mol_type = other DNA
cctatggcgcaggccaaggtataaatgagcatagttattttatcaaaatcgatttcgatctgctcaatgtcaagt

SEQ ID NO: 121860 - DNA, 75 bp, synthetic construct
  source 1..75: mol_type = other DNA
cactaacagcacgtcagaaacgcaggctgccacaccaaaagctgtgaaggctgtatatgaccttgccaatggaaa

SEQ ID NO: 121861 - DNA, 75 bp, synthetic construct
  source 1..75: mol_type = other DNA
gctttctggtgtttctctatatctggctgccgttcatgatcctgcccgtgcaggcggcgcttgagcgtttgccgc

SEQ ID NO: 121862 - DNA, 75 bp, synthetic construct
  source 1..75: mol_type = other DNA
gtttacccccgtcactgctgcaggcatcggcagatctcggcgcgcgcccacggcaaactttccgctatgtggtgt

SEQ ID NO: 121863 - DNA, 75 bp, synthetic construct
  source 1..75: mol_type = other DNA
cgctactcgttttcccagaccgatatcaccgatgccgctgccgtggcggcccagttcagcgagttccgcccggat

SEQ ID NO: 121864 - DNA, 75 bp, synthetic construct
  source 1..75: mol_type = other DNA
ctgattgattccgaagccaatatttctggcgcactggagcggatgcgctctgaaagtgctacccatgcgcattga

SEQ ID NO: 121865 - DNA, 75 bp, synthetic construct
  source 1..75: mol_type = other DNA
agaaacgcaggctgccacaccaaaggcagtgaaggcggcatatgaccttgcagcaggtaaggcacctgtcagtca

SEQ ID NO: 121866 - DNA, 75 bp, synthetic construct
  source 1..75: mol_type = other DNA
tggtcatgagttctcacaaagtgtactttttgttatttttgaaacaaataccagtgaggcaggagaatttttaag

SEQ ID NO: 121867 - DNA, 75 bp, synthetic construct
  source 1..75: mol_type = other DNA
gtgcaactcagcagcgccactaacagcacgtcagaaacgcaggctgccacaccaaaagccgtgaaggctgtatat

SEQ ID NO: 121868 - DNA, 75 bp, synthetic construct
  source 1..75: mol_type = other DNA
gtgaatatgacactaacgtgctgaagccgttccgggaagtgctgaatgaccctgcaccaaagaaactgatcatcg

SEQ ID NO: 121869 - DNA, 75 bp, synthetic construct
  source 1..75: mol_type = other DNA
atatttttcatggtacaatccaagcgaaagcatattataccaaagttgtaacaatgccaacacatccagcaaata

SEQ ID NO: 121870 - DNA, 75 bp, synthetic construct
  source 1..75: mol_type = other DNA
gtgctgtgctggatgttgaagatcccatcaccgttgcttataacctggaagtctcctcaccgggtctcgatcgcc

SEQ ID NO: 121871 - DNA, 75 bp, synthetic construct
  source 1..75: mol_type = other DNA
acagttaccgtcgaaggtaaagtcgaaggtaaagatgaagtgttcgcgctgagtaatatccagaaggcgaacctg

SEQ ID NO: 121872 - DNA, 75 bp, synthetic construct
  source 1..75: mol_type = other DNA
ggggattcagcttcttgataaggataaacatgagctgaaaattaatgtgccgacaacaattgcgttaatgccggg

SEQ ID NO: 121873 - DNA, 75 bp, synthetic construct
  source 1..75: mol_type = other DNA
attcaggtcttgtccgcatggttcctgcttccacctttaattatcaaggtgttttacttacaggaattgttgatg

SEQ ID NO: 121874 - DNA, 75 bp, synthetic construct
  source 1..75: mol_type = other DNA
tttaaagaagagctcgtacgaaagtacgggcttttttttcgtatattgcacacaccgggtgcccccgcccacgtc

SEQ ID NO: 121875 - DNA, 75 bp, synthetic construct
  source 1..75: mol_type = other DNA
ggtggaatagattctgaccgtggaagttatcgaaaaattaaggtgttacgacaaaatagagtaatacagcaaatt

SEQ ID NO: 121876 - DNA, 75 bp, synthetic construct
  source 1..75: mol_type = other DNA
atgcctatttctgcttatgttggttctttaggtagtggtaaatcatacgaggttgtttctagtgttattgtacct

SEQ ID NO: 121877 - DNA, 75 bp, synthetic construct
  source 1..75: mol_type = other DNA
cccaatacgcggttcgataaaccaggtaaatcgccgtttatgtatatggatctggtgccgaaatatgccgatgaa

SEQ ID NO: 121878 - DNA, 75 bp, synthetic construct
  source 1..75: mol_type = other DNA
atagaagatattcctttaagttcagctttaattgatgagttgttagatggcgtgtcacttgatgatgttataaaa

SEQ ID NO: 121879 - DNA, 75 bp, synthetic construct
  source 1..75: mol_type = other DNA
atgaagaaattcttcagacattttctttttttaattctgtgcttgagttgttataccgcgagtgctggcactgat

SEQ ID NO: 121880 - DNA, 75 bp, synthetic construct
  source 1..75: mol_type = other DNA
aatatgctgaaaggcgggatttccggccgcagtgcaaaaggaaaacgtatccatacccgggccattcacaacatc

SEQ ID NO: 121881 - DNA, 75 bp, synthetic construct
  source 1..75: mol_type = other DNA
tgtttgaccggatagaggagaagcatgatgccatgcagtcgctggtcctggcgccaccggcacgccaggcgctgg

SEQ ID NO: 121882 - DNA, 75 bp, synthetic construct
  source 1..75: mol_type = other DNA
attttcgcgccagacggacaggcagtactacatgaatcagcagcgaacacaaagtgcgcgtgaatatgacactaa

SEQ ID NO: 121883 - DNA, 75 bp, synthetic construct
  source 1..75: mol_type = other DNA
ccaggagaatatgctgaaaggcgggatttccggtcgcagtgcaaaaggaaaacgtatccatacccgggccattca

SEQ ID NO: 121884 - DNA, 75 bp, synthetic construct
  source 1..75: mol_type = other DNA
ctgttgcgtaagcgccgtgagcaatgggtggaaccactatggaaaagtattttgagcaacaaaggattaatgccg

SEQ ID NO: 121885 - DNA, 75 bp, synthetic construct
  source 1..75: mol_type = other DNA
gtatcacttccccgaaaaattgatcccgctgaccatcctcaacgccctggcgggtaaaccgctgccggtgtatgg

SEQ ID NO: 121886 - DNA, 75 bp, synthetic construct
  source 1..75: mol_type = other DNA
gtgatcggcaccttcactctgctggaagcggcccgtcactactggtccgggcttggggaggagcagaagcaggct

SEQ ID NO: 121887 - DNA, 75 bp, synthetic construct
  source 1..75: mol_type = other DNA
ccagaactatacgtacatccccaccatcaccgtactggagagcctgcagcgggaaggctttcagccgttcttcgc

SEQ ID NO: 121888 - DNA, 75 bp, synthetic construct
  source 1..75: mol_type = other DNA
atggcgatgaatgtattgcaatcaccttcacgtccaggtctgggtaaggtgtccggtttcttctggcgtaatccg

SEQ ID NO: 121889 - DNA, 75 bp, synthetic construct
  source 1..75: mol_type = other DNA
gcagatgctggggtatgcgtcgctggctgaggttccggcggaacagctggacggcaaaagtgagcgcattcagca

SEQ ID NO: 121890 - DNA, 75 bp, synthetic construct
  source 1..75: mol_type = other DNA
cacaggcggcactgacttaccgttatggtgacgaacatcagctgccacaacagcggacatcctcacgcaacgacg

SEQ ID NO: 121891 - DNA, 75 bp, synthetic construct
  source 1..75: mol_type = other DNA
attctgaccagcgccggcagcgtgagcgataaaattgctgcgtttgaaaaactggcggcatcaaccagtaccgaa

SEQ ID NO: 121892 - DNA, 75 bp, synthetic construct
  source 1..75: mol_type = other DNA
tgacgaacatcagcccgtcaccaccgccgacattctgacgccgcgacgccgggaggattacggtaaggacctgtg

SEQ ID NO: 121893 - DNA, 75 bp, synthetic construct
  source 1..75: mol_type = other DNA
aggcggcactgacttaccgttatggtgatgagcatcaaccggtcaccaccgccgacattctgacaccgcgacgcc

SEQ ID NO: 121894 - DNA, 75 bp, synthetic construct
  source 1..75: mol_type = other DNA
gaatatccataccgtgataccgcctggattgaggacatggggcgagggacgcggcgatttattatccgtggtttt

SEQ ID NO: 121895 - DNA, 75 bp, synthetic construct
  source 1..75: mol_type = other DNA
aggtgtgaaacggggggaggagctggcggaggccagcggtgatctgtggcgtgatgcccgctgggccatcagccg

SEQ ID NO: 121896 - DNA, 75 bp, synthetic construct
  source 1..75: mol_type = other DNA
tgacgaacatcagcccgtcaccaccaccgacattctgacaccacgacgccgggaggattacggtaaggacctatg

SEQ ID NO: 121897 - DNA, 75 bp, synthetic construct
  source 1..75: mol_type = other DNA
gggctggggctgtttttactgctgcttggcccgctaatgtggtttggcattgtctatttcggctcgctgctgacg

SEQ ID NO: 121898 - DNA, 75 bp, synthetic construct
  source 1..75: mol_type = other DNA
ttacgacccgagaggcaaagacgatacaacaggaggagtttacccggatcaagatacaggtataacataccctct

SEQ ID NO: 121899 - DNA, 75 bp, synthetic construct
  source 1..75: mol_type = other DNA
tggtgacgaacatcggcccgtcaccaccgccgacattctgaccccacgacgccgggaggattacggtaaggacct

SEQ ID NO: 121900 - DNA, 75 bp, synthetic construct
  source 1..75: mol_type = other DNA
gtcggcagatctcggtgcgcgccctcgacaaaccttccgctatgtcgtgttgccgctggcgatcccggggattgc

SEQ ID NO: 121901 - DNA, 75 bp, synthetic construct
  source 1..75: mol_type = other DNA
gggaagtgcgtgttccacaccggggaaatgtagtggagaaagttatcgacggggcttacgaggtggtgggggttt

SEQ ID NO: 121902 - DNA, 75 bp, synthetic construct
  source 1..75: mol_type = other DNA
tgtggcagtcactatcgccagcgccattctggcttttccaatggcgtggtatatggcgcgctataccagcgggaa

SEQ ID NO: 121903 - DNA, 75 bp, synthetic construct
  source 1..75: mol_type = other DNA
acttcatttccaggctacattaaaacaagacgggaatattgctattgaacccggcgaatttaaagccaccagcac

SEQ ID NO: 121904 - DNA, 75 bp, synthetic construct
  source 1..75: mol_type = other DNA
gcagtgccagaggaaaacgtatccacacccgtgccattcacagcatcgacaccgacattaagctcaaccgcgcat

SEQ ID NO: 121905 - DNA, 75 bp, synthetic construct
  source 1..75: mol_type = other DNA
cgctgtacaaagtggcgaccgaaggcaaaagcggtgagacctataacatcggcggtcataacgagcgaaaaaata

SEQ ID NO: 121906 - DNA, 75 bp, synthetic construct
  source 1..75: mol_type = other DNA
atgcactatgtgcccagtattttcggtgaagaccggcatacttcccgcagtaaacgatatgcgtacattcccacc

SEQ ID NO: 121907 - DNA, 75 bp, synthetic construct
  source 1..75: mol_type = other DNA
atgtaaatcagatccgccgggagcgcccgctgacacgcgaagaactgatgtaccacgttccgagtatttttggtg

SEQ ID NO: 121908 - DNA, 75 bp, synthetic construct
  source 1..75: mol_type = other DNA
tgcgtctgcggtcagtctctgggggaagtgcgtgttccacaccggggaaatgtggtggagaaagttatcgaaggg

SEQ ID NO: 121909 - DNA, 75 bp, synthetic construct
  source 1..75: mol_type = other DNA
cggcaaacctttcgctatgtggtgctgccgctggcaatccctggtattgccgctggctctatctttaccttttca

SEQ ID NO: 121910 - DNA, 75 bp, synthetic construct
  source 1..75: mol_type = other DNA
ttccgcttccaccacatctccaccgatgaggtgtacggcgacctgcacggcaccgatgacctgttcaccgaagaa

SEQ ID NO: 121911 - DNA, 75 bp, synthetic construct
  source 1..75: mol_type = other DNA
gccgatgtgggcgagctacattgttaaagcctatgcctggacgttattgctggcgaaagatggtgtggcgcagtg

SEQ ID NO: 121912 - DNA, 75 bp, synthetic construct
  source 1..75: mol_type = other DNA
gcgtggcgatctgccgccgggaagtggtaagccagaaatgtatgcttctgacctggtgacgctattaaaagaagt

SEQ ID NO: 121913 - DNA, 75 bp, synthetic construct
  source 1..75: mol_type = other DNA
atggggattttaaaaagtttatttacattaggtaagtcttttatttcacaggcggaagaatccattgaagaaaac

SEQ ID NO: 121914 - DNA, 75 bp, synthetic construct
  source 1..75: mol_type = other DNA
taccaggacaagagccattacaggtattgatggtgatatccgaatcaacaaggcgttatgggtgattgccgaaca

SEQ ID NO: 121915 - DNA, 75 bp, synthetic construct
  source 1..75: mol_type = other DNA
ggggcttacgaggtggtgggggtttttgaccggattgaggaaaagcgtgatgccatgcagtcgctaattctgccg

SEQ ID NO: 121916 - DNA, 75 bp, synthetic construct
  source 1..75: mol_type = other DNA
tataccagaaggaatggatattctcaaaggggatagtgtggaggatggaattcgaactagaggttttagaagagc

SEQ ID NO: 121917 - DNA, 75 bp, synthetic construct
  source 1..75: mol_type = other DNA
gatctcgacgaaaaactggcggaagcggggattggtggagttaacaaaagcagtgctcaggatgtgctggcaagg

SEQ ID NO: 121918 - DNA, 75 bp, synthetic construct
  source 1..75: mol_type = other DNA
aaattcgagaggattatgttcttaactatatgcttgaaacagaaagcaaaggctcactactcaatactgataatt

SEQ ID NO: 121919 - DNA, 75 bp, synthetic construct
  source 1..75: mol_type = other DNA
atgctggaacagcatattcgtgacgctaaagctgaactcgataaagccggaaaatctcgcgttgatctgctggcg

SEQ ID NO: 121920 - DNA, 75 bp, synthetic construct
  source 1..75: mol_type = other DNA
atagctttaagcattcaagttggctgagtatgatggatagccgtttgctttttgttaaaaatttactcagtgaaa

SEQ ID NO: 121921 - DNA, 75 bp, synthetic construct
  source 1..75: mol_type = other DNA
tatataattatttaattgggagtgcatctcataataaaaatgagataatattagatttttttgctggttcaggaa

SEQ ID NO: 121922 - DNA, 75 bp, synthetic construct
  source 1..75: mol_type = other DNA
ggtgggggtttttgaccggattgaagaaaagcgtgacgccatgcggtcgctggtcttaccgccaccggcacgcca

SEQ ID NO: 121923 - DNA, 75 bp, synthetic construct
  source 1..75: mol_type = other DNA
aggatgctttagtgcagtccgctatttcaacaattctggctgataaaacagttcaacagcattgggttgatcttg

SEQ ID NO: 121924 - DNA, 75 bp, synthetic construct
  source 1..75: mol_type = other DNA
tggtgacgaacatcagccagtcaccaccgccgacattctgacaccacgacgccgggaggattacggtaaagacct

SEQ ID NO: 121925 - DNA, 75 bp, synthetic construct
  source 1..75: mol_type = other DNA
tattatgatgttagtggggctagggatggtgctggggaatatgctaagtggcaggatttcaggacgttattcacc

SEQ ID NO: 121926 - DNA, 75 bp, synthetic construct
  source 1..75: mol_type = other DNA
aaagcaactggcggctatggcatccggagcaaatgagcatgaaaatgcagtattttcccatctgctgactttctt

SEQ ID NO: 121927 - DNA, 75 bp, synthetic construct
  source 1..75: mol_type = other DNA
caccggggaaatgtggtggacagagtcattgaaggggcttacgaggtggtgggcgtgtttgaccggatagaggag

SEQ ID NO: 121928 - DNA, 75 bp, synthetic construct
  source 1..75: mol_type = other DNA
catatcttgttgtttctggtggcgttgtgcgtcattggcaacgccatgttcacgctctcttcgtcttacctgatg

SEQ ID NO: 121929 - DNA, 75 bp, synthetic construct
  source 1..75: mol_type = other DNA
aagttctgcaaagcctgatgggacataagtccatcagttcaacggaagtctacacgaaggtttttgcgcttgatg

SEQ ID NO: 121930 - DNA, 75 bp, synthetic construct
  source 1..75: mol_type = other DNA
gatatctgtagcgcggcgattttttttgcaccaaaacgcgataaattttgcactgccagaaggtgccaaaaagac

SEQ ID NO: 121931 - DNA, 75 bp, synthetic construct
  source 1..75: mol_type = other DNA
cgatcctcgccagtgggatcgtaccgcgcattccgcccatcgacgggatcgatcatccgaaggtgttgagttatc

SEQ ID NO: 121932 - DNA, 75 bp, synthetic construct
  source 1..75: mol_type = other DNA
atcagcgaagttttcaccaataacgttaatgtttacgttaatttacttaccgcgacgccggtcagtgtatatgtc

SEQ ID NO: 121933 - DNA, 75 bp, synthetic construct
  source 1..75: mol_type = other DNA
tgttctacacgcggatacagcacggtgagccgcaggtggagagccgctacctctatgacccgctgggccgccgga

SEQ ID NO: 121934 - DNA, 75 bp, synthetic construct
  source 1..75: mol_type = other DNA
ctgtcgcgtaaaccggaggagacctggtacgggtgggacggtgacaggctgaccactgtacagacccaacagaca

SEQ ID NO: 121935 - DNA, 75 bp, synthetic construct
  source 1..75: mol_type = other DNA
tggttcagctacgtaaagccatacatgatgtttatttccggtttttcggaaacggcgatgacctttattatgatg

SEQ ID NO: 121936 - DNA, 75 bp, synthetic construct
  source 1..75: mol_type = other DNA
agacgagaaataaaccctgaggcaaaattcattattgttgatcagggagagtatttcgatacactgataaaaccg

SEQ ID NO: 121937 - DNA, 75 bp, synthetic construct
  source 1..75: mol_type = other DNA
ggcctggtctgcggtcagtcgctgggagaagtccgggtgccccaccggggaaacgtggtggacagggtgattgaa

SEQ ID NO: 121938 - DNA, 75 bp, synthetic construct
  source 1..75: mol_type = other DNA
ttctcaaccggcctcaatcggatatgacgatgcaaaactcgatcgttatcctttagaagatgatctaggccgata

SEQ ID NO: 121939 - DNA, 75 bp, synthetic construct
  source 1..75: mol_type = other DNA
atgcaatcaaaatgtcgacaccacacaatggtattgtattggactattttgcaggttcagggacaacttctcatg

SEQ ID NO: 121940 - DNA, 75 bp, synthetic construct
  source 1..75: mol_type = other DNA
gccgccgggcatatgatttcgtattatgcgctgggcgtggtggtcggcgcgccgataatcgccctcttctccaac

SEQ ID NO: 121941 - DNA, 75 bp, synthetic construct
  source 1..75: mol_type = other DNA
gtgatggtggtatgaataaagttattttatctttggctctcggcacgtttggtctggggatggccgaatttggca

SEQ ID NO: 121942 - DNA, 75 bp, synthetic construct
  source 1..75: mol_type = other DNA
cgttttatatttcctgaaacgcgctggcggcatcgactccgaccgcggcagctatcgtcatattaaagtattgcg

SEQ ID NO: 121943 - DNA, 75 bp, synthetic construct
  source 1..75: mol_type = other DNA
gacagagcggtcgagatcgatgctacgcaaatggttcgatgctttcaaacaacttgatccagtgcgtattggcga

SEQ ID NO: 121944 - DNA, 75 bp, synthetic construct
  source 1..75: mol_type = other DNA
acgaagcaaaagatattttctttaactactgcaatggtaatgactccaacttattgatagtgttttatgttcaga

SEQ ID NO: 121945 - DNA, 75 bp, synthetic construct
  source 1..75: mol_type = other DNA
gaacaactggaagctttcgttgacttacgtgatgtacgtcagcctgaagtgaaagaagagaaaccagagttcgat

SEQ ID NO: 121946 - DNA, 75 bp, synthetic construct
  source 1..75: mol_type = other DNA
actgagattaaagacgtgctggcttcccgtggactgtctctgggcatgcgcctggaaaactggccaccggcaagc

SEQ ID NO: 121947 - DNA, 75 bp, synthetic construct
  source 1..75: mol_type = other DNA
tgggagaagtgcgtgttccgcaccggggaaatgtggtggacagagtcattgaaggggcttacgaggtggtggggg

SEQ ID NO: 121948 - DNA, 75 bp, synthetic construct
  source 1..75: mol_type = other DNA
gccgacatactgacaccacgacgccgggaggattacggtaaggacctgtggagtgcttatcagaccattcaggag

SEQ ID NO: 121949 - DNA, 75 bp, synthetic construct
  source 1..75: mol_type = other DNA
tcccggtgaactggataagcgacagctattacaaacacaaagataatttggcaactctcacgcaccactggctgt

SEQ ID NO: 121950 - DNA, 75 bp, synthetic construct
  source 1..75: mol_type = other DNA
ttagacgccattttgcaacgctttgctgattgctgtcggcaaatcaatagtgaactgactgaatgccacatccgc

SEQ ID NO: 121951 - DNA, 75 bp, synthetic construct
  source 1..75: mol_type = other DNA
agcaggcttacctcctccgtatggtgctaatttatttgccggaggctatgaaacagaaaggagtgacggcttaag

SEQ ID NO: 121952 - DNA, 75 bp, synthetic construct
  source 1..75: mol_type = other DNA
ggcagggttgtataacccaggtatgcaatggctggcatccggcgtgctggaatgggtgagaaaactgttctggac

SEQ ID NO: 121953 - DNA, 75 bp, synthetic construct
  source 1..75: mol_type = other DNA
gcgtggtgacctgccgtcgggaagcggtaagccggaaatgtatgcttctgacctggtggagctgttaaaagaagt

SEQ ID NO: 121954 - DNA, 75 bp, synthetic construct
  source 1..75: mol_type = other DNA
atttaacagcccggaagaagcccgctcacagattcattatcagtaccgttatttctacccgcaaaccgaacctga

SEQ ID NO: 121955 - DNA, 75 bp, synthetic construct
  source 1..75: mol_type = other DNA
cgccatcactattttctgtcgacaaccgagcgaggccgcgaccgggttaatagctacattgtcgagcaatccatt

SEQ ID NO: 121956 - DNA, 75 bp, synthetic construct
  source 1..75: mol_type = other DNA
cagggactagatgatatcgtcatcgaacgaagtgatggcttcgttgaccttcagcagatcaagttcaccccagat

SEQ ID NO: 121957 - DNA, 75 bp, synthetic construct
  source 1..75: mol_type = other DNA
cgatgaaacgatccttgccagcgggatcgtgccgcgcattccgcccatcgacgggatcgatcatccgaaggtatt

SEQ ID NO: 121958 - DNA, 75 bp, synthetic construct
  source 1..75: mol_type = other DNA
cgggaattttgccggtttcgaactttaaacaggcgaagaaatttgccgacatgaccaacgtgcgtattccggcgt

SEQ ID NO: 121959 - DNA, 75 bp, synthetic construct
  source 1..75: mol_type = other DNA
gcgtggcgacctgccgccgggaagcggtaagccggaaatgtatgcttctgacctggtgacgctgttaaaagaagt

SEQ ID NO: 121960 - DNA, 75 bp, synthetic construct
  source 1..75: mol_type = other DNA
tttacgaccacatcgccttcgccgcctccgtctctgtggtcacgattggcgcgatgaccatcagcgaaaaaatcg

SEQ ID NO: 121961 - DNA, 75 bp, synthetic construct
  source 1..75: mol_type = other DNA
atttccctgctagaaaacttacaacgcgaaggcttccagccattctttgcctgccagacccgagttcgggaccag

SEQ ID NO: 121962 - DNA, 75 bp, synthetic construct
  source 1..75: mol_type = other DNA
tggatatattgccagaatggattctgatgatatttctacgactgatcgcattgaatctcaggtgagatttctaga

SEQ ID NO: 121963 - DNA, 75 bp, synthetic construct
  source 1..75: mol_type = other DNA
acgttgccttatcatcaagtagcaaaggtggagtatgtggctggtattttgaagcaatctcgccacctagatgac

SEQ ID NO: 121964 - DNA, 75 bp, synthetic construct
  source 1..75: mol_type = other DNA
ccgtgccattcacagcatcgacaccgatattaagctcaaccgcgcattgtgggtaatggcagaaacgctgctgga

SEQ ID NO: 121965 - DNA, 75 bp, synthetic construct
  source 1..75: mol_type = other DNA
tgatgaatatcagccggtcaccaccgctgacattctgacaccacgacgtcgggaggattacggtaaggacctgtg

SEQ ID NO: 121966 - DNA, 75 bp, synthetic construct
  source 1..75: mol_type = other DNA
aaaaccttaacaacatcagacaaaatgccactatatatgttcacgcataccactatactgaggtgtactggcaat

SEQ ID NO: 121967 - DNA, 75 bp, synthetic construct
  source 1..75: mol_type = other DNA
aacccggcatcatgcgcattttcgatcatatctggcgctttgataccgggatgcgaagccgcctgctcagacgct

SEQ ID NO: 121968 - DNA, 75 bp, synthetic construct
  source 1..75: mol_type = other DNA
gtaccgaggttgagctccttaaaacgcctaaccttggtaaaaaatctcttactaagattaaagacgtgctggctt

SEQ ID NO: 121969 - DNA, 75 bp, synthetic construct
  source 1..75: mol_type = other DNA
gtcgcagcgctaaaggaaaacgtatccatacccgtgccattcacagcattgacactgacattaagctcaaccgtg

SEQ ID NO: 121970 - DNA, 75 bp, synthetic construct
  source 1..75: mol_type = other DNA
tacgtgatgtacgtcagcctgaagtgaaagaagagaaaccagagttcgatccgatcttgctgcgccctgttgacg

SEQ ID NO: 121971 - DNA, 75 bp, synthetic construct
  source 1..75: mol_type = other DNA
ccagggatggttttttgcgaaggcgatgccgccgcaggtgtttatgcaatggatggagcaattacccgcgcggga

SEQ ID NO: 121972 - DNA, 75 bp, synthetic construct
  source 1..75: mol_type = other DNA
cgccgggaatataccaaacatatgctgcgtctgcggcgggccggagagataaacggagaacatgtccctgaaatt

SEQ ID NO: 121973 - DNA, 75 bp, synthetic construct
  source 1..75: mol_type = other DNA
tgcgtctgcggcgggccggagagataaacggagaacatgtccctgaaattattctgctcaactcccatgacggtt

SEQ ID NO: 121974 - DNA, 75 bp, synthetic construct
  source 1..75: mol_type = other DNA
cggtgaatgagaaagggcaggcggcggtggatattgatcgggtcgatcagcatgttgtcaacacagaacgcctca

SEQ ID NO: 121975 - DNA, 75 bp, synthetic construct
  source 1..75: mol_type = other DNA
cgaaaaccagacgctggcttctatcaccttccagaactacttccgcctgtatgaaaaactggcggggatgaccgg

SEQ ID NO: 121976 - DNA, 75 bp, synthetic construct
  source 1..75: mol_type = other DNA
aaccgcaacacatttttttgaggaacatcaacgtgatgcagctctcctttcgtgggcctgcgctgaagctgaact

SEQ ID NO: 121977 - DNA, 75 bp, synthetic construct
  source 1..75: mol_type = other DNA
tgggatattccgggtctgcaggaacgtctgaaaaacgatttcgacctcgatttgccgattgccgagtggctggac

SEQ ID NO: 121978 - DNA, 75 bp, synthetic construct
  source 1..75: mol_type = other DNA
cacgttgcccagtggattccaatgattcagtaattttcgatagttttgctccctatatcttgctggaggtagttg

SEQ ID NO: 121979 - DNA, 75 bp, synthetic construct
  source 1..75: mol_type = other DNA
ggtgcttacgaagtggtgggcgtgtttgacctgattgaggaaaagcgtgatgccatgcagtcgctgtttctgccg

SEQ ID NO: 121980 - DNA, 75 bp, synthetic construct
  source 1..75: mol_type = other DNA
ttcagccatgcgctgaacctcaacgatatgcgccagttcgccgagatgcacgacattgaaatcacggtgattgat

SEQ ID NO: 121981 - DNA, 75 bp, synthetic construct
  source 1..75: mol_type = other DNA
agcggggaaacaggccgcaggggtggcggcgaaagggcagacaactgcgccatcaggcgcagtggccttacacac

SEQ ID NO: 121982 - DNA, 75 bp, synthetic construct
  source 1..75: mol_type = other DNA
aaaggccggagtattaagatagaaatacatggcaatgtgaataaaatagtaactgaaaatgctgatgttattatt

SEQ ID NO: 121983 - DNA, 75 bp, synthetic construct
  source 1..75: mol_type = other DNA
gacgattttcccggctcgtcagtcagtgatgttggtccgttgccggtcattgacggacgtacggttattgagggg

SEQ ID NO: 121984 - DNA, 75 bp, synthetic construct
  source 1..75: mol_type = other DNA
ccaccagcacgccaggcgctggcacaggcggcgctgacttaccgttatggtgatgaacatcagcccgtcaccacc

SEQ ID NO: 121985 - DNA, 75 bp, synthetic construct
  source 1..75: mol_type = other DNA
gcacgacattgaaatcacggtgattgataacgatacccgccttccagcgtttaaagacgcgctgcgctggaacga

SEQ ID NO: 121986 - DNA, 75 bp, synthetic construct
  source 1..75: mol_type = other DNA
cacaacgtcctgaacgctaaattccacgccaacgaagcggcgattgttgctcaggcggggtatcctgctgccgtg

SEQ ID NO: 121987 - DNA, 75 bp, synthetic construct
  source 1..75: mol_type = other DNA
ccgtacccgcgccgtgaacggcatcgatggggacgtgaagctcaaccgggccctgtgggtaatgaccgaaaacat

SEQ ID NO: 121988 - DNA, 75 bp, synthetic construct
  source 1..75: mol_type = other DNA
ccgcacccgtgctgttaccggtattgatggcgatgtgaagctcaatcgcgccctgtgggtaatggcagaaaacat

SEQ ID NO: 121989 - DNA, 75 bp, synthetic construct
  source 1..75: mol_type = other DNA
catcaagctaccagatgctgccggggctgtttcgtggcgtctgtaccaatggtctggtctgcggtcagtcattcg

SEQ ID NO: 121990 - DNA, 75 bp, synthetic construct
  source 1..75: mol_type = other DNA
aatgcgctgtggaaagcgcagccggatctaccaaccgcttccgaagcgtggatccttgctggtggcgcgcaccac

SEQ ID NO: 121991 - DNA, 75 bp, synthetic construct
  source 1..75: mol_type = other DNA
ttcgcctgcatcgtgccggtcaacttaccgggcatcaggtaccggaaatcattctgcttaacagccacgacggct

SEQ ID NO: 121992 - DNA, 75 bp, synthetic construct
  source 1..75: mol_type = other DNA
aagcgcgtctttggtatgcgtcatttcgatgtacagttgctcggcggtatggttcttaatgaacgttgcatcgcg

SEQ ID NO: 121993 - DNA, 75 bp, synthetic construct
  source 1..75: mol_type = other DNA
gcaattcagggaaaccacccgctggattggaaatccgtataaaaagaatgggctcactgatttcgacactcttcc

SEQ ID NO: 121994 - DNA, 75 bp, synthetic construct
  source 1..75: mol_type = other DNA
tccacgctgaatggcagctgggtcgcgttgttgcagacgcgtaacaccctcaaccgcgcgggtatccgctacatg

SEQ ID NO: 121995 - DNA, 75 bp, synthetic construct
  source 1..75: mol_type = other DNA
atgctaatcaaattattaacaaaagttttcggtagccgtaacgaccgcaccctgcgccggatgcgcaaagtcgtc

SEQ ID NO: 121996 - DNA, 75 bp, synthetic construct
  source 1..75: mol_type = other DNA
gacaacgtaccagcgtatccaggagaacctgctgaaaggcgggcttccgggacgtactgcgaagggcaaacgcag

SEQ ID NO: 121997 - DNA, 75 bp, synthetic construct
  source 1..75: mol_type = other DNA
ggatgtgcgtggttctgactgcaccatcaaagggctggcgatgagcggctttggtccggtaacgcagatttatat

SEQ ID NO: 121998 - DNA, 75 bp, synthetic construct
  source 1..75: mol_type = other DNA
gaagaggtggttggtgctgagatgatgcgtcacttcgagaaaggcgtgatgctgcagacgctcgattctctgtgg

SEQ ID NO: 121999 - DNA, 75 bp, synthetic construct
  source 1..75: mol_type = other DNA
atgccagttaattttctttccgaagatcaaaaagcaagttacggtaactatcatggcgaactgacaaaggaaaca

SEQ ID NO: 122000 - DNA, 75 bp, synthetic construct
  source 1..75: mol_type = other DNA
gccaatatgttgccacgtgttgatttacctgaactattactggagatcgatgcccggacacatttcactgatgcc

SEQ ID NO: 122001 - DNA, 75 bp, synthetic construct
  source 1..75: mol_type = other DNA
cggcgatccgccactccgctgactttcatattcagctgcaggctatctccggcaacccggtgctcaccgagatgg

SEQ ID NO: 122002 - DNA, 75 bp, synthetic construct
  source 1..75: mol_type = other DNA
aaatgtggtggagaaagttattgaaggggcttacgaggtggtgggtgtgtttgaccggattgaggacaagcgtga

SEQ ID NO: 122003 - DNA, 75 bp, synthetic construct
  source 1..75: mol_type = other DNA
gaacataaaaaaaccatcattgatgccattgattttcaccaagttgaatttacaaaacctcacttcagttctgtt

SEQ ID NO: 122004 - DNA, 75 bp, synthetic construct
  source 1..75: mol_type = other DNA
gcggcggcgtggatttgcggtccgtgggcaacaaacgactgggcgcaaaatattccgattggaagtatcaccgac

SEQ ID NO: 122005 - DNA, 75 bp, synthetic construct
  source 1..75: mol_type = other DNA
tttgatgctctgaatgaatattcagcaaatgatcctaaattcggtgcgtgggactggtatcgcggagcagtgatc

SEQ ID NO: 122006 - DNA, 75 bp, synthetic construct
  source 1..75: mol_type = other DNA
actgtgtttaataatgtggtggcatcgcgtccgtacaccattgaagcattgcaacaggcccttactttcgccaac

SEQ ID NO: 122007 - DNA, 75 bp, synthetic construct
  source 1..75: mol_type = other DNA
aagaccggcatacttcccgcagtaaacgatatgcgtacattcccaccatcaccgtactagaaagcctgcagcggg

SEQ ID NO: 122008 - DNA, 75 bp, synthetic construct
  source 1..75: mol_type = other DNA
atgaggaaactaacgtttgaactaagaagccacatccatcagcagaacgctattcacgcagtacagcaaatcatt

SEQ ID NO: 122009 - DNA, 75 bp, synthetic construct
  source 1..75: mol_type = other DNA
aaatgtggtggagaaagttatagaaggggcttacgaggtggtgggtgtgtttgaccggatagaggacaagcgtga

SEQ ID NO: 122010 - DNA, 75 bp, synthetic construct
  source 1..75: mol_type = other DNA
gtgtatattgctaatatctatacttagcttttctgggattctttttggacaagtggtcagtttctttaaagccgg

SEQ ID NO: 122011 - DNA, 75 bp, synthetic construct
  source 1..75: mol_type = other DNA
aaatgtggtggagaaagttatcgaaggggcttacgaggtggtgggtgtgtttgaccggatagaggaaaagcgtga

SEQ ID NO: 122012 - DNA, 75 bp, synthetic construct
  source 1..75: mol_type = other DNA
tgtgcgcaggaagttcttttgcagcttcttttgattgtaataaatcaaaaaattttgcagaaaaaacaatttgtt

SEQ ID NO: 122013 - DNA, 75 bp, synthetic construct
  source 1..75: mol_type = other DNA
tgctgccccctggcagtttgtatccagttattatcagtaccatcagcaactgaatgcactgacaaccttcctgaa

SEQ ID NO: 122014 - DNA, 75 bp, synthetic construct
  source 1..75: mol_type = other DNA
tttaactattgtttactttctgaaaaaatcagtaccaaggcaatacacaatcataaattaaatcaggttggcgga

SEQ ID NO: 122015 - DNA, 75 bp, synthetic construct
  source 1..75: mol_type = other DNA
aaatgtggtggagaaagttatggaaggggcttacgaggtggtgggtgtgtttgaccggatggaggacaagcgtga

SEQ ID NO: 122016 - DNA, 75 bp, synthetic construct
  source 1..75: mol_type = other DNA
ccgtccgctgacacatgaagagctgatgcaccatgtgccggggattttcggagaagataaacacacgtcccgaag

SEQ ID NO: 122017 - DNA, 75 bp, synthetic construct
  source 1..75: mol_type = other DNA
ctttgtttccaatgaaatgattatctctggtcttaatgttaaagatatctggccgcttctgagtcagccattcct

SEQ ID NO: 122018 - DNA, 75 bp, synthetic construct
  source 1..75: mol_type = other DNA
ggcaaaggccatatcaattggagatctacatgcgtagcagaaaatgtactcgatccattcaatccgccatctcgg

SEQ ID NO: 122019 - DNA, 75 bp, synthetic construct
  source 1..75: mol_type = other DNA
cagcaatggcagaaaaaatatcttcagacctattcaaatggtttaagtgggaactcgttggtccaaccaatgaaa

SEQ ID NO: 122020 - DNA, 75 bp, synthetic construct
  source 1..75: mol_type = other DNA
ccaactgatgttgtattttcttataaagatccctatttgaatagaaccatttttttaaatactgatttaaaaagc

SEQ ID NO: 122021 - DNA, 75 bp, synthetic construct
  source 1..75: mol_type = other DNA
aaatgtggtggagaaagttatcgaaggggcttacgaggtggtgggtgtgtttgaccggatcgaggacaagcgtga

SEQ ID NO: 122022 - DNA, 75 bp, synthetic construct
  source 1..75: mol_type = other DNA
ggaggaaagaatgatttaataatcaaaacttcaaaggatgctgcgcgtaacagaaaaaatattatacaattagct

SEQ ID NO: 122023 - DNA, 75 bp, synthetic construct
  source 1..75: mol_type = other DNA
aaatgtggtggagaaagttatcgaaggggcttacgaggtggtgggtgtgtttgaccggatggaggagaagcgtga

SEQ ID NO: 122024 - DNA, 75 bp, synthetic construct
  source 1..75: mol_type = other DNA
tcacagcagggctccttccatcttatttaatggcgtggaataatcccggtgagcctttttctgggcaattaaaat

SEQ ID NO: 122025 - DNA, 75 bp, synthetic construct
  source 1..75: mol_type = other DNA
gattttgctatttataaacacggtactttagttagcgctcatcaagtaaaggctaagattagtagttaccgtagc

SEQ ID NO: 122026 - DNA, 75 bp, synthetic construct
  source 1..75: mol_type = other DNA
ggaacaaggtggcttccacgctttcactactacctttgaagatttgcacggcctgaaacagcttccgggtctggc

SEQ ID NO: 122027 - DNA, 75 bp, synthetic construct
  source 1..75: mol_type = other DNA
cgtaaactgcactatgcgctggtggacgaagtggactccatcctgatcgatgaagcgcgtacaccgctgatcatt

SEQ ID NO: 122028 - DNA, 75 bp, synthetic construct
  source 1..75: mol_type = other DNA
aagagaaacacacgtcccgaagccagaactatacgtacatccccaccatcaccgtactggaaagcctgcagcggg

SEQ ID NO: 122029 - DNA, 75 bp, synthetic construct
  source 1..75: mol_type = other DNA
gtatccatacccgggccattcacagcattgataccgacattaagctcaaccgtgcattgtgggtgatggcagaaa

SEQ ID NO: 122030 - DNA, 75 bp, synthetic construct
  source 1..75: mol_type = other DNA
ggccagcaacagcagggatagatgatttgggtgaaattttagctaagatgaaacagagaacatcgagaggaataa

SEQ ID NO: 122031 - DNA, 75 bp, synthetic construct
  source 1..75: mol_type = other DNA
gcccgtcaccaccgccgacattctgacaccacgacgccgggaggattacggtcaggacctgtggagtgcttatca

SEQ ID NO: 122032 - DNA, 75 bp, synthetic construct
  source 1..75: mol_type = other DNA
taacgtgattcgtttcttgtatccgctgaccatcccggatacgcaattcgatgcggcaatgaaaattttgcagga

SEQ ID NO: 122033 - DNA, 75 bp, synthetic construct
  source 1..75: mol_type = other DNA
gaacatcagcccgtcaccaccgccgacatcctgacgccgcgacgccgggaggattacggtaaggacctgtggagc

SEQ ID NO: 122034 - DNA, 75 bp, synthetic construct
  source 1..75: mol_type = other DNA
atgaagtttgttgcgccagaacaggcaccggaacaggcggaaatcatcaggaatacgccgttctggcctgatgtg

SEQ ID NO: 122035 - DNA, 75 bp, synthetic construct
  source 1..75: mol_type = other DNA
tatgttaggcattgaggtcttaaccattcttgaggactccctgagcaccatccaagcgatgaccatccaagccgc

SEQ ID NO: 122036 - DNA, 75 bp, synthetic construct
  source 1..75: mol_type = other DNA
attacggatgctcagggcggcaaatggcgctatgtgtatgaccggcaggggcatatcacggagacgcacgacccg

SEQ ID NO: 122037 - DNA, 75 bp, synthetic construct
  source 1..75: mol_type = other DNA
cggtgtgaagcgaggcgaggaactggcagaagccagcggtgatttatggcgtgacgcccgctgggccatcagccg

SEQ ID NO: 122038 - DNA, 75 bp, synthetic construct
  source 1..75: mol_type = other DNA
agctgtatgagtttcgcaggcgccagcaggtgctggggtatgcctcgctggcagaggttccggcggaacagctgg

SEQ ID NO: 122039 - DNA, 75 bp, synthetic construct
  source 1..75: mol_type = other DNA
atcaggactatgacgccacagcatccggtgtgaagcggggcgaggaactggtagaagccagcggtgatttgtggc

SEQ ID NO: 122040 - DNA, 75 bp, synthetic construct
  source 1..75: mol_type = other DNA
gcagatgctgggatatgcctcgctggcagaggttccggcggaacagctggacgggaaaagcgagcgaattcagca

SEQ ID NO: 122041 - DNA, 75 bp, synthetic construct
  source 1..75: mol_type = other DNA
cgtgccattcacagcatcgacaccgatattaagctcaaccgcgcattgtgggtgatggcggaaaccctgctggag

SEQ ID NO: 122042 - DNA, 75 bp, synthetic construct
  source 1..75: mol_type = other DNA
gcttatcagaccattcaggagaatatgctgaaaggcggaatttccggtcgcagtgccagagggaaacgtatccac

SEQ ID NO: 122043 - DNA, 75 bp, synthetic construct
  source 1..75: mol_type = other DNA
accaactgttatgaacacagcggcttaccagacattaaaaacgtcaccggtattttaattgtcggcaaacccacg

SEQ ID NO: 122044 - DNA, 75 bp, synthetic construct
  source 1..75: mol_type = other DNA
ggaatggggatccgtgaagataacacgctgatcaccaaagacacctcacgtttcgttccgcattacattgctgga

SEQ ID NO: 122045 - DNA, 75 bp, synthetic construct
  source 1..75: mol_type = other DNA
tgaccatagccgggtggaaaggatcgccacagagaagctgcagatgcagcatgttgatccatcacaagaaaatat

SEQ ID NO: 122046 - DNA, 75 bp, synthetic construct
  source 1..75: mol_type = other DNA
gcagttgctgggctaccgggaactggctgaggttccggcggacatgctggacggtaaaagcgagcgtatccggca

SEQ ID NO: 122047 - DNA, 75 bp, synthetic construct
  source 1..75: mol_type = other DNA
agaaggggcggcacgaccagttgcttaccgcgcttcgtgcgctgctgttaagccgcaagaatccgtttggcgata

SEQ ID NO: 122048 - DNA, 75 bp, synthetic construct
  source 1..75: mol_type = other DNA
agcagcgtgtaccgatgatgcaggcatgggcggattatgtgatgtctcaacttgctaaaaacactaaggaattcg

SEQ ID NO: 122049 - DNA, 75 bp, synthetic construct
  source 1..75: mol_type = other DNA
cggctttgcgcgtaccggtaaactgtttgccatggatcattacgccgataagccggacttaatgacgatggcgaa

SEQ ID NO: 122050 - DNA, 75 bp, synthetic construct
  source 1..75: mol_type = other DNA
cgtaccttatccgtcagatttacacggcatttcaacgcaggactccctcgacgccatcgaacgcttgtttaaatc

SEQ ID NO: 122051 - DNA, 75 bp, synthetic construct
  source 1..75: mol_type = other DNA
cacgcatcagtaaagaaatcatcgacttctatatcaatcagggcgttaatcgtattggttttattggcggtgaag

SEQ ID NO: 122052 - DNA, 75 bp, synthetic construct
  source 1..75: mol_type = other DNA
gcggaagaggtgatggactttgccaaccgtacaatgatcaaatcgctttcactgaactttgtgaattacgaaaac

SEQ ID NO: 122053 - DNA, 75 bp, synthetic construct
  source 1..75: mol_type = other DNA
gggtcgatgattgcggcagagtttaacgatccgcaaacgggcgagccgtcagcggcgattgcacagaaaatccag

SEQ ID NO: 122054 - DNA, 75 bp, synthetic construct
  source 1..75: mol_type = other DNA
ttatggatcaaactgactcggatcaaaactcagtcgttgatgatgacagcaacgcccttgctccagctctggctg

SEQ ID NO: 122055 - DNA, 75 bp, synthetic construct
  source 1..75: mol_type = other DNA
ctgtatccgctgaccatcccggatgcgcaattcgatgcggcaatgaaaattttgcaggatgcgctgagcgattaa

SEQ ID NO: 122056 - DNA, 75 bp, synthetic construct
  source 1..75: mol_type = other DNA
accgctgtgcagatatttaaaacaaccggtaatgacatgtcagccgcttttaccacactgggagccagtgcaaaa

SEQ ID NO: 122057 - DNA, 75 bp, synthetic construct
  source 1..75: mol_type = other DNA
tgaagagcatcaaccggtgacagaatcgcagatcctttccccgcgccgctggcaggatgagaacaatgacctgtg

SEQ ID NO: 122058 - DNA, 75 bp, synthetic construct
  source 1..75: mol_type = other DNA
aagtcaggttcttcagttattggtttccttgccggagccgggttaggcactcttggatatatattaatgggattt

SEQ ID NO: 122059 - DNA, 75 bp, synthetic construct
  source 1..75: mol_type = other DNA
ggataccgccgcctttcagtgggtggctgaaatggtcggcagtatgggggcatggttcggcaatgcatggaacac

SEQ ID NO: 122060 - DNA, 75 bp, synthetic construct
  source 1..75: mol_type = other DNA
ttttaagaaaaatattcctagctattttaagtaataattcaaaaattaataaaataccattcttttttgatctta

SEQ ID NO: 122061 - DNA, 75 bp, synthetic construct
  source 1..75: mol_type = other DNA
tggtggttcacaaaccgggaaaaatgaacgcagcacgcttgtgatcatcattaccccgactttcccgtcaggagg

SEQ ID NO: 122062 - DNA, 75 bp, synthetic construct
  source 1..75: mol_type = other DNA
aaactgcgttcactgagccagaaggtcaatctgaaagaagggcaatcacttgtcgttactggtttcgatcagaac

SEQ ID NO: 122063 - DNA, 75 bp, synthetic construct
  source 1..75: mol_type = other DNA
tttttgaccgggtggaggagaaacgggatgccatgcagtcgttgctgttgccacccccggcacagcaggcactgg

SEQ ID NO: 122064 - DNA, 75 bp, synthetic construct
  source 1..75: mol_type = other DNA
tccggccaacatcatgctgatgcaccacgtaacggcggcgctgcgcgctcatgcgctgtttacccgtgacgtcga

SEQ ID NO: 122065 - DNA, 75 bp, synthetic construct
  source 1..75: mol_type = other DNA
ccgcacccgtgctgttaccggtattgatggcgatgtgaagctcaatcgtgctctttgggagatggcagaaaacat

SEQ ID NO: 122066 - DNA, 75 bp, synthetic construct
  source 1..75: mol_type = other DNA
acagcgtcgtatggaagccgagcgtttagcgcaaatgcagcagcttagccatcaggatgacgactctgcagccgc

SEQ ID NO: 122067 - DNA, 75 bp, synthetic construct
  source 1..75: mol_type = other DNA
tccgccacagtcgctggaagaaatgtgggatattccggggctgcaggaacgtctgaagaacgatttcgacctcga

SEQ ID NO: 122068 - DNA, 75 bp, synthetic construct
  source 1..75: mol_type = other DNA
gcttcctgtcggcaggcgctacgcttgccgccatcccactgctacacagccccgctgtacgcgcgctggggcgta

SEQ ID NO: 122069 - DNA, 75 bp, synthetic construct
  source 1..75: mol_type = other DNA
gcaatgcgccctcgtttgttgcgcttaccaacctcgatctgaaccatgcgtcgctggagatccacaacaagccgc

SEQ ID NO: 122070 - DNA, 75 bp, synthetic construct
  source 1..75: mol_type = other DNA
aactgggtatgaagccaggcgaagccattgaacacccgtgggtgactaaagcgattgccaacgcccagcgtaaag

SEQ ID NO: 122071 - DNA, 75 bp, synthetic construct
  source 1..75: mol_type = other DNA
tgatgaacatcagcccgtcaccaccgccgacatcctgacgccacgacgccgggaggattacggtaaggacctgtg

SEQ ID NO: 122072 - DNA, 75 bp, synthetic construct
  source 1..75: mol_type = other DNA
ggctcatcaagctaccagatgctgccagggatgtttcgaggcgtctgtaccaacggcctagtctgcggtcagtca

SEQ ID NO: 122073 - DNA, 75 bp, synthetic construct
  source 1..75: mol_type = other DNA
taccgaagatgagattaaaatcaccgcgaagaaaaaaataacgattaatggtggtgggagttatatccggataga

SEQ ID NO: 122074 - DNA, 75 bp, synthetic construct
  source 1..75: mol_type = other DNA
atagacaagtcagaaggtaaagtcgtccccaaactattaaaatcagataaaacccttacaataagagatgtaatt

SEQ ID NO: 122075 - DNA, 75 bp, synthetic construct
  source 1..75: mol_type = other DNA
gatcttgatgaaaagctggcggaagccggaataggcggtagcaataaaagtagcgcccaggatgtattagcaaga

SEQ ID NO: 122076 - DNA, 75 bp, synthetic construct
  source 1..75: mol_type = other DNA
tatgggaccgccaataatacgaaaatcaatcctggcggagaacagcatataaaagaatttggtgtaagtagtaat

SEQ ID NO: 122077 - DNA, 75 bp, synthetic construct
  source 1..75: mol_type = other DNA
ggcgaaaacccgattaccacctctattccgtgctatctctggaccgatgcgatccaaaatcctgaaaagatgacg

SEQ ID NO: 122078 - DNA, 75 bp, synthetic construct
  source 1..75: mol_type = other DNA
acgtgaaatggccgaagctcgggcctgtttcattgcccagggatgggggccacagcgtcatgcaaatggtgaaca

SEQ ID NO: 122079 - DNA, 75 bp, synthetic construct
  source 1..75: mol_type = other DNA
taatgtggctatcacgatgtcgaaaggcgcaggacaacttgttgcggttctggccgtcctgctggccggggcggt

SEQ ID NO: 122080 - DNA, 75 bp, synthetic construct
  source 1..75: mol_type = other DNA
atgaggaaactaacgtttgaactaagaagccccattcatcagcaaaacgctattcacgcgatacagcaaattctt

SEQ ID NO: 122081 - DNA, 75 bp, synthetic construct
  source 1..75: mol_type = other DNA
gcgccgcaaatcttatccgtcgtgaccgtccgttaacccgtgaggagctgtttcgcgtggtgcccagcgtattca

SEQ ID NO: 122082 - DNA, 75 bp, synthetic construct
  source 1..75: mol_type = other DNA
taccggtaaacaggtgccggaaattatcctgcttaactctcacgatggcaccagttcgtaccagatgctgccggg

SEQ ID NO: 122083 - DNA, 75 bp, synthetic construct
  source 1..75: mol_type = other DNA
aagtcatagttaaagatgatcggattgtgcgaattgaaccggaagatgctaaggatgattcggtattcggtgaac

SEQ ID NO: 122084 - DNA, 75 bp, synthetic construct
  source 1..75: mol_type = other DNA
tcgctgggcgatttcgggcagtgcgggcaggatctgcccgctgaatttgtgaaaaccacggtactggataacacg

SEQ ID NO: 122085 - DNA, 75 bp, synthetic construct
  source 1..75: mol_type = other DNA
tttttttagcgctgtgctcttgttgttatacagcaagtgccggtaccgatgattacgtcggctatgttgttgggg

SEQ ID NO: 122086 - DNA, 75 bp, synthetic construct
  source 1..75: mol_type = other DNA
ccgggactcgactggcggtagccgaaggacatacaaaaatgaaagcaatacgctgcctgaagcgctatatttcat

SEQ ID NO: 122087 - DNA, 75 bp, synthetic construct
  source 1..75: mol_type = other DNA
tggtcggcgcggcggcacaatatttcatcatgacctatggcatcgtcatcgaccgttcaatgatcaccaatatca

SEQ ID NO: 122088 - DNA, 75 bp, synthetic construct
  source 1..75: mol_type = other DNA
ttaacgctgggattaagtggcgtgttggccgcgattattgcctgctggatcaaaatcaaaccctccacttcacgt

SEQ ID NO: 122089 - DNA, 75 bp, synthetic construct
  source 1..75: mol_type = other DNA
ccggatagccaaaaacaggtgccgatgctgctgtggctgtcggaggattatcaaaaacggtatcaggttgaccag

SEQ ID NO: 122090 - DNA, 75 bp, synthetic construct
  source 1..75: mol_type = other DNA
tggcgattaatcagcaaatcgtcccgcgggaacaatgggcgcaacatatcgtgcaggatggcgaccagatcctgc

SEQ ID NO: 122091 - DNA, 75 bp, synthetic construct
  source 1..75: mol_type = other DNA
aacgtaaacagcgggaagatttgctgcaactggtggaaaaggtgacgcggcaggtgatccgctgcgaactggcgc

SEQ ID NO: 122092 - DNA, 75 bp, synthetic construct
  source 1..75: mol_type = other DNA
atatgtttaacgtctggtctcctgcaggtatttcacggtcgacatatacggttaatgcacagagtctgaataact

SEQ ID NO: 122093 - DNA, 75 bp, synthetic construct
  source 1..75: mol_type = other DNA
cctctttgaatttactcgcctggctattgttggccgctttttatatctctatctgcctgaatattgcctttttta

SEQ ID NO: 122094 - DNA, 75 bp, synthetic construct
  source 1..75: mol_type = other DNA
ctatcgacgccgataaaatgaatgacttacgctggaatttttataccagaatgcaaaaagtcaataacgctgcca

SEQ ID NO: 122095 - DNA, 75 bp, synthetic construct
  source 1..75: mol_type = other DNA
ttttcttagggttgactttgacctgaccgatatcgtattaacaaaccctacctgttttactgcggcgcttagtgg

SEQ ID NO: 122096 - DNA, 75 bp, synthetic construct
  source 1..75: mol_type = other DNA
accgataaagctaaaattacccgcaataccgttgatgcttcgaaagattttaatacgctttcgctctacagctct

SEQ ID NO: 122097 - DNA, 75 bp, synthetic construct
  source 1..75: mol_type = other DNA
tgattttaaagtttgggttggcataatttccgttctgacagacagcgaccatccgatcaccaacgaaggaaaaat

SEQ ID NO: 122098 - DNA, 75 bp, synthetic construct
  source 1..75: mol_type = other DNA
tagaaaaacgaggtgtccttgaaacacttcgccgcatcatatcccgcctgaatgaaattttccgctatgcagcaa

SEQ ID NO: 122099 - DNA, 75 bp, synthetic construct
  source 1..75: mol_type = other DNA
atgtatcagggacactcattagcggaggagtgcagcgagtttccagcggtggtagtgctgtagacaccaccgtgg

SEQ ID NO: 122100 - DNA, 75 bp, synthetic construct
  source 1..75: mol_type = other DNA
taaaatcaaacccaccacctcacgcctgcgcagcgttcttttccgcggggccaatattctggtttctgtactgct

SEQ ID NO: 122101 - DNA, 75 bp, synthetic construct
  source 1..75: mol_type = other DNA
aaacatttggtcagcatatacatttactgatattaacccatcaggcatatatattggagacgctacagaacattt

SEQ ID NO: 122102 - DNA, 75 bp, synthetic construct
  source 1..75: mol_type = other DNA
cctgccgcgaaaagaaaaattgcgacaggccaaaccgcgcaaaaaccttcttctgtagtaactaggataccctcc

SEQ ID NO: 122103 - DNA, 75 bp, synthetic construct
  source 1..75: mol_type = other DNA
gcaattatccatatctgcacctcaggcatggttaaaatacaaagatgcaaactggacgcctcctgaactttggga

SEQ ID NO: 122104 - DNA, 75 bp, synthetic construct
  source 1..75: mol_type = other DNA
aaaatcgactttgacctgacagatatcgtattaacaaaccctacctgttttactgcggcgcttagtggcccatcg

SEQ ID NO: 122105 - DNA, 75 bp, synthetic construct
  source 1..75: mol_type = other DNA
ctggagcagatcggtcagttgtacgccatagaggcggatataaggggaatgccggcagagcagcggcttgctgaa

SEQ ID NO: 122106 - DNA, 75 bp, synthetic construct
  source 1..75: mol_type = other DNA
cgttaggtgaaaatggcatctatctacacggcttgccttatagcatcgccccggatagccaaaagcaggttccga

SEQ ID NO: 122107 - DNA, 75 bp, synthetic construct
  source 1..75: mol_type = other DNA
acccgtcgtattatgggtaaagcgtctttcgttaccctgcaggacgttggcggtcgcattcagttgtacgttgcc

SEQ ID NO: 122108 - DNA, 75 bp, synthetic construct
  source 1..75: mol_type = other DNA
ttaactggcgttgagacgaagtattaccaggctgcggatgatattctgcaaacttgcaggagagtgagtgaatga

SEQ ID NO: 122109 - DNA, 75 bp, synthetic construct
  source 1..75: mol_type = other DNA
atgtctggaaatataggggcaaatccagtcacgtttaaccagtatcttgaatcattaaggttaaatacatacgta

SEQ ID NO: 122110 - DNA, 75 bp, synthetic construct
  source 1..75: mol_type = other DNA
ctggtgaattctcatggggttggctgaacaatgtatccctgtatggtggttcagttttaacaaaccgtgattatc

SEQ ID NO: 122111 - DNA, 75 bp, synthetic construct
  source 1..75: mol_type = other DNA
tattcaatcaccaggaatctatatcggagacacttcaacccaacaatttcacttctccataacagacaacgatct

SEQ ID NO: 122112 - DNA, 75 bp, synthetic construct
  source 1..75: mol_type = other DNA
ctctacgtcgactatattgttgataaagcaattaatctgctgaaagaacatcaggataaatttaccaccagcctg

SEQ ID NO: 122113 - DNA, 75 bp, synthetic construct
  source 1..75: mol_type = other DNA
ggttgaagaagaggacgggcaagtcacgcaatggcaagttgcatctaatagcattccttatctgacgcgtaaagg

SEQ ID NO: 122114 - DNA, 75 bp, synthetic construct
  source 1..75: mol_type = other DNA
gaaggggcttacgaggtggtgggcgtttttgaccggatggaggacaagcgtgatgccatgcagtcgctgctactg

SEQ ID NO: 122115 - DNA, 75 bp, synthetic construct
  source 1..75: mol_type = other DNA
aacggctgcgtctgtgggcagtctctgggggaagtgcgtgttccgcaccggggaaatgtcgtggagacagtgatt

SEQ ID NO: 122116 - DNA, 75 bp, synthetic construct
  source 1..75: mol_type = other DNA
aacggctgcgtctgtgggcagtctctgggggaagtgcgtgttccgcaccggggaaatgtcgtggacacagtcatt

SEQ ID NO: 122117 - DNA, 75 bp, synthetic construct
  source 1..75: mol_type = other DNA
gatgaagatgctgttatgcagaaaatcagtggtggcgtctccatcgccgggattaacgacatcatttcctgtgac

SEQ ID NO: 122118 - DNA, 75 bp, synthetic construct
  source 1..75: mol_type = other DNA
tgggggaagtacgtgttccgcaccggggaaatgtggtggacagagtcattgaaggggcttacgaggtggtgggcg

SEQ ID NO: 122119 - DNA, 75 bp, synthetic construct
  source 1..75: mol_type = other DNA
tgtggaggtacttaccgctgaattagagcgaagcaaagcggaacttgaaaagaccaccgccgaggtagctaaatt

SEQ ID NO: 122120 - DNA, 75 bp, synthetic construct
  source 1..75: mol_type = other DNA
gaaggggcttacgaggtggtgggcgtgtttgaccggattgaggacaagcgtgatgccatgcagtcgctgctactg

SEQ ID NO: 122121 - DNA, 75 bp, synthetic construct
  source 1..75: mol_type = other DNA
attataggcgttggcaatttacataaattaagtgggcttgagcgagaatgttgtattgcgatttctgaactctgg

SEQ ID NO: 122122 - DNA, 75 bp, synthetic construct
  source 1..75: mol_type = other DNA
ttgccctccgataaattagaatctctccccttaaataaggatcatattccggtttcagcggttaatgatcaagtc

SEQ ID NO: 122123 - DNA, 75 bp, synthetic construct
  source 1..75: mol_type = other DNA
aacggctgcgtctgtgggcagtctctgggggaagtgcgtgttccgcaccggggaaatgtcgtggaaacagtaatt

SEQ ID NO: 122124 - DNA, 75 bp, synthetic construct
  source 1..75: mol_type = other DNA
atgaaaattcattttctgggaaccgcggcatccgaagggatacccaatcctttttgtcgttgtgagcactgtcag

SEQ ID NO: 122125 - DNA, 75 bp, synthetic construct
  source 1..75: mol_type = other DNA
caatcagtaagcaacttgatgtggtattaccacaactgacaaaacacaacgaccttctggataaagtgttgcctt

SEQ ID NO: 122126 - DNA, 75 bp, synthetic construct
  source 1..75: mol_type = other DNA
acaccgccgccatagcactaaaaatgcccatcgggcgctggagctactgcgcacgggtaatttcccgatactcaa

SEQ ID NO: 122127 - DNA, 75 bp, synthetic construct
  source 1..75: mol_type = other DNA
tatagcattgattttgttggtacctatacggacccactgaagcatgcggtttacccggatcgccgtgacggcgcg

SEQ ID NO: 122128 - DNA, 75 bp, synthetic construct
  source 1..75: mol_type = other DNA
cttatggcgcgccaggggctggctaacgtcccgctcagacttccgcaggccgatctcgacaaaaagcaaaccgat

SEQ ID NO: 122129 - DNA, 75 bp, synthetic construct
  source 1..75: mol_type = other DNA
acggtaccgacacgatggaagaaacagcttacttcctcgacctgacggtgaaatgcgacaaaccggtggtgatgg

SEQ ID NO: 122130 - DNA, 75 bp, synthetic construct
  source 1..75: mol_type = other DNA
gatgtttcattatcgttgttatacaacgctgctgatattactgttgtgccatcacgaatggagaacttgccacag

SEQ ID NO: 122131 - DNA, 75 bp, synthetic construct
  source 1..75: mol_type = other DNA
tggcaaacactagatctttacaataatgccttacccgtatggagcgtaaaattaaatgttttacaaaataatgct

SEQ ID NO: 122132 - DNA, 75 bp, synthetic construct
  source 1..75: mol_type = other DNA
gcagcatggtacacgctgtaccagaatcaggagcaggccagggagtctgcgcgccagtatgcactgacgatagat

SEQ ID NO: 122133 - DNA, 75 bp, synthetic construct
  source 1..75: mol_type = other DNA
acggtaccgacacgatggaagaaacagcttacttcctagacctgacggtgaaatgagacaaaccggtggtgatgg

SEQ ID NO: 122134 - DNA, 75 bp, synthetic construct
  source 1..75: mol_type = other DNA
tgttgcgcggtgaggaatttaattcggtcaatgaaagtggtgaccggatcattcgtgcactggctgcaggcatgg

SEQ ID NO: 122135 - DNA, 75 bp, synthetic construct
  source 1..75: mol_type = other DNA
gaaatattgctgccagaagcgccgcccagaatgcgctgaacagtacaacggcggtgggctcacgtctgatgagcg

SEQ ID NO: 122136 - DNA, 75 bp, synthetic construct
  source 1..75: mol_type = other DNA
ccccagccgaccggaagcttgcggcctgcgtcatctggcttttagcgttgatgatatcgatgcggcagtggcgca

SEQ ID NO: 122137 - DNA, 75 bp, synthetic construct
  source 1..75: mol_type = other DNA
tggtgatgaatatcagcccgtcaccactgctgacattctgacaccgcgacgccgggaggattacggtaaggacct

SEQ ID NO: 122138 - DNA, 75 bp, synthetic construct
  source 1..75: mol_type = other DNA
acggtaccgacacgatggaagaaactgcttacttccttgacctgacggtgaaatgggacaaaccggtggtgatgg

SEQ ID NO: 122139 - DNA, 75 bp, synthetic construct
  source 1..75: mol_type = other DNA
ggggcttacgaagtggtgggcgtttttgaccggattgaggaaaagcgtgatgccatgcagtcgctgattctgccg

SEQ ID NO: 122140 - DNA, 75 bp, synthetic construct
  source 1..75: mol_type = other DNA
gtgaccgctgcacgtaatgaagtggcactggctgaggcccagttaaggggaacgcagattgccactgcgcgggca

SEQ ID NO: 122141 - DNA, 75 bp, synthetic construct
  source 1..75: mol_type = other DNA
tctagataaagagttttcgagaaaagcattaaatctatctctatcatcaaagataattttatttggtgctgtagg

SEQ ID NO: 122142 - DNA, 75 bp, synthetic construct
  source 1..75: mol_type = other DNA
acggtaccgacacgatggaagaaacagcttacttcctggacctgacggtgaaatgggacaaaccggtggtgatgg

SEQ ID NO: 122143 - DNA, 75 bp, synthetic construct
  source 1..75: mol_type = other DNA
gagcaattaacattattaggctttactgatgagattattgaagtggctcagcaaaacctgatcgatggttgttac

SEQ ID NO: 122144 - DNA, 75 bp, synthetic construct
  source 1..75: mol_type = other DNA
cagcacagggaacccctgcattatacatcgccatgagcaagggtaatgaagacgtcgtgttatcttatatatcga

SEQ ID NO: 122145 - DNA, 75 bp, synthetic construct
  source 1..75: mol_type = other DNA
aatgaccgggttaatcggcttctcgtcaggtttccataccatgatgaacgccgacacgttagtgctactcggcac

SEQ ID NO: 122146 - DNA, 75 bp, synthetic construct
  source 1..75: mol_type = other DNA
atcgccagaattatctggacgggcagttcccgccatcacaatttgctgagattgtatgtaacccggcattacagc

SEQ ID NO: 122147 - DNA, 75 bp, synthetic construct
  source 1..75: mol_type = other DNA
aggtcgcgcaggagctgcaggcgaaattcgacgattttaaggaaaaaaacgacaaacgcatcgacgcgattgagc

SEQ ID NO: 122148 - DNA, 75 bp, synthetic construct
  source 1..75: mol_type = other DNA
ttgccaaaacgctcgaatcggcaggggtgaaacgcatctggggtgtcacaggtgattctcttaacggacttagcg

SEQ ID NO: 122149 - DNA, 75 bp, synthetic construct
  source 1..75: mol_type = other DNA
tatggattcgatgaaataatcgatatctttctgaatgcattaaccactccaatagcacaagagcttttaaacaaa

SEQ ID NO: 122150 - DNA, 75 bp, synthetic construct
  source 1..75: mol_type = other DNA
cgaatttgccgaacaggaagaaattgcctttaccactggtgatggcaccaagaagccgaaagggttcctggcgta

SEQ ID NO: 122151 - DNA, 75 bp, synthetic construct
  source 1..75: mol_type = other DNA
gcacatgaccgctgggagagccggaatattattgcgaataaccatttccgccctattcaggaactgctgatgagg

SEQ ID NO: 122152 - DNA, 75 bp, synthetic construct
  source 1..75: mol_type = other DNA
acctttcctcttttccggctgtaacgcagcgggcactggaaaccctgaatgccgccagaaatgagtggtttgaag

SEQ ID NO: 122153 - DNA, 75 bp, synthetic construct
  source 1..75: mol_type = other DNA
gaagacaaactcgtggcgttaattacgcgttacttaggatcaatcaaacactctgattcgccattagccgcaggt

SEQ ID NO: 122154 - DNA, 75 bp, synthetic construct
  source 1..75: mol_type = other DNA
tgctgaaaatgactctggggcgaagcgcttcttccgttatcggcgtagttcataccgtaaacgaccccgaaagta

SEQ ID NO: 122155 - DNA, 75 bp, synthetic construct
  source 1..75: mol_type = other DNA
cacctccagcaagacgcgcagtgttatcaggagattcctgtatggcaggatcaggaggtgctggagaacgaatct

SEQ ID NO: 122156 - DNA, 75 bp, synthetic construct
  source 1..75: mol_type = other DNA
agaaaaagccgatcgcaagtttctggataaagcgctggaagattaccgcgacgcccgcaaagggctggacgattt

SEQ ID NO: 122157 - DNA, 75 bp, synthetic construct
  source 1..75: mol_type = other DNA
tgagtccactgatgaagatgacaagacccgtgcgtttggcaaacttcagcacattgcttccggtgcggcttctgg

SEQ ID NO: 122158 - DNA, 75 bp, synthetic construct
  source 1..75: mol_type = other DNA
attagcgcaattggctgatgaagcaaagcggatgcgcgagcgtattcaggcgctggaatccattcttgatgcaga

SEQ ID NO: 122159 - DNA, 75 bp, synthetic construct
  source 1..75: mol_type = other DNA
aaacggatgcgcgagcgtattcaggcgctggaatccattcttgatgcagaacatccgaactggagggatcgctaa

SEQ ID NO: 122160 - DNA, 75 bp, synthetic construct
  source 1..75: mol_type = other DNA
gcatggcaaactttggatgtttataataatgtattgccaattttgaaagtaaaattaaatccttcacagttggat

SEQ ID NO: 122161 - DNA, 75 bp, synthetic construct
  source 1..75: mol_type = other DNA
caccagatgcaaattggaatgttacaaagtgaaaagccattgtcatctcaattgaatagtattcataaaaaaata

SEQ ID NO: 122162 - DNA, 75 bp, synthetic construct
  source 1..75: mol_type = other DNA
gggttacctatgaacacaagggtaatcagtatgttgaatatgaaatttccaaagacggcgcgatgtacatcatca

SEQ ID NO: 122163 - DNA, 75 bp, synthetic construct
  source 1..75: mol_type = other DNA
gagttacgcaaactggcgcaactgctgcgttattccagcaatatcgctctgatgtgtggcagcggctgcgcgggg

SEQ ID NO: 122164 - DNA, 75 bp, synthetic construct
  source 1..75: mol_type = other DNA
ttcgataccggatgttggaagccgcaaagcagattagatcgggtagagcatgtattggcgaccatctttttatcg

SEQ ID NO: 122165 - DNA, 75 bp, synthetic construct
  source 1..75: mol_type = other DNA
ccaggaacataaggcgctgttcgatgcgataaggcatcaggacggcgatgcggcagagcaggcggcgcttaccat

SEQ ID NO: 122166 - DNA, 75 bp, synthetic construct
  source 1..75: mol_type = other DNA
gatcaagtttctggaaatttttcttcagcaatcagtagtgttagagtcaataaaatgctctgagttcaagaagtt

SEQ ID NO: 122167 - DNA, 75 bp, synthetic construct
  source 1..75: mol_type = other DNA
cagcacatggaacccctgctttatacatcgccatgagcaagggtaataaagacgtcgtgttatcttatatatcaa

SEQ ID NO: 122168 - DNA, 75 bp, synthetic construct
  source 1..75: mol_type = other DNA
cattcatcataatcattataaaactgtagaaacatattatgctgctataaatgtaatcagccaaagcatgagttt

SEQ ID NO: 122169 - DNA, 75 bp, synthetic construct
  source 1..75: mol_type = other DNA
aattgtcgcaaagtgaacagcagcgattagcgcaactggctgatgaggcaaaacggatgcgcgagcgtattcagg

SEQ ID NO: 122170 - DNA, 75 bp, synthetic construct
  source 1..75: mol_type = other DNA
ataaatggtgaggagatagaaccgttaagtttagagattgttaccaatcgtgtaaaaaaaataaactgtacacta

SEQ ID NO: 122171 - DNA, 75 bp, synthetic construct
  source 1..75: mol_type = other DNA
aaaatattctatcggccatcaaatttgtctgaagaccccaatatgtcatatcaaaaattacgctgggcacgaaaa

SEQ ID NO: 122172 - DNA, 75 bp, synthetic construct
  source 1..75: mol_type = other DNA
attagcgcaactggcagatgaggcaaaacggatgcgtgagcgtattcaggcgctggagtccattcttgatgctga

SEQ ID NO: 122173 - DNA, 75 bp, synthetic construct
  source 1..75: mol_type = other DNA
caaaataaagttgccagtgaacataaagaagcgtttatcggatttatgcgcaaggggcgtgaagacggtctgcgt

SEQ ID NO: 122174 - DNA, 75 bp, synthetic construct
  source 1..75: mol_type = other DNA
cggtggaaaacaccattgagctgttaagcattgaaagtatcaaacgttgtgtcgcggcgaatatcggtgtcagtt

SEQ ID NO: 122175 - DNA, 75 bp, synthetic construct
  source 1..75: mol_type = other DNA
ttttatactgataccgattttaaccctacaacaaaccagcaagtatccttatccagctcatcgacatatctttat

SEQ ID NO: 122176 - DNA, 75 bp, synthetic construct
  source 1..75: mol_type = other DNA
cagaacgcccccagcccggcggcgcaaatccgcatacaaaaacagcgtgaaaaagcgaagaaggggcaaagctgc

SEQ ID NO: 122177 - DNA, 75 bp, synthetic construct
  source 1..75: mol_type = other DNA
tcgaaacccatgttaaccagctttggcatgattttatgaagcagcatggtcaaacccttatccagcttttaagcc

SEQ ID NO: 122178 - DNA, 75 bp, synthetic construct
  source 1..75: mol_type = other DNA
cccgagcactgcggctcaggtcacttttagatatgcatcaacaaccaataatttagttttttataaacctactca

SEQ ID NO: 122179 - DNA, 75 bp, synthetic construct
  source 1..75: mol_type = other DNA
aatttattgagcgagtaaataaagatagtcatgatgcggatgctttttctcggaagctagctaaggcgtatgctc

SEQ ID NO: 122180 - DNA, 75 bp, synthetic construct
  source 1..75: mol_type = other DNA
gactctggtttatatgttggagataccacaccacaaaaattccagtggatcatcacagaccctgatctacaacat

SEQ ID NO: 122181 - DNA, 75 bp, synthetic construct
  source 1..75: mol_type = other DNA
tgctggatagcgatattcctgctgacaccggtgttaaaatcggtacaccgtttagtgacctttacagcaaagcat

SEQ ID NO: 122182 - DNA, 75 bp, synthetic construct
  source 1..75: mol_type = other DNA
atgaagatattcttcagatactttctttttttagcactatgctcttgttgttatacagcaagtgccggcaccgat

SEQ ID NO: 122183 - DNA, 75 bp, synthetic construct
  source 1..75: mol_type = other DNA
gctggggcagccgtcctctctggcgggttacggtatcgctgaaaacgaacagatgccggatatcgccgctgatgc

SEQ ID NO: 122184 - DNA, 75 bp, synthetic construct
  source 1..75: mol_type = other DNA
ttcatcactgttagcaggtttttgctcgcttgctgactggttaggctcctggactacaacgaatacctttctgtt

SEQ ID NO: 122185 - DNA, 75 bp, synthetic construct
  source 1..75: mol_type = other DNA
ggtatttatctacgaccaaaatgttttcgagcgtttttttggctataaagcatggataaaaaatgctgccactga

SEQ ID NO: 122186 - DNA, 75 bp, synthetic construct
  source 1..75: mol_type = other DNA
cgcggcggaagtaattaatcgaaaggcgctgtgtaaggagttggggatctgtaatatcaccctatgccgtctaga

SEQ ID NO: 122187 - DNA, 75 bp, synthetic construct
  source 1..75: mol_type = other DNA
ctgggatgggtgcgtaccacggaagtaacgcgcggcaaggatggtagcgcacatccccattttcacactctgctg

SEQ ID NO: 122188 - DNA, 75 bp, synthetic construct
  source 1..75: mol_type = other DNA
ggcgactctctgaacggtcttagtgacagtcttaatcgcatgggcaccatcgagtggatgtccacccgccatgaa

SEQ ID NO: 122189 - DNA, 75 bp, synthetic construct
  source 1..75: mol_type = other DNA
agtggattgatggctccgcacgccgacctatggtctgctctaggtcagttattcgagggcgcacaataccaaaaa

SEQ ID NO: 122190 - DNA, 75 bp, synthetic construct
  source 1..75: mol_type = other DNA
tttccctaccgcgcgttctacccgaccgatgccaaaattattcagattgatatcaacccagccagcatcggcgcg

SEQ ID NO: 122191 - DNA, 75 bp, synthetic construct
  source 1..75: mol_type = other DNA
gttttatgtcggtatcactcgcacaaaacagcagctaaatctggtggtccctcttgatgaagggcttgcgcggtg

SEQ ID NO: 122192 - DNA, 75 bp, synthetic construct
  source 1..75: mol_type = other DNA
tgagtggattgatgctatatctaaaatagaattatcagaaagtaaaggttatatctacggatggagagaattgct

SEQ ID NO: 122193 - DNA, 75 bp, synthetic construct
  source 1..75: mol_type = other DNA
ttccaccgcaaatcaaactcgaacaagcaaaaggatttagcttgtatatgttgcgggcgatcatcaacggacgtg

SEQ ID NO: 122194 - DNA, 75 bp, synthetic construct
  source 1..75: mol_type = other DNA
atctataacagcacggtagagaaacagaaggctgacttcagcaagtttcaccaatggtatctaagagatcttcag

SEQ ID NO: 122195 - DNA, 75 bp, synthetic construct
  source 1..75: mol_type = other DNA
gggccattatcaatgacgttgggtatccacggttttgtcccgatggggcgagccttaacgcgcgctggggcgaaa

SEQ ID NO: 122196 - DNA, 75 bp, synthetic construct
  source 1..75: mol_type = other DNA
gcgtctaagctcggccagattgagccgttcatgggggaaatttacggtaacccgcaggccactcaaaccatgctg

SEQ ID NO: 122197 - DNA, 75 bp, synthetic construct
  source 1..75: mol_type = other DNA
actacctgtggcgtcctggtctggaactgggtcagccttcctctctggccgggtacggtgtggcagagaacgaac

SEQ ID NO: 122198 - DNA, 75 bp, synthetic construct
  source 1..75: mol_type = other DNA
aggaaaagggaaaacttgctggtgaagtggaaaccctcaacggaaaactggctgaactggaaaatctgaaaagcg

SEQ ID NO: 122199 - DNA, 75 bp, synthetic construct
  source 1..75: mol_type = other DNA
ttcggatgaatgcagcatggaaacgcttgagtgatcgtaaggaattcaggtcggttcttggctggttacgtacga

SEQ ID NO: 122200 - DNA, 75 bp, synthetic construct
  source 1..75: mol_type = other DNA
ggctaccttatcgctacctcaatggttcaagcgcattacacacccgcaccgaaatcgggatactggtagttggcg

SEQ ID NO: 122201 - DNA, 75 bp, synthetic construct
  source 1..75: mol_type = other DNA
ggcctgctgacgtatctgacaaacctttatttcaagattaaagaagataagcgtaaggcggcgcggggagagtaa

SEQ ID NO: 122202 - DNA, 75 bp, synthetic construct
  source 1..75: mol_type = other DNA
tagcgggctattccgccttcttcaccgcgctctctccagacgctcaggacgatatcatcgcccgcaccgaacaca

SEQ ID NO: 122203 - DNA, 75 bp, synthetic construct
  source 1..75: mol_type = other DNA
cgatggacgcggtaaatccactctcttatgcgatcctcgaatcttgcggtcgcctgcgttcgactcagcctaacc

SEQ ID NO: 122204 - DNA, 75 bp, synthetic construct
  source 1..75: mol_type = other DNA
gttttgcggtgagcgaagagaacaaacgtgttctgcatgaagtgtgcccttggtggcgcggtcagaccgtacagg

SEQ ID NO: 122205 - DNA, 75 bp, synthetic construct
  source 1..75: mol_type = other DNA
tgatacgctcaatgtgtatacggtacccgactttaacattagagcggcaatggaaattgaggacaaaaagactgc

SEQ ID NO: 122206 - DNA, 75 bp, synthetic construct
  source 1..75: mol_type = other DNA
gggtgcctggcccacgcccgccgaaaaatccatgacgaggatgtgcgccgtccgacagaaataactcaggaagcg

SEQ ID NO: 122207 - DNA, 75 bp, synthetic construct
  source 1..75: mol_type = other DNA
aatggctatgcctctgtctctgtactgggtaagcgctatcgtcgctccagagtcatctacagcctgtgtaagggt

SEQ ID NO: 122208 - DNA, 75 bp, synthetic construct
  source 1..75: mol_type = other DNA
ctggacgacctggcagcgggttcaggagaatatgataaaaggtggactatcgggaaaaagtgcctccggtaaaaa

SEQ ID NO: 122209 - DNA, 75 bp, synthetic construct
  source 1..75: mol_type = other DNA
ggcgctgaagaaagcgctggagcatgaaaaaacgccggaactggcggctaagctggcgactgaagccattgagcg

SEQ ID NO: 122210 - DNA, 75 bp, synthetic construct
  source 1..75: mol_type = other DNA
aggtgacgtggtacggatgggacggcgaccggctgacgacggtacagaccgacaccacgcgtatccagacggtat

SEQ ID NO: 122211 - DNA, 75 bp, synthetic construct
  source 1..75: mol_type = other DNA
attcatcggatttatatctcagaagtatcgtccaagaaataatttaccagtaaaatcatttcaaagatggattga

SEQ ID NO: 122212 - DNA, 75 bp, synthetic construct
  source 1..75: mol_type = other DNA
tcgctggttgaagcgatggtcgaggccaacggcgagcgtgtaatggcgctaattaatgaagctgctgcccgtggt

SEQ ID NO: 122213 - DNA, 75 bp, synthetic construct
  source 1..75: mol_type = other DNA
tgacctccggcgatgcgcacctggcggtcaatttcccgctgctgctggaaaaagggcttgatggtctgcgtgaga

SEQ ID NO: 122214 - DNA, 75 bp, synthetic construct
  source 1..75: mol_type = other DNA
cgatctggtagtgcgtgtcgcgggttattccgccttcttcaccgcgctctctccagacgctcaggacgatatcat

SEQ ID NO: 122215 - DNA, 75 bp, synthetic construct
  source 1..75: mol_type = other DNA
acgacgatgatactgtcgatacgctgctggctcgcgcttatcagacctatatcgacgaactgaaacagtaccata

SEQ ID NO: 122216 - DNA, 75 bp, synthetic construct
  source 1..75: mol_type = other DNA
tgcacagcaaaaactggctgaagcgttgagcacgttaaaaggttcaacggttgaactgactatcgttgaagatga

SEQ ID NO: 122217 - DNA, 75 bp, synthetic construct
  source 1..75: mol_type = other DNA
agtttcacaaacaaatgtattgacactgatggcaagctggttcgatatgaatggtatatcaatgatgagctaagg

SEQ ID NO: 122218 - DNA, 75 bp, synthetic construct
  source 1..75: mol_type = other DNA
attattctgctcaattctcacgatggctccagttcatatcagatgctaccgggactattccgtgcggtatgccag

SEQ ID NO: 122219 - DNA, 75 bp, synthetic construct
  source 1..75: mol_type = other DNA
tgaacgttacacatatattcccaccatctctctgctggacagtctgcatcgggagggctttcagccgttctttgc

SEQ ID NO: 122220 - DNA, 75 bp, synthetic construct
  source 1..75: mol_type = other DNA
gggaaaaagcgcagcggcgcagcctggcagagacgctccagcaggaagggagtgagaacggccacggcgtggtgt

SEQ ID NO: 122221 - DNA, 75 bp, synthetic construct
  source 1..75: mol_type = other DNA
cggtcaatctcgttcgccgtgatcgtccgttaacccgagatgaactagcgcactatgtcccgagtgtgttcagcg

SEQ ID NO: 122222 - DNA, 75 bp, synthetic construct
  source 1..75: mol_type = other DNA
aacgcatacccgtgcagtgcgcggtatcgacggcgacgttaagctcaaccgggcactgtgggtgatggctgaagc

SEQ ID NO: 122223 - DNA, 75 bp, synthetic construct
  source 1..75: mol_type = other DNA
tgtgtttgattgaagtggaggattgtatgactgctttggataaagcaataaagattgctggtggtattcgcccgt

SEQ ID NO: 122224 - DNA, 75 bp, synthetic construct
  source 1..75: mol_type = other DNA
ccgtccgttaacccgtgaagagttgtttcgagtggtccccagcgtattcagcgaggacaaacacaaatcccgcag

SEQ ID NO: 122225 - DNA, 75 bp, synthetic construct
  source 1..75: mol_type = other DNA
gccccggcccgtcacgcgctggcaaatgctgcgttggaatatcgcttcggtgaggaccaccagccggtcacggta

SEQ ID NO: 122226 - DNA, 75 bp, synthetic construct
  source 1..75: mol_type = other DNA
accgaatcaaactgtacgaccattacacctttgacccaaccattcctcagctactccgagtcaagacaccttacg

SEQ ID NO: 122227 - DNA, 75 bp, synthetic construct
  source 1..75: mol_type = other DNA
atgaacgaatatgaattacagattttcattgatagcgacactgctatgatggtgcaggctttcgctgattccggt

SEQ ID NO: 122228 - DNA, 75 bp, synthetic construct
  source 1..75: mol_type = other DNA
tggcgcgtgaccccccatgatcttagaccggatctttacccaaacccagatgacagcttgcctaaaacgaaagca

SEQ ID NO: 122229 - DNA, 75 bp, synthetic construct
  source 1..75: mol_type = other DNA
tggcggactacagaggtatcctgcaggccgatgcatatgcgggttacaatgctctttacgaaagcggtcaggtaa

SEQ ID NO: 122230 - DNA, 75 bp, synthetic construct
  source 1..75: mol_type = other DNA
gctttggcgtccccccaaagcaggtaattccgctatgtcagctaatgaagtgggaagttaccccgcatgaaattc

SEQ ID NO: 122231 - DNA, 75 bp, synthetic construct
  source 1..75: mol_type = other DNA
tgaactaacaagacctgtattacctaaaagtgcagcccttgattatattccaagtcaatatatatgcgaatttat

SEQ ID NO: 122232 - DNA, 75 bp, synthetic construct
  source 1..75: mol_type = other DNA
tggtggcgcggtcagaccgtacaggatcgctgctatggcatgtttaccgatgagcaaaaaggcctgctggcgacc

SEQ ID NO: 122233 - DNA, 75 bp, synthetic construct
  source 1..75: mol_type = other DNA
cgaccccaaaggggacgcatgggcgccgcacgtcttccgggcgcactgtccggacttcaccctgctggatctgcg

SEQ ID NO: 122234 - DNA, 75 bp, synthetic construct
  source 1..75: mol_type = other DNA
tgattacgtcctcggaggtgccaaagtatatctttgcaaaagtacggtacaccgaaaccgacgagatggccggga

SEQ ID NO: 122235 - DNA, 75 bp, synthetic construct
  source 1..75: mol_type = other DNA
ggcggcgctggaaggcggtcgtgatgccaccagcggcaaagtgttcctgccacaagaaaaagcgttgtcggcagg

SEQ ID NO: 122236 - DNA, 75 bp, synthetic construct
  source 1..75: mol_type = other DNA
acgagccggaaaccgggatgtacctggtgagtgatccgctggggttgcagggaggtgagcagacttaccggtatg

SEQ ID NO: 122237 - DNA, 75 bp, synthetic construct
  source 1..75: mol_type = other DNA
caataccgggatctggtggtgcgtgtcgcgggctattccgccttcttcaccgccctgtcaccggaagctcaggac

SEQ ID NO: 122238 - DNA, 75 bp, synthetic construct
  source 1..75: mol_type = other DNA
tgcgccacctgcatttcggggagccggtaccggttaatgcgctggccgatttttcctcggagcaggcccggcagg

SEQ ID NO: 122239 - DNA, 75 bp, synthetic construct
  source 1..75: mol_type = other DNA
agactttctggcaggcgctgcaactgtgctatttcatccagttgattttgcaaatcgaatccaacggccactccg

SEQ ID NO: 122240 - DNA, 75 bp, synthetic construct
  source 1..75: mol_type = other DNA
ttggccttgctggtcgttatcctgcaagctatcactttattggctacggtgattggtagccgttctggtggttgt

SEQ ID NO: 122241 - DNA, 75 bp, synthetic construct
  source 1..75: mol_type = other DNA
attcagcaggtgctggcggcggcgtacgcgctgccggaggccctgaaaaaggacgtgaaggggttgatcactagg

SEQ ID NO: 122242 - DNA, 75 bp, synthetic construct
  source 1..75: mol_type = other DNA
gcccctgcgccacaagtcgaactggcgaaaagcgggcgcagttttcttaagggcttactgaccaatctcgcgaat

SEQ ID NO: 122243 - DNA, 75 bp, synthetic construct
  source 1..75: mol_type = other DNA
tattccgccttcttcaccgcgctctctccagacgcacaggacgatatcatcgcccgtactgaacatatgctgtaa

SEQ ID NO: 122244 - DNA, 75 bp, synthetic construct
  source 1..75: mol_type = other DNA
acctggtgacgctattaaaagaagtggcagatttcgatatctccgtggcggcgtatccggaagttcacccggaag

SEQ ID NO: 122245 - DNA, 75 bp, synthetic construct
  source 1..75: mol_type = other DNA
gtctgggcagggatcgcgctgcttggcctgcatttgattatcgaaaaaatggcctggctgcatacgctgattatg

SEQ ID NO: 122246 - DNA, 75 bp, synthetic construct
  source 1..75: mol_type = other DNA
ctgggattagagggattgttgaatgctctgatgacggcacattgcgtatatttgaaggcgatatttcggaagaaa

SEQ ID NO: 122247 - DNA, 75 bp, synthetic construct
  source 1..75: mol_type = other DNA
tccctcatggctcgactcaaggagctggaggacgaaaaccgccgcctcaagaagatgtacgccgaggagcgcctc

SEQ ID NO: 122248 - DNA, 75 bp, synthetic construct
  source 1..75: mol_type = other DNA
ccaccatttaccgaaatagcgagtctggaaagggctagccgggcaattgaagaagatcctgataataaagagtaa

SEQ ID NO: 122249 - DNA, 75 bp, synthetic construct
  source 1..75: mol_type = other DNA
ttagcgtgggtatggttggcgaggaaggacatgcctggttaagcggtgtcgctgaaaatcaactgtttaccgtgg

SEQ ID NO: 122250 - DNA, 75 bp, synthetic construct
  source 1..75: mol_type = other DNA
actccaaagcctctgccggtagcccgctgtatcagaacgtcaccatcggtgggcaaaacctggttgatggtcagc

SEQ ID NO: 122251 - DNA, 75 bp, synthetic construct
  source 1..75: mol_type = other DNA
ggtaaaaccaactatcaccggtcttaaatcatccctgaacggattagtctatgacggcttttctttcaaatcgta

SEQ ID NO: 122252 - DNA, 75 bp, synthetic construct
  source 1..75: mol_type = other DNA
cgcaggcgcgcgagtccattattgcggataataatatccagactctgcgtcgattcttcgatgcggaactggatg

SEQ ID NO: 122253 - DNA, 75 bp, synthetic construct
  source 1..75: mol_type = other DNA
ggtaagaaaaatatctatgattttatcaaggcaactcaatctgctatccctggcacctctatcccaaaatctttt

SEQ ID NO: 122254 - DNA, 75 bp, synthetic construct
  source 1..75: mol_type = other DNA
gcccgcagacacagactacccggacccgcgcggggaactggacccggaagccgcccccggcctgctgtatgcggg

SEQ ID NO: 122255 - DNA, 75 bp, synthetic construct
  source 1..75: mol_type = other DNA
ggttcttgaggggcacagcatcccggtgacactgactgataacaatgaagatgtacaaggtagtgcagttgaagt

SEQ ID NO: 122256 - DNA, 75 bp, synthetic construct
  source 1..75: mol_type = other DNA
tacggacctgcttagtcaaacagctggtgataaatgcactctgtttaccacagaggaaaatgcgaatgcttacct

SEQ ID NO: 122257 - DNA, 75 bp, synthetic construct
  source 1..75: mol_type = other DNA
tgggtggaaatagacaacaacatcggtgaaaacgcgttacgatcggtggcggttggaagaaaaaattatctcttc

SEQ ID NO: 122258 - DNA, 75 bp, synthetic construct
  source 1..75: mol_type = other DNA
aaacgctggcgtggtttaccgttgttgccagcctgtttgctctaccgcaaatgcgcaggggttatcaacgtctgg

SEQ ID NO: 122259 - DNA, 75 bp, synthetic construct
  source 1..75: mol_type = other DNA
gtgaacaaaatccgctccggctcacactcaaaagcctctgcgggaagtcctctgtatcagaacgtcaccattggc

SEQ ID NO: 122260 - DNA, 75 bp, synthetic construct
  source 1..75: mol_type = other DNA
gatgcccacagtgagatcggcgggcaatttaatatcgccaaacagatccccggcaaagaggaattttacgaaacg

SEQ ID NO: 122261 - DNA, 75 bp, synthetic construct
  source 1..75: mol_type = other DNA
caccgccgacattctgacgccgcgacgccgggaggattacggtaaggacctgtggagcgcatatcagaccatcca

SEQ ID NO: 122262 - DNA, 75 bp, synthetic construct
  source 1..75: mol_type = other DNA
tacagaatggtgcgcagaatacgatgaatggggcaacctgctgaatgaagagaacccgcatcagctgcagcagct

SEQ ID NO: 122263 - DNA, 75 bp, synthetic construct
  source 1..75: mol_type = other DNA
aagcaaagatccttccatcgtggaattctccagaaaaagaagaatgcttagatattttaatggctataagaaaag

SEQ ID NO: 122264 - DNA, 75 bp, synthetic construct
  source 1..75: mol_type = other DNA
accgccgacattctgacgccgcgacgccgggaggattacggtaaggacctgtggagtacttatcagaccatccag

SEQ ID NO: 122265 - DNA, 75 bp, synthetic construct
  source 1..75: mol_type = other DNA
gtcgagaaacctgatctagctttagcggagcagtttttagctacaaaaaattatctatggaacagtggtatgttt

SEQ ID NO: 122266 - DNA, 75 bp, synthetic construct
  source 1..75: mol_type = other DNA
agcccgcgatcgcttattgcatgaaggttatacgcaaacgtcaatgcgccgttttgtgcgggtgaataatgattc

SEQ ID NO: 122267 - DNA, 75 bp, synthetic construct
  source 1..75: mol_type = other DNA
ggtctacgacaacatggcgtttggcctgaagatgcaaaaaatcgccaaagaggtgattgatgagcgggtgaactg

SEQ ID NO: 122268 - DNA, 75 bp, synthetic construct
  source 1..75: mol_type = other DNA
tgtgctggtggtgatgaacgacaccgtgcttgatggccgtgatgtcaccaaaactaataccaccgatgtagcgac

SEQ ID NO: 122269 - DNA, 75 bp, synthetic construct
  source 1..75: mol_type = other DNA
gtctttgccgttggcggcgtgacgccagaaaacctggcgcagtggatagacgcaggttgtgcaggggcgggctta

SEQ ID NO: 122270 - DNA, 75 bp, synthetic construct
  source 1..75: mol_type = other DNA
tcgacgaacactaataatttagtgttttataaaccaaccggaccaggcatagttaaaacaaatgtgaaactctac

SEQ ID NO: 122271 - DNA, 75 bp, synthetic construct
  source 1..75: mol_type = other DNA
cccgtcaccaccgccgacattctgacaccacgacgccgggaggattacggtaaggacctgtggagtacttatcag

SEQ ID NO: 122272 - DNA, 75 bp, synthetic construct
  source 1..75: mol_type = other DNA
aaaaaagacggaagaaaacgctgacaaaagcacagatatcgcggatcgtgcttattctgcaacaattttcggaag

SEQ ID NO: 122273 - DNA, 75 bp, synthetic construct
  source 1..75: mol_type = other DNA
gatattttaatgagcatacgtgatggtatcagtcaccagataagtataatagatgatgaaatcagaaagttagaa

SEQ ID NO: 122274 - DNA, 75 bp, synthetic construct
  source 1..75: mol_type = other DNA
aaatgtggtggacaagtcattgaaggggcttacgaagtggtgggcgtttttgaccggattgaggaaaagcgtgat

SEQ ID NO: 122275 - DNA, 75 bp, synthetic construct
  source 1..75: mol_type = other DNA
acaaccagcgggtaggcgagttaacgaagttagccaacggcgcgcacactacccgaagacgaaaccgtaacgcat

SEQ ID NO: 122276 - DNA, 75 bp, synthetic construct
  source 1..75: mol_type = other DNA
gcagtttgccggagtcgtaactgttgatcgctctctggaaaaccgccgtatgcaggcagggcaggtaatcagcgg

SEQ ID NO: 122277 - DNA, 75 bp, synthetic construct
  source 1..75: mol_type = other DNA
accagctgacgggaatatctgctctgtattcctcatactgctcatagatcgcatgctgaagcatcgtaatacgtt

SEQ ID NO: 122278 - DNA, 75 bp, synthetic construct
  source 1..75: mol_type = other DNA
acggtaccgacacgatggaagaaaccgcttacttcctagacctgacggtgaaatgcgacaaaccggtggtgatgg

SEQ ID NO: 122279 - DNA, 75 bp, synthetic construct
  source 1..75: mol_type = other DNA
ctatcacacctgttacatcggcaaatggcatctcgacggtcatgactatttcggcacctggcgagtgtccgccgg

SEQ ID NO: 122280 - DNA, 75 bp, synthetic construct
  source 1..75: mol_type = other DNA
aacggctgcgtctgtggccagtctctgggggaagtgcgtgttccgcaccggggaaatgtcgtggagacagtcatt

SEQ ID NO: 122281 - DNA, 75 bp, synthetic construct
  source 1..75: mol_type = other DNA
aacggctgcgtctgtggtcagtctctgggggaagtgcgtgttccgcaccggggaaatgtcgtggatacagtaatt

SEQ ID NO: 122282 - DNA, 75 bp, synthetic construct
  source 1..75: mol_type = other DNA
ttcaaaaattagacgctattatatggttaaaggcttctgttctggtctgaagaaagataaaggtatcatcgataa

SEQ ID NO: 122283 - DNA, 75 bp, synthetic construct
  source 1..75: mol_type = other DNA
cttcaagtctgttaactacggtcctctgggttacattcacaacggtaagattgactaccaacgtaccccggcacg

SEQ ID NO: 122284 - DNA, 75 bp, synthetic construct
  source 1..75: mol_type = other DNA
aaaacggtactgcagtcgtgcgttcttcccgcgtaccgacgggcgctaccactcaggatgccgaagtggatgatg

SEQ ID NO: 122285 - DNA, 75 bp, synthetic construct
  source 1..75: mol_type = other DNA
ttcacaggcgtgccgtttgccatacacattgaaagacgatcaggggcgggtggtttcctatgaaaaacatctgcg

SEQ ID NO: 122286 - DNA, 75 bp, synthetic construct
  source 1..75: mol_type = other DNA
atgttactcaccgatctccttcacggtaatacgcaccagatacgccgtgaccgtccgctgacacacgaagaactg

SEQ ID NO: 122287 - DNA, 75 bp, synthetic construct
  source 1..75: mol_type = other DNA
acggtaccgacacgatggaagaaacggcttacttcctagacctgacggtgaaatgggacaaaccggtggtgatgg

SEQ ID NO: 122288 - DNA, 75 bp, synthetic construct
  source 1..75: mol_type = other DNA
ctgtataacgcggtagtaaccgcagctgataaagcctccgctaatcgtggcgtactggtagtaatgaacgacact

SEQ ID NO: 122289 - DNA, 75 bp, synthetic construct
  source 1..75: mol_type = other DNA
aacggctgcgtctgtggacagtctctgggggaagtgcgtgttccgcaccggggaaatgtcgtggagacagtaatt

SEQ ID NO: 122290 - DNA, 75 bp, synthetic construct
  source 1..75: mol_type = other DNA
tgttaaatcttgggtgtataagtttcctgagatgaaagtcagtacaaagcttaaatacaccatggccccgtcgac

SEQ ID NO: 122291 - DNA, 75 bp, synthetic construct
  source 1..75: mol_type = other DNA
gccaatggcctgacgtggctggtgcttttactgtggagtgagttgtttaaacttgttggcatcacgtttttcaaa

SEQ ID NO: 122292 - DNA, 75 bp, synthetic construct
  source 1..75: mol_type = other DNA
atggttacactcttaaatcctatcttaaggatgaagcaattaggaatgtcactgtctccgtagagcctcgcaatt

SEQ ID NO: 122293 - DNA, 75 bp, synthetic construct
  source 1..75: mol_type = other DNA
actcacagctgcgaaggatggaaaactggggacgaagcctaaagcgtggcgcgatcttgtagtggatggtgaaag

SEQ ID NO: 122294 - DNA, 75 bp, synthetic construct
  source 1..75: mol_type = other DNA
gctgaagtggcaaactgatggcatgaacccctggagagctgaaaaggcgatttgggattttggctgctatctgct

SEQ ID NO: 122295 - DNA, 75 bp, synthetic construct
  source 1..75: mol_type = other DNA
aggatggaaaactggggacgaggccgaaagcgtggcgcgatctgacggtagatggtgaaacgctggaaataaact

SEQ ID NO: 122296 - DNA, 75 bp, synthetic construct
  source 1..75: mol_type = other DNA
caacacgaaagctactcctgaatattcgctctgttcgtgtttttgcgcgagaaaccagctttgaacaactgctgg

SEQ ID NO: 122297 - DNA, 75 bp, synthetic construct
  source 1..75: mol_type = other DNA
ccaatgcccgttgtgatggtttcttccctgaccggcaaagggtcagaagtcacgctgcgcgcgctggagctgggg

SEQ ID NO: 122298 - DNA, 75 bp, synthetic construct
  source 1..75: mol_type = other DNA
cacgggtaacggttactggcgcctcaatgacgaggagctagaaggagagctggcgggcgcaacgatcgccactcg

SEQ ID NO: 122299 - DNA, 75 bp, synthetic construct
  source 1..75: mol_type = other DNA
ccaccggcacgccaggcgctggcacaggcggcactgacttaccgtatggtgacgaacatcagcccgtcaccaccg

SEQ ID NO: 122300 - DNA, 75 bp, synthetic construct
  source 1..75: mol_type = other DNA
cagtagacagttttggtgctgacgatggttttatggcgggcttggtatatagctttcttgaaggatacagtttcc

SEQ ID NO: 122301 - DNA, 75 bp, synthetic construct
  source 1..75: mol_type = other DNA
ttttgcaattgatcttaatggctattgtccgcgatccgcaaaaagcgtcacttccctggacggggccgttgcgtt

SEQ ID NO: 122302 - DNA, 75 bp, synthetic construct
  source 1..75: mol_type = other DNA
ttgtgggggcaaccgattaaagacgacaacgatcgcatcagagctgtaaattcgctgcatcaacaaggggttaaa

SEQ ID NO: 122303 - DNA, 75 bp, synthetic construct
  source 1..75: mol_type = other DNA
ggtgggaatggctgcacgatcgatgttggaagcatcaaagtaagtgattcggatttgctgatgggttcacgggaa

SEQ ID NO: 122304 - DNA, 75 bp, synthetic construct
  source 1..75: mol_type = other DNA
gaggctggcaaagagctgggtgttgatgtcacctacgatggtccaacggagcccagcgtgtccggccaggtccag

SEQ ID NO: 122305 - DNA, 75 bp, synthetic construct
  source 1..75: mol_type = other DNA
tctgtttaccgaggaaggtattgaaaaacctatttatcaattagagaagaatatcttctttctgcctgccgatca

SEQ ID NO: 122306 - DNA, 75 bp, synthetic construct
  source 1..75: mol_type = other DNA
cccctggagagctgaaaaggcgctttgggattttggctgctatctgctgctgatggcaatgttgttgctaccgtg

SEQ ID NO: 122307 - DNA, 75 bp, synthetic construct
  source 1..75: mol_type = other DNA
aacgcaaacgcatgaacaaattgacagcctgacacaagacgtaacccaaacgcatcagcagttaagcaacacgca

SEQ ID NO: 122308 - DNA, 75 bp, synthetic construct
  source 1..75: mol_type = other DNA
atttgcgtcaaagtgaacaggcctctctgactaaaggtcttcaggaaacgtcccttacaccttacaaagcattgc

SEQ ID NO: 122309 - DNA, 75 bp, synthetic construct
  source 1..75: mol_type = other DNA
caatgcgcaacaggcacaagcggacacccagcagcaacaaatggacgatcagcagaaacaaatcgacgcgacgca

SEQ ID NO: 122310 - DNA, 75 bp, synthetic construct
  source 1..75: mol_type = other DNA
cgccaactgggcttcaatgaaagctgatgacgcgcagcacgccattatggtggcgcagacggatattgatgccaa

SEQ ID NO: 122311 - DNA, 75 bp, synthetic construct
  source 1..75: mol_type = other DNA
tgacgaacatcagcccgtcaccaccgccgacattctgacaccacgacgccgggaggattacggtaaggacctgtg

SEQ ID NO: 122312 - DNA, 75 bp, synthetic construct
  source 1..75: mol_type = other DNA
gggttgttttccatgactacgggtttacctttctggcagaccggctggggataaccatgaagacggtatgtgcgc

SEQ ID NO: 122313 - DNA, 75 bp, synthetic construct
  source 1..75: mol_type = other DNA
gctcaactctcatgacggtacctccagctaccagatgctgccggggtacttcaggttcgtctgccagaacggctg

SEQ ID NO: 122314 - DNA, 75 bp, synthetic construct
  source 1..75: mol_type = other DNA
atctttacaatgcgatggagaaaaatggtctgcggggtgtcagtgttaaatatctctgcagcaccgcagaccggt

SEQ ID NO: 122315 - DNA, 75 bp, synthetic construct
  source 1..75: mol_type = other DNA
ggggcttacgaggtggtgggcgtttttgaccggattgaggaaaagcgtgatgccatgcagtcgctggttctgccg

SEQ ID NO: 122316 - DNA, 75 bp, synthetic construct
  source 1..75: mol_type = other DNA
taagaaaaaaactgctcgataacgctgccgaaccctaccgcattaaaaccgtgcgtaacaaaggctatctttttg

SEQ ID NO: 122317 - DNA, 75 bp, synthetic construct
  source 1..75: mol_type = other DNA
tgaatctgcggtgtctgtaggaacatcttttaatgccggaacgcatacggtacttaaagcaggtatttctgcgga

SEQ ID NO: 122318 - DNA, 75 bp, synthetic construct
  source 1..75: mol_type = other DNA
ctaagaactggtgggcatcttaaagctgccagattacacttaaaaagtgatttttttgccgttgttgatattaaa

SEQ ID NO: 122319 - DNA, 75 bp, synthetic construct
  source 1..75: mol_type = other DNA
ccagtcatggcataccgatgaaatccgtaagctgcgtccaagcccggtagatgaagccaaatggggctttgccgt

SEQ ID NO: 122320 - DNA, 75 bp, synthetic construct
  source 1..75: mol_type = other DNA
atagcgcagccgggattatttgatgaaatccagccccgtaaaaacagtgaaaagttaatgaaaacactcgatgaa

SEQ ID NO: 122321 - DNA, 75 bp, synthetic construct
  source 1..75: mol_type = other DNA
gcccgacctggtctggcctggaaagcgatcacgtctcctacaatgcgggatataccaacgttcacgagttaattc

SEQ ID NO: 122322 - DNA, 75 bp, synthetic construct
  source 1..75: mol_type = other DNA
gaagccgacgcatatgattggcggttacgcgcaactggcctggggctttaactactacggcaccgtcggctcgaa

SEQ ID NO: 122323 - DNA, 75 bp, synthetic construct
  source 1..75: mol_type = other DNA
gatccagacccgccagctggcgcaacagatgcgtcgtgaagtgcaggagctggtggatgtgctgttgagcacacc

SEQ ID NO: 122324 - DNA, 75 bp, synthetic construct
  source 1..75: mol_type = other DNA
tccgctccaactggcaggagctaaaccagctgattgccgccgctaacgtctggaccatcaaaacttacggcccgg

SEQ ID NO: 122325 - DNA, 75 bp, synthetic construct
  source 1..75: mol_type = other DNA
tgcgcagggctggagcattaaggatggcggaattcagttgtcagatggtgtatttaagatcaccaagcagagcaa

SEQ ID NO: 122326 - DNA, 75 bp, synthetic construct
  source 1..75: mol_type = other DNA
tattgaaaccatcgctcgtgaatttgccgatactgcccataaaacgcatgggcgctcgatgattatcctcggcgc

SEQ ID NO: 122327 - DNA, 75 bp, synthetic construct
  source 1..75: mol_type = other DNA
cgcccggcggcgacacgccatcggggccgtctgaagatgcatccgtacgcacaatctccctgttgccgacagccg

SEQ ID NO: 122328 - DNA, 75 bp, synthetic construct
  source 1..75: mol_type = other DNA
cgcactgaccaacaatcagttcggtctgggaatttatctgtataccgatgtagcgttacctgacgtcgtggcgat

SEQ ID NO: 122329 - DNA, 75 bp, synthetic construct
  source 1..75: mol_type = other DNA
gcatcagaagtgattctggcgctggcaccggaaaccaacggtcatgttgcagtcaaagcgtggcaggcgctgggc

SEQ ID NO: 122330 - DNA, 75 bp, synthetic construct
  source 1..75: mol_type = other DNA
caaagaaactgacgtggtacttcagccattgttacacgactctccggcagagctatcccaaccttgcgaagtgct

SEQ ID NO: 122331 - DNA, 75 bp, synthetic construct
  source 1..75: mol_type = other DNA
gacgttatttcccgtctgaaagtgcgtatcaacgaagtctataccgcgctgaacatgattgactacggtctggat

SEQ ID NO: 122332 - DNA, 75 bp, synthetic construct
  source 1..75: mol_type = other DNA
ctgaatcatccgaaggcagacctgagcaaagggcagtacggctgtgtcggccagggcttacatattgccaaaaaa

SEQ ID NO: 122333 - DNA, 75 bp, synthetic construct
  source 1..75: mol_type = other DNA
cggctgggactgtcgcatgtcctgttccgtaacggggacatgaagacagcactgaccggaggtctgcagcaccgc

SEQ ID NO: 122334 - DNA, 75 bp, synthetic construct
  source 1..75: mol_type = other DNA
atcgggcggctgatggatgcgtttcgcagcagtgttcatgcgcttaatcgccaccgcgaacagctggcggcgcag

SEQ ID NO: 122335 - DNA, 75 bp, synthetic construct
  source 1..75: mol_type = other DNA
gctcccgttcctgatggtgtggcgatgacgggtaccggtaatccgttcctgatgtcgtacttcactcagaccact

SEQ ID NO: 122336 - DNA, 75 bp, synthetic construct
  source 1..75: mol_type = other DNA
acctgatttcccgcacaaaagcggcattgcagaaaaatcccaaaaacgttctgctggccgtctgctggatgcagg

SEQ ID NO: 122337 - DNA, 75 bp, synthetic construct
  source 1..75: mol_type = other DNA
acgggcgaggaaggtgccgcctggctgtttgccggttccccttctgacggcctgatgggtggcggattcctctat

SEQ ID NO: 122338 - DNA, 75 bp, synthetic construct
  source 1..75: mol_type = other DNA
ctgcatgatgtgcaggatatgagtacgctgaatcatccgaaggcagacctgagcaaagggcagtacggctgtgtc

SEQ ID NO: 122339 - DNA, 75 bp, synthetic construct
  source 1..75: mol_type = other DNA
tatcggttcgctggaagcacgtgccaattaccgcgatgcgctggtggcattccttgagcagcataaagaaaagct

SEQ ID NO: 122340 - DNA, 75 bp, synthetic construct
  source 1..75: mol_type = other DNA
cggtgataccggtccggtactgcgggcgctgaaacggatgatggcgatgcgccactatatgcgttcacaaaccgt

SEQ ID NO: 122341 - DNA, 75 bp, synthetic construct
  source 1..75: mol_type = other DNA
gttcctccgctgtcaccgattcagtcctatgcagatgcgggcggcttgccgaaaagcgaaggcgtgctgcccgcc

SEQ ID NO: 122342 - DNA, 75 bp, synthetic construct
  source 1..75: mol_type = other DNA
atggcaaatgaaacgagaaatgctatcgccttcgtatacaacacaatggactgagatccccattgcttcattctg

SEQ ID NO: 122343 - DNA, 75 bp, synthetic construct
  source 1..75: mol_type = other DNA
ccggcattccaggtcataaaagacagtctgacactggggctgaatgcgctgacgttaactgatatcactaaaaat

SEQ ID NO: 122344 - DNA, 75 bp, synthetic construct
  source 1..75: mol_type = other DNA
atttcagttcatgggcgcgcaggaagcattattccggatcgtctggcaaccgctattctgaacgcagccgggcgc

SEQ ID NO: 122345 - DNA, 75 bp, synthetic construct
  source 1..75: mol_type = other DNA
cacttaacgcccagcgtgatgatttgcgggcaattaccgactctggtgaatcgttgctgaccatcctcaacgata

SEQ ID NO: 122346 - DNA, 75 bp, synthetic construct
  source 1..75: mol_type = other DNA
gcagccgggattatttgatgaaatccagccccgtaaaaacagtgaaaagttaatgaaaacactcgatgaactgaa

SEQ ID NO: 122347 - DNA, 75 bp, synthetic construct
  source 1..75: mol_type = other DNA
gagccctgcatatccctggaagaagccccaccggcaaaacagcagattgtctgtagtcgcagttttggtgaacga

SEQ ID NO: 122348 - DNA, 75 bp, synthetic construct
  source 1..75: mol_type = other DNA
gtgccgcaaatgctggaagattttaaacaacaccccgccattcgcccgctgattagcggcggcaaactgcttgaa

SEQ ID NO: 122349 - DNA, 75 bp, synthetic construct
  source 1..75: mol_type = other DNA
tgcgtaccatcgttgaactagctaaaagccttaagaatattgatgtaagggcaaatttttccattaatgttactg

SEQ ID NO: 122350 - DNA, 75 bp, synthetic construct
  source 1..75: mol_type = other DNA
cgaaagcaacaatccgcagtggaaaaccgtagcagttaataccgcaggtgaactggtggtgccgaacggttcgat

SEQ ID NO: 122351 - DNA, 75 bp, synthetic construct
  source 1..75: mol_type = other DNA
ctgcccacgcggtgcaagctactcatggtatctctacagcgccaaccgcctgaaatacccactaattcgtaagcg

SEQ ID NO: 122352 - DNA, 75 bp, synthetic construct
  source 1..75: mol_type = other DNA
tggactatcaaaacttacgggccggatcgcgttgccggattctctccgattccggcaatgtcgatggtctcttac

SEQ ID NO: 122353 - DNA, 75 bp, synthetic construct
  source 1..75: mol_type = other DNA
gacctgtaagttccgcctgtcaggcgcactgaccaacaatcagttcgggctggggatttatctgtatacggatgc

SEQ ID NO: 122354 - DNA, 75 bp, synthetic construct
  source 1..75: mol_type = other DNA
ggatattacggtgcggcatcgagaacgaatggaaaccaggtatcatcaaaccgcccgacacatttcagttcatgg

SEQ ID NO: 122355 - DNA, 75 bp, synthetic construct
  source 1..75: mol_type = other DNA
ttcgtgagaacctgagtgaaattctggattacctttcttccggtggcagtgtcgttatcacggcgcagggaggga

SEQ ID NO: 122356 - DNA, 75 bp, synthetic construct
  source 1..75: mol_type = other DNA
cctgatttgcgaggacagcctgctcacgcgccaggagcgtgaaaccctggtgcgggccgtggccgccatcggcgc

SEQ ID NO: 122357 - DNA, 75 bp, synthetic construct
  source 1..75: mol_type = other DNA
ggttcgattggtttccgctggggagaaaaaggcaaatggaatctggaatccattgccgccggtacggaaaccgaa

SEQ ID NO: 122358 - DNA, 75 bp, synthetic construct
  source 1..75: mol_type = other DNA
ttaaaagagtttcatctcgataatcccagcgactactttatcaactactgccgccgctacagcgacatgccgatg

SEQ ID NO: 122359 - DNA, 75 bp, synthetic construct
  source 1..75: mol_type = other DNA
tggtttccgctggggagaaaaaggcaaatggaatctggaatccattgccgccggtacggaaaccgaattgtcgtt

SEQ ID NO: 122360 - DNA, 75 bp, synthetic construct
  source 1..75: mol_type = other DNA
atggcaaaagttatctttgagtttacatggctggaaagtagtgacggttgcaatgggcgcagagaagttctggat

SEQ ID NO: 122361 - DNA, 75 bp, synthetic construct
  source 1..75: mol_type = other DNA
atgcgtaatctcgttgttttatctctcagctctgcagcactgtttattccattagtctcgtccgcaatgacaatt

SEQ ID NO: 122362 - DNA, 75 bp, synthetic construct
  source 1..75: mol_type = other DNA
tactgcatgactctccggcagagctctcacagccgtgtgaagtgctcgactggcgcaaaggcgaatgcgatctga

SEQ ID NO: 122363 - DNA, 75 bp, synthetic construct
  source 1..75: mol_type = other DNA
atggcgcacaaaaccaaatttcacaattctgatacccagtacgacaccgtgtacggagggtataaaaacagggag

SEQ ID NO: 122364 - DNA, 75 bp, synthetic construct
  source 1..75: mol_type = other DNA
gatccgcgcattaaacagctggcgcgccgcagcacggtaactccgggtggagagagttgtacgtataacgacatc

SEQ ID NO: 122365 - DNA, 75 bp, synthetic construct
  source 1..75: mol_type = other DNA
gtggtactacgtcatcgtactggccgggcagtccaatgccatggcttacggtgaagggcttccgcttccggattc

SEQ ID NO: 122366 - DNA, 75 bp, synthetic construct
  source 1..75: mol_type = other DNA
ccggcagtgccacggttactccgaaactgaatggagtggctggcccggcattccaggttataaaagacagtctga

SEQ ID NO: 122367 - DNA, 75 bp, synthetic construct
  source 1..75: mol_type = other DNA
accctgaagcagatttaagcaaaggtcagtatgggtgtgtcggacagggcttacatatcgccaaacgtctgctgc

SEQ ID NO: 122368 - DNA, 75 bp, synthetic construct
  source 1..75: mol_type = other DNA
gcggttccacttccacgaacaacgttaccctccgctccggatgcgatgaaaggtccctgttttaccattaatcgg

SEQ ID NO: 122369 - DNA, 75 bp, synthetic construct
  source 1..75: mol_type = other DNA
tatcaggacctgattgcgcgcactaaagctgcattacagaagaacccgaaaaatgtgttgctggcggtgtgctgg

SEQ ID NO: 122370 - DNA, 75 bp, synthetic construct
  source 1..75: mol_type = other DNA
ttgagtttaaggctgttctcgcttacgaaccgaagaagtagccgttgtgcggggagtaatcccataagcgctaac

SEQ ID NO: 122371 - DNA, 75 bp, synthetic construct
  source 1..75: mol_type = other DNA
tgtgcttgccggacagtccaacggcatggcctacggtgaagggcttccgttaccggattcatacgatgctccgga

SEQ ID NO: 122372 - DNA, 75 bp, synthetic construct
  source 1..75: mol_type = other DNA
tgaagatgcatccgtacgcacaatctccctgttgccgacagccggagatgctgctgcgcagggctggagcattaa

SEQ ID NO: 122373 - DNA, 75 bp, synthetic construct
  source 1..75: mol_type = other DNA
ccaggcagagcaataaaacctggtccctgacgcatccggtggatgacgcaattaccctgctgacacagggcggca

SEQ ID NO: 122374 - DNA, 75 bp, synthetic construct
  source 1..75: mol_type = other DNA
tgttgcacttcacgccacgcgggatgaaccagtggcattcgtactgccgggaacggcgttccgtgtctctgccag

SEQ ID NO: 122375 - DNA, 75 bp, synthetic construct
  source 1..75: mol_type = other DNA
tgctgaccgggcatgaaaatgaggtggtatcagcacagacggataccgtgactgatacggctgctctggtcacgg

SEQ ID NO: 122376 - DNA, 75 bp, synthetic construct
  source 1..75: mol_type = other DNA
gtacaccttcaacgatcgtgagcgtgatgcgaaagaggttgtttcgttaactcttcgccctgaaggtacagcagg

SEQ ID NO: 122377 - DNA, 75 bp, synthetic construct
  source 1..75: mol_type = other DNA
gacagacgatgagctggaaaccgtcatgcagcggctggacgatgcctttgagcatggtgctgatgtcagcattgt

SEQ ID NO: 122378 - DNA, 75 bp, synthetic construct
  source 1..75: mol_type = other DNA
ggttacatattgccaaaaaactgctcccgtatatcccgaataacgcggggatcctgctggtaccatgctgtcgtg

SEQ ID NO: 122379 - DNA, 75 bp, synthetic construct
  source 1..75: mol_type = other DNA
ctgtcagacgatgagctggaaaccgtcatgcggcggctggacgatgcttttgtatatggcgcatgtgacagagtt

SEQ ID NO: 122380 - DNA, 75 bp, synthetic construct
  source 1..75: mol_type = other DNA
gggcgtacaaaaacagggagagcgacaacgttttctttgtgccattcctgaccgatggtagtggcaacaatacct

SEQ ID NO: 122381 - DNA, 75 bp, synthetic construct
  source 1..75: mol_type = other DNA
atgaaattacgtgattcgctggcggagaataaatccatccgcctgcaggctgaagcagagacatggcaggacgca

SEQ ID NO: 122382 - DNA, 75 bp, synthetic construct
  source 1..75: mol_type = other DNA
tcatgcagatcgtcaacctgtttgaagatgaagagaatttcgaccgtttacgcgcctgccgtaccgagcaggaag

SEQ ID NO: 122383 - DNA, 75 bp, synthetic construct
  source 1..75: mol_type = other DNA
ccacgaagataacgacccggtggatatcctcatcacgatggcggcagtcgatgccaacacgcatcaggaagtggg

SEQ ID NO: 122384 - DNA, 75 bp, synthetic construct
  source 1..75: mol_type = other DNA
ttcatttagtaaggattactttcgtgaacaaaatagtgatatatataaaatattttttaaaattgcttcttcgag

SEQ ID NO: 122385 - DNA, 75 bp, synthetic construct
  source 1..75: mol_type = other DNA
tacgccggagactctgcatgtctgggtttgccagcatgggcgggataccggggcggtgatggtgggctcaccacc

SEQ ID NO: 122386 - DNA, 75 bp, synthetic construct
  source 1..75: mol_type = other DNA
cggttggtgtgttcgaattcccgaacttccgcaaaggtactgaaatcgtggctaacgctatcgcagacagcgaag

SEQ ID NO: 122387 - DNA, 75 bp, synthetic construct
  source 1..75: mol_type = other DNA
cgatccacgacgtattcgtcaggtcattaccaacctattgagcaatgccctgcgttttactgacgaagggcacat

SEQ ID NO: 122388 - DNA, 75 bp, synthetic construct
  source 1..75: mol_type = other DNA
aaaagtgatggcgctggcaggcagtgaaatgaagcgcctgtatgccgtcgggagtgagagcggaggcgacggtga

SEQ ID NO: 122389 - DNA, 75 bp, synthetic construct
  source 1..75: mol_type = other DNA
ccgaagtccgtcaacggacagttcgtatggttctggaaaatcagggcgaatatgactcccaatgggcagcaattt

SEQ ID NO: 122390 - DNA, 75 bp, synthetic construct
  source 1..75: mol_type = other DNA
ttgctgccgcactggtggattttgatctgccggatatcgacggcattacgcttgcccgacaactggcacagcaat

SEQ ID NO: 122391 - DNA, 75 bp, synthetic construct
  source 1..75: mol_type = other DNA
attaccctgctgacacagggcggcagactgacctgtaagttccgcctgtcaggcgcactgaccaacaatcagttc

SEQ ID NO: 122392 - DNA, 75 bp, synthetic construct
  source 1..75: mol_type = other DNA
cgacacatttcagttcatgggcgcgcaggagcattattccggatcgtctggcaaccgctattctgaacgcagccg

SEQ ID NO: 122393 - DNA, 75 bp, synthetic construct
  source 1..75: mol_type = other DNA
gtcagacgatgagctggaaaccgtcatgcagcggctggacgatgcctttgagcatggtgcggatgtcagcattgt

SEQ ID NO: 122394 - DNA, 75 bp, synthetic construct
  source 1..75: mol_type = other DNA
ttaaggatggcggaattcagttgtcagatggtgtatttaagatcaccaagcagagcaataaaacctggtccctga

SEQ ID NO: 122395 - DNA, 75 bp, synthetic construct
  source 1..75: mol_type = other DNA
gcagcagcaaggatatacttcgcaaggcttcagcttattgtgcgaaggcggatttcgaccgcctcgtgaaaaagt

SEQ ID NO: 122396 - DNA, 75 bp, synthetic construct
  source 1..75: mol_type = other DNA
agttcgaccgcctctggaaaaataatgccactgctggataagctgcgtgagcagtacggggtcggaccggtatgc

SEQ ID NO: 122397 - DNA, 75 bp, synthetic construct
  source 1..75: mol_type = other DNA
aaagatcagcgtctggcgcaggaagcttcacaagaagcggcgcgtcgtaagtcgatcgagaaagagctggagtgg

SEQ ID NO: 122398 - DNA, 75 bp, synthetic construct
  source 1..75: mol_type = other DNA
ctctgcgtgtgtgggttcgtcagcatgagcgggataccgggagtggtgatggtggactcaccaccgctgaacgtc

SEQ ID NO: 122399 - DNA, 75 bp, synthetic construct
  source 1..75: mol_type = other DNA
gtgaaaatcggcgttgacctgctggtggcggcggacgttgtcgagccgcgctattaccaggcgattctggatggc

SEQ ID NO: 122400 - DNA, 75 bp, synthetic construct
  source 1..75: mol_type = other DNA
atgcaggctgtggccattgaaggcgagccacaggtcggtccttcatctgagccggactggtattacgtggttgtg

SEQ ID NO: 122401 - DNA, 75 bp, synthetic construct
  source 1..75: mol_type = other DNA
gcatcccgaacgaacaaaaactgggcatcgtcaaaccgtccgacacatttcagctcatgggcacgcaggggtatt

SEQ ID NO: 122402 - DNA, 75 bp, synthetic construct
  source 1..75: mol_type = other DNA
atgatgttgtcagggcggcgtcgccgttcagaccttgcggaaaagctgacacacaaactgaaagagggctggcag

SEQ ID NO: 122403 - DNA, 75 bp, synthetic construct
  source 1..75: mol_type = other DNA
gccggacagtgaatgcgtttttgccgtggtgctgacccgtggggatgtgcgtcacatagcccaggactggaacct

SEQ ID NO: 122404 - DNA, 75 bp, synthetic construct
  source 1..75: mol_type = other DNA
gatggtgggctcaccagcgctgaacgtcagcgtctgaaagagctggaacgtgaaaatcgtgaactgcgccgcagt

SEQ ID NO: 122405 - DNA, 75 bp, synthetic construct
  source 1..75: mol_type = other DNA
aaaataaatccatccgtctgcaggccgaagctgaaacctggcaggaggcggtaaaaatcggcgttgacctgctgg

SEQ ID NO: 122406 - DNA, 75 bp, synthetic construct
  source 1..75: mol_type = other DNA
agggtatccagccacagttgcagatgaaacgcgagatgctttcacctagatatacaacgagatatgatgacatat

SEQ ID NO: 122407 - DNA, 75 bp, synthetic construct
  source 1..75: mol_type = other DNA
tcgacacccgtagcgtcagtgagatgcgccagataccgccaaacggcttcccggaaaaagcacttaacttcctga

SEQ ID NO: 122408 - DNA, 75 bp, synthetic construct
  source 1..75: mol_type = other DNA
gttgctgaaggtgaactggttgttctggaaaacgttcgcttcaacaaaggcgagaagaaagacgacgaaaccctg

SEQ ID NO: 122409 - DNA, 75 bp, synthetic construct
  source 1..75: mol_type = other DNA
tcgttgctgaccatcctcaacgatattctcgattattcggctatcgaagcaggcggcaagaatgtttcggtcagc

SEQ ID NO: 122410 - DNA, 75 bp, synthetic construct
  source 1..75: mol_type = other DNA
gtgggtgtctgcggtaaagaagggcaaagtttgccggttggcgtgggccagccaacgctgaaagtcgataacctg

SEQ ID NO: 122411 - DNA, 75 bp, synthetic construct
  source 1..75: mol_type = other DNA
ccgctattctgaacgcagttggtcgaaccagcgccttcatcagcggtaccgcaccggaaatcaaaccctcgcccg

SEQ ID NO: 122412 - DNA, 75 bp, synthetic construct
  source 1..75: mol_type = other DNA
ggcgttgagatagaaagtctggtgctggagataaatgcaccggcagcatataaaaaagagccagcgactgacctg

SEQ ID NO: 122413 - DNA, 75 bp, synthetic construct
  source 1..75: mol_type = other DNA
cgaaagcaacaatccgcagtggaaaaccgtggcagttaatactgcgggtgaactggtggtgcctaacggttcgat

SEQ ID NO: 122414 - DNA, 75 bp, synthetic construct
  source 1..75: mol_type = other DNA
tgtatttaagatcaccaggcagagcaataaaacctggtccctgacgcatccggtggatgacgcaattaccctgct

SEQ ID NO: 122415 - DNA, 75 bp, synthetic construct
  source 1..75: mol_type = other DNA
ctgatttcacaccatcgggtatagcgcagccgggattatttgatgaaatccagccccgtaaaaacagtgaaaagt

SEQ ID NO: 122416 - DNA, 75 bp, synthetic construct
  source 1..75: mol_type = other DNA
ctgaatgcgctgacgttaactgatatcactaaaaatgccgcgtacggcgtcgatatcggcagcctggtgctggaa

SEQ ID NO: 122417 - DNA, 75 bp, synthetic construct
  source 1..75: mol_type = other DNA
ccacacgaagaaattacacgcagtgttgccgatctggaagcatggttgaataagaaagacctgaacgcgatttga

SEQ ID NO: 122418 - DNA, 75 bp, synthetic construct
  source 1..75: mol_type = other DNA
cgactggtataactccagctacatcattgcctggggttctaacgtaccgcagacgcgcacgccagacgcccactt

SEQ ID NO: 122419 - DNA, 75 bp, synthetic construct
  source 1..75: mol_type = other DNA
acgttgcgtgcgcaggcccgctgctggcggctgaacttgacgcgctgggtaaagcactgaaagaaccagctcgtc

SEQ ID NO: 122420 - DNA, 75 bp, synthetic construct
  source 1..75: mol_type = other DNA
ttgaagttgtggcgattcgcgaagcgactgaagaagaactggctcatggtcacgttcacggcgcgcacgatcacc

SEQ ID NO: 122421 - DNA, 75 bp, synthetic construct
  source 1..75: mol_type = other DNA
agaagacggggtgttggttgatgagtctccggtgagtgcgccgctggactacctgcatggtcacggttccctgat

SEQ ID NO: 122422 - DNA, 75 bp, synthetic construct
  source 1..75: mol_type = other DNA
atgactaaaaatactcgtttttcccccgaagtccgtcaacgggcagttcgtatggttctggaaagtcaggacgaa

SEQ ID NO: 122423 - DNA, 75 bp, synthetic construct
  source 1..75: mol_type = other DNA
caccccgtggtatctcatgcaggccatggtggccgatggtgccaccgagacgccctctgagccattaccaaacaa

SEQ ID NO: 122424 - DNA, 75 bp, synthetic construct
  source 1..75: mol_type = other DNA
gcaccggaaatcaaaccctcgcccggcggcgacacgccatcggggccgtctgaagatgcatccgtacgcacaatc

SEQ ID NO: 122425 - DNA, 75 bp, synthetic construct
  source 1..75: mol_type = other DNA
gatttgctggcgctgtatcagcaggacagtgaaatcagcaatcacctgcaaactctcgcccaaaataacatcgcc

SEQ ID NO: 122426 - DNA, 75 bp, synthetic construct
  source 1..75: mol_type = other DNA
ctttatagattcatttgctaaagcaagtatctctgacagagaaaataatatatatcctgttatttgtgattctcc

SEQ ID NO: 122427 - DNA, 75 bp, synthetic construct
  source 1..75: mol_type = other DNA
atcaggcggtgcgtctggacggtttacgattactgttgattgaagataacccgctaacccaacgaattaccgtcg

SEQ ID NO: 122428 - DNA, 75 bp, synthetic construct
  source 1..75: mol_type = other DNA
atcctgctggtaccatgctgtcgtggtggttcggcattcactcagggcgcggagggaacattcagtacgaccacg

SEQ ID NO: 122429 - DNA, 75 bp, synthetic construct
  source 1..75: mol_type = other DNA
atgagatccgcacaccgctgtacggtattctcggcaccgcgcaactgctggcagataaccccgcacttaacgccc

SEQ ID NO: 122430 - DNA, 75 bp, synthetic construct
  source 1..75: mol_type = other DNA
accgactgcgttaatgggcgatccgcggcgtattcgtcaggtcattaccaacctgttgagcaacgccctgcgttt

SEQ ID NO: 122431 - DNA, 75 bp, synthetic construct
  source 1..75: mol_type = other DNA
tgagtggcgtctatgaattaattttggttgctgcgactgacggcacgctggcggcggatgttcgcccgctggtgc

SEQ ID NO: 122432 - DNA, 75 bp, synthetic construct
  source 1..75: mol_type = other DNA
gatgaaatcgacattgcccgcgccagtcaggatagcgagaaaataaagcgtgccgcacatcagctaaaaagcagt

SEQ ID NO: 122433 - DNA, 75 bp, synthetic construct
  source 1..75: mol_type = other DNA
gccagaacagcgaaaaaataaagcgtgccgcacatcagctaaaaagcagttgctcgagtctgggaatgcgtagcg

SEQ ID NO: 122434 - DNA, 75 bp, synthetic construct
  source 1..75: mol_type = other DNA
gttcgctatttcgcgggattatccctaaaccggtgccgcgtgaagtgctcggtcagttactggcgcactatctcc

SEQ ID NO: 122435 - DNA, 75 bp, synthetic construct
  source 1..75: mol_type = other DNA
atcaaaaaaactggcggtgctgctaaccgtataacggcaaatgctattaaagacccggttactggttgggtcttc

SEQ ID NO: 122436 - DNA, 75 bp, synthetic construct
  source 1..75: mol_type = other DNA
aaatcgcgccagactgggatgtgaaactgactgacgatttacgtttcaacggttggttgtcgatgtataaatttg

SEQ ID NO: 122437 - DNA, 75 bp, synthetic construct
  source 1..75: mol_type = other DNA
ctttccgtttcgctggaatacgcgtttgagtggcaggatcacgacgaaggcgacagcgataaattccattatgca

SEQ ID NO: 122438 - DNA, 75 bp, synthetic construct
  source 1..75: mol_type = other DNA
ggataagcgaggacttgagagcaagacccaggcaaaccatgaactggcaagtctgagccgtgtatacggatgggg

SEQ ID NO: 122439 - DNA, 75 bp, synthetic construct
  source 1..75: mol_type = other DNA
ttatctcgagcgcggcttcaatatggacgacagccgcaataacggtgagttttccacgcaagaaattcgcgccta

SEQ ID NO: 122440 - DNA, 75 bp, synthetic construct
  source 1..75: mol_type = other DNA
tgtacgaaatagaaaacgtcgagggttatggcgaagatatggatgggctggcggagccttctgtctattttaatg

SEQ ID NO: 122441 - DNA, 75 bp, synthetic construct
  source 1..75: mol_type = other DNA
ggccgggcagaaaaaggatgaggctctgtcggcagcgacacgagctgaaaaggcggcagaccgcgcagaagccgc

SEQ ID NO: 122442 - DNA, 75 bp, synthetic construct
  source 1..75: mol_type = other DNA
tgaatttggtttttcatttgcaaaaatgaaaactaaggaaaatatgacgggtcaatcatccgctcttagtttgca

SEQ ID NO: 122443 - DNA, 75 bp, synthetic construct
  source 1..75: mol_type = other DNA
tattaatattgttttgagagcaccggttcgtttaatgcctaactttatgagaaagattatttatagaaatttact

SEQ ID NO: 122444 - DNA, 75 bp, synthetic construct
  source 1..75: mol_type = other DNA
gcgtatccggtttgataaatatgacggtagcgcaacaacttttcttggtgatgcgtatattgatacacaaacgct

SEQ ID NO: 122445 - DNA, 75 bp, synthetic construct
  source 1..75: mol_type = other DNA
ataaaaaaattactgttggtgcggatgttgtcactatgcctagtgacaagattgttagttttacccgtgcatcaa

SEQ ID NO: 122446 - DNA, 75 bp, synthetic construct
  source 1..75: mol_type = other DNA
ccgccaacgggccgtggagaattgctctggcctattatcaggaagggccggtagattatagcgcgggtaaacgtg

SEQ ID NO: 122447 - DNA, 75 bp, synthetic construct
  source 1..75: mol_type = other DNA
gattcagtatgcgccgaaagagggtgggaagacagaagctgatgattatatctatcttgccacaccgcaattcga

SEQ ID NO: 122448 - DNA, 75 bp, synthetic construct
  source 1..75: mol_type = other DNA
cctctggagcgtgaaaaccaccgggggtgaagatggctatgtttatacgctcatcgagcaccagagcaccgaaaa

SEQ ID NO: 122449 - DNA, 75 bp, synthetic construct
  source 1..75: mol_type = other DNA
gtgatcaacacaaccaaaggcgggaaggtcatagctaaaacgctgaacaactggtggaatcaggctaaacgtgca

SEQ ID NO: 122450 - DNA, 75 bp, synthetic construct
  source 1..75: mol_type = other DNA
ttttccgccttcacatgccgggaccattaccgtctatgaaggttccagaccaggtacgctgaatgattttcttgg

SEQ ID NO: 122451 - DNA, 75 bp, synthetic construct
  source 1..75: mol_type = other DNA
tttcctgcgtcggtgcggaaaagtggtcaatgcaatgctgactgtttacccgtatcttgaaaattatgttgatgc

SEQ ID NO: 122452 - DNA, 75 bp, synthetic construct
  source 1..75: mol_type = other DNA
atgattaccgtcattgagcatgaagaacacactcgtcgcacatggccgataagagcaggaaagttaacatggctg

SEQ ID NO: 122453 - DNA, 75 bp, synthetic construct
  source 1..75: mol_type = other DNA
tgcaatatctcgccaatatgttgagtgccggtgataccggtccggtactgcgggcgctgaaacggatgatggcga

SEQ ID NO: 122454 - DNA, 75 bp, synthetic construct
  source 1..75: mol_type = other DNA
gatctgactggcgcaatatttgggtggttggcgatctgcatggttgttacacaaacctgatgggaaagctggatg

SEQ ID NO: 122455 - DNA, 75 bp, synthetic construct
  source 1..75: mol_type = other DNA
gatataggtggttcagaccgacgaataaatgaaaatgccgggctggaaaaaatgcttattggtatgcgggtaaag

SEQ ID NO: 122456 - DNA, 75 bp, synthetic construct
  source 1..75: mol_type = other DNA
tttccgccatgatggggaaattaatattttttgcgctcccaacccaaagcctgtcactatggggcgcgtatttca

SEQ ID NO: 122457 - DNA, 75 bp, synthetic construct
  source 1..75: mol_type = other DNA
cgcgggatgtggtgaagatgaacctgccacgcgtgctggagaatctgcgtttgctggtgagtgagggtgtcaacg

SEQ ID NO: 122458 - DNA, 75 bp, synthetic construct
  source 1..75: mol_type = other DNA
tggttctgcaagcgcggcggctgcttctgccactgcatcagctaacagtcaaaaagcagcaaaaaccagtgaaac

SEQ ID NO: 122459 - DNA, 75 bp, synthetic construct
  source 1..75: mol_type = other DNA
ggagccagatacaggtgaggttaaggcgtacggtaataaggcgctggtgacattcagaacggaaaaacaggggga

SEQ ID NO: 122460 - DNA, 75 bp, synthetic construct
  source 1..75: mol_type = other DNA
gcgctgactggtgcaatatcttcgtcgtcggcgatctgcatgggtgctacacgctgttgatgaacgaactcgaca

SEQ ID NO: 122461 - DNA, 75 bp, synthetic construct
  source 1..75: mol_type = other DNA
ctaccacagagcacatcgaagccatcgttccacatgttcgccaggctgatatcgatgaatttctggcaaccaatg

SEQ ID NO: 122462 - DNA, 75 bp, synthetic construct
  source 1..75: mol_type = other DNA
ctgtcactatggggcgcgtatttcagaccggcgtggagcgtgtgctcttcctgtttctgaatgactttattgaac

SEQ ID NO: 122463 - DNA, 75 bp, synthetic construct
  source 1..75: mol_type = other DNA
ggtaaatcgcagtggcaatggattggtgataaaaaatgactcagctaattgggtgacgatttcggatgtcaaagc

SEQ ID NO: 122464 - DNA, 75 bp, synthetic construct
  source 1..75: mol_type = other DNA
atgcgaacaaaagataatatgacaggacaatcatctgcacttagtctgcatacatgcagtgcatcccgggggatt

SEQ ID NO: 122465 - DNA, 75 bp, synthetic construct
  source 1..75: mol_type = other DNA
caattacatacgcttttaacacaactgagaaatattacggtcagctttatatgcaaacttataaagcgtcgacaa

SEQ ID NO: 122466 - DNA, 75 bp, synthetic construct
  source 1..75: mol_type = other DNA
tgcggcggataactcagcgaaagcatcggcagcaagccagacggcagctaaagcaagcgaagacgcagccaggga

SEQ ID NO: 122467 - DNA, 75 bp, synthetic construct
  source 1..75: mol_type = other DNA
tcaccacccacagcctttactcttggataaagaagtacggtccggattctttcactaataaagaacagtcagatg

SEQ ID NO: 122468 - DNA, 75 bp, synthetic construct
  source 1..75: mol_type = other DNA
cggcaaagaaatccgaaactgcagcggcatcatcgaagaacgcggcgaaaacctcagaaacgaatgcagctaaca

SEQ ID NO: 122469 - DNA, 75 bp, synthetic construct
  source 1..75: mol_type = other DNA
aatcagacccagccagcgcccggcgcgatggtgccacaagaagcttttccacgaagtcaccacggcgaagatcag

SEQ ID NO: 122470 - DNA, 75 bp, synthetic construct
  source 1..75: mol_type = other DNA
agcggcggcaaagaaatccgaaacggcagcggcatcatcgaagaacgcggcgaaaacctcagaaacgaatgcagc

SEQ ID NO: 122471 - DNA, 75 bp, synthetic construct
  source 1..75: mol_type = other DNA
cttcggcttaggttttgaaaccaccatgccgaccaccgccatcactctgcaacaggcgaaagcgcgtgatgtgca

SEQ ID NO: 122472 - DNA, 75 bp, synthetic construct
  source 1..75: mol_type = other DNA
atgaaaactctacctgcaacaaatccgcaggcggcgaagctatgtctgtcgcccgtggcagtgtggcaaatgctg

SEQ ID NO: 122473 - DNA, 75 bp, synthetic construct
  source 1..75: mol_type = other DNA
acgatttcggatgtcaaagctaataatgttaaagtcaattatgaaactattatgattgcccccttagaaagtcag

SEQ ID NO: 122474 - DNA, 75 bp, synthetic construct
  source 1..75: mol_type = other DNA
tttccggtaagaatgactctagaaaagaagaaaataaattgcctgatgttgatttagaaaagtataaagatgaat

SEQ ID NO: 122475 - DNA, 75 bp, synthetic construct
  source 1..75: mol_type = other DNA
ttttcatcgtccgctggtggtcgctggtttcgaaccccttgatctactgcaaggcgtggtgatgctggtggagca

SEQ ID NO: 122476 - DNA, 75 bp, synthetic construct
  source 1..75: mol_type = other DNA
tcgttcctggcgaatcccgacgtcgccagagattttctggaactgcatcttccggcggagtaccggcagttgtgc

SEQ ID NO: 122477 - DNA, 75 bp, synthetic construct
  source 1..75: mol_type = other DNA
ttaagatttgaacaccatgatggttatacttacacttttttgggagatgcttacctcaatttatcaacacttgta

SEQ ID NO: 122478 - DNA, 75 bp, synthetic construct
  source 1..75: mol_type = other DNA
ccagctctcaggcctggaaccccagtccgctgaaaaccgcagagctgattcaggcagatatggctcaggtgggtg

SEQ ID NO: 122479 - DNA, 75 bp, synthetic construct
  source 1..75: mol_type = other DNA
ggcgacaattaaggcacttgatacagaaaatatgataggtggaatggttcagtatgccccggcaaaaggagtggg

SEQ ID NO: 122480 - DNA, 75 bp, synthetic construct
  source 1..75: mol_type = other DNA
ttcttcccccaatcatggagcttgcatatgactcccatgagtccctaaaagaagtcctcaaggaaaatggaacaa

SEQ ID NO: 122481 - DNA, 75 bp, synthetic construct
  source 1..75: mol_type = other DNA
tacacattcttaggtgacgcttacttaaatacgacagatttatctattgataagacgggtggtgccgctaatcgc

SEQ ID NO: 122482 - DNA, 75 bp, synthetic construct
  source 1..75: mol_type = other DNA
gatgcgctggagcgggaagtgatgaaagatgacattttctttcgcacgtctggcggtggtgtcacgctttctggc

SEQ ID NO: 122483 - DNA, 75 bp, synthetic construct
  source 1..75: mol_type = other DNA
tatatttatcttgccaccccacaagtagagaatgggccgtgtgtatcatcatttattatttcaggaggcagcgca

SEQ ID NO: 122484 - DNA, 75 bp, synthetic construct
  source 1..75: mol_type = other DNA
acagtttgggtttcatccatacatagtgaaactcgccaacgatataacaggatggcctcgatatattcctggtga

SEQ ID NO: 122485 - DNA, 75 bp, synthetic construct
  source 1..75: mol_type = other DNA
ccgcagatattcccgtggcgagcgataacccagtgcactatgcggatgccattcgttataatgctcgaacgcctc

SEQ ID NO: 122486 - DNA, 75 bp, synthetic construct
  source 1..75: mol_type = other DNA
atgagtggtaagcgttatcccgaagagtttaaaactgaagcagtcaaacaggttgttgatcacggttattctgtt

SEQ ID NO: 122487 - DNA, 75 bp, synthetic construct
  source 1..75: mol_type = other DNA
accttaatgattttggcaatacaccaaagcgcggtgaaaaaactgttgaggccgctttaattattggcgacaaaa

SEQ ID NO: 122488 - DNA, 75 bp, synthetic construct
  source 1..75: mol_type = other DNA
tcatttatttggtcatgtcaggaatttcagaatatggcacaaggcattgactgatgctcaggtgggtggatttgc

SEQ ID NO: 122489 - DNA, 75 bp, synthetic construct
  source 1..75: mol_type = other DNA
gcgttcaacaccaataaaccgccgttgaataaccccgccgtgcggcatgcgctggcgctggcgatcaacaaccag

SEQ ID NO: 122490 - DNA, 75 bp, synthetic construct
  source 1..75: mol_type = other DNA
aactggtaaccatgtttggtgtatctccggcgtcaatgatcggtggcaatggtacgccctggctggtcggaacca

SEQ ID NO: 122491 - DNA, 75 bp, synthetic construct
  source 1..75: mol_type = other DNA
ggcaaacctcagccattaatatggcatcaattgctgcaacaaagtcagttgatgtctcaggcgataataaacacg

SEQ ID NO: 122492 - DNA, 75 bp, synthetic construct
  source 1..75: mol_type = other DNA
tgaaacggatgatggcgatgcgccactatatgcgttcacaaaccgtggaaggcgttactgatactcgtgccatcg

SEQ ID NO: 122493 - DNA, 75 bp, synthetic construct
  source 1..75: mol_type = other DNA
tcgccatcatataaaaagattgttattggtgatgatgaaataacgatgcctggcgataaggttgtaaagtttaaa

SEQ ID NO: 122494 - DNA, 75 bp, synthetic construct
  source 1..75: mol_type = other DNA
acatgccgggaccattaccgtctatgaaggttccagaccaggtacgctgaatgattttctcggcgccatgacgga

SEQ ID NO: 122495 - DNA, 75 bp, synthetic construct
  source 1..75: mol_type = other DNA
cgatccgaaattcgacagcgtattgcgtaaggcgctctcttcgcagcagctggcggcgcgtattgaagcctatga

SEQ ID NO: 122496 - DNA, 75 bp, synthetic construct
  source 1..75: mol_type = other DNA
cgcaattcgatgcgttatgtggtggattatgcggcaatgaacgaccgcaggttgtggctcaagggattcgcctcg

SEQ ID NO: 122497 - DNA, 75 bp, synthetic construct
  source 1..75: mol_type = other DNA
aacgacttggtgaactgtcccggattctgggtcgggaaccggatatgtcgggaagcgcagcagatattgcgcagc

SEQ ID NO: 122498 - DNA, 75 bp, synthetic construct
  source 1..75: mol_type = other DNA
tccagccagacggcagcgaagaccagcgaaacgaatgccaaagccagcgaaactgcggcgaaaaacagtcaggat

SEQ ID NO: 122499 - DNA, 75 bp, synthetic construct
  source 1..75: mol_type = other DNA
tagcggcagatgtggtagagccgcgttactaccaggcgattctggatgcggttgaacagcacggcccgtactttg

SEQ ID NO: 122500 - DNA, 75 bp, synthetic construct
  source 1..75: mol_type = other DNA
ctggaacgtgaaaatcgtgaactgcgccgcagtaacgatatccttcgccaggcttccgcttatttttgcgaaggc

SEQ ID NO: 122501 - DNA, 75 bp, synthetic construct
  source 1..75: mol_type = other DNA
tcaccatgacgcagaaccagatcacctacgatcgtctgaacgtgacgctgacccgtgatgacgtgatgggcgaaa

SEQ ID NO: 122502 - DNA, 75 bp, synthetic construct
  source 1..75: mol_type = other DNA
ccggattgcggggatgtgggcgacagcattgccagtgaggctgatttaagccaggggttaatgtcccggtttatc

SEQ ID NO: 122503 - DNA, 75 bp, synthetic construct
  source 1..75: mol_type = other DNA
tcttagcggtatcgccagcaaagttgagattgcaggtccgggctttatcaatattttccttgatccggcattcct

SEQ ID NO: 122504 - DNA, 75 bp, synthetic construct
  source 1..75: mol_type = other DNA
aacgtattaccactgtcagcaacagcgacatcatccggataaacgcagtgcccgtgcgcagcgcgatgactggct

SEQ ID NO: 122505 - DNA, 75 bp, synthetic construct
  source 1..75: mol_type = other DNA
tcagcgaaagcatcggcagcaagccagacggcagctaaagcaagcgaagatgcagccagagagtacgcaagccag

SEQ ID NO: 122506 - DNA, 75 bp, synthetic construct
  source 1..75: mol_type = other DNA
ttcatttgaaccagataaaatttccagtggaataacgtccattcataaaattcctgctggaacttcgatatattc

SEQ ID NO: 122507 - DNA, 75 bp, synthetic construct
  source 1..75: mol_type = other DNA
gactatatttatctggctacccctcaggttgaggatggttcgtgtgtatcatcttttattatatcaggaacgacg

SEQ ID NO: 122508 - DNA, 75 bp, synthetic construct
  source 1..75: mol_type = other DNA
cctgtggcgcggtgtctggcttccatgcgctgatctcttccggcaccacaccgaagatgctggcgaacgaagggc

SEQ ID NO: 122509 - DNA, 75 bp, synthetic construct
  source 1..75: mol_type = other DNA
caacgttacgcctgggtggcgctggtaccaacggcctggctgctgatttgtaccctgaccgcaggctggcagaaa

SEQ ID NO: 122510 - DNA, 75 bp, synthetic construct
  source 1..75: mol_type = other DNA
ccaacggcgaaagaaacgccatatgagccgatgccggaaaatgtcgaggagatcgtggcgcaggcgaaaggcgcg

SEQ ID NO: 122511 - DNA, 75 bp, synthetic construct
  source 1..75: mol_type = other DNA
ttttcgccatcatataaaaagattgttattggtgacgacgaaataacgatgcctggtgacaaggttgttaagttt

SEQ ID NO: 122512 - DNA, 75 bp, synthetic construct
  source 1..75: mol_type = other DNA
tggcccggtatggaccggtaatctgttcccgttcctgtttattactatcgcctgtggcgcggtgtctggcttcca

SEQ ID NO: 122513 - DNA, 75 bp, synthetic construct
  source 1..75: mol_type = other DNA
ccaacggcaaaagaaacgccgtatgagccgatgccagaaaatgtcgaggagatcgtggcgcaggcaaaaggcgcg

SEQ ID NO: 122514 - DNA, 75 bp, synthetic construct
  source 1..75: mol_type = other DNA
ttcgctgctggcgctggggcatacgtcaggggcagatacgctgctggggttctggcttggccaacaattattaca

SEQ ID NO: 122515 - DNA, 75 bp, synthetic construct
  source 1..75: mol_type = other DNA
agaaagagctttttttcttaaaaaaacaagggtatgaattttccaaaaaatttcctaagatagctaggaggcttg

SEQ ID NO: 122516 - DNA, 75 bp, synthetic construct
  source 1..75: mol_type = other DNA
gatatgcatccgtttattcatccgctttctgcggcggtcgatccggcctgggagtcacgcagcgactgggaaatc

SEQ ID NO: 122517 - DNA, 75 bp, synthetic construct
  source 1..75: mol_type = other DNA
tggcagagctggaagaggagcttgatgacacggatgacgctgctggtcaggacacatctgtcagcccggaaaatg

SEQ ID NO: 122518 - DNA, 75 bp, synthetic construct
  source 1..75: mol_type = other DNA
atgcgcccgacgctgaccatgcctgcgctgaccaaatttgtcgatggcactggcccggtatggaccggtaacctg

SEQ ID NO: 122519 - DNA, 75 bp, synthetic construct
  source 1..75: mol_type = other DNA
ggaaaccgggcttttcgggccactggcgttggcggcaagcgatccgctgcctgctgagttacgccagtttcgtca

SEQ ID NO: 122520 - DNA, 75 bp, synthetic construct
  source 1..75: mol_type = other DNA
atgacgatcatccatcctctgcttgccagccgtagtgcaccgaattattgccagtcctggcggttagcgggcatc

SEQ ID NO: 122521 - DNA, 75 bp, synthetic construct
  source 1..75: mol_type = other DNA
caatgtcgcccgcgccattgcccatctgggaggcactgccacagcgatcttcccggcgggtggcgcgaccggcga

SEQ ID NO: 122522 - DNA, 75 bp, synthetic construct
  source 1..75: mol_type = other DNA
gtataaatatgtcttacagccactgcctgatgtgtggataccgtttaacgattcactggatatgattacgggctt

SEQ ID NO: 122523 - DNA, 75 bp, synthetic construct
  source 1..75: mol_type = other DNA
ccggcacgctgaatgattttctcggcgccatgacggaagatgatgtcatgccggaggcattgcgtcgttttgagg

SEQ ID NO: 122524 - DNA, 75 bp, synthetic construct
  source 1..75: mol_type = other DNA
caggcacgctgaatgattttctcggtgccatgacggaagacgatgtcatgccggaggcattgcgtcgttttgagg

SEQ ID NO: 122525 - DNA, 75 bp, synthetic construct
  source 1..75: mol_type = other DNA
ccgaagtccgtcaacgggcagttcgtatggctctggaaagccagggcgaatatgactcacaatgggcggcaattt

SEQ ID NO: 122526 - DNA, 75 bp, synthetic construct
  source 1..75: mol_type = other DNA
ctggcacgctgaatgattttctcggagccatgacggaagacgatgtcatgccggaggcattgcgtcgttttgagg

SEQ ID NO: 122527 - DNA, 75 bp, synthetic construct
  source 1..75: mol_type = other DNA
atgattgatggcttatcagagcgcggaaacgtcaatcactggatgcttaatggcggtggatggttctttaatctc

SEQ ID NO: 122528 - DNA, 75 bp, synthetic construct
  source 1..75: mol_type = other DNA
taccgttgcaccctgaataccgcaccctgccgatggtctggtacgttcctccgctgtcaccgattcagtcctacg

SEQ ID NO: 122529 - DNA, 75 bp, synthetic construct
  source 1..75: mol_type = other DNA
cggagcgtcatcacagagtgcagcggcggcaaagaaatccgaaacggcagcagcctcatcgaagaatgcggcgaa

SEQ ID NO: 122530 - DNA, 75 bp, synthetic construct
  source 1..75: mol_type = other DNA
gcggcggcaaagaaatccgaaactgcagcggcatcatcgaagaacgcagcgaaaacctcagaaacgaatgcagct

SEQ ID NO: 122531 - DNA, 75 bp, synthetic construct
  source 1..75: mol_type = other DNA
ccgtagtaacgatatccttcgtcaggcttccgcttattttgcaaaggcggagttcgaccgcttctggaaaaaata

SEQ ID NO: 122532 - DNA, 75 bp, synthetic construct
  source 1..75: mol_type = other DNA
gccagttgggggcgatcgtcaaatatggatgtgcccgaaacagggacggataattttggttttacctatggaaag

SEQ ID NO: 122533 - DNA, 75 bp, synthetic construct
  source 1..75: mol_type = other DNA
gttgaccgcggcgcggaaaacgtcgagcgcctggagctgattactatgccttggttccgggctgtgcgaggaaac

SEQ ID NO: 122534 - DNA, 75 bp, synthetic construct
  source 1..75: mol_type = other DNA
ctgttctctggcttctacgagcactgcccgatcctcagcgcagaaaacgaagaagtgcgtaacagccgtctgaaa

SEQ ID NO: 122535 - DNA, 75 bp, synthetic construct
  source 1..75: mol_type = other DNA
ctgcagtttgaagaaaccctcaccgtggttgcccgtgaaggcacgccgcatgtaatgtgtgcttacctgtacgat

SEQ ID NO: 122536 - DNA, 75 bp, synthetic construct
  source 1..75: mol_type = other DNA
gtgagtaaactctcagtcagaggtgactcacatgacaaaacagtatcaaccagtaaaaaaccccgtaaacagcat

SEQ ID NO: 122537 - DNA, 75 bp, synthetic construct
  source 1..75: mol_type = other DNA
gttcgtcagcatgagcgggataccgggagcggtgatggtgggctcaccagcgctgaacgtcagcgtctgaaagag

SEQ ID NO: 122538 - DNA, 75 bp, synthetic construct
  source 1..75: mol_type = other DNA
tctccaaaaaccgcactaccgactacatcttcgactgggacaacatgctggcgttcgagggtaacactgcgccgt

SEQ ID NO: 122539 - DNA, 75 bp, synthetic construct
  source 1..75: mol_type = other DNA
ctgaaccttgttcagccgcaggaagtgcaggaggggaacgatacctttgatgcttatctgaacgggacgtggatc

SEQ ID NO: 122540 - DNA, 75 bp, synthetic construct
  source 1..75: mol_type = other DNA
tggccaccccacaagtagaagatgggccttgtgtatcatcttttattatatcaggagcgacggcggcgacccgcg

SEQ ID NO: 122541 - DNA, 75 bp, synthetic construct
  source 1..75: mol_type = other DNA
tttatctactgccaatactgccgtgaatcgagccaaaaaccctgtgcttggtgcttttgttatgtcctggtgcgc

SEQ ID NO: 122542 - DNA, 75 bp, synthetic construct
  source 1..75: mol_type = other DNA
ccacctttaacatttctagctgaagttcatacaaactggaacgaaacgccaaatgcagcaccacgaatttttgat

SEQ ID NO: 122543 - DNA, 75 bp, synthetic construct
  source 1..75: mol_type = other DNA
ttccattgctccaaagattggctgtacgccagagactctgcgagtctgggttcgccagcatgagcgggataccgg

SEQ ID NO: 122544 - DNA, 75 bp, synthetic construct
  source 1..75: mol_type = other DNA
gtacagcgatccagttagcccgaaatgtatcttcctgtacatgcgaatatgtgatcaatacaaccaaaggcggga

SEQ ID NO: 122545 - DNA, 75 bp, synthetic construct
  source 1..75: mol_type = other DNA
ggagtgagaacgggggcgacggtgacgcattcgtcagggaggaacgcgaagcaatggacgttgtgttgcaggcgc

SEQ ID NO: 122546 - DNA, 75 bp, synthetic construct
  source 1..75: mol_type = other DNA
tgcgtccagggcgcaaactggcctcgctactggtatcgcgtatcaaagtgatggcgcggctggatatcgccgaaa

SEQ ID NO: 122547 - DNA, 75 bp, synthetic construct
  source 1..75: mol_type = other DNA
cgtgatgtatatacagatagcctcaaataaaaatatatactcaaaattatataatgcaattaagtatgtaattat

SEQ ID NO: 122548 - DNA, 75 bp, synthetic construct
  source 1..75: mol_type = other DNA
agcaacggcattgagaaagtgctcgccggagaaacctctctcgatgaagtgctgcgggtaaccatggaggcgtaa

SEQ ID NO: 122549 - DNA, 75 bp, synthetic construct
  source 1..75: mol_type = other DNA
atcttaatgattgcccatttattccctgtatggacggtttatgcttaatgcctgcattaatagcaaatagctcag

SEQ ID NO: 122550 - DNA, 75 bp, synthetic construct
  source 1..75: mol_type = other DNA
aaatgcaggcaccgaagcccgcatctggattgccataaaatcactcaaatgtgaaagcgatgattatttaataaa

SEQ ID NO: 122551 - DNA, 75 bp, synthetic construct
  source 1..75: mol_type = other DNA
gtgttgcgaaggggaaatcactatcgataagtttatagattatctttcctctttgcccagtattaatgctgtacg

SEQ ID NO: 122552 - DNA, 75 bp, synthetic construct
  source 1..75: mol_type = other DNA
gtctggttcgcaccctatgtccagattgccgtcaggccgttcaagctaatgatgaagaaaaacgtcttatggggc

SEQ ID NO: 122553 - DNA, 75 bp, synthetic construct
  source 1..75: mol_type = other DNA
tggaatggcgaaacgagaaaagttttttacctgaacaggtaaaaatagttttcattaaagcacaaaatgaggtga

SEQ ID NO: 122554 - DNA, 75 bp, synthetic construct
  source 1..75: mol_type = other DNA
aacgcgtaccgcaggatgggcgcattgcgctgctgctgggcggtcgggcgattgacgtgcgtgtctccaccatgc

SEQ ID NO: 122555 - DNA, 75 bp, synthetic construct
  source 1..75: mol_type = other DNA
tgaccccgcaggataccaccgactacgttctgaccatcccgaaagctgcgaccgcaggtaacttcaccatgacct

SEQ ID NO: 122556 - DNA, 75 bp, synthetic construct
  source 1..75: mol_type = other DNA
cggtacaaaacgaagagcgaatccagatatgaacaggctggcccataagattcataaactacgaaagaaagtaga

SEQ ID NO: 122557 - DNA, 75 bp, synthetic construct
  source 1..75: mol_type = other DNA
cgaatctgtgctccgaaacatggttgacctgatgcccggttctactctgagcgaagatgacaactctgtcacgat

SEQ ID NO: 122558 - DNA, 75 bp, synthetic construct
  source 1..75: mol_type = other DNA
cgactgccgccagtccgcgcctgccactgacgaagaaaaacgcctgctggggattaccgatgcgcgtaccgtcac

SEQ ID NO: 122559 - DNA, 75 bp, synthetic construct
  source 1..75: mol_type = other DNA
ctggcgctggacatgaaatataaattatcaaaattatatttcatatggcaaataagcctttttaagaccctagcg

SEQ ID NO: 122560 - DNA, 75 bp, synthetic construct
  source 1..75: mol_type = other DNA
gctgcacttttcgctggagggttagttgccggcttactttggggcataggatgtatgctggtaacgctgattgta

SEQ ID NO: 122561 - DNA, 75 bp, synthetic construct
  source 1..75: mol_type = other DNA
atggacgcaagcccaaaagactgcagaccaacgccaactttgaaaagcaggagttcaaagcgctgtgggggcgaa

SEQ ID NO: 122562 - DNA, 75 bp, synthetic construct
  source 1..75: mol_type = other DNA
atatccttgtaaaagaagagaaactggctctggatcttctcgagcagattaagaacggggccgatttcggcaagc

SEQ ID NO: 122563 - DNA, 75 bp, synthetic construct
  source 1..75: mol_type = other DNA
agcaatgcgatcaaggcgcttaatgacaagaatgccgggttgcgagtgacaccgttgcaatacaccatccatcgt

SEQ ID NO: 122564 - DNA, 75 bp, synthetic construct
  source 1..75: mol_type = other DNA
ctgctggaggatgaggaacatgccagcagcctgcctcttatcggtgtacctgacgtattgcccttacgcgcaagc

SEQ ID NO: 122565 - DNA, 75 bp, synthetic construct
  source 1..75: mol_type = other DNA
ggtgaattccgccagggtcagatggttccggcgttcgataaagtggttttctcttgtccggtactggagccgacc

SEQ ID NO: 122566 - DNA, 75 bp, synthetic construct
  source 1..75: mol_type = other DNA
agtcactgaagttgcagagcaggccaccggcaatctgtttgccgacgaggatattgttcgtgaagaatcttcgct

SEQ ID NO: 122567 - DNA, 75 bp, synthetic construct
  source 1..75: mol_type = other DNA
gctttgggcactggcatcctggcttgaacaacttgctgaagaagactatctgatatcacttacagaccggtggtt

SEQ ID NO: 122568 - DNA, 75 bp, synthetic construct
  source 1..75: mol_type = other DNA
gctcgcctggatattgccgaaaaacgtattccacaggatgggcgaatcgcgttgctactgggcggtcgggcgatt

SEQ ID NO: 122569 - DNA, 75 bp, synthetic construct
  source 1..75: mol_type = other DNA
atatacatattgagacgtttgaaaagagtctggtaatccgttttcgtgttgatggaacgctacatgaaatgttgc

SEQ ID NO: 122570 - DNA, 75 bp, synthetic construct
  source 1..75: mol_type = other DNA
agtgccgctgacgatggaagcggtgataacgagagaaaacctgatgctggcttatcagcgcgtggtggaaaacaa

SEQ ID NO: 122571 - DNA, 75 bp, synthetic construct
  source 1..75: mol_type = other DNA
aagcgcgtcactcgcaaactgggtaagggtgacaatctgtttgtgctatcgaacgagctggatcaataccgcgat

SEQ ID NO: 122572 - DNA, 75 bp, synthetic construct
  source 1..75: mol_type = other DNA
taatccagagccacgttttcgtgataactcacccaagcttaactggctgctgaaaatactcgcagaaataaaaca

SEQ ID NO: 122573 - DNA, 75 bp, synthetic construct
  source 1..75: mol_type = other DNA
cccggagagaatggcgaactcagccacgtcatcatccctcccgaagtgaaagaagtcctgaattcaatacactcg

SEQ ID NO: 122574 - DNA, 75 bp, synthetic construct
  source 1..75: mol_type = other DNA
aaaaggaaaccatcgatactatatccggtaacgtgcgtcgtgcctttataggtctgtatgaagagaagcgcctat

SEQ ID NO: 122575 - DNA, 75 bp, synthetic construct
  source 1..75: mol_type = other DNA
ttattactttgttctatagtatttgcatctgctgaattaacattactattactttctgtcactgcgccaatattt

SEQ ID NO: 122576 - DNA, 75 bp, synthetic construct
  source 1..75: mol_type = other DNA
ctggtgaagtttctcggtaagcaattccgggttgccaaaagccaggtggtgattgaaaaaggcgaacttggccgc

SEQ ID NO: 122577 - DNA, 75 bp, synthetic construct
  source 1..75: mol_type = other DNA
gcgttctgcgcctctctcatatccataacacactgtggccggagggggcagaaatcgaatacgaaggtgagcctg

SEQ ID NO: 122578 - DNA, 75 bp, synthetic construct
  source 1..75: mol_type = other DNA
gagtcctgcgtttatcacacattcataacaacctatggcctgaaggctctgaagttgagtatgacggtgagccgg

SEQ ID NO: 122579 - DNA, 75 bp, synthetic construct
  source 1..75: mol_type = other DNA
gcgtcgtgcctttataggtctgtatgaagagaagcgcctattcggcggacagaattcgcctgaaaacaagaatca

SEQ ID NO: 122580 - DNA, 75 bp, synthetic construct
  source 1..75: mol_type = other DNA
aagggcgttttcaacatgctgctttcggacgggcgctatgtaatggcgtattgctcgactaatttacactggatc

SEQ ID NO: 122581 - DNA, 75 bp, synthetic construct
  source 1..75: mol_type = other DNA
cattccaggaaatggcatcgaatgtggttcgctctcaactggcgactcttgacctgagtaccgtagaaaaggaaa

SEQ ID NO: 122582 - DNA, 75 bp, synthetic construct
  source 1..75: mol_type = other DNA
tatatgatggaaatttctttagagcaactcatgatataatattacgagcagttgagaaatcaacatcaggaatgt

SEQ ID NO: 122583 - DNA, 75 bp, synthetic construct
  source 1..75: mol_type = other DNA
atgggcgaagtcgaactggtgatcatgctgacgctgggcgctaacgaagggatgaatcatgtgaaagtcttctcg

SEQ ID NO: 122584 - DNA, 75 bp, synthetic construct
  source 1..75: mol_type = other DNA
tatgacgcgtggtgcacttggtatgggcagaaatgccggtattggtgcatggaaaggtctgcgccgtcaggaagg

SEQ ID NO: 122585 - DNA, 75 bp, synthetic construct
  source 1..75: mol_type = other DNA
gtcaccgggcgcatcaaagcagtaccacccgggatgtggcgctggatcgtcatttaccggactgcgaagacatac

SEQ ID NO: 122586 - DNA, 75 bp, synthetic construct
  source 1..75: mol_type = other DNA
accgcaatatacggtgatgaaaaccaaccagtcgccggaaggctgtgagtcaggcaattattactacattgcgga

SEQ ID NO: 122587 - DNA, 75 bp, synthetic construct
  source 1..75: mol_type = other DNA
gattgagaccgacagctatacgggtgagaaatcggtggtgtattcgcacgatggcaaggaaatggggaaactcta

SEQ ID NO: 122588 - DNA, 75 bp, synthetic construct
  source 1..75: mol_type = other DNA
taacactctgtggccggagggggcagaaatcgaatacgaaggtgagcctggtagcgcactggaacctgttaacga

SEQ ID NO: 122589 - DNA, 75 bp, synthetic construct
  source 1..75: mol_type = other DNA
ggtgaaaccgatagcgaaaaagccttctgctggctgctgcataaattaacgcagcgttacccgcgcacgccgggc

SEQ ID NO: 122590 - DNA, 75 bp, synthetic construct
  source 1..75: mol_type = other DNA
gtatagatatcgccttggatgtgctgagaatatcttccatctattataatagattttcagtccagactgaagttg

SEQ ID NO: 122591 - DNA, 75 bp, synthetic construct
  source 1..75: mol_type = other DNA
ttggcttttcatcaggtctcaccctgcaggtcttacgtacccgtgagtcgcccgatggctgcgagggcggtagtt

SEQ ID NO: 122592 - DNA, 75 bp, synthetic construct
  source 1..75: mol_type = other DNA
ccttaagcctgggtcgctttatgccggaaaagtacaaacccagctactacgcggcggcctcttatagctgccact

SEQ ID NO: 122593 - DNA, 75 bp, synthetic construct
  source 1..75: mol_type = other DNA
gaaaaatctgtagtttattcacacgatggtaaggaaatggggaaactctatctgccggagaatcaggagaaaaat

SEQ ID NO: 122594 - DNA, 75 bp, synthetic construct
  source 1..75: mol_type = other DNA
cccgataaaatcctgttcggttgtggctcatattcgccaggccaatcggggcgaggtggcgctggaaaatactca

SEQ ID NO: 122595 - DNA, 75 bp, synthetic construct
  source 1..75: mol_type = other DNA
cctgcaaaaagtgataagcggtgacacctcctgggatgaggttatgcgcgtcgccagtgccacgctggagagcga

SEQ ID NO: 122596 - DNA, 75 bp, synthetic construct
  source 1..75: mol_type = other DNA
aattagcatcgcaaatatataatcagctaaaattctcaggtactgtcagcaactgttttgacgtattgaaaaatg

SEQ ID NO: 122597 - DNA, 75 bp, synthetic construct
  source 1..75: mol_type = other DNA
gataaagatacatctactgttccaattgccggtggtttatcctctttatttgtatatttcggtggaatagtggca

SEQ ID NO: 122598 - DNA, 75 bp, synthetic construct
  source 1..75: mol_type = other DNA
gcagaagggcgttttcaacatgctgctttcggatgggcgctatgtaatggcgtattgctcgaccaatctgcactg

SEQ ID NO: 122599 - DNA, 75 bp, synthetic construct
  source 1..75: mol_type = other DNA
cgtattgctcgaccaatctgcactggatcacccgccgcgcgccgtttggcgtggcaacgttgctggatcaggatg

SEQ ID NO: 122600 - DNA, 75 bp, synthetic construct
  source 1..75: mol_type = other DNA
attggtgcatggaaaggtctgcgtcgtcaggaaggcgggtttggtcagtctccgggaataacgggtaagacagct

SEQ ID NO: 122601 - DNA, 75 bp, synthetic construct
  source 1..75: mol_type = other DNA
catcgtattgaacgttttgctcaacgttgtgccggtaatcctgtttcccgttacctgctactaccgtgcattggt

SEQ ID NO: 122602 - DNA, 75 bp, synthetic construct
  source 1..75: mol_type = other DNA
agttcgttctcaactggcgactcttgacctgagtaccgtagaaaaagaaaccatcgataatatatccggtaacgt

SEQ ID NO: 122603 - DNA, 75 bp, synthetic construct
  source 1..75: mol_type = other DNA
cgcgctgattaattttatcgggcagcaccgcattgaacgatttgctcaacgttgcgccggcaatcctgtttcccg

SEQ ID NO: 122604 - DNA, 75 bp, synthetic construct
  source 1..75: mol_type = other DNA
ttcagcacctcaggaaaataagtgctgtactgctcaggctgataagcagaacattaaaattatttccttttggtc

SEQ ID NO: 122605 - DNA, 75 bp, synthetic construct
  source 1..75: mol_type = other DNA
aaacaaagtgttctgcgaatgtttgggtatacgttaagcgcttatccgcgaacgataccggtgctacaagatccc

SEQ ID NO: 122606 - DNA, 75 bp, synthetic construct
  source 1..75: mol_type = other DNA
cgttcacgtctaattcatattggtttgaaggagctctctttatttgctcgtctgtatgacagcgaaggaacgcca

SEQ ID NO: 122607 - DNA, 75 bp, synthetic construct
  source 1..75: mol_type = other DNA
tctggtgatgcaaaattatcgtctgatcgacgccacgttgtatgtcacgcttgaaccatgtgtaatgtgtgccgg

SEQ ID NO: 122608 - DNA, 75 bp, synthetic construct
  source 1..75: mol_type = other DNA
ttatgactgcctggacttgctaactctgcctgacgattacctgccgcgcactaactacattccggcatgtgatgc

SEQ ID NO: 122609 - DNA, 75 bp, synthetic construct
  source 1..75: mol_type = other DNA
cgtacagcactacatagtcgggctctatgccttgtatcgctagtgagaagttatgccgatctctggcaatcctgc

SEQ ID NO: 122610 - DNA, 75 bp, synthetic construct
  source 1..75: mol_type = other DNA
tacccgaaaactgtccgggaataccttatttcgttagaaacatttatcgatgaaactaaagcattgtatgtcgat

SEQ ID NO: 122611 - DNA, 75 bp, synthetic construct
  source 1..75: mol_type = other DNA
gccgggctgaacaaaggcgaggcgcgcaacgcgctggcccgcgccgtgttcttcaaccgcctgggggaaatccgc

SEQ ID NO: 122612 - DNA, 75 bp, synthetic construct
  source 1..75: mol_type = other DNA
ttgaatttcctgtagaaaacttacgtatgctggcagtaaagaccacctgcaaagatcgctggcgtcagatactga

SEQ ID NO: 122613 - DNA, 75 bp, synthetic construct
  source 1..75: mol_type = other DNA
ggttagtagcgaaaccctgttctgggaaaccatggaaaaactgaaggaactgggcgccagctcgattctggttct

SEQ ID NO: 122614 - DNA, 75 bp, synthetic construct
  source 1..75: mol_type = other DNA
ttgatatcgcaagcgggaattactttatctacatcaaacgcctttctgcaaacgacacaggcgcaacaggtggcc

SEQ ID NO: 122615 - DNA, 75 bp, synthetic construct
  source 1..75: mol_type = other DNA
cccacgggtttcgtggaaagaacaggatgaagacgagccgaggaaggtgacggattattatcgtcatataaatcg

SEQ ID NO: 122616 - DNA, 75 bp, synthetic construct
  source 1..75: mol_type = other DNA
tatcggtatcctcgcggcaggcgtgatcctcgccatcatgattattccgtacattgcagcggtaatgcgcgatgt

SEQ ID NO: 122617 - DNA, 75 bp, synthetic construct
  source 1..75: mol_type = other DNA
gaaaccatggaaaaactgaaagcgctgggtgccagttcaatcctggtcctgccgattgagaagatgatggagtga

SEQ ID NO: 122618 - DNA, 75 bp, synthetic construct
  source 1..75: mol_type = other DNA
aggcatcagctttaaatcctgcctgctgaacggctctgttgaagtggccccgcgtgccggtctggccgacgccat

SEQ ID NO: 122619 - DNA, 75 bp, synthetic construct
  source 1..75: mol_type = other DNA
ttattatcgattaacctcaagaaccatgatcggggcatcttcggagagaacccttcaaagcgcgatcattcctaa

SEQ ID NO: 122620 - DNA, 75 bp, synthetic construct
  source 1..75: mol_type = other DNA
ggtcgtatcgtcgaaggattcggtcctccaagtgcagggaaaacgttccttgcaacagcagcgatgatctccgct

SEQ ID NO: 122621 - DNA, 75 bp, synthetic construct
  source 1..75: mol_type = other DNA
cttccctactctggctttgtgggcacgcaaatacaacgcctgcatcatcttcttgaatcaggttcgcacaaaaat

SEQ ID NO: 122622 - DNA, 75 bp, synthetic construct
  source 1..75: mol_type = other DNA
aggctgatgttgcccgctatatcctggaacatggcaataaaaccgttatttcccctgaatggtcacttatttatt

SEQ ID NO: 122623 - DNA, 75 bp, synthetic construct
  source 1..75: mol_type = other DNA
ttaatccttgatgtcaaccctacagctcggactcataaagtgaagagctttgagctgaaaacggtttatgccgat

SEQ ID NO: 122624 - DNA, 75 bp, synthetic construct
  source 1..75: mol_type = other DNA
acgttgtggctcgacgtggaaaaacgtgactggtcagactcgctattgcaaaagtgcggcctgacgcgggcaaat

SEQ ID NO: 122625 - DNA, 75 bp, synthetic construct
  source 1..75: mol_type = other DNA
attatatcgtgagctttgggataatttttattcatcagcgttttgtttattaaagtggagccgcgatctcccgca

SEQ ID NO: 122626 - DNA, 75 bp, synthetic construct
  source 1..75: mol_type = other DNA
ttcaccgaaaaagaaacaaacccaggatgacaagaagcaaaaaattaaaccgaagatgtattttgctggtggagg

SEQ ID NO: 122627 - DNA, 75 bp, synthetic construct
  source 1..75: mol_type = other DNA
gcagggcacggtgacggcctccctgatgctccgaaagctcggcagctacccacgccagaacggcctggccgtggc

SEQ ID NO: 122628 - DNA, 75 bp, synthetic construct
  source 1..75: mol_type = other DNA
gggcaaatcaactctgcgaatttcccaaaattgaatgtttctgccgcagatttgtttaatggttgtaaaaatctc

SEQ ID NO: 122629 - DNA, 75 bp, synthetic construct
  source 1..75: mol_type = other DNA
aaaatttggggcattgcatcgctgccgcgtttattgcgatggagcgctatgaaagcgcccctgaggttggtgagg

SEQ ID NO: 122630 - DNA, 75 bp, synthetic construct
  source 1..75: mol_type = other DNA
cacgtccgcgcccattgggacgaaatcctgcggctggccacctcgatcaagcagggcacggtgacggcctcgctg

SEQ ID NO: 122631 - DNA, 75 bp, synthetic construct
  source 1..75: mol_type = other DNA
gttgagggcgcattttcaatttgccaatgaagttaaaatatttgctgaagtagataatcacactagatttagcat

SEQ ID NO: 122632 - DNA, 75 bp, synthetic construct
  source 1..75: mol_type = other DNA
cactgttgattgctggccttttggatgccacacccgcaaatgcggaactgtcagcgccggttatggctctggcaa

SEQ ID NO: 122633 - DNA, 75 bp, synthetic construct
  source 1..75: mol_type = other DNA
atggacatgctctgcctgcctggatagcgtccttttccccactggctgaatggccgtggctggccgatctgaccc

SEQ ID NO: 122634 - DNA, 75 bp, synthetic construct
  source 1..75: mol_type = other DNA
gctggcgaagcgtgcctgggatgagcgggaagtaccggtcggcgcggtattagtgcataacaatcgtgttattgg

SEQ ID NO: 122635 - DNA, 75 bp, synthetic construct
  source 1..75: mol_type = other DNA
aactttgttatggccgttccaatggcgctcattctttcagtgctgtctataaaagagggtcactacgatgccgcg

SEQ ID NO: 122636 - DNA, 75 bp, synthetic construct
  source 1..75: mol_type = other DNA
actacctgaccaaagttgaaagcaaagtgtttggtgaaggagaccgtaacttcggctgtagccaaatcgaactgt

SEQ ID NO: 122637 - DNA, 75 bp, synthetic construct
  source 1..75: mol_type = other DNA
gtgtacatatcctcgaatatcagatcaagatcaataaattattatgttatttgactaaccgttatcctaggttaa

SEQ ID NO: 122638 - DNA, 75 bp, synthetic construct
  source 1..75: mol_type = other DNA
acagtgggatttgaacatatatctaatttgtatgctccgcaaactattgatgcatgttttgaacattctggcagt

SEQ ID NO: 122639 - DNA, 75 bp, synthetic construct
  source 1..75: mol_type = other DNA
aacctggtgacggcggctatcgtgctgtggaacacggtgtacctggaacgcgccacccgaggggttggtcgaggc

SEQ ID NO: 122640 - DNA, 75 bp, synthetic construct
  source 1..75: mol_type = other DNA
gcacgtgcgtgcccactgggacgacatcctggactggctgcaaagtgttgaactgcgccgccgcgtgcatgccgg

SEQ ID NO: 122641 - DNA, 75 bp, synthetic construct
  source 1..75: mol_type = other DNA
gttgataatttcgttgcaaggctcagaaatgtaggtgctgaacggatctgtattctgaccgacctggaagatgcg

SEQ ID NO: 122642 - DNA, 75 bp, synthetic construct
  source 1..75: mol_type = other DNA
ccggaagtgaagcgctttcctttgttcgcaatccttataccttcctgggtgaggatgccgccagtgttattgccc

SEQ ID NO: 122643 - DNA, 75 bp, synthetic construct
  source 1..75: mol_type = other DNA
agatgtcttaaactcaatacactcaatcccaggccgtcgagtggccggaagtgaagcgctttcctttgttcgcaa

SEQ ID NO: 122644 - DNA, 75 bp, synthetic construct
  source 1..75: mol_type = other DNA
aaaccgccgacaattacccggtatggcctgcggaaaatacggctcaagtccgctcttctttaagcagcaaagatg

SEQ ID NO: 122645 - DNA, 75 bp, synthetic construct
  source 1..75: mol_type = other DNA
ctaatctacatcaaatgttggatagctatcccttaattgacgcagctgtaaatttaaaagtaagaacacttacat

SEQ ID NO: 122646 - DNA, 75 bp, synthetic construct
  source 1..75: mol_type = other DNA
tggagccatgcgtgatgtgcgccggagcgatgattcacagccgcattggtcgcgtagtctttggcgctcgtgatg

SEQ ID NO: 122647 - DNA, 75 bp, synthetic construct
  source 1..75: mol_type = other DNA
accttttctcagccaaaacgatcgagctttgctttgctcatgatggctccggtgaagttggtggcattaaagatg

SEQ ID NO: 122648 - DNA, 75 bp, synthetic construct
  source 1..75: mol_type = other DNA
agatgcatggcgaagtgagtttgaatctgccgttggattacagaactatctaaatagtcagcaaaatttttcatg

SEQ ID NO: 122649 - DNA, 75 bp, synthetic construct
  source 1..75: mol_type = other DNA
cgacgttgcgcccgctgatcggcggcaccctgaacatcaagcacgtgcgtgcccactgggacgacatcctgcgcc

SEQ ID NO: 122650 - DNA, 75 bp, synthetic construct
  source 1..75: mol_type = other DNA
tcgagcgcacgctgttcatcctggactggctgcaaagtgttgaactgcgccgccgcgtgcatgccggcctgaaca

SEQ ID NO: 122651 - DNA, 75 bp, synthetic construct
  source 1..75: mol_type = other DNA
caccagaaccgcctgctcaagctggcccgcgagggtgggcagatgacgcccaaagacctcggtaagttcgagccg

SEQ ID NO: 122652 - DNA, 75 bp, synthetic construct
  source 1..75: mol_type = other DNA
attgttgatgcgcaatgcctggactgcttcgcaggtagcggtgcgctggggctggaagccttgtcacgctacgct

SEQ ID NO: 122653 - DNA, 75 bp, synthetic construct
  source 1..75: mol_type = other DNA
atgacagacaacactcgtttacgcatagctatgcagaaatccggtcgtttaagtgatgactcacgcgaattgctg

SEQ ID NO: 122654 - DNA, 75 bp, synthetic construct
  source 1..75: mol_type = other DNA
ctgaacggttctgtcgaagtcgccccgcgcgccggactggcggatgcgatttgcgatctggtttccaccggtgcc

SEQ ID NO: 122655 - DNA, 75 bp, synthetic construct
  source 1..75: mol_type = other DNA
aagtcgaagttatctaccgctcgaaagcctgcctgatccagcgcgatggtgaaatggaagaatccaaacagcaac

SEQ ID NO: 122656 - DNA, 75 bp, synthetic construct
  source 1..75: mol_type = other DNA
tgactgcctggacttgctaactctgcctgacgactatctgccgcgcactaactacattccggcatgtgatgcaca

SEQ ID NO: 122657 - DNA, 75 bp, synthetic construct
  source 1..75: mol_type = other DNA
cactcggctgggagcacatcaacctgaccggtgattacctatggcgcagcagcgccaagatcggcgcggggaagt

SEQ ID NO: 122658 - DNA, 75 bp, synthetic construct
  source 1..75: mol_type = other DNA
cggcgattacgtctggcggcagagccgcagactggaagacgggaagtttcggcccttacggatgcccggaaaacc

SEQ ID NO: 122659 - DNA, 75 bp, synthetic construct
  source 1..75: mol_type = other DNA
aggatggctgcattatgcatggctacagcgatactgacaccattgtcggggaaaacggtcatatcggtcatggcg

SEQ ID NO: 122660 - DNA, 75 bp, synthetic construct
  source 1..75: mol_type = other DNA
aatcagcatatgcttttccctatcggtgacagggttaagtttagtattaatatctacaccgcgtttgtaagtgat

SEQ ID NO: 122661 - DNA, 75 bp, synthetic construct
  source 1..75: mol_type = other DNA
attggcgatgtgattgtgggagccggtgtctacatcggcccactcgcctcactgcgtggtgactacgggcggttg

SEQ ID NO: 122662 - DNA, 75 bp, synthetic construct
  source 1..75: mol_type = other DNA
agcgatgatccacagtcgcattggtcgcgtggtctttggtgcgcgtgacgcgaaaactggcgctgcgggatcttt

SEQ ID NO: 122663 - DNA, 75 bp, synthetic construct
  source 1..75: mol_type = other DNA
tttcgatctgtctgaagacgcctcaaccgaaactgcaatggtctttggcgaactgtaccgccatggcgctgaatg

SEQ ID NO: 122664 - DNA, 75 bp, synthetic construct
  source 1..75: mol_type = other DNA
tggtggagatggttttaccgcctttaccgaagggaaagcgcgtaacacaacgggcggttattacgtttatcacgc

SEQ ID NO: 122665 - DNA, 75 bp, synthetic construct
  source 1..75: mol_type = other DNA
acaaccagaaaatcaaataccctgtattggctggtatcctacaccctgatatgcgttatgccagaggtagcgagc

SEQ ID NO: 122666 - DNA, 75 bp, synthetic construct
  source 1..75: mol_type = other DNA
gatggattccagctgaaaacgattgaagaactggaagcggaaaagaacgggcaacagcaggctcagaatcaggag

SEQ ID NO: 122667 - DNA, 75 bp, synthetic construct
  source 1..75: mol_type = other DNA
gaacgccgggctgagacacgtaatgaccacctccattgagcatgagaatgtggagattgagcaaacggcaggttg

SEQ ID NO: 122668 - DNA, 75 bp, synthetic construct
  source 1..75: mol_type = other DNA
taacattgacgataaaagtgagcaggagtctttaatgggccagatacgacaacttgagaagcattttagcctgta

SEQ ID NO: 122669 - DNA, 75 bp, synthetic construct
  source 1..75: mol_type = other DNA
gagaggtggtgatgcgtaacggaaaaatcctcggctgggcatggggggccggttttgttgacgggattggtcagg

SEQ ID NO: 122670 - DNA, 75 bp, synthetic construct
  source 1..75: mol_type = other DNA
actataaatccgactatgtggatgatgcgtttcttgaagctacgggagctaagaggtatcagctatcgttgttac

SEQ ID NO: 122671 - DNA, 75 bp, synthetic construct
  source 1..75: mol_type = other DNA
caaggcttccgcgccagttgtccagaccatatctaagcctcatccgtggtttaaacgtgtggcactcgatggtaa

SEQ ID NO: 122672 - DNA, 75 bp, synthetic construct
  source 1..75: mol_type = other DNA
cacccaggtggacgatggtaccctggaagtgcgcgtgaacagcgcattgtcgaaagacgaacagattaagaaaga

SEQ ID NO: 122673 - DNA, 75 bp, synthetic construct
  source 1..75: mol_type = other DNA
atggcagttcaatctcggtcgctgcatcttctgtggacgctgcgaagaagtctgcccgacggcggcgatcaaact

SEQ ID NO: 122674 - DNA, 75 bp, synthetic construct
  source 1..75: mol_type = other DNA
atgcagagcttgaaagacggatgttggcttacaaaacaaggcaacaatgggaaacagcaggcaaagataatcaaa

SEQ ID NO: 122675 - DNA, 75 bp, synthetic construct
  source 1..75: mol_type = other DNA
cggcgggcaggtgtaccgtgtctgggagttgtctgccgggcgggcgaatgaggcgctggactgcatggtgtacgg

SEQ ID NO: 122676 - DNA, 75 bp, synthetic construct
  source 1..75: mol_type = other DNA
actcgggcggtcatcacaccaacaaagtgtatgagttctcgaaggcgcgtatcgggcgtcgtatctgggcgacaa

SEQ ID NO: 122677 - DNA, 75 bp, synthetic construct
  source 1..75: mol_type = other DNA
gtaatgtttctctgactaaagaagccccgagcatgaatgttgctctggttggcctgggctgggatgcacgcgtta

SEQ ID NO: 122678 - DNA, 75 bp, synthetic construct
  source 1..75: mol_type = other DNA
atcttgtcactgccaggcaccttattataggtgaaaaacacgataatgccgaacatcatcagattgagctctgga

SEQ ID NO: 122679 - DNA, 75 bp, synthetic construct
  source 1..75: mol_type = other DNA
acgaaaacagggggccttacggaaacaacaagtaccgaggcaactgctcgggctttatcgttaaagacttcattg

SEQ ID NO: 122680 - DNA, 75 bp, synthetic construct
  source 1..75: mol_type = other DNA
atgttgacgtcagagcaacagccccgagttaaccaagttaaatgttggctgaaagataatcctgtggttcgagat

SEQ ID NO: 122681 - DNA, 75 bp, synthetic construct
  source 1..75: mol_type = other DNA
agaaaaaggaatgaatatcaccgtagatcatgctgactacgtgtggttcgtgacgccagacgctacaaaaaggta

SEQ ID NO: 122682 - DNA, 75 bp, synthetic construct
  source 1..75: mol_type = other DNA
ccgctgttcgccgtttacttccaggagccggtcggcaatatcatgtcgaatatcccgattgtcggcgcgctgttc

SEQ ID NO: 122683 - DNA, 75 bp, synthetic construct
  source 1..75: mol_type = other DNA
tttttgcgacctataaagcgacattaccaattattggacgtctgatgaacatcagtcaggctatgattataccgc

SEQ ID NO: 122684 - DNA, 75 bp, synthetic construct
  source 1..75: mol_type = other DNA
ttgtatcgatggcgcagtgcagtttcccatcatattcgagctgagctttgatggccgaacaaaggtgatcgctgc

SEQ ID NO: 122685 - DNA, 75 bp, synthetic construct
  source 1..75: mol_type = other DNA
tgaccgccggtttatatttcctgttctggattaacgcctggcatggtttgtatcagtggcgcaaggagctgcggg

SEQ ID NO: 122686 - DNA, 75 bp, synthetic construct
  source 1..75: mol_type = other DNA
aaggggctgaaacacaaggcgatgcttactttaccgcgtttggtctgcgtaatgtcgatactgaatcgtcttgcg

SEQ ID NO: 122687 - DNA, 75 bp, synthetic construct
  source 1..75: mol_type = other DNA
agcttccttcgcttcattaccagagattactctagatcgtctggtcgtctctggcctaatgccatttgtgtatca

SEQ ID NO: 122688 - DNA, 75 bp, synthetic construct
  source 1..75: mol_type = other DNA
tccggggattaaggtggatttcagcaaggggcaatacatgatgggccaccacctgaacgtcttcattggcgtggc

SEQ ID NO: 122689 - DNA, 75 bp, synthetic construct
  source 1..75: mol_type = other DNA
tgaagatggcggtagattatggagcccagaccaccaatggaaggccatgatcgcagcagcaccgcagcaggaggc

SEQ ID NO: 122690 - DNA, 75 bp, synthetic construct
  source 1..75: mol_type = other DNA
tgtgaataaccacgtcgtaaaaaacgacactgagtcattaaaagagtttctctcagctcaggggttccctaaatc

SEQ ID NO: 122691 - DNA, 75 bp, synthetic construct
  source 1..75: mol_type = other DNA
cataactttacttccatcttaactcaggtcaggtcacggctacttgattttatacttgaactttctgatcaagtt

SEQ ID NO: 122692 - DNA, 75 bp, synthetic construct
  source 1..75: mol_type = other DNA
caggaaccgcagctgaacccggaacacaccgtgcgtgagtccattgaagaagcggtttctgaagtggttaacgcc

SEQ ID NO: 122693 - DNA, 75 bp, synthetic construct
  source 1..75: mol_type = other DNA
ggccgtctggaagagatcattcaggctcacgacggtcataacctgaacgtacagctggagcgtgcggcggatgcg

SEQ ID NO: 122694 - DNA, 75 bp, synthetic construct
  source 1..75: mol_type = other DNA
attatggcgggcatcgataaagatatcgaaggtgaagcacgtccgcaaccggatatcaaaatcggctatctgccg

SEQ ID NO: 122695 - DNA, 75 bp, synthetic construct
  source 1..75: mol_type = other DNA
attgaagatgcgacggtttatcacattgctactcagagtttccttgctgatggtggagatggttttaccgccttt

SEQ ID NO: 122696 - DNA, 75 bp, synthetic construct
  source 1..75: mol_type = other DNA
ccggaagttttcattattcgaatgtacgcggtgaaagctggcaacatattacccggcaaatttgtgcgcaattag

SEQ ID NO: 122697 - DNA, 75 bp, synthetic construct
  source 1..75: mol_type = other DNA
tgccaggcatcgcgtcattgaatattattgatacgcagttggttgagaatattaccgggcatttattacgttgcc

SEQ ID NO: 122698 - DNA, 75 bp, synthetic construct
  source 1..75: mol_type = other DNA
acgacaatacgccgcaaactgcgaaagagccggattatctggatatcccagctttcctgcgtaagcaagctgact

SEQ ID NO: 122699 - DNA, 75 bp, synthetic construct
  source 1..75: mol_type = other DNA
gttccattgctccaaagactggctgtacgccggagactctgcgtgtctgggttcgccaggatgagcgggataccg

SEQ ID NO: 122700 - DNA, 75 bp, synthetic construct
  source 1..75: mol_type = other DNA
tgcaagttggcggcaacatgctgctgctcgacgaaccaaccaacgacctggatatcgaaaccctgcgtgcgctgg

SEQ ID NO: 122701 - DNA, 75 bp, synthetic construct
  source 1..75: mol_type = other DNA
tatatggcgcatgtgacagagttgtttccgatattgtcaatgaactgatggaggaaaagcgcgtaaaccgtcttg

SEQ ID NO: 122702 - DNA, 75 bp, synthetic construct
  source 1..75: mol_type = other DNA
gttccattgctccaaagagtggctgtacgccagagactctgcgtgtctgggttcgccagaatgagcgggataccg

SEQ ID NO: 122703 - DNA, 75 bp, synthetic construct
  source 1..75: mol_type = other DNA
tgttcttttcctgtgccggagtgctcatccttctggcgtactgcatccagttattagacgatgctcgctggaaac

SEQ ID NO: 122704 - DNA, 75 bp, synthetic construct
  source 1..75: mol_type = other DNA
gaagtgagaacgggggcgacggtgacgcattcgtcagggaggaacgcgaagcaatggacgttgtgttacaggcgc

SEQ ID NO: 122705 - DNA, 75 bp, synthetic construct
  source 1..75: mol_type = other DNA
gctgtacaccggagactctgcgtgtctgggtacgccagcatgagcgggataccggaggcggtgatggcgggctca

SEQ ID NO: 122706 - DNA, 75 bp, synthetic construct
  source 1..75: mol_type = other DNA
gctgctacgcgcgtgggtattgaagcgcgcgatgaaattaaatggctacaacgttatatcgatgaactcaaaggc

SEQ ID NO: 122707 - DNA, 75 bp, synthetic construct
  source 1..75: mol_type = other DNA
acgagattcgtcagggccagccgattggtctgggcgaagcgtctaacgatacgtggatcaccaccaaagtgcgtt

SEQ ID NO: 122708 - DNA, 75 bp, synthetic construct
  source 1..75: mol_type = other DNA
gcggacgctttgctggcagcggcgggtaaaaatacccagttggcgttaaccaactctggcgggattcgcaatgag

SEQ ID NO: 122709 - DNA, 75 bp, synthetic construct
  source 1..75: mol_type = other DNA
ttcaggaaggtgttgataaaattcgccactttcaggaactgggcgtagaaggattgcaatggcatttcattggcc

SEQ ID NO: 122710 - DNA, 75 bp, synthetic construct
  source 1..75: mol_type = other DNA
agagaaagaagagaatagcaaacaaaaactggtactggaggacgtttccgtcaaaaacggcgagatttggcaacg

SEQ ID NO: 122711 - DNA, 75 bp, synthetic construct
  source 1..75: mol_type = other DNA
atgtactgtactgttaaagaaatcatccgcgatgtactggatacagacgtgccggacagtgaatgcgtttttgcc

SEQ ID NO: 122712 - DNA, 75 bp, synthetic construct
  source 1..75: mol_type = other DNA
agtagaatattttaagcaagaaaaagagcacgctatttcggttcatgtgaactgctacgatgaacgtttgctacc

SEQ ID NO: 122713 - DNA, 75 bp, synthetic construct
  source 1..75: mol_type = other DNA
aaaagtgatggagatggcaggaagtgaaataaaacgcctaaatgcagtagggagagagaacgggggcgacggtga

SEQ ID NO: 122714 - DNA, 75 bp, synthetic construct
  source 1..75: mol_type = other DNA
tcagggctgcgtcgccgtcagatcttgcggaaaagctgacacataaactgaaagagggctggcagccgtttggta

SEQ ID NO: 122715 - DNA, 75 bp, synthetic construct
  source 1..75: mol_type = other DNA
gcgcacgcctggcgagctggcacaacagactggcgtttcgggcaggaccatcctgcgcgacattgactatctcaa

SEQ ID NO: 122716 - DNA, 75 bp, synthetic construct
  source 1..75: mol_type = other DNA
aaataccgatgcacaggcgctgcgtaaaacggcggttgggcagacgattcagatcggtagtggtatcaccaaagg

SEQ ID NO: 122717 - DNA, 75 bp, synthetic construct
  source 1..75: mol_type = other DNA
tggaacgtgaaaatcgtgaactgcgccgcagtaacgatattcttcgccaggcttccgcttattttgcgaaggcgg

SEQ ID NO: 122718 - DNA, 75 bp, synthetic construct
  source 1..75: mol_type = other DNA
cctcagccttcatcagtggtaaggcaccggaaatcaaaccctcgcccggcggcgacacgccatcggggccgtctg

SEQ ID NO: 122719 - DNA, 75 bp, synthetic construct
  source 1..75: mol_type = other DNA
ggcttgcatggaatgccgagcctgcaaagcaggacgttttaatctttgtgaaccaccgcaggttgctggttttcg

SEQ ID NO: 122720 - DNA, 75 bp, synthetic construct
  source 1..75: mol_type = other DNA
attaccaaaaatgcaacgtatggcgttgagatagaaagtctggtgctggagataaatgcaccggcatcatcataa

SEQ ID NO: 122721 - DNA, 75 bp, synthetic construct
  source 1..75: mol_type = other DNA
gaagaactaatggcggagctggtcaggactgcgaatagtggcggaacagtccttgatccttttatggggtcgggg

SEQ ID NO: 122722 - DNA, 75 bp, synthetic construct
  source 1..75: mol_type = other DNA
gtgctggatctgctttgcgaatataaggaccagggctacgaagtgtggctggagctggggctacaaaccgcccac

SEQ ID NO: 122723 - DNA, 75 bp, synthetic construct
  source 1..75: mol_type = other DNA
ataatgccaacaatcattctctgcaagcgtgccaatccggtcggtggtcagggggtaataaaattaattactcag

SEQ ID NO: 122724 - DNA, 75 bp, synthetic construct
  source 1..75: mol_type = other DNA
ttgagttactacaccgacgtcgctggcgtcggtgccgctgcggcgggcaccatgctgttactggtgcgggtattc

SEQ ID NO: 122725 - DNA, 75 bp, synthetic construct
  source 1..75: mol_type = other DNA
aaaaatcagtccagaccaggagctaactcccgcaacggttattccacaaagaccgttatcacaggcgacggtcta

SEQ ID NO: 122726 - DNA, 75 bp, synthetic construct
  source 1..75: mol_type = other DNA
cggatggtgtcacgccagtgaaactgggtgaggttcataatcatgggcagggtacttccattgaccgggatacgc

SEQ ID NO: 122727 - DNA, 75 bp, synthetic construct
  source 1..75: mol_type = other DNA
gctcactgccggagaaatgattcgccatacgccaccggaagtgatctaccaccgcatttccgccagcgcccgtcg

SEQ ID NO: 122728 - DNA, 75 bp, synthetic construct
  source 1..75: mol_type = other DNA
atgttgacacctgctcaacaacattttaatcgcgtgatggctgaacgccgccacgccagccgtgagccgtcgcag

SEQ ID NO: 122729 - DNA, 75 bp, synthetic construct
  source 1..75: mol_type = other DNA
tcggagaaccgccgtcagtgacgcactttgtcgggcgttaacaagagaaaatcgagctattccgcaatgcggttt

SEQ ID NO: 122730 - DNA, 75 bp, synthetic construct
  source 1..75: mol_type = other DNA
gagagaatctgttgctaatgacgcattttgtcgggcgttttcacagggaaatcagactatctcacaatgccgtcc

SEQ ID NO: 122731 - DNA, 75 bp, synthetic construct
  source 1..75: mol_type = other DNA
atgaaaatcacacctgaacaggctcgcgaagctctggatatctgggtatgtcgaccaggaatgacacaggagcag

SEQ ID NO: 122732 - DNA, 75 bp, synthetic construct
  source 1..75: mol_type = other DNA
agtttccagacgtactgcgcaagggatgcagacaaggaaaccgtaatgatgcagcaacggattatgcagtcagcc

SEQ ID NO: 122733 - DNA, 75 bp, synthetic construct
  source 1..75: mol_type = other DNA
aaaaatcagcccagaccgggaactaactcccgcaacggttattccacaaagaccgttgtcacaggcgacgatccc

SEQ ID NO: 122734 - DNA, 75 bp, synthetic construct
  source 1..75: mol_type = other DNA
cgctggggaaaattccgcccgtttttactcttcggtactgcgccgttaatgatcttcagcgtgctggtattctgg

SEQ ID NO: 122735 - DNA, 75 bp, synthetic construct
  source 1..75: mol_type = other DNA
gccatccgggcgttgtggaatacgcatgtgaatgcctgcgctactgggttgaaacctgccatgtggatggttttc

SEQ ID NO: 122736 - DNA, 75 bp, synthetic construct
  source 1..75: mol_type = other DNA
ctaaaacttatgcttctcaacttgcaggtgtaggtgttgaaggcgcaatgcagggagcggccgcaatggggatcg

SEQ ID NO: 122737 - DNA, 75 bp, synthetic construct
  source 1..75: mol_type = other DNA
tacaaaatccacggaggcaaaaacagcctcgcgatcctgagaccggtctgtttttgaaaacaaaaaaaggcgctc

SEQ ID NO: 122738 - DNA, 75 bp, synthetic construct
  source 1..75: mol_type = other DNA
ctgttttgtatttgattgggaattttgctttttcagcaaaagcagtagacatctcattcaagggtgatttaacag

SEQ ID NO: 122739 - DNA, 75 bp, synthetic construct
  source 1..75: mol_type = other DNA
ggatggcaccgggaacaacgtgatggagctggacgatacccggtccattaacggctgtttctccgagctgacggt

SEQ ID NO: 122740 - DNA, 75 bp, synthetic construct
  source 1..75: mol_type = other DNA
gcaaatagttaccactgcgcatcagcggggcaaatgggtaggcatttgcggtgaactgggcggtgaaagccgtta

SEQ ID NO: 122741 - DNA, 75 bp, synthetic construct
  source 1..75: mol_type = other DNA
attacggcaccaatttttattgtgtgtttatcgtttggttttttgcgtcagatgtttaataactggttgcaagcc

SEQ ID NO: 122742 - DNA, 75 bp, synthetic construct
  source 1..75: mol_type = other DNA
tggacgctactgatgtcgtggatgcgattaaagcgtgctcatctttggttaacgatgcccgtgcagagctggtaa

SEQ ID NO: 122743 - DNA, 75 bp, synthetic construct
  source 1..75: mol_type = other DNA
ttttacgtgtttccggagagaaccagggaaaacttgctgttggtctgctggatacggatggtgtcactccgttga

SEQ ID NO: 122744 - DNA, 75 bp, synthetic construct
  source 1..75: mol_type = other DNA
atgcactgtagaggctgcggttttatcggtgaggagtggcagcaagatttccagcctcttgatggtgggcctgtg

SEQ ID NO: 122745 - DNA, 75 bp, synthetic construct
  source 1..75: mol_type = other DNA
tatccggaaaacggtgaagctgacattcagcggtaaccgggaaagtggcatgaaagaacgggctgattattttct

SEQ ID NO: 122746 - DNA, 75 bp, synthetic construct
  source 1..75: mol_type = other DNA
ctcatttacccgtaaatgcggtcaggcaatcggaggttcaattcctgcctttattttggggttaagcggatatat

SEQ ID NO: 122747 - DNA, 75 bp, synthetic construct
  source 1..75: mol_type = other DNA
ttccagagaaaccgctgtcaatgacgcattttgtcggacgttaacacgaggaagtctggctatcccgcaatgcca

SEQ ID NO: 122748 - DNA, 75 bp, synthetic construct
  source 1..75: mol_type = other DNA
tggtcgcgaggatcggtaaaaagaataccttcctgattggcgctttgctgggaacctgcggttatctgctgttct

SEQ ID NO: 122749 - DNA, 75 bp, synthetic construct
  source 1..75: mol_type = other DNA
tctgcgctatggctatcgtgttcatggcccatggcaaccgcagcagggccaccggtttaatccggccaagctgct

SEQ ID NO: 122750 - DNA, 75 bp, synthetic construct
  source 1..75: mol_type = other DNA
atgggactcgatatttttttccttgggcgtgatcgtgtttgtgttaccgacgcagtggtatcggtaccggaaacg

SEQ ID NO: 122751 - DNA, 75 bp, synthetic construct
  source 1..75: mol_type = other DNA
caccctgattaacagcacaaaagacgtcgcggcaccgggagctatctggcatcccgaaaccttcagtcatgaact

SEQ ID NO: 122752 - DNA, 75 bp, synthetic construct
  source 1..75: mol_type = other DNA
ggtatcggtaccggaaacgcgggaagtggggtactttcgcaaggttaacccactgattgcctggtttgagacgca

SEQ ID NO: 122753 - DNA, 75 bp, synthetic construct
  source 1..75: mol_type = other DNA
gcgatgttaacggtgccagtttacccttgaacagatgctcgcctggcgggaccatccgcaggttaccggccttgc

SEQ ID NO: 122754 - DNA, 75 bp, synthetic construct
  source 1..75: mol_type = other DNA
ttcctctaacgctcaacccgatgaaacagagcaaaaacaaaccgcgaattcgccaggcggttggtgccacccggc

SEQ ID NO: 122755 - DNA, 75 bp, synthetic construct
  source 1..75: mol_type = other DNA
gaactactgaattttagccagaaacagctccatacccgactgaatgaaaacaggaagttatttcgtcaaatcgag

SEQ ID NO: 122756 - DNA, 75 bp, synthetic construct
  source 1..75: mol_type = other DNA
aacaatactaagtagctatcatgagtttttgattaaatgctttaatggtgatggttatgttcgttattacaaaaa

SEQ ID NO: 122757 - DNA, 75 bp, synthetic construct
  source 1..75: mol_type = other DNA
atcgtgaaatcgtggctcagaagcacgcttgattcgtttgattttgaacgaaaagtactgttgctctgggcatgg

SEQ ID NO: 122758 - DNA, 75 bp, synthetic construct
  source 1..75: mol_type = other DNA
ggaaacctgaggcgcgatggggattatttcaacctgtccagccttgtggaacgtatcgcacctgggaagctggtg

SEQ ID NO: 122759 - DNA, 75 bp, synthetic construct
  source 1..75: mol_type = other DNA
cgaataccgcgttcatcaactatccgaagcaggctgtctttggtcgtaccctgccaaagaataagatctacgaac

SEQ ID NO: 122760 - DNA, 75 bp, synthetic construct
  source 1..75: mol_type = other DNA
aggaaaaggtttatgcgcacatacagagtttagagtgaatggaggcttacagagtaaccccgcagcatactggaa

SEQ ID NO: 122761 - DNA, 75 bp, synthetic construct
  source 1..75: mol_type = other DNA
tatctaggatcttctctaaaaaaaataaaaagatatatttaaaacgtgagatttcctttctcagaggttatttga

SEQ ID NO: 122762 - DNA, 75 bp, synthetic construct
  source 1..75: mol_type = other DNA
ccacgcaaaatatctgaacggcgagagccttcaccgctttgatgaatttgcgggtgaaaacatggatgcccgttc

SEQ ID NO: 122763 - DNA, 75 bp, synthetic construct
  source 1..75: mol_type = other DNA
gctgtcgcgcaaaactatacggacataaaatctttgcaaaacaaaactcaggattcaactacgacacagaaagga

SEQ ID NO: 122764 - DNA, 75 bp, synthetic construct
  source 1..75: mol_type = other DNA
atgaatgagtttaagcgttttgaagaccgactgaccggactgattgaatcgctgtcaccgtctgggcgtcggcga

SEQ ID NO: 122765 - DNA, 75 bp, synthetic construct
  source 1..75: mol_type = other DNA
ttagtcgaagatttttgtcgaattaatacggaagttaacagaaaaataaaatactatgatactggagaaaatttg

SEQ ID NO: 122766 - DNA, 75 bp, synthetic construct
  source 1..75: mol_type = other DNA
aatggaattttacggcgggaagtcgccgaaaatcgccagtgtgcatcagttcggtctgtcggaagaaacccggaa

SEQ ID NO: 122767 - DNA, 75 bp, synthetic construct
  source 1..75: mol_type = other DNA
cgggtgaaaacatggacgcccgttcgtgggcttactggacacaattatggatggcacaggcacaccgcgcagtca

SEQ ID NO: 122768 - DNA, 75 bp, synthetic construct
  source 1..75: mol_type = other DNA
gcaatggcctgtgctgccgctacggtgtttcgtaactatctggtcccggttggttcgcagagggggcagactcaa

SEQ ID NO: 122769 - DNA, 75 bp, synthetic construct
  source 1..75: mol_type = other DNA
cgcttgatgtgcgtttggtgaataatcgtaatgttcctatagagatagagtcgttgatccgggaatttggaggtc

SEQ ID NO: 122770 - DNA, 75 bp, synthetic construct
  source 1..75: mol_type = other DNA
gggctgatggctcttatatctgcgatgccatctggaacggcaataaggttgatgccttcgctaaaccagttatcg

SEQ ID NO: 122771 - DNA, 75 bp, synthetic construct
  source 1..75: mol_type = other DNA
atgaaatacccgttaaaatatccgcaagtaatgctgagacagcaaactttgctactgatgttgtaaatgtctaca

SEQ ID NO: 122772 - DNA, 75 bp, synthetic construct
  source 1..75: mol_type = other DNA
cttattaccagtcgttttttgcatatccgtgccagcccggagcaggcatcaatggaattttacggcgggaagtcg

SEQ ID NO: 122773 - DNA, 75 bp, synthetic construct
  source 1..75: mol_type = other DNA
tccgcgccagcccggagcaggcatcaatggaattttacggcgggaagtcgccgaaaatcgccagtgtgcatcagt

SEQ ID NO: 122774 - DNA, 75 bp, synthetic construct
  source 1..75: mol_type = other DNA
aacattttagtctgtatgttgatgggtataagcgggttagcaagatgcgagatcgggcgttttgggagctggttt

SEQ ID NO: 122775 - DNA, 75 bp, synthetic construct
  source 1..75: mol_type = other DNA
cgctgggcgttaaccgggtgaagatattcgaacgctggaaagctatcgacaccagggataagcgggaaaaattca

SEQ ID NO: 122776 - DNA, 75 bp, synthetic construct
  source 1..75: mol_type = other DNA
acaccccatacggggtatttcaggcatcagtgtgaatacatcgtctggggcagcaaaggccatttagataaatcg

SEQ ID NO: 122777 - DNA, 75 bp, synthetic construct
  source 1..75: mol_type = other DNA
agcaacagtcaataccacggacaagggattggactggccgtaagcggcaattttaaacagctactcaattattct

SEQ ID NO: 122778 - DNA, 75 bp, synthetic construct
  source 1..75: mol_type = other DNA
agcaataccaacattactttgcagataaacaaatatctgtctggggttcgtatgagtatcgatgcgctacgatgg

SEQ ID NO: 122779 - DNA, 75 bp, synthetic construct
  source 1..75: mol_type = other DNA
tcttccttttacggttctttgtgaggtacataagaactggtataaaacgccaaatgcagcaccgcgtgtttttga

SEQ ID NO: 122780 - DNA, 75 bp, synthetic construct
  source 1..75: mol_type = other DNA
ggcactctgagtacacagattaagggcgtcagcctgaatttcggggtatccggctccaggaacacgcagggagag

SEQ ID NO: 122781 - DNA, 75 bp, synthetic construct
  source 1..75: mol_type = other DNA
ttcataaaagcaggtgcctccactgtgaaaataagtttctgatgaataaaaatccggattacgtatcgcctccat

SEQ ID NO: 122782 - DNA, 75 bp, synthetic construct
  source 1..75: mol_type = other DNA
gcggaagagaatgtcaggtacgtatttacggcgtatgcaatggcaaccctgaaactacagttctggcgcattacc

SEQ ID NO: 122783 - DNA, 75 bp, synthetic construct
  source 1..75: mol_type = other DNA
gaaagcgaccacgggaaaaggggagacctgcccgtaaatcagttccggaaatggtcggtgagtgccagttttcag

SEQ ID NO: 122784 - DNA, 75 bp, synthetic construct
  source 1..75: mol_type = other DNA
ccgtcgggccgcgcttgctgtatcagctgctttcgccagtaccacaggtgttgcaggtgaaaaactggatatgtc

SEQ ID NO: 122785 - DNA, 75 bp, synthetic construct
  source 1..75: mol_type = other DNA
ctacagcccggaactggtgctgccgattgccgaaactttgcgcgtgctggggtatcaacgcgcggcggtggtgca

SEQ ID NO: 122786 - DNA, 75 bp, synthetic construct
  source 1..75: mol_type = other DNA
aagccaccagctgttttcagcggtggtgcgtggcgagctgaagccggaacaactggcggcggcgctggtgagcat

SEQ ID NO: 122787 - DNA, 75 bp, synthetic construct
  source 1..75: mol_type = other DNA
tggcaacctctgcctgagtatcaacgggaagattttactatcggcatcctgggggctggcgtattaggcagtaaa

SEQ ID NO: 122788 - DNA, 75 bp, synthetic construct
  source 1..75: mol_type = other DNA
tgtcgcttggcattattggcgttgtcgtggcggtcggcattgtcaccagcgtcgtgctgttcttacgtaaacgtg

SEQ ID NO: 122789 - DNA, 75 bp, synthetic construct
  source 1..75: mol_type = other DNA
attgcacacgccattacacaactcgaaaaagggaagacggtcagcggacaagtcgaccgtgtacgaggctactaa

SEQ ID NO: 122790 - DNA, 75 bp, synthetic construct
  source 1..75: mol_type = other DNA
atcccagtaatgagataaaacaaatcgttgaacaaagcggcctgtttctgggcgataacgctataagaactctga

SEQ ID NO: 122791 - DNA, 75 bp, synthetic construct
  source 1..75: mol_type = other DNA
cggtaaataattacatcaccgtaaaaaatatcattacggctgccggtatcgaacaaataaaacattttctggcga

SEQ ID NO: 122792 - DNA, 75 bp, synthetic construct
  source 1..75: mol_type = other DNA
caacccaagaagtctgtggtcatggattccgggcgatggcatgtagtgcgctgatcgaatcaggtttgtggtccc

SEQ ID NO: 122793 - DNA, 75 bp, synthetic construct
  source 1..75: mol_type = other DNA
atggatatcatcttttatcacccaaccttcgacactaaatggtggattgacgcgctgggtaaagcgataccccac

SEQ ID NO: 122794 - DNA, 75 bp, synthetic construct
  source 1..75: mol_type = other DNA
cgtgacggtgactttgtgccggggggaacctgggcacgtgacagtaagaacacgccgctgggcttcgtggccaac

SEQ ID NO: 122795 - DNA, 75 bp, synthetic construct
  source 1..75: mol_type = other DNA
aaggcgctctacagtccgtgtgagattcgccatctggcgattattgtgaacctggaatatgacccgacgacggcg

SEQ ID NO: 122796 - DNA, 75 bp, synthetic construct
  source 1..75: mol_type = other DNA
ccaaatgaatggctggatctcggcggcttaagctcgctttccgctgaagaatacttcggtgccagcctttggcaa

SEQ ID NO: 122797 - DNA, 75 bp, synthetic construct
  source 1..75: mol_type = other DNA
gcctcggtcatcaggcgattgtcgaagcttacgggggctatgtcggtcaggcgggcgaaattcttcacggtaaag

SEQ ID NO: 122798 - DNA, 75 bp, synthetic construct
  source 1..75: mol_type = other DNA
acacagattaagggcgtcagtcttaacctgggctggtccggttcacggaacatccggggggaaaacaactggtct

SEQ ID NO: 122799 - DNA, 75 bp, synthetic construct
  source 1..75: mol_type = other DNA
tgggggggctgttcagtctgtcggtgtccggctggcagcggagttactaccccgcatctgtaatcagtgctcacc

SEQ ID NO: 122800 - DNA, 75 bp, synthetic construct
  source 1..75: mol_type = other DNA
cggcttgccgttatgttgaatctgctggtgtttattcgctccagtgaactcagatatgcccgctggtcagaaatt

SEQ ID NO: 122801 - DNA, 75 bp, synthetic construct
  source 1..75: mol_type = other DNA
agtggtgatcgcgattttgttttcatcggcgatcatgaccatcgcaaaccgatgagtgaaaatgatcttacccag

SEQ ID NO: 122802 - DNA, 75 bp, synthetic construct
  source 1..75: mol_type = other DNA
attgatcaggtgcgtgaggcgcacaacgagctgctcgacgcgatgatgcagagctaccgtaatctgatccgcttt

SEQ ID NO: 122803 - DNA, 75 bp, synthetic construct
  source 1..75: mol_type = other DNA
tagcggtggaatggatgaagtttccttacacgcgccgacgattgttgccgaactgcataatggggaaatcaaaag

SEQ ID NO: 122804 - DNA, 75 bp, synthetic construct
  source 1..75: mol_type = other DNA
attgccgaaaccttgcgcgtgctggggtatcaacgcgcggcggtggtgcacagcggcgggatggatgaagtttca

SEQ ID NO: 122805 - DNA, 75 bp, synthetic construct
  source 1..75: mol_type = other DNA
acgcgatgccggttcgccagcaactgaaaacccgcaccctgttcaacgtgctggggccattgattaacccggcgc

SEQ ID NO: 122806 - DNA, 75 bp, synthetic construct
  source 1..75: mol_type = other DNA
ggtatcaacgtgcagcggtggtgcacagcggtggaatggatgaagtttccttacacgcaccgaccattgttgccg

SEQ ID NO: 122807 - DNA, 75 bp, synthetic construct
  source 1..75: mol_type = other DNA
cagcagtacgtcggtaagcaccggcaaaggcggtggcacgggcttcagtacagggctttccggctcgctgaatga

SEQ ID NO: 122808 - DNA, 75 bp, synthetic construct
  source 1..75: mol_type = other DNA
tggatgcgccgggggatatcactctggggcggtgccggatacctgcggagaaactgcaggatactgagaaactac

SEQ ID NO: 122809 - DNA, 75 bp, synthetic construct
  source 1..75: mol_type = other DNA
aacgcctgtgaatatggatggcgcgaagcaatggatcgcatttactcagaagttattccagacactattcctgaa

SEQ ID NO: 122810 - DNA, 75 bp, synthetic construct
  source 1..75: mol_type = other DNA
cgaacaacaccaaagttcgcatcgatcccattattgtggcgcaagatggttcgctgtctggtcccggtatggcct

SEQ ID NO: 122811 - DNA, 75 bp, synthetic construct
  source 1..75: mol_type = other DNA
tactggatgaacgggaagcccaaagcaaacgcattgcagagctggagactaatcttgctgcgcttacggcggaga

SEQ ID NO: 122812 - DNA, 75 bp, synthetic construct
  source 1..75: mol_type = other DNA
attacaaaaatggtgtggcagcgaaaacccgcaaccgcgccgtggctgccaggcgtgcgactggcatctgctgtg

SEQ ID NO: 122813 - DNA, 75 bp, synthetic construct
  source 1..75: mol_type = other DNA
aacccgcacccgcgccgtgactgccaggcgtgcgactggcatcggctgtgtccgcacgctcgggaggagacgcca

SEQ ID NO: 122814 - DNA, 75 bp, synthetic construct
  source 1..75: mol_type = other DNA
tccggtcagtaactcaacgctaaaaagcgaagatccgaccggagcgccggtaaccagcagcggcttcctcggtgc

SEQ ID NO: 122815 - DNA, 75 bp, synthetic construct
  source 1..75: mol_type = other DNA
cgccctgcctgcacctcccgatttaagcggcggcgcgggaacaaattcagtgtctggcccgcagggtgacattct

SEQ ID NO: 122816 - DNA, 75 bp, synthetic construct
  source 1..75: mol_type = other DNA
gcaaccggcaccgaaaactgaaacgaaaccggaacgtcaacaggaccgccgtaagccacgtcagaacaaccgtcg

SEQ ID NO: 122817 - DNA, 75 bp, synthetic construct
  source 1..75: mol_type = other DNA
acccggctctggatatggctggtgcattgaccacagtaaaacgccagcatcgccctgcgctggatctttcacgtc

SEQ ID NO: 122818 - DNA, 75 bp, synthetic construct
  source 1..75: mol_type = other DNA
gcggtaactttatggtgcaagttggcgccgttagcgatcaggcgcgcgcgcaacagtatcagcagcagttaggac

SEQ ID NO: 122819 - DNA, 75 bp, synthetic construct
  source 1..75: mol_type = other DNA
aaccgtgataagacctgctcttatgactacttgctgcacccggcaatttctatttctaaaatcattggtggctgt

SEQ ID NO: 122820 - DNA, 75 bp, synthetic construct
  source 1..75: mol_type = other DNA
caccactgacgagcagcaagcaccgcgtcgtgaacgtagccgtcgccgtaacgacgataaacgtcaggtgcaaca

SEQ ID NO: 122821 - DNA, 75 bp, synthetic construct
  source 1..75: mol_type = other DNA
gcggcaacaaaggcgcagcactcaccacctttatcagtctggcaggtagttatctggttttgatgccgaacaacc

SEQ ID NO: 122822 - DNA, 75 bp, synthetic construct
  source 1..75: mol_type = other DNA
tactgtaaataaagccctgagggtgatggggtatgacacaacccaggatgtctgtggccatggattccgggcgat

SEQ ID NO: 122823 - DNA, 75 bp, synthetic construct
  source 1..75: mol_type = other DNA
aacgtcagatgagccatcaggagcgtaatggtgtacgtgctgcgtatatccataaagcagaacatctggaagaac

SEQ ID NO: 122824 - DNA, 75 bp, synthetic construct
  source 1..75: mol_type = other DNA
ggcgatcgcgccacgcagatcaaaacgctgaccaacggctgcatctgctgttcgcgctccaacgagctggaggac

SEQ ID NO: 122825 - DNA, 75 bp, synthetic construct
  source 1..75: mol_type = other DNA
cccgcgcgcacaacttgcctcggcacttaatttgccggaaacctgggtagcagagcgcctgctccggctaaagca

SEQ ID NO: 122826 - DNA, 75 bp, synthetic construct
  source 1..75: mol_type = other DNA
atatccataaagcagaacatctggaagaacgtcgactgatgctacagtggtgggcagattttctggatgcgaaca

SEQ ID NO: 122827 - DNA, 75 bp, synthetic construct
  source 1..75: mol_type = other DNA
cggtggtcatagacttagtgttttaagagcatggaaagaaaatgactatggtgatggcactatatcgcaaaaatt

SEQ ID NO: 122828 - DNA, 75 bp, synthetic construct
  source 1..75: mol_type = other DNA
gttcgctgaacgtaagcgtccggaacaacctgcgctggcaacctttgccatgccgggatgggccgcctgccccaa

SEQ ID NO: 122829 - DNA, 75 bp, synthetic construct
  source 1..75: mol_type = other DNA
gttgcacagagtttacaaacctggcgctttccgctgcgttgctggagccgtagccataaatcgtggcctggcgtg

SEQ ID NO: 122830 - DNA, 75 bp, synthetic construct
  source 1..75: mol_type = other DNA
ggatggctggaatttgcggaacgggaatgaagcctgacgacatgatcggcgcatgggcttgtagtgactgccacg

SEQ ID NO: 122831 - DNA, 75 bp, synthetic construct
  source 1..75: mol_type = other DNA
gacagcgtgctttgtgcgggctatcaggcgttttattcttactccgcaccgcatatgcgggtgatgcgtgatctg

SEQ ID NO: 122832 - DNA, 75 bp, synthetic construct
  source 1..75: mol_type = other DNA
caacctgcactggcaacttttgccatgccggatgtgccacctgctccagccccggctgaacctgtagcgcctgca

SEQ ID NO: 122833 - DNA, 75 bp, synthetic construct
  source 1..75: mol_type = other DNA
gccaataagcgattcatagcagcagccaatccggctaccgtgctggcactgctggatgaacgggaagcccaaagc

SEQ ID NO: 122834 - DNA, 75 bp, synthetic construct
  source 1..75: mol_type = other DNA
gctggtgaaaatggtctgatctttacgggagcacatgacccgcgtaaaccaatcagtgaaaatactgtaaataaa

SEQ ID NO: 122835 - DNA, 75 bp, synthetic construct
  source 1..75: mol_type = other DNA
gtataccccggttttcagcggtattgcggacgggccgtcgagggtgacactgacgcagaacgggcggttgctgca

SEQ ID NO: 122836 - DNA, 75 bp, synthetic construct
  source 1..75: mol_type = other DNA
gatacacaaaattctagctgcggcagatgagcgaaatctgccgctctggatcggtgggggctgggcgatcgatgc

SEQ ID NO: 122837 - DNA, 75 bp, synthetic construct
  source 1..75: mol_type = other DNA
ggtgcggtatcggttgatggcgcttatgccacagcgaagtatcgtgatggtaaccatgcgggtaacaaagtgcag

SEQ ID NO: 122838 - DNA, 75 bp, synthetic construct
  source 1..75: mol_type = other DNA
acggccatcagcatcatcaccggactggtcgcctgggcgatgctcgcagcactggacgttcgctttgcttttgtc

SEQ ID NO: 122839 - DNA, 75 bp, synthetic construct
  source 1..75: mol_type = other DNA
atggccaaagcaccaactaaaaaagccaaagcaaagaaaggctttgaagaaacattatgggataccgcaaaccaa

SEQ ID NO: 122840 - DNA, 75 bp, synthetic construct
  source 1..75: mol_type = other DNA
tctgtttcggtaccgttcacattatttgaccgtcgctacagtagcagcacatcggtgagtaccagtaaggacggt

SEQ ID NO: 122841 - DNA, 75 bp, synthetic construct
  source 1..75: mol_type = other DNA
aaatttgaagcacgccgcaaaaaaatgattgccgatgggcaagctgacttccttgagatggaagtgttctaccag

SEQ ID NO: 122842 - DNA, 75 bp, synthetic construct
  source 1..75: mol_type = other DNA
ttgttcagaaaaccggattcagtatggccagaataccaaccaaaaaagctaaagcaaaaaaaagggtttgaagaa

SEQ ID NO: 122843 - DNA, 75 bp, synthetic construct
  source 1..75: mol_type = other DNA
ctacacaaaagttagccctttctattcctcaagttggcttgtctgctaagccagagaatcaagaatgggactatg

SEQ ID NO: 122844 - DNA, 75 bp, synthetic construct
  source 1..75: mol_type = other DNA
tgcctgaacttctgtcgcgtattgacggttataaaggccagcctgtcacccggcttgccgttatgctgaatttac

SEQ ID NO: 122845 - DNA, 75 bp, synthetic construct
  source 1..75: mol_type = other DNA
ccgttgacaattattgtcaaaattgcgcttgaacaaacagcgggaggtcaaagcatcgccgttctgttaagcgat

SEQ ID NO: 122846 - DNA, 75 bp, synthetic construct
  source 1..75: mol_type = other DNA
tgccgcgtgtgttggctgtgtcgattttaatgataatcatcgtgatggcgatggtgctattactggcctatctcg

SEQ ID NO: 122847 - DNA, 75 bp, synthetic construct
  source 1..75: mol_type = other DNA
ccgggcatatctgagtggtgcgctgaattattcgcagtccggcggaaccagtggttcagtgtcagccagtggttc

SEQ ID NO: 122848 - DNA, 75 bp, synthetic construct
  source 1..75: mol_type = other DNA
gatgtaccgctctataccagtggtgatgtaataatgacagtaacgggagaggatggaaaggaacagacacagatt

SEQ ID NO: 122849 - DNA, 75 bp, synthetic construct
  source 1..75: mol_type = other DNA
atattcataaagcagaacatctggaagaacgtcggcttatgctgcaatggtgggcagattttctggatgcaaaca

SEQ ID NO: 122850 - DNA, 75 bp, synthetic construct
  source 1..75: mol_type = other DNA
ggaagtctgtggccatggattccgggcgatggcgtgcagtgcattgattgaatccggcttatggtcaagagatgc

SEQ ID NO: 122851 - DNA, 75 bp, synthetic construct
  source 1..75: mol_type = other DNA
ccggttatcgtatgccgccaaccggtaacgccaactacggctggattttgcatatgctctccaagctgtcggcta

SEQ ID NO: 122852 - DNA, 75 bp, synthetic construct
  source 1..75: mol_type = other DNA
gccctgagggtgatggggtatgacacaatgaaccgccccgggtttcctggagagtgttttatctgtgaactcagg

SEQ ID NO: 122853 - DNA, 75 bp, synthetic construct
  source 1..75: mol_type = other DNA
caacgtcgcccgcgccattgcccatcttggaggcagtgccacagcgatcttcccggcgggtggcgcgaccggcga

SEQ ID NO: 122854 - DNA, 75 bp, synthetic construct
  source 1..75: mol_type = other DNA
attgaagatagtgctacagcaccagagccggagcgcattgttcttgacgaaaaaataaaaattcatcctgattta

SEQ ID NO: 122855 - DNA, 75 bp, synthetic construct
  source 1..75: mol_type = other DNA
caggacaacattttctacctgccggaagaggcgcgttggtcatttatcaaacaaaatgcaaaacaggacgatatt

SEQ ID NO: 122856 - DNA, 75 bp, synthetic construct
  source 1..75: mol_type = other DNA
ctaaagcaaaaaaagggtttgaagaaacattatgggatgccgcaaatcagcttcgcggcagcgttgagtcctccg

SEQ ID NO: 122857 - DNA, 75 bp, synthetic construct
  source 1..75: mol_type = other DNA
acttcaggtgccggggtatttaaagcccacttaagcaaatgctgctggcaggaactttatgaacgtctgggatac

SEQ ID NO: 122858 - DNA, 75 bp, synthetic construct
  source 1..75: mol_type = other DNA
gtcctacaccaaaaaagaagcaatgcgtatcaaaattgcttatatcaacgcatttaactggatgtacgccatgct

SEQ ID NO: 122859 - DNA, 75 bp, synthetic construct
  source 1..75: mol_type = other DNA
gattttcgacaagaaacagatttactaccgcatggactttagtggcttcgttatgctggtcatgggatttaatgg

SEQ ID NO: 122860 - DNA, 75 bp, synthetic construct
  source 1..75: mol_type = other DNA
ttcagaacggacggatattgcattctgaaatggttccggcggggccgttttccatcactgatgtgcagctgtaca

SEQ ID NO: 122861 - DNA, 75 bp, synthetic construct
  source 1..75: mol_type = other DNA
ggttcccttccaatgaatacggagctggcgacaacaagcaaaaaggttatacctgcggataaagctgttgtatgg

SEQ ID NO: 122862 - DNA, 75 bp, synthetic construct
  source 1..75: mol_type = other DNA
ataaagcagaacatctggaagaacggcgactgatgttgcaatggtgggccgattttctggatgcgaaccgggaga

SEQ ID NO: 122863 - DNA, 75 bp, synthetic construct
  source 1..75: mol_type = other DNA
cggcagcagcaatctatgcagataataattatcatcgtgaaatgaacgtaaaacgtgttcttgagcagtatttcg

SEQ ID NO: 122864 - DNA, 75 bp, synthetic construct
  source 1..75: mol_type = other DNA
gtgcgtgcaaaaacaaaattaatagcggggagtgtgcctccggtgttttttcgccgtgctgcactggcgcttgct

SEQ ID NO: 122865 - DNA, 75 bp, synthetic construct
  source 1..75: mol_type = other DNA
tggctgacgaaggccgggatttatatcagtgcagattactttcgtgagggatatgacgctacacgacagtgttat

SEQ ID NO: 122866 - DNA, 75 bp, synthetic construct
  source 1..75: mol_type = other DNA
gacaaaaccacacgatatgcaggcggcgattgcctgtagctcatgccacgatttaatcgacgggagagtaaaaac

SEQ ID NO: 122867 - DNA, 75 bp, synthetic construct
  source 1..75: mol_type = other DNA
tgacgctggacaaaaaagaaattaccatgcctaaaaatacggtaatatttccatttgccagcgatgaaacagcta

SEQ ID NO: 122868 - DNA, 75 bp, synthetic construct
  source 1..75: mol_type = other DNA
acggaacacccggggagaaaacaactggtctgcatcggcgtcagtgtcggtaccgttcacactgtttgaccgtcg

SEQ ID NO: 122869 - DNA, 75 bp, synthetic construct
  source 1..75: mol_type = other DNA
tggatgcgccgggtgatatcaccctgggccagtgccggatacctgcggcgaaactgcaggatactgagaaactac

SEQ ID NO: 122870 - DNA, 75 bp, synthetic construct
  source 1..75: mol_type = other DNA
ctcatcgcttgcgataagttgtgatttatctgttgaaatccccgtcaaaagtgaggcggataatttaggtttagc

SEQ ID NO: 122871 - DNA, 75 bp, synthetic construct
  source 1..75: mol_type = other DNA
tcggggagttgttcagtctgtcgctttctggctggcaacggagttattacccggtctcagtaatcagtgctcacc

SEQ ID NO: 122872 - DNA, 75 bp, synthetic construct
  source 1..75: mol_type = other DNA
cgaacaggtgattccgttccgaaccaaatctatcggcaacatgccgcccgccaatcaggatcacgatacgccgct

SEQ ID NO: 122873 - DNA, 75 bp, synthetic construct
  source 1..75: mol_type = other DNA
cagtacaggacccgccaaaaggcgagcttccgattactggcgtatacaccatgggcagcacctcgtctatagggc

SEQ ID NO: 122874 - DNA, 75 bp, synthetic construct
  source 1..75: mol_type = other DNA
tcgacttatgctacagtggtgggcagattttctggatgcgaacagagaacaatgtatcagcccgtttgaatatgc

SEQ ID NO: 122875 - DNA, 75 bp, synthetic construct
  source 1..75: mol_type = other DNA
ctggtgaagatgccggagaacgtggactgggattacgggaccagtgcatttcgcgtgaactataacgcgaacgct

SEQ ID NO: 122876 - DNA, 75 bp, synthetic construct
  source 1..75: mol_type = other DNA
atcctgctctggatatggctggggcattgaccacggtaaaacgccagcatcgccccgctcttgacctttcacgcc

SEQ ID NO: 122877 - DNA, 75 bp, synthetic construct
  source 1..75: mol_type = other DNA
gggctggtgaagatgccggagaatgtggactgggattacgggaccagtgcatttcgcgtgaactataacgcgaac

SEQ ID NO: 122878 - DNA, 75 bp, synthetic construct
  source 1..75: mol_type = other DNA
aaggtgcagttatcctggagtaagcaactggagatgacgaacaccgggctgcgggtgagctggtcacggcagagt

SEQ ID NO: 122879 - DNA, 75 bp, synthetic construct
  source 1..75: mol_type = other DNA
gacaacgtgctttgtgcgggctatcaggcgttttattcttactccgcgccgcatatgcgggtgatgcgtgatctg

SEQ ID NO: 122880 - DNA, 75 bp, synthetic construct
  source 1..75: mol_type = other DNA
ggtggagtgattctggaaatccacagtgaaattgaccgtccgatactgggattcagtgttaacggcgtggcgggt

SEQ ID NO: 122881 - DNA, 75 bp, synthetic construct
  source 1..75: mol_type = other DNA
atgatcaccacaaatatgaaatattggtcctggatgggcgcattttctctgtcgatgctcttctgggttgaactc

SEQ ID NO: 122882 - DNA, 75 bp, synthetic construct
  source 1..75: mol_type = other DNA
atggggacaagcatggcaaagccgatcatcacgctcaatggcctaaaaatcgtcattatgttgggaatgctggtc

SEQ ID NO: 122883 - DNA, 75 bp, synthetic construct
  source 1..75: mol_type = other DNA
gacgattattgtcaaaattgcccttgaacaaacggcaggaggccaaagcatcgccgtcctgctaagcgatctcaa

SEQ ID NO: 122884 - DNA, 75 bp, synthetic construct
  source 1..75: mol_type = other DNA
catactgacagaactacagacatgggctggtgaaaatggtctgatctttacgggagcacatgacccgcgtaaacc

SEQ ID NO: 122885 - DNA, 75 bp, synthetic construct
  source 1..75: mol_type = other DNA
ccggatggttactcgcttctgcgacagatcacagcctcattcaactgagcggcatcattatggcctcaatgggat

SEQ ID NO: 122886 - DNA, 75 bp, synthetic construct
  source 1..75: mol_type = other DNA
aagataataaaactgttgaaattgaacatcgtgtcattaataaattatttcgtcgcctaatcatttttcttttta

SEQ ID NO: 122887 - DNA, 75 bp, synthetic construct
  source 1..75: mol_type = other DNA
aatcagtgaaaacaccgtaaataaagccctgagggttatgggatatgacacaacccaagaagtctgtggtcatgg

SEQ ID NO: 122888 - DNA, 75 bp, synthetic construct
  source 1..75: mol_type = other DNA
cgtaaaaagtgaggcggataatttaggtttagcgccgtcatgctcatcaacagtcgttctggttgttggtgatgc

SEQ ID NO: 122889 - DNA, 75 bp, synthetic construct
  source 1..75: mol_type = other DNA
cttacaaaaatggtgtggcagcgaaaactcgcaaccgcgccgtgactgccaggcgtgcgactggcatcggctgtg

SEQ ID NO: 122890 - DNA, 75 bp, synthetic construct
  source 1..75: mol_type = other DNA
acagccatcagcatcatcaccggcctggtcgcctgggcgatgctcgccgcactcgatgttcgcttcgcttttgtc

SEQ ID NO: 122891 - DNA, 75 bp, synthetic construct
  source 1..75: mol_type = other DNA
ttgaaatgacctcctttgacagcatttcctgggcacccacatccacgtttggccagggggctgaggccgtcaaca

SEQ ID NO: 122892 - DNA, 75 bp, synthetic construct
  source 1..75: mol_type = other DNA
cggcgattcagcgtgcgattgacagcgtatcgcattacctggtactgaaaacagccattagcatcatcaccggtc

SEQ ID NO: 122893 - DNA, 75 bp, synthetic construct
  source 1..75: mol_type = other DNA
gtgtatacagggaagacactgctcagcctcttcttctgtgccgctctgacatgtctgaagccgctcgtgaatgct

SEQ ID NO: 122894 - DNA, 75 bp, synthetic construct
  source 1..75: mol_type = other DNA
gcagcagaagggcttatctccaacgtgctgcgtgtggagcggtcactggaaaggtgtgtgaagcaacagccacca

SEQ ID NO: 122895 - DNA, 75 bp, synthetic construct
  source 1..75: mol_type = other DNA
ggtgaggaagttgtctgacatctttattcattcagagcgttttaaatgcaatgtgttctaccactttatgttcga

SEQ ID NO: 122896 - DNA, 75 bp, synthetic construct
  source 1..75: mol_type = other DNA
taagtttgcaggcgtctgggatgaaaaatacccgcaaatcagcaagagctggcgcacacactgggaaaatctcaa

SEQ ID NO: 122897 - DNA, 75 bp, synthetic construct
  source 1..75: mol_type = other DNA
tcaccggtgcggtggaaatcgtactggtggcaaattcggtgattgatatctcggtcggttcgccgttctccattc

SEQ ID NO: 122898 - DNA, 75 bp, synthetic construct
  source 1..75: mol_type = other DNA
ctgtcgtctgcagccctatcagtgcagcgcgggtgtatggactgacggcattggtaatacgtcgggcgtcattcc

SEQ ID NO: 122899 - DNA, 75 bp, synthetic construct
  source 1..75: mol_type = other DNA
gctacccggcggatatccgtaaggctatctacaccaagaacacgatagaatcgctgaacagcgtgatccgtgcgg

SEQ ID NO: 122900 - DNA, 75 bp, synthetic construct
  source 1..75: mol_type = other DNA
cagcttcacacctccgtggaggggcttaaactgattgtcgattacgaaggctgtcgtctgcagccgtatcagtgc

SEQ ID NO: 122901 - DNA, 75 bp, synthetic construct
  source 1..75: mol_type = other DNA
tttgctgttgcagtgccgtcggtgaatcctgtcgatggtctgctaatggcggaaaaaatccgtaaaggcgttgaa

SEQ ID NO: 122902 - DNA, 75 bp, synthetic construct
  source 1..75: mol_type = other DNA
gaacagcgtcattcggcaggcgataaagaagcgcaaggtgttcccaacggacgactcggtgcgaaaagtgattta

SEQ ID NO: 122903 - DNA, 75 bp, synthetic construct
  source 1..75: mol_type = other DNA
aaacggccatcaatatcgaatacatgaaagccagcatccgtgccagggtggagcacccgtttcgcatcatcaagc

SEQ ID NO: 122904 - DNA, 75 bp, synthetic construct
  source 1..75: mol_type = other DNA
aaggtgtgtgaagcaacagccgccgcagaaggtgtatgacgctgcagtgtcgtttgccttcaacgtgggaacggg

SEQ ID NO: 122905 - DNA, 75 bp, synthetic construct
  source 1..75: mol_type = other DNA
cactgtatcccattgtttatcttgactgtattgtggttaaggttcgtcacggcgggagtgtcattaacaaagcgg

SEQ ID NO: 122906 - DNA, 75 bp, synthetic construct
  source 1..75: mol_type = other DNA
atcgaacttaacacgccgcgtgaccgtgaaaataccttcgaaccgcaactaattaagaagcatcagacacgcatc

SEQ ID NO: 122907 - DNA, 75 bp, synthetic construct
  source 1..75: mol_type = other DNA
cgtatcgactttcgtcaactgcggtaaagcgttgccggaacatggcattgaaatccgcaatgaagcaggtatacc

SEQ ID NO: 122908 - DNA, 75 bp, synthetic construct
  source 1..75: mol_type = other DNA
tattttagtaaacctgctgatgattattttttaaataatcatataatttcttatgacccgtcaaaaaaccagtgg

SEQ ID NO: 122909 - DNA, 75 bp, synthetic construct
  source 1..75: mol_type = other DNA
cggcgacctgttaccggatattggtgaatacgaaactaatatgtggggtgacaatggaacaaataaacattgttg

SEQ ID NO: 122910 - DNA, 75 bp, synthetic construct
  source 1..75: mol_type = other DNA
acttctataacggtcgccataataaaccaggtagcgagcagcgttatacctttaaaaataccaaccgtatttacc

SEQ ID NO: 122911 - DNA, 75 bp, synthetic construct
  source 1..75: mol_type = other DNA
cacccgagggggtgtcaggagcatatgcctctgttattgatggaaatatctttctggccggtggtgcatatttcc

SEQ ID NO: 122912 - DNA, 75 bp, synthetic construct
  source 1..75: mol_type = other DNA
ttttgcagaacagcaaatttatatactgggaggggagagaaaaccggggcttcgttctgttagatcctggacggg

SEQ ID NO: 122913 - DNA, 75 bp, synthetic construct
  source 1..75: mol_type = other DNA
cgcattgcatatcgttgtaaaactatgaacgttgtggctttctgtccgagatacataaagatcacacctcggaaa

SEQ ID NO: 122914 - DNA, 75 bp, synthetic construct
  source 1..75: mol_type = other DNA
tgtggttaacgaagtggatcgcgacatcctcgaatatcagggcaaagccgtcgcgccggatgctgaaacacgcgc

SEQ ID NO: 122915 - DNA, 75 bp, synthetic construct
  source 1..75: mol_type = other DNA
atgggggcttgtgtccgtaaggtgacgcttatgaatgcatggtatcttttatactgtaataacaacgaattagat

SEQ ID NO: 122916 - DNA, 75 bp, synthetic construct
  source 1..75: mol_type = other DNA
gcttgtttattaagatccgcgaacacggagatctgctaccggatattgacgaatacgcgacgaatatgtggggtg

SEQ ID NO: 122917 - DNA, 75 bp, synthetic construct
  source 1..75: mol_type = other DNA
tgtagccggctgggttgcaggttacaactttatgctgggcagcgagaaattcactcttaccaactggaacgagta

SEQ ID NO: 122918 - DNA, 75 bp, synthetic construct
  source 1..75: mol_type = other DNA
taatgctacaagtgaaacggcaaatattaatgtgctccaaaaaaacatgacttctttagatagtagtggttcatt

SEQ ID NO: 122919 - DNA, 75 bp, synthetic construct
  source 1..75: mol_type = other DNA
cagtgggatctacagaccgccaaagagtgcgcgcgcgatgtagaagcggtgctatcgagtgactcctatcccttc

SEQ ID NO: 122920 - DNA, 75 bp, synthetic construct
  source 1..75: mol_type = other DNA
tttacaccttctggcggtattcgccggaatcagccgcaacaagccgaaagatcgcctgactcctttactggaagc

SEQ ID NO: 122921 - DNA, 75 bp, synthetic construct
  source 1..75: mol_type = other DNA
atgtacaccccatttcaactttccgtttgttccaggaaggtcatctgctacgtaatagcattcgctatttttgcg

SEQ ID NO: 122922 - DNA, 75 bp, synthetic construct
  source 1..75: mol_type = other DNA
tatgtgaaatccttaggcgacagcgtacgtctggtgctgggcaatcacgatctgcatctgctggcggtatttgcc

SEQ ID NO: 122923 - DNA, 75 bp, synthetic construct
  source 1..75: mol_type = other DNA
gttcccgctgcctgcattaatctggtgtgcagtgcgctatacgccgcaggtaacatgtctgttgacctttgtcac

SEQ ID NO: 122924 - DNA, 75 bp, synthetic construct
  source 1..75: mol_type = other DNA
aaataagtatgagccagtaagtgccttacggctatttaattactgtctgattgccgcattattatgcgctattgt

SEQ ID NO: 122925 - DNA, 75 bp, synthetic construct
  source 1..75: mol_type = other DNA
aagcgatttatcaggctcccacggaagaggcaggccagcaggcactggaagcgttcgctgcggcctgggacagtc

SEQ ID NO: 122926 - DNA, 75 bp, synthetic construct
  source 1..75: mol_type = other DNA
tgccgagttaaaacagcttggcctcgatggagtaatggtttatcaggagacatatcatgaggcgacttatgccca

SEQ ID NO: 122927 - DNA, 75 bp, synthetic construct
  source 1..75: mol_type = other DNA
cgaaagtggggatggattacttccgccgccatctccctgccctgcgtaaacaattctcctcactacagatggaag

SEQ ID NO: 122928 - DNA, 75 bp, synthetic construct
  source 1..75: mol_type = other DNA
ggcgctggatgcgttcgggaaggaatgggatgcacggtacccgcagataagtcgcagctggcgggcaaactggcc

SEQ ID NO: 122929 - DNA, 75 bp, synthetic construct
  source 1..75: mol_type = other DNA
cggattttccatgagcaatcgcatcaagcgcaaaacgctggatgaagcagatatcgccagggaaagtgcagccat

SEQ ID NO: 122930 - DNA, 75 bp, synthetic construct
  source 1..75: mol_type = other DNA
agcgcgggtgtctggaccgacggcattggtaatacgtcgggcgtcattcccggcaaaaccattacggagcgacag

SEQ ID NO: 122931 - DNA, 75 bp, synthetic construct
  source 1..75: mol_type = other DNA
caatgcctgcagttccacgctggtgaaattgctcaatcagcggcgctgggcggatgcatgccgacagttgccgcg

SEQ ID NO: 122932 - DNA, 75 bp, synthetic construct
  source 1..75: mol_type = other DNA
atgagatgggcgcaaaatctttccgtattacttcagtaaccggtccgaataccctccacggaacggcagtaattt

SEQ ID NO: 122933 - DNA, 75 bp, synthetic construct
  source 1..75: mol_type = other DNA
gagcacccgtttcgcatcatcaagcggcagtttggcttcgtgaaagccagatacaaggggctgctgaaaaacgat

SEQ ID NO: 122934 - DNA, 75 bp, synthetic construct
  source 1..75: mol_type = other DNA
agcttggtcacgatctgaaccgtgcttgtggcatgggacaaagaccagagacatttccacttatgtatgatggaa

SEQ ID NO: 122935 - DNA, 75 bp, synthetic construct
  source 1..75: mol_type = other DNA
gtcactcgcgacctgaaagcgatttatcaggctcccacggaagaggcaggtcagcaggcactggaagcgttcgct

SEQ ID NO: 122936 - DNA, 75 bp, synthetic construct
  source 1..75: mol_type = other DNA
taagctggtggatcagtttgaggaataccaacaagccgttaatgatggcttgatccgtttttcacaagtcacagg

SEQ ID NO: 122937 - DNA, 75 bp, synthetic construct
  source 1..75: mol_type = other DNA
agcgcgggcgtctggaccgacggaattggtaatacgtcgggcgtcattcccggcaaaactattacggaacgacag

SEQ ID NO: 122938 - DNA, 75 bp, synthetic construct
  source 1..75: mol_type = other DNA
caccatcatgaatttccgccacctgctcgagcagcatcaactggcccgtcaattgttcaagaccatcaatcgctg

SEQ ID NO: 122939 - DNA, 75 bp, synthetic construct
  source 1..75: mol_type = other DNA
tcgcctccatgcggctgtttgcccgtttatccctggatagcgccatgccggaacgcaccaccatcatgaatttcc

SEQ ID NO: 122940 - DNA, 75 bp, synthetic construct
  source 1..75: mol_type = other DNA
ggtagcgcgtgtcaaaaccattttgcgccgttgtaaaccgcaacgcgaacttcagcaacaggatgccgaaagccc

SEQ ID NO: 122941 - DNA, 75 bp, synthetic construct
  source 1..75: mol_type = other DNA
aggtggatatggactggctgatcgccgagcgtcccggcaaggtaaaaaccttgaagcagcatccgcgcaagaaca

SEQ ID NO: 122942 - DNA, 75 bp, synthetic construct
  source 1..75: mol_type = other DNA
cggagcggtagaaatcgtgctggtggctaattcggtgattgatatcgccgtcggttcgccgttctcgattccgca

SEQ ID NO: 122943 - DNA, 75 bp, synthetic construct
  source 1..75: mol_type = other DNA
accttgcagcagaatttgctaaaggaatcaaaacagaagacgatctcaatcaattcacccgattgttgactaaac

SEQ ID NO: 122944 - DNA, 75 bp, synthetic construct
  source 1..75: mol_type = other DNA
aatggcagtgttatcaacaaggctgtattccttgccttaggcattaatcttgatggacagaaagaactgctcggc

SEQ ID NO: 122945 - DNA, 75 bp, synthetic construct
  source 1..75: mol_type = other DNA
attcgtcgtttttctgatattcccattgttatggtgacagcgaaaatcgaagagatcgaccgcctgctggggctg

SEQ ID NO: 122946 - DNA, 75 bp, synthetic construct
  source 1..75: mol_type = other DNA
cgggagcacatgacccgcgtaaaccaatcagtgaaaacaccgtaaataaagccctgagggtaatgggatatgaca

SEQ ID NO: 122947 - DNA, 75 bp, synthetic construct
  source 1..75: mol_type = other DNA
agcaggagttattacaggagttaccgtggttacagatgcgctttcagaaccgcgctaactatgaagcgatgattg

SEQ ID NO: 122948 - DNA, 75 bp, synthetic construct
  source 1..75: mol_type = other DNA
gagccggaatttacacctgctgagcttgccgcattccgggattactggatggcggaggggaaggttttcacgcag

SEQ ID NO: 122949 - DNA, 75 bp, synthetic construct
  source 1..75: mol_type = other DNA
atggatatttttatttcgaaaaagatgcgcaattttattttattagcgcaaaccaataatattgccagggcagca

SEQ ID NO: 122950 - DNA, 75 bp, synthetic construct
  source 1..75: mol_type = other DNA
atgaaagaaaaacaacagaacataacacataaaaaagtaagagtgttgctaaccattgaaaatggtgaagtaatt

SEQ ID NO: 122951 - DNA, 75 bp, synthetic construct
  source 1..75: mol_type = other DNA
gcgcgtcacgaaatgtcacgcacatgtcacgacaagtcacgacagataaagatacagatacagaattaaacccca

SEQ ID NO: 122952 - DNA, 75 bp, synthetic construct
  source 1..75: mol_type = other DNA
ggtaaaaccagtcagcaagggggtaagccatgcagcaccaggtggcaccgcatcacgggcagttcaggaaatccg

SEQ ID NO: 122953 - DNA, 75 bp, synthetic construct
  source 1..75: mol_type = other DNA
agccatcaaaaaagctgcagaaagccgccctgctccgttcctgatccaccaggagagcaacgtaattgtgcgtgc

SEQ ID NO: 122954 - DNA, 75 bp, synthetic construct
  source 1..75: mol_type = other DNA
gacacgattcatctccgtggtccaaaagtcataaacggcgaagagcgcattacgcgaacgccgctggcagggtta

SEQ ID NO: 122955 - DNA, 75 bp, synthetic construct
  source 1..75: mol_type = other DNA
aacgtctggctatgcgattgcgctaaagtttacggtcacgcgcaggtgaaagctggcatagaagaagatgccatt

SEQ ID NO: 122956 - DNA, 75 bp, synthetic construct
  source 1..75: mol_type = other DNA
gacaatggtaacgtttcgcaaacggcaaaatccccggcagagcgcaagagagcgcagcgggagcgggaaaagctg

SEQ ID NO: 122957 - DNA, 75 bp, synthetic construct
  source 1..75: mol_type = other DNA
taaataaagccctgagggtgatggggtatgacacaacccaggatgtctgtggccatggattccgtgcgatggcat

SEQ ID NO: 122958 - DNA, 75 bp, synthetic construct
  source 1..75: mol_type = other DNA
tgatgcaaaacagactggcggttgaggataaattccgcagtttccgcccggccgatttcgctgacgtttttcgtc

SEQ ID NO: 122959 - DNA, 75 bp, synthetic construct
  source 1..75: mol_type = other DNA
aagatttagcaagtgcgcttgatgtgacggaagacgtaattgattcaattttgcatgcaatgcaggggcgggttc

SEQ ID NO: 122960 - DNA, 75 bp, synthetic construct
  source 1..75: mol_type = other DNA
gtgttattacggcagattatcgccattagcgattttaacgatgtgatagcaggaaccgctggcggctggatcgat

SEQ ID NO: 122961 - DNA, 75 bp, synthetic construct
  source 1..75: mol_type = other DNA
ctcgtcagaacaaccgccgtgaccgtaatgaacgtcgcgacacccgaggcgaacgtacagaaggtggcgataacc

SEQ ID NO: 122962 - DNA, 75 bp, synthetic construct
  source 1..75: mol_type = other DNA
tcgcctccatgcgactgtttgcccgcttatccctggatagcgccttgccggagcgcaccaccatcatgaatttcc

SEQ ID NO: 122963 - DNA, 75 bp, synthetic construct
  source 1..75: mol_type = other DNA
tcgcctccatgcgactgtttgcccgcttatccctggatagcgccgtgccggatcgcaccaccatcatgaatttcc

SEQ ID NO: 122964 - DNA, 75 bp, synthetic construct
  source 1..75: mol_type = other DNA
tcgcctccatgcgtctgtttgcccgcttatccctggatagcgccgtgccggagcgcaccaccatcatgaatttcc

SEQ ID NO: 122965 - DNA, 75 bp, synthetic construct
  source 1..75: mol_type = other DNA
gctgccgatgagattgctcgtcagctgcgcctgcgtgacctcggcggtctgattgttatcgacttcatcgacatg

SEQ ID NO: 122966 - DNA, 75 bp, synthetic construct
  source 1..75: mol_type = other DNA
agacagcaaagccaaaagacaaaacctacaaaatggccgatggcggcggtttgtatcttgaggtgacgagcaaag

SEQ ID NO: 122967 - DNA, 75 bp, synthetic construct
  source 1..75: mol_type = other DNA
tttgtgagctaatcaatgctctttccatgcttgctcatttccatgatataaaaaaagatagcaaaggtacatttt

SEQ ID NO: 122968 - DNA, 75 bp, synthetic construct
  source 1..75: mol_type = other DNA
aggatgaaatatctgatgcgtatatctgcgcaagagacggaggtatgccgcaaaccacggctacagatgctctcc

SEQ ID NO: 122969 - DNA, 75 bp, synthetic construct
  source 1..75: mol_type = other DNA
tgccactcagccaacaggctgtagccatactgacagaacttcagacatgggcaggtgaaaatggtctgatattta

SEQ ID NO: 122970 - DNA, 75 bp, synthetic construct
  source 1..75: mol_type = other DNA
attaagccggggcatacgcttggcattatcgatgctctgttggttcataagatggccatggctttattgccgttg

SEQ ID NO: 122971 - DNA, 75 bp, synthetic construct
  source 1..75: mol_type = other DNA
ggaattgaagctttacgcgcaacgataatcttcagtatgtggtcaatcattccctattttgtttatctggcgtcg

SEQ ID NO: 122972 - DNA, 75 bp, synthetic construct
  source 1..75: mol_type = other DNA
ccggaatgaccaggaaggccgcgttaaagcacatcgttgatggtgtgcgcatgggggcgttacctgaccgcatta

SEQ ID NO: 122973 - DNA, 75 bp, synthetic construct
  source 1..75: mol_type = other DNA
tgttcctgtgccaatcgcttcttacctgctgaatgaaaaacgttctgcggtgaatgccattgaaacgcgtcagga

SEQ ID NO: 122974 - DNA, 75 bp, synthetic construct
  source 1..75: mol_type = other DNA
gctggtgaaaatggtctgatctttacgggagcgcatgacccacgtagaccaatcagtgaaaacaccgtaaataaa

SEQ ID NO: 122975 - DNA, 75 bp, synthetic construct
  source 1..75: mol_type = other DNA
cacgcctgaccatgccggttggatatacaaatgccgaaaactatataccactccgccagcgccggtaatacaggc

SEQ ID NO: 122976 - DNA, 75 bp, synthetic construct
  source 1..75: mol_type = other DNA
ttattcacgctggccaacctgtttcgggcggaccaaatgatacgtcagtgggagagatctgtaagcgtcgtctga

SEQ ID NO: 122977 - DNA, 75 bp, synthetic construct
  source 1..75: mol_type = other DNA
aaaatactgtaaataaagccctgagggtgatggggtatgacacaacccaggaagtctgtggccatggattccggg

SEQ ID NO: 122978 - DNA, 75 bp, synthetic construct
  source 1..75: mol_type = other DNA
acatcggcttactgcatctgttgctgcaacatacctccgcctctctgacacttaatgagaactgcgatcccaccg

SEQ ID NO: 122979 - DNA, 75 bp, synthetic construct
  source 1..75: mol_type = other DNA
acatgacccgcgtaaaccaatcagtgaaaatactgtaaataaagccctgagggtgatggggtatgacacaaccca

SEQ ID NO: 122980 - DNA, 75 bp, synthetic construct
  source 1..75: mol_type = other DNA
ttcagaccggcacctggcaaggcatctggctgggggaacatcgcgtcgcatcatcgcgtcgcatcatcgcgacac

SEQ ID NO: 122981 - DNA, 75 bp, synthetic construct
  source 1..75: mol_type = other DNA
caccatcaggcctacagatgagctcgccccaacgaggcaactaaaagttatccggcccgaactggtaaaaaatcc

SEQ ID NO: 122982 - DNA, 75 bp, synthetic construct
  source 1..75: mol_type = other DNA
cccgcgtaaaccgatcagtgaaaatactgtaaataaagccctgagggtgatgggatatgacacaacccaggaagt

SEQ ID NO: 122983 - DNA, 75 bp, synthetic construct
  source 1..75: mol_type = other DNA
ttcgaaacgctggacgatttgtccggtaaaatgccgaatttgcgtcagcagatgatgcgtctgatgagcggtgaa

SEQ ID NO: 122984 - DNA, 75 bp, synthetic construct
  source 1..75: mol_type = other DNA
tggcatcagttatgtttttgaatgaaaaaacaaactcaatgcagattgcgggtttaactatcgcaatagttgcac

SEQ ID NO: 122985 - DNA, 75 bp, synthetic construct
  source 1..75: mol_type = other DNA
ttactcttttctcacggcgagtgtctgcaaccaacaaacatcgggatcgctcaccacaaacaaataatggtattc

SEQ ID NO: 122986 - DNA, 75 bp, synthetic construct
  source 1..75: mol_type = other DNA
caaagcattcgagtatcacatcgactgcctgcccgcagaagcgcagaagattttacgtaaacacctgactaatcg

SEQ ID NO: 122987 - DNA, 75 bp, synthetic construct
  source 1..75: mol_type = other DNA
cagaacgtgagctggccctgtcccgactgaagggggaggaaaaagagcgtgtccggctggggtatgcggcggatg

SEQ ID NO: 122988 - DNA, 75 bp, synthetic construct
  source 1..75: mol_type = other DNA
ggaaacggcctggaagctgtgggagcttatgggggaggtgtattcgaaccgctggacccagaagaacggggccgc

SEQ ID NO: 122989 - DNA, 75 bp, synthetic construct
  source 1..75: mol_type = other DNA
caagtgctggaatccttgttgaagtggctggcaacacacccttgcgacaaaaaaggaccgcgcttttcagtcaat

SEQ ID NO: 122990 - DNA, 75 bp, synthetic construct
  source 1..75: mol_type = other DNA
gtcacgacagataaagatacagatacagaattaaaccccacacataacgcgcgtatgcgcgagagtgctccaacc

SEQ ID NO: 122991 - DNA, 75 bp, synthetic construct
  source 1..75: mol_type = other DNA
cctgaagttgtgcgtgagctggcacgaattgtgctggcatcgctggaatcagagcctgttctgtatcagtcctgc

SEQ ID NO: 122992 - DNA, 75 bp, synthetic construct
  source 1..75: mol_type = other DNA
agctctctcagccagtgcagtggcagcgctctctcacctacctgacaggacacttgtcaccgatcgcgatagaga

SEQ ID NO: 122993 - DNA, 75 bp, synthetic construct
  source 1..75: mol_type = other DNA
ctgatgctacagtggtgggcagattttctgaatgcgaacagagagaaatgtatcagtccgtttgattatgcaaag

SEQ ID NO: 122994 - DNA, 75 bp, synthetic construct
  source 1..75: mol_type = other DNA
acggcctgagcgaaccgatcgggaaattttcgatgactactgtctggcagccgtcgtcggattttcgacaacggg

SEQ ID NO: 122995 - DNA, 75 bp, synthetic construct
  source 1..75: mol_type = other DNA
gtcaaaggtaaatacatcaccatcgaaaataacgatgcgctggccctgcttgctggtcatacgcgtaacgttgcc

SEQ ID NO: 122996 - DNA, 75 bp, synthetic construct
  source 1..75: mol_type = other DNA
atggtgcagagcaggaggtcatgttccgccagcaacatcagcccggcctgcgatgccggtcggggccacgaaaat

SEQ ID NO: 122997 - DNA, 75 bp, synthetic construct
  source 1..75: mol_type = other DNA
aaaccatcagccgcctgctgggtcgctttcagaaaagcggtatgctggcagttaaaggtaaatacatcactatcg

SEQ ID NO: 122998 - DNA, 75 bp, synthetic construct
  source 1..75: mol_type = other DNA
catctgaaaaggcgtatctgtcaggcgctgatactgcggggcagtaacgacttcagcaccatagaagaatatcag

SEQ ID NO: 122999 - DNA, 75 bp, synthetic construct
  source 1..75: mol_type = other DNA
caaaccattagaaatggtgttatcaagagtctaagtgttagggtctctaaaatactggccgatggtgttgtttct

SEQ ID NO: 123000 - DNA, 75 bp, synthetic construct
  source 1..75: mol_type = other DNA
actacacacaaaatagaaataagctttttgcaaatttaatcagcattattgatgggattcttgccgatggacatg

SEQ ID NO: 123001 - DNA, 75 bp, synthetic construct
  source 1..75: mol_type = other DNA
ctggccgttatgctgaatttactggtttttattcgttccagtgaactcagatatgcccgttggtctgaaattgat

SEQ ID NO: 123002 - DNA, 75 bp, synthetic construct
  source 1..75: mol_type = other DNA
tatatcggtattgaaattacgccaaccacgcagaccggtacgccaaacgtcgggactgcgctgcatctttatgac

SEQ ID NO: 123003 - DNA, 75 bp, synthetic construct
  source 1..75: mol_type = other DNA
ggagctaacagacgggtaaacgaaaacgcatcgcttgaaaaaatggttatggggatgcgtgtaaagtcagagcag

SEQ ID NO: 123004 - DNA, 75 bp, synthetic construct
  source 1..75: mol_type = other DNA
ctatttggctgaaaggacatctagggttgacagggacggaattaggtacactttattcggtcaaccagtttacca

SEQ ID NO: 123005 - DNA, 75 bp, synthetic construct
  source 1..75: mol_type = other DNA
gagccgtataaatatgtcttacagccgctgcctgatgtgtggataccatttaacgattcgctggatatgattacg

SEQ ID NO: 123006 - DNA, 75 bp, synthetic construct
  source 1..75: mol_type = other DNA
tgctgaaagatggtgcgggaaaaccaatacagaactgcactattcaactgagggcaaagcgtaacagcaccacgg

SEQ ID NO: 123007 - DNA, 75 bp, synthetic construct
  source 1..75: mol_type = other DNA
tacagtgaaggtggtaatgcgacgatcaactctgctgatgccgatcatgtcaaagtcacttccgattatcagggc

SEQ ID NO: 123008 - DNA, 75 bp, synthetic construct
  source 1..75: mol_type = other DNA
attttagttttggcccctggaaatggggattagatagttcaagtgccgtatacctgatatcactcgcagttgcta

SEQ ID NO: 123009 - DNA, 75 bp, synthetic construct
  source 1..75: mol_type = other DNA
tcccgatgctggcgggcgcggtactccagtctggcgagttcatcacaattgagttaccagaatggctgctggcga

SEQ ID NO: 123010 - DNA, 75 bp, synthetic construct
  source 1..75: mol_type = other DNA
ggaatatttctagagttagtggaaaatttgcaccttactaaacgatacgatgatctggcacaattgttggcacct

SEQ ID NO: 123011 - DNA, 75 bp, synthetic construct
  source 1..75: mol_type = other DNA
aagaaaccgctcatctggtgtatgagtttcatcctggtcttgaccggaccgtttatgatttacgtttatgaaccg

SEQ ID NO: 123012 - DNA, 75 bp, synthetic construct
  source 1..75: mol_type = other DNA
ctcccgcaggtcatggtggaaatttcagacgagcaggtgcgtgttctgattcattacatcgttaacgcaggggac

SEQ ID NO: 123013 - DNA, 75 bp, synthetic construct
  source 1..75: mol_type = other DNA
cgtgccagcttcagaaaatggggatgacgccggagcagattaagcaggctaccggactttccgatgacgaactga

SEQ ID NO: 123014 - DNA, 75 bp, synthetic construct
  source 1..75: mol_type = other DNA
ttacggcacgagtcaggaaggaggaaactacaggatggatttttgctgaggcaacaattcaggcaattgatggtg

SEQ ID NO: 123015 - DNA, 75 bp, synthetic construct
  source 1..75: mol_type = other DNA
atgaattaaaaattagaacaagaatgatgaaaatcctccggaatggcaaaatcaatatatatgaatatataaata

SEQ ID NO: 123016 - DNA, 75 bp, synthetic construct
  source 1..75: mol_type = other DNA
ctgagcgtctgccgcagcatgaggataaactgatgactatcgcagaacgtcttgagcaaaaaggtcgccaggaag

SEQ ID NO: 123017 - DNA, 75 bp, synthetic construct
  source 1..75: mol_type = other DNA
gatttatcgccggatcagtggcggattgtcattctgatgggattagtattgacgccggtgatgctgtatcacaaa

SEQ ID NO: 123018 - DNA, 75 bp, synthetic construct
  source 1..75: mol_type = other DNA
ccggcaggttcttatacgacgatatcgtgtctgacgaaaagtgataattcccggtgtcgtgcaaggttcggaaaa

SEQ ID NO: 123019 - DNA, 75 bp, synthetic construct
  source 1..75: mol_type = other DNA
cggcatgcggactgcaggcagagaaaactggccgattttctctgcactggagggataatacaaggtctaattctg

SEQ ID NO: 123020 - DNA, 75 bp, synthetic construct
  source 1..75: mol_type = other DNA
atggcagtacagatttcaggtgtgctgaaagacggtgcaggaaaaccaatacagaactgcactattcagctcaaa

SEQ ID NO: 123021 - DNA, 75 bp, synthetic construct
  source 1..75: mol_type = other DNA
ctcagtttgaaaagggaactcatgcgtcatcatttatcattacgtcgggaactggtgcaacaagagccagtgata

SEQ ID NO: 123022 - DNA, 75 bp, synthetic construct
  source 1..75: mol_type = other DNA
ggcggtgctgcctcaagaattacagcgagagtcagaaaggacgaagctaccggatggatttttgcagaggcaaca

SEQ ID NO: 123023 - DNA, 75 bp, synthetic construct
  source 1..75: mol_type = other DNA
gttttcaaggatcgaaacttctgggttttcgtcatatttattgtggggacgtggtctttctataacatttttgat

SEQ ID NO: 123024 - DNA, 75 bp, synthetic construct
  source 1..75: mol_type = other DNA
cggatttccttattgcgatattggaggagctaacagacgggtaaacgaaaacgcatcgcttgaaaaaatggttat

SEQ ID NO: 123025 - DNA, 75 bp, synthetic construct
  source 1..75: mol_type = other DNA
gcgtagtggcgtttaccacgctggcgcagggttcgttacccgaattgcatcaggcgtggcaagcggtagacgaac

SEQ ID NO: 123026 - DNA, 75 bp, synthetic construct
  source 1..75: mol_type = other DNA
aagtatattctggcaagaaaactgtccttatcctccgtattacttcgcttaacaaatctttctgtttttgaaata

SEQ ID NO: 123027 - DNA, 75 bp, synthetic construct
  source 1..75: mol_type = other DNA
gcgtttctgtagtcagtgcctttattggcgcaccggtgctgatcttcctcgtgcgacgtaaaacgcgaggtggcg

SEQ ID NO: 123028 - DNA, 75 bp, synthetic construct
  source 1..75: mol_type = other DNA
atgaaacctgatatgaaacgtggcctgacaaaagtcgcgctcgcgttgatgctggctggatactgtgccgtacca

SEQ ID NO: 123029 - DNA, 75 bp, synthetic construct
  source 1..75: mol_type = other DNA
tcgagaaaggcaccactaccaaccttatcggtggtaatacggccattgcgcttaacaaaacgtatgtggccaaac

SEQ ID NO: 123030 - DNA, 75 bp, synthetic construct
  source 1..75: mol_type = other DNA
tttaccggcggcaacgatgattgcccgtgaaattatcatttctgcactgcgcgagtggatggcggagctgggtaa

SEQ ID NO: 123031 - DNA, 75 bp, synthetic construct
  source 1..75: mol_type = other DNA
cttgccggggcgttaatgcaaaccctcacccgaaacccgcttgccgatcctggtttgcttggcgtgaacgccggt

SEQ ID NO: 123032 - DNA, 75 bp, synthetic construct
  source 1..75: mol_type = other DNA
tacgccgctctgagtagcgccggaatgaatttttatgacagacgttgccaacttgaagatcaactggaatatcag

SEQ ID NO: 123033 - DNA, 75 bp, synthetic construct
  source 1..75: mol_type = other DNA
ttaccctgtcgactttcctcgtctgattcaggaaaagcgtaaggagtgggagcagattgcaggcgtgcctgtagc

SEQ ID NO: 123034 - DNA, 75 bp, synthetic construct
  source 1..75: mol_type = other DNA
gccttgctgaacgagggattattcagcttcccccaatggggatttctgaaaatatcaatgggttaggtttaactc

SEQ ID NO: 123035 - DNA, 75 bp, synthetic construct
  source 1..75: mol_type = other DNA
gcccgcgcggaagcgaaaaaacgttatcagaaggccgtcgccgctaatccccctgtgcaggaatctctcgtatga

SEQ ID NO: 123036 - DNA, 75 bp, synthetic construct
  source 1..75: mol_type = other DNA
acggtatttcagggttacgcctaatttattcaggaaacgtgatttttgggatttcagatattattttcctcagca

SEQ ID NO: 123037 - DNA, 75 bp, synthetic construct
  source 1..75: mol_type = other DNA
tcgctgcccgtcacgctacttgctacccctgccctgctgctgtttgccgatatcatcgggcgggtgattgtgccc

SEQ ID NO: 123038 - DNA, 66 bp, synthetic construct
  source 1..66: mol_type = other DNA
gcggctttcagctcactgtcgcgaggtggcgtatattacgctttcctctttcagagtcaaccctga

SEQ ID NO: 123039 - DNA, 75 bp, synthetic construct
  source 1..75: mol_type = other DNA
gatacagtggcggttattgctgcgggtagtaatgctgatatggcattgattatggcgatgcagaccctgcgcctg

SEQ ID NO: 123040 - DNA, 75 bp, synthetic construct
  source 1..75: mol_type = other DNA
aaactaatgcgaaaaatagcgaggtagctgcaaaatcgagtcagagtgctgccgcaaactccgctaccgcagcaa

SEQ ID NO: 123041 - DNA, 75 bp, synthetic construct
  source 1..75: mol_type = other DNA
aaaaccagtgaaaccaatgcaaagacaagcgagactgcagcggcgaactcggcgaaagcatcggcagcaagccag

SEQ ID NO: 123042 - DNA, 75 bp, synthetic construct
  source 1..75: mol_type = other DNA
caaagccagcgaaactgcggcgaaaaacagtcaggatgcagcagcccaaagcgagagtgctgcagctggttctgc

SEQ ID NO: 123043 - DNA, 75 bp, synthetic construct
  source 1..75: mol_type = other DNA
agtgagacagcttcaaagactagcgaaactaatgcgaaaaatagcgaggtagctgcaaaatcgagtcagagtgct

SEQ ID NO: 123044 - DNA, 75 bp, synthetic construct
  source 1..75: mol_type = other DNA
gcaggggccgctgttctggtcacccgcatgatgctgggcgataacgctgaagcggttaaccagcagatcgtctgg

SEQ ID NO: 123045 - DNA, 75 bp, synthetic construct
  source 1..75: mol_type = other DNA
cagacggcagcgaagaccagcgaaacgaatgccaaagccagtgaaactgcggcgaaaaacagtcaggatgcagca

SEQ ID NO: 123046 - DNA, 75 bp, synthetic construct
  source 1..75: mol_type = other DNA
atgcaaacttataaagcgtcgacaagtacttacgtttctagtgtgtttgctggtcgagctgatgttcgaaaattc

SEQ ID NO: 123047 - DNA, 75 bp, synthetic construct
  source 1..75: mol_type = other DNA
ctcgcctggcggggcggcggcaatggtcgcgatggcgcaggattacggcgcagatatccgcctggtggcgtttat

SEQ ID NO: 123048 - DNA, 75 bp, synthetic construct
  source 1..75: mol_type = other DNA
cggtattgaaattacgccaaccacgcagaccggtacgccaaacgtcgggactgcgctgcatctttatgacgtttc

SEQ ID NO: 123049 - DNA, 75 bp, synthetic construct
  source 1..75: mol_type = other DNA
gataccgtggcggtcatcgccgcagggagcaatgccgatatggcgctcatcatggcgatgcaaaccctgcgcctg

SEQ ID NO: 123050 - DNA, 75 bp, synthetic construct
  source 1..75: mol_type = other DNA
acttgccgaccccggcttgcttggcgtgaacgccggagccagctttgccattgtgctgggtgcggcgctgtttgg

SEQ ID NO: 123051 - DNA, 75 bp, synthetic construct
  source 1..75: mol_type = other DNA
gaattgtggcgtttaccaccctggcacaaggctcattaccagagctacatcaggcatggcaggctgtagacgcac

SEQ ID NO: 123052 - DNA, 75 bp, synthetic construct
  source 1..75: mol_type = other DNA
atctatggaggctgcttgtgctgtgctaaacgattatactaaggttagaagcatttatgttgcagctttgacttg

SEQ ID NO: 123053 - DNA, 75 bp, synthetic construct
  source 1..75: mol_type = other DNA
tctacataccttaaaagtggtgctgatcccggtgctgatcgccggagcaactgcgctattactgagtcgcgcgct

SEQ ID NO: 123054 - DNA, 75 bp, synthetic construct
  source 1..75: mol_type = other DNA
gacaggacaatcatctgcacttagtctgcatacatgcagtgcatcccgggggattgatgttagtggcgataataa

SEQ ID NO: 123055 - DNA, 75 bp, synthetic construct
  source 1..75: mol_type = other DNA
aatagtgcacaggcggcagcgacctcaaagactgcatcggcaaactacgcgacagcagccaaaaaatcagaaacc

SEQ ID NO: 123056 - DNA, 75 bp, synthetic construct
  source 1..75: mol_type = other DNA
tttccatgagggaaaccatccatatgggcaacgcagaggcgctgaattttacgctgcagtctgatgatgagcagg

SEQ ID NO: 123057 - DNA, 75 bp, synthetic construct
  source 1..75: mol_type = other DNA
ggatgcagcagcccaaagcgagagtgccgcagccagttctgcaagtgcggcggcttcttctgccactgcatcagc

SEQ ID NO: 123058 - DNA, 75 bp, synthetic construct
  source 1..75: mol_type = other DNA
cgaaaaatagcgagacagccacaaaggccagcgaaaaaaacgcaaaatccagccagacggcagcgaaaaccagtg

SEQ ID NO: 123059 - DNA, 75 bp, synthetic construct
  source 1..75: mol_type = other DNA
ttcaatctttcactctcagcgtccgtgcatgaaaaccagctacgtcagattttgttactttgcgaagactttggc

SEQ ID NO: 123060 - DNA, 75 bp, synthetic construct
  source 1..75: mol_type = other DNA
taattctccgcgtctctatcccgttctgcttgagccggatacaccggcacaatttgaaatctttgtgccagctcc

SEQ ID NO: 123061 - DNA, 75 bp, synthetic construct
  source 1..75: mol_type = other DNA
ttacagcgagagtcagaaaggacgaagctaccggatggatttttgcagaggcaacaattcaggcaattgatgggg

SEQ ID NO: 123062 - DNA, 75 bp, synthetic construct
  source 1..75: mol_type = other DNA
gatgtaccgactcgatgcacgagaacccaaagggccatggatttccataaacacttgccagcaatccgctacttg

SEQ ID NO: 123063 - DNA, 75 bp, synthetic construct
  source 1..75: mol_type = other DNA
ctttagcgccccgcgctcgccagggatgggtagccgtcttgctgtaggcgtcatcgttggcttacttacctggat

SEQ ID NO: 123064 - DNA, 75 bp, synthetic construct
  source 1..75: mol_type = other DNA
ggaccattaccgtctatgaaggttccagaccaggtacgctgaatgattttctcggtgccatgacggaagatgatg

SEQ ID NO: 123065 - DNA, 75 bp, synthetic construct
  source 1..75: mol_type = other DNA
gcgattagtatcgtaacggtttctggcagtaaaggatttgatgtcacaggtgatgaaaaatatgtgaccatttca

SEQ ID NO: 123066 - DNA, 75 bp, synthetic construct
  source 1..75: mol_type = other DNA
aaaaataataatgcgaatggctggcaactgaccattatcgatgatcacggcaactatattagtgacaaaatttaa

SEQ ID NO: 123067 - DNA, 75 bp, synthetic construct
  source 1..75: mol_type = other DNA
ggccgggcagaaactttttacctccattgaggtgcgggaaaactatctgggcacgggcaaattctttgtgtccgg

SEQ ID NO: 123068 - DNA, 75 bp, synthetic construct
  source 1..75: mol_type = other DNA
cccaaagggccatggatttccataaacacttgccagcaatccgctacttgtaaagatcttgactcgtcattggag

SEQ ID NO: 123069 - DNA, 75 bp, synthetic construct
  source 1..75: mol_type = other DNA
ggcggagatgcgtcagcaggtaatggaagggcagattggtggatttctcctgggaggggagagagttagagtttc

SEQ ID NO: 123070 - DNA, 75 bp, synthetic construct
  source 1..75: mol_type = other DNA
acaatttgaaggcggctcatgcgcatcatcttttatcatttccgatacagttgcatcaacgcgagcaagcgatat

SEQ ID NO: 123071 - DNA, 75 bp, synthetic construct
  source 1..75: mol_type = other DNA
atcgaaccgcattattaaatgcggcggagaagcgcagtgaaatcatcaaacgccatcgggcaggaagtgccattc

SEQ ID NO: 123072 - DNA, 75 bp, synthetic construct
  source 1..75: mol_type = other DNA
tttaaccttctggtttccggcctatttccgcgcccgtgccaacgccttgtttatggtagcaatgccggtaacgac

SEQ ID NO: 123073 - DNA, 75 bp, synthetic construct
  source 1..75: mol_type = other DNA
atttatttcgaggttacatatcaatctgaagctattgataatatggttggctctcagatccaaattgctccacct

SEQ ID NO: 123074 - DNA, 75 bp, synthetic construct
  source 1..75: mol_type = other DNA
gctgaggtcaatacgagtgttgatgtttccggtaagaatgactctagaaaagaagaaaataaattgcctgatgtt

SEQ ID NO: 123075 - DNA, 75 bp, synthetic construct
  source 1..75: mol_type = other DNA
tggcaatttcaaaggtagatggggcagagaaccccacctataacatcgatgttgtgttttttaacggaaccagtt

SEQ ID NO: 123076 - DNA, 75 bp, synthetic construct
  source 1..75: mol_type = other DNA
cttagaaagtcagagtgttaatgtcaaaagtaataatgcaaataactggtatctgaccattattgatgaccacgg

SEQ ID NO: 123077 - DNA, 75 bp, synthetic construct
  source 1..75: mol_type = other DNA
agacgagcgaaaccaacgcaaagtccagccagacggcagcgaagaccagcgaaacgaatgccaaagccagtgaaa

SEQ ID NO: 123078 - DNA, 75 bp, synthetic construct
  source 1..75: mol_type = other DNA
gcatcagccaacagtcaaaaagctgcaaaaaccagtgaaaccaacgcaaaggcgagcgagactacggcggccaac

SEQ ID NO: 123079 - DNA, 75 bp, synthetic construct
  source 1..75: mol_type = other DNA
cgtattatttatccggcagaaaaaaaagaagtgatggtgcagttgatgaatcagggaaaccgctcttcgctgctg

SEQ ID NO: 123080 - DNA, 75 bp, synthetic construct
  source 1..75: mol_type = other DNA
aatataaggtgtcgtttaagatttgaacatcatgatggttctacttacacttttttgggagatgcttacctcaat

SEQ ID NO: 123081 - DNA, 75 bp, synthetic construct
  source 1..75: mol_type = other DNA
gcaaagcgtaacagcaccacggtactggtgaacacggtggcctctgaaaatccggatgaagccgggcgttacagc

SEQ ID NO: 123082 - DNA, 75 bp, synthetic construct
  source 1..75: mol_type = other DNA
gaggtccagcttgagcagatgcgtctcggtagatcaggacggtttaacaataaaccagtccggtcaatcagtgtg

SEQ ID NO: 123083 - DNA, 75 bp, synthetic construct
  source 1..75: mol_type = other DNA
tcggagatgaatgccggtacagagcaacggacaaagcttttgcaatgtcggaaaagccaatcatcaggctggaag

SEQ ID NO: 123084 - DNA, 75 bp, synthetic construct
  source 1..75: mol_type = other DNA
acaaacagttgcggcattacgttttgctaccatcgtgcctggcgcttattgctggcatcatgctgatgataatga

SEQ ID NO: 123085 - DNA, 75 bp, synthetic construct
  source 1..75: mol_type = other DNA
ctggaatgaatgtgcataccgatgcttacagcgtcagccgcgcttgcgctaccagtttccaggcggttgcaaacg

SEQ ID NO: 123086 - DNA, 75 bp, synthetic construct
  source 1..75: mol_type = other DNA
cgcatcagcgtgccgctcaggcgtggtcagaaggtaaactcaaagaagaggtgatgactgcctttatccctcctt

SEQ ID NO: 123087 - DNA, 75 bp, synthetic construct
  source 1..75: mol_type = other DNA
agacccttcgaagtggaataagtcaacttcactggacgttacagaaacaggcacagatagtttcgggtttaatta

SEQ ID NO: 123088 - DNA, 75 bp, synthetic construct
  source 1..75: mol_type = other DNA
cgattattttcgccaacaccaaacaccgttgtgaagagatctgggccacctggcggcagatggtcatcgtgtcgg

SEQ ID NO: 123089 - DNA, 75 bp, synthetic construct
  source 1..75: mol_type = other DNA
ttccttttacggttctttgtgaggtacataagaactggtataaaacgccaaatgcagcaccgcgtgtttttgata

SEQ ID NO: 123090 - DNA, 75 bp, synthetic construct
  source 1..75: mol_type = other DNA
gtcagacggaaaactcaaagaagaggtgatgactgcctttatccctccttataaacaactgctcgcggaagacaa

SEQ ID NO: 123091 - DNA, 75 bp, synthetic construct
  source 1..75: mol_type = other DNA
taccagacagttttcttcgcaatttcgggtattgtctgcctgatgttgctatttggcattttcttcctgagtaaa

SEQ ID NO: 123092 - DNA, 75 bp, synthetic construct
  source 1..75: mol_type = other DNA
cagaaaatggggatgacgccggagcagattaggcaggctaccgggctttccgatgatgaactgaagaaaatcact

SEQ ID NO: 123093 - DNA, 75 bp, synthetic construct
  source 1..75: mol_type = other DNA
gctttggtaacaccacaaaccactcccggagagctgcacggcagagcactttatgaagaagattatgtttgcata

SEQ ID NO: 123094 - DNA, 75 bp, synthetic construct
  source 1..75: mol_type = other DNA
tgcgcttactgatgcggaattacggcgcaaggctgccgatgaactgtcctgtatgaccgcacgaattaaccgtgg

SEQ ID NO: 123095 - DNA, 75 bp, synthetic construct
  source 1..75: mol_type = other DNA
ctctaaatcgtgcacaggctctggcgaagatcgcagaaatcaaagctgaaccgccccgggtttcctggagagtat

SEQ ID NO: 123096 - DNA, 75 bp, synthetic construct
  source 1..75: mol_type = other DNA
tggcatgaacgaactcatcgtgaccctagccatcagtggattcgggctttatgcgtagaagttagccaagatact

SEQ ID NO: 123097 - DNA, 75 bp, synthetic construct
  source 1..75: mol_type = other DNA
ggggcgttcccatgctactggtgaagtggacgatagtaagtttaacgtgcttggtggttccattgcgtacgggca

SEQ ID NO: 123098 - DNA, 75 bp, synthetic construct
  source 1..75: mol_type = other DNA
ttgaatcctacatttatgcacgcagtgccaccattaaagacgacaaaacgtgggtcctgcatggtgtgaatcata

SEQ ID NO: 123099 - DNA, 75 bp, synthetic construct
  source 1..75: mol_type = other DNA
ttattgcgatattggaggagctaacagacgggtaaacgaaaacgcatcgcttgaaaaaatggttatggggatgcg

SEQ ID NO: 123100 - DNA, 75 bp, synthetic construct
  source 1..75: mol_type = other DNA
gcgaaaaatagcgaaacagccgcaaagacgagtgaaaccaacgcgaagtccagccagacggcagcgaaaaccagc

SEQ ID NO: 123101 - DNA, 75 bp, synthetic construct
  source 1..75: mol_type = other DNA
gtgagtaagaagaaaaccaccacgacgcccacgccgcatgatgccgcgttccggtcgttcctggcgaatcccgac

SEQ ID NO: 123102 - DNA, 75 bp, synthetic construct
  source 1..75: mol_type = other DNA
cagcgactgcgctcggtttaccggtagtgtttgtgctggtggcgttgagtctggtgtattggtatgacaggcaac

SEQ ID NO: 123103 - DNA, 75 bp, synthetic construct
  source 1..75: mol_type = other DNA
tatcgcgttattaggggggattgtcggtctcgggcagttatcgaaaaacagtgaacttaccgccattcgcagcac

SEQ ID NO: 123104 - DNA, 75 bp, synthetic construct
  source 1..75: mol_type = other DNA
tatcacggtgagcgcagcccgtacccgtacagcatgaactggctggactgttttgagaatccggcgcttgcggct

SEQ ID NO: 123105 - DNA, 75 bp, synthetic construct
  source 1..75: mol_type = other DNA
acagcgtcaccctgctggttgaaggttttccgccttcacatgccggaaccattaccgtctatgaaggttccagac

SEQ ID NO: 123106 - DNA, 75 bp, synthetic construct
  source 1..75: mol_type = other DNA
ttcgccgtcgcggcggtggatttggcttagtgaccgcttgtgctgctggtgggcttggtgcggcaatggttctgg

SEQ ID NO: 123107 - DNA, 75 bp, synthetic construct
  source 1..75: mol_type = other DNA
ttcccggcgagtctggctaaccggggccagaacgaactgaatgaaatccgccgccagtgggttctggctttccgg

SEQ ID NO: 123108 - DNA, 75 bp, synthetic construct
  source 1..75: mol_type = other DNA
tgccagcttcagaaaatggggatgacgccggagcagattaagcaggctaccggactttccgatgacgaactgaag

SEQ ID NO: 123109 - DNA, 75 bp, synthetic construct
  source 1..75: mol_type = other DNA
atggtagcgttaatgactctgccgcgtacacttattgatcttggaccatttattgccttattaggtgggatcgtc

SEQ ID NO: 123110 - DNA, 75 bp, synthetic construct
  source 1..75: mol_type = other DNA
ttataatcttccttttacggttctttgtgaggtacataagaactggtataaaacgccaaatgtagcgccgcgtgt

SEQ ID NO: 123111 - DNA, 75 bp, synthetic construct
  source 1..75: mol_type = other DNA
gaaaaaacgtctgcgtattcttgatgaatttacccgtggcgatctggatattctggttgctaccgacgttgccgc

SEQ ID NO: 123112 - DNA, 75 bp, synthetic construct
  source 1..75: mol_type = other DNA
ctcgctctgggggtctatcctgaagtctcgttatcagaagcaagggaaaaacgcgatacggcgagaaagctgata

SEQ ID NO: 123113 - DNA, 75 bp, synthetic construct
  source 1..75: mol_type = other DNA
tggtacgccgattatatggattcgctcgagcatggcggaaatgtggtgcatggtgagttcggaaaatgcgggtga

SEQ ID NO: 123114 - DNA, 75 bp, synthetic construct
  source 1..75: mol_type = other DNA
cgggagcacatgacccgcgtaaaccaatcagtgaaaatactgtaaataaagccctgagggtgatggggtatgaca

SEQ ID NO: 123115 - DNA, 75 bp, synthetic construct
  source 1..75: mol_type = other DNA
atgaagctaaatgcgcgacaggtagatgcagctaaacccagagagaaagcctataagctggcagatggtgctggt

SEQ ID NO: 123116 - DNA, 75 bp, synthetic construct
  source 1..75: mol_type = other DNA
gcaggtagtaaagatgaagtagtaactaaggcattcaccctagcggtagatggcggtcctctttcttctggcgtt

SEQ ID NO: 123117 - DNA, 75 bp, synthetic construct
  source 1..75: mol_type = other DNA
acaatatcgttgatatattagcaccggctgagttaactcgattgtttacagcttacaagcagtgggattggcctg

SEQ ID NO: 123118 - DNA, 75 bp, synthetic construct
  source 1..75: mol_type = other DNA
ggaatacaatatggtgcaaaaattcgcctacattctgattattttagatggcgctgctctgctattgtctggtct

SEQ ID NO: 123119 - DNA, 75 bp, synthetic construct
  source 1..75: mol_type = other DNA
aaatgcagcgagtgagacacttaacccattcagagaagtggcgttagagtggcacaaaatgaaatcacccaaatg

SEQ ID NO: 123120 - DNA, 75 bp, synthetic construct
  source 1..75: mol_type = other DNA
acacgatgagtacgattttgcacgaggaagggttcaatacggcatggattgaaacccagcttgcgcatgtcgata

SEQ ID NO: 123121 - DNA, 75 bp, synthetic construct
  source 1..75: mol_type = other DNA
atgaaagtaaagaaaaacaaaaaagccgccagtgtcacccactgacggccaacgccgggagccgtgattatggca

SEQ ID NO: 123122 - DNA, 75 bp, synthetic construct
  source 1..75: mol_type = other DNA
ttgtcgctgggtgtttatcctgaggtgtccctttctgatgccaggacggcaagggatgaagccaaaaggcttatc

SEQ ID NO: 123123 - DNA, 75 bp, synthetic construct
  source 1..75: mol_type = other DNA
tatcggcgtaataaattatgggaattggaggcaatattgcctccaattcccataatttattacgccgataataac

SEQ ID NO: 123124 - DNA, 75 bp, synthetic construct
  source 1..75: mol_type = other DNA
cgcaggagctgcgttttgcatgctgggaggatattgattttgataagaaattatgggagatcccggcagaagcga

SEQ ID NO: 123125 - DNA, 75 bp, synthetic construct
  source 1..75: mol_type = other DNA
ccagaagcaggtgaagaaacgattctcactttattaaatgataatcaactggcccacatttcgcgtcgtaaagtg

SEQ ID NO: 123126 - DNA, 75 bp, synthetic construct
  source 1..75: mol_type = other DNA
tgggttgtcggagatgaaagaacccctttagaggatgtgttacaaaagcattggggagaatttaaatatctttgt

SEQ ID NO: 123127 - DNA, 75 bp, synthetic construct
  source 1..75: mol_type = other DNA
gcgcggtttgcgaaacggcgttgccccttacatcccggcggccttttgccgggatgccgggagcgcaggccacgg

SEQ ID NO: 123128 - DNA, 75 bp, synthetic construct
  source 1..75: mol_type = other DNA
acgtgcacagtttaagatcacttattacaccgacggtacacacacagaaggttattatgcaatctataatgcatt

SEQ ID NO: 123129 - DNA, 75 bp, synthetic construct
  source 1..75: mol_type = other DNA
aagagcgcatgcgcgaaacggcgttgccccttacatcccggcggccttttgccgggatgccaggagcgcaggcca

SEQ ID NO: 123130 - DNA, 75 bp, synthetic construct
  source 1..75: mol_type = other DNA
gcaaaacgccgaagattgatttccagcggctggcggaaattcgtgaagtggtggatgttcctctggtgctacatg

SEQ ID NO: 123131 - DNA, 75 bp, synthetic construct
  source 1..75: mol_type = other DNA
atggatattcccgtaaatgcagcaaagccggggcgtcggcgttatctgacgttggtgatgatttttattacggta

SEQ ID NO: 123132 - DNA, 75 bp, synthetic construct
  source 1..75: mol_type = other DNA
atgatctttattacggtggtcatttgttatgttgaccgcgctaacctggccgtggcttccgcccatattcaggaa

SEQ ID NO: 123133 - DNA, 75 bp, synthetic construct
  source 1..75: mol_type = other DNA
ggcatcaccgttccgctggtggtggggtacctggcgcagggttacggtttcgcacctgcactggtttatatctcc

SEQ ID NO: 123134 - DNA, 75 bp, synthetic construct
  source 1..75: mol_type = other DNA
atggcattaatcggagtgtatgcggattgggaaggcctggatggtcctgagcggattggttatttacacagtcgc

SEQ ID NO: 123135 - DNA, 75 bp, synthetic construct
  source 1..75: mol_type = other DNA
atgcctctacaggtgtgagttatctggaattagcagatgttcttatcagacatggcgcgcagactaatactgacc

SEQ ID NO: 123136 - DNA, 75 bp, synthetic construct
  source 1..75: mol_type = other DNA
aagcggctgttgagttgaggttgacgaaaaaaactatcctcttcccttgttattgtgtagccagaatgccgcaaa

SEQ ID NO: 123137 - DNA, 75 bp, synthetic construct
  source 1..75: mol_type = other DNA
aaacggaatcacgcatattggtccggcacggcaacaggatggcgattacagttatctggcggatattttgcaaac

SEQ ID NO: 123138 - DNA, 75 bp, synthetic construct
  source 1..75: mol_type = other DNA
gttacttacaacagtagttttaaccgtaagctactaggtactaaatccatcccagatatcgaactaactgtaaac

SEQ ID NO: 123139 - DNA, 75 bp, synthetic construct
  source 1..75: mol_type = other DNA
tatgggctaaatattcattactatactgttagtgatgagaggtttttaattgatgatgataaatatctaattgct

SEQ ID NO: 123140 - DNA, 75 bp, synthetic construct
  source 1..75: mol_type = other DNA
ctcgctgttatgctgaatttactggtttttattcgttccagtgaactcagataggcccgttggtctgaaattgat

SEQ ID NO: 123141 - DNA, 75 bp, synthetic construct
  source 1..75: mol_type = other DNA
cttcgcggtagcgttgagtcctccgaatacaagcacgtggtgttgagcctcgtattcctgaaattcatcagcgat

SEQ ID NO: 123142 - DNA, 75 bp, synthetic construct
  source 1..75: mol_type = other DNA
ctcgcggttatgctgaatttactggtttttattcgttccagtgaactcagatatgcccgttggtctgaaattgat

SEQ ID NO: 123143 - DNA, 75 bp, synthetic construct
  source 1..75: mol_type = other DNA
tcccgcatattgggcacagacctatagctgatattcagccccttgaactgcttgaagttctgaggttgatagaag

SEQ ID NO: 123144 - DNA, 75 bp, synthetic construct
  source 1..75: mol_type = other DNA
cagactataacccagcccccgatcttgccagtgctttagctacaccgaaaaaagtacattttccctttcttactg

SEQ ID NO: 123145 - DNA, 75 bp, synthetic construct
  source 1..75: mol_type = other DNA
gcattgaccacggtaaaacgccagcatcgcccggctcttgatctttcgcgcctgcctgaacttttgtcgcgtatt

SEQ ID NO: 123146 - DNA, 75 bp, synthetic construct
  source 1..75: mol_type = other DNA
ctttactgcccttaacgcttattcaggaagtccaattgtattgttgggggcacaattgcttatcctgacaggcct

SEQ ID NO: 123147 - DNA, 75 bp, synthetic construct
  source 1..75: mol_type = other DNA
tgacggtgaaatcgctgaacgagcagggccagccggtgggcgtggagatttttcattaccgcgatgatctctcgc

SEQ ID NO: 123148 - DNA, 75 bp, synthetic construct
  source 1..75: mol_type = other DNA
gcatttcacgggcgcggttaacgtttgaaggtttcggcagtttacgtgacagcgatttttcgaaacgtaccgcga

SEQ ID NO: 123149 - DNA, 75 bp, synthetic construct
  source 1..75: mol_type = other DNA
aatttatagcagtagtggggtacagatggtgattgcacctcatatcgtccataagttccagcaacaggggaatca

SEQ ID NO: 123150 - DNA, 75 bp, synthetic construct
  source 1..75: mol_type = other DNA
atggactttagtggcttcgttatgctggttatgggatttaacggggcaaaagccgatgctgttaaagaagcctat

SEQ ID NO: 123151 - DNA, 75 bp, synthetic construct
  source 1..75: mol_type = other DNA
ctggctgttatgctgaatttactggtttttattcgttccagtgaactcagatacgcccgttggtctgaaattgat

SEQ ID NO: 123152 - DNA, 75 bp, synthetic construct
  source 1..75: mol_type = other DNA
attgtgaccgaagcgctggtaccgacacctgcttttttcccgttaatcgacaaactggcggcaaaagccaatacc

SEQ ID NO: 123153 - DNA, 75 bp, synthetic construct
  source 1..75: mol_type = other DNA
atggcgattagccaggaacagcaaaagcgcgggctggagcatttaaaacagatccgccgcaaatacttcagcgaa

SEQ ID NO: 123154 - DNA, 75 bp, synthetic construct
  source 1..75: mol_type = other DNA
gccttcaacaaagatgtgttcccttacattggcaaaaaaccaatcgccgaaatcaaaccacttgaactgctgaat

SEQ ID NO: 123155 - DNA, 75 bp, synthetic construct
  source 1..75: mol_type = other DNA
aactggacgctgataaaagcgtacatttaagcgctattgcagggtttcagcgcgatagagtttcagaacagcgac

SEQ ID NO: 123156 - DNA, 75 bp, synthetic construct
  source 1..75: mol_type = other DNA
ctatacgcttggggatgggcaaggcttgtcattgcttatagaacctaatggaagcaagagctggcgattccgcta

SEQ ID NO: 123157 - DNA, 75 bp, synthetic construct
  source 1..75: mol_type = other DNA
aaaaactaactgaaagggatcgtgaggccatatataaagaaaatattcagatatcagaaatggcaccggaagaaa

SEQ ID NO: 123158 - DNA, 75 bp, synthetic construct
  source 1..75: mol_type = other DNA
tagggcatcagtttggtggtggtcgtggtaaagatgtcgccactgttgtggggggcgctgggtggtggatatgcc

SEQ ID NO: 123159 - DNA, 75 bp, synthetic construct
  source 1..75: mol_type = other DNA
gatgatgattatattaataacccacttggttttaatgtgactagttatcgtgtcgatcaagaatcacaaaaataa

SEQ ID NO: 123160 - DNA, 75 bp, synthetic construct
  source 1..75: mol_type = other DNA
cggaatacaatcctgcagcggacctaaccagcgcgatgtcagggcatgaatcgaagcattatcccttcctgtcag

SEQ ID NO: 123161 - DNA, 75 bp, synthetic construct
  source 1..75: mol_type = other DNA
ttctgacacctttgaaagaggtgaaaccatatatcgcagaagtagatcaggttacaggtcaggtaaatatcgttt

SEQ ID NO: 123162 - DNA, 75 bp, synthetic construct
  source 1..75: mol_type = other DNA
atgaagctcaatgccagacaggtcgagactgccaagcccaaagagaagccctacaagatggctgatggtggtggc

SEQ ID NO: 123163 - DNA, 75 bp, synthetic construct
  source 1..75: mol_type = other DNA
agctcaactttgagctttgctataaaaacaatgagttacagaatggtaagccgcaaaaattctaccgtctccgca

SEQ ID NO: 123164 - DNA, 75 bp, synthetic construct
  source 1..75: mol_type = other DNA
gcatgaaagtgaaaaaatggtcagttgggtatgcctctgacattctcgaagctttcaataaagatatttttcctt

SEQ ID NO: 123165 - DNA, 75 bp, synthetic construct
  source 1..75: mol_type = other DNA
cgctggggcaaaattaagaagccacagctgctggccagaattgaacgccttgaacagcacgggcaaaccgtaatc

SEQ ID NO: 123166 - DNA, 75 bp, synthetic construct
  source 1..75: mol_type = other DNA
agactgccaagcctaaagataaaccctataagttagcagatggtgggggcatgtatctggaggtgttccctaacg

SEQ ID NO: 123167 - DNA, 75 bp, synthetic construct
  source 1..75: mol_type = other DNA
aaacccatgaactggacgcctgcgtgatggatggcaacacactgaaagcgggggcggtggcgggcattagccatc

SEQ ID NO: 123168 - DNA, 75 bp, synthetic construct
  source 1..75: mol_type = other DNA
gcattgaccacggtaaaacgccagcatcgcccggctcttgatctttctcgcctgcctgaacttgtgtcgcgtatt

SEQ ID NO: 123169 - DNA, 75 bp, synthetic construct
  source 1..75: mol_type = other DNA
gcttgacgatgtccgcaacggatgtttcccggtgatcctgccgcgcgtagtaaagggcagcaatgacaaagtcac

SEQ ID NO: 123170 - DNA, 75 bp, synthetic construct
  source 1..75: mol_type = other DNA
cactgccttacagttgatgctgccatccaaacgaacagaacatgatactgcaggtatcaataattggcaggactg

SEQ ID NO: 123171 - DNA, 75 bp, synthetic construct
  source 1..75: mol_type = other DNA
cctgactttattcatcgtattgtctggtttgatccttctaacgcagtaaaaatcgtcatgccacgagatattatc

SEQ ID NO: 123172 - DNA, 75 bp, synthetic construct
  source 1..75: mol_type = other DNA
gtcactgtatgaaaatgaccgcgtttaaccccctgaccggcaatattttccggccagaagtgacgctggttatgg

SEQ ID NO: 123173 - DNA, 75 bp, synthetic construct
  source 1..75: mol_type = other DNA
ccaggtggtagccaaaagtggaatgagtgacgccaagtgtcggaatctggtgaacgcatatcaaattcctacaga

SEQ ID NO: 123174 - DNA, 75 bp, synthetic construct
  source 1..75: mol_type = other DNA
aggtggccaaatttactgtgccactacattccctctctgatggctgattttactggtgaactgcatagactcatt

SEQ ID NO: 123175 - DNA, 75 bp, synthetic construct
  source 1..75: mol_type = other DNA
cacgagagacttctcagcatcagaaatagaaaatgaattaagaactcacaatgtgataagtagtatttactatga

SEQ ID NO: 123176 - DNA, 75 bp, synthetic construct
  source 1..75: mol_type = other DNA
cgccgtttacaacaggcgcaaaagtggcgcgactggctggcgaaaaaagatggtctcgacagctatcgtttaatc

SEQ ID NO: 123177 - DNA, 75 bp, synthetic construct
  source 1..75: mol_type = other DNA
ttgagttcccggcgtcgcgcggcacgcagggttgtacggtgacttacatgatcacagcacctgcccgcgcactga

SEQ ID NO: 123178 - DNA, 75 bp, synthetic construct
  source 1..75: mol_type = other DNA
gtttggcaacacaaatgttggtatagccagaattcccctcgacgccgaaataaaactttttgatggccaacatcg

SEQ ID NO: 123179 - DNA, 75 bp, synthetic construct
  source 1..75: mol_type = other DNA
acgaaatgctcggcgctaacccatcgatgttcgccggaacactgctggcgtgcgatatgggcggcttcttcctcg

SEQ ID NO: 123180 - DNA, 75 bp, synthetic construct
  source 1..75: mol_type = other DNA
ataaaaaaattgttattggtgacgatgaaataacgatgcctggcgacaagattgttaagtttaaacgtgcatcga

SEQ ID NO: 123181 - DNA, 75 bp, synthetic construct
  source 1..75: mol_type = other DNA
cggtcatctttgcaaatccgatagcacagggagcctgtgcggtggatgccattgccagtgcctttaacaagccgc

SEQ ID NO: 123182 - DNA, 75 bp, synthetic construct
  source 1..75: mol_type = other DNA
gtccgctttggggctgacgggaaggaaatcgttacggtcagtgatgacatgcggatcagtacagaggatgaagcc

SEQ ID NO: 123183 - DNA, 75 bp, synthetic construct
  source 1..75: mol_type = other DNA
acccgaaacagggcagtgttcgcccgttatcatacggctttatttcgcaggacgacctggcaaaacagttcctga

SEQ ID NO: 123184 - DNA, 75 bp, synthetic construct
  source 1..75: mol_type = other DNA
cattaccggaagccgatgttgcgctccagcgtccagttccgaacgatatcgcctacctccagtacacctccggca

SEQ ID NO: 123185 - DNA, 75 bp, synthetic construct
  source 1..75: mol_type = other DNA
ttgcggcggcatttggtcgggctgcctcacaatatgagcaacacgcagagttacagcgccacagtgccgacgtct

SEQ ID NO: 123186 - DNA, 75 bp, synthetic construct
  source 1..75: mol_type = other DNA
tgacctggcagaaaaaatcacatcgctggtggataaaattctgcagattggcaatgagattacgctgatccattg

SEQ ID NO: 123187 - DNA, 75 bp, synthetic construct
  source 1..75: mol_type = other DNA
aaaatctcgcctttgccgcccaatttgaatcttcttttgaacctatttgcaccattccggtggtgccagcgggaa

SEQ ID NO: 123188 - DNA, 75 bp, synthetic construct
  source 1..75: mol_type = other DNA
aagcatccatgaccagcgttgagatcgcagagctggtgggtaagcgtcatgacaatgtgaaacgcactattgaaa

SEQ ID NO: 123189 - DNA, 75 bp, synthetic construct
  source 1..75: mol_type = other DNA
gacggcgttagatctctcgccgccaatgcttgttcaggcacgccagaaggatgccgcagaccattatctggcggg

SEQ ID NO: 123190 - DNA, 75 bp, synthetic construct
  source 1..75: mol_type = other DNA
gttcatattcaacagaagttaatttaaacggcttaattgaggtgctcagcaagcatctttactccacacctgtgg

SEQ ID NO: 123191 - DNA, 75 bp, synthetic construct
  source 1..75: mol_type = other DNA
cattagctaaaggtggtgttgtccgatctcctcaaattgaggtttccgaaagaatcaataacttagggtttaaag

SEQ ID NO: 123192 - DNA, 75 bp, synthetic construct
  source 1..75: mol_type = other DNA
actcttggaataatctactacagaaataccaaccagaataaagtaaatgactccagcaacaataagaaagaaaac

SEQ ID NO: 123193 - DNA, 75 bp, synthetic construct
  source 1..75: mol_type = other DNA
tatctggccgcaggatattgaatatattgcggaacaagaaccggaaattcattctggcgatgcgattgcttttgt

SEQ ID NO: 123194 - DNA, 75 bp, synthetic construct
  source 1..75: mol_type = other DNA
aagaaggaatggaactgacccaggggcccgttaccggcgagctgccgcccgccctgctaccgattgaagaacacg

SEQ ID NO: 123195 - DNA, 75 bp, synthetic construct
  source 1..75: mol_type = other DNA
caacttcctgtcatgggcggcagacctctaaatcgtgttcaggcgctggcgaagatcgcagaaattaagctaagt

SEQ ID NO: 123196 - DNA, 75 bp, synthetic construct
  source 1..75: mol_type = other DNA
aacattttaacgttattacatgcattagtgtcatatttgtcattgtatggaacatctacttttatgcttaaaacc

SEQ ID NO: 123197 - DNA, 75 bp, synthetic construct
  source 1..75: mol_type = other DNA
ttgtttggcgttaaagaaacatccacaactgaaagggcgacattaatttctactggatataccagggttatttca

SEQ ID NO: 123198 - DNA, 75 bp, synthetic construct
  source 1..75: mol_type = other DNA
ctgtcactatgggtcgggcctttcagaccggcgtcgagcgtgtgctctttctgtttcttaatgactttattgaac

SEQ ID NO: 123199 - DNA, 75 bp, synthetic construct
  source 1..75: mol_type = other DNA
agacgagcgaaaccaacgcgaagtccagccagacggcagcgaaaaccagcgaaacgaatgccaaagccagtgaaa

SEQ ID NO: 123200 - DNA, 75 bp, synthetic construct
  source 1..75: mol_type = other DNA
gcgaaacgaatgccaaagccagtgaaactgcggcgaaaagcagtcaggatgcagcagctgaaagcgagagtgcgg

SEQ ID NO: 123201 - DNA, 75 bp, synthetic construct
  source 1..75: mol_type = other DNA
agtatgccgactggcgtcatttttaccgcacgcattattttcaggatgcacaactggatatgcattttgccgggc

SEQ ID NO: 123202 - DNA, 75 bp, synthetic construct
  source 1..75: mol_type = other DNA
actgcagccaaaaaatcagaaaccaacgcgaaaaacagtgagacagccgcaaagacgagcgaaaccaacgcgaag

SEQ ID NO: 123203 - DNA, 75 bp, synthetic construct
  source 1..75: mol_type = other DNA
cccgtgaattatcccctgccgaccagcaaaccatcagggaggcattaaccctgctggagtgccagctacgtgaaa

SEQ ID NO: 123204 - DNA, 75 bp, synthetic construct
  source 1..75: mol_type = other DNA
gcctgagttaatggaagcattgcttcgtaatcttgccccacaatttttgtatcactacccttcatcatgtattgc

SEQ ID NO: 123205 - DNA, 75 bp, synthetic construct
  source 1..75: mol_type = other DNA
ctgctggaaattctccggcaggcaaatatcaaaccggataaaaataccaccaaccagattatgacggcgctgaaa

SEQ ID NO: 123206 - DNA, 75 bp, synthetic construct
  source 1..75: mol_type = other DNA
aactgacctgtatgacagcgcgaattaaccgtggtgagacgatacctgaaccagtaaaacaacttcctgttatgg

SEQ ID NO: 123207 - DNA, 75 bp, synthetic construct
  source 1..75: mol_type = other DNA
tgatgaagagtggcgcacgtctttaaacatcaactcagccacaaaaaagatatttaataaccttgacaacttatc

SEQ ID NO: 123208 - DNA, 75 bp, synthetic construct
  source 1..75: mol_type = other DNA
cgcgatgatcttcccgatgattgtcggcaagttgattggcggcgtcacggcgattggcgtggcgatgatgttggt

SEQ ID NO: 123209 - DNA, 75 bp, synthetic construct
  source 1..75: mol_type = other DNA
gcgattttgaccgggaacaggctcgccgaatagcgcacaacctgcctgagcagtacaccgaacgcgagcaaacgc

SEQ ID NO: 123210 - DNA, 75 bp, synthetic construct
  source 1..75: mol_type = other DNA
tactcccccgattatggaataactctgaggttcacagatggttcgggaataaagaacctaacttgctcaccgcta

SEQ ID NO: 123211 - DNA, 75 bp, synthetic construct
  source 1..75: mol_type = other DNA
aagggcgcgaaaaatcattacttcgtcgccatccgtgggtcttttccggggccgttgcccgcatggaaggtaaag

SEQ ID NO: 123212 - DNA, 75 bp, synthetic construct
  source 1..75: mol_type = other DNA
aaatgtatatattcgtctgagtgatgatggtggagctcagtcacgtattatgaatggagatgttctttcaattga

SEQ ID NO: 123213 - DNA, 75 bp, synthetic construct
  source 1..75: mol_type = other DNA
ctatcggttattgccaatgtggcagcgcagaaagcagcagcaaacagactgatacaagcttttaccaaaggaagt

SEQ ID NO: 123214 - DNA, 75 bp, synthetic construct
  source 1..75: mol_type = other DNA
atgcagggcaacgctttattgtgggctggtcgctgtccctgtcggagaacgtagtggccgttgctgatgcattgc

SEQ ID NO: 123215 - DNA, 75 bp, synthetic construct
  source 1..75: mol_type = other DNA
atgtactacccgaagtctgcatctgctttttatcccttttagcagaacaagaatctcctcattttcagaacttgt

SEQ ID NO: 123216 - DNA, 75 bp, synthetic construct
  source 1..75: mol_type = other DNA
ataaaaaagtaactatcggtgatgatgttattacttttccatcagagaaggttgtatctttcactcgctccactt

SEQ ID NO: 123217 - DNA, 75 bp, synthetic construct
  source 1..75: mol_type = other DNA
cgattggcgtggcgatgatgctggtacctaaagaagacgcgagcgcggctaaaaccgaagcggaggcgcaatcgt

SEQ ID NO: 123218 - DNA, 75 bp, synthetic construct
  source 1..75: mol_type = other DNA
cgaagaactactggacaacaggcctcgttcccctgtgaggtcacctttaccatcagccgccaaaacgccagacct

SEQ ID NO: 123219 - DNA, 75 bp, synthetic construct
  source 1..75: mol_type = other DNA
gctgctgactcgctggtttgaaaaaccgctgatgagcgtcggtaaagtgctgaatatgaacaatatcgcggcagc

SEQ ID NO: 123220 - DNA, 75 bp, synthetic construct
  source 1..75: mol_type = other DNA
tatgacgatgcataatgcggatgtgatttttgccgttggcgtacgctttgatgaccgcactactaacaatctggc

SEQ ID NO: 123221 - DNA, 75 bp, synthetic construct
  source 1..75: mol_type = other DNA
cgccgaacggttaatctcccatcttgatgatgagactatcgccagagcacaagccgcttttgcacggacggattc

SEQ ID NO: 123222 - DNA, 75 bp, synthetic construct
  source 1..75: mol_type = other DNA
cctgcaggcggtgcagaaacgtaacttctggcaactgcaggctgaaatcagtcaccgggggcgctactgccatcc

SEQ ID NO: 123223 - DNA, 75 bp, synthetic construct
  source 1..75: mol_type = other DNA
gctacatttctgaaaacgcccgcatgaacttcatgccagcagcctttcacaacgcctttttcagtgctgatcact

SEQ ID NO: 123224 - DNA, 75 bp, synthetic construct
  source 1..75: mol_type = other DNA
aaactaacgacgaagcgtggcaggccgccgagcggttaatctcgcatcttgatgatgaaactatcgccaaagcac

SEQ ID NO: 123225 - DNA, 75 bp, synthetic construct
  source 1..75: mol_type = other DNA
taaagggcaaattaagcgcgctctgcaaacgctggtggcggcaaaaaaaccggttgtctacgtaggcggtggggc

SEQ ID NO: 123226 - DNA, 75 bp, synthetic construct
  source 1..75: mol_type = other DNA
cccgtgctgttaacaagcgcggccatacagttggcatcacacagaacgtgaaggccgaaaacgtccaggctgcaa

SEQ ID NO: 123227 - DNA, 75 bp, synthetic construct
  source 1..75: mol_type = other DNA
gagctgctgctggagctgatgctgctggctgacgtcggtatgttggggatgccaaacgcgggtaaatcgaccttt

SEQ ID NO: 123228 - DNA, 75 bp, synthetic construct
  source 1..75: mol_type = other DNA
gaaacgcatcggtaacctgccggcggtacgcgtcccgtacttcccggcggatgcgatgctcatcacgaagctgga

SEQ ID NO: 123229 - DNA, 75 bp, synthetic construct
  source 1..75: mol_type = other DNA
atgcttttaatagtcttggatcgtttgagagtgataatggaatactgcttcgtcttatccgtgaagcatggatga

SEQ ID NO: 123230 - DNA, 75 bp, synthetic construct
  source 1..75: mol_type = other DNA
aggtacgcgtgttatcgaccagggtaccggtgaaaccatgggcgatatgaccaaacacggtcagcgtctgctggt

SEQ ID NO: 123231 - DNA, 75 bp, synthetic construct
  source 1..75: mol_type = other DNA
atctggaagaagcgtatcgggttggcgagttgctgttcccgcttctggatgtcgccatcccggaaattccccagc

SEQ ID NO: 123232 - DNA, 75 bp, synthetic construct
  source 1..75: mol_type = other DNA
tatgacaatgcataatgctgatgtcatttttgcggtcggcgtacgttttgatgatcgtacgactaacaatctggc

SEQ ID NO: 123233 - DNA, 75 bp, synthetic construct
  source 1..75: mol_type = other DNA
aaaatacagccaggatctggcggcgaaaccgcgttggttagtgttcaacaagatcgatctgctggataaggcaga

SEQ ID NO: 123234 - DNA, 75 bp, synthetic construct
  source 1..75: mol_type = other DNA
ggtttgcgtcactggtgacggcagtattcagatgaacatccaggaactgtctaccgccttgcaatacgagttgcc

SEQ ID NO: 123235 - DNA, 75 bp, synthetic construct
  source 1..75: mol_type = other DNA
tgttgtcgcaagtgctcgaacagacctcgatcccgcaacgatactttttgagttcgaaggcgtgcgccggaatat

SEQ ID NO: 123236 - DNA, 75 bp, synthetic construct
  source 1..75: mol_type = other DNA
gctgtgatgaatgacgagccgcaatatcgcgtctacggcattacccgaatgctggaaaatttgcctgagccggct

SEQ ID NO: 123237 - DNA, 75 bp, synthetic construct
  source 1..75: mol_type = other DNA
cgaaagcgcaattcattgttacggctgtaaaaggcgagattaaacgccgacagcgcaggaaaaataagccagagc

SEQ ID NO: 123238 - DNA, 75 bp, synthetic construct
  source 1..75: mol_type = other DNA
tccgccgtcttacccctgtcgaatgtgaaaggctgcaaggttttcctgatgggcatacgttgatcccgacggaaa

SEQ ID NO: 123239 - DNA, 75 bp, synthetic construct
  source 1..75: mol_type = other DNA
gaaatggtgaaagattatcgacaagagaaagattgcttattagcgaaagtgttgatgctgtgatggattttcctc

SEQ ID NO: 123240 - DNA, 75 bp, synthetic construct
  source 1..75: mol_type = other DNA
tacgggtctttatcttaccccctttatatccagcctgagaatcgatatacatccacaatatattaccagaccatc

SEQ ID NO: 123241 - DNA, 75 bp, synthetic construct
  source 1..75: mol_type = other DNA
agaatgcgccgtcttacccctgtcgaatgtgaaaggctgcaaggttttcctgattggcatacgttgatccctacg

SEQ ID NO: 123242 - DNA, 75 bp, synthetic construct
  source 1..75: mol_type = other DNA
gatgtgtcgaaaaaattcaccgttgaaccgtcggtcacccagaccctgatgaacaccatgcaggagtcctctgac

SEQ ID NO: 123243 - DNA, 75 bp, synthetic construct
  source 1..75: mol_type = other DNA
ggttgcctggtggaaaaaattaaggtcggtgatttctccacaccggccagggcgaccgcagagccgggagcgtaa

SEQ ID NO: 123244 - DNA, 75 bp, synthetic construct
  source 1..75: mol_type = other DNA
cagataacgccttcggatgtttccttgccggattggctggagaagatgcgccatttgaaccaggtgatcgacctg

SEQ ID NO: 123245 - DNA, 75 bp, synthetic construct
  source 1..75: mol_type = other DNA
gaatctgcataacactctggcagataaagacgagttcaacgaaaaaaaccctgcaagtacctgcattctgggtac

SEQ ID NO: 123246 - DNA, 75 bp, synthetic construct
  source 1..75: mol_type = other DNA
cgcgaggcgcattcacttatcactctggcacatcgtttcttccaggactataacacacaggaaggatacctggca

SEQ ID NO: 123247 - DNA, 75 bp, synthetic construct
  source 1..75: mol_type = other DNA
ttaaagtacatcatatggcagccagacggtcggtttcctgcaaggcgtcaacacgtgtagttgctaacgatataa

SEQ ID NO: 123248 - DNA, 75 bp, synthetic construct
  source 1..75: mol_type = other DNA
agaggcctgttcagcgatgcagatgcgtaccctctggaccaggcgtttcctctgctgatgaaacaactgcaactc

SEQ ID NO: 123249 - DNA, 75 bp, synthetic construct
  source 1..75: mol_type = other DNA
tgcgctgctgctgggcggtcgggcgatcgacgtgcgcgtctccaccatgccttccgcctggggcgagcgcgtggt

SEQ ID NO: 123250 - DNA, 75 bp, synthetic construct
  source 1..75: mol_type = other DNA
aacattctcacggttgaagaccccatcgaatacatgattgaagggatcggtcagacgcaggttaacacccgcgtc

SEQ ID NO: 123251 - DNA, 75 bp, synthetic construct
  source 1..75: mol_type = other DNA
agaggcctgttcagcgatgcagatgcgtaccctctggaccaggcctttccgctgctgatgaaacaactgtaactc

SEQ ID NO: 123252 - DNA, 75 bp, synthetic construct
  source 1..75: mol_type = other DNA
atgaatatgatgatctcatatcaggaacttgttcgcaccttccttaagttttccgtgctcgatgccagcgactgt

SEQ ID NO: 123253 - DNA, 75 bp, synthetic construct
  source 1..75: mol_type = other DNA
gcctgttcagttcgatcaaccgcacgctgggtgaggggatcgcacaactcctttcggcgcagatcctcgccgggc

SEQ ID NO: 123254 - DNA, 75 bp, synthetic construct
  source 1..75: mol_type = other DNA
acgctgcataccaacacggcggtgggggcgatcacgcgtttgcaggatatgggcgtggagcctttcctgctctct

SEQ ID NO: 123255 - DNA, 75 bp, synthetic construct
  source 1..75: mol_type = other DNA
tcctcaaacagagtgcgaaggagttcgcgaaatacaaccactgtatccggaccagttcctgccactgcagcgcga

SEQ ID NO: 123256 - DNA, 75 bp, synthetic construct
  source 1..75: mol_type = other DNA
gtttgtaccatccggtagccagtgccagcggactggggatgaacctggtggataagcgtttacgtgaacgatttg

SEQ ID NO: 123257 - DNA, 75 bp, synthetic construct
  source 1..75: mol_type = other DNA
gataagcgtttacgtgaacggtttggcgatgactatgggataagcgtcgcctgtgagcctgatagttacacccga

SEQ ID NO: 123258 - DNA, 75 bp, synthetic construct
  source 1..75: mol_type = other DNA
gccgacaccctcggcagttgtggttacgtttatctggcggtttatccgacaccggcacccgcaaccacctcataa

SEQ ID NO: 123259 - DNA, 75 bp, synthetic construct
  source 1..75: mol_type = other DNA
cgctgtatgcgaaaggactgacttgcgaagccgataccctgggctcctgtggttacgtttatctggctgtttatc

SEQ ID NO: 123260 - DNA, 75 bp, synthetic construct
  source 1..75: mol_type = other DNA
cggatatccacatcgagacgtttgaaaagagtctggtgatccgttttcgtgttgacggcacattacatgaaatgc

SEQ ID NO: 123261 - DNA, 75 bp, synthetic construct
  source 1..75: mol_type = other DNA
tggatacagggcgagtggcaattagcgcaaggcgtgaagggcaacatttgatgctggagatcgaagacaatgccg

SEQ ID NO: 123262 - DNA, 75 bp, synthetic construct
  source 1..75: mol_type = other DNA
aagaacgccagaaaaagctgcagcagcagacggcgcttgtgcgcgctgatgtcacgaacggtgcaatagtgatcc

SEQ ID NO: 123263 - DNA, 75 bp, synthetic construct
  source 1..75: mol_type = other DNA
cttaatcattctctgcgtgtttttacctgtgatttcagggttgaggcgaatgaacgtaattcatttgaactgttt

SEQ ID NO: 123264 - DNA, 75 bp, synthetic construct
  source 1..75: mol_type = other DNA
caggttcctgagaaaagatattaagaaagataaaatcactgaccgggaaatggaaattatccgcatgacggctca

SEQ ID NO: 123265 - DNA, 75 bp, synthetic construct
  source 1..75: mol_type = other DNA
atcaggctgagttcagcatcaaagcaatgtgccgcgtgctccgggtggcccgcagcggctggtatacgtggggtc

SEQ ID NO: 123266 - DNA, 75 bp, synthetic construct
  source 1..75: mol_type = other DNA
aaagataaaatcactgaccgggaaatggaaattatccgcatgacggctcagggaatgctgcctaaatcgattgcc

SEQ ID NO: 123267 - DNA, 75 bp, synthetic construct
  source 1..75: mol_type = other DNA
tcaagttatcttgctaaagaggaaagtaaatgttttacagatggggagcgaaattttggttgtagtattaagtga

SEQ ID NO: 123268 - DNA, 75 bp, synthetic construct
  source 1..75: mol_type = other DNA
tggtgcaggagggtaaccggttgcattaccttgccgaccgtgccggtatcagaggcctgttcagcgatgcagatg

SEQ ID NO: 123269 - DNA, 75 bp, synthetic construct
  source 1..75: mol_type = other DNA
caatggcagcaaaagttcctgtgctatcctcagatatcgaagcaaataaatatcttattgaaaaaacagctggtg

SEQ ID NO: 123270 - DNA, 75 bp, synthetic construct
  source 1..75: mol_type = other DNA
ttccgttgcgtggtgaaaatcagcgggtgatgggcaccatcaaattgtatgaagccaaaaaccgtttattcagtt

SEQ ID NO: 123271 - DNA, 75 bp, synthetic construct
  source 1..75: mol_type = other DNA
gtacttacggccagtattttaactctgatgaaccgtccctgcgggatgacgcaaaaatggtggtgctggagctgg

SEQ ID NO: 123272 - DNA, 75 bp, synthetic construct
  source 1..75: mol_type = other DNA
gttattccgactaacgaagaaaaaatgattgctttggatgccattcatttaggcaaagttaacgcgcccgcagaa

SEQ ID NO: 123273 - DNA, 75 bp, synthetic construct
  source 1..75: mol_type = other DNA
cgccgtcttacccctgtcgaatgtgaaaggctgcaaggttttcctgatgggcatacgttgatccctacggaaaag

SEQ ID NO: 123274 - DNA, 75 bp, synthetic construct
  source 1..75: mol_type = other DNA
ttaaggaatctaaccttatcctgaattcattgctgcttacccctctgggagaatctcatctgcttactgtggggg

SEQ ID NO: 123275 - DNA, 75 bp, synthetic construct
  source 1..75: mol_type = other DNA
ctcaaaaagtggttttctcgggcgattagcagcaaaactcgcgggcacaaaacaaataatccatacggtgcatgg

SEQ ID NO: 123276 - DNA, 75 bp, synthetic construct
  source 1..75: mol_type = other DNA
accgatttcttcgacttataccttaaaagcgattgaaaccggtgaagtggtctacgctgatggcaacgaagtgcc

SEQ ID NO: 123277 - DNA, 75 bp, synthetic construct
  source 1..75: mol_type = other DNA
tgagcaaggtcactgacgaggaagggcacaccacctctgaggtcatccgcgtgggtaagggcggtgattatgcca

SEQ ID NO: 123278 - DNA, 75 bp, synthetic construct
  source 1..75: mol_type = other DNA
gtcacgagcgcggtatgcgttccggcactctgcctgttcaccagatcgtcggtatgggcgaagcctatcgcatcg

SEQ ID NO: 123279 - DNA, 75 bp, synthetic construct
  source 1..75: mol_type = other DNA
gaagtggtgaccaatggtctgaatatcgccggtggcatgatcgtggtggttggctatgcgatggttatcaacatg

SEQ ID NO: 123280 - DNA, 75 bp, synthetic construct
  source 1..75: mol_type = other DNA
aaaaggcaagcacatcatcaccagtaaaaccgaacacaaagcggtactggatacctgccgtcagctggagcgcga

SEQ ID NO: 123281 - DNA, 75 bp, synthetic construct
  source 1..75: mol_type = other DNA
actcatacagtcaacctgaatattaaggatggctctgttgatgctctggcagtaaaagacagtacggttaatatc

SEQ ID NO: 123282 - DNA, 75 bp, synthetic construct
  source 1..75: mol_type = other DNA
tggccgctgacatcatcatcagccagaagcggatcggcaacctccccgccgtgcgtgtgccgtacttcccggcga

SEQ ID NO: 123283 - DNA, 75 bp, synthetic construct
  source 1..75: mol_type = other DNA
atggcgataattttgttgcaaataatgaaaaaagatgtgtgacagggatatcattggaaggaacaacgggaaaga

SEQ ID NO: 123284 - DNA, 75 bp, synthetic construct
  source 1..75: mol_type = other DNA
atggaagagccgtgcatctggttcagcggattctgcagccagggggacggagcctgttttgaagggcactggcac

SEQ ID NO: 123285 - DNA, 75 bp, synthetic construct
  source 1..75: mol_type = other DNA
ttgctcaaaagggtagcgtattgaatggttttaacggtgatgcaacagacaacattacccttgctggctcaaata

SEQ ID NO: 123286 - DNA, 75 bp, synthetic construct
  source 1..75: mol_type = other DNA
ttttccggctcagcaacggcaggtttatggaagagccgtgcatctggttcagcggattctgcggccagggggacg

SEQ ID NO: 123287 - DNA, 75 bp, synthetic construct
  source 1..75: mol_type = other DNA
acagtgcgggttcattggatcttatcaatgaacaaacggcatttatttctaccggcaaagacagcactctaaaag

SEQ ID NO: 123288 - DNA, 75 bp, synthetic construct
  source 1..75: mol_type = other DNA
gcgcctgaatggtgtggaggttgaagaactctccagcaagttcaccgttgagccatccgtgcagcagacgctgga

SEQ ID NO: 123289 - DNA, 75 bp, synthetic construct
  source 1..75: mol_type = other DNA
caccgcacaggaaaaagcccgcgacgggtaccgtcagcatcatgctgacagcaactggtatgaaaacgtgtatga

SEQ ID NO: 123290 - DNA, 75 bp, synthetic construct
  source 1..75: mol_type = other DNA
ttgctttcccctgtctgggggtgtcattaagcgccgctgctgatgatgttatgattgtgagtgcatcgggttatg

SEQ ID NO: 123291 - DNA, 75 bp, synthetic construct
  source 1..75: mol_type = other DNA
cggtgtaaaagttagcgatgacaaaaatgttgtgattaaagctacaggctccaccattacagctcaaggtgaagg

SEQ ID NO: 123292 - DNA, 75 bp, synthetic construct
  source 1..75: mol_type = other DNA
taccgaagctgcttactacctctcgctaaaagcaaagcgcgttctctggttatgtcttatgcagacgtatttcac

SEQ ID NO: 123293 - DNA, 75 bp, synthetic construct
  source 1..75: mol_type = other DNA
ttccatccggaaacctataagcgctgggtgaaagaagctatagagcgagcttgtgtcattgccgggatcggcgtg

SEQ ID NO: 123294 - DNA, 75 bp, synthetic construct
  source 1..75: mol_type = other DNA
atgaaaaaatacattaaaaacacttttttatttgtttttgtttgtttaacagttgcatgtaaagagcaactgtat

SEQ ID NO: 123295 - DNA, 75 bp, synthetic construct
  source 1..75: mol_type = other DNA
agagaagaaaaagagattcgagcttgcaagacaaaagaacaaagtatcgggtttagacccattcgatgacagtga

SEQ ID NO: 123296 - DNA, 75 bp, synthetic construct
  source 1..75: mol_type = other DNA
ttttttcctggctgggctttggtcaaaaagagcagaccccggaaaaagagacagaaacccaaaacgaacaactgg

SEQ ID NO: 123297 - DNA, 75 bp, synthetic construct
  source 1..75: mol_type = other DNA
ttaacgcttacctgcggcagctggcgcgtctgaacggtgtggcagttgaagaactgtccagcaagttcaccgtgg

SEQ ID NO: 123298 - DNA, 75 bp, synthetic construct
  source 1..75: mol_type = other DNA
gagataaaaaactaatgaatgaccctctcgagcaatggaattgtattttggagtattgctactggaagtatactt

SEQ ID NO: 123299 - DNA, 75 bp, synthetic construct
  source 1..75: mol_type = other DNA
tgcttcactacgcagtggactgacagcattaaataagtgtaaatatcatgataaaggcagcttctataatgcttt

SEQ ID NO: 123300 - DNA, 75 bp, synthetic construct
  source 1..75: mol_type = other DNA
cccttctgcacgggaaaaagcccgcgactggtaccgtgtgcaccattctgacagcaactggtatgaaaacgtgta

SEQ ID NO: 123301 - DNA, 75 bp, synthetic construct
  source 1..75: mol_type = other DNA
tcgaacgcgcaggcgctgcagcagctggccgcccgcgccgaaccggagatgctggagcgcgccgtacagcttctg

SEQ ID NO: 123302 - DNA, 75 bp, synthetic construct
  source 1..75: mol_type = other DNA
gttgggggcaaaacgtgatgcacatcatatcgtcattaccgacagtcaggtcagtccgttggctgcgttcagtga

SEQ ID NO: 123303 - DNA, 75 bp, synthetic construct
  source 1..75: mol_type = other DNA
ttatcaagcgtcagtcgctcgatttcatcatggctggtttcaacggtatcacccgcgcggagacttccaaccgca

SEQ ID NO: 123304 - DNA, 75 bp, synthetic construct
  source 1..75: mol_type = other DNA
gttgaggactaccgctgcgctgcactggtggaaaacatccagattggcgatttcagcgccgccgccgcagaagcc

SEQ ID NO: 123305 - DNA, 75 bp, synthetic construct
  source 1..75: mol_type = other DNA
aaaaagaaacaaactcaggatgacaagaagcaaaaaattaaaccgaagatgtattttgctggtggaggtatgtgc

SEQ ID NO: 123306 - DNA, 75 bp, synthetic construct
  source 1..75: mol_type = other DNA
attatcggtgggactctggaaatgatcgcacttggctggatgaacatcggtgccgcagttgcgcctgatgccgct

SEQ ID NO: 123307 - DNA, 75 bp, synthetic construct
  source 1..75: mol_type = other DNA
gactttatcctatttactgctgaattatcagcgatgttcacctcgctagtggaggccgttggtggtgaagcagaa

SEQ ID NO: 123308 - DNA, 75 bp, synthetic construct
  source 1..75: mol_type = other DNA
gaaagacccattagaactgaccatcactggctggattaaagatggcttcccgaacggtttccgtgctggtgagga

SEQ ID NO: 123309 - DNA, 75 bp, synthetic construct
  source 1..75: mol_type = other DNA
ctgacattctgtgatgatctctatgaccagaacgacgatatcgaccgggaggatgtagcacaacgatttgatgct

SEQ ID NO: 123310 - DNA, 75 bp, synthetic construct
  source 1..75: mol_type = other DNA
atgaaaaaaaattaaccagtgcagctgcgagtgtttcggtgatcagtcaggaggacttgcgatccagccagtatc

SEQ ID NO: 123311 - DNA, 75 bp, synthetic construct
  source 1..75: mol_type = other DNA
gcaaacgcgccgcaacgtgtcatgaaagatatcaccgtgaccagccgcgacgattccaaccaggtgatcgctaaa

SEQ ID NO: 123312 - DNA, 75 bp, synthetic construct
  source 1..75: mol_type = other DNA
cttttgttgaagacgaatggcatatcagcgacaggctctccctgacagcaggtagtcgctatgagcatcatgatg

SEQ ID NO: 123313 - DNA, 75 bp, synthetic construct
  source 1..75: mol_type = other DNA
gcggcaaggagcgtaaaacagccgactttaccgcgctggagtccaaaaaatacgagtgcgatcaggtcaactttg

SEQ ID NO: 123314 - DNA, 75 bp, synthetic construct
  source 1..75: mol_type = other DNA
acgataacctctccggtctgaatgccaatataacaggctttataacagacttctccaacaagattgtctcttatt

SEQ ID NO: 123315 - DNA, 75 bp, synthetic construct
  source 1..75: mol_type = other DNA
agtggtacgggtaaaaccggtgggctggaaatcagcatccgtggaatgcctgccagttacacgctgatactgatt

SEQ ID NO: 123316 - DNA, 75 bp, synthetic construct
  source 1..75: mol_type = other DNA
ctgccagtgcagataatctggaaatttttgaaagtatttatcatgaaggaatggagcctgatgactgggttcctg

SEQ ID NO: 123317 - DNA, 75 bp, synthetic construct
  source 1..75: mol_type = other DNA
aattggcatcggtgtcaccggctccatcgccagcaccaccgacaccgccggtggcaccgagcgtcagccgaagga

SEQ ID NO: 123318 - DNA, 75 bp, synthetic construct
  source 1..75: mol_type = other DNA
ttgctcccgggcacttttcagttcatccacaatatagctgctcttctcgcatttttgccgattttaaaaatgcga

SEQ ID NO: 123319 - DNA, 75 bp, synthetic construct
  source 1..75: mol_type = other DNA
tgagtaaaatcgtcgacgaggaagggaacgtcgtttccgccgtgatccgtgtgggtaaaaacggcgattacgtta

SEQ ID NO: 123320 - DNA, 75 bp, synthetic construct
  source 1..75: mol_type = other DNA
cgaaacgtgaccggattgaaaattttgaatccgttaacgaagcctacgtggttgaggactaccgttgcgccgcac

SEQ ID NO: 123321 - DNA, 75 bp, synthetic construct
  source 1..75: mol_type = other DNA
aaccccgcgctttactcaaaactattcatctctttctgctgtgcagaaaaaagtttatgacgaagaaggtgagta

SEQ ID NO: 123322 - DNA, 75 bp, synthetic construct
  source 1..75: mol_type = other DNA
ggttcctgagaaaagatattaagaaagataaaatcactgaccgggaaatggaaattatccgcatgacggctcagg

SEQ ID NO: 123323 - DNA, 75 bp, synthetic construct
  source 1..75: mol_type = other DNA
cattctccgctcttcatcctccagttgccgacgctcctgatcaagctggcgctggcgatcgtccagctgcctgcg

SEQ ID NO: 123324 - DNA, 75 bp, synthetic construct
  source 1..75: mol_type = other DNA
ttcctgacgctgattaacatcacgccggtcactgagcagtcaggacagttgctggggctgggtgttggcagcacc

SEQ ID NO: 123325 - DNA, 75 bp, synthetic construct
  source 1..75: mol_type = other DNA
ggctgtttccgctgcgctggggcgtgggcgatccgatcccgatctacggcccgccggatgaacagggctgcgacg

SEQ ID NO: 123326 - DNA, 75 bp, synthetic construct
  source 1..75: mol_type = other DNA
taataataaacaaacaatttatgcttctgcttcggcacaaggagcaggttcagcaacgcaaaatttaaatttatc

SEQ ID NO: 123327 - DNA, 75 bp, synthetic construct
  source 1..75: mol_type = other DNA
ttgctcaaaagggtagcgtattgaatggttttaaaggtgatgcaaccgacaacattacccttgctggctcaaata

SEQ ID NO: 123328 - DNA, 75 bp, synthetic construct
  source 1..75: mol_type = other DNA
tgcaggtgacaccgctgccgctaaaccactcaaaactgaccttcggttatctgctggaaacggcgcacagccggg

SEQ ID NO: 123329 - DNA, 75 bp, synthetic construct
  source 1..75: mol_type = other DNA
caactagatggcgataacaaaggtgcaccgctcagttatacaccagaacatatggcaaatatgaggcttaactgg

SEQ ID NO: 123330 - DNA, 75 bp, synthetic construct
  source 1..75: mol_type = other DNA
gaagatgcaccggatcacgtcatgggtagcaccaccacgggcggtgaaaccacaccgggtgcggtgaaagtcggg

SEQ ID NO: 123331 - DNA, 75 bp, synthetic construct
  source 1..75: mol_type = other DNA
gcgccgttcttcccgccgaatgcactgctgatcacccgtctggataacttgtccatctactggcaggaagacacc

SEQ ID NO: 123332 - DNA, 75 bp, synthetic construct
  source 1..75: mol_type = other DNA
cttggcgacaacctcacccatgaataccagggttttcttctgatgcagcataaacgagaggaaaaaatcctacct

SEQ ID NO: 123333 - DNA, 75 bp, synthetic construct
  source 1..75: mol_type = other DNA
cactactgcagagccggtaaaagttggtccgggtggccggtacgtaaatctggatgcggtggtgatggatgccgt

SEQ ID NO: 123334 - DNA, 75 bp, synthetic construct
  source 1..75: mol_type = other DNA
caagtatttcccgctggttaacaaagagcaggacaacagcgaaaaaatctctgccgatctgattatcagccagaa

SEQ ID NO: 123335 - DNA, 75 bp, synthetic construct
  source 1..75: mol_type = other DNA
acgcatgggtggcctgcaggccgtgcgtgcgcctttcttcccggcaaatgcgctgctgatcacccgtctggataa

SEQ ID NO: 123336 - DNA, 75 bp, synthetic construct
  source 1..75: mol_type = other DNA
gctggtatgtgaggccgactccctgggctctcacggctacatttatctcgccatttacctcggagaaccgcctga

SEQ ID NO: 123337 - DNA, 75 bp, synthetic construct
  source 1..75: mol_type = other DNA
ggtggcggaaaatatggatcttcctgctataccgccacgctatcgcagcagttatttcgcccatatttttggtgg

SEQ ID NO: 123338 - DNA, 75 bp, synthetic construct
  source 1..75: mol_type = other DNA
aggctacccagtgcctctgctttatggtaagcgtcgaatcggcggagcgattatttctgccgggatatatgtcga

SEQ ID NO: 123339 - DNA, 75 bp, synthetic construct
  source 1..75: mol_type = other DNA
ggctggtggttgacgatgttcagcaactggcaggcatgagtgagcaagaaattgcgctggcggctgaggcggctc

SEQ ID NO: 123340 - DNA, 75 bp, synthetic construct
  source 1..75: mol_type = other DNA
tgtgagttttgcgtggatatcaccagtatgaaagtcgccgagcgtaccggcagcaccgataaactgctggcagtg

SEQ ID NO: 123341 - DNA, 75 bp, synthetic construct
  source 1..75: mol_type = other DNA
agcggcaggcgcgtggcggaaacagcgtcattttgctttctgccacgttatctcaacagcagcgcgacaaactcg

SEQ ID NO: 123342 - DNA, 75 bp, synthetic construct
  source 1..75: mol_type = other DNA
acggcattaatcggcctgcaaaacctgtcggcccgttttaattctgctatggccattcccgcccagggactgtgc

SEQ ID NO: 123343 - DNA, 75 bp, synthetic construct
  source 1..75: mol_type = other DNA
cagaggcctgttcagcgatgcagatgcgtaccacctggaccaggcctttccgctgctgatgaaacaactggaact

SEQ ID NO: 123344 - DNA, 75 bp, synthetic construct
  source 1..75: mol_type = other DNA
agaggccggttcagcgacgcggatgcgtaccatctggaccaggcctttccgctgctgatgaaacaactggaatta

SEQ ID NO: 123345 - DNA, 75 bp, synthetic construct
  source 1..75: mol_type = other DNA
cccgccatcagcataccgtcacgctgtatgcaaaagggctgacctgcaaagccgataccctcagcagttgtgatt

SEQ ID NO: 123346 - DNA, 75 bp, synthetic construct
  source 1..75: mol_type = other DNA
ttgtctggacacgtggcaccaccgaatctattaacatggtggcgcaatgttatgcccgtccacgcctgcaaccag

SEQ ID NO: 123347 - DNA, 75 bp, synthetic construct
  source 1..75: mol_type = other DNA
caaaaacgggtggtcacgccgggacaggtaaagccagctatgtgggcggcaacagcaaaagttcggcgctgttca

SEQ ID NO: 123348 - DNA, 75 bp, synthetic construct
  source 1..75: mol_type = other DNA
aatggcaacggccaatgccatgtacgatcggctggtcaaaacctggcttgctttctattcgccacaatcccgccc

SEQ ID NO: 123349 - DNA, 75 bp, synthetic construct
  source 1..75: mol_type = other DNA
atgaacgtttttaatcccgcgcagtttcgcgcccagtttcgcgcccagtttcccgcactacaggatgcgggcgtc

SEQ ID NO: 123350 - DNA, 75 bp, synthetic construct
  source 1..75: mol_type = other DNA
ggctgactggcggcaaagcccgctctttagcgatgaagaacggctggcgctggagtacgccgaagccgcaagcgt

SEQ ID NO: 123351 - DNA, 75 bp, synthetic construct
  source 1..75: mol_type = other DNA
gctcaatttttcgcctggttgttgtgctggcacgatactggtaaatttgcccgctcatttcagcaactttacctg

SEQ ID NO: 123352 - DNA, 75 bp, synthetic construct
  source 1..75: mol_type = other DNA
gtatgccagagggctgacctgcgaagccgacaccctcggcagttgtggctacgtttatatggctgtttatccgac

SEQ ID NO: 123353 - DNA, 75 bp, synthetic construct
  source 1..75: mol_type = other DNA
tggatgggtaattttgtcgagcaatctacgctcaatgaaacgcgcccggtaatttataacgtttgcaattatcaa

SEQ ID NO: 123354 - DNA, 75 bp, synthetic construct
  source 1..75: mol_type = other DNA
caccagcggtgaactgaatccccgacatcagcataccgtcacgctgtatgcaaaagggctgacctgcgaagccga

SEQ ID NO: 123355 - DNA, 75 bp, synthetic construct
  source 1..75: mol_type = other DNA
agtaaacggtgtgcgactgacaccgcgcggctggtttgaatttaccgaagcctggctacccgcaccgtcgcaatg

SEQ ID NO: 123356 - DNA, 75 bp, synthetic construct
  source 1..75: mol_type = other DNA
ggcaacagcgaagatttagaacgtctgtatcgtcaatggcgcggtaaggcaccacagattgcaccaatgttgcaa

SEQ ID NO: 123357 - DNA, 75 bp, synthetic construct
  source 1..75: mol_type = other DNA
agctcacagcgtgccggaaaagtcctcatttgtactcaggtcttagagtcgagcgttgattgcgatatggacgaa

SEQ ID NO: 123358 - DNA, 75 bp, synthetic construct
  source 1..75: mol_type = other DNA
gagttaaatctaacgctcagaaattagctgaagcgaaagaatcacgtgatgcactccgtgaagatatcgctaatg

SEQ ID NO: 123359 - DNA, 75 bp, synthetic construct
  source 1..75: mol_type = other DNA
tgtgaggactttatcgtgtcagacacgctccatgaaacaaattatcccgacgacaacaacgaccgcccctggtgg

SEQ ID NO: 123360 - DNA, 75 bp, synthetic construct
  source 1..75: mol_type = other DNA
gatccgcgcccaacaggcgaaactacttggtttcccttattatgccgcatggaaaattgccgatcagatggcaaa

SEQ ID NO: 123361 - DNA, 75 bp, synthetic construct
  source 1..75: mol_type = other DNA
ggacaacgcatcccgatgacaatgacgaccatccctggtggggactaccctgcacagtgacgccctgtttcggcg

SEQ ID NO: 123362 - DNA, 75 bp, synthetic construct
  source 1..75: mol_type = other DNA
tgaacagttttccgccgaactggcggaactggctaatgatatctatctgaacggcgaattattcgcgcgggtgga

SEQ ID NO: 123363 - DNA, 75 bp, synthetic construct
  source 1..75: mol_type = other DNA
cgccaatatcaacgattaccttccggaaaagctgtcgacacgtctggctgaggaatctgtttccctgtggctggc

SEQ ID NO: 123364 - DNA, 75 bp, synthetic construct
  source 1..75: mol_type = other DNA
atgagcaaaaagcagagttccacccacacgatgcgctgttcaaactctttttacgccaaccggagacggcacgcg

SEQ ID NO: 123365 - DNA, 75 bp, synthetic construct
  source 1..75: mol_type = other DNA
ttaccttgccgaccgcgccggtatcagaggccggttcagcgacgcggatgcgtaccatctggaccaggcctttcc

SEQ ID NO: 123366 - DNA, 75 bp, synthetic construct
  source 1..75: mol_type = other DNA
cccctggtgggggctgccctgcacagtgaggccctgttttggggcccgtctggtgcaggagggtaaccgcctgca

SEQ ID NO: 123367 - DNA, 75 bp, synthetic construct
  source 1..75: mol_type = other DNA
tgatccgttacaaacggtaatttctgctggcattggtggtattggtaaggggctggaaaatacagcgagtgcggt

SEQ ID NO: 123368 - DNA, 75 bp, synthetic construct
  source 1..75: mol_type = other DNA
cataccgtcacgctgtatgcgaaaggactgacctgcgaagccgataccctgggctcctgtggttacgtttatctg

SEQ ID NO: 123369 - DNA, 75 bp, synthetic construct
  source 1..75: mol_type = other DNA
actcatgctcaccagcggtgaactgaatccccgccatcagcataccgttacgctgtatgcgaacggactgacctg

SEQ ID NO: 123370 - DNA, 75 bp, synthetic construct
  source 1..75: mol_type = other DNA
aggctgaaaaactgaaaaacttggtggattctgccagattacaaacttcttcttctgccgtaacagcaacagtcc

SEQ ID NO: 123371 - DNA, 75 bp, synthetic construct
  source 1..75: mol_type = other DNA
taaacagctttatgagtctgcgactaaagggcagcaaaaattcattgaggcagcaggaaagcgatataaccgcat

SEQ ID NO: 123372 - DNA, 75 bp, synthetic construct
  source 1..75: mol_type = other DNA
gtgacaccttgttttggcgcccgtatggtgcaggagggtaaccggttgcattaccttgccgaccgcgccggtatc

SEQ ID NO: 123373 - DNA, 75 bp, synthetic construct
  source 1..75: mol_type = other DNA
cggagccaccccaataacaagttatacagagaacataatgaaaatggcttacggttcaaaaatggggcatttaaa

SEQ ID NO: 123374 - DNA, 75 bp, synthetic construct
  source 1..75: mol_type = other DNA
gggcaaaggtcttgggcgtaaattgttaagccgattgattgatgaagcgcgggattgcgggaagcatgtcatggt

SEQ ID NO: 123375 - DNA, 75 bp, synthetic construct
  source 1..75: mol_type = other DNA
ggttttcgccataccgtggaacattcggtttatgtccatcccgatcatcagggcaaaggtctggggcgtaaattg

SEQ ID NO: 123376 - DNA, 75 bp, synthetic construct
  source 1..75: mol_type = other DNA
atgcagacaaatggcattcttccatcaacgcagggctgaatcagcaggaaagcaacaaatggggcaatagcagcc

SEQ ID NO: 123377 - DNA, 75 bp, synthetic construct
  source 1..75: mol_type = other DNA
atcaccgcaagacctgacttcgtttcttgctaatgcgttggcgtttacaccagcgggcagggctggaacggtgct

SEQ ID NO: 123378 - DNA, 75 bp, synthetic construct
  source 1..75: mol_type = other DNA
acaggagagtgcattgaaattaaaacacgcgagcctttgaacagcgtgatggaaacattgagtgagggtgggtaa

SEQ ID NO: 123379 - DNA, 75 bp, synthetic construct
  source 1..75: mol_type = other DNA
aaagggcagcaaaaattcattgaggcagcaggaaagcgatataaccgcataattgacgctatgggggatacccct

SEQ ID NO: 123380 - DNA, 75 bp, synthetic construct
  source 1..75: mol_type = other DNA
ctgcgcgcctcttttgcgccatataatacaaagagtgatgtggatgcgctggtgaatgccgttgaccgcgcgctg

SEQ ID NO: 123381 - DNA, 75 bp, synthetic construct
  source 1..75: mol_type = other DNA
cccctggtggggactcccctgtagcgtgacgccctgttttggcgcccgtctggtgcaggaaggtaaccggttgca

SEQ ID NO: 123382 - DNA, 75 bp, synthetic construct
  source 1..75: mol_type = other DNA
tgcgcagccgataccctcggcagttgtggttacgtttatctggctgtttatccgacgcccgaaacgaaaaagtaa

SEQ ID NO: 123383 - DNA, 75 bp, synthetic construct
  source 1..75: mol_type = other DNA
cagatccgcggcagcacacagcagcgtcagggctcatcggtcacatcactgagcgacacatcagccacgcgtatt

SEQ ID NO: 123384 - DNA, 75 bp, synthetic construct
  source 1..75: mol_type = other DNA
gggccaaagtggtgaaattgccgcttaatgcgcagcgactgccggatgtcgatttgttgccagaactgattactc

SEQ ID NO: 123385 - DNA, 75 bp, synthetic construct
  source 1..75: mol_type = other DNA
tctccacgccggctgacctgtcatcgttaaactatcattcatcgattttctgtaaggattttatcgtgtcagact

SEQ ID NO: 123386 - DNA, 75 bp, synthetic construct
  source 1..75: mol_type = other DNA
agcgatgaagaacggctggcgctggagtacgccgaagccgcaagcgtaacgccgccaacggtcgatgatgccctg

SEQ ID NO: 123387 - DNA, 75 bp, synthetic construct
  source 1..75: mol_type = other DNA
actcatgctcaccagcggtgaactgaatccccgccatcagcataccgtaacactgtatgcgaatggactgacctg

SEQ ID NO: 123388 - DNA, 75 bp, synthetic construct
  source 1..75: mol_type = other DNA
actcatgctcaccagcggtgaactgaatccccgccatcagcataccgtaactctgtatgcgaaaggactgacctg

SEQ ID NO: 123389 - DNA, 75 bp, synthetic construct
  source 1..75: mol_type = other DNA
actcatgctcaccagcggtgaactgaatccccgccatcagcataccgttaccctgtatgcgaagggactgacctg

SEQ ID NO: 123390 - DNA, 75 bp, synthetic construct
  source 1..75: mol_type = other DNA
gtgtgccactacaacaatcacgaccgcccctggtgggggctgccctgcaccgtgacgccctgtttcggggcccga

SEQ ID NO: 123391 - DNA, 75 bp, synthetic construct
  source 1..75: mol_type = other DNA
ctcaatgctccagatgacaaaaccattgtctggacgcgcggcaccaccgaatccatcaacatggtggcgcaatgc

SEQ ID NO: 123392 - DNA, 75 bp, synthetic construct
  source 1..75: mol_type = other DNA
gtcgctggcgtaattgggttaagcgcggcgctggaatggctggcagattacgatatcaaccaggcagaaagctgg

SEQ ID NO: 123393 - DNA, 75 bp, synthetic construct
  source 1..75: mol_type = other DNA
ccggtgaaagccgaatgacaccagaaatggagagactgcaaaatgttggggctgcccctgagttgaactcactaa

SEQ ID NO: 123394 - DNA, 75 bp, synthetic construct
  source 1..75: mol_type = other DNA
ttaatggttaaaagaaattgcttcgggctggctgattactttcgtcaattagggatttctgacaaggaacaggcg

SEQ ID NO: 123395 - DNA, 75 bp, synthetic construct
  source 1..75: mol_type = other DNA
catggtgtggaatttgcctgtgtcataccccatcactctgagggccttatttacggtattttcactgattggttt

SEQ ID NO: 123396 - DNA, 75 bp, synthetic construct
  source 1..75: mol_type = other DNA
ctcatcccgacgacaatcgcggccgcccctggtggggactgccctgcaccgtgacgccctgtttcggggcacgtc

SEQ ID NO: 123397 - DNA, 75 bp, synthetic construct
  source 1..75: mol_type = other DNA
atccgatcgtatccatcgaagacggtctggacgaatctgactgggacggtttcgcataccagaccaaagttctgg

SEQ ID NO: 123398 - DNA, 75 bp, synthetic construct
  source 1..75: mol_type = other DNA
agggctgacctgcgaagccgataccctcggcagctgtggttacgtttatatggctgtttatccgacactggcacc

SEQ ID NO: 123399 - DNA, 75 bp, synthetic construct
  source 1..75: mol_type = other DNA
gcgggatgacgcaaaaatggtggtgctggagctgggcggactggaagaccgtccgtcactgctggttgcggtgat

SEQ ID NO: 123400 - DNA, 75 bp, synthetic construct
  source 1..75: mol_type = other DNA
gtggggactaccctgcacagtgacgccctgtttcggcgcccgtctggtgcaggagggtaaccggttgcattacct

SEQ ID NO: 123401 - DNA, 75 bp, synthetic construct
  source 1..75: mol_type = other DNA
cgtagcgggcaaggagccggtatatatcagcccgcaggatgcccgtgcgcgcgggattgccaacggtgatgtggt

SEQ ID NO: 123402 - DNA, 75 bp, synthetic construct
  source 1..75: mol_type = other DNA
agaatccgacaccgttacagcaaaaggtgctggatctggatatcagccagccagggccacagttatttattctgg

SEQ ID NO: 123403 - DNA, 75 bp, synthetic construct
  source 1..75: mol_type = other DNA
atcttgtcagccagcctttcgagaaatggctcaaccggaacatcaccaaagaactttttaacgacctctcacaaa

SEQ ID NO: 123404 - DNA, 75 bp, synthetic construct
  source 1..75: mol_type = other DNA
ggtgaaaccttccgtcagaaaagctggtcggcatttgttgaggatgagtggtatatcacggatgcatttgcactg

SEQ ID NO: 123405 - DNA, 75 bp, synthetic construct
  source 1..75: mol_type = other DNA
atgacaactgatttttcacaagatcataaagacgaaaaaaatcagatgcaaagcgccgatttagacgcattgctc

SEQ ID NO: 123406 - DNA, 75 bp, synthetic construct
  source 1..75: mol_type = other DNA
tcaatgggaggaatgacggcactcagctgcatgatttctaccattgttgaaggtctgttaggtggcctggtgcac

SEQ ID NO: 123407 - DNA, 75 bp, synthetic construct
  source 1..75: mol_type = other DNA
tggtacgcgtctttaacgctcgcggtcaggtgttggcaggggcagtagtttctgaccgctatgcacccggcgtgg

SEQ ID NO: 123408 - DNA, 75 bp, synthetic construct
  source 1..75: mol_type = other DNA
ggtggctttggttttggctggcactataacggcgcaggcacgccggggcgtaaaggcgttattctgagtggtttc

SEQ ID NO: 123409 - DNA, 75 bp, synthetic construct
  source 1..75: mol_type = other DNA
catcacgtcggcgttttctggcacaactcggcggcttaactgtcgccgggatgctggggccgtcattgttaacgc

SEQ ID NO: 123410 - DNA, 75 bp, synthetic construct
  source 1..75: mol_type = other DNA
tgtttaatgcgcttaacaccattaaagcggtgatccgccgcgacagcgaacaggccagccagctggtgcagtatc

SEQ ID NO: 123411 - DNA, 75 bp, synthetic construct
  source 1..75: mol_type = other DNA
gcaggaaaaaacagacaatgattgtggaagtgcttcgcaagagtcgctggcagaggagcaacagtttgttaaata

SEQ ID NO: 123412 - DNA, 75 bp, synthetic construct
  source 1..75: mol_type = other DNA
gacagtttgcggcaaaaaacactgacggcgctgcggcaatggttaccagagtttgctgcgcgttgtcgacagtat

SEQ ID NO: 123413 - DNA, 75 bp, synthetic construct
  source 1..75: mol_type = other DNA
atgttggatattgaagacaacgccggattataccagcctgcaaccaacgccagcgggctggggatgagtctggta

SEQ ID NO: 123414 - DNA, 75 bp, synthetic construct
  source 1..75: mol_type = other DNA
cgcaggcacgccggggcgtaaaggcgttattctgagtggtttctccggctctacgtcgattccgcctgttcacga

SEQ ID NO: 123415 - DNA, 75 bp, synthetic construct
  source 1..75: mol_type = other DNA
gtgtcagacacgctccatgaaacaaattatcccgacgacaacaacgaccgcccctggtggggactaccctgcacc

SEQ ID NO: 123416 - DNA, 75 bp, synthetic construct
  source 1..75: mol_type = other DNA
gcggtgatgggcggtttgctgggcggcccggtcgtgggaggtctggttggtctgaccgggggattacaccgttat

SEQ ID NO: 123417 - DNA, 75 bp, synthetic construct
  source 1..75: mol_type = other DNA
cgccggggccgtcacttttattgccgaaatgatccaaatgctgatcattcttgccattgcccggccttatgaaga

SEQ ID NO: 123418 - DNA, 75 bp, synthetic construct
  source 1..75: mol_type = other DNA
agtgaacaacgtgatggtgataacaaaggtgcaccgctgagttatacccctgaacacatggtgaatgcgaaactg

SEQ ID NO: 123419 - DNA, 75 bp, synthetic construct
  source 1..75: mol_type = other DNA
tgacgatgcccgtctggaactggccgctgacttttgcggcctgtttctgatgaccgacaaacaagcggcgctgcc

SEQ ID NO: 123420 - DNA, 75 bp, synthetic construct
  source 1..75: mol_type = other DNA
ctgatgtccagtcagctggttggtgacagaattgaatacggactgcgtgagttctcctggtctggcgaacaggcc

SEQ ID NO: 123421 - DNA, 75 bp, synthetic construct
  source 1..75: mol_type = other DNA
catcgccgggttatttcatgattttggaaaatccggacgcagctttcagcaaagcctgacccaaaagaatgcccg

SEQ ID NO: 123422 - DNA, 75 bp, synthetic construct
  source 1..75: mol_type = other DNA
acagcgtgttggagaaatgtttgctgaagtgagagtaccggccagtgaagaagatgcggtcgatgactggcgtta

SEQ ID NO: 123423 - DNA, 75 bp, synthetic construct
  source 1..75: mol_type = other DNA
caacgaagtgccttatcaatgttctttacatccgcagtgtaagttaggttcaacactggttatcccactccgtgg

SEQ ID NO: 123424 - DNA, 75 bp, synthetic construct
  source 1..75: mol_type = other DNA
tgctgaacttcaggcccggctatgccgccaatatcaacgattaccttccggaaaagctgtcgacacgtctggctg

SEQ ID NO: 123425 - DNA, 75 bp, synthetic construct
  source 1..75: mol_type = other DNA
ttctggtggtgtttgcctcagtatggaagcaaatcagctacaactttctgttcttctatgccgcgctgcaatcca

SEQ ID NO: 123426 - DNA, 75 bp, synthetic construct
  source 1..75: mol_type = other DNA
ttctggtggtgtttgcctcggtgtggaagcaaatcagctacaactttctgttcttctatgccgcgctgcaatcca

SEQ ID NO: 123427 - DNA, 75 bp, synthetic construct
  source 1..75: mol_type = other DNA
gccgagaccctaggctcctgtggttacgtttatctggctgtttatcctgcgaccgaaacggaaaatgtagtggtc

SEQ ID NO: 123428 - DNA, 75 bp, synthetic construct
  source 1..75: mol_type = other DNA
aattgaatgtgacgagttgcttccttcctcttcactctctccccgcaaacttaaacgggtaatagcgatgtggat

SEQ ID NO: 123429 - DNA, 75 bp, synthetic construct
  source 1..75: mol_type = other DNA
gcagacgctacaggatattcagcagcatatcgagactttaggtgtgtcacttagcatggctattgaccagttcgt

SEQ ID NO: 123430 - DNA, 75 bp, synthetic construct
  source 1..75: mol_type = other DNA
acctcggcaaatacgttattaccggaacaaaacacgacctgattcttagtgaaagaggaattatcaaagaaggcg

SEQ ID NO: 123431 - DNA, 75 bp, synthetic construct
  source 1..75: mol_type = other DNA
gcaaagggactggattttgttattttccgggatcgccgcaatatcggacacgaagagtttgagctcctgggccca

SEQ ID NO: 123432 - DNA, 75 bp, synthetic construct
  source 1..75: mol_type = other DNA
agagttttttgtgagcgtaccggaacagggcggcagcgaacttattcctgccggaatgccaaagccgggcgttgt

SEQ ID NO: 123433 - DNA, 75 bp, synthetic construct
  source 1..75: mol_type = other DNA
gctcacgcatgggaaatgagcgttgtcagagtgcgtcgaagctggtggaaaaaatattgcgatgagttttcttta

SEQ ID NO: 123434 - DNA, 75 bp, synthetic construct
  source 1..75: mol_type = other DNA
taatcccgttcccctgctttatggtcagcgagaaataggcggcgctattatctccgccgggatatatgcagaaga

SEQ ID NO: 123435 - DNA, 75 bp, synthetic construct
  source 1..75: mol_type = other DNA
gacgctcctggtgacgaatggttcggcagtgccatgcgtaacagtgcatatgtctacccggatcatgggcgaatc

SEQ ID NO: 123436 - DNA, 75 bp, synthetic construct
  source 1..75: mol_type = other DNA
cgctttgcatcaacctggacgggctggaaagctatcttctgaacgccaaaaagaatggcatgacgttcgcggtgt

SEQ ID NO: 123437 - DNA, 75 bp, synthetic construct
  source 1..75: mol_type = other DNA
ttgagcattacaatgaaaaccatccgcatagtgcgttgggttatcgctctccgcaagaatatctacgtcagcgga

SEQ ID NO: 123438 - DNA, 75 bp, synthetic construct
  source 1..75: mol_type = other DNA
ggtgaaagcctccctgaaatacaatgcggcagcggtcattgtcgcgcactgccatccctcaggccatgccgaacc

SEQ ID NO: 123439 - DNA, 75 bp, synthetic construct
  source 1..75: mol_type = other DNA
tgctgtgaataatgtgctcaacaaggattacagtgatgtgagcctgtaccgtgccggcagcagcacgctttatgc

SEQ ID NO: 123440 - DNA, 75 bp, synthetic construct
  source 1..75: mol_type = other DNA
accacgatctggcggaggctctgagatcagtagagggtgtggatgttgaaagtggtacgggtaaaaccggtgggc

SEQ ID NO: 123441 - DNA, 75 bp, synthetic construct
  source 1..75: mol_type = other DNA
gtaactgctgcaaagacagcggctggggccaggatgtggggctggcacgctgcagcagcgaggaaaaggcgctgg

SEQ ID NO: 123442 - DNA, 75 bp, synthetic construct
  source 1..75: mol_type = other DNA
gatcccggaagacgagcatatctcacgcctgtcgccactgatgtacggtcatatcaacatgctgggacattatac

SEQ ID NO: 123443 - DNA, 75 bp, synthetic construct
  source 1..75: mol_type = other DNA
gtgccggcagtggtacgctttatgcgggtgattacttccagacgggggcatcgacaacgggttatgtgatacctg

SEQ ID NO: 123444 - DNA, 75 bp, synthetic construct
  source 1..75: mol_type = other DNA
atgatggtcgataccgatggcatctccggcgttgaaatcaactctaaccgaactgttaccaacgggctgggcatc

SEQ ID NO: 123445 - DNA, 75 bp, synthetic construct
  source 1..75: mol_type = other DNA
aggtttcgctgatacggagcaggcagcacaatttttcgcctggctattgtgctggcacgatactggaaaatttgc

SEQ ID NO: 123446 - DNA, 75 bp, synthetic construct
  source 1..75: mol_type = other DNA
taaaccgccattcttgttgtcgttcatcaagcgcagggggtgttccccgcgccagcggggataaaccgggtaaat

SEQ ID NO: 123447 - DNA, 75 bp, synthetic construct
  source 1..75: mol_type = other DNA
aacgatgaaattaacgcctttgctttctttggcggcaacgtggtgctgcactctgccctgttccgttattccgat

SEQ ID NO: 123448 - DNA, 75 bp, synthetic construct
  source 1..75: mol_type = other DNA
ttctggtggtgtttgcctcggtgtggaagcaaattagctacaacttcctgttcttctatgccgcgctgcaatcca

SEQ ID NO: 123449 - DNA, 75 bp, synthetic construct
  source 1..75: mol_type = other DNA
aaatgcccgcgatttacgcaccaatccggtgttgcagctcaacctggcgaacgcttatctgcaaggcggtcaacc

SEQ ID NO: 123450 - DNA, 75 bp, synthetic construct
  source 1..75: mol_type = other DNA
agatatgtgcttatggctcgagttaatatccgcgaataaaaagtttgcaaatattgactccgttcttctaaagta

SEQ ID NO: 123451 - DNA, 75 bp, synthetic construct
  source 1..75: mol_type = other DNA
attacagcggcatatccgcgatattaatggtcagttaaagcgtgacggaaaggacgagcgttcccccctgaattg

SEQ ID NO: 123452 - DNA, 75 bp, synthetic construct
  source 1..75: mol_type = other DNA
catgtcaccgcccctttccgtggcttacaggccgatgcaatatcgcatcgcctggtatgccgaacagtctaaaaa

SEQ ID NO: 123453 - DNA, 75 bp, synthetic construct
  source 1..75: mol_type = other DNA
tattataacttaaatactattattggagataaaaaactaatgaatgaccctcttgagcaatggaattatattttg

SEQ ID NO: 123454 - DNA, 75 bp, synthetic construct
  source 1..75: mol_type = other DNA
tctggtgcgtctgggctggtcccacggcgatcaggaaatcttcactcgtgaagagatgatcaaatacttcacttt

SEQ ID NO: 123455 - DNA, 75 bp, synthetic construct
  source 1..75: mol_type = other DNA
caggtgccctggggagaaaatgcattgtctgcttatctgggtgatgatcgggaatactggaagcagtacgacacg

SEQ ID NO: 123456 - DNA, 75 bp, synthetic construct
  source 1..75: mol_type = other DNA
gactgtgaagtattaatgtcaggtattgccgatggtattaactcggaaaatgcattcttatccgtaaatggggga

SEQ ID NO: 123457 - DNA, 75 bp, synthetic construct
  source 1..75: mol_type = other DNA
tgcgtccggtagcgcgtcagccgctggaagtggttcgtgacaaactggccgcgattactgactggaccgctgaaa

SEQ ID NO: 123458 - DNA, 75 bp, synthetic construct
  source 1..75: mol_type = other DNA
aaggaacgaagttcggatatacagccgggaatagcctatgttcatgcttttgtcgataatctggaaaagcttggt

SEQ ID NO: 123459 - DNA, 75 bp, synthetic construct
  source 1..75: mol_type = other DNA
taaatgctggaacaagctaataaataaaggcattctggtcaaagaagggaagcataccatgataaacgcaaatct

SEQ ID NO: 123460 - DNA, 75 bp, synthetic construct
  source 1..75: mol_type = other DNA
aagcctggcccttacataccccgtttgtgattgcccggggaagtcgcagtgaagcgcgcgtggtggtggttgaac

SEQ ID NO: 123461 - DNA, 75 bp, synthetic construct
  source 1..75: mol_type = other DNA
cctggatggaattatattcaccggcggaataggagagaactcaagtttaattcgtcgtttggtcatggagcattt

SEQ ID NO: 123462 - DNA, 75 bp, synthetic construct
  source 1..75: mol_type = other DNA
gcacgcgcagtggtgatgttgatttcggcgctatgtcctgggtggcgagccaaacccgtcaaagtctgagtgacc

SEQ ID NO: 123463 - DNA, 75 bp, synthetic construct
  source 1..75: mol_type = other DNA
tgttaaggcgttcagtaaaaaagggctggctcactaaagaacaggcaattgagcgactggcgacgcaaactgaac

SEQ ID NO: 123464 - DNA, 75 bp, synthetic construct
  source 1..75: mol_type = other DNA
tcttgttaaccaaccaactccgttagggcgagttcaagacggtaaaaccgaactgcttataaatgaggtcgcaaa

SEQ ID NO: 123465 - DNA, 75 bp, synthetic construct
  source 1..75: mol_type = other DNA
tcatccgttacccatttgtgctgatgaaagctgccatacccgcagtaacctgaaggcgctgcaagggcgctatga

SEQ ID NO: 123466 - DNA, 75 bp, synthetic construct
  source 1..75: mol_type = other DNA
tatggggagagcgatgcttcggtaatggcacaaataacgagcgttgtgccgcaactggaaaaaggtttatctcgc

SEQ ID NO: 123467 - DNA, 75 bp, synthetic construct
  source 1..75: mol_type = other DNA
cacagacacgagtattacaaagcaggacagaggggagcaatttggcgagatcgactcggacagatctttgcgatg

SEQ ID NO: 123468 - DNA, 75 bp, synthetic construct
  source 1..75: mol_type = other DNA
atggcgaattgtcgcattctgttaacgccactgaatgaacgtgacgaacagcgcggatattcgacacaggggttg

SEQ ID NO: 123469 - DNA, 75 bp, synthetic construct
  source 1..75: mol_type = other DNA
gatggcatacatcagtcaggtgaagaaaatggaactccccgccattaaaacagaagctgaatttaacgccattaa

SEQ ID NO: 123470 - DNA, 75 bp, synthetic construct
  source 1..75: mol_type = other DNA
ggtattatctgctctgttgctgaagatgtctctgctttatatccggcaggttttactgttgttgaagtggacgaa

SEQ ID NO: 123471 - DNA, 75 bp, synthetic construct
  source 1..75: mol_type = other DNA
atgaagccatacattacgcataacaatatccttgtgaaagattcaacgctggactatttcaagtcggtcgttttc

SEQ ID NO: 123472 - DNA, 75 bp, synthetic construct
  source 1..75: mol_type = other DNA
ccagcagcgcctgacattgtgccaatgaaacgtgggacaccagatgaaccggccaaacagatccagactttcaca

SEQ ID NO: 123473 - DNA, 75 bp, synthetic construct
  source 1..75: mol_type = other DNA
ttcaactgaagtggatgctcgcctctcgtttgatacccaggccagtattgctaaagcgcgggaaattattgcact

SEQ ID NO: 123474 - DNA, 75 bp, synthetic construct
  source 1..75: mol_type = other DNA
ccgcaccgtggtgatgggggccagtttccgtacgccggaacaggtgctggcgcttaacggatgcgatcgtctgac

SEQ ID NO: 123475 - DNA, 75 bp, synthetic construct
  source 1..75: mol_type = other DNA
gtaccggtgacgcgatgaagtttatggcagaactggtggctaaacttccggcgggcgtcggctactcctggactg

SEQ ID NO: 123476 - DNA, 75 bp, synthetic construct
  source 1..75: mol_type = other DNA
cctggtgatcatcatcgggttgttcgatcttttcagtagcgttcagcaggcaaccgttgatcccgcctggttggg

SEQ ID NO: 123477 - DNA, 75 bp, synthetic construct
  source 1..75: mol_type = other DNA
ttcaaagaatattgtttatacaaataaaaagtctgggcaaaggaagttgattgtttatatttttgacaagttgga

SEQ ID NO: 123478 - DNA, 75 bp, synthetic construct
  source 1..75: mol_type = other DNA
gaccgcaatcattcagcgggcaatggtggctctgagcagtatcaataaagcgatgattttcccgttcaacttacc

SEQ ID NO: 123479 - DNA, 75 bp, synthetic construct
  source 1..75: mol_type = other DNA
cccatgttaacgacaacatcgcatttaaaatcgatctctttcgtcgcattgtttacgcctggttgctgggtaata

SEQ ID NO: 123480 - DNA, 75 bp, synthetic construct
  source 1..75: mol_type = other DNA
atctgcaagtaaacctgtaccgcctactgtgattgatgcatatgccgttaatagttccaatcgcgacagatacct

SEQ ID NO: 123481 - DNA, 75 bp, synthetic construct
  source 1..75: mol_type = other DNA
tattcagtattagcagtaagccttgataaagctactaataaacgtagtatcgaatcaaccattagtgaagcaata

SEQ ID NO: 123482 - DNA, 75 bp, synthetic construct
  source 1..75: mol_type = other DNA
aacgtaaagagaaaccgagagcccttacacaatcaatgctgatagaatgtttgaagtccttagagtcatttcact

SEQ ID NO: 123483 - DNA, 75 bp, synthetic construct
  source 1..75: mol_type = other DNA
gaagccgctaaaaggataaactgtgcttttttgtcgaaacagaatgatattgatttatcaggacttaatttaact

SEQ ID NO: 123484 - DNA, 75 bp, synthetic construct
  source 1..75: mol_type = other DNA
agaacgggtggaattatagtgcacctgcacctcataaaacgggtgccgggattgctaccccgacgatgactactg

SEQ ID NO: 123485 - DNA, 75 bp, synthetic construct
  source 1..75: mol_type = other DNA
gacttggttacttgaatagcttagctaatgctcgtgtatctgaattgaaaccggggcaaattttgcgtctttgct

SEQ ID NO: 123486 - DNA, 75 bp, synthetic construct
  source 1..75: mol_type = other DNA
cattttccgatcgtcatggtgatgtttatcgcgatcagatggcagattttatccttagtgcgttgaattcgcaga

SEQ ID NO: 123487 - DNA, 75 bp, synthetic construct
  source 1..75: mol_type = other DNA
acacggtcatcgacctgatcgtggtggacgagcgcgaccggcaaccgattggccgtccgtatctgaccatcgcca

SEQ ID NO: 123488 - DNA, 75 bp, synthetic construct
  source 1..75: mol_type = other DNA
gccgatcacgttatcccatggcagcacagccaaaagttgtatgatctggcaaaagagccaaaacgtttaatctta

SEQ ID NO: 123489 - DNA, 75 bp, synthetic construct
  source 1..75: mol_type = other DNA
gctgatcacgttatcccatggcagcacagcgaaaagttgtatagcctggcaaaagagccaaaacggttgatccta

SEQ ID NO: 123490 - DNA, 75 bp, synthetic construct
  source 1..75: mol_type = other DNA
atattattctcccgcaacagttgcagcgtctgaccgcagcggttaaccgcgcggtacaggatgaaacattttttt

SEQ ID NO: 123491 - DNA, 75 bp, synthetic construct
  source 1..75: mol_type = other DNA
ttttcgcgggttaaattcgaacaccgcggcaattcttataacgcctaccaaatcaccaaaaacggcttcgttttc

SEQ ID NO: 123492 - DNA, 75 bp, synthetic construct
  source 1..75: mol_type = other DNA
gcatactccctgaaagagaaactcattgtcgaatggatgattcacgaacacttaccatcaggtattcagggaagg

SEQ ID NO: 123493 - DNA, 75 bp, synthetic construct
  source 1..75: mol_type = other DNA
cggttttatctggaaaaacagggctggactcttgtaaaccggggcgcaattaaaaacatgaccgtagagcagttg

SEQ ID NO: 123494 - DNA, 75 bp, synthetic construct
  source 1..75: mol_type = other DNA
gtgagtgttacgcccttcgacaacgaagaacaggtggtgaactgggcgaatgacagccagtacggacttgcatct

SEQ ID NO: 123495 - DNA, 75 bp, synthetic construct
  source 1..75: mol_type = other DNA
tgaatgatcttgatgattataaaactacgcttgaagatagattggtgttcctgaatggagttttatcggggattc

SEQ ID NO: 123496 - DNA, 75 bp, synthetic construct
  source 1..75: mol_type = other DNA
ggacattttgtgcctcggtaaagccttaaccggcggcacaatgaccctttccgccacgctcaccacgcgcgaggt

SEQ ID NO: 123497 - DNA, 75 bp, synthetic construct
  source 1..75: mol_type = other DNA
cgttattcagaagatcgaaactctcgaatgctcgccggagtttaaccggcttaattttaagcccgtcacctatac

SEQ ID NO: 123498 - DNA, 75 bp, synthetic construct
  source 1..75: mol_type = other DNA
cgcatggaagcagaactacgccagaataataccactcccacaaacaaaatcattccgggcgatgggcgcactctg

SEQ ID NO: 123499 - DNA, 75 bp, synthetic construct
  source 1..75: mol_type = other DNA
atgtcggtgctggcggatggagcgctggtctgtggcattgtgatattgctgtggccggtgatgaaagaaacagac

SEQ ID NO: 123500 - DNA, 75 bp, synthetic construct
  source 1..75: mol_type = other DNA
atgtggaaaaggtgtaacggagacgacatatggcttatcaatctcaagatatcattcgtcgttccgcgactaacg

SEQ ID NO: 123501 - DNA, 75 bp, synthetic construct
  source 1..75: mol_type = other DNA
tgaaaatgcgcgtgtcatttgcgccgtaattccgactaacgaagaaaaaatgattgctttggatgccattcattt

SEQ ID NO: 123502 - DNA, 75 bp, synthetic construct
  source 1..75: mol_type = other DNA
gggagttgcgtacagaaccggttaaaggggtattcagtagttatggattaagcgcaactgctactattccctggt

SEQ ID NO: 123503 - DNA, 75 bp, synthetic construct
  source 1..75: mol_type = other DNA
cgacttgaatccaaaccgagaagacacgacttatcgccactggcagcagccactggtaaccgaattagaggagtt

SEQ ID NO: 123504 - DNA, 75 bp, synthetic construct
  source 1..75: mol_type = other DNA
atggctacatacggcggtcagtttacgcttacgaattttaagacggatatctatttcgtttccacgtttgaaccg

SEQ ID NO: 123505 - DNA, 75 bp, synthetic construct
  source 1..75: mol_type = other DNA
ttcgttttcctggtgatgggcttcaccggcaaaaaggccgctgcattcaaggaagcctacattgccgagttcgac

SEQ ID NO: 123506 - DNA, 75 bp, synthetic construct
  source 1..75: mol_type = other DNA
gcgcgtgtcggcgtaccggccgtcgtcacacgcgctacttcgttcctggtcgattttctgccgatcctccggcgc

SEQ ID NO: 123507 - DNA, 75 bp, synthetic construct
  source 1..75: mol_type = other DNA
cgcacactggccgctggtcagttggttacccgatcgcaatttcaatgtattcatgtttgattatcgcgggtttgg

SEQ ID NO: 123508 - DNA, 75 bp, synthetic construct
  source 1..75: mol_type = other DNA
ctgccatcctgctgtttctggtcgtggcggtggacttcaccagcaggataatgtcggtgctggcggatggagcgc

SEQ ID NO: 123509 - DNA, 75 bp, synthetic construct
  source 1..75: mol_type = other DNA
ttatccacagaatcaggggataacgccggaaagaacatgtgcgcaaaaaagcaaaaggccgcgccgctggcgttt

SEQ ID NO: 123510 - DNA, 75 bp, synthetic construct
  source 1..75: mol_type = other DNA
tcttcgtggtttgcacattacacgcaagccggcgtatttcgcttttatcgtcaggtcactccggtatatttcgat

SEQ ID NO: 123511 - DNA, 75 bp, synthetic construct
  source 1..75: mol_type = other DNA
acaggacaacgaatacaaatattacgtactcgacgggcaaacggcgatcctcgaagattatttcgctgtcaaacc

SEQ ID NO: 123512 - DNA, 75 bp, synthetic construct
  source 1..75: mol_type = other DNA
aaatatatgcgcgtgcatcgcaccatcggttccacgcgcatggatatcaaaattgcccacgcgcgtattgaaaat

SEQ ID NO: 123513 - DNA, 75 bp, synthetic construct
  source 1..75: mol_type = other DNA
gtggaaaatcgtggagtttccttggtttcaatgtgtctccctttgttaccccaaacagcgaaattaaagcactga

SEQ ID NO: 123514 - DNA, 75 bp, synthetic construct
  source 1..75: mol_type = other DNA
tgtgcgacgtgttaacttacgttgagcgttttgagccggaagcggtgattgatgtggcgacgctgaccggtgcct

SEQ ID NO: 123515 - DNA, 75 bp, synthetic construct
  source 1..75: mol_type = other DNA
tataaccttccttgcacttcctctgctggggattgctttgatggcttacagtggaaaatcgtggagtttccttgg

SEQ ID NO: 123516 - DNA, 75 bp, synthetic construct
  source 1..75: mol_type = other DNA
agtatccgcagattgcgccaccgaccattaccgtcagcgctacctatccgggtgccgatgcgcaaacggtagaag

SEQ ID NO: 123517 - DNA, 75 bp, synthetic construct
  source 1..75: mol_type = other DNA
agtaaaaaagaaggcatgaacaatatcattgcggctattgaagctgcaaaaaatggctactgctatttccccttc

SEQ ID NO: 123518 - DNA, 75 bp, synthetic construct
  source 1..75: mol_type = other DNA
cgtatctgggatcacgtctgcgccgtatcaccgacattaaaaccgaacgcctcgccgccatcaccgctgcacagg

SEQ ID NO: 123519 - DNA, 75 bp, synthetic construct
  source 1..75: mol_type = other DNA
ccgttccgtatgctgccagataacatcaaccaatggtatgtgcgcaacgcatccggcaccatggcgccgctttct

SEQ ID NO: 123520 - DNA, 75 bp, synthetic construct
  source 1..75: mol_type = other DNA
ggaacttcacgccggaaactttcgcacagtatgtggctgatacgcacacattaacgtacgttttcgttccattgg

SEQ ID NO: 123521 - DNA, 75 bp, synthetic construct
  source 1..75: mol_type = other DNA
ttgtggaagaacgtattcaaaaccgatgagcgcttcaccagtgctttctctcagaacggcggcggcacatccatc

SEQ ID NO: 123522 - DNA, 75 bp, synthetic construct
  source 1..75: mol_type = other DNA
cccagagtgagtaacatgctcaacgggaagttggacaaattctcggtcgacacactattagaaatagtgttcaag

SEQ ID NO: 123523 - DNA, 75 bp, synthetic construct
  source 1..75: mol_type = other DNA
aattcaatgtgccggaaagctatagtttgctgaaaatgccaccagtgggatgtctgatcagcgcgctaaaaaaag

SEQ ID NO: 123524 - DNA, 75 bp, synthetic construct
  source 1..75: mol_type = other DNA
agcgcctggacccatccgagtacgccaacgtgaaagcgcagtttgttcttcgcgccagcgatctccacaacgcca

SEQ ID NO: 123525 - DNA, 75 bp, synthetic construct
  source 1..75: mol_type = other DNA
tgcgcaaggtggatttgctccccgacagcatccgtaagccactgctggaaatgctgcgtgaaaaacgtctgacgc

SEQ ID NO: 123526 - DNA, 75 bp, synthetic construct
  source 1..75: mol_type = other DNA
gcggcaaaagcacgtgaaggcgtagaagccagagacgaaattaaatatttaaataaagcacttgcagaattaaaa

SEQ ID NO: 123527 - DNA, 75 bp, synthetic construct
  source 1..75: mol_type = other DNA
tggaatggcaggtgatggagtggcgcgaggaagcctataccctcgatgaactggctgattatttgagcgcctcag

SEQ ID NO: 123528 - DNA, 75 bp, synthetic construct
  source 1..75: mol_type = other DNA
tcctgccgaatgcccgtttcttcgacaaattgcgtattgacggcaacttgctgcataccgccgtacgttacggat

SEQ ID NO: 123529 - DNA, 75 bp, synthetic construct
  source 1..75: mol_type = other DNA
atgccctttgatgcggtgtccgttggtaatcacgagttcgatcacggcgtgcccaatatggtatctcagttatca

SEQ ID NO: 123530 - DNA, 75 bp, synthetic construct
  source 1..75: mol_type = other DNA
aagaaaatttaccccaccgtccctatcacacgaatgatctcgcttttggtcttcgcatctccggcaaagggcgtg

SEQ ID NO: 123531 - DNA, 75 bp, synthetic construct
  source 1..75: mol_type = other DNA
cgcgtcgtagcatcgataaacattacgggatggggcgaaactgccacctgttcgaaatgacgcgcaaatgggctt

SEQ ID NO: 123532 - DNA, 75 bp, synthetic construct
  source 1..75: mol_type = other DNA
tatacttgcactttcggcaattgttatatttttcggaataacattttttattaaggaactatattatgctcaagt

SEQ ID NO: 123533 - DNA, 75 bp, synthetic construct
  source 1..75: mol_type = other DNA
gtttaacgccgtacgtcaggccggggagtgcgtttcggttcagttgattctggaaaacggtgcggtcgccgtagg

SEQ ID NO: 123534 - DNA, 75 bp, synthetic construct
  source 1..75: mol_type = other DNA
attctggaaatgtcccgcgccctgatgtaccgccgcctgcgtgccgcgaccgaatctctgaacagcgacagcgac

SEQ ID NO: 123535 - DNA, 75 bp, synthetic construct
  source 1..75: mol_type = other DNA
gtcatgcggtatattcttgatggcaaggataataatgacattgctgaaaaatgttcatcagcaacaaaactgtca

SEQ ID NO: 123536 - DNA, 75 bp, synthetic construct
  source 1..75: mol_type = other DNA
cgttcgctgtgtgagaaactttgtgctgatgtgaactacagcggactgatttgcaaaaatccgttccacctggaa

SEQ ID NO: 123537 - DNA, 75 bp, synthetic construct
  source 1..75: mol_type = other DNA
gcagcatcctgatggtggcggcgtttatctctgaaaacggcagcctcaaccagtacgatattgcagattatgtgg

SEQ ID NO: 123538 - DNA, 75 bp, synthetic construct
  source 1..75: mol_type = other DNA
ctggcctttgacgttgaccggacgggggcagcgatcgactggagcgaccggaactgtccggccccgaacatcacc

SEQ ID NO: 123539 - DNA, 75 bp, synthetic construct
  source 1..75: mol_type = other DNA
gagtattagataaggaattacgaagggcttcggtatcattaaaaactttgaagagtaaagcggtgagttcacttg

SEQ ID NO: 123540 - DNA, 75 bp, synthetic construct
  source 1..75: mol_type = other DNA
gtgatcctgtttcagtcagcatatgttgcggaagtcgtgcgaggcggattacaggcgctgcctaaagggcaatat

SEQ ID NO: 123541 - DNA, 75 bp, synthetic construct
  source 1..75: mol_type = other DNA
tcgaaatgtacaacgcatcgcttcctgttccgctttcaccagctgaatgccgggctattggcaggagcattgcga

SEQ ID NO: 123542 - DNA, 75 bp, synthetic construct
  source 1..75: mol_type = other DNA
agcaaaaggggatgataagtttatcaccaccgactatttgcaacagtgccctttcgactacctcccctcaaagcc

SEQ ID NO: 123543 - DNA, 75 bp, synthetic construct
  source 1..75: mol_type = other DNA
aacctttgaagcaaaatacccggacgcgcatcttggcgcggttgtcgcctttggcaacaacacctggcgtgctct

SEQ ID NO: 123544 - DNA, 75 bp, synthetic construct
  source 1..75: mol_type = other DNA
tccaccgggaatggcaggtggctgaatggcgggaagatgcctacaccctcgatgaactggcggattatcttgatt

SEQ ID NO: 123545 - DNA, 75 bp, synthetic construct
  source 1..75: mol_type = other DNA
aacaaatattgtggttcttgaatgtactaccctcgccgatcttctgacaaatgataacatttgttttttatataa

SEQ ID NO: 123546 - DNA, 75 bp, synthetic construct
  source 1..75: mol_type = other DNA
atcatctatggcgaacaaggcaaacctgcattcgcgccggaaacgccgctatggttcaacttaagccatagcggt

SEQ ID NO: 123547 - DNA, 75 bp, synthetic construct
  source 1..75: mol_type = other DNA
atcaaaagccatggtggggcgactttaaagcaaagggccatagagcatccctttcaggtcagggaaaaagaaaat

SEQ ID NO: 123548 - DNA, 75 bp, synthetic construct
  source 1..75: mol_type = other DNA
tcatcgtggttcgaacactacacgcaatctggtgtgtttcgtctttatcgtcaggtcacgccggtttatttcgat

SEQ ID NO: 123549 - DNA, 75 bp, synthetic construct
  source 1..75: mol_type = other DNA
tcaactgggggggatgccacaggcggcagaccagcaactgaacgcctcaatcattgtgcagacgcgtctacaaac

SEQ ID NO: 123550 - DNA, 75 bp, synthetic construct
  source 1..75: mol_type = other DNA
cgcagcagagatcagcgacctgacttttgccatcggactgatgaattgctttaaccgcctggccgtttccatgcg

SEQ ID NO: 123551 - DNA, 75 bp, synthetic construct
  source 1..75: mol_type = other DNA
gcacaagctggacgctctggcaggctggcgggtgagccatcattttgacgatcgcgagcgggcggcgctggcctg

SEQ ID NO: 123552 - DNA, 75 bp, synthetic construct
  source 1..75: mol_type = other DNA
cgaaacggcagccgctctgggctttatctcagccattggcgcagtgggcggcttttttattccgcaggcgtttgg

SEQ ID NO: 123553 - DNA, 75 bp, synthetic construct
  source 1..75: mol_type = other DNA
agttattttgatgtgctggaaaaagcgtcagtaaccaaagaaattttattgccgaatggtcatgaccagatgcca

SEQ ID NO: 123554 - DNA, 75 bp, synthetic construct
  source 1..75: mol_type = other DNA
gcagggctggccagcattctcacagtggcttgatgccgtgattcagcgtgttgaaatgtacaacgcatcgcttcc

SEQ ID NO: 123555 - DNA, 75 bp, synthetic construct
  source 1..75: mol_type = other DNA
tgctgacattgaaaaagaattgttggaaaaagaagctataagacaagacctacttacaaaatacaaagataaaaa

SEQ ID NO: 123556 - DNA, 75 bp, synthetic construct
  source 1..75: mol_type = other DNA
tagcctgtacagcccttttaaccggctgcgtcagccaggataaaggtaatgcaatgcaaagtcagctgaacaacc

SEQ ID NO: 123557 - DNA, 75 bp, synthetic construct
  source 1..75: mol_type = other DNA
ggggtacgcggtgagtccgaggcttacggatgcacaccttatatctacgacactaaatacggaccaacaagcgac

SEQ ID NO: 123558 - DNA, 75 bp, synthetic construct
  source 1..75: mol_type = other DNA
cctggcaacgtgattgcggcaaaaagtgacgctgaagggatactggaaaatgctttctggcaaattgcgctcaat

SEQ ID NO: 123559 - DNA, 75 bp, synthetic construct
  source 1..75: mol_type = other DNA
gtaaaacagagggaatactggaaaatgctttctggcaaattgcactcaatgaggatggttcacttcgtctggttg

SEQ ID NO: 123560 - DNA, 75 bp, synthetic construct
  source 1..75: mol_type = other DNA
aaagggctgaagattgttcgacagagcctgccgtacggcaccgccagcggtacgcacggtctgtacttttgcgcc

SEQ ID NO: 123561 - DNA, 75 bp, synthetic construct
  source 1..75: mol_type = other DNA
gtagctatcattggctttgaacaaattgcaggtgctgtttttgttgagcaattagacattaaggttttggttatt

SEQ ID NO: 123562 - DNA, 75 bp, synthetic construct
  source 1..75: mol_type = other DNA
ctctggtatggaagttgttttgttagatggtttaagcgatctgctactggttgaaaaactgatgccattgtttga

SEQ ID NO: 123563 - DNA, 75 bp, synthetic construct
  source 1..75: mol_type = other DNA
atttgatattaatgttttggttgttggcgacctgtctgaattgctgactaatgaaacgctggattcattatacaa

SEQ ID NO: 123564 - DNA, 75 bp, synthetic construct
  source 1..75: mol_type = other DNA
gggggtaattgctttcctgagtggtttgggtactcattttgctgccgtgcaatgggcaaatgatattgcagaata

SEQ ID NO: 123565 - DNA, 75 bp, synthetic construct
  source 1..75: mol_type = other DNA
tctattcagaagaactgtttcgagaatatgtaagagaagcattgcatgattatattaatcgctcaagtttaaata

SEQ ID NO: 123566 - DNA, 75 bp, synthetic construct
  source 1..75: mol_type = other DNA
gtgattgtcattagccttgatgatatcagttattgtgacgttctggaacgaacagatattgattttgtgaaatat

SEQ ID NO: 123567 - DNA, 75 bp, synthetic construct
  source 1..75: mol_type = other DNA
agaatccatcaatgcctggacagaagatgagttaagttatctggattgtactgttgatgttgagtatgtgaagga

SEQ ID NO: 123568 - DNA, 75 bp, synthetic construct
  source 1..75: mol_type = other DNA
gcttcccttctattggtcagaataatgcccgtcggattgcagagttcgcagatgggaatgcaagagtggctttgg

SEQ ID NO: 123569 - DNA, 75 bp, synthetic construct
  source 1..75: mol_type = other DNA
cagcgcagtgacaatgccgacaacctgttgcacattgaaaatatcgcccttatgccgggaattaattttaaccct

SEQ ID NO: 123570 - DNA, 75 bp, synthetic construct
  source 1..75: mol_type = other DNA
tatttttggctggcgcttaatgcgcgatgtaaccggcccgattcgcaacatggtgaataccgtcgaccgcatccg

SEQ ID NO: 123571 - DNA, 75 bp, synthetic construct
  source 1..75: mol_type = other DNA
gcctttgctggctcatcagtgaaagacaaaaaatacttcggtgacggcaccggtgtagggctacgtaaagatgat

SEQ ID NO: 123572 - DNA, 75 bp, synthetic construct
  source 1..75: mol_type = other DNA
tttgatatcgatctgggtaacgagatgtgcaaacgcatgcaggttaaatgtacctgggttgccagtgactttgat

SEQ ID NO: 123573 - DNA, 75 bp, synthetic construct
  source 1..75: mol_type = other DNA
acaaggctgttcgtattacaggattgtctggtgttgggaagactcgaatcgttcaggcgctctttgatgaaactg

SEQ ID NO: 123574 - DNA, 75 bp, synthetic construct
  source 1..75: mol_type = other DNA
agtgcctcgccggtaagcgcctggcctatgtcgaaccaaactccgcagcagcgcaatgcacgctggatattttaa

SEQ ID NO: 123575 - DNA, 75 bp, synthetic construct
  source 1..75: mol_type = other DNA
tatattaatgaaaaacagttagaaaaattaaatcctcagggaaatttacgtatagcaatagaaaaatttgggtgg

SEQ ID NO: 123576 - DNA, 75 bp, synthetic construct
  source 1..75: mol_type = other DNA
aatatgtcacacgagctgcgtacaccactgaatggtgttattggctttacccgcctgacgctgaaaacagaatta

SEQ ID NO: 123577 - DNA, 75 bp, synthetic construct
  source 1..75: mol_type = other DNA
gtgagcaattctctaatttgccagaaagcagggtcctcgagctagctcaaaggctgctgagtaaaccgaatggtg

SEQ ID NO: 123578 - DNA, 75 bp, synthetic construct
  source 1..75: mol_type = other DNA
tacctgggttgccagtgactttgacgcgctgatcccctcactgaaagcgaaaaaaatcgacgccattatttcgtc

SEQ ID NO: 123579 - DNA, 75 bp, synthetic construct
  source 1..75: mol_type = other DNA
gcgcagttgtttaatcgcttgtttgaacaacgtaatcatcccgacggccatttacgggagcaagctgaaatattg

SEQ ID NO: 123580 - DNA, 75 bp, synthetic construct
  source 1..75: mol_type = other DNA
tgataattgcccatcagaactccatgcttcgcttgccagcaaagtatcagccgcagggaaagaagtaagtctcat

SEQ ID NO: 123581 - DNA, 75 bp, synthetic construct
  source 1..75: mol_type = other DNA
cttatactccctccgggacatcaggcagtaattcctctgcttgaatctccacgaggagaaataagccgggatacc

SEQ ID NO: 123582 - DNA, 75 bp, synthetic construct
  source 1..75: mol_type = other DNA
agagtttaaaactgattcgatcattaccggtggtagtggtatggaaactacagaagaaactcgaaatcgtgctca

SEQ ID NO: 123583 - DNA, 75 bp, synthetic construct
  source 1..75: mol_type = other DNA
acgttgctgcgccatacacgccatgagttagcaaacgatcggcagctgctcgaggaggagtcccgtgagcagtaa

SEQ ID NO: 123584 - DNA, 75 bp, synthetic construct
  source 1..75: mol_type = other DNA
caggtaaaagttaaagatatttggcgtgttatagagtcactggatatgtttctctcttacgatattacaacacag

SEQ ID NO: 123585 - DNA, 75 bp, synthetic construct
  source 1..75: mol_type = other DNA
tcccaaactcaacattcatgccatgcaatttggcgattcgctggacaatcgatagcccaagtccactgccggtag

SEQ ID NO: 123586 - DNA, 75 bp, synthetic construct
  source 1..75: mol_type = other DNA
cgttgtcccctgctatcgcccctgtactggcagatggtgatccggaaaaactctttcatggtggcaaacgacctg

SEQ ID NO: 123587 - DNA, 75 bp, synthetic construct
  source 1..75: mol_type = other DNA
acaaggtgttatagacactttaatctcagccccaggcgtaaccattactttaccatcgggaaaggggcaaaaact

SEQ ID NO: 123588 - DNA, 75 bp, synthetic construct
  source 1..75: mol_type = other DNA
ctggcatttctggcagaacatccacagtaccttttacaggaattgaccaacaccctacgtttgtacgcctttagc

SEQ ID NO: 123589 - DNA, 75 bp, synthetic construct
  source 1..75: mol_type = other DNA
gcatgatgattctgatcctggcgccgaccgtccttattgggttattgcttagtatctttttcgtcgtgcatcgct

SEQ ID NO: 123590 - DNA, 75 bp, synthetic construct
  source 1..75: mol_type = other DNA
aacagctacgcagcggtactaaagaagaagatttggagccagagcttctggaattgctggacgagatggataatg

SEQ ID NO: 123591 - DNA, 75 bp, synthetic construct
  source 1..75: mol_type = other DNA
aggcgcttggcgaactgcgtcaggatggcacttacgacaagatggcgaaaaagtatttcgactttaatgtctatg

SEQ ID NO: 123592 - DNA, 75 bp, synthetic construct
  source 1..75: mol_type = other DNA
ctggcgaaaaagcgtgcccaggaagcggcgcgtattaaatccgagtttctggcaaatatgtcacacgagctgcgt

SEQ ID NO: 123593 - DNA, 75 bp, synthetic construct
  source 1..75: mol_type = other DNA
aatcgacactgttgcgtcatacgcgccatgaactggcgaacgatcggcaactgctcgaggaggagtcccgtgagc

SEQ ID NO: 123594 - DNA, 75 bp, synthetic construct
  source 1..75: mol_type = other DNA
acggcaggaacagcacggcccgtatcctgaatttccatctggtccgtaatccggaaatcgccttactgtggaata

SEQ ID NO: 123595 - DNA, 75 bp, synthetic construct
  source 1..75: mol_type = other DNA
gcgctgtttcactggatgtcacccgtgcgaatgcccggttaccggatgaaagccggcatgacggtcagtcatatc

SEQ ID NO: 123596 - DNA, 75 bp, synthetic construct
  source 1..75: mol_type = other DNA
actcgccaagttattcgataacgaaaaagacatacaggccattttgatggccaaaacgacgcaggacattttgtc

SEQ ID NO: 123597 - DNA, 75 bp, synthetic construct
  source 1..75: mol_type = other DNA
atgcgatgctcatcacgaagctggaaaacctgtccatctactacatggatgacagccatcgccgcgtgattgtgg

SEQ ID NO: 123598 - DNA, 75 bp, synthetic construct
  source 1..75: mol_type = other DNA
gtgatctgcatcgtatcgcggatgccctgcaggcggtgcagaaacgtaacttctggcagttacaggctgaaatca

SEQ ID NO: 123599 - DNA, 75 bp, synthetic construct
  source 1..75: mol_type = other DNA
tttcagacccgtatccgtgacgcgattatcaagcgccagtcgctcgatttcatcatggccggtttcaacggtatc

SEQ ID NO: 123600 - DNA, 75 bp, synthetic construct
  source 1..75: mol_type = other DNA
ttgaacgtaaactgtcttacaccggcgaagtgaaagcgcgtccggcgcgtatcactgagtccgagttcctgtggc

SEQ ID NO: 123601 - DNA, 75 bp, synthetic construct
  source 1..75: mol_type = other DNA
accaactttaacctggttgctctgggtgtgattggtactgttatggcagtgctctacatccaacttagcccgaaa

SEQ ID NO: 123602 - DNA, 75 bp, synthetic construct
  source 1..75: mol_type = other DNA
ttgattgatgatgctgtcgcctgggcgaaacagcagagcaacgatcgcgcgcagcagatcgtggacgcgactgac

SEQ ID NO: 123603 - DNA, 75 bp, synthetic construct
  source 1..75: mol_type = other DNA
cctgaatttccatctggcccgtaacccggaaatcgccttcctgtggaacatggccgacaactacagcaatctgct

SEQ ID NO: 123604 - DNA, 75 bp, synthetic construct
  source 1..75: mol_type = other DNA
gttctggacgccatgctggccgttatcatccgtgacgccagaaagattgggcagaaaaacggctccgctcgctga

SEQ ID NO: 123605 - DNA, 75 bp, synthetic construct
  source 1..75: mol_type = other DNA
atgaagaagaatacccgctttgcttttaacgcttacctgcagcaactggcgcgtctgaacggtgtggcagttgaa

SEQ ID NO: 123606 - DNA, 75 bp, synthetic construct
  source 1..75: mol_type = other DNA
gtgaactgcatcgtatcgcggatgccctgcaggcggttcagaaacgtaacttctggcagttacaggctgaaatca

SEQ ID NO: 123607 - DNA, 75 bp, synthetic construct
  source 1..75: mol_type = other DNA
gtgatctccatcgtatcgcggatgccctgcaggcggtccagaaacgtaacttctggcagttacaggctgaaatca

SEQ ID NO: 123608 - DNA, 75 bp, synthetic construct
  source 1..75: mol_type = other DNA
gcacgttatgctggtatgacttcggtgttcaatattgccaggatgtcaccgcagaaggcactgttgcaaatagtc

SEQ ID NO: 123609 - DNA, 75 bp, synthetic construct
  source 1..75: mol_type = other DNA
gtgatctacatcgtatcgcggatgccctgcaggcggtacagaaacgtaacttctggcagttacaggctgaaatca

SEQ ID NO: 123610 - DNA, 75 bp, synthetic construct
  source 1..75: mol_type = other DNA
tgttatctggagcatggcgctgctggggattctgttcaagctgaccatcgcgcaccgatttaaaatattatcgct

SEQ ID NO: 123611 - DNA, 75 bp, synthetic construct
  source 1..75: mol_type = other DNA
taagtcagagtttctggcaaacatgtcgcatgagctgcgtacaccgttgaatggcgttattggttttacccgcct

SEQ ID NO: 123612 - DNA, 75 bp, synthetic construct
  source 1..75: mol_type = other DNA
ggtgatattatgatcttacgcacaccaattatttccgagagttattcccccgacgaatcgcccagtagtgatgcc

SEQ ID NO: 123613 - DNA, 75 bp, synthetic construct
  source 1..75: mol_type = other DNA
aaaagcaccctcgcgcggctattggtaggtttagaatcgccctcacaagggaatatcaactggcgcggcgaaccg

SEQ ID NO: 123614 - DNA, 75 bp, synthetic construct
  source 1..75: mol_type = other DNA
cagttaagcggcggccagctccagcgcgtctgcctggcgcgcgcgctggcggtcgaaccgaaactgctgattctg

SEQ ID NO: 123615 - DNA, 75 bp, synthetic construct
  source 1..75: mol_type = other DNA
atgtctggaaatataggggcaaatccagcgccgttctcgtcgaaagatgctaaaggtgattttgttggctttgat

SEQ ID NO: 123616 - DNA, 75 bp, synthetic construct
  source 1..75: mol_type = other DNA
aatctggtatctctcccgacgttttggcagggaggatgatatcgaagtcatcaacttcatgaacggcggaaaatc

SEQ ID NO: 123617 - DNA, 75 bp, synthetic construct
  source 1..75: mol_type = other DNA
ccccgtaacattcgccagtgcctgtcactggcaatgttaatacgcccgctactcaaatcaggtgggtatgccatt

SEQ ID NO: 123618 - DNA, 75 bp, synthetic construct
  source 1..75: mol_type = other DNA
caaaaattatcaaatatgctttagataactattgtgcgacttattcttcaagcacaaataaagggcctcatcaat

SEQ ID NO: 123619 - DNA, 75 bp, synthetic construct
  source 1..75: mol_type = other DNA
gtgagctacatcgtatcgcggatgccctgcaggcggttcagaaacgtaacttctggcagttacaggctgaaatca

SEQ ID NO: 123620 - DNA, 75 bp, synthetic construct
  source 1..75: mol_type = other DNA
ccaatgaacttcctcacttccttaacgatctggcgggttataccggcagtatcatcacgaagacagccactcaga

SEQ ID NO: 123621 - DNA, 75 bp, synthetic construct
  source 1..75: mol_type = other DNA
gaggcaaaaaaacatccagcagatgccagattcacccccgtatcgatgggtaaacaactcattacagcctcgatg

SEQ ID NO: 123622 - DNA, 75 bp, synthetic construct
  source 1..75: mol_type = other DNA
gttaccggtaccccgactgaaatcacggaagcccgcaacacgttcctgatgctcaatgcggaaccagaaaacggc

SEQ ID NO: 123623 - DNA, 75 bp, synthetic construct
  source 1..75: mol_type = other DNA
acgaagttgttaaggctcataatttcatcgtctggaatatatccagtttagataaaaaagatatattatctatat

SEQ ID NO: 123624 - DNA, 75 bp, synthetic construct
  source 1..75: mol_type = other DNA
acgccggtgtattcactggccagaaacgcctttatccgggtcatcaaaacagaaggcgcacaacagtggctcagg

SEQ ID NO: 123625 - DNA, 75 bp, synthetic construct
  source 1..75: mol_type = other DNA
accacgccgccatgataacgatgaaggctcagagactggtgaaaccaccgaaacccggcatcccgccgacaagga

SEQ ID NO: 123626 - DNA, 75 bp, synthetic construct
  source 1..75: mol_type = other DNA
gactcgtgaaatgtcattagatgtactggaagatgttctggaaaagtttaaaattattcttatagaacgacgaga

SEQ ID NO: 123627 - DNA, 75 bp, synthetic construct
  source 1..75: mol_type = other DNA
gacaaccgatgcggaagccgctgtcagcgaagccctgcgcgacctggccttctggctgtaccgccagctggaaaa

SEQ ID NO: 123628 - DNA, 75 bp, synthetic construct
  source 1..75: mol_type = other DNA
gaaccattttgcatgttgacgggccgccgatccccgataccaggtgcaggcggcttgaattactgtgcagtgttg

SEQ ID NO: 123629 - DNA, 75 bp, synthetic construct
  source 1..75: mol_type = other DNA
gatcttgtcgctctggagagtgagttagaaccacatgacttggttccggaaataatggcttatgtattaagtaac

SEQ ID NO: 123630 - DNA, 75 bp, synthetic construct
  source 1..75: mol_type = other DNA
gagactgggagaaccattcatcattacgctgccagaatcagttagagtcgatgttgacatatatcctctcaaaaa

SEQ ID NO: 123631 - DNA, 75 bp, synthetic construct
  source 1..75: mol_type = other DNA
ctggatgactctgacatacagccccatatgtatggggcaattctgtggggtgagcaattctctaatttgccagaa

SEQ ID NO: 123632 - DNA, 75 bp, synthetic construct
  source 1..75: mol_type = other DNA
ttgatgctgctcacaaattacattcttactatccgtgggttgaaggatggaaggccgttcgttcaacgatatatt

SEQ ID NO: 123633 - DNA, 75 bp, synthetic construct
  source 1..75: mol_type = other DNA
atgtatcggatagttctggggaaagtttcgaccttaagcgcagttccactgccaccggctttacgcgatcaagca

SEQ ID NO: 123634 - DNA, 75 bp, synthetic construct
  source 1..75: mol_type = other DNA
ggagcagaaaccgctcaggctacggtcagagtctggatgagattccggcgagatgtaacagcaacttcatgtcta

SEQ ID NO: 123635 - DNA, 75 bp, synthetic construct
  source 1..75: mol_type = other DNA
tcgcctgttcgcgctggggatgagctaccaggatatcagccgggagatcgaagatttatatgccttcagtgtttc

SEQ ID NO: 123636 - DNA, 75 bp, synthetic construct
  source 1..75: mol_type = other DNA
gagccattctgggtatagaagggccaccaataccggatgcacgcgccacccggcttgaaatactctgcagcctga

SEQ ID NO: 123637 - DNA, 75 bp, synthetic construct
  source 1..75: mol_type = other DNA
taaatagaaaaataactccagcaaatactcccccaaagttgttatcatacagaaatgcagatttaatgcaagaaa

SEQ ID NO: 123638 - DNA, 75 bp, synthetic construct
  source 1..75: mol_type = other DNA
tggcgatgcagttgtctgaattgtacaaattgatctttcggcctgcgttcatcttgctacaggccgataaagagc

SEQ ID NO: 123639 - DNA, 75 bp, synthetic construct
  source 1..75: mol_type = other DNA
cagggagtttagtctccaggatttccggggcggttcagtccggccaagcattaaccggcaaggatggtatcctaa

SEQ ID NO: 123640 - DNA, 75 bp, synthetic construct
  source 1..75: mol_type = other DNA
ttatttttcaagaaatagtgatggaattattatcggtagatttttttcgagtgccattctaggtgcctattcatt

SEQ ID NO: 123641 - DNA, 75 bp, synthetic construct
  source 1..75: mol_type = other DNA
gaccttcgagactgggacatcgcctgatatcgcacaggttcaggtgcaaaataaactgcaactcgctatgccttc

SEQ ID NO: 123642 - DNA, 75 bp, synthetic construct
  source 1..75: mol_type = other DNA
gtgagcgtattgaaaaatataaccagcttatgagaattgaggatgaactgggttcatcggcgcaatttgccggaa

SEQ ID NO: 123643 - DNA, 75 bp, synthetic construct
  source 1..75: mol_type = other DNA
aaagtcgtcagcttaagcgatcagaaactcaatatcgccatgacctttgtcggctcgatgagcggcgcactgctg

SEQ ID NO: 123644 - DNA, 75 bp, synthetic construct
  source 1..75: mol_type = other DNA
acgcctaggagcaaatgctattttgggcgtatcattagccacagcgcgtctcgcagctcagttatctcatacgcc

SEQ ID NO: 123645 - DNA, 75 bp, synthetic construct
  source 1..75: mol_type = other DNA
gtgttggtgatgctgtttttggcgctgcacttgttgattccaggctgaatggttctgacaaggagggtcgcccat

SEQ ID NO: 123646 - DNA, 75 bp, synthetic construct
  source 1..75: mol_type = other DNA
ctggttgttcacttcgacgaacgcggcaacatcagattcaccgaaaccgttcctgatggcgcacgggtctgtacc

SEQ ID NO: 123647 - DNA, 75 bp, synthetic construct
  source 1..75: mol_type = other DNA
gagactgggagaaccattcattattacacttccagaaacagtcaggctggatgttaatatccacccactcaaaaa

SEQ ID NO: 123648 - DNA, 75 bp, synthetic construct
  source 1..75: mol_type = other DNA
cttcgcttgccagcaaagtatcagccgcagggaaagaagtaagtctcatcacgatcgagtacgacattagggatg

SEQ ID NO: 123649 - DNA, 75 bp, synthetic construct
  source 1..75: mol_type = other DNA
cgtggaaacccgaaagttactcgagcgcataaccgcgccgaagcggtttttttatgcgttaagcacagccacatt

SEQ ID NO: 123650 - DNA, 75 bp, synthetic construct
  source 1..75: mol_type = other DNA
gtcagcgtagacagcacctatcactcctcgctgtcagtcagccattgtcagctagaaaatttaagtctggcgatc

SEQ ID NO: 123651 - DNA, 75 bp, synthetic construct
  source 1..75: mol_type = other DNA
gggttgggctatcacagtttactaaagttatcttacagataatggcactaataatctttagtaggttattggatc

SEQ ID NO: 123652 - DNA, 75 bp, synthetic construct
  source 1..75: mol_type = other DNA
tttatgcgtaaagcgcagccacattcagattatggtggggcgtatggggccgttttcgggcgggccggattctct

SEQ ID NO: 123653 - DNA, 75 bp, synthetic construct
  source 1..75: mol_type = other DNA
cgttatcgtctcggcggtgatgagtgccaaattactttatgatagccatggacaggagatcctccactggttggg

SEQ ID NO: 123654 - DNA, 75 bp, synthetic construct
  source 1..75: mol_type = other DNA
accgtcagcgccggatgtacggtctgccttttgccttaattgctggtgggtgcgttggcttttatgacggtttct

SEQ ID NO: 123655 - DNA, 75 bp, synthetic construct
  source 1..75: mol_type = other DNA
cgcaattatacttttactgtgtttcttgattgttaaacactcaattaaatataattccgtaaccagtaagaaatt

SEQ ID NO: 123656 - DNA, 75 bp, synthetic construct
  source 1..75: mol_type = other DNA
aaactaatagctaagagaacgaatgataagagttacgtgtttcacggcaggttggaaggcaacatgaacgtggag

SEQ ID NO: 123657 - DNA, 75 bp, synthetic construct
  source 1..75: mol_type = other DNA
cgcgtgtgtatcaactgaagcgtgactttccgcatctgacaatgtcgattaacggtggcatcaagtcgctggaag

SEQ ID NO: 123658 - DNA, 75 bp, synthetic construct
  source 1..75: mol_type = other DNA
tcttcgtccgtctggacgacttgttcattgatggtctggtccatgtctcttcgctggacaatgactactatcgct

SEQ ID NO: 123659 - DNA, 75 bp, synthetic construct
  source 1..75: mol_type = other DNA
catgatgatggcagaaggtattgttattatgaaatatgaactgtggcatatccctcctgccctgctgggtctggc

SEQ ID NO: 123660 - DNA, 75 bp, synthetic construct
  source 1..75: mol_type = other DNA
tttgtggctcgctatcgccgcagtgttttctggtgcgggaatgattatattctactggttgctccatgcatcaga

SEQ ID NO: 123661 - DNA, 75 bp, synthetic construct
  source 1..75: mol_type = other DNA
accgtgttaaatttggtcaaggtttagcaagaggggcacttgacctacgggagtgttggcaacaactcgttgctt

SEQ ID NO: 123662 - DNA, 75 bp, synthetic construct
  source 1..75: mol_type = other DNA
ctttccgcatctgacgatgtcgattaacggtggcatcaagtcgctggaagaagctaaagcgcatttgcaacatat

SEQ ID NO: 123663 - DNA, 75 bp, synthetic construct
  source 1..75: mol_type = other DNA
aagttactgggaaaaggtccattcaccgaagaacaaccctatcttccctatctggtgacttgttttcagtctgat

SEQ ID NO: 123664 - DNA, 75 bp, synthetic construct
  source 1..75: mol_type = other DNA
gctggtcactcacggatgacgtgataccacgccgccatgataacgatgaaggctcagatactggtgaaaccaccg

SEQ ID NO: 123665 - DNA, 75 bp, synthetic construct
  source 1..75: mol_type = other DNA
tcatattatctaaaaaaccactgctaaaagcatcaggtaatcgtgttaatttgattaagcttactgattacacat

SEQ ID NO: 123666 - DNA, 75 bp, synthetic construct
  source 1..75: mol_type = other DNA
tactggggaacggacaggacggaccgtcagcttaatgctggctttaactcatctgtgaatgacatcagttggtcc

SEQ ID NO: 123667 - DNA, 75 bp, synthetic construct
  source 1..75: mol_type = other DNA
agttggcttcgctggaggcctggctggaagacatgagaaatacaggagtgttgcatgaccacaacgcaaaaaacg

SEQ ID NO: 123668 - DNA, 75 bp, synthetic construct
  source 1..75: mol_type = other DNA
tgttatattatcgaaaaagccactgttaaaagcatcaggcaatcgtgttaatttgattaagcttactgattacac

SEQ ID NO: 123669 - DNA, 75 bp, synthetic construct
  source 1..75: mol_type = other DNA
gcagctttacacgcggtttttcagatttcacacctgaaacccaagtacaagaagctgacggaaaagtaatgtggc

SEQ ID NO: 123670 - DNA, 75 bp, synthetic construct
  source 1..75: mol_type = other DNA
aaaacctgggttgatgcccaccagcgacgttatcacactggcgcaacactgtatgtatcacggtttaattggtga

SEQ ID NO: 123671 - DNA, 75 bp, synthetic construct
  source 1..75: mol_type = other DNA
cgtatgccaatggatacagacctccgcaatcgaattctggcgcgttgttatggtgagctggtgcaaacgtccatc

SEQ ID NO: 123672 - DNA, 75 bp, synthetic construct
  source 1..75: mol_type = other DNA
accgatccgtactgggcgcgctcgcgggtgctggagtacctcaaccaggtacagggtaagctgcctgcgggagtc

SEQ ID NO: 123673 - DNA, 75 bp, synthetic construct
  source 1..75: mol_type = other DNA
ctgcaatcaaaaggctgaaaatattcaggcatttaataacctcaagtcaatggttctaaccaacttggctaacca

SEQ ID NO: 123674 - DNA, 75 bp, synthetic construct
  source 1..75: mol_type = other DNA
actttattcattattcgataagatcgcttatttgataagtcgtttttttgaccttaacaacataaaagatgacaa

SEQ ID NO: 123675 - DNA, 75 bp, synthetic construct
  source 1..75: mol_type = other DNA
taagttcgctaatcttaggacataccttgactctaaagcttatcaattggggcaggatttcgcgtcatctcagca

SEQ ID NO: 123676 - DNA, 75 bp, synthetic construct
  source 1..75: mol_type = other DNA
atcagtggcggccaggcatgacgatggacaaaatcattgaggaactggataacaccgtgcgtctgccggggctgg

SEQ ID NO: 123677 - DNA, 75 bp, synthetic construct
  source 1..75: mol_type = other DNA
atgcgatggcgggggctgcgctgctggcgatcgtggtgatcccgatcctgatgggttactggatccgtggcaaaa

SEQ ID NO: 123678 - DNA, 75 bp, synthetic construct
  source 1..75: mol_type = other DNA
aatgtacgctgtgcgttgaccgcgtggtggttgggcaagaaccggcctgtgtgaaaacctgcccgacgggtgcga

SEQ ID NO: 123679 - DNA, 75 bp, synthetic construct
  source 1..75: mol_type = other DNA
cgtcaccttcccgtgcaccatggttgaccgcatcgttccggcggcgacgccagaaaccttgcaggaaattgctga

SEQ ID NO: 123680 - DNA, 75 bp, synthetic construct
  source 1..75: mol_type = other DNA
gggttgcgacaattcctgatgttgatccggaatattttcgcccgctgacggagaatgtggcgcaatataaagatt

SEQ ID NO: 123681 - DNA, 75 bp, synthetic construct
  source 1..75: mol_type = other DNA
ttatcgcgataaagacggggagaaaagttatgcgttcggtaaaaattgccggagtacgtttgacctacagcggga

SEQ ID NO: 123682 - DNA, 75 bp, synthetic construct
  source 1..75: mol_type = other DNA
gattgccgtcggggcgatggtcgatgccgctatcgtcatgatcgagaatgcgcataaacggctggaagagtggca

SEQ ID NO: 123683 - DNA, 75 bp, synthetic construct
  source 1..75: mol_type = other DNA
ttatcgcgataaagacggggagaaacgttatgcgttcggtaaaaactgccgaagtatatttgacctacagcggga

SEQ ID NO: 123684 - DNA, 75 bp, synthetic construct
  source 1..75: mol_type = other DNA
caggggatttggaaatacaggggagtgtattgaagttaaaactaatgaacctttgaataacgtgatggaaacact

SEQ ID NO: 123685 - DNA, 75 bp, synthetic construct
  source 1..75: mol_type = other DNA
agcgaaaaacgaaaaacagaatcaaagagcacaagctgccgcagcaagagcacaggcaaggcaacagcaacaaat

SEQ ID NO: 123686 - DNA, 75 bp, synthetic construct
  source 1..75: mol_type = other DNA
agataaagacagcttgaaaaaagcgaaagactctattacaggcttaaaggaattcgcagagaatatcaagccagc

SEQ ID NO: 123687 - DNA, 75 bp, synthetic construct
  source 1..75: mol_type = other DNA
cgggtactgtgtattgatctgcatgctcattatggtcagggctttgtctggaaccatattccgtggggagcagaa

SEQ ID NO: 123688 - DNA, 75 bp, synthetic construct
  source 1..75: mol_type = other DNA
gtgataaccctgctccagttggtgatccatcacaacaggaaggtgataagccacaacctgttgttgatgtcgata

SEQ ID NO: 123689 - DNA, 75 bp, synthetic construct
  source 1..75: mol_type = other DNA
aatggtgaagtacgcattattgatctttcaggaaaacgggcatctgcacaacgtaaagcgaaagatcgtattgat

SEQ ID NO: 123690 - DNA, 75 bp, synthetic construct
  source 1..75: mol_type = other DNA
aaagatctaggctattatcttttagtatatcgtaaaaaaatgcgcaattttatgcggcgtttgaaagggaaacca

SEQ ID NO: 123691 - DNA, 75 bp, synthetic construct
  source 1..75: mol_type = other DNA
agccaaaacagaaaaacagaatcaaagagcacaagctgccgcagcaagagcacaggcaaggcaacagcaacaaat

SEQ ID NO: 123692 - DNA, 75 bp, synthetic construct
  source 1..75: mol_type = other DNA
aagtagacaagattgctcaacagaaagctaaaaccgaaaaacagaatcaaagagcacaagctgccgcagcaagag

SEQ ID NO: 123693 - DNA, 75 bp, synthetic construct
  source 1..75: mol_type = other DNA
tttatcggcgtggggcgggcgctgagcgtgtttgtgcgcaaggcgggtatcaaactgattgccaataaaggcgca

SEQ ID NO: 123694 - DNA, 75 bp, synthetic construct
  source 1..75: mol_type = other DNA
ttaagggatggcttttcgatgataatgcttcttctgtgtcagatgtaaaaatgtcagtcagcgaagcaccgataa

SEQ ID NO: 123695 - DNA, 75 bp, synthetic construct
  source 1..75: mol_type = other DNA
atggagctggaagcgcttttccgccaccttggtcaatccgtgcggtactctgtcaacgatcccaaaggcatacag

SEQ ID NO: 123696 - DNA, 75 bp, synthetic construct
  source 1..75: mol_type = other DNA
tacaccacgcgattttgtcgaatttccttcgcaaatcaacgagcattgggcaatgcatccgcaggtattcgcgcg

SEQ ID NO: 123697 - DNA, 75 bp, synthetic construct
  source 1..75: mol_type = other DNA
gcgaccttattatccatgcgcggtattgtcgccgtattcctgcattaacagagaccgcagcccgacagggagact

SEQ ID NO: 123698 - DNA, 75 bp, synthetic construct
  source 1..75: mol_type = other DNA
acgcaggcttgaatatcgactatgttcagcaggatgtccgcgcatactggccggataaatcattcgatttcatta

SEQ ID NO: 123699 - DNA, 75 bp, synthetic construct
  source 1..75: mol_type = other DNA
gatcttatcagaagcggggcgtttctggtggcgatgtctctgtggcataaccatccgcagaagacaaaactgccg

SEQ ID NO: 123700 - DNA, 75 bp, synthetic construct
  source 1..75: mol_type = other DNA
aattgccaccgaggtaaaaggttaccttgccgatgatggcattattgatagcgcacaggacagtattaacgccac

SEQ ID NO: 123701 - DNA, 75 bp, synthetic construct
  source 1..75: mol_type = other DNA
aatgaatgccgatgatgtggtatttaccttccagcggatttttgatcgcaataacccgtggcataacgtcaacgg

SEQ ID NO: 123702 - DNA, 75 bp, synthetic construct
  source 1..75: mol_type = other DNA
atgtgtcgtttttcgtgcagtttatcgacgttaatgcgccgcataccgggatttcattctttatcctggcgacga

SEQ ID NO: 123703 - DNA, 75 bp, synthetic construct
  source 1..75: mol_type = other DNA
cggttatcttgcggcctgcggtgtatttattggcgatgcagtattgatgtttctggcatgggctggagtggcgac

SEQ ID NO: 123704 - DNA, 75 bp, synthetic construct
  source 1..75: mol_type = other DNA
agccaactgtctattttgcgcgacgacccgcgtttgcgtttaacgctgcgtccggggatgaacgttgcctatctg

SEQ ID NO: 123705 - DNA, 75 bp, synthetic construct
  source 1..75: mol_type = other DNA
gtgagtttatttgattctttaattaactaccgtctttgcaatgagcagccagtcgatggtggagcagctccggct

SEQ ID NO: 123706 - DNA, 75 bp, synthetic construct
  source 1..75: mol_type = other DNA
accgttcaatatcttccagtgagtggcgtttatgcccaaacattaacattcgatatatacaaatatgacgtgtaa

SEQ ID NO: 123707 - DNA, 75 bp, synthetic construct
  source 1..75: mol_type = other DNA
cctgaagatcttccccatattccggttactggcgcaacaggcaacatcaaagccatgctaaaggaacacgagaaa

SEQ ID NO: 123708 - DNA, 75 bp, synthetic construct
  source 1..75: mol_type = other DNA
ggcaacgttccggttgtcaaagggagccagccggatacgtcgaacccctcgatgccgattcagttttgtccgatg

SEQ ID NO: 123709 - DNA, 75 bp, synthetic construct
  source 1..75: mol_type = other DNA
acttatcgtctgatgccggagcttgccgaaagctgggaagtgctcgacaacggcgcaacctatcgcttccactta

SEQ ID NO: 123710 - DNA, 75 bp, synthetic construct
  source 1..75: mol_type = other DNA
aaagcaaacttccacaacttggcaccactattttcacccggatgagcgcgctggcgcagcaacaccaggcgatta

SEQ ID NO: 123711 - DNA, 75 bp, synthetic construct
  source 1..75: mol_type = other DNA
tggggcatgaagctgagggtgaggtgagcatcaatgtggcagagaacaagttgcccgtgtgtagcctgaaatcac

SEQ ID NO: 123712 - DNA, 75 bp, synthetic construct
  source 1..75: mol_type = other DNA
tgagcgtgtttgtgcgtaaagcgggcatcaaactgtttgccaacaagggggcgatctcggtacaggcacagaacg

SEQ ID NO: 123713 - DNA, 75 bp, synthetic construct
  source 1..75: mol_type = other DNA
agcacaggctgataaagctaatgctaaagcacaattagccgctcaacgtgtagttgcaagagaacaaaaagccct

SEQ ID NO: 123714 - DNA, 75 bp, synthetic construct
  source 1..75: mol_type = other DNA
tatgccagaatttcccatcctttcagccgtggactcatccgatttttgtcttgaatgcctgctgaatgccatcaa

SEQ ID NO: 123715 - DNA, 75 bp, synthetic construct
  source 1..75: mol_type = other DNA
ggttttattacaatgaagatttcgtagaaaaggatagcaatgatgttgtttgcgaaatttttatccccgttcgcc

SEQ ID NO: 123716 - DNA, 75 bp, synthetic construct
  source 1..75: mol_type = other DNA
tcaagcacattggggccagggttatctgggtttgttgcctataaggctggaatgacggttaaaaccaacccgatc

SEQ ID NO: 123717 - DNA, 75 bp, synthetic construct
  source 1..75: mol_type = other DNA
gagaaatcgttcaagatcgaccagtccaagccctacgccattgacctgcaatactctggctcgaataaatacgag

SEQ ID NO: 123718 - DNA, 75 bp, synthetic construct
  source 1..75: mol_type = other DNA
tctgtccgggatgagcggggctgttcatgcggatactgatagcaccgaagtggcgaaaaataacgcgctgactga

SEQ ID NO: 123719 - DNA, 75 bp, synthetic construct
  source 1..75: mol_type = other DNA
gtattgcaatggcgttaccttggtggatggctaactatcgaactcgacatataaaagggttgaaaataaatgttt

SEQ ID NO: 123720 - DNA, 75 bp, synthetic construct
  source 1..75: mol_type = other DNA
tcgatcaagttttagaacttttccaaattaaaccggactacgatttaaatgtaatgaagccgggacaaacacttg

SEQ ID NO: 123721 - DNA, 75 bp, synthetic construct
  source 1..75: mol_type = other DNA
acatttgatgcaaaaaaaatattttctatgctattaacgatagcagaaacaataataaagaaggagatgccagtc

SEQ ID NO: 123722 - DNA, 75 bp, synthetic construct
  source 1..75: mol_type = other DNA
ggttttccggtgaggaggccgcatcgcttgccgtgggcatgcgtgccggctccctgctgacggcgctggacagcc

SEQ ID NO: 123723 - DNA, 75 bp, synthetic construct
  source 1..75: mol_type = other DNA
tcttcactactacacaaaccggatatatcgcacctgcaggagaacaacgatataacatatgcattcctggtaatt

SEQ ID NO: 123724 - DNA, 75 bp, synthetic construct
  source 1..75: mol_type = other DNA
gtttttaatgctgggcgctattgaatattttttattgcgctttatctggcgacgctggttctcgctggcggatta

SEQ ID NO: 123725 - DNA, 75 bp, synthetic construct
  source 1..75: mol_type = other DNA
ttaatactattaagggcttgtttgttaatggtgatgattctccttctggtggacaagctgcaatgcaatacgata

SEQ ID NO: 123726 - DNA, 75 bp, synthetic construct
  source 1..75: mol_type = other DNA
agggtgctctaccggatacccaaaacaaactcctatccttcttcaccttacggtgctcaaagcggtaactggtgt

SEQ ID NO: 123727 - DNA, 75 bp, synthetic construct
  source 1..75: mol_type = other DNA
gaaaaacaacgcagcacagcaagctattaagactccttcttacacctttgcacctgttcttaacttcaatccaga

SEQ ID NO: 123728 - DNA, 75 bp, synthetic construct
  source 1..75: mol_type = other DNA
cggctgttatgctgggtggcttaggcgctggcgctgcatatatggctatgagcaaagcctctgaatttgttacta

SEQ ID NO: 123729 - DNA, 75 bp, synthetic construct
  source 1..75: mol_type = other DNA
cgctcactgattatgcggaagcatcgaacggtgaagctcagttctcagtagacctgtctggtgtggatacttcct

SEQ ID NO: 123730 - DNA, 75 bp, synthetic construct
  source 1..75: mol_type = other DNA
aaggcgggtatcaaactgattgccaataaaggcgcagtatcggtacaggcgcagcacgatctgatggagttactg

SEQ ID NO: 123731 - DNA, 75 bp, synthetic construct
  source 1..75: mol_type = other DNA
atgttagaactaaacgtggcacgcctctcgaacgttgtcaccttcgaagttaaccgaccatcattagagaaagca

SEQ ID NO: 123732 - DNA, 75 bp, synthetic construct
  source 1..75: mol_type = other DNA
ctcgacgatgagcgcggcaaagagcatatcaaggtcagtaccgagtacggcggcaagagccagctaaacctcggc

SEQ ID NO: 123733 - DNA, 75 bp, synthetic construct
  source 1..75: mol_type = other DNA
cggcaagagccagctaaacctcggccatctggtggatgccggaaaacagcagcgcggggaaggttttgaactgcg

SEQ ID NO: 123734 - DNA, 75 bp, synthetic construct
  source 1..75: mol_type = other DNA
atgatcaatttcaagcctaaacttccggcgttgcttggcgctctggcggttcttaccgctggtgctgctcatgca

SEQ ID NO: 123735 - DNA, 75 bp, synthetic construct
  source 1..75: mol_type = other DNA
tgcgggcaaagaaaggcatctttatcagcgccgatgcgcaggataaggcgcagggtcaggtcagagagatggccg

SEQ ID NO: 123736 - DNA, 75 bp, synthetic construct
  source 1..75: mol_type = other DNA
ggatattgccatatcgcgcaactcggatgttcttgagtctgagaccttcactccgggatggggtgccaccaataa

SEQ ID NO: 123737 - DNA, 75 bp, synthetic construct
  source 1..75: mol_type = other DNA
ggatagcatcacgctttcgagcgatgaagaaacccgataccgcctgtgggctcgtgtgcgctctgccactgcacc

SEQ ID NO: 123738 - DNA, 75 bp, synthetic construct
  source 1..75: mol_type = other DNA
ggccgagcttcggaatgcaggtcaggaagaacgctgacgtggctcctgcgacgatcaccgcgtcagtgcggccaa

SEQ ID NO: 123739 - DNA, 75 bp, synthetic construct
  source 1..75: mol_type = other DNA
atgaaagtggtgctcatagtgattttgacagtattcgcactgtaataagaccggcctggatctggaatacatgga

SEQ ID NO: 123740 - DNA, 75 bp, synthetic construct
  source 1..75: mol_type = other DNA
gtgttcgcagaatatggggttctgaattactggacctatctggttggggccatttttatcgtgctggtgccaggg

SEQ ID NO: 123741 - DNA, 75 bp, synthetic construct
  source 1..75: mol_type = other DNA
cagacgctcgtgttgtgggcgctgccagtggtgttgttactgctgatggccttgatcctctggcgggtaagggcg

SEQ ID NO: 123742 - DNA, 75 bp, synthetic construct
  source 1..75: mol_type = other DNA
gtgcttttgccgcacaggcacctttgtcatctgccgacctctattttaatccgcgctttttagcggatgatcccc

SEQ ID NO: 123743 - DNA, 75 bp, synthetic construct
  source 1..75: mol_type = other DNA
tgatgtcacttttaatgccggcgatagcgaacaaggcattgttccttgtctgacgcgtgcgcaactggccagtat

SEQ ID NO: 123744 - DNA, 75 bp, synthetic construct
  source 1..75: mol_type = other DNA
tgctgttatttacctgttttgcgcgcgctcaggttgtagacacctggcaattcgctaatccgcaacaacaggaac

SEQ ID NO: 123745 - DNA, 75 bp, synthetic construct
  source 1..75: mol_type = other DNA
ttgcagaatgaggctgttcatgtgaccagctgctacgaaacacttgcggtgtacatttgtctgataaggaaaaat

SEQ ID NO: 123746 - DNA, 75 bp, synthetic construct
  source 1..75: mol_type = other DNA
aattaaaaatcgtcaaggggaaaactacccaacaagaaattcttgctgcctttggagagcctcagacacgcgcta

SEQ ID NO: 123747 - DNA, 75 bp, synthetic construct
  source 1..75: mol_type = other DNA
gtagaaaaaaataaaaccgtaaacaatgtcactgcgggtaaattttctgcaccagccacattcacagtaacctat

SEQ ID NO: 123748 - DNA, 75 bp, synthetic construct
  source 1..75: mol_type = other DNA
ctctggttctggccttctccagcgcaactgcggcatttgctgcgattccgcaaaacatccgcatcggtaccgatc

SEQ ID NO: 123749 - DNA, 75 bp, synthetic construct
  source 1..75: mol_type = other DNA
acgctcagctatagcctgacgaaaaacgcctggcaaaaaggacgagatcagatgttagcgcttaacgtcaatatt

SEQ ID NO: 123750 - DNA, 75 bp, synthetic construct
  source 1..75: mol_type = other DNA
ggcttgcttcagcgatagccatgttaggctgcattcacacgtcggcggcggcggatcagctgcgtttcggtatcg

SEQ ID NO: 123751 - DNA, 75 bp, synthetic construct
  source 1..75: mol_type = other DNA
cagacgctggtattgtgggctctgccagtggtgttgttactgctgatggcactgatcctctggcgagtgagggcg

SEQ ID NO: 123752 - DNA, 75 bp, synthetic construct
  source 1..75: mol_type = other DNA
cggaggtctgcagcaccgcattattcacaattatctggatgatgttctgcttcagggcagcagccgtaaactcac

SEQ ID NO: 123753 - DNA, 75 bp, synthetic construct
  source 1..75: mol_type = other DNA
agttcaggtgaaatggggagaagaggaaaagctcactgtatcgccaattatcaactgccaccagagagtcagcag

SEQ ID NO: 123754 - DNA, 75 bp, synthetic construct
  source 1..75: mol_type = other DNA
aatactgcgttcgaagatatcaactggacgctcagctatagcctgacgaaaaacgcctggcaaaaaggacgggat

SEQ ID NO: 123755 - DNA, 75 bp, synthetic construct
  source 1..75: mol_type = other DNA
catctggcgcaggcgcaaaccctgaccacgcgcaccaccagagccgatacgaaaacggcgatcgccaccagcgac

SEQ ID NO: 123756 - DNA, 75 bp, synthetic construct
  source 1..75: mol_type = other DNA
ggcgaaggcatcctgacgacaatctacggtattctggtgtttttaccgtggtgggcagttcagttccgccgcctg

SEQ ID NO: 123757 - DNA, 75 bp, synthetic construct
  source 1..75: mol_type = other DNA
gcgatgagcagccacgacgcgctgatggtggcgagcggcatcaccaccgtactggatgccgtggcaattggcgac

SEQ ID NO: 123758 - DNA, 75 bp, synthetic construct
  source 1..75: mol_type = other DNA
ttgccagaagtttatttttgtcagttatcgtcattgctatatttcttatcggttggggtattggtgttgtattct

SEQ ID NO: 123759 - DNA, 75 bp, synthetic construct
  source 1..75: mol_type = other DNA
ttttggcttttttcatttctgacaggatattacaaaccgcagtttaagaaagaatatgaaatgattaattataat

SEQ ID NO: 123760 - DNA, 75 bp, synthetic construct
  source 1..75: mol_type = other DNA
atgagtcgcagaagaaggttgctatgcaggctgatattgagcagcttacgaagatttctcagaaatacgcaaagg

SEQ ID NO: 123761 - DNA, 75 bp, synthetic construct
  source 1..75: mol_type = other DNA
aatatgaatcacagaagaagattgctatgcaggctgatattgagcagcttactaagatttctcagaaatacagca

SEQ ID NO: 123762 - DNA, 75 bp, synthetic construct
  source 1..75: mol_type = other DNA
cttgctcgttatgataattgtctggttttgtctacttctttcaatgcaggtagtaaaaaggtttgtcatttatca

SEQ ID NO: 123763 - DNA, 75 bp, synthetic construct
  source 1..75: mol_type = other DNA
ttcaggtaaagccgaaattcaccgactattacaacctcgcttataacaaacgtgggaaattacaattcagtgtga

SEQ ID NO: 123764 - DNA, 75 bp, synthetic construct
  source 1..75: mol_type = other DNA
aacacaatttagttgtgtgacaccagcatctcaagaggtaacaatctccactgcagccaacgaggtggtttatta

SEQ ID NO: 123765 - DNA, 75 bp, synthetic construct
  source 1..75: mol_type = other DNA
atgaattcttatctagttcattccacactaaaatctgaattccttcgcagctattgtctgcgcacttttggggtt

SEQ ID NO: 123766 - DNA, 75 bp, synthetic construct
  source 1..75: mol_type = other DNA
cctgcgtgccattaacctcaatgattaatgacgctactgcgcatttagatgttggccagcagcggctcaacatca

SEQ ID NO: 123767 - DNA, 75 bp, synthetic construct
  source 1..75: mol_type = other DNA
gtcaaccgcgccgagcaccgtctgcatctgcgctgcgaactgccgcatcacaccacgctgccgctgtttgaaaaa

SEQ ID NO: 123768 - DNA, 75 bp, synthetic construct
  source 1..75: mol_type = other DNA
tgctgggtgaagagatgaaagtcattgccagcgaactgggcgaagaacgtttctcccaggggcgttttgacgatg

SEQ ID NO: 123769 - DNA, 75 bp, synthetic construct
  source 1..75: mol_type = other DNA
ggcaaaccggtgaccaaagccttgttccgccagatgctgggtgaagagatgaaagtcattgccagcgaactgggc

SEQ ID NO: 123770 - DNA, 75 bp, synthetic construct
  source 1..75: mol_type = other DNA
tgggacgtattctgaagatgctggaagatcagaacctgatctctgcacacggaaaaaccatcgtcgtttacggca

SEQ ID NO: 123771 - DNA, 75 bp, synthetic construct
  source 1..75: mol_type = other DNA
gtcagaaccggcgcgtttctggtggcgatgtccctgtggcataaccatccgcagaaaacggcatcaccgtcaatg

SEQ ID NO: 123772 - DNA, 75 bp, synthetic construct
  source 1..75: mol_type = other DNA
tgtcgggtacggtctgggctgtatttcattatgtggtggcgttttttaatcctgatgaaaatacgctggttaatg

SEQ ID NO: 123773 - DNA, 75 bp, synthetic construct
  source 1..75: mol_type = other DNA
atgagcaattccaggctggattaaatactgcgttcgaagatatcaactggacgctcagctatagcctgacgaaaa

SEQ ID NO: 123774 - DNA, 75 bp, synthetic construct
  source 1..75: mol_type = other DNA
gaccgtatcgaaaagacgttcagaatgcgaaaacttaaacaacttgggctttcacgtagttattgtgttgatgtt

SEQ ID NO: 123775 - DNA, 75 bp, synthetic construct
  source 1..75: mol_type = other DNA
cgttcgtgatgctgaaaaccgcctccgcatggcgtctgccagcggttttacggggtataacatcatggcagaagg

SEQ ID NO: 123776 - DNA, 75 bp, synthetic construct
  source 1..75: mol_type = other DNA
acaagggattgttccctgcctgacacgcgcgcaacttgccagtatggggctgaatacggcttctgtctccggtat

SEQ ID NO: 123777 - DNA, 75 bp, synthetic construct
  source 1..75: mol_type = other DNA
aaacgtcagggaatggctgaaccgagctggcaacgctgtccggacgggctgtttctgggcgtccctcatctgctt

SEQ ID NO: 123778 - DNA, 75 bp, synthetic construct
  source 1..75: mol_type = other DNA
agcgtgacccgttgggaagcgggcaagaatatgcccaatgaccggcgtaacttcgggtatctcttctggcgcaag

SEQ ID NO: 123779 - DNA, 75 bp, synthetic construct
  source 1..75: mol_type = other DNA
tggcttgccgagcaggggctggtgcgtaagcgcacgctcgttaacggttatttcatcgctgaactgaccggccgg

SEQ ID NO: 123780 - DNA, 75 bp, synthetic construct
  source 1..75: mol_type = other DNA
gatagtctttcacaacgtgaccgccaggcctttgctgcggagctggagaagtggtggctggaagtgcaacgtagt

SEQ ID NO: 123781 - DNA, 75 bp, synthetic construct
  source 1..75: mol_type = other DNA
cctcttccgaagccgctcgccgcaaatctattgagaaagaacttgagtgggttcgccagaatccaaaaggccgtc

SEQ ID NO: 123782 - DNA, 75 bp, synthetic construct
  source 1..75: mol_type = other DNA
taatatgtagggggaaaatgtctaatgattgtcaagttaaaataaagaaaattgatgatgatactttgatcgcaa

SEQ ID NO: 123783 - DNA, 75 bp, synthetic construct
  source 1..75: mol_type = other DNA
gatagtctttcgcaacgtgaccgccagttatttgccgctgagctggaaaagtggtggctggaagtacaacgtagt

SEQ ID NO: 123784 - DNA, 75 bp, synthetic construct
  source 1..75: mol_type = other DNA
gcaccacgcaccagaaatatattcaggatcagcacccggaagtgaaaactgtctcctatgacagttatcagaatg

SEQ ID NO: 123785 - DNA, 75 bp, synthetic construct
  source 1..75: mol_type = other DNA
ccctattcgtcagtcccgcttttgcaacgtgaagggcatactcgttattccattacggcaggagaataccgtagt

SEQ ID NO: 123786 - DNA, 75 bp, synthetic construct
  source 1..75: mol_type = other DNA
gtgagtgtatatctcattgataaacgccgacgtgggcaacaaataccacctgtaggaattccgaatcacacatgg

SEQ ID NO: 123787 - DNA, 75 bp, synthetic construct
  source 1..75: mol_type = other DNA
tttatttccggaaagacacagcctgtagcgaatccgcacatcgcgcgatggtctgacaatatccgcaactggctg

SEQ ID NO: 123788 - DNA, 75 bp, synthetic construct
  source 1..75: mol_type = other DNA
cggccttccggctggctggacaatatatggtggaacgcaactggcggatcgttatcgtgcttttaatttcggtat

SEQ ID NO: 123789 - DNA, 75 bp, synthetic construct
  source 1..75: mol_type = other DNA
tgctgctgttcgcctgttttgcgcgcgctcaggtcgtagacacctggcaattcgccagtccgcaacaacaggaac

SEQ ID NO: 123790 - DNA, 75 bp, synthetic construct
  source 1..75: mol_type = other DNA
tgttgatatttgcctgttttgcacacgcccaggtcgtagacacctggcaattcgccaatctgcaacaacaggaac

SEQ ID NO: 123791 - DNA, 75 bp, synthetic construct
  source 1..75: mol_type = other DNA
gtgagtgtatgtcttattgataaacgtcgacgtgggcaacaaatatcatctgttggaatgccgaatcacacatgg

SEQ ID NO: 123792 - DNA, 75 bp, synthetic construct
  source 1..75: mol_type = other DNA
tggcgatgactggggtggttatccccagttttgtagttgcgccattattagtgatgatatttgcgatcattttgc

SEQ ID NO: 123793 - DNA, 75 bp, synthetic construct
  source 1..75: mol_type = other DNA
cgcattaaaacctgctctgttacccgtgctctcctatatgggccccgcatttgtcggcattattaccggttctat

SEQ ID NO: 123794 - DNA, 75 bp, synthetic construct
  source 1..75: mol_type = other DNA
gtgattgatgcgattggtgaagggccgattgaaggtccggtgaaggggctgcagagtattctggtgaacaaaacc

SEQ ID NO: 123795 - DNA, 75 bp, synthetic construct
  source 1..75: mol_type = other DNA
tggcaatgaccggggttgttatccccagttttgtggttgcaccattattagtcatgatatttgcgatcattttgc

SEQ ID NO: 123796 - DNA, 75 bp, synthetic construct
  source 1..75: mol_type = other DNA
tcgtacagcgcgatggcaaagttgtcggcgtagaagctgatggcgatgtgattgaagcgaaaacggtgatccttg

SEQ ID NO: 123797 - DNA, 75 bp, synthetic construct
  source 1..75: mol_type = other DNA
gacgctgcggggttgtgtttgaatattggttacactgttcgtggaatggatctggctatcgcgtctggtgaagct

SEQ ID NO: 123798 - DNA, 75 bp, synthetic construct
  source 1..75: mol_type = other DNA
ttaagcctgaccattctggttggggcgttgaccattctgttcaatgccattgtcgatgtactgtatgcggttatc

SEQ ID NO: 123799 - DNA, 75 bp, synthetic construct
  source 1..75: mol_type = other DNA
cgaaattccctctgcccgattaccgatgagcgatgtgcgtttttattcccgcagcagcattcgcttcgcacgctg

SEQ ID NO: 123800 - DNA, 75 bp, synthetic construct
  source 1..75: mol_type = other DNA
atgaagttgagctataagctggttatcgctgttttcttcgttactgtcattggttctttcatctggtcggtcaac

SEQ ID NO: 123801 - DNA, 75 bp, synthetic construct
  source 1..75: mol_type = other DNA
acaaattgggtgaagacaaaggtatcggtgaagttgtcggcgttggccgtcagtggactggtctgaataccgagc

SEQ ID NO: 123802 - DNA, 75 bp, synthetic construct
  source 1..75: mol_type = other DNA
caagaagaacgtcaggctaaactggaagccttccgccagaaactgttagaagacggtatcgatcctacagaacta

SEQ ID NO: 123803 - DNA, 75 bp, synthetic construct
  source 1..75: mol_type = other DNA
tggacgtggcttgacgcaacgtatcgtagcaatgtttgtaacggtaatcggatgcccggtatctctcgcaatatg

SEQ ID NO: 123804 - DNA, 75 bp, synthetic construct
  source 1..75: mol_type = other DNA
caggtacttactgacgaagaaaaacagttacttaccgcgcagcagcaagaacaacaatcgctaaactggttaacg

SEQ ID NO: 123805 - DNA, 75 bp, synthetic construct
  source 1..75: mol_type = other DNA
gatgaaaacggtaatgaacagacttggacgggtcagggccgtactcctaaagtgatcgctgttgctattgaagca

SEQ ID NO: 123806 - DNA, 75 bp, synthetic construct
  source 1..75: mol_type = other DNA
gtttgcatcagcgagtttaactcaatagatttagataaaagcagaaaaggaattgtaaacacattaataaaggca

SEQ ID NO: 123807 - DNA, 75 bp, synthetic construct
  source 1..75: mol_type = other DNA
gaatgatgactgcgctcatcggcctgtgcctcctgcaactgctcaccggctgcggcaattcgcggacagtttacg

SEQ ID NO: 123808 - DNA, 75 bp, synthetic construct
  source 1..75: mol_type = other DNA
ttgagataacaggtgggaattactttatctacatcaaacgcctttccgccaacgatactggtgccactggtggtc

SEQ ID NO: 123809 - DNA, 75 bp, synthetic construct
  source 1..75: mol_type = other DNA
aggaagatgaagaagggagctggttgtcggcgcgccagcaagaagcccatagctggcaactacgccagaacgaat

SEQ ID NO: 123810 - DNA, 75 bp, synthetic construct
  source 1..75: mol_type = other DNA
gcgcgtaaccaacccgacggtaatttgcaggtgccacgcgttgagctggcgcgctgcgccgacggcaaaattctc

SEQ ID NO: 123811 - DNA, 75 bp, synthetic construct
  source 1..75: mol_type = other DNA
tcgctgcttttctcgttactgtcatcggttctttcatctggtctgccaaccactactacagcaaatatcagcacg

SEQ ID NO: 123812 - DNA, 75 bp, synthetic construct
  source 1..75: mol_type = other DNA
cggttctttcatctggtctgccaaccactactacagcaaatatcagtacgaaaagaaacgtgctgatgaggctgt

SEQ ID NO: 123813 - DNA, 75 bp, synthetic construct
  source 1..75: mol_type = other DNA
ggatccagatgctggcaggtctggcgctgttgagtaccattggcggcagtttgtatcaggcgctgcataatgagc

SEQ ID NO: 123814 - DNA, 75 bp, synthetic construct
  source 1..75: mol_type = other DNA
tttttataccagcctgatgccaattctgctgctgaaggaaatcgcacaggcattacgccgcacgccagcgccgat

SEQ ID NO: 123815 - DNA, 75 bp, synthetic construct
  source 1..75: mol_type = other DNA
ctgtttgttttatggaaggacaacaccacgccggggaaattactggttaaggagattaacttcgtaagacaaaca

SEQ ID NO: 123816 - DNA, 75 bp, synthetic construct
  source 1..75: mol_type = other DNA
ctgaaggacgtttatacggaagacgcttccctgccgggaaaaatcaggaaatgccatgtttatttccctgatgac

SEQ ID NO: 123817 - DNA, 75 bp, synthetic construct
  source 1..75: mol_type = other DNA
acagcgaagaaacagtggcactggaaaactggcggcaaattcatgaacaatgtctcgcgttacaaagccagcagc

SEQ ID NO: 123818 - DNA, 75 bp, synthetic construct
  source 1..75: mol_type = other DNA
ggacatgctctgctgccaggtctgttgttgcctgtgttctgcgtgggctgtcctggtgtctgatgtacactatta

SEQ ID NO: 123819 - DNA, 75 bp, synthetic construct
  source 1..75: mol_type = other DNA
ctgaccggtcactgatgcaactggtcaccgcattatgggcaacactggcactgatgtatgtctcgctggcagcga

SEQ ID NO: 123820 - DNA, 75 bp, synthetic construct
  source 1..75: mol_type = other DNA
cgttagccgaagaagaaaaagcgcaacctcaactggcggcgctcagtctggcacaaccggcacgaaatcttcgtc

SEQ ID NO: 123821 - DNA, 75 bp, synthetic construct
  source 1..75: mol_type = other DNA
cggtattcatgacagacggtagggaaaaggttatcgccctgtatgacgacgagggggaagcattggttgacgcgc

SEQ ID NO: 123822 - DNA, 75 bp, synthetic construct
  source 1..75: mol_type = other DNA
gcaaaatgatctcatgacccgcgataccgccgaatgtctggcggaagtggagtttgaagtgaaaggtgaagcgta

SEQ ID NO: 123823 - DNA, 75 bp, synthetic construct
  source 1..75: mol_type = other DNA
aggtatttctgacagacggaagggaaatgactgttgccctgtataaagatgaaggcgatgcacttactgacgcgc

SEQ ID NO: 123824 - DNA, 75 bp, synthetic construct
  source 1..75: mol_type = other DNA
acgctggcacttatgtatatgtcgtttgcggcaggcaccgggaaatatccgatgatgtggcccggaaaaatgaaa

SEQ ID NO: 123825 - DNA, 75 bp, synthetic construct
  source 1..75: mol_type = other DNA
agcatcagcaacaccagcctgacgggttggatctcactttgacagcggaacagattcagcaagagttagcacaaa

SEQ ID NO: 123826 - DNA, 75 bp, synthetic construct
  source 1..75: mol_type = other DNA
agcgatgaaagagcgtattccggtgcagatcaaagtgaagaagatcaacggcctgggctacagcaaactggaaag

SEQ ID NO: 123827 - DNA, 75 bp, synthetic construct
  source 1..75: mol_type = other DNA
tggttacaggaacacgaccgcttccgtctgtggaacaacgagctggcgggttggcgtgcgcagttctcccaacag

SEQ ID NO: 123828 - DNA, 75 bp, synthetic construct
  source 1..75: mol_type = other DNA
gtaaatagcaatcagtatcggtattgtgcaaaacataaatttaaacaaaagcattatatggcaggcatttttaat

SEQ ID NO: 123829 - DNA, 75 bp, synthetic construct
  source 1..75: mol_type = other DNA
ttacttcgtctacatcaaacgcctttccgccaacgataccggcgcaacaggtggtcaccaggtaggactttatat

SEQ ID NO: 123830 - DNA, 75 bp, synthetic construct
  source 1..75: mol_type = other DNA
ttttctttcacaccaaagaagaaagtagttagtgaaaataagaagcaaaggattaagcctaaaatgtactatgca

SEQ ID NO: 123831 - DNA, 75 bp, synthetic construct
  source 1..75: mol_type = other DNA
ttgccgcgtgccgaggttctggccgcgcgaatttttcccgctgttctacgcggtgcaccttgccgtcatcggact

SEQ ID NO: 123832 - DNA, 75 bp, synthetic construct
  source 1..75: mol_type = other DNA
atgaaaaaagaaactaatgcttttattatggtagataaacgagttgcacaattccctaaaacattaaagccaatt

SEQ ID NO: 123833 - DNA, 75 bp, synthetic construct
  source 1..75: mol_type = other DNA
gtgatattaaagaagatgactttctttctttggatgaattaaatgattttctctctatgaatgaatctgaccttg

SEQ ID NO: 123834 - DNA, 75 bp, synthetic construct
  source 1..75: mol_type = other DNA
atgaggccgataaaattcatcaggtgcacctgtttacactccaggagggagtatctcagactcagtatcgcgaga

SEQ ID NO: 123835 - DNA, 75 bp, synthetic construct
  source 1..75: mol_type = other DNA
tattttactggcaatggccagcccgcaggcggggatggcggcgctgaccggtacgctggcgggaacgcgccaggg

SEQ ID NO: 123836 - DNA, 75 bp, synthetic construct
  source 1..75: mol_type = other DNA
gctggctctaaccattgagcactcgacatctcactggttgatacactacagaaatgcagggaggccagcagcagt

SEQ ID NO: 123837 - DNA, 75 bp, synthetic construct
  source 1..75: mol_type = other DNA
aatcgcctgaaaaatgcccgtgatttgcgcaccaatccggtgttgcagctcaacctggcgaacgcttatctacaa

SEQ ID NO: 123838 - DNA, 75 bp, synthetic construct
  source 1..75: mol_type = other DNA
tgaatatcacggggctgaccgcggtcacggatgccgtgacggacggctatatacgccggggatatatcaccagcc

SEQ ID NO: 123839 - DNA, 75 bp, synthetic construct
  source 1..75: mol_type = other DNA
taaaaaggaagataaaatctctgatgtgattgctagtagtgaccataaaaacacacagtgtcccgccactgatga

SEQ ID NO: 123840 - DNA, 75 bp, synthetic construct
  source 1..75: mol_type = other DNA
ctaaagaacaaggttagtgacctcgatgactttgatgatagtgacgatgattttacttacagacccaaaaagaaa

SEQ ID NO: 123841 - DNA, 75 bp, synthetic construct
  source 1..75: mol_type = other DNA
caccagtgatttgctggatgaatgggcgaaaggaaacgttcgtcagcaacgagcggcgcaatatggtcgtgcttt

SEQ ID NO: 123842 - DNA, 75 bp, synthetic construct
  source 1..75: mol_type = other DNA
gcagtggtaaccgaatggctgaaagataatccaaaactggcggctgtgggcgacaaagtgaccgataaagattac

SEQ ID NO: 123843 - DNA, 75 bp, synthetic construct
  source 1..75: mol_type = other DNA
gaaaatgaaaccggcgctgaaaaaaacgctgatggcggtagcgtgactgagcgcagtaccggcagcccaggctgc

SEQ ID NO: 123844 - DNA, 75 bp, synthetic construct
  source 1..75: mol_type = other DNA
cgtctggcgctggttgcctgcctgctggccgtgattcctgcgcttaacctcgccaccagtgatgcggcggctgta

SEQ ID NO: 123845 - DNA, 75 bp, synthetic construct
  source 1..75: mol_type = other DNA
ggagcgtgaaaagcaggtgctgtttaccacgccgtactatgacaactctgccctgtttgtgggtcagcaaggcaa

SEQ ID NO: 123846 - DNA, 75 bp, synthetic construct
  source 1..75: mol_type = other DNA
ggatgatgattgtgctgcacgccttgtgcctgctgccgctgctgagcggttgcggaagtacgcggacagtttacg

SEQ ID NO: 123847 - DNA, 75 bp, synthetic construct
  source 1..75: mol_type = other DNA
gtgcctgctaccgctgctgaccggttgcggaagtacgcggacagtttacgtgaacattccggcggcaccactgcc

SEQ ID NO: 123848 - DNA, 75 bp, synthetic construct
  source 1..75: mol_type = other DNA
catttgttgatgcagctctgtattcgcacaaataaaagaatgcaggataatatatctgaatttctgggggtgtat

SEQ ID NO: 123849 - DNA, 75 bp, synthetic construct
  source 1..75: mol_type = other DNA
ttgttgccttctttgttaccgtcattggttccttcatctggtctaccgggcattactacagcaaatatcagcacg

SEQ ID NO: 123850 - DNA, 75 bp, synthetic construct
  source 1..75: mol_type = other DNA
tacactttattgttttgcctgtggtttttagtgctgggcgctattgagtattttgttctgcgctttatctggcga

SEQ ID NO: 123851 - DNA, 75 bp, synthetic construct
  source 1..75: mol_type = other DNA
accacgccgtactatgacaactctgccctgtttgtgggtcagcagggtaaatacaccagcgttgatcagctgaaa

SEQ ID NO: 123852 - DNA, 75 bp, synthetic construct
  source 1..75: mol_type = other DNA
aaatgcccgcgatttgcgcaccaatccggtgttgcagctcaacctggcaaacgcttatctgcaaggcggtcaacc

SEQ ID NO: 123853 - DNA, 75 bp, synthetic construct
  source 1..75: mol_type = other DNA
ggataagcacccggaaatcaccaccgttccgtatgacagctaccagaacgcaaaactggatctgcaaaacggtcg

SEQ ID NO: 123854 - DNA, 75 bp, synthetic construct
  source 1..75: mol_type = other DNA
caggaaggagaaccgtcagcttcgtgagcaactgaaacaggcctcagcggtggatgacagcagggaggtttcaga

SEQ ID NO: 123855 - DNA, 75 bp, synthetic construct
  source 1..75: mol_type = other DNA
ggcgtttgacagcctgatcccaagcctgaaattccgtcgcgtggaagcggtgatggccgggatggatatcacccc

SEQ ID NO: 123856 - DNA, 75 bp, synthetic construct
  source 1..75: mol_type = other DNA
ttgaagaagtgaagcctgttacagaacccgcgtccggtgaaagcgccgggaaaaaagcgttatctctggccggaa

SEQ ID NO: 123857 - DNA, 75 bp, synthetic construct
  source 1..75: mol_type = other DNA
cctgtaagagagtgtttgccttctctgcatgatcttccaggagcagaagagaaaatctgccgttaccgtgctgct

SEQ ID NO: 123858 - DNA, 75 bp, synthetic construct
  source 1..75: mol_type = other DNA
gatgatcctgctggatatcagcgctgaagagggtaaaaacgtactggagccggtgagcctggtgtatcaggggga

SEQ ID NO: 123859 - DNA, 75 bp, synthetic construct
  source 1..75: mol_type = other DNA
attgccggaaaagattataacgaaaagaccgcgcccgcagcggttaacagtaaatacccggacggaactaccgtc

SEQ ID NO: 123860 - DNA, 75 bp, synthetic construct
  source 1..75: mol_type = other DNA
gaaatgaaaataggttcaaacgtcggatcgttaggcatagacacaagcaacaatagagacgccttagacgttgta

SEQ ID NO: 123861 - DNA, 75 bp, synthetic construct
  source 1..75: mol_type = other DNA
gctgacgctgcgtaaccagcgtgcggagaaagtgattctcgatccgcgtcgtcttcagggcaatttctacagcgc

SEQ ID NO: 123862 - DNA, 75 bp, synthetic construct
  source 1..75: mol_type = other DNA
gaaatgaaaataggttcaaatgtcgggtcgttaggcatagacacaagcaacaacagagacgcccttgacgttgta

SEQ ID NO: 123863 - DNA, 75 bp, synthetic construct
  source 1..75: mol_type = other DNA
tccagcctgctggcctttgattttgctggcgttcatcacagcgatatggtgacactgctggcggagtacggtatt

SEQ ID NO: 123864 - DNA, 75 bp, synthetic construct
  source 1..75: mol_type = other DNA
ggaaggcctgagcgaacccatcgggaaatttccgatgaccgatagctggtatccgtcacgggattttcgacgacg

SEQ ID NO: 123865 - DNA, 75 bp, synthetic construct
  source 1..75: mol_type = other DNA
ttgatcgtgtcgttgcactcggcggagggcatgggctcggacgcgttctttcatcgctttcatctttggggtctc

SEQ ID NO: 123866 - DNA, 75 bp, synthetic construct
  source 1..75: mol_type = other DNA
acggagaatgtgctatttggtgaagtaatcaccgagggcaaggtccgtacactggcccagctttttgcacttgaa

SEQ ID NO: 123867 - DNA, 75 bp, synthetic construct
  source 1..75: mol_type = other DNA
gagccggaatttacacctgctgaacttgccgccttccgggactactgggcagcggaggggaaagttttcacgcag

SEQ ID NO: 123868 - DNA, 75 bp, synthetic construct
  source 1..75: mol_type = other DNA
aggcagcagaacctgcatccctggatggcctgagcgaacccatcgggaaatttccgatggccgatggctggcatc

SEQ ID NO: 123869 - DNA, 75 bp, synthetic construct
  source 1..75: mol_type = other DNA
agaatcaggagttcaagaaggcgtttttaaacacaccattgcgcttacgaattgccgggaaagattatgacgaaa

SEQ ID NO: 123870 - DNA, 75 bp, synthetic construct
  source 1..75: mol_type = other DNA
agctcaccagtacggtcagccgtaaggtggtgctggaccccagggcactgcagggaaactttgtgaccgccacgt

SEQ ID NO: 123871 - DNA, 75 bp, synthetic construct
  source 1..75: mol_type = other DNA
acgccactggatatcgtcgaacagaccggctatatggtggctactgaacgtatgacgctggacaacatcatcaaa

SEQ ID NO: 123872 - DNA, 75 bp, synthetic construct
  source 1..75: mol_type = other DNA
ctgtttgccaacaagggggcgatctcggtacaggcacagaacgatctgatggaactgttggcacagaaatcgata

SEQ ID NO: 123873 - DNA, 75 bp, synthetic construct
  source 1..75: mol_type = other DNA
ccttaaacagtcctgcgctgaccggaacgccaacaacgccaactgcgcgacagggaacgaataatacccaaatcg

SEQ ID NO: 123874 - DNA, 75 bp, synthetic construct
  source 1..75: mol_type = other DNA
aagcggggagaaaataccgttactcagtacagcgaatacctggactaatcgacaaacattcagcggtggcctttc

SEQ ID NO: 123875 - DNA, 75 bp, synthetic construct
  source 1..75: mol_type = other DNA
gacccatagccttccagagaagttttatccgtcttgaaatgggcgtgactgccgcattgtttctgtcgcagttga

SEQ ID NO: 123876 - DNA, 75 bp, synthetic construct
  source 1..75: mol_type = other DNA
gttagcagaatatcatttcgctccaacggaaacagcaaaaataaatttattaagagaagggtgtcctgagtataa

SEQ ID NO: 123877 - DNA, 75 bp, synthetic construct
  source 1..75: mol_type = other DNA
ttgagctgttaattttattcttagtgcttaaccagttggttattgatactttcaatggttactttatttttagtt

SEQ ID NO: 123878 - DNA, 75 bp, synthetic construct
  source 1..75: mol_type = other DNA
ggattgcaaagaagcttataatgcaatgagttttgcacataacccatatggcaatggtacatcatctaaaataat

SEQ ID NO: 123879 - DNA, 75 bp, synthetic construct
  source 1..75: mol_type = other DNA
atttccgaagatattacagcaaaatgtgtctaaatgtcgaaacaccagcgcagggacttcgcttgctggttgcac

SEQ ID NO: 123880 - DNA, 75 bp, synthetic construct
  source 1..75: mol_type = other DNA
tagacgcgattgatcctaaagatggtatcaacatctcccgcccagacgaatatatacatattccgctatcgtatt

SEQ ID NO: 123881 - DNA, 75 bp, synthetic construct
  source 1..75: mol_type = other DNA
gttagcagaatatcatttcgcaccaacggaaacagcaaaaagaaatttattaaaagaagggtgttctgagcataa

SEQ ID NO: 123882 - DNA, 75 bp, synthetic construct
  source 1..75: mol_type = other DNA
tactatttcagaacattcagccgtacatttcagcagatattttccccggaaaaatactcagaatcagcggcacga

SEQ ID NO: 123883 - DNA, 75 bp, synthetic construct
  source 1..75: mol_type = other DNA
tagacgcgattgatcctaaagatggtatcaacatctcccgcccagacgaatatatacatattccgttgtcttatt

SEQ ID NO: 123884 - DNA, 75 bp, synthetic construct
  source 1..75: mol_type = other DNA
atgggtgaaacgaacaagaaagcgcccttaaatagtcctgcactgaccggaacgccaacaacaccaactgcgcga

SEQ ID NO: 123885 - DNA, 75 bp, synthetic construct
  source 1..75: mol_type = other DNA
acaggccgtatatcgccggggtaaaacacgactcggcgcacaccgaccatgtgaccatccagaactacaagcgca

SEQ ID NO: 123886 - DNA, 75 bp, synthetic construct
  source 1..75: mol_type = other DNA
gtacggcggaatccgcggcaacgcgcgccgagacagcagcaaaacgggcagaggatattgcatccgccgtggcgc

SEQ ID NO: 123887 - DNA, 75 bp, synthetic construct
  source 1..75: mol_type = other DNA
acagcgaagctactgtgacgctggaaaactggcggcaagttcatgagcaatgtctcgcgttgcaaagccagcggc

SEQ ID NO: 123888 - DNA, 75 bp, synthetic construct
  source 1..75: mol_type = other DNA
gagaaactgcaagcgcaggccagcggtgtcgcattattagcgccagaacaagtgcaatcgctgacagaaagtttg

SEQ ID NO: 123889 - DNA, 75 bp, synthetic construct
  source 1..75: mol_type = other DNA
gcggtggtggcatttctggtaacggcaagtggattgacgctggtcgggattggttctgcgttttggggattaatt

SEQ ID NO: 123890 - DNA, 75 bp, synthetic construct
  source 1..75: mol_type = other DNA
aaacagcggcgaagaaatccgaagcttatcaacaaaaattgtgggaaaaaattgacgctgacactcgtgctcagg

SEQ ID NO: 123891 - DNA, 75 bp, synthetic construct
  source 1..75: mol_type = other DNA
atagcgtcagtagcggtatcaaaggcggctatcttgcggcctgtggcgtatttattggcgatgcagtattgatgt

SEQ ID NO: 123892 - DNA, 75 bp, synthetic construct
  source 1..75: mol_type = other DNA
atttgtaatagttgacagcgatgggttaacacctgagctacagcaactatcactactatttaatgataccgcacg

SEQ ID NO: 123893 - DNA, 75 bp, synthetic construct
  source 1..75: mol_type = other DNA
gcaaggatcgcggttcgcagggaccaatgtatcacaaaaggtaacggccttcgccgtggcgactatagcggcata

SEQ ID NO: 123894 - DNA, 75 bp, synthetic construct
  source 1..75: mol_type = other DNA
acccggaaaaatgaaatgtgtccgtgtggcaacagcagatgagcgtctgaaggaagttcttgcagaagacacttc

SEQ ID NO: 123895 - DNA, 75 bp, synthetic construct
  source 1..75: mol_type = other DNA
tggtcgaatttcgaacgatatcactcccattgactatactgatttcgtcagacttacggttaagcacaccagcca

SEQ ID NO: 123896 - DNA, 75 bp, synthetic construct
  source 1..75: mol_type = other DNA
tggttgtggccgtgtgtttttgtatctcgctggtggttattgctggtgtcctgtggcgcatcttagtggcgcaga

SEQ ID NO: 123897 - DNA, 75 bp, synthetic construct
  source 1..75: mol_type = other DNA
aaggggcagaacgccagccgggctgtatccggtccgatactgctcgaacagttttggttccgatttagcgatgcc

SEQ ID NO: 123898 - DNA, 75 bp, synthetic construct
  source 1..75: mol_type = other DNA
ttggttccgatttagcgatgcctccgtctgtaacgtgcggttttcgccggggggatgctgcagaatatgccaggg

SEQ ID NO: 123899 - DNA, 75 bp, synthetic construct
  source 1..75: mol_type = other DNA
agattgttccccaacaaaaacgtctggcgcagttacaggtcgctatccagaatgtcactctggaacagacgcaac

SEQ ID NO: 123900 - DNA, 75 bp, synthetic construct
  source 1..75: mol_type = other DNA
ttatgtcagggagactgaccggtcactgatgcaactggtcaccgcattatgggcaacactggcactgatgtatgt

SEQ ID NO: 123901 - DNA, 75 bp, synthetic construct
  source 1..75: mol_type = other DNA
agataacgctgatatcagcagacgtctacgcgataaagggttgccggattattttcttggcattcgctatgttgg

SEQ ID NO: 123902 - DNA, 75 bp, synthetic construct
  source 1..75: mol_type = other DNA
ccccaacgtacctgccacacgtgaagcggtgctggcgattaatgaggcggatctgatcattattgggccagggag

SEQ ID NO: 123903 - DNA, 75 bp, synthetic construct
  source 1..75: mol_type = other DNA
gacgctctgcgctatcttagccaacaaatcgatgcctggcgtcgtcaactgatgctggacgaaacgcaatccgca

SEQ ID NO: 123904 - DNA, 75 bp, synthetic construct
  source 1..75: mol_type = other DNA
gtgattgatgcggtagttgttggaccgaaagctgatgtatccgcagttaacaacagaattgtgattcaggaagta

SEQ ID NO: 123905 - DNA, 75 bp, synthetic construct
  source 1..75: mol_type = other DNA
ggtcaccgcattatgggcaacgctggcactgatgtatatgtcgtttgcggtgggcaccgggaaaaaacggtgctg

SEQ ID NO: 123906 - DNA, 75 bp, synthetic construct
  source 1..75: mol_type = other DNA
gtggcgaacaattgccagggtgtcagggcagccaatcgcaacggtgatggcggtttatgtccaccttctggtgag

SEQ ID NO: 123907 - DNA, 75 bp, synthetic construct
  source 1..75: mol_type = other DNA
caactaataaagatacagatctaaaagaattaaaccccacacataacgcgcgcgtacgcgagagtactccgacaa

SEQ ID NO: 123908 - DNA, 75 bp, synthetic construct
  source 1..75: mol_type = other DNA
gcggaggggaaagttttcacgcaggttcagtgggagcagaaattcgcccgtcacgtaaatcacgtcagggcgcag

SEQ ID NO: 123909 - DNA, 75 bp, synthetic construct
  source 1..75: mol_type = other DNA
gctgcgggtacagagtaccggtggtgccgtgtacctgaaggcggacagtgcctttccacagacacggctgcagtt

SEQ ID NO: 123910 - DNA, 75 bp, synthetic construct
  source 1..75: mol_type = other DNA
tatgccgcccagagtctgtatgcgccgttaagaaccgtggagccggtgcccggcgtacagccgttatcactgacc

SEQ ID NO: 123911 - DNA, 75 bp, synthetic construct
  source 1..75: mol_type = other DNA
acgccactggaaatcgtcaaacggaccggccaactggcggtcacggaacacatgactttggacaataccatcaaa

SEQ ID NO: 123912 - DNA, 75 bp, synthetic construct
  source 1..75: mol_type = other DNA
acatcacgcagaatcagcattatcaacatctggcgcttgcagaacggcgaaaagccgcctcgttggtgcccttgc

SEQ ID NO: 123913 - DNA, 75 bp, synthetic construct
  source 1..75: mol_type = other DNA
ttgatcgtgttgttgcactcggcggagggcatggattaggacgcgttctttcatcactttcatctttaggctctc

SEQ ID NO: 123914 - DNA, 75 bp, synthetic construct
  source 1..75: mol_type = other DNA
aaggacaacaccacaccaggaaaattactggttcaggaaattgacttcgtaagacaaacagcccctgccgggcag

SEQ ID NO: 123915 - DNA, 75 bp, synthetic construct
  source 1..75: mol_type = other DNA
atggtagctaccgttcgtcatttcctccggaatagcctgatggcgcttccgttactgatatccccgtttgtgctg

SEQ ID NO: 123916 - DNA, 75 bp, synthetic construct
  source 1..75: mol_type = other DNA
atggaaaccgtggcttacgctgattttgcacgtctggaaatgcgcgtcgggaaaattgtggatgtgaaacgccat

SEQ ID NO: 123917 - DNA, 75 bp, synthetic construct
  source 1..75: mol_type = other DNA
attacaatgaagatttcgtagaaaaggatggcaatgatgttgtttgcgaaatttttatccccgttcgtccggttt

SEQ ID NO: 123918 - DNA, 75 bp, synthetic construct
  source 1..75: mol_type = other DNA
tcgactcagagaacagcaagcgccttgctttgttatcccttcgtgaatttctgaacgaactaccaaaagtcacca

SEQ ID NO: 123919 - DNA, 75 bp, synthetic construct
  source 1..75: mol_type = other DNA
aaggcgttgtccgcgcactttatttgcgccgctatacgccaaaagaaattgcatcagaattaaatctgccgaatg

SEQ ID NO: 123920 - DNA, 75 bp, synthetic construct
  source 1..75: mol_type = other DNA
gggcgacaggaaggatttacctactattttgcatgggaagggtttgaaaaggccgttctcacgggcaagaatcag

SEQ ID NO: 123921 - DNA, 75 bp, synthetic construct
  source 1..75: mol_type = other DNA
cccattaaaggcaatccggttaagttaagtaatctggctgaactgtattttctggcgaccaacagtaacacagcg

SEQ ID NO: 123922 - DNA, 75 bp, synthetic construct
  source 1..75: mol_type = other DNA
gcaggccgaagcggaaaccgtggagattgtcgaagcggcggaagaacaagcagcgaaagaagaaatcaccgacga

SEQ ID NO: 123923 - DNA, 75 bp, synthetic construct
  source 1..75: mol_type = other DNA
ctgctggataatcatggcgatgatcccctttttttacaagaagcaatttctgatatgaaaaattttatgcttaag

SEQ ID NO: 123924 - DNA, 75 bp, synthetic construct
  source 1..75: mol_type = other DNA
aaggcgttgttcgcgcactttatctgcgccgctatacgccaaaggaaatcgcatctgaattaaatctgccgaatg

SEQ ID NO: 123925 - DNA, 75 bp, synthetic construct
  source 1..75: mol_type = other DNA
aagagtggacaacgacccgagactttatgcctctttccgttatgaaggaaactgggaaaattatcctgactgggt

SEQ ID NO: 123926 - DNA, 75 bp, synthetic construct
  source 1..75: mol_type = other DNA
ccaactttgcaaaactcaatgaagtggccagcgcgatggccacacatgacaaatggcgtaccacctacttttcca

SEQ ID NO: 123927 - DNA, 75 bp, synthetic construct
  source 1..75: mol_type = other DNA
ttgacgagatagaaggtctggcggctaccaatacccatctggtagaacagatcccacgctacctgagtgagatgg

SEQ ID NO: 123928 - DNA, 75 bp, synthetic construct
  source 1..75: mol_type = other DNA
aggcattctgggcaatcacccacgccctgcataacgaaccactcaactatgaaaacaaaccaaaatcccgctggg

SEQ ID NO: 123929 - DNA, 75 bp, synthetic construct
  source 1..75: mol_type = other DNA
aagccacgcagtgaaatgggggtgacttgtgttggccgccagaagcaacgcggaaaatcaattccagcttattac

SEQ ID NO: 123930 - DNA, 75 bp, synthetic construct
  source 1..75: mol_type = other DNA
gccagcaggtcaggaacatccttaaaagccgccagatcggtgccacctggtactttgcatttgaagcctttgaaa

SEQ ID NO: 123931 - DNA, 75 bp, synthetic construct
  source 1..75: mol_type = other DNA
cagccaggcagaactgggtaaaatagccgcctttcgccaatggatcctggcgaaagccgctgctgaacaagaaaa

SEQ ID NO: 123932 - DNA, 75 bp, synthetic construct
  source 1..75: mol_type = other DNA
gcagcaaaaccaggaaaaggaaaaacagcagcgtattgaacgtgaaaaacagcgacagacgcgatcgcgtggcat

SEQ ID NO: 123933 - DNA, 75 bp, synthetic construct
  source 1..75: mol_type = other DNA
tggccagcgctttgcagcactgctacagggagcgtgagacgccgaatgctgacgctgaacggacaccagaaaact

SEQ ID NO: 123934 - DNA, 75 bp, synthetic construct
  source 1..75: mol_type = other DNA
agcaaaaccaggagaaggagaaacagcagcgtgtcgaacgtgagacacagcgacagatgcgatcccgtggcatgg

SEQ ID NO: 123935 - DNA, 75 bp, synthetic construct
  source 1..75: mol_type = other DNA
agaaaaggatagcaatgatgttgtttgcgaaattttttatccccgttcgtccggtttagttttcgctatatctaa

SEQ ID NO: 123936 - DNA, 75 bp, synthetic construct
  source 1..75: mol_type = other DNA
aaatgaaaaccggtgaatacctcagcaaggggctgactgaagccggattcgtggtcgatcatgctgataatggcc

SEQ ID NO: 123937 - DNA, 75 bp, synthetic construct
  source 1..75: mol_type = other DNA
tgtccgctcagtccggcagggatactggggatattatcttcctgatcaggatcatggcccggaattcagtgagtt

SEQ ID NO: 123938 - DNA, 75 bp, synthetic construct
  source 1..75: mol_type = other DNA
ttgtatcaggatttctgaccgaaaatgacatttcatggttaaaccgaattgaagcagggtgtgaccttgatgtca

SEQ ID NO: 123939 - DNA, 75 bp, synthetic construct
  source 1..75: mol_type = other DNA
aggactgtatgcatctttccgctatgaaggtgagtgggagcgctatcctgaatggtcgcgaaacctctatctgat

SEQ ID NO: 123940 - DNA, 75 bp, synthetic construct
  source 1..75: mol_type = other DNA
gtatacaacaaagctcgtcaggccagtattactcaggaactcaccgagatcgtctcgggggccgccgcggtttaa

SEQ ID NO: 123941 - DNA, 75 bp, synthetic construct
  source 1..75: mol_type = other DNA
cgtttgaggcgtttgaagatgcggtattaaccggcgacacacagatatttttatcggcatcaaaacgtcaggccg

SEQ ID NO: 123942 - DNA, 75 bp, synthetic construct
  source 1..75: mol_type = other DNA
ggatctgatttacgccaaccgtattgagtgggatgaggaggcaacagatattccggcatcatttttggccattcg

SEQ ID NO: 123943 - DNA, 75 bp, synthetic construct
  source 1..75: mol_type = other DNA
atggccggcgcaaaagagatacgtagtaagatcgcaagcgtccagaacacgcaaaagatcactaaagcgatggag

SEQ ID NO: 123944 - DNA, 75 bp, synthetic construct
  source 1..75: mol_type = other DNA
cttgaacgggagggaaaatttccaccacgtaagtctatcggaaagaaatcctgtggatggttattcagcgacctt

SEQ ID NO: 123945 - DNA, 75 bp, synthetic construct
  source 1..75: mol_type = other DNA
taatgctcatcttgcagaacaagagaaagaccatgctcttatggcaatttcttcagtagctctcccgaaagttga

SEQ ID NO: 123946 - DNA, 75 bp, synthetic construct
  source 1..75: mol_type = other DNA
gtgggaatgattgtgttcgctggtaaatggggaaatgccaaagcagtagcttctactgaaaccagcgtttttaac

SEQ ID NO: 123947 - DNA, 75 bp, synthetic construct
  source 1..75: mol_type = other DNA
atggctacatacggcggtcagtttacgcttaccattgattacgactggaaagcatcaatagaaattgaaatcgac

SEQ ID NO: 123948 - DNA, 75 bp, synthetic construct
  source 1..75: mol_type = other DNA
agtcagcgtcgccgccgatattatggcgctggtgctgttaactgcaccgggtaaacagggcgcggatattgtctt

SEQ ID NO: 123949 - DNA, 75 bp, synthetic construct
  source 1..75: mol_type = other DNA
gtttatatcaaaaatatccccgaacatgtgaaaaagctggatgaagcggttggcttccaattggcaccatacgct

SEQ ID NO: 123950 - DNA, 75 bp, synthetic construct
  source 1..75: mol_type = other DNA
aggtgaaagccggtgtctggccgttggaagataacccgctggtgaacgcgccacacattcagagcgaactggtcg

SEQ ID NO: 123951 - DNA, 75 bp, synthetic construct
  source 1..75: mol_type = other DNA
cgcatccgtacagtcgtgaagttgcagtattcccggcaggtgtggcagacaaatactggccgaccgtgaaacgtc

SEQ ID NO: 123952 - DNA, 75 bp, synthetic construct
  source 1..75: mol_type = other DNA
cgacgacatgaaatcatttcatgatattattaatcttgcaaattcaacacatcataaaaacactgtcgcacctaa

SEQ ID NO: 123953 - DNA, 75 bp, synthetic construct
  source 1..75: mol_type = other DNA
atgcaaccaattacataccaacagactagcggatttaccccggctacggtgataaatcgttctcaaacaaaacag

SEQ ID NO: 123954 - DNA, 75 bp, synthetic construct
  source 1..75: mol_type = other DNA
cggtgatgttaccattcataactattctgctgacatacttccttcggcccagcaaccaatttcgttgctgcaaaa

SEQ ID NO: 123955 - DNA, 75 bp, synthetic construct
  source 1..75: mol_type = other DNA
tgtggcattaaaatgttcccggtggtcaacatgcttccagcactccttctggcaatgccgctttccgccgcctag

SEQ ID NO: 123956 - DNA, 75 bp, synthetic construct
  source 1..75: mol_type = other DNA
gtggtcatcggcccttttatcaacgctagtgcagtcttactgggtggcgttctcggcgcactgctcagccaacgt

SEQ ID NO: 123957 - DNA, 75 bp, synthetic construct
  source 1..75: mol_type = other DNA
tggcgataatctctcctgcatcatggtgacttatccatccacccacggtgtgtacgaagaaacaatccgtgaagt

SEQ ID NO: 123958 - DNA, 75 bp, synthetic construct
  source 1..75: mol_type = other DNA
gtttcgcacctcaacctgcataaaactttctgtattccgcacggcggtggcggcccgggtatggggccgatcggc

SEQ ID NO: 123959 - DNA, 75 bp, synthetic construct
  source 1..75: mol_type = other DNA
gtggtcatcggtccttttatcaacgcaagtgcagtattactgggtggcgtgctcggtgcactgcttagccaacgc

SEQ ID NO: 123960 - DNA, 75 bp, synthetic construct
  source 1..75: mol_type = other DNA
ccgccgatgtggtggaaagccagcgtatcgagtgggacaaaaacctgaaggaaatccccgccagctttatgtcag

SEQ ID NO: 123961 - DNA, 75 bp, synthetic construct
  source 1..75: mol_type = other DNA
cgaacaaagagcgcgtcgaaataccggccagttttatggctatccggcgcaccacaaccaacagcggcaacgcgc

SEQ ID NO: 123962 - DNA, 75 bp, synthetic construct
  source 1..75: mol_type = other DNA
cgaagtggaccgggccacatggggcgactttgatctgaccgctgcgcggcccttcggcaatcgcgaagtatgggc

SEQ ID NO: 123963 - DNA, 75 bp, synthetic construct
  source 1..75: mol_type = other DNA
gcagcatcactcggaagccttcgctgtaaggaagaagatgaacgcagtggaagtatttgcctgccaaacgtagct

SEQ ID NO: 123964 - DNA, 75 bp, synthetic construct
  source 1..75: mol_type = other DNA
atgacagtagtcattacatatctggctgacgataacgccagaaatcgccgcagagcacgcagacaggctcaacgt

SEQ ID NO: 123965 - DNA, 75 bp, synthetic construct
  source 1..75: mol_type = other DNA
gggttagccagagtgaacggcagcgatattgagcgcttttattacaatgaagatttcgtagaaaaggatggcaat

SEQ ID NO: 123966 - DNA, 75 bp, synthetic construct
  source 1..75: mol_type = other DNA
gccagggggttagccagagtgaacggcagtgatattgagcgattttattacaatgaagatttcgtagaaaaggat

SEQ ID NO: 123967 - DNA, 75 bp, synthetic construct
  source 1..75: mol_type = other DNA
cgcccatgccattgacaacgagccattaaactttgaaaaccagcgaaaatcacgctggggtaacttagggaaagc

SEQ ID NO: 123968 - DNA, 75 bp, synthetic construct
  source 1..75: mol_type = other DNA
atatttccggactgacggcagagagttttgaaccgtttactaaaaaactgttcgcttatcagttacaccttcgga

SEQ ID NO: 123969 - DNA, 75 bp, synthetic construct
  source 1..75: mol_type = other DNA
atcgcggttacctggttgagcaggatagcttcatgactcggttggctgaaatggaaaaggaactcagtgaggcaa

SEQ ID NO: 123970 - DNA, 75 bp, synthetic construct
  source 1..75: mol_type = other DNA
agacggccgcgtggaatgggataaggagaagaccgaaatcgccgccagctttatgaccatccgccgtacgtccac

SEQ ID NO: 123971 - DNA, 75 bp, synthetic construct
  source 1..75: mol_type = other DNA
tgatccccggatttattgcattgaggggttatgtgaactggcacgtcgtgaggcctggcaaatggcattttgtcg

SEQ ID NO: 123972 - DNA, 75 bp, synthetic construct
  source 1..75: mol_type = other DNA
ttgatgtcctgtgtggcaaaaatgaaaaaggagagccattctatgtattgaatgtgccgcgagccaagcagcgca

SEQ ID NO: 123973 - DNA, 75 bp, synthetic construct
  source 1..75: mol_type = other DNA
attctttacagcgtcgaaagcaaaaaccgtctggtaatgaagatgatcgacgttgtcgagcgtaagcgcatcgaa

SEQ ID NO: 123974 - DNA, 75 bp, synthetic construct
  source 1..75: mol_type = other DNA
atttcgttcgtccacatcctgagcagtatacgtggatcctcaagttgctgaaaacacgtaaggcaggggaagagg

SEQ ID NO: 123975 - DNA, 75 bp, synthetic construct
  source 1..75: mol_type = other DNA
aggtccgtgaggcgctgaattacgccattaaccgtccggcgctggtgaaagttgcctttgcgggctatgcaacgc

SEQ ID NO: 123976 - DNA, 75 bp, synthetic construct
  source 1..75: mol_type = other DNA
ggcaccgatttcaacgcagcggcggtaaaagcgaatctggaccgggccagcgatccggcgaatcatcttaaacgc

SEQ ID NO: 123977 - DNA, 75 bp, synthetic construct
  source 1..75: mol_type = other DNA
tcaccctgtaccagaatagtttcacctgcgaagccgatacccttggtagttgcggctacgtatacatcgccgttt

SEQ ID NO: 123978 - DNA, 75 bp, synthetic construct
  source 1..75: mol_type = other DNA
tcaggcactgaaaactaatgatccggcggaaaagacccgcttgtataaggcggcgcaggatatcatctggcaaga

SEQ ID NO: 123979 - DNA, 75 bp, synthetic construct
  source 1..75: mol_type = other DNA
gcttgaagactgggtgatgagtcatgttcgctgcttccagtggttgggtggcgttcctgaacttgttgttccgga

SEQ ID NO: 123980 - DNA, 75 bp, synthetic construct
  source 1..75: mol_type = other DNA
aattatttctcaagtggggactgaatcgtaatgtgacaccttgctttggcgctcgtctggtacaggagggaaacc

SEQ ID NO: 123981 - DNA, 75 bp, synthetic construct
  source 1..75: mol_type = other DNA
taaaagcgaatctggatcgagccagcgatccggcgaatcatcttaaacgctataacttgtacaaaaatattgcca

SEQ ID NO: 123982 - DNA, 75 bp, synthetic construct
  source 1..75: mol_type = other DNA
tttttagtacgaacgaaagctcaagcattgatttttactcagataatgatttgatcactgctctagaagaaagta

SEQ ID NO: 123983 - DNA, 75 bp, synthetic construct
  source 1..75: mol_type = other DNA
aggtacgggaggcgctgaattatgccatcaaccgtccggcgctggtgaaagtcgcgtttgcgggatatgcaacgc

SEQ ID NO: 123984 - DNA, 75 bp, synthetic construct
  source 1..75: mol_type = other DNA
cacactggcgtggtgtcatggcgacacgctgctgacagtcctcgaaacactcaagcagtggcacatccgctgtat

SEQ ID NO: 123985 - DNA, 75 bp, synthetic construct
  source 1..75: mol_type = other DNA
tattagaggcctgttcagcgatgcagatgcgtaccacctggaccaggcctttccgctgctgatgaaacaactgga

SEQ ID NO: 123986 - DNA, 75 bp, synthetic construct
  source 1..75: mol_type = other DNA
acgcaaaagccgttcgacaacctgaaggtacgcgaggcgctgaattatgccatcaaccgtccggcgttggtgaaa

SEQ ID NO: 123987 - DNA, 75 bp, synthetic construct
  source 1..75: mol_type = other DNA
ttaccttgccgaccgcgcgggtatcagaggccgcttcagcgacgcagatgcataccatctggaccaggcctttcc

SEQ ID NO: 123988 - DNA, 75 bp, synthetic construct
  source 1..75: mol_type = other DNA
aaaagaaaaccggcgaatacttaaccaaggggttaactgaggccggttttgtggtcgatttagccgacaacgggc

SEQ ID NO: 123989 - DNA, 75 bp, synthetic construct
  source 1..75: mol_type = other DNA
gcaaggtattttaagatttcaaactaaactacctattcactcttttgctggttttatctttgaagcatttgcggt

SEQ ID NO: 123990 - DNA, 75 bp, synthetic construct
  source 1..75: mol_type = other DNA
ctgcgaagccgacaccttcggctcctgtggttacgtttatctggctgtttatccgacgcccgaaacgaaaaagta

SEQ ID NO: 123991 - DNA, 75 bp, synthetic construct
  source 1..75: mol_type = other DNA
cagaagttagtgttcgatatcgaaatggcgtgggataaccgtaaagcggcgaaaagtgatgatgtggcggattgc

SEQ ID NO: 123992 - DNA, 75 bp, synthetic construct
  source 1..75: mol_type = other DNA
gcaaaggctctatgaacaacggccaatactggactgttgatgttggtgtaggcagtgaagttgtgatgcagtacc

SEQ ID NO: 123993 - DNA, 75 bp, synthetic construct
  source 1..75: mol_type = other DNA
ctggatcatggcccgaatcaggcatgagatcttctgtaagcgtcaacggagcaccgtattgacgcttatttattg

SEQ ID NO: 123994 - DNA, 75 bp, synthetic construct
  source 1..75: mol_type = other DNA
atgtacatagcgttaacgctgtgccatgaagcaacagcgaggagtgtagtcgcaaatggcgaaagaaaaaaacgt

SEQ ID NO: 123995 - DNA, 75 bp, synthetic construct
  source 1..75: mol_type = other DNA
ttaccttgccgaccgcgccggtatcagaggccggttcagcgacgcagatgcataccatctggaccaggcctttcc

SEQ ID NO: 123996 - DNA, 75 bp, synthetic construct
  source 1..75: mol_type = other DNA
tatccggtgctggtgagcgaagaaaatggcgttgtcacggggtatgcctcatttggtgactggcgtagtttcgac

SEQ ID NO: 123997 - DNA, 75 bp, synthetic construct
  source 1..75: mol_type = other DNA
gagcaccacggcacactgcaatcttttcgtacgctttcaaaaccggtatcgacattatgcagccggatgttggct

SEQ ID NO: 123998 - DNA, 75 bp, synthetic construct
  source 1..75: mol_type = other DNA
ccggtgaaatgggctgttttatcgtcgaaaaacaccttaaccgtttcattgagggtaaatgtgtcagtgatatca

SEQ ID NO: 123999 - DNA, 75 bp, synthetic construct
  source 1..75: mol_type = other DNA
cacctggtggggactgccctgcaccgtgacgtcctgttttggtgcccgtctggtacaggaaggcaaccggttgca

SEQ ID NO: 124000 - DNA, 75 bp, synthetic construct
  source 1..75: mol_type = other DNA
cgacattatgcagccggatgttggctggtgcggtggcttaaccacgctggtggaaattgccgcaatcgccaaatc

SEQ ID NO: 124001 - DNA, 75 bp, synthetic construct
  source 1..75: mol_type = other DNA
tggagatgagattgtcggcttcattacccagggacgcggtatttcagtacaccgcgccgattgcgaacaactggc

SEQ ID NO: 124002 - DNA, 75 bp, synthetic construct
  source 1..75: mol_type = other DNA
atgatggtcaccagcggtgagcaccacggcacactgcaatctttccgtacgctttcagaaaacggtatcgacatt

SEQ ID NO: 124003 - DNA, 75 bp, synthetic construct
  source 1..75: mol_type = other DNA
atgacaaataaaataatttgctctaatcaagaaatttcagaggatttcagtcttaacattttatttaatgttcct

SEQ ID NO: 124004 - DNA, 75 bp, synthetic construct
  source 1..75: mol_type = other DNA
gaagaatatggaatggcaaaacgcaacgtcgaacggctgggcgcacggctggcgaagcgcggtttaatatccaca

SEQ ID NO: 124005 - DNA, 75 bp, synthetic construct
  source 1..75: mol_type = other DNA
gcggagagttataccgtctccggcgacggcctcacttataccgtgaaattgcgtgaagggattaagttccaggac

SEQ ID NO: 124006 - DNA, 75 bp, synthetic construct
  source 1..75: mol_type = other DNA
actcagggcaaaaaaatgcagatagttaacctgaagactgaaggggcaggattacatggcgtcgcgcgtctgaca

SEQ ID NO: 124007 - DNA, 75 bp, synthetic construct
  source 1..75: mol_type = other DNA
atcatttacagtcctgactatggcgaaattggtcgctttgtatataggcctgaaatggtggagtgtcataatgtg

SEQ ID NO: 124008 - DNA, 75 bp, synthetic construct
  source 1..75: mol_type = other DNA
atttaaccgggtttttgtaccaatgcgtgatgcactgcgggtgctgcgcggtgaattacgaaacacaatgcgtat

SEQ ID NO: 124009 - DNA, 75 bp, synthetic construct
  source 1..75: mol_type = other DNA
aacaactaatcgctgaatataacaacggtttaacgtataaacagatcgctgaaaaatacggcatgtcaaaacgca

SEQ ID NO: 124010 - DNA, 75 bp, synthetic construct
  source 1..75: mol_type = other DNA
atggtgcgataacctccgcaagaacacttcttgaaacagtttgcaaacacattcttgatgatatgggcattcagt

SEQ ID NO: 124011 - DNA, 75 bp, synthetic construct
  source 1..75: mol_type = other DNA
aaatcataaggacgtcgagatccaggtgcttagcggaaatcatgatcaatcggggatgatttggctacgtgcggc

SEQ ID NO: 124012 - DNA, 75 bp, synthetic construct
  source 1..75: mol_type = other DNA
ggcactggcatcatcaacggctaattgaatcatcgttaggcgttgttgagtatcacggcacgttagcgggtaaag

SEQ ID NO: 124013 - DNA, 75 bp, synthetic construct
  source 1..75: mol_type = other DNA
cccgcgccaaaatggcagcagcttattgaagagatcgacagcctgccgaaggcaaagcagaagatgatttcggag

SEQ ID NO: 124014 - DNA, 75 bp, synthetic construct
  source 1..75: mol_type = other DNA
gtcggtcagcgtctgtcactgaaggtggggcagtcggtggtacagctctggcacaaggggcagtgtgtggcgcaa

SEQ ID NO: 124015 - DNA, 75 bp, synthetic construct
  source 1..75: mol_type = other DNA
gatcgacatgctcttttagctgttaatcttgcaggaagcatgtcagttttcctcattcaaacatggcaaaacttg

SEQ ID NO: 124016 - DNA, 75 bp, synthetic construct
  source 1..75: mol_type = other DNA
taaccaatactacaccgaagccgaagcttctttagccaggggcagaatatctggtgcagaaaatatagtaaaaaa

SEQ ID NO: 124017 - DNA, 75 bp, synthetic construct
  source 1..75: mol_type = other DNA
aaactgttgcttcctgcattcgtaagagaaaacagaagcctaaaaaaattttggggattcatacagcagaagttc

SEQ ID NO: 124018 - DNA, 75 bp, synthetic construct
  source 1..75: mol_type = other DNA
cgtcgtttcggaggaagactacacgcacgtaatgacggaattagagcttttgttcagtcggtacggtcaggctac

SEQ ID NO: 124019 - DNA, 75 bp, synthetic construct
  source 1..75: mol_type = other DNA
gaacacgacaaaaaaggcgatgaatttttcaacatcaactggagcgaaataaccacagagcacgttctgacgcta

SEQ ID NO: 124020 - DNA, 75 bp, synthetic construct
  source 1..75: mol_type = other DNA
ggagaggctgcaaaatgttgggtctgctccagagcttaatagcttaagcactgatgcactgcgtgctggattggg

SEQ ID NO: 124021 - DNA, 75 bp, synthetic construct
  source 1..75: mol_type = other DNA
tacgcaactggaacaggtgctcgatgccatgaaagaacgcggctttaagaagctgaataaacatccacgtcgccg

SEQ ID NO: 124022 - DNA, 75 bp, synthetic construct
  source 1..75: mol_type = other DNA
tggagtttttccttcgccatcagggcgaagtgctgccccgctcgcttatcgcctcgcaggtatgggacatgaatt

SEQ ID NO: 124023 - DNA, 75 bp, synthetic construct
  source 1..75: mol_type = other DNA
gcgcgaaaaaggttattaaaaaaagttggtattgatatatcactggaaaacttgattctttattacaaaatggaa

SEQ ID NO: 124024 - DNA, 75 bp, synthetic construct
  source 1..75: mol_type = other DNA
agcagaaaaaacatccccgccgtcgctttaaggggcatgtcacaccgcgcgagaagatttataaaatctggcagc

SEQ ID NO: 124025 - DNA, 75 bp, synthetic construct
  source 1..75: mol_type = other DNA
aaaagaaaaccggcgaatatctgaccaaagggttaaccgaagccggttttgtggtcgatttggccgataacggac

SEQ ID NO: 124026 - DNA, 75 bp, synthetic construct
  source 1..75: mol_type = other DNA
cagctcatcaattaagccatccccaaggcatgccgaacttgcagtaaatttatcaggctcaatggctcttttttt

SEQ ID NO: 124027 - DNA, 75 bp, synthetic construct
  source 1..75: mol_type = other DNA
gccctctcattaacataattcggggcacacagagacttgcagaaaaaagagttcctcatggaatcttaactggag

SEQ ID NO: 124028 - DNA, 75 bp, synthetic construct
  source 1..75: mol_type = other DNA
aaaaatttgtgcgcccgcatcctgaacaatatacatgggtcctgaagtttctgaaaacgcgaaaagcaggggaag

SEQ ID NO: 124029 - DNA, 75 bp, synthetic construct
  source 1..75: mol_type = other DNA
acgggtggacgatgatcttgcgctggcgctgaaaactaccgatcctgtggaaaaagccagattgtataaggccgc

SEQ ID NO: 124030 - DNA, 75 bp, synthetic construct
  source 1..75: mol_type = other DNA
taatccatgttgcccgtcgcaatctacaactggacgatgacacctaccgctctgtactgatgcgagtgacgggaa

SEQ ID NO: 124031 - DNA, 75 bp, synthetic construct
  source 1..75: mol_type = other DNA
gccctctgattaacataattcgcggaacccaaacgctggcacaaaaacgggtgccgaaaggggaattaacaggaa

SEQ ID NO: 124032 - DNA, 75 bp, synthetic construct
  source 1..75: mol_type = other DNA
acctgcccgtaaatcagttccggaaatggtcggtgagtgccagttttcagcgccccgtcacggacagggtgtggt

SEQ ID NO: 124033 - DNA, 75 bp, synthetic construct
  source 1..75: mol_type = other DNA
cgtgctggcttatgacgcgtactatcgctatttcatgggcgaaaagccaaccttgatgagcgccacagaatgggg

SEQ ID NO: 124034 - DNA, 75 bp, synthetic construct
  source 1..75: mol_type = other DNA
gtcaccacttatatatttatctctgcaattgcatgtgtactgtgcggttgtttgttcttaatgtggtcctttaaa

SEQ ID NO: 124035 - DNA, 75 bp, synthetic construct
  source 1..75: mol_type = other DNA
tcggtcactttggcgaccgactgggacgtaagcgcatgttaatgctgaccgtctggatgatgggcatcgcgacag

SEQ ID NO: 124036 - DNA, 75 bp, synthetic construct
  source 1..75: mol_type = other DNA
tcgttgcctggcgtttgatgggcaacgatgtcaccgacgaacaggcgaagtggcgtgatgatgcaattatgcgtt

SEQ ID NO: 124037 - DNA, 75 bp, synthetic construct
  source 1..75: mol_type = other DNA
tcctaatactggacgttggttaggtatggactacatcaaacgaaacaaaaaagcgatcctcaacgttgaagttat

SEQ ID NO: 124038 - DNA, 75 bp, synthetic construct
  source 1..75: mol_type = other DNA
ggcgatcgtcgcggcctgaatacttggctggcgcgtctgcctatggaagcgaaagagaaagatgaatggcgttac

SEQ ID NO: 124039 - DNA, 75 bp, synthetic construct
  source 1..75: mol_type = other DNA
cacacaaaatggaaaagatgcaggcattcattgattttattttttatgaggtatggtgcaaagcgcgggtaagag

SEQ ID NO: 124040 - DNA, 75 bp, synthetic construct
  source 1..75: mol_type = other DNA
gagactggcatagcgtcgccatttatttgctggcaggatgcctgatttccgcaataactgctttgttgatgaaag

SEQ ID NO: 124041 - DNA, 75 bp, synthetic construct
  source 1..75: mol_type = other DNA
ctaccgattcaacagttcaaaaagcatatgatggtatgctgacggaacttagtaatatgcagacggcatataata

SEQ ID NO: 124042 - DNA, 75 bp, synthetic construct
  source 1..75: mol_type = other DNA
tacgagtcaggatcagattactgacagcacaggcagaggcgcaggaacttaaaaacgatcgcgatcgcggtgacg

SEQ ID NO: 124043 - DNA, 75 bp, synthetic construct
  source 1..75: mol_type = other DNA
tgaccagacgatagcggaaggtaagcgactatatgaaggagtaactaactttaatgtaaacgacttgctggatga

SEQ ID NO: 124044 - DNA, 75 bp, synthetic construct
  source 1..75: mol_type = other DNA
cctggaataccgccagatcaccgatgatctgatgaatcaaccggcggtgacggtcactaactttgttcgcgctaa

SEQ ID NO: 124045 - DNA, 75 bp, synthetic construct
  source 1..75: mol_type = other DNA
actttgggatcatctggaggagcgattcccactggcctacaacgatcttttcaaacgctacaccagcggtaaaga

SEQ ID NO: 124046 - DNA, 75 bp, synthetic construct
  source 1..75: mol_type = other DNA
gtgaaaaaagtatttttttgtttattcttggccctgccgttaacagtttcggcggcaacgcagtgcggaccattc

SEQ ID NO: 124047 - DNA, 75 bp, synthetic construct
  source 1..75: mol_type = other DNA
ctgattcttgattttcctttatctgtcattgcagacagattttacaggaaacaggttgtagttagtggcgtattt

SEQ ID NO: 124048 - DNA, 75 bp, synthetic construct
  source 1..75: mol_type = other DNA
atattgagcaggggatggagcagattaatcgtctgcgtacggagtcggtacagattgaaatatcgcccggtgacc

SEQ ID NO: 124049 - DNA, 75 bp, synthetic construct
  source 1..75: mol_type = other DNA
cgatgtcactgacgaacaagcaaaatggcgcgatgacgccattatgcgctcgcaatccacgtcgttgattgaacg

SEQ ID NO: 124050 - DNA, 75 bp, synthetic construct
  source 1..75: mol_type = other DNA
ctgcgcaacctcaagccaaaggacaagctctacaaagtgaatgaccgtgacggcctctacgtggccatcacgcca

SEQ ID NO: 124051 - DNA, 75 bp, synthetic construct
  source 1..75: mol_type = other DNA
ggcattaaaattatcccgctcagtgaagtggcgacgaaggacgatttttttaatatcaaaaaagccagcgcggaa

SEQ ID NO: 124052 - DNA, 75 bp, synthetic construct
  source 1..75: mol_type = other DNA
cagcgtaatagacaatcgggttagcaatgcaattaaccagattacagacgacaaaggcgagattgatgatgatga

SEQ ID NO: 124053 - DNA, 75 bp, synthetic construct
  source 1..75: mol_type = other DNA
cagcgtgatagacaatagggttaacaatgcaattagccagcttacaaacgacaaaggcgagattgatgatgatga

SEQ ID NO: 124054 - DNA, 75 bp, synthetic construct
  source 1..75: mol_type = other DNA
cggtttacccggtcactgcgctgttatgcgcgatactggcggcgctgataacgcaatatcaggcgaatacatgcg

SEQ ID NO: 124055 - DNA, 75 bp, synthetic construct
  source 1..75: mol_type = other DNA
ctgaagttattcagtttctcagaagtgttccccgccgcacattgttgtttaaaaaaatggggttgcgagaactca

SEQ ID NO: 124056 - DNA, 75 bp, synthetic construct
  source 1..75: mol_type = other DNA
gatcccgcaaagctatgcgatggcgattgcccgtcaggagagtgcctggaatccgaaagtgaaatcaccggtagg

SEQ ID NO: 124057 - DNA, 75 bp, synthetic construct
  source 1..75: mol_type = other DNA
cgaagaagtcgtcaaaaaacagagtattaaaataggtgataattacgaactgaaagttgagcatggtacaaatat

SEQ ID NO: 124058 - DNA, 75 bp, synthetic construct
  source 1..75: mol_type = other DNA
atgagaatgaccagccgtaaaaaagagatactcagttattttgagccggataacctcgaatgggtgactggtgag

SEQ ID NO: 124059 - DNA, 75 bp, synthetic construct
  source 1..75: mol_type = other DNA
agtggtgatggcagtgactccggagaagaaaatgaagaccctggagggagcggcttggccggaagtggtggtggt

SEQ ID NO: 124060 - DNA, 75 bp, synthetic construct
  source 1..75: mol_type = other DNA
gagaccatcgggaacgaccagaagataacggtggtgaaggggcagacggttcaggtcgggaccagaaaagaaggg

SEQ ID NO: 124061 - DNA, 75 bp, synthetic construct
  source 1..75: mol_type = other DNA
atgagcaattccaggctggattaaatactgcgttcgaagatatcaactggacgctcagctctgatgaatccccta

SEQ ID NO: 124062 - DNA, 75 bp, synthetic construct
  source 1..75: mol_type = other DNA
atggataatcagagcgatgaggaggagacgcttgcttatcttgctcatatcgaacaggtttatggcgttagggtg

SEQ ID NO: 124063 - DNA, 75 bp, synthetic construct
  source 1..75: mol_type = other DNA
gttgatgtgtatatcccggggtgtccgccgcgtccggaagcgtatatgcaggcactgatgttgttgcaggaatct

SEQ ID NO: 124064 - DNA, 75 bp, synthetic construct
  source 1..75: mol_type = other DNA
ttgttgcggataatggtcaggtttacctcagcggaatgcctttagcgggaaaagttcaggtgaaatggggagaag

SEQ ID NO: 124065 - DNA, 75 bp, synthetic construct
  source 1..75: mol_type = other DNA
cccctcgccagctctttttatccctgaacggcttagatgaggtgaatctgccggtggccttcaacgacgtggatt

SEQ ID NO: 124066 - DNA, 75 bp, synthetic construct
  source 1..75: mol_type = other DNA
tctgtctgcatctggtgaacggcggcgatgaggcggcacgccagcgcacgctggccagtatcgcggcgctctgtt

SEQ ID NO: 124067 - DNA, 75 bp, synthetic construct
  source 1..75: mol_type = other DNA
ctcgccccgaaggatattgcgcacatccctgccctgctgatgcacgtcccggacgcgctgccgcagcaggacggg

SEQ ID NO: 124068 - DNA, 75 bp, synthetic construct
  source 1..75: mol_type = other DNA
atggaaagtctatacatcaacggtaaaaagattgatagcttcggggactggtcgccacagattgaacatccagct

SEQ ID NO: 124069 - DNA, 75 bp, synthetic construct
  source 1..75: mol_type = other DNA
actatgaaacgcagaagaagattgctatgcaagccgatattgagcaactaactaagatttctagcaaatatgcaa

SEQ ID NO: 124070 - DNA, 75 bp, synthetic construct
  source 1..75: mol_type = other DNA
tgtgtgcggaaaccgatgatggcagtgaaagcgtgctgttaacgccggagcggatgatgcctgcgggcgtacgta

SEQ ID NO: 124071 - DNA, 75 bp, synthetic construct
  source 1..75: mol_type = other DNA
attgccagacagaacatcttagcatcacgtaacaagcaacttgaaaatgttaagttgtgtctcttaagagagctt

SEQ ID NO: 124072 - DNA, 75 bp, synthetic construct
  source 1..75: mol_type = other DNA
aatcaattgggtaaaggttatataggcaatttgatcttggctttaagtttttggaagttaaggcggaaaatccga

SEQ ID NO: 124073 - DNA, 75 bp, synthetic construct
  source 1..75: mol_type = other DNA
tgtgtgcggaaaccgatgacggcagtgaaagcgtgttgttaacgccggagcggatgatgcctgcgggcgtacgta

SEQ ID NO: 124074 - DNA, 75 bp, synthetic construct
  source 1..75: mol_type = other DNA
aaggacggccttcagatcatccctttgtcagaagttgcggcgaaggatgagtttctaaatatcaagaacgtgagt

SEQ ID NO: 124075 - DNA, 75 bp, synthetic construct
  source 1..75: mol_type = other DNA
ggagtctgctccgcacggcatctgccgctggcgctggccgcttccggaacagcttccgcgggtgtcggtgattat

SEQ ID NO: 124076 - DNA, 75 bp, synthetic construct
  source 1..75: mol_type = other DNA
aacgacaccgaggtgattaacccactgtggctggatgagatggtctcgcacctgctgcgtccgggcgtcgggatc

SEQ ID NO: 124077 - DNA, 75 bp, synthetic construct
  source 1..75: mol_type = other DNA
tttcagaatgcatttttgatggtgaaggctcatgccaccttacaaccacgaggctgaaacttgcgctcaaagtgt

SEQ ID NO: 124078 - DNA, 75 bp, synthetic construct
  source 1..75: mol_type = other DNA
ttgttggcaaccgcattgatcgtcccctatttcaaacgctcgtcgcgggtgaaagcgacgtttgtgaatccgtaa

SEQ ID NO: 124079 - DNA, 75 bp, synthetic construct
  source 1..75: mol_type = other DNA
ttggaggctggttgcttggcccgttagcctggctgttagttgccttactgagtacgacgctggcgctgttgctgt

SEQ ID NO: 124080 - DNA, 75 bp, synthetic construct
  source 1..75: mol_type = other DNA
gtttatgtactcgcctaacggcaaaaaggacgggcttcagatcatcccgctgtcagaagtcgcagcgaaggatga

SEQ ID NO: 124081 - DNA, 75 bp, synthetic construct
  source 1..75: mol_type = other DNA
ggccgattcgctgaaacccggaacctacaccgttgactggcatgttgtttcggtggacgggcataaaacgaaagg

SEQ ID NO: 124082 - DNA, 75 bp, synthetic construct
  source 1..75: mol_type = other DNA
tagcggtactaaagaagaagatttggagccggagctgctggaactgttggacgagatggataatgtagcgcgcga

SEQ ID NO: 124083 - DNA, 75 bp, synthetic construct
  source 1..75: mol_type = other DNA
tgaagtggcaacgaaggacgattttttaacatcaaaaaagccagcgccgctgacctgctggacgcgcaccgcatc

SEQ ID NO: 124084 - DNA, 75 bp, synthetic construct
  source 1..75: mol_type = other DNA
accagcgaaacacgcaatgcttgcataatcgtaagccttgtctggctggtttttttatccggctctctgttgcct

SEQ ID NO: 124085 - DNA, 75 bp, synthetic construct
  source 1..75: mol_type = other DNA
tattactgaagtggcgaaaaataacacgctgactgatgatgatttttctgcgggaaagtcttcgacggtgagctg

SEQ ID NO: 124086 - DNA, 75 bp, synthetic construct
  source 1..75: mol_type = other DNA
ttataaaaaaacatttttttgagattgtgatgattgcttttgtggcatatttctggcatatttctggcttttttc

SEQ ID NO: 124087 - DNA, 75 bp, synthetic construct
  source 1..75: mol_type = other DNA
agtgactacctcagcaccattgataaccggggctggcggtggcgttccacgggagacctgcagactcaccggctg

SEQ ID NO: 124088 - DNA, 75 bp, synthetic construct
  source 1..75: mol_type = other DNA
cgccgggatctgtattccacctgctggagcctgacatcaaccaggagctgtacggcatgccggaatatctcagcg

SEQ ID NO: 124089 - DNA, 75 bp, synthetic construct
  source 1..75: mol_type = other DNA
agacgcctcagcataaggctgccatccggcgcattgttaattcgatgcctgaaaacaatggcgcgcgcgagtttt

SEQ ID NO: 124090 - DNA, 75 bp, synthetic construct
  source 1..75: mol_type = other DNA
agacacctcagcataaggctgccattcggcgcattgttaattcgatgcctgagaacaatggcgggcgcgagtatt

SEQ ID NO: 124091 - DNA, 75 bp, synthetic construct
  source 1..75: mol_type = other DNA
tgaagatgccgtaaaagcaggatttaacctggcgaacgtggatgacctgcgcgaccgctacagcggcccggcgtt

SEQ ID NO: 124092 - DNA, 75 bp, synthetic construct
  source 1..75: mol_type = other DNA
ttcttcggtggttctgtaactgtgttttgtgacgatgtttatcagtacacaatcaaagacaaaggtgggcgatac

SEQ ID NO: 124093 - DNA, 75 bp, synthetic construct
  source 1..75: mol_type = other DNA
gtaacgccggtcaacgtactgggtattgttgccgtcgaggctggtgctgcgattgctaaagggcagaacgtccag

SEQ ID NO: 124094 - DNA, 75 bp, synthetic construct
  source 1..75: mol_type = other DNA
catcactgtacagccgaactgattccaccagatccagaaaacaccgcgcgcgcagggctttggataggtaaaagt

SEQ ID NO: 124095 - DNA, 75 bp, synthetic construct
  source 1..75: mol_type = other DNA
catcactgtacagccgaactaattccagcagatccagaaaacaccgcgcacgccggactgtggataggtaaaagc

SEQ ID NO: 124096 - DNA, 75 bp, synthetic construct
  source 1..75: mol_type = other DNA
accgttcaccaggggacctgccggggacgaagacgcagatgacgatacggtcgaagacctataaaggaagcgggt

SEQ ID NO: 124097 - DNA, 75 bp, synthetic construct
  source 1..75: mol_type = other DNA
cagcggtgttacatgggcttcaaaaaccgtttcaccatttacagcctggtgtaactttaaccgtttcgaaagtta

SEQ ID NO: 124098 - DNA, 75 bp, synthetic construct
  source 1..75: mol_type = other DNA
cagcggtgtttcatgggcttcaaaaactgtttcaccatttacagcctggtgtaactttaaccgtttagaaagtta

SEQ ID NO: 124099 - DNA, 75 bp, synthetic construct
  source 1..75: mol_type = other DNA
ttaccggtctggcaaaaagcctgcgtgctgccgtgcatcacagctcaccgatttacgttaaacgcaatattctgg

SEQ ID NO: 124100 - DNA, 75 bp, synthetic construct
  source 1..75: mol_type = other DNA
tcggatgcaaatgcctgcgccgttccccagacagcagcatcaggcgacaccccggcaggtatttcagccgggatt

SEQ ID NO: 124101 - DNA, 75 bp, synthetic construct
  source 1..75: mol_type = other DNA
gacctgctggacgcgcaccgcatcccctttcagttgatgggcggcaaaccggagaacgtcgggtcgctgggcgat

SEQ ID NO: 124102 - DNA, 75 bp, synthetic construct
  source 1..75: mol_type = other DNA
gatggtagcaaagcagatggaactggtgctggaaggctgtttaagccgaatgctggtgaatcgtagccaggcgga

SEQ ID NO: 124103 - DNA, 75 bp, synthetic construct
  source 1..75: mol_type = other DNA
cgccgccgccgagatgatcccaatcacctggccggaatttgccgaactgcacccgttctgcccgccggaacaggc

SEQ ID NO: 124104 - DNA, 75 bp, synthetic construct
  source 1..75: mol_type = other DNA
gtttcacaccttaacctacataaaactttctgcattccgcacggcggtggtggtccgggtatgggaccgatcggc

SEQ ID NO: 124105 - DNA, 75 bp, synthetic construct
  source 1..75: mol_type = other DNA
aaaagcatgaactaccctgctcccgcattgaccgcatatcagatgtgactgtgggacaaatatttcggtctgcct

SEQ ID NO: 124106 - DNA, 75 bp, synthetic construct
  source 1..75: mol_type = other DNA
acggactgttgccacatgacaggttcaggaaaatcccccacacagcggatgtatgggaagtggctgaattaatca

SEQ ID NO: 124107 - DNA, 75 bp, synthetic construct
  source 1..75: mol_type = other DNA
ttccagcgtcatttccgttccgaccctggcgacaacgaagcgatcgtcaaagagctgtttgccatgagtgagtct

SEQ ID NO: 124108 - DNA, 75 bp, synthetic construct
  source 1..75: mol_type = other DNA
gcgccaggccacgaaaaaatccgtgatgccgttcgcgcctggtcggctgcagataatcaggatgttgttgccgca

SEQ ID NO: 124109 - DNA, 75 bp, synthetic construct
  source 1..75: mol_type = other DNA
gtgaaatgcgccaaccttccggcgatggttttagcgacgctactcggtgcattaattggtgaaatttgtttgttg

SEQ ID NO: 124110 - DNA, 75 bp, synthetic construct
  source 1..75: mol_type = other DNA
cagctggctgactggctggtgaaactgaccggttacgacgccgtttgtatgcagccgaactctggcgcacagggc

SEQ ID NO: 124111 - DNA, 75 bp, synthetic construct
  source 1..75: mol_type = other DNA
tggggcttggtatatgcaatggtgtactggcggaagatggctcgcctgaactgaaatcagaaagtcaggctgttg

SEQ ID NO: 124112 - DNA, 75 bp, synthetic construct
  source 1..75: mol_type = other DNA
aacatcaattcctacagttgggcagtggtacaccacgcctgcagggcatgttctacgtgttagcctggttgaccg

SEQ ID NO: 124113 - DNA, 75 bp, synthetic construct
  source 1..75: mol_type = other DNA
aaaagagcagaccccggaaaaagagacagaagttcagaatgaacaaccggttgtagaagaaatcgttccggcgca

SEQ ID NO: 124114 - DNA, 75 bp, synthetic construct
  source 1..75: mol_type = other DNA
cggtattccggcggtgctggcatttttgctgagtggtcggcgggcttcatttccccgtatctggcatgtgctcta

SEQ ID NO: 124115 - DNA, 75 bp, synthetic construct
  source 1..75: mol_type = other DNA
ggtcagcgtcgccgccgatattatggcgctggtgctgttaactgcgccgggtaaacagggcgcggatattgtctt

SEQ ID NO: 124116 - DNA, 75 bp, synthetic construct
  source 1..75: mol_type = other DNA
ggtgatttgtgaaccgctgggccgtaattaccgcgtcagtatgccgcttatagccttttgctccggaaaaatgtt

SEQ ID NO: 124117 - DNA, 75 bp, synthetic construct
  source 1..75: mol_type = other DNA
agtcgtgtgtgaattactggggcgtaactacaccattagctatccgttgatggcgtttcagtccggaaaaatgtt

SEQ ID NO: 124118 - DNA, 75 bp, synthetic construct
  source 1..75: mol_type = other DNA
tttaggatatacccagtatatatagtttgtcttattttatgcacctattttctatcaaagccaatagatttagac

SEQ ID NO: 124119 - DNA, 75 bp, synthetic construct
  source 1..75: mol_type = other DNA
tgagtttctgaatatcaagaacgtgagtcgggacgacatgatggcggcacaccgtgtgccgccgcaaatgatggg

SEQ ID NO: 124120 - DNA, 75 bp, synthetic construct
  source 1..75: mol_type = other DNA
ataaaaccaattaaatcattaaactttttaggtgatatttcatattctctatacctcacccatccaataataata

SEQ ID NO: 124121 - DNA, 75 bp, synthetic construct
  source 1..75: mol_type = other DNA
cattaaaataaaaaacgacaaggaaaataagtttgttattaatttctatgatcccaatcagaccgcgacgcataa

SEQ ID NO: 124122 - DNA, 75 bp, synthetic construct
  source 1..75: mol_type = other DNA
atgagcaacactactgattggggaagcatgatagccaacatagttatggctactaccgctgtctgggctgcattc

SEQ ID NO: 124123 - DNA, 75 bp, synthetic construct
  source 1..75: mol_type = other DNA
ctgccgggctcagcaccaccagtggccatgtttccggttcgttcactgccggactgcctctggtttacccggact

SEQ ID NO: 124124 - DNA, 75 bp, synthetic construct
  source 1..75: mol_type = other DNA
ataatagagacgatagccccgaagggattgtcaaggaaattaaagaatggcgagctgctaacggtaagccaggat

SEQ ID NO: 124125 - DNA, 75 bp, synthetic construct
  source 1..75: mol_type = other DNA
cgcgcaaagcggtaccgatgttgaggctttgcgcgatgcgatgcgcagctcgaaagggctcggcaacttcaaaaa

SEQ ID NO: 124126 - DNA, 75 bp, synthetic construct
  source 1..75: mol_type = other DNA
aatgcaattaaccatgttacaaacgacaaaggcgaaattgatgatgatgaacttttacgcgtcaggatcagatta

SEQ ID NO: 124127 - DNA, 75 bp, synthetic construct
  source 1..75: mol_type = other DNA
gcttactatgcaaaggagcttcccacagattacccccgccatgctggacaggcttaaaagggaagtggttaaagc

SEQ ID NO: 124128 - DNA, 75 bp, synthetic construct
  source 1..75: mol_type = other DNA
tcacgctgacctatcgtctggcacagaaggaagggcagtcgcttggcaagttcggaccgcacgacttgcggcgca

SEQ ID NO: 124129 - DNA, 75 bp, synthetic construct
  source 1..75: mol_type = other DNA
accttcggccgctatggtgtcggagggatcacgctagcggaagctcgcgaacggctgggcgaagccaagaagatg

SEQ ID NO: 124130 - DNA, 75 bp, synthetic construct
  source 1..75: mol_type = other DNA
gccgctttgtgctggattttctggtgttcggtaatgcgtttctggaaaagcgttacagcaccaccggtaaggtca

SEQ ID NO: 124131 - DNA, 75 bp, synthetic construct
  source 1..75: mol_type = other DNA
ggtgacgttgagaaggtggcaaaggtctttgtgcgtaacgagctgaccccgctacaggcacggttcatggagttg

SEQ ID NO: 124132 - DNA, 75 bp, synthetic construct
  source 1..75: mol_type = other DNA
tatgcccagtggtcaccggaccgtcttcatggtgtggaacaactgagcctcgggggtgagagttcagtgcgtggc

SEQ ID NO: 124133 - DNA, 75 bp, synthetic construct
  source 1..75: mol_type = other DNA
cgctggaaatgctttatccgatttatgatacgccgacaaatatgttgttcactcagggggcaatacatcgtacag

SEQ ID NO: 124134 - DNA, 75 bp, synthetic construct
  source 1..75: mol_type = other DNA
aaggaagcggctttaatgaactgcggtttgaagacgccacgggcggtgaacaggtctatatccacgcgcagaaga

SEQ ID NO: 124135 - DNA, 75 bp, synthetic construct
  source 1..75: mol_type = other DNA
cttacaaaatctcagatgaaaatcttgtgtgaatcaaaaaatgttaataatgttcctgggttgcttttagctcta

SEQ ID NO: 124136 - DNA, 75 bp, synthetic construct
  source 1..75: mol_type = other DNA
cgctggtatgagccgcccgtcagctttgacgggctggcacgaaccttccgcgccgccgtgcatcacagctcaccg

SEQ ID NO: 124137 - DNA, 75 bp, synthetic construct
  source 1..75: mol_type = other DNA
agtatggatgaacctgtaaagatatcgtttgagttaaaagaaatcagttttaaagatttttaccagcatgaaacc

SEQ ID NO: 124138 - DNA, 75 bp, synthetic construct
  source 1..75: mol_type = other DNA
tgggtttgggaatttgcggcacaactcatgccgatggaggttcaccagaactaaaagcggaaagccaagcgatta

SEQ ID NO: 124139 - DNA, 75 bp, synthetic construct
  source 1..75: mol_type = other DNA
gagccgacacctttcacgcccggctccgtgtttcacctgctggagccggatattaatcaggagctgtacggcctg

SEQ ID NO: 124140 - DNA, 75 bp, synthetic construct
  source 1..75: mol_type = other DNA
ttccttccgtatttttaaagatgaagatacagacgcatttgactcctatttttattcggtttgcgataataaagc

SEQ ID NO: 124141 - DNA, 75 bp, synthetic construct
  source 1..75: mol_type = other DNA
tcgtgatcctgatggtgggcgtcaacggtgtgggtaaaaccacgacgatcggtaagctggcgcgtcagtttgagc

SEQ ID NO: 124142 - DNA, 75 bp, synthetic construct
  source 1..75: mol_type = other DNA
ctactggtttatgcaatacggtatgacaacccagccgtatcagttcacgaaaggcagcatttttcatctgatgga

SEQ ID NO: 124143 - DNA, 75 bp, synthetic construct
  source 1..75: mol_type = other DNA
gggtgaagtttcactgggaccgttatcacgggatgacggaggagagttcgtgctgggtgagggtgtcacaggcgt

SEQ ID NO: 124144 - DNA, 75 bp, synthetic construct
  source 1..75: mol_type = other DNA
gcacagcctggtggtgaagggggacctggcgaggaaggtgagtggcgcgctggggataaaggtcgacggggatat

SEQ ID NO: 124145 - DNA, 75 bp, synthetic construct
  source 1..75: mol_type = other DNA
tttaaaagaattcaatatatgcccagaaaaggtagcagaatacctaagcgagttcagcggaaaacatttcctcga

SEQ ID NO: 124146 - DNA, 75 bp, synthetic construct
  source 1..75: mol_type = other DNA
gctgccctgctgatgctgggctcaatgctgtttctgccatcttccccatggtggggaaagcaaatttcccttact

SEQ ID NO: 124147 - DNA, 75 bp, synthetic construct
  source 1..75: mol_type = other DNA
cccttcagcaaaaggccagtgcctttcaggcttctcttgttttccttatttttccattgattgcggtaagccttg

SEQ ID NO: 124148 - DNA, 75 bp, synthetic construct
  source 1..75: mol_type = other DNA
gcattactaacctgaacactcaggtcactaatctggatactcgcgtgaccaatatcgaaaacggcattggcgata

SEQ ID NO: 124149 - DNA, 75 bp, synthetic construct
  source 1..75: mol_type = other DNA
accaaacttccactagcgtttgaactgccaggagaaaagcatattttgtttcgcggtcattgcagcgaaagcgat

SEQ ID NO: 124150 - DNA, 75 bp, synthetic construct
  source 1..75: mol_type = other DNA
ccagccacctgctgcccacgctgtttgaccgcctgtgcgatgacgccccgaaccagaagcgcgaccacgatatca

SEQ ID NO: 124151 - DNA, 75 bp, synthetic construct
  source 1..75: mol_type = other DNA
tggttcggctgataccgatgcggttaacgtgggtcagttgaaagtaacggacgcgcaggtttcccagaataccca

SEQ ID NO: 124152 - DNA, 75 bp, synthetic construct
  source 1..75: mol_type = other DNA
gtgggatgcaaccgctaattcaaatactggcgcattcagtgctgcacacggaacactcaaaaccgccagcaagat

SEQ ID NO: 124153 - DNA, 75 bp, synthetic construct
  source 1..75: mol_type = other DNA
aagccgctacggcggcctgccaggcatgccagattcgggaagagctgaggctattatcgggagagtccaggccag

SEQ ID NO: 124154 - DNA, 75 bp, synthetic construct
  source 1..75: mol_type = other DNA
tgttccgctgtgtgagtatccgtgagaacgatgacggcacgtatgccatcactgccgtgcagcatgtaccggaaa

SEQ ID NO: 124155 - DNA, 75 bp, synthetic construct
  source 1..75: mol_type = other DNA
cgcaggcttacacgccgggtgccagcatggcctctattggtggcggtacttacaacggtgaatcggctgttgctt

SEQ ID NO: 124156 - DNA, 75 bp, synthetic construct
  source 1..75: mol_type = other DNA
tacggtctgccgccgctggctggcagctttctgtatgaacacaaatgggacgatatccgcagggccattttacgt

SEQ ID NO: 124157 - DNA, 75 bp, synthetic construct
  source 1..75: mol_type = other DNA
cgctctcttggatcgatccgctgggactgactgcatgttccaaaaacgcgaaatctttgcgagaggggcctcaag

SEQ ID NO: 124158 - DNA, 75 bp, synthetic construct
  source 1..75: mol_type = other DNA
gggctgcattacaatctgcacaggtactatgatccggatgtcgggcggttcatggtaacggacccgatagggctg

SEQ ID NO: 124159 - DNA, 75 bp, synthetic construct
  source 1..75: mol_type = other DNA
gccatcgctggcggcagttacagcaacgtcggtgacgcgctggaagcgatcgataccacgctggatgacgctctg

SEQ ID NO: 124160 - DNA, 75 bp, synthetic construct
  source 1..75: mol_type = other DNA
acgactatgccgggaccatgaccggcggacgtatcctgtccatcgatgccgccagccgcaccctgacgctggacc

SEQ ID NO: 124161 - DNA, 75 bp, synthetic construct
  source 1..75: mol_type = other DNA
cttataccaatatgcgcctaatcctcagggatggattgatccattaggtcttagtaaaacccatactgggtatgt

SEQ ID NO: 124162 - DNA, 75 bp, synthetic construct
  source 1..75: mol_type = other DNA
tccgtaaattcacattctgctgatgctcatattggaatgaagaatccagtagattttccaactatttcaggtcga

SEQ ID NO: 124163 - DNA, 75 bp, synthetic construct
  source 1..75: mol_type = other DNA
gctcgatcagcaaaatcagcagttaacgcaatcattttgcgatgtggttgatgccattatcgccgggggcggaat

SEQ ID NO: 124164 - DNA, 75 bp, synthetic construct
  source 1..75: mol_type = other DNA
aaactgtccgcgaaccagattgaaggcgatctcgttaaaacagtgggcaaagctttcccccgggattcccgtgca

SEQ ID NO: 124165 - DNA, 75 bp, synthetic construct
  source 1..75: mol_type = other DNA
ttatggtgcctacgtggacgcgaatgcacttaatggcattgctattggtagcaacgcgagtgcaaatcatgcaaa

SEQ ID NO: 124166 - DNA, 75 bp, synthetic construct
  source 1..75: mol_type = other DNA
ttcgaaagagtggaaggacgccaacgataaatggaatgccatgtggggcgtcaaaattgagcagaccgaagacgg

SEQ ID NO: 124167 - DNA, 75 bp, synthetic construct
  source 1..75: mol_type = other DNA
ccatcacggcggtgcagcatgtgccggaaaaagaagccattgtggataacggggcccgctttgagccgatgtccg

SEQ ID NO: 124168 - DNA, 75 bp, synthetic construct
  source 1..75: mol_type = other DNA
acgatgccggacaggcgctacattatgaaattttcgacgacgccaattttatggtgctggtggaaccagagatta

SEQ ID NO: 124169 - DNA, 75 bp, synthetic construct
  source 1..75: mol_type = other DNA
ggtcggtggtctgggcgatcgttttacgcgtgtggcggcggcccatgccgtgcataacggtctgactgtcctgcc

SEQ ID NO: 124170 - DNA, 75 bp, synthetic construct
  source 1..75: mol_type = other DNA
accaacctgactgacgctgttgacagtctcggtgatgactctctgctgtggaacgctactgcgggggcattcagt

SEQ ID NO: 124171 - DNA, 75 bp, synthetic construct
  source 1..75: mol_type = other DNA
tcagaggtgacttcgttaaagctgtatccaaatcatttccgaaacaggctggtacgtggggtaacacggaaacac

SEQ ID NO: 124172 - DNA, 75 bp, synthetic construct
  source 1..75: mol_type = other DNA
gtcacgattaacaagaactgccgggttctgggaaaactgtccgcgaaccagattgaaggcgatctcgttaaaaca

SEQ ID NO: 124173 - DNA, 75 bp, synthetic construct
  source 1..75: mol_type = other DNA
tgccggggaaacagacgcaccggagattatccgtttcagttacgacagactggggcggatgctgactgaggagac

SEQ ID NO: 124174 - DNA, 75 bp, synthetic construct
  source 1..75: mol_type = other DNA
catcagacgggagactgacggcgaaaaatgcggatatcagtggcagtgtgaatgcgaactcaggaacgctcaaca

SEQ ID NO: 124175 - DNA, 75 bp, synthetic construct
  source 1..75: mol_type = other DNA
cgcagaccgtcaataagaaactggaagaccagagtgcggcgatccagcagatacagaaggttcaggttgatacaa

SEQ ID NO: 124176 - DNA, 75 bp, synthetic construct
  source 1..75: mol_type = other DNA
cgggagaataacgatatttattcgtcatgccgcctgatagtgaagaaaaacggtgctgaaatttataaccgtacc

SEQ ID NO: 124177 - DNA, 75 bp, synthetic construct
  source 1..75: mol_type = other DNA
tcacctgaactggcagaccttactgtaggcgctgcgaccggagagatatctgtatcttctgtcgccgacacgtta

SEQ ID NO: 124178 - DNA, 75 bp, synthetic construct
  source 1..75: mol_type = other DNA
caacatgctggaacaggaaggcttggtgatgcagaattgcgaatacttaaaggtgaggatggtaaactgacgtat

SEQ ID NO: 124179 - DNA, 75 bp, synthetic construct
  source 1..75: mol_type = other DNA
ggaaatgtcaggcggcggagggggcggtggaggtggggcagtcgccggaagctcgacaatgctgaatccaaaatt

SEQ ID NO: 124180 - DNA, 75 bp, synthetic construct
  source 1..75: mol_type = other DNA
ggcgcaggacggcattcgggtacgacgcttacgggcggctgacccggctgacaaacgagaacggagaaagctatc

SEQ ID NO: 124181 - DNA, 75 bp, synthetic construct
  source 1..75: mol_type = other DNA
attgtgaagcttagtaacgcgaccaatagcaacagcacgacagaggcggcgactccgagcgcggtgaaggcggca

SEQ ID NO: 124182 - DNA, 75 bp, synthetic construct
  source 1..75: mol_type = other DNA
tgggggctgaagttgccgacgttgcgtcagcgcctgttccgctgtgtgagtatccgtgagaacgatgacggcacg

SEQ ID NO: 124183 - DNA, 75 bp, synthetic construct
  source 1..75: mol_type = other DNA
cgcgttattgaagcaggtaaaccatttactccgtcaggccaatctgccggggcagtttccgctattagttggcta

SEQ ID NO: 124184 - DNA, 75 bp, synthetic construct
  source 1..75: mol_type = other DNA
ccccgggactcccgtgcaccggagcggtggccatcagggaccattaccgtcagggtttatgacgatcagccgttt

SEQ ID NO: 124185 - DNA, 75 bp, synthetic construct
  source 1..75: mol_type = other DNA
caaatatgattaatttctggaagaatgtcagtattgctggcgcatttttgctgctggcgattaccggcccgggag

SEQ ID NO: 124186 - DNA, 75 bp, synthetic construct
  source 1..75: mol_type = other DNA
acaggcagagtggctgtgaaagaaagtaatcagcgatggtgctctgacgggttcgagttctgctgtgataacgga

SEQ ID NO: 124187 - DNA, 75 bp, synthetic construct
  source 1..75: mol_type = other DNA
accagctataaaggtgaagaggtgcgtaagggtgacgtgacggtggcaaaaaattatctcactcaggatgaagtc

SEQ ID NO: 124188 - DNA, 75 bp, synthetic construct
  source 1..75: mol_type = other DNA
gtgagtttcatgcttcgcctgaccgtggccgcggatgacggcagtgagcggctggtcagcacagcccggacggcg

SEQ ID NO: 124189 - DNA, 75 bp, synthetic construct
  source 1..75: mol_type = other DNA
tgattctcccgtgctggtggaactagcggtgggggccgcaactggtgaaatccccgtatcttcagtagcggaaaa

SEQ ID NO: 124190 - DNA, 75 bp, synthetic construct
  source 1..75: mol_type = other DNA
aatcacaacaaaaaacggccagaatccctctagaagttttaagcgaaatgaatttggtcaaagaggaaaacgaaa

SEQ ID NO: 124191 - DNA, 75 bp, synthetic construct
  source 1..75: mol_type = other DNA
ccggatgaagtcgacgttgccactgtggttaaagtgattgatacgtgcccgagcggcgcgctgaaataccgtcat

SEQ ID NO: 124192 - DNA, 75 bp, synthetic construct
  source 1..75: mol_type = other DNA
cttttcgaagtctccgccacctacctggtggctactgcgagagggcatatattcaatgatgccaataagcgtacc

SEQ ID NO: 124193 - DNA, 75 bp, synthetic construct
  source 1..75: mol_type = other DNA
cacccgtccgctggcggtgctgtttattttctacacgctgggtacggcggtgattggtcaccattactgggatat

SEQ ID NO: 124194 - DNA, 75 bp, synthetic construct
  source 1..75: mol_type = other DNA
atgaactcactacgttattttgattttggtgctgcccgccccgttttgttattaattgcccgtatcgccgtggtc

SEQ ID NO: 124195 - DNA, 75 bp, synthetic construct
  source 1..75: mol_type = other DNA
gtaccgctggttttttagttactgctgcaaaaggcgagatcaaacgccgccagcgccgcaaggccaaagaacagg

SEQ ID NO: 124196 - DNA, 75 bp, synthetic construct
  source 1..75: mol_type = other DNA
atcagttcctgcaatttaacgaccgagaggttctacagggcgctggtaaaatcagcaagaaaatggccgatgaaa

SEQ ID NO: 124197 - DNA, 75 bp, synthetic construct
  source 1..75: mol_type = other DNA
ataatattattaatacgttagcagaaaactgcgatgtcatcatttgcggtatgggaactcccgtacaagaagaat

SEQ ID NO: 124198 - DNA, 75 bp, synthetic construct
  source 1..75: mol_type = other DNA
tgcgcgatcgttggcgtgaacagggcggcccaggcagcggtatctggtacgatttagcaccgcaccttcttgatc

SEQ ID NO: 124199 - DNA, 75 bp, synthetic construct
  source 1..75: mol_type = other DNA
tgcaaattaccgggcggtgaaacgattgatgaatgggcattgtggcgacgggaccatccggctggtgaaaaataa

SEQ ID NO: 124200 - DNA, 75 bp, synthetic construct
  source 1..75: mol_type = other DNA
ttcaaccccttctcagccagaagcacccaaaccgccgcagattggtatggcaaatccggcgtcggtctattgcca

SEQ ID NO: 124201 - DNA, 75 bp, synthetic construct
  source 1..75: mol_type = other DNA
catatatttcatattactcactagaaaaagttaggtgtgaaaagatatcatctggatatgacgccaacatagcaa

SEQ ID NO: 124202 - DNA, 75 bp, synthetic construct
  source 1..75: mol_type = other DNA
acggcatcccgtgcgtggagcaggtcttcaactctgaaaccaattacattctcgtgcgtattaaagcttccagcg

SEQ ID NO: 124203 - DNA, 75 bp, synthetic construct
  source 1..75: mol_type = other DNA
aaacgggacggttacagtcaccatcagcgatgatcataactttgaccgtcaaatcattattccgcccattatctt

SEQ ID NO: 124204 - DNA, 75 bp, synthetic construct
  source 1..75: mol_type = other DNA
ctggtgtacctgctgtgtgttttcctggtataccgccgctgggttgctccgctaccggtcgttggccagctgagc

SEQ ID NO: 124205 - DNA, 75 bp, synthetic construct
  source 1..75: mol_type = other DNA
gtgagtttgcttacgacgaaaaccactgcatgacgctgcaccgccagccgggcggcgaagggtattattaccagt

SEQ ID NO: 124206 - DNA, 75 bp, synthetic construct
  source 1..75: mol_type = other DNA
caaaaaagcagtgaaatcatgacgacaacggaccagaagctgggagatcaggaggccaccatccagcagatacaa

SEQ ID NO: 124207 - DNA, 75 bp, synthetic construct
  source 1..75: mol_type = other DNA
catgctgaacgtcttccgttcacggtacagctggacgatgtggctgggggcgctgataacgtcattgctgttcgt

SEQ ID NO: 124208 - DNA, 75 bp, synthetic construct
  source 1..75: mol_type = other DNA
gtgcgatggccgtggtgtatgtcggagaatttctgctgggtaaagtgctggacctgcccgctgagccgtttatga

SEQ ID NO: 124209 - DNA, 75 bp, synthetic construct
  source 1..75: mol_type = other DNA
aggagcgaataactggacaccaacaaccagtatcagcgatctgctggttgtggtgatgaaaaaatccacagcagg

SEQ ID NO: 124210 - DNA, 75 bp, synthetic construct
  source 1..75: mol_type = other DNA
cggctgacggcgaaaaatgccgatatcagcggtaacgtgaatgcgaactccgggacgctcaataacgtcacgatt

SEQ ID NO: 124211 - DNA, 75 bp, synthetic construct
  source 1..75: mol_type = other DNA
tcagccgaagacaggtggcacttatttttgatatcggcctttcaaccctttatcgttattatcctgcgagcgttt

SEQ ID NO: 124212 - DNA, 75 bp, synthetic construct
  source 1..75: mol_type = other DNA
ctagtgtacctgctatgtgttttcctggtataccgccgttggatagctccgctaccggttgttggtcagctgcgc

SEQ ID NO: 124213 - DNA, 75 bp, synthetic construct
  source 1..75: mol_type = other DNA
ctttttgccgataagtctatacctgacgtgatcctgacgttgctgaccatctttatccttgcctcgttgaatgag

SEQ ID NO: 124214 - DNA, 75 bp, synthetic construct
  source 1..75: mol_type = other DNA
tttcgactctgaaaccaactacattctggcgcgctttaaagcctccagcgcagtgtttaaatctttgtgggatca

SEQ ID NO: 124215 - DNA, 75 bp, synthetic construct
  source 1..75: mol_type = other DNA
aaacggtgggaaaagcctttccgagaaatggcagttatgccagcggtacaataacggtcactgtgtacgatgacc

SEQ ID NO: 124216 - DNA, 75 bp, synthetic construct
  source 1..75: mol_type = other DNA
acggcgaaaaatgcggatatcagcggtaacgtgaacgcgaactccgggacgctcaacaacgtcacgattaatcag

SEQ ID NO: 124217 - DNA, 75 bp, synthetic construct
  source 1..75: mol_type = other DNA
cgatgtttgttgggcagggcgatcagatattcatgaacgaagtgttcctgaaatatctgacggctcccaccatta

SEQ ID NO: 124218 - DNA, 75 bp, synthetic construct
  source 1..75: mol_type = other DNA
ggcgcaggacggcgttcgggtacgatgcttacgggcgtctggtcacgctgacaaacgagaacggagaaagctacc

SEQ ID NO: 124219 - DNA, 75 bp, synthetic construct
  source 1..75: mol_type = other DNA
acagtgccgacgctggaaaactggcaactggacttacagggcatttccgacaagctggacggcgtaaaagtggtc

SEQ ID NO: 124220 - DNA, 75 bp, synthetic construct
  source 1..75: mol_type = other DNA
aggtcggtgagtttattgagaaaggttaccgtaccgcccgccgtcataccggtgcctatatcaccatcacacaga

SEQ ID NO: 124221 - DNA, 75 bp, synthetic construct
  source 1..75: mol_type = other DNA
acatcattattgatgatgacgatatcagcctgctgccgctgcatgcacgcgcgcgtcgcggtatcggctatctgc

SEQ ID NO: 124222 - DNA, 75 bp, synthetic construct
  source 1..75: mol_type = other DNA
cagctacaacggtcaggatgaactgctgaagacacggcacagccggcggggcgaaacggattacttttacgacag

SEQ ID NO: 124223 - DNA, 75 bp, synthetic construct
  source 1..75: mol_type = other DNA
agacgcacgacccgctggggcgggtgtcgcagacgcagtggcacccggtgtggcacgaaccggagacggaggtgg

SEQ ID NO: 124224 - DNA, 75 bp, synthetic construct
  source 1..75: mol_type = other DNA
tactgctgcgtcgttaccgctatgacgaggccggcgacctgaacggcgtgtacgacagcacggggcacctgctgc

SEQ ID NO: 124225 - DNA, 75 bp, synthetic construct
  source 1..75: mol_type = other DNA
ggcgagatagggaaaacccatctggctcaggagttgtggacgcagattgataacggtcagcttgcgcctgacctg

SEQ ID NO: 124226 - DNA, 75 bp, synthetic construct
  source 1..75: mol_type = other DNA
cgaccgcaacagcaactgtctgaatctgtactacgacgagctggggcgcatcacgcaaatcagcggtgaacagca

SEQ ID NO: 124227 - DNA, 75 bp, synthetic construct
  source 1..75: mol_type = other DNA
acagtggttgattcttataatcaaaaaactattcagaaaggaataaataaactggtctgttatggggtttaccaa

SEQ ID NO: 124228 - DNA, 75 bp, synthetic construct
  source 1..75: mol_type = other DNA
tacgatttcagcagccagtaaagatgcggttaacggctctcagttgtatgacctgcagcaggatgctctgttgtg

SEQ ID NO: 124229 - DNA, 75 bp, synthetic construct
  source 1..75: mol_type = other DNA
aacagaaagtgttcgccatgatagacgattgcgattacacccagtggcacaactttatttttgacacgatcaacg

SEQ ID NO: 124230 - DNA, 75 bp, synthetic construct
  source 1..75: mol_type = other DNA
tgattgcagcggctggctctgtatatatcacgtcgaaatattttaaaactgagctccccggtaacgatgaaatag

SEQ ID NO: 124231 - DNA, 75 bp, synthetic construct
  source 1..75: mol_type = other DNA
ggcgttgctgaatacagcgtgtgggggctgaagctgccgacgctgcaccagcgcctgttccgctgtgtgagtatc

SEQ ID NO: 124232 - DNA, 75 bp, synthetic construct
  source 1..75: mol_type = other DNA
tcacgattaatcagaactgtcggattctgggaaaactgtcagctaaccagattgaaggtgatattgtcaaaacgg

SEQ ID NO: 124233 - DNA, 75 bp, synthetic construct
  source 1..75: mol_type = other DNA
ttcaacgacgccagcgcacagggtgttggcgctacagctataggttataactctgtcgccaaaggcgatagcagc

SEQ ID NO: 124234 - DNA, 75 bp, synthetic construct
  source 1..75: mol_type = other DNA
gctgttcttcattcatggtgctgttctggtgtacctgctgtgtgtgttcctggtttaccgccgctgggttgcacc

SEQ ID NO: 124235 - DNA, 75 bp, synthetic construct
  source 1..75: mol_type = other DNA
cggacggtatgctggaaaccgcctttcagggcgtgaatgcggttattggcagtatcagcaatctgttcagagatg

SEQ ID NO: 124236 - DNA, 75 bp, synthetic construct
  source 1..75: mol_type = other DNA
ggtaaggcggggtgagcaggggcactggcttatcagcagcgataatggacagttttttttgtttgaaacggaccc

SEQ ID NO: 124237 - DNA, 75 bp, synthetic construct
  source 1..75: mol_type = other DNA
aaagcaagttgagcggtggtatcgcttctgcaatggcgatgaccggtctgccgcaggcttacacgccgggtgcca

SEQ ID NO: 124238 - DNA, 75 bp, synthetic construct
  source 1..75: mol_type = other DNA
aaaaagcgtgctgctgaacggtacgccagtcctggacagcgaggggaagacaaacttttccggtgttacggtggt

SEQ ID NO: 124239 - DNA, 75 bp, synthetic construct
  source 1..75: mol_type = other DNA
tgaaagtaacggacgcgcaggtttcccagaatacccagagcattactaacctgaacactcaggtcactaatctgg

SEQ ID NO: 124240 - DNA, 75 bp, synthetic construct
  source 1..75: mol_type = other DNA
actctggcctgagtcattcaaccgggaaaaaacaaaaccacttaaagtggggatacctgacgacctgatacagga

SEQ ID NO: 124241 - DNA, 75 bp, synthetic construct
  source 1..75: mol_type = other DNA
gttgcggcaggtgatctctccacaaccagtaccgatgctgttaacggttcccagttaaacgcaaccaatattctg

SEQ ID NO: 124242 - DNA, 75 bp, synthetic construct
  source 1..75: mol_type = other DNA
ctaatgaagattaccacagcgtaggtgaagccctggatgcgctcgatgataacgcgctgctgtgggatgaagacg

SEQ ID NO: 124243 - DNA, 75 bp, synthetic construct
  source 1..75: mol_type = other DNA
ctcgttttttcccactgccgcaggggcaaatcgccgtcactctgcgtgacgcacaggcctgctttaacctgaatg

SEQ ID NO: 124244 - DNA, 75 bp, synthetic construct
  source 1..75: mol_type = other DNA
cacggtcacatgacgctggagttttcggtatcagcgtggctggtaaatgactggtatcccacagccagtatcagt

SEQ ID NO: 124245 - DNA, 75 bp, synthetic construct
  source 1..75: mol_type = other DNA
gtgaccaaaaaagcggcttctgcgtattttcatgaaaggagatcactcaataacttccatcgagatcgggtaata

SEQ ID NO: 124246 - DNA, 75 bp, synthetic construct
  source 1..75: mol_type = other DNA
taacgaatggcatccgcatagtgcgctgggttatcgctcgccacgggaatatctgcggcagcgggccagtaatgg

SEQ ID NO: 124247 - DNA, 75 bp, synthetic construct
  source 1..75: mol_type = other DNA
tggttgccacggtagagtatgatagacaggcccatgaagtagcacgaagaatcaataaacatattaagcttatag

SEQ ID NO: 124248 - DNA, 75 bp, synthetic construct
  source 1..75: mol_type = other DNA
gaatgattaactacatagcaacctcaacatctatcgaagacttaatgagtgctattgcggaaaatggttttttcc

SEQ ID NO: 124249 - DNA, 75 bp, synthetic construct
  source 1..75: mol_type = other DNA
cttctgggtcaggcactgaaagagcgcattgatgcttcagcgctgcgtacggaggtcacgcaactggaagaagat

SEQ ID NO: 124250 - DNA, 75 bp, synthetic construct
  source 1..75: mol_type = other DNA
ccagcaggagtaccagcaggcgctgtggtacagcgccagtgcagaaagcctggcgttgagcgcgctcagtctgag

SEQ ID NO: 124251 - DNA, 75 bp, synthetic construct
  source 1..75: mol_type = other DNA
aacgagcttccggcgtctccagtagagtggctgacggataatggttcatgctaccgggctaatgaaacacggcag

SEQ ID NO: 124252 - DNA, 75 bp, synthetic construct
  source 1..75: mol_type = other DNA
cggtgctgaaatttataaccgtaccgcgctggataatacgctgatttacagtggtgttattgatatgccagctgg

SEQ ID NO: 124253 - DNA, 75 bp, synthetic construct
  source 1..75: mol_type = other DNA
gagtggaaggacgccaacgataaatggaatgccatgtggggcgtcaaaattgagcagaccgaagacggtaagcat

SEQ ID NO: 124254 - DNA, 75 bp, synthetic construct
  source 1..75: mol_type = other DNA
agatccgcgaaattttaatcagcgagtcagcttgggaagaaatgacctgcttattcgcaccttccttaggcgaag

SEQ ID NO: 124255 - DNA, 75 bp, synthetic construct
  source 1..75: mol_type = other DNA
accaaccatcctgccgctgctgatcctgtcaccatgcgggctattcaaaaagccatcgcgctgattgatctgaaa

SEQ ID NO: 124256 - DNA, 75 bp, synthetic construct
  source 1..75: mol_type = other DNA
gcagcattgatgatatcgaacgcagcctgcaaaacgaccgtctggcacagcaggcagaggcactggaaaaccagg

SEQ ID NO: 124257 - DNA, 75 bp, synthetic construct
  source 1..75: mol_type = other DNA
atcggttcttttctcttgaagtggtcaacaaaaactggccaccgcgttagagtttttccagtatcggttttctga

SEQ ID NO: 124258 - DNA, 75 bp, synthetic construct
  source 1..75: mol_type = other DNA
aagtttacgccgccattgcccgccgtttgtttctgccgaagcctgtgcatcaagaagtgatacagcacatccgtg

SEQ ID NO: 124259 - DNA, 75 bp, synthetic construct
  source 1..75: mol_type = other DNA
tgcgtgaagcggcagaacgcgctattccggcaatggaacgattgttgatactttcatttgatgataggttgttaa

SEQ ID NO: 124260 - DNA, 75 bp, synthetic construct
  source 1..75: mol_type = other DNA
actggtttgtcggtacggcaattgatatccagcaggcgaaagattacgcgcccagccatttcctgctctacgtac

SEQ ID NO: 124261 - DNA, 75 bp, synthetic construct
  source 1..75: mol_type = other DNA
acaggcccatgaagtagcacgaagaatcaataaacatattaagcttataggttctgaaatagcagagaaaaatag

SEQ ID NO: 124262 - DNA, 75 bp, synthetic construct
  source 1..75: mol_type = other DNA
gtgtgtcggcgctgaaaaaatatctttctatctttagtgatggcgatagcgtggcggctgcgcaatcgcaactgg

SEQ ID NO: 124263 - DNA, 75 bp, synthetic construct
  source 1..75: mol_type = other DNA
atcgcatccagagaaactaaaggggccattcccggtagctacagtgcggttattgatatgccgagtggcagggga

SEQ ID NO: 124264 - DNA, 75 bp, synthetic construct
  source 1..75: mol_type = other DNA
agcccagatgggggaccgttctaaagatgaaaaggccgaacagaaaagcgataaagccggtgagcttatccctgc

SEQ ID NO: 124265 - DNA, 75 bp, synthetic construct
  source 1..75: mol_type = other DNA
aagattacgcacccagccatttcctgctctacgtacgttattccgccgccggatggcagggtgacatggatttac

SEQ ID NO: 124266 - DNA, 75 bp, synthetic construct
  source 1..75: mol_type = other DNA
ttgtctgcatctgatctcaagctgggcgaaggtggtgaaattccaccggagaaagtagctcaactggggagtaag

SEQ ID NO: 124267 - DNA, 75 bp, synthetic construct
  source 1..75: mol_type = other DNA
aggtcagaggggatttcgttaaagctgtatcaaaagccttcccgaaaaaagtcggtacgtggggtaacacggaaa

SEQ ID NO: 124268 - DNA, 75 bp, synthetic construct
  source 1..75: mol_type = other DNA
taaattttttctaagtctgcaacaacatcatgcgggaatctggcatttaactgttgcgacttattatttgttgaa

SEQ ID NO: 124269 - DNA, 75 bp, synthetic construct
  source 1..75: mol_type = other DNA
gaaaaaaaataagtgttcaacacttgacgtgtttaacacctgggtttaaattggtgttcaacaccttgttggcgc

SEQ ID NO: 124270 - DNA, 75 bp, synthetic construct
  source 1..75: mol_type = other DNA
taaagtttttatatgcggcaaacctgctgcacgaatgggcgatatgtgcgctcatggggggacaattgttagtgg

SEQ ID NO: 124271 - DNA, 75 bp, synthetic construct
  source 1..75: mol_type = other DNA
cggtgcggagtccggagagtaacggaatagcagagagcttcgtgaaaacgataaagcgtgactacatcagtatca

SEQ ID NO: 124272 - DNA, 75 bp, synthetic construct
  source 1..75: mol_type = other DNA
tgaagaagcgccactattgccggataacaggcaaagaaaaggccaccagtcacggtggccctgcgacacaaattt

SEQ ID NO: 124273 - DNA, 75 bp, synthetic construct
  source 1..75: mol_type = other DNA
ttccagaaaggcaatcagggggcaggcaatatcaccgactgtacggtgattgtgaccaaaaaagccgcttccggc

SEQ ID NO: 124274 - DNA, 75 bp, synthetic construct
  source 1..75: mol_type = other DNA
caccacggcgctggtgatggttattcctgctctttggcctttcggcgctggcggcgtttgatctcaccttcaagc

SEQ ID NO: 124275 - DNA, 75 bp, synthetic construct
  source 1..75: mol_type = other DNA
ggtgctctgacgggtttgagttccgctgtgataacggagaaaaactgcgggtcacgttcgcgctggactgctgtg

SEQ ID NO: 124276 - DNA, 75 bp, synthetic construct
  source 1..75: mol_type = other DNA
gactgctgtgaccgtgaggcactgcactgggcagtcactacgggcggcttcgacagtgaaacagtacaggacgtc

SEQ ID NO: 124277 - DNA, 75 bp, synthetic construct
  source 1..75: mol_type = other DNA
ctgaaactgaaagacggcctggcgttcggcaccggtgacgagactgaaatgcagtatgacgtgacactgcgtgaa

SEQ ID NO: 124278 - DNA, 75 bp, synthetic construct
  source 1..75: mol_type = other DNA
atatcgtaagctggcgacagagcttatatttgcattggctgaacaactgaatgttgagatggcggaaaataaccc

SEQ ID NO: 124279 - DNA, 75 bp, synthetic construct
  source 1..75: mol_type = other DNA
cgcatagtacgctggattatcgctctccacgcgaatatctacggccgcaggcctgtaatgggttaagtgataata

SEQ ID NO: 124280 - DNA, 75 bp, synthetic construct
  source 1..75: mol_type = other DNA
ggaagtgaaatatgatacgccgatcacccggaccatcacgtcggcaaccatcgaccgtctgcgctttaccttcgg

SEQ ID NO: 124281 - DNA, 75 bp, synthetic construct
  source 1..75: mol_type = other DNA
cttcgtgaaaacgataaagcgtgactacatcagtgtcatgcccaaaccagacgggttaacggcagcaaagaacct

SEQ ID NO: 124282 - DNA, 75 bp, synthetic construct
  source 1..75: mol_type = other DNA
tgtttgcggttggaatactgatattcggtttgatgcatggcactttctccgtcccggcatcggaagtcgggcgag

SEQ ID NO: 124283 - DNA, 75 bp, synthetic construct
  source 1..75: mol_type = other DNA
ttcccccgggactcccgtgcaccggaacggtggccatcagggaccatcaccgtcagggtttatgacgatcagccg

SEQ ID NO: 124284 - DNA, 75 bp, synthetic construct
  source 1..75: mol_type = other DNA
acgtgtatcgttttcgccggataagctcgatcaggcgcttgacagcctgcttgcgcagccgatggtgcagggcgg

SEQ ID NO: 124285 - DNA, 75 bp, synthetic construct
  source 1..75: mol_type = other DNA
ggctgacggataatggttcatgctaccgggctaatgaaacacggcagtttgcccggatgttggggcttgaaccga

SEQ ID NO: 124286 - DNA, 75 bp, synthetic construct
  source 1..75: mol_type = other DNA
tagtgcgctgggttatcgctcgccacgggaatatctgcggcagcgggcttgtaatgggttaagtgataacagatg

SEQ ID NO: 124287 - DNA, 75 bp, synthetic construct
  source 1..75: mol_type = other DNA
attgccctgatctcgcgcctcgatgtgcctgcttatcgggccgaactgatagccgaaagcctgtgggagtttatt

SEQ ID NO: 124288 - DNA, 75 bp, synthetic construct
  source 1..75: mol_type = other DNA
tacgcccactacgtgttggtaagttttcgacactggtacgccctaaaaatctgctgttgcttggtgggctgtttc

SEQ ID NO: 124289 - DNA, 75 bp, synthetic construct
  source 1..75: mol_type = other DNA
tcggttcttttctcttgaagtggtcaacaaaaactggccaccgcgttagagtttttccagtatcgattttccgat

SEQ ID NO: 124290 - DNA, 75 bp, synthetic construct
  source 1..75: mol_type = other DNA
gtaatacaacacccttgtttgtggctcagggggatcagctgttcctgaatgaggttttcatgtccagggcgacga

SEQ ID NO: 124291 - DNA, 75 bp, synthetic construct
  source 1..75: mol_type = other DNA
gtttattgacgaggaccgcagcgtgcagacgcgtctgggccgtgaagacagcgagtatctcgcccgttcggtgcc

SEQ ID NO: 124292 - DNA, 75 bp, synthetic construct
  source 1..75: mol_type = other DNA
ggcccgacacaaattgatgaactgttgacggatgttttgcccggtacaggaaataaggaggaggggaataccaat

SEQ ID NO: 124293 - DNA, 75 bp, synthetic construct
  source 1..75: mol_type = other DNA
agattctcatagttgaagatgagccagtctttcgctcgcttctggattcatggttttcctcattgggagcaacaa

SEQ ID NO: 124294 - DNA, 75 bp, synthetic construct
  source 1..75: mol_type = other DNA
aacaggtgtctggaaatatgtaagcgtaaactgaccgccgtatgtagccatcagacgagaattggtaacttagac

SEQ ID NO: 124295 - DNA, 75 bp, synthetic construct
  source 1..75: mol_type = other DNA
tgtgatcgtgaggcactgcactgggcggtgactaccggcggcttcaacagtgaaacagtacaggacgtcatgctg

SEQ ID NO: 124296 - DNA, 75 bp, synthetic construct
  source 1..75: mol_type = other DNA
gaacctgattaacggcagcggtaagccggtgagcgtggacatcaccgcacaccccgcgccggaccggatacaggt

SEQ ID NO: 124297 - DNA, 75 bp, synthetic construct
  source 1..75: mol_type = other DNA
ggccttgccggtaaccttattacaggacaaatactacctgttagtttatttaatacgtctttattaccctggtaa

SEQ ID NO: 124298 - DNA, 75 bp, synthetic construct
  source 1..75: mol_type = other DNA
ggaaggcagcggtcgtacccagactatccgcatgattctggttgtcacgaataccgaagctattacgctgaaaat

SEQ ID NO: 124299 - DNA, 75 bp, synthetic construct
  source 1..75: mol_type = other DNA
tttattccaaaaatcatcgccgtatttatcgccattattattgccggaccgtggatgctcaatctgttgctggat

SEQ ID NO: 124300 - DNA, 75 bp, synthetic construct
  source 1..75: mol_type = other DNA
aaagaaagtaatcagcgatggtgctctgacgggttcgagttccgctgtgataacggagaaaaactgcgagtcacg

SEQ ID NO: 124301 - DNA, 75 bp, synthetic construct
  source 1..75: mol_type = other DNA
tggcatagtttccccttcgcaggaaacacgaaaagagaatattgcggggtaatattgagacagaaaaaagaaata

SEQ ID NO: 124302 - DNA, 75 bp, synthetic construct
  source 1..75: mol_type = other DNA
cctatgggccagcaataacaatgggtatcgaccaggttccgacaattcaggaatcagatattaccgtaattctat

SEQ ID NO: 124303 - DNA, 75 bp, synthetic construct
  source 1..75: mol_type = other DNA
taacgaatggcatccgcatagtgcgctgggttatcgctcgccacgggaatatctgcggcagcaagccagtaatgg

SEQ ID NO: 124304 - DNA, 75 bp, synthetic construct
  source 1..75: mol_type = other DNA
agtccggagagtaacggaatagcagagagcttcgtgaaaacgataaagcgtgactacatcagtgtcatgcccaaa

SEQ ID NO: 124305 - DNA, 75 bp, synthetic construct
  source 1..75: mol_type = other DNA
tctcgcccgctcggtgccgttctacgccgctaatcaaccgctggcggatatcagcgaaatgcgcgtggtgcaggg

SEQ ID NO: 124306 - DNA, 75 bp, synthetic construct
  source 1..75: mol_type = other DNA
ccattgctggcaacattgttgtcgccatggaatatccgttcgacggttatacaggacccggcaagacttgctgac

SEQ ID NO: 124307 - DNA, 75 bp, synthetic construct
  source 1..75: mol_type = other DNA
gacctggcaaatagcaaagccgcaaccagtcatactcatgcctggaatcagattactggtatccctgacggtaca

SEQ ID NO: 124308 - DNA, 75 bp, synthetic construct
  source 1..75: mol_type = other DNA
cagagacgtgattgccgaaaagctcatccacgaccgcagaatcaaccccacgccgttgcaggtccgttacccaca

SEQ ID NO: 124309 - DNA, 75 bp, synthetic construct
  source 1..75: mol_type = other DNA
tcgtcgcctgttccgctgtgtttccatccgggaaaacacggacggtacctttgccatcacggcagtgcagcatgt

SEQ ID NO: 124310 - DNA, 75 bp, synthetic construct
  source 1..75: mol_type = other DNA
catggaatatccgctccacggttatacaggacccggccagacttgcagactatctttcagctgacgctctcgaac

SEQ ID NO: 124311 - DNA, 75 bp, synthetic construct
  source 1..75: mol_type = other DNA
gaaaaacggtgctgaaatttataaccgtaccgcgttggataatacgctgctttacagtggtgttattgatatgcc

SEQ ID NO: 124312 - DNA, 75 bp, synthetic construct
  source 1..75: mol_type = other DNA
atggcaacgaaagcagttaatggaaaatccaaaaaacttgaggctcgagtaccccacgcaatagctgacgctgta

SEQ ID NO: 124313 - DNA, 75 bp, synthetic construct
  source 1..75: mol_type = other DNA
accggatggggtgacgcagatctttgttgaggttgttggtggtggtggtggcggagccggaggttcatcagcaaa

SEQ ID NO: 124314 - DNA, 75 bp, synthetic construct
  source 1..75: mol_type = other DNA
ccgctgatttgacccgaatcctgcttgaggatgctctgcataatatgttcatgcctgcggataacaccacgggaa

SEQ ID NO: 124315 - DNA, 75 bp, synthetic construct
  source 1..75: mol_type = other DNA
aaatgtacaagagtttcaacaatcatttgcgaacccgacaatggtatttatgatgcactgaataaaggtattcaa

SEQ ID NO: 124316 - DNA, 75 bp, synthetic construct
  source 1..75: mol_type = other DNA
ccggtgctggacagtgaggggaatactaacatctctggtgtcacggtggtgttccgggcaggtgagcaggaacag

SEQ ID NO: 124317 - DNA, 75 bp, synthetic construct
  source 1..75: mol_type = other DNA
atcagcaatcacgaaatcatcctgatgcgacgctgacacaaaaaggttttacacagctgagcaatgcgactaata

SEQ ID NO: 124318 - DNA, 75 bp, synthetic construct
  source 1..75: mol_type = other DNA
ttgccatcacggcagtgcagcatgtgccggagaaagaagccatcgtggataacggggccagctttgagccgcagt

SEQ ID NO: 124319 - DNA, 75 bp, synthetic construct
  source 1..75: mol_type = other DNA
tacgacggaagctgcaacgccaagtgcggttaaggcagtgtatgacctggcaaatagtaaagccgccactagtca

SEQ ID NO: 124320 - DNA, 75 bp, synthetic construct
  source 1..75: mol_type = other DNA
aaggatgtcaccattaacggcaagaccacctcacagttcctggcctcggtgattctggataatctgcctccccgc

SEQ ID NO: 124321 - DNA, 75 bp, synthetic construct
  source 1..75: mol_type = other DNA
tctgcttattgcaagattgtccacgatactgacggcggatttgatctgagcaaattggatattttgtgtcaggaa

SEQ ID NO: 124322 - DNA, 75 bp, synthetic construct
  source 1..75: mol_type = other DNA
tgaaccgaagaacacggcagtgcggagtccggagagtaacggaataacagagagcttcgtgaaaacgataaagcg

SEQ ID NO: 124323 - DNA, 75 bp, synthetic construct
  source 1..75: mol_type = other DNA
cggaacactgggtggttgtcgcgggaacggcaaaagtcactatcgacggtgatatcaaactgcttggtgaaaacg

SEQ ID NO: 124324 - DNA, 75 bp, synthetic construct
  source 1..75: mol_type = other DNA
cagtgaaacagtacaggacgtcatgctgggagcggtggaacgccgcttcggcaacgagcttccggcgtctccagt

SEQ ID NO: 124325 - DNA, 75 bp, synthetic construct
  source 1..75: mol_type = other DNA
atgagcagaaaaacccaacgttactctaaagagttcaaagccgaagctgtcagaacgaccacgaacccgaaccac

SEQ ID NO: 124326 - DNA, 75 bp, synthetic construct
  source 1..75: mol_type = other DNA
caatggcaaaaggcatcacctactcgggtttactttaaggtaaatattgatgcctcactaaaccccccaagtgat

SEQ ID NO: 124327 - DNA, 75 bp, synthetic construct
  source 1..75: mol_type = other DNA
acaatgccgtaataccctcatcaggctctgttgatgtgcagtttgtcaacacaacaaccgggccaattccgtgtg

SEQ ID NO: 124328 - DNA, 75 bp, synthetic construct
  source 1..75: mol_type = other DNA
gctctgacgggttcgagttccgctgtgataacggagaaaaactgcgagtcacgttcgcgctggactgctgtgacc

SEQ ID NO: 124329 - DNA, 75 bp, synthetic construct
  source 1..75: mol_type = other DNA
cagtatctggcctcggtggtggtgggtaacctgccgccgcgcccgttcaatatacggatgcgcaggatgacgccg

SEQ ID NO: 124330 - DNA, 75 bp, synthetic construct
  source 1..75: mol_type = other DNA
acctcaataaacttgagcttgatacaaaaaatccacgtcttcctgaaggtgttgaacgtaccccagaagcaatgc

SEQ ID NO: 124331 - DNA, 75 bp, synthetic construct
  source 1..75: mol_type = other DNA
gcaaaatctgcagacgtttaacgaactggtccgtgccgtcccccgcgcagtcccctggcgcatcagaatggatct

SEQ ID NO: 124332 - DNA, 75 bp, synthetic construct
  source 1..75: mol_type = other DNA
aataaattccagaaagagcacggcggtaatacaggaaaccatttagaccccgttcagatcccggaaccactgaat

SEQ ID NO: 124333 - DNA, 75 bp, synthetic construct
  source 1..75: mol_type = other DNA
gatgtgcttcgccgtatacatcatgttatcggagagctgcccacatatggttatcgtcgggtatgggcgctgctt

SEQ ID NO: 124334 - DNA, 75 bp, synthetic construct
  source 1..75: mol_type = other DNA
ggcgttcgagcattataacgaatggcatccgcatagtgcgctgggttatcgctcgccacgggaatatctgcggca

SEQ ID NO: 124335 - DNA, 75 bp, synthetic construct
  source 1..75: mol_type = other DNA
ttctttattgcacctggctgctgctacaccggttattcttacagcaacaataactcgccattctatatgggcata

SEQ ID NO: 124336 - DNA, 75 bp, synthetic construct
  source 1..75: mol_type = other DNA
tctggttttatgtgcgcagcgtcaacctggtgggtaaatctgcttttgtggaagccagtggacgggcgagcaatg

SEQ ID NO: 124337 - DNA, 75 bp, synthetic construct
  source 1..75: mol_type = other DNA
caatgaaaaccatccgcataatgcgttgggttatcgctctccgcgagaatatcgacgtcagcgggtaacgttaac

SEQ ID NO: 124338 - DNA, 75 bp, synthetic construct
  source 1..75: mol_type = other DNA
tattgatatgccgagtggcaggggaagcgtcactctggagtttaaggttttccataaaggcaatcagcggcaggt

SEQ ID NO: 124339 - DNA, 75 bp, synthetic construct
  source 1..75: mol_type = other DNA
tacgtttatgggttgtacctttctttattggcgagagtttacagacatcagagttgcgttttcctagtggggctg

SEQ ID NO: 124340 - DNA, 75 bp, synthetic construct
  source 1..75: mol_type = other DNA
cccttattgcccggggatggggagtaagcttagtcagccgttgtctccgggtgtcgcgtgcgcagttgcacgtca

SEQ ID NO: 124341 - DNA, 75 bp, synthetic construct
  source 1..75: mol_type = other DNA
aggacgcatcgacactatctgccttgctggctacgaatggtgtgctggatgcctatgtatggtcaaacagaactg

SEQ ID NO: 124342 - DNA, 75 bp, synthetic construct
  source 1..75: mol_type = other DNA
ttgcgtttgacgggaacaatccagatacatccctttcggagagaattattaatacagccctcgaggccgggtatc

SEQ ID NO: 124343 - DNA, 75 bp, synthetic construct
  source 1..75: mol_type = other DNA
ctcagattcaggcgcggcagttgtatcacgatcgcgaagaagtgacggtgcacgtccgccgtatctgggctgcgg

SEQ ID NO: 124344 - DNA, 75 bp, synthetic construct
  source 1..75: mol_type = other DNA
cagaaagccggaataacagattctcctgcaagccatagcgaaagatactcaatcatcgttgcattactggactat

SEQ ID NO: 124345 - DNA, 75 bp, synthetic construct
  source 1..75: mol_type = other DNA
cgccgagtcgttccacgctcaaactggaagaggcatttcatgtgtttattcctgcggatgagtgggatgaacgcc

SEQ ID NO: 124346 - DNA, 75 bp, synthetic construct
  source 1..75: mol_type = other DNA
taacgaatggcatccgcatagtgcactgggttatcgctcgccacgggaatatctgcggcagcaggccagtaatgg

SEQ ID NO: 124347 - DNA, 75 bp, synthetic construct
  source 1..75: mol_type = other DNA
gattaagggcatgctggaggcgacacaggtcagaggtgacttcgttaaagcggtatccaaatcattcccgaagaa

SEQ ID NO: 124348 - DNA, 75 bp, synthetic construct
  source 1..75: mol_type = other DNA
tctgctggcagcactggatgaggtgatcagcgagaagctggatccggcgcaccatatcgacgccgttgagagcaa

SEQ ID NO: 124349 - DNA, 75 bp, synthetic construct
  source 1..75: mol_type = other DNA
tcctgaaacgcctgacggctcccaccattaccagcggtggaaatccgccggcattttccctgacaccggacggaa

SEQ ID NO: 124350 - DNA, 75 bp, synthetic construct
  source 1..75: mol_type = other DNA
ggcatgacgatggacaaaatcattgaggaactggataacaccgtgcgtctgccggggctggcgaatctgtgggtg

SEQ ID NO: 124351 - DNA, 75 bp, synthetic construct
  source 1..75: mol_type = other DNA
tgaagcacgaatttatcagcatgttttgcaggcagaaggtttttcaccagacgatacggtctttttcgacgataa

SEQ ID NO: 124352 - DNA, 75 bp, synthetic construct
  source 1..75: mol_type = other DNA
gcccgttatccaattaatctgcgttatccgcaaagctggcgcgatagtccgcaggcactgcgccagttgccgatc

SEQ ID NO: 124353 - DNA, 75 bp, synthetic construct
  source 1..75: mol_type = other DNA
atgtatccgatggatcgtattcaacaaaaacatgctcgtcaaatagatctgctggaaaatctgacggcagttatt

SEQ ID NO: 124354 - DNA, 75 bp, synthetic construct
  source 1..75: mol_type = other DNA
gacggcccccaccattaccagtggtggcagtcctccggtattttccctgacatcagacggaaagctgaccgctaa

SEQ ID NO: 124355 - DNA, 75 bp, synthetic construct
  source 1..75: mol_type = other DNA
agcctgaataacctgcaggtcagcaggattaatccacacgatgaaaccgaacgttatcgccagtatgtcctagag

SEQ ID NO: 124356 - DNA, 75 bp, synthetic construct
  source 1..75: mol_type = other DNA
gtagcgtcactctggagtttaagattttccagaaaggcaatcagggggcaggcaatatcaccgactgtacggtga

SEQ ID NO: 124357 - DNA, 75 bp, synthetic construct
  source 1..75: mol_type = other DNA
atggttgataaccctgccgcagcggcgaaattattacaggaactacaaccgccggttcagcaggtgatttcccat

SEQ ID NO: 124358 - DNA, 75 bp, synthetic construct
  source 1..75: mol_type = other DNA
gcgctatcgccagcatgtccttgagacaaagggaaaagatctcgatgaagcggggaaacgactgctggaagagga

SEQ ID NO: 124359 - DNA, 75 bp, synthetic construct
  source 1..75: mol_type = other DNA
gccggaaaaagaagccattgtggataagggggcccgttttatgccccggccgtcagccggtccggtggcattatc

SEQ ID NO: 124360 - DNA, 75 bp, synthetic construct
  source 1..75: mol_type = other DNA
gaatttggcgtggtgatgctgatgtatttacgtcacgccatagaggccgagccgtcgttgaataatccgcaaaca

SEQ ID NO: 124361 - DNA, 75 bp, synthetic construct
  source 1..75: mol_type = other DNA
agtaatagcttccagactaacggcgtgctgctcgatgacgaatggtgtgcatttctggcagaaaatcattttctt

SEQ ID NO: 124362 - DNA, 75 bp, synthetic construct
  source 1..75: mol_type = other DNA
gcatggctagtgaataactggtatcccacagcaagtatcagcgatttgctggttgtggtgatgaaaaaatccaca

SEQ ID NO: 124363 - DNA, 75 bp, synthetic construct
  source 1..75: mol_type = other DNA
gtggtcgagcgcctggctgatgaaacagctgcccgcgatggactgaaactacatgcgcctggtgatattcagggg

SEQ ID NO: 124364 - DNA, 75 bp, synthetic construct
  source 1..75: mol_type = other DNA
tgcgcgcgacgttatcacagcagtcaaggataaactggacacgctgaaggccagtctgccggaaggcgttgaaat

SEQ ID NO: 124365 - DNA, 75 bp, synthetic construct
  source 1..75: mol_type = other DNA
cgaaacaggctggtacgtggggtaacacggaaacaccaaacgggacggttacagtcaccatcagcgatgatcata

SEQ ID NO: 124366 - DNA, 75 bp, synthetic construct
  source 1..75: mol_type = other DNA
cgttacggcgagcgtctgaaaacgccggggctgaacttgttaagtgcgccgggtaacgatgccgtagcgaccagc

SEQ ID NO: 124367 - DNA, 75 bp, synthetic construct
  source 1..75: mol_type = other DNA
tgatgattgagaatgcgcataaacggcttgaggagtgggatcatcagcatccgggtgagcagattgacaacgcca

SEQ ID NO: 124368 - DNA, 75 bp, synthetic construct
  source 1..75: mol_type = other DNA
ggcttttacctggcagggcggcgaaccaacgctactcgggctggagttttaccgccgtgccgtggcgctacaggc

SEQ ID NO: 124369 - DNA, 75 bp, synthetic construct
  source 1..75: mol_type = other DNA
ggctgagatccacaatcaatatcgcgtgaccaaaggtggcagacccacgcataagctggtgatgcgtgccctgac

SEQ ID NO: 124370 - DNA, 75 bp, synthetic construct
  source 1..75: mol_type = other DNA
gaaatatggtgctggcaggaagataagtaacagcttccagactaacggcgtgctgctcgatgatgaatggtgtgc

SEQ ID NO: 124371 - DNA, 75 bp, synthetic construct
  source 1..75: mol_type = other DNA
atcagtctagccgaagtaaaaagcgcgctggatgcttcaaaccaggaagcgggcggttcgtcgatcgaactggcg

SEQ ID NO: 124372 - DNA, 75 bp, synthetic construct
  source 1..75: mol_type = other DNA
acaacggcgacgtttacgcctgcgatcactatgtttatccgcaatatcggttggggaatatgcaccagcaaacaa

SEQ ID NO: 124373 - DNA, 75 bp, synthetic construct
  source 1..75: mol_type = other DNA
gcgcgcccggcaggaactgccccagattgaggctgttaagaatcagcacactgatcgtatagcgctcgttccggt

SEQ ID NO: 124374 - DNA, 75 bp, synthetic construct
  source 1..75: mol_type = other DNA
tgcgcgacggctatccgccttgctgaacagggtaagcgggttttgctggtcagtaccgatccggcttccaatgtc

SEQ ID NO: 124375 - DNA, 75 bp, synthetic construct
  source 1..75: mol_type = other DNA
tgtcggtgtcgcgtatgatgcagaagcatttactgatatgtttgttgagtggggcggtgattcatgggctggtac

SEQ ID NO: 124376 - DNA, 75 bp, synthetic construct
  source 1..75: mol_type = other DNA
ggcaaaaacagcaaccgtagcactaagaaacaaaatggtgacggctatgcgttgtctgtagactataacatcaat

SEQ ID NO: 124377 - DNA, 75 bp, synthetic construct
  source 1..75: mol_type = other DNA
caagctgcatagcgttagtaccggtaatggctgcagagcccactggcatcgagaaactcagagagctggccgttt

SEQ ID NO: 124378 - DNA, 75 bp, synthetic construct
  source 1..75: mol_type = other DNA
ctacggtgttgcttatgatgccgcagcttataccgatatgttagttgaatggggcggcgattcctgggcttccgc

SEQ ID NO: 124379 - DNA, 75 bp, synthetic construct
  source 1..75: mol_type = other DNA
taaatttgaccgccagattattattccgcccattatttttaatggtatagcgtataccgatccgggaagtggtga

SEQ ID NO: 124380 - DNA, 75 bp, synthetic construct
  source 1..75: mol_type = other DNA
ccagcggtgagctggcgctggtgtacaacgcaatgagtgcggcaggcgcagtagaacgtcgcgcgtcgctgtatg

SEQ ID NO: 124381 - DNA, 75 bp, synthetic construct
  source 1..75: mol_type = other DNA
ctggttctggttgcgcgactgcaaaaatctacgctgcaggaagtcgcccgcacccatgaagaactcgccgcaatt

SEQ ID NO: 124382 - DNA, 75 bp, synthetic construct
  source 1..75: mol_type = other DNA
ccggtgctggacagtgaggggaataccaacatctccggtgtcacggtggtgttccgggcaggtgagcaggaacag

SEQ ID NO: 124383 - DNA, 75 bp, synthetic construct
  source 1..75: mol_type = other DNA
gcgggaacacaggaaggtattgccgatatttctgtctggggatcacgattgcccgctggcagaacgcagtggagc

SEQ ID NO: 124384 - DNA, 75 bp, synthetic construct
  source 1..75: mol_type = other DNA
ctgacaagaatatttatgatgctttgcatcataaaagaataacccctgcaaaattacatgaattattgctaaata

SEQ ID NO: 124385 - DNA, 75 bp, synthetic construct
  source 1..75: mol_type = other DNA
ggaagtgaaatatgacacgccgataacccggaccatcacgtcggcaaacattgaccgtctgcgcctgaccttcgg

SEQ ID NO: 124386 - DNA, 75 bp, synthetic construct
  source 1..75: mol_type = other DNA
gaagggtatctggaatttttccgggaaaaaataggaaaactgcatctggctcaggggctgtgggagctgatagac

SEQ ID NO: 124387 - DNA, 75 bp, synthetic construct
  source 1..75: mol_type = other DNA
ggagtagcttcattgaaaataatccagatggtgcttcctgtcttggcccaatggtcgggctggaaaagcagcatg

SEQ ID NO: 124388 - DNA, 75 bp, synthetic construct
  source 1..75: mol_type = other DNA
gcaaaggtggcgtaggtaaaaccacgatggctgcggccatcgccgtcaggctggcagacatgggatttgacgtgc

SEQ ID NO: 124389 - DNA, 75 bp, synthetic construct
  source 1..75: mol_type = other DNA
tttcaaaggagaaatcgggaaaacacatctggcccaggagttgtggacgcagattgataacggtcagcttgcgcc

SEQ ID NO: 124390 - DNA, 75 bp, synthetic construct
  source 1..75: mol_type = other DNA
ctggacgatgaaacccaagcgattgccagtgagattgtccgtcacgatcttttcgaccgtgtgcatatcggcctc

SEQ ID NO: 124391 - DNA, 75 bp, synthetic construct
  source 1..75: mol_type = other DNA
ctggaagagcagaaatcgttgccgtggcaggcggtatgggaaatgtattgtcagcgtcacgataccccagcgggt

SEQ ID NO: 124392 - DNA, 75 bp, synthetic construct
  source 1..75: mol_type = other DNA
gagagctacacggttggctccaatgagttttacatggggtatgccaccagccgccagacggcgctgtgcctggac

SEQ ID NO: 124393 - DNA, 75 bp, synthetic construct
  source 1..75: mol_type = other DNA
acctcaccaggcgctgtgcgcaattggcacggctacttcaatacgcaaagcggtctttaaagtaccgcgcgacat

SEQ ID NO: 124394 - DNA, 75 bp, synthetic construct
  source 1..75: mol_type = other DNA
gtctgtgcgcgtgaatgaatggttcagtgcgtatgcgatggcgggcgtggcttacagccgtgtgtcgactttttc

SEQ ID NO: 124395 - DNA, 75 bp, synthetic construct
  source 1..75: mol_type = other DNA
gtaaggctgaaccttcacgttcaaccttactctcatttacacgttacgcttttttaaaggtaagcggctcgccag

SEQ ID NO: 124396 - DNA, 75 bp, synthetic construct
  source 1..75: mol_type = other DNA
tggtattcaacctgccggttaagagtgacccgcaatggtcaggagatttttaatcagtccacgacggatgctcag

SEQ ID NO: 124397 - DNA, 75 bp, synthetic construct
  source 1..75: mol_type = other DNA
aaatccgccggcattttccctgacaccggacggaaagttgaccgctaaaaatgcggatatcagcggtaatgtgaa

SEQ ID NO: 124398 - DNA, 75 bp, synthetic construct
  source 1..75: mol_type = other DNA
ggaagggcaggaagggcgcctgttcgggccactggccttcacgaaaacgtattccatggcaggcgcggccgcgct

SEQ ID NO: 124399 - DNA, 75 bp, synthetic construct
  source 1..75: mol_type = other DNA
ttcctgctgagaccagtaacccactgaaccggttgctgattaaagcgtatcacccgttactgctcagggtactac

SEQ ID NO: 124400 - DNA, 75 bp, synthetic construct
  source 1..75: mol_type = other DNA
tgcgaactcagggacgctcaacaacgtcacgattaatgagaactgtcagattaaggggaaactgtcagccaacca

SEQ ID NO: 124401 - DNA, 75 bp, synthetic construct
  source 1..75: mol_type = other DNA
tcgctcgtgtcgatggcactattaatctgcccggttccaagagcgtttctaaccgcgctttattgctggcggcat

SEQ ID NO: 124402 - DNA, 75 bp, synthetic construct
  source 1..75: mol_type = other DNA
gggcgaccattagctggggggatgattatatttcctgcacgcgtggcgaactgaacgctattgacatggatatga

SEQ ID NO: 124403 - DNA, 75 bp, synthetic construct
  source 1..75: mol_type = other DNA
ttgcgtttacagggcggtttcatcggcggcaacgttgaagttgacggctctgtttccagtcagtttctcaccgcg

SEQ ID NO: 124404 - DNA, 75 bp, synthetic construct
  source 1..75: mol_type = other DNA
cgtttccagccagttcctcaccgcactgttaatgactgcgcctcttgcgccggaagatacggtgattcgtattaa

SEQ ID NO: 124405 - DNA, 75 bp, synthetic construct
  source 1..75: mol_type = other DNA
tcaataatattcgcgagcatctgatgctttatctttttctctggggattgttggcaattatggatctgatctatg

SEQ ID NO: 124406 - DNA, 75 bp, synthetic construct
  source 1..75: mol_type = other DNA
tgcaaaccagattgaaggcgatctcgttaaaacagtgggtaaggctttcccccgtgactcccgtgcaccgaagcg

SEQ ID NO: 124407 - DNA, 75 bp, synthetic construct
  source 1..75: mol_type = other DNA
aaaaacagcagcagagttagttaaaagaaaattagccactggctctggtgaaacagtaaaaatcactgcgaaaaa

SEQ ID NO: 124408 - DNA, 75 bp, synthetic construct
  source 1..75: mol_type = other DNA
aaccacaggtcgtggtttgcatattcacgctgcggaagacctttacgacgtttcctacagtcaccactggtacgg

SEQ ID NO: 124409 - DNA, 75 bp, synthetic construct
  source 1..75: mol_type = other DNA
agggcctgaacgccaatattatgtcgctgggggggatcgcgattgccgtcggggcgatggtggatgcggccatcg

SEQ ID NO: 124410 - DNA, 75 bp, synthetic construct
  source 1..75: mol_type = other DNA
gtaatagcggcatcaaagagttgcaggaaggagtggaagaaaacatccgcttcgcccgtcaaattgatgaagcga

SEQ ID NO: 124411 - DNA, 75 bp, synthetic construct
  source 1..75: mol_type = other DNA
cggaggctcatccgttgaaatcgcggaagcggagtacatggtccgggccagcggctaccttcagaccatcgatga

SEQ ID NO: 124412 - DNA, 75 bp, synthetic construct
  source 1..75: mol_type = other DNA
ttaataatatccgcgagcatctcatgctatatctttttctctggggattattggcaattatggatctgatctacg

SEQ ID NO: 124413 - DNA, 75 bp, synthetic construct
  source 1..75: mol_type = other DNA
cgcagaagggcttcgccatgtaccgggggatgtcattgaaatctgcgatgatgactatgcgggtatcagcatcgg

SEQ ID NO: 124414 - DNA, 75 bp, synthetic construct
  source 1..75: mol_type = other DNA
attacggacatttcagcgttcccctgccgggcgcagaggcgctgattgcctgtgtgggtgcacaacgtgatcagg

SEQ ID NO: 124415 - DNA, 75 bp, synthetic construct
  source 1..75: mol_type = other DNA
ttaataatattcgcgagcatctgatgctttatctttttctctggggactattagcaattatggacctaatctacg

SEQ ID NO: 124416 - DNA, 75 bp, synthetic construct
  source 1..75: mol_type = other DNA
atgatcgcgcataaaacaaaggcgaccgggggcggtcgccaatgggaaaacactaaacataagcccgaacatcat

SEQ ID NO: 124417 - DNA, 75 bp, synthetic construct
  source 1..75: mol_type = other DNA
acgccgggcacttccacccgactgaagtgatttccgacaagatttccgccgccatgctgtatgtgccgcagttgc

SEQ ID NO: 124418 - DNA, 75 bp, synthetic construct
  source 1..75: mol_type = other DNA
tcgcctgctgtttggccgcggcgttctgaccggcacacatgacgaactgaaaatgcagaatgtgcagctcaccgg

SEQ ID NO: 124419 - DNA, 75 bp, synthetic construct
  source 1..75: mol_type = other DNA
ggaaaacgaacagggatactttcccgatgcagtgactgaacgaggtcagaaacatcttcgggagttgatgagcgt

SEQ ID NO: 124420 - DNA, 75 bp, synthetic construct
  source 1..75: mol_type = other DNA
accctttgttgtagaagtcactccgctcgaagcagaagcattgcgtcgggaactcggcaactacgatgttatttt

SEQ ID NO: 124421 - DNA, 75 bp, synthetic construct
  source 1..75: mol_type = other DNA
gcaacagcaagttcaaatagcaatgctgactcaatctttgtctcaggcaatcaatgagctaacaaaaagcaggaa

SEQ ID NO: 124422 - DNA, 75 bp, synthetic construct
  source 1..75: mol_type = other DNA
catcctgacgctaatgatgggtgggtaatacctggtgcgtcgtggataccatcacactggatgccgctaccagaa

SEQ ID NO: 124423 - DNA, 75 bp, synthetic construct
  source 1..75: mol_type = other DNA
ctggtaaatggctggtatcccacagcaagtatcagcgatttactggttgtggtgatgaagaaatcaacagcaggt

SEQ ID NO: 124424 - DNA, 75 bp, synthetic construct
  source 1..75: mol_type = other DNA
gtggaaagagtaaatgattccgccatgaaccgcctgctgacaccgctgatgcgtcgtgtgcgcctgatgcttgcg

SEQ ID NO: 124425 - DNA, 75 bp, synthetic construct
  source 1..75: mol_type = other DNA
agtaatgtttgccagattgcatatgccggtaagaccagaatcgttcatccctataaattaactaatcagagaagt

SEQ ID NO: 124426 - DNA, 75 bp, synthetic construct
  source 1..75: mol_type = other DNA
tccatctccacatcaaagaaacacgcatctctgatatgcgactacttctctgtttctaataaagatgagttaatc

SEQ ID NO: 124427 - DNA, 75 bp, synthetic construct
  source 1..75: mol_type = other DNA
aggcgttgagatcgtgaccacctacgatcgcagccagttaatcgaccgggccattgataacctcagctacaaact

SEQ ID NO: 124428 - DNA, 75 bp, synthetic construct
  source 1..75: mol_type = other DNA
aatgacttcaaacagtactttattgcccatgaccagccgatctacgaaaacccatcgccggggaacaaagcaggc

SEQ ID NO: 124429 - DNA, 75 bp, synthetic construct
  source 1..75: mol_type = other DNA
aaaacggtcagcaagtctttcccccgcacgagcacttatgccagtggcaccatcacggtaagaatcagtgatgat

SEQ ID NO: 124430 - DNA, 75 bp, synthetic construct
  source 1..75: mol_type = other DNA
gatcgcagccagttgatcgaccgggcgattgataaccttagttccaaacttctggaagagtttttcgtggtggcc

SEQ ID NO: 124431 - DNA, 75 bp, synthetic construct
  source 1..75: mol_type = other DNA
tgtcggtggttaatgacattaaaacggctatcagtcagaaggtgaaacttagaccgggcaccagcgtgtcattct

SEQ ID NO: 124432 - DNA, 75 bp, synthetic construct
  source 1..75: mol_type = other DNA
gttatagatatgcctgccggacaggggacgctgacactgacattcaccgtatcttcatcaggagcgaataactgg

SEQ ID NO: 124433 - DNA, 75 bp, synthetic construct
  source 1..75: mol_type = other DNA
aacagatgccgatcctgaccccgatgaagcagcagatcacgctgggcgatgtcgcggatattaaggtcgtttcag

SEQ ID NO: 124434 - DNA, 75 bp, synthetic construct
  source 1..75: mol_type = other DNA
taccgcctatccgtaaccgtattgatatgctctcaaccggcattaaaagtccgataggtattaaggtatcgggta

SEQ ID NO: 124435 - DNA, 75 bp, synthetic construct
  source 1..75: mol_type = other DNA
agggaccattaccgtcagggtttatgacgatcagccgtttgaccggcagattgttattcccgcggtggcgtttcg

SEQ ID NO: 124436 - DNA, 75 bp, synthetic construct
  source 1..75: mol_type = other DNA
tgtcggggtgcgtaatgagctgtggatcctgccaaccgtgggctgtgtcaacggcatcgcgcggcagatccaaaa

SEQ ID NO: 124437 - DNA, 75 bp, synthetic construct
  source 1..75: mol_type = other DNA
cgggccagaaatgcggcgcggtattgccgagcttaacggacaaggggaagtcgccggcggcgtggtgatcctgcg

SEQ ID NO: 124438 - DNA, 75 bp, synthetic construct
  source 1..75: mol_type = other DNA
tggggcacatggacgataattaacacgccggtcgatgcgctgcctgacctgtcagaagtgcaggtcattattaaa

SEQ ID NO: 124439 - DNA, 75 bp, synthetic construct
  source 1..75: mol_type = other DNA
cgattgaaggtccggtgaaggggctgcagagtatcctggtgaacaaaaccccgctgatggacacggacggtaatc

SEQ ID NO: 124440 - DNA, 75 bp, synthetic construct
  source 1..75: mol_type = other DNA
cagaaaacgcccgacagatagcacaggtccgccagtacgtggataaaaaagggagtgaaattacctcgaccacgg

SEQ ID NO: 124441 - DNA, 75 bp, synthetic construct
  source 1..75: mol_type = other DNA
atcacggcagtgagggataaactggacacgctgaaggccagcctgccggaaggtgttgaaattgtgaccacctac

SEQ ID NO: 124442 - DNA, 75 bp, synthetic construct
  source 1..75: mol_type = other DNA
tgcaggactggttcctgaaatttgaactgaaaaccatcccgaacgtggcggaagtagcttcggttggcggcgtgg

SEQ ID NO: 124443 - DNA, 75 bp, synthetic construct
  source 1..75: mol_type = other DNA
attcacgctgcggaagacctttacgacgtttcctacagtcaccattggtacggcaaagacctgctggcacgactg

SEQ ID NO: 124444 - DNA, 75 bp, synthetic construct
  source 1..75: mol_type = other DNA
ttgaccgcctgcgggtcaccttcggggtgcagtcactggtgcagaccacgtcaaagggtgaccgaaacccgacat

SEQ ID NO: 124445 - DNA, 75 bp, synthetic construct
  source 1..75: mol_type = other DNA
tgcgtgatgttgcccgcatacaaatgggaccggaaatgcggcgtggtatcgctgagcttaacggtcagggcgaag

SEQ ID NO: 124446 - DNA, 75 bp, synthetic construct
  source 1..75: mol_type = other DNA
cgccgataatatagaaggagctaatcagctaggcattaccagtattctggtgaaagataaaaccaccatcccgga

SEQ ID NO: 124447 - DNA, 75 bp, synthetic construct
  source 1..75: mol_type = other DNA
acagaaatggaagcatacaggaatgagaatacacatttgaatcttgttgaggatgtttttattcagaataaattc

SEQ ID NO: 124448 - DNA, 75 bp, synthetic construct
  source 1..75: mol_type = other DNA
aataaagatgagttaattatcttactctacaataaaaagtttatttattatttatacgagaaggctatgtgtatc

SEQ ID NO: 124449 - DNA, 75 bp, synthetic construct
  source 1..75: mol_type = other DNA
tatgtggccgggattggcgcggggattgaggatgttgatggtcagacgctgagtaacattctgctgcaggccgat

SEQ ID NO: 124450 - DNA, 75 bp, synthetic construct
  source 1..75: mol_type = other DNA
tcacttaacccattactggcctgctgccgcagatattcccgtggcgagcgataacccagtgcactatgcggatgc

SEQ ID NO: 124451 - DNA, 75 bp, synthetic construct
  source 1..75: mol_type = other DNA
aaacccatctggctcaggagctgtggacgcagattgataacggtcagcttacgcctgacctgactgaaatcagga

SEQ ID NO: 124452 - DNA, 75 bp, synthetic construct
  source 1..75: mol_type = other DNA
ctgtccgactgctgattcagttgcagcgtaacggtaactgggtgacggaaaatgatgtcaccattaacggcaaga

SEQ ID NO: 124453 - DNA, 75 bp, synthetic construct
  source 1..75: mol_type = other DNA
ggcacaggggctgcgtcacacacccggtgacatcattgaaatctgtgataacgactatgccgggaccatgaccgg

SEQ ID NO: 124454 - DNA, 75 bp, synthetic construct
  source 1..75: mol_type = other DNA
atggaatttcgtaatcttacgccgttttcagtaatgcaatatgcaatggacgacaaacacaacgagcgtcattgt

SEQ ID NO: 124455 - DNA, 75 bp, synthetic construct
  source 1..75: mol_type = other DNA
acgccagcaaactggaggagttttcgaaagagtggaaggacgctaacgataaatggaatgccatgtggggcgtca

SEQ ID NO: 124456 - DNA, 75 bp, synthetic construct
  source 1..75: mol_type = other DNA
ccatgcaccaacaaaatcacttcaacaggccgcccgtgacggggataacgaacgcctgaatattctgcgcgacag

SEQ ID NO: 124457 - DNA, 75 bp, synthetic construct
  source 1..75: mol_type = other DNA
tatcacaatcttaatgaagaagatctgcgtaaaagcctctactggcatcaggataacgacgcggttagccattta

SEQ ID NO: 124458 - DNA, 75 bp, synthetic construct
  source 1..75: mol_type = other DNA
ggcgttaatccgctggctttgcgattatcacaatcttaatgaagaagatctgcgtaaaagcctctactggcatca

SEQ ID NO: 124459 - DNA, 75 bp, synthetic construct
  source 1..75: mol_type = other DNA
ccatcgtggataacggggccagctttgagccgcagtcaggcaccctgaacagcgttattccaccggcagtgcagc

SEQ ID NO: 124460 - DNA, 75 bp, synthetic construct
  source 1..75: mol_type = other DNA
cgatctcgttaaaacagtgggcaaagctttcccccgggactcccgtgcaccggagcggtggccatcaggaaccat

SEQ ID NO: 124461 - DNA, 75 bp, synthetic construct
  source 1..75: mol_type = other DNA
gacaaacttgatcaggcgctggacagtctgctcgcacagccgatggtgcagggcggggtggtgctgtcgacgtgt

SEQ ID NO: 124462 - DNA, 75 bp, synthetic construct
  source 1..75: mol_type = other DNA
cggccggtgcgaacaactggacgccgacaacgtacatcagtgatttactggttgtggtcatgaaaaaatccacgg

SEQ ID NO: 124463 - DNA, 75 bp, synthetic construct
  source 1..75: mol_type = other DNA
gtatggaacgggcagacgctgacgttcgtgcaggaccgcccatcggatgtggtgtggccctacaccaacagcgat

SEQ ID NO: 124464 - DNA, 75 bp, synthetic construct
  source 1..75: mol_type = other DNA
atggcgtcacgcggtattaataaggtgatactgatagggcatcttggacaggatccggaactccgttacttcccc

SEQ ID NO: 124465 - DNA, 75 bp, synthetic construct
  source 1..75: mol_type = other DNA
agccggcaccatgactgataaccagcggcagcacgccgagaataaaggccagagaagtcatcaggattgggcgta

SEQ ID NO: 124466 - DNA, 75 bp, synthetic construct
  source 1..75: mol_type = other DNA
gcggtgcatctcaccgaagcgctgtctatcgactacgagccggaaggccgtcaggtgaaataccagcaggccagc

SEQ ID NO: 124467 - DNA, 75 bp, synthetic construct
  source 1..75: mol_type = other DNA
gaatgcgaacgccgggacgctcaacaatgtcacaattaatgagaactgtcagattaaggggaaactgtcagccaa

SEQ ID NO: 124468 - DNA, 75 bp, synthetic construct
  source 1..75: mol_type = other DNA
tttccttattgtcactcaacttctttatataattatttaattgggagtgcatctcataataaaaatgagataata

SEQ ID NO: 124469 - DNA, 75 bp, synthetic construct
  source 1..75: mol_type = other DNA
gtctggtgatggtaaaggtgaaagagccgaagtttgggcgttgtcaacaaaatatgacgctaacaatgtctatgc

SEQ ID NO: 124470 - DNA, 75 bp, synthetic construct
  source 1..75: mol_type = other DNA
ggatccggaaatccgttatttccccaacggcggaggtgcagtggcaaatctgacgctggccaccactgatacctg

SEQ ID NO: 124471 - DNA, 75 bp, synthetic construct
  source 1..75: mol_type = other DNA
tactgttgacttaaaattcaaccctggtgggaagcattcaaatgaatgcattcactatgcgaaagacggagatga

SEQ ID NO: 124472 - DNA, 75 bp, synthetic construct
  source 1..75: mol_type = other DNA
tcactgcgtcgtcgcctgttccgctgtgtctccatccgggaaaacacggacggcacctttgccatcacggcggtg

SEQ ID NO: 124473 - DNA, 75 bp, synthetic construct
  source 1..75: mol_type = other DNA
aaaaagaatcaccagccatgcaacgaccaagcggttcaacgggctggatagaactgccgaacggtcagcgctgga

SEQ ID NO: 124474 - DNA, 75 bp, synthetic construct
  source 1..75: mol_type = other DNA
gatgctgccgaccatatctatctgtcgcaagaattgggtatgcgcaaacccgaagcgcgaatttaccagcacgtt

SEQ ID NO: 124475 - DNA, 75 bp, synthetic construct
  source 1..75: mol_type = other DNA
ggtgacatcattgaaatctgtgataacgactacgccgggaccctgaccggcggacgcatcctgtccatggatgcc

SEQ ID NO: 124476 - DNA, 75 bp, synthetic construct
  source 1..75: mol_type = other DNA
ggtgacattattgaaatctgtgataacgactatgccgggaccatgaccggcggacgcatcctgtccatcgatgcc

SEQ ID NO: 124477 - DNA, 75 bp, synthetic construct
  source 1..75: mol_type = other DNA
gggcgcacgcgttatcatcagtgggacgcgcagaatcaggtgacggcgtaccaggacgaagccggacaggtgacg

SEQ ID NO: 124478 - DNA, 75 bp, synthetic construct
  source 1..75: mol_type = other DNA
gtatggaacggacagacgctgacgttcgtgcaggacagaccgtcggataaggtgtggacctataaccgcggcaat

SEQ ID NO: 124479 - DNA, 75 bp, synthetic construct
  source 1..75: mol_type = other DNA
aaaccgcgctgaactcttcaactgacgtgctgttcactgcggcagcttgccaggcagaagacgatcgtctggcaa

SEQ ID NO: 124480 - DNA, 75 bp, synthetic construct
  source 1..75: mol_type = other DNA
caggtggcacttatttttgatatcggcctttcaaccctttatcgttattatcctgcgagcgtttcggaaaaataa

SEQ ID NO: 124481 - DNA, 75 bp, synthetic construct
  source 1..75: mol_type = other DNA
ggcgatgtcattgaaatctgcgatgatgactatgcggggatcagcatcggcgggcgcgtgctggcggtgaacagc

SEQ ID NO: 124482 - DNA, 75 bp, synthetic construct
  source 1..75: mol_type = other DNA
tgatatttcgccgccgtcaggcattgtagaagtgatgcgcgggctggtaatgagcatggtttccaaccccatcga

SEQ ID NO: 124483 - DNA, 75 bp, synthetic construct
  source 1..75: mol_type = other DNA
tcgggagcccggaaaactggcagactggttgtccccggacgctctgggctggctggcagactgcttctgcgtcag

SEQ ID NO: 124484 - DNA, 75 bp, synthetic construct
  source 1..75: mol_type = other DNA
aaaaacaagccatcgtgggttgatgataaccatgataaaattcccggctcagacaattatgagcaagagaattat

SEQ ID NO: 124485 - DNA, 75 bp, synthetic construct
  source 1..75: mol_type = other DNA
tagttatccagtcactatcggcgcaggtggggccggtggtgttagtgcgacgaacggcaccagtggcgggaatag

SEQ ID NO: 124486 - DNA, 75 bp, synthetic construct
  source 1..75: mol_type = other DNA
ccttccgcatccggtcaatgccgccaccggagccaaatatctgatggatgacgatgattttgacttcagtctgcc

SEQ ID NO: 124487 - DNA, 75 bp, synthetic construct
  source 1..75: mol_type = other DNA
tcagcatggtgggtaaatggctggtatcccacagcaagtatcagcgatttgctggttgtggtgatgaagaaagcc

SEQ ID NO: 124488 - DNA, 75 bp, synthetic construct
  source 1..75: mol_type = other DNA
caatgaacagccaaacagtgaatgcagcactcaagcgtgctgggttaggaggtgttctcgtttctcatggcttgc

SEQ ID NO: 124489 - DNA, 75 bp, synthetic construct
  source 1..75: mol_type = other DNA
gctttgagccgcagtcaggttccctgaacagcgtcatcccaccggcagtacagcacctgacggtggaggtgagcg

SEQ ID NO: 124490 - DNA, 75 bp, synthetic construct
  source 1..75: mol_type = other DNA
aacttgatgataatttccaccaaatcctgacgcagattgccgactgtcagctcgcgtgggacaccattgaaaacc

SEQ ID NO: 124491 - DNA, 75 bp, synthetic construct
  source 1..75: mol_type = other DNA
aaagcaatgacattgcacttgcaggagatcagcgagtcagtactacagatccgtcagaaaaatagcgactggttc

SEQ ID NO: 124492 - DNA, 75 bp, synthetic construct
  source 1..75: mol_type = other DNA
gacgatcagccgtttgaccggcagattgttattccggcggtggcattcagtggcgctaagcatgagagagagcat

SEQ ID NO: 124493 - DNA, 75 bp, synthetic construct
  source 1..75: mol_type = other DNA
agtggtgaatggttagcaggaaagagtaaggctgaaccttcacgttcaaccttactctcatttacacgttacgct

SEQ ID NO: 124494 - DNA, 75 bp, synthetic construct
  source 1..75: mol_type = other DNA
gaactcacgcagacggtcagtcagagtaatgaggagaatgcacgccagatagcgcaggttcgccagtatgtggat

SEQ ID NO: 124495 - DNA, 75 bp, synthetic construct
  source 1..75: mol_type = other DNA
ggaaatcctgatggtgatttaccacatttacaagttcatcaacatggtggaagtgttagacatatatttttcccg

SEQ ID NO: 124496 - DNA, 75 bp, synthetic construct
  source 1..75: mol_type = other DNA
gcgggcgcagcaatcaccattaccgtgttgacgctggctgcggttaatacgctgggtatcccggtcgatctgccc

SEQ ID NO: 124497 - DNA, 75 bp, synthetic construct
  source 1..75: mol_type = other DNA
cagctcaggccgggggacaccctgctggtctggaaactggatcgccttggacgcagtatgcagcatcttgtcctt

SEQ ID NO: 124498 - DNA, 75 bp, synthetic construct
  source 1..75: mol_type = other DNA
ataaaattgatgcagccgcagaggaaaagataaaaagcggtgctgtaatgccgcagccgaaagactccggtcaga

SEQ ID NO: 124499 - DNA, 75 bp, synthetic construct
  source 1..75: mol_type = other DNA
gtcgggaacacccaaaccaggagaatccaccactggcgcatatggcctgtccggtcaatccactcggattaggct

SEQ ID NO: 124500 - DNA, 75 bp, synthetic construct
  source 1..75: mol_type = other DNA
atggaatttcgtaatctgacgccgttttcagtaatgcaatatgcgatggatgacaaacacaacgaacgtcattgt

SEQ ID NO: 124501 - DNA, 75 bp, synthetic construct
  source 1..75: mol_type = other DNA
caacatttgcaggaaatcagcgaatccgtgcgccagatccgtcaggaaaacagcgactggtttagcgaagagtaa

SEQ ID NO: 124502 - DNA, 75 bp, synthetic construct
  source 1..75: mol_type = other DNA
cggttgaaggcgtggcccggtacccgattaatatccgctatccgcaggattaccggaacagcccgcaggccctga

SEQ ID NO: 124503 - DNA, 75 bp, synthetic construct
  source 1..75: mol_type = other DNA
ctgtcgccaaccgtttcctggtcatgatgggggccctgtttctcagcatctggggaacatggacgattattaaca

SEQ ID NO: 124504 - DNA, 75 bp, synthetic construct
  source 1..75: mol_type = other DNA
tgactggctgccctatcaggataagttcgttctggtggttacgtccacgaccgggcagggcgaccttcctgatag

SEQ ID NO: 124505 - DNA, 75 bp, synthetic construct
  source 1..75: mol_type = other DNA
gcatctggcacaggggctgtgggagctgattgataacagtcagcttgacgatgagatggcggagatgaagaccat

SEQ ID NO: 124506 - DNA, 75 bp, synthetic construct
  source 1..75: mol_type = other DNA
tccgcatggtgccttgaaaacgttactgttcctgattttttactgcctccgccggatgtaaaatatataaacttt

SEQ ID NO: 124507 - DNA, 75 bp, synthetic construct
  source 1..75: mol_type = other DNA
tgggcccgttcccgcgtgctggaatatctgaatcaggttcagggaaaactgcctgccggtgtgagttctgaaatc

SEQ ID NO: 124508 - DNA, 75 bp, synthetic construct
  source 1..75: mol_type = other DNA
aatgctaatgctcttatcgccacacaagtaccgcgtaataaaagcggctgggcgctgggtacgctctccacaggc

SEQ ID NO: 124509 - DNA, 75 bp, synthetic construct
  source 1..75: mol_type = other DNA
caagaagtgtgagaatcgccggaattgaaattatcgatagtgtcaaatcggttgcttctgtttttactgaaatct

SEQ ID NO: 124510 - DNA, 75 bp, synthetic construct
  source 1..75: mol_type = other DNA
tgcagtctccggcctctaccgcagtagtcggtcgccaggctttaaccgctatcatcgtattaggcgcaatctggc

SEQ ID NO: 124511 - DNA, 75 bp, synthetic construct
  source 1..75: mol_type = other DNA
aaaaccgttgttgggcattccaggcatctgctcgctggcgctgatcgctaacctgcaaaacacggatgccgccgc

SEQ ID NO: 124512 - DNA, 75 bp, synthetic construct
  source 1..75: mol_type = other DNA
tcgttggctgttatcgcagtggctttaatcgccgttttatccatttgtaaaatactctcagcaatatgggagtga

SEQ ID NO: 124513 - DNA, 75 bp, synthetic construct
  source 1..75: mol_type = other DNA
gcactggaactggttgatacctccagtgcgccagatattgaatggcttacgcctccggcagttcaggccagatga

SEQ ID NO: 124514 - DNA, 75 bp, synthetic construct
  source 1..75: mol_type = other DNA
gattggtgcagggattgaggatactgatggccagccactgagcaacatactgctgctggctgaccgtatcgcgat

SEQ ID NO: 124515 - DNA, 75 bp, synthetic construct
  source 1..75: mol_type = other DNA
tccggtaaaattgtctcagtatggtatcagcctgcccgaagtgaaacaggcccttgaatcgtctaaccaggaggc

SEQ ID NO: 124516 - DNA, 75 bp, synthetic construct
  source 1..75: mol_type = other DNA
ctggttctggttgcacgactgcaaaaatcgacgctgcaggaagtcgcccgcacccatgaagaactggctgcaatt

SEQ ID NO: 124517 - DNA, 75 bp, synthetic construct
  source 1..75: mol_type = other DNA
tgaccggcgggcgtattctgtccatcgacagcgccagccgtaccctgacgctggaccgtgaggtgaccctgccgg

SEQ ID NO: 124518 - DNA, 75 bp, synthetic construct
  source 1..75: mol_type = other DNA
ccgggctgtgggtgataaagaccggactgctggaaacgcagacggtggatttcacgctcgggtcacaggggctgc

SEQ ID NO: 124519 - DNA, 75 bp, synthetic construct
  source 1..75: mol_type = other DNA
aataccgctccagaatcgttgatcctatcaaaggtcttttgcctgatgacgttgttaacagtatcagcgagcagc

SEQ ID NO: 124520 - DNA, 75 bp, synthetic construct
  source 1..75: mol_type = other DNA
gcatcaaccctcgcgatgaaaccgaacgctatcgtcagcatgttcttgagacgaagggaagagatctggacgaag

SEQ ID NO: 124521 - DNA, 75 bp, synthetic construct
  source 1..75: mol_type = other DNA
ctatcgtgacacccgaggtcggcctctgactatccatagaacatacgtagacaaaaacggtgataaggcacctgt

SEQ ID NO: 124522 - DNA, 75 bp, synthetic construct
  source 1..75: mol_type = other DNA
ggtgagcgtggccatcactgcacaccccgcgccggaccggatacaggtcagcaccctgcctgatggtgtggagac

SEQ ID NO: 124523 - DNA, 75 bp, synthetic construct
  source 1..75: mol_type = other DNA
gttcagtttattgaaatgtacctgcttaatacattgcgggttaacgttctccaacaagaagggcataaagaaacg

SEQ ID NO: 124524 - DNA, 75 bp, synthetic construct
  source 1..75: mol_type = other DNA
aacctgggtgatgagcgagcgctatcttggcgctcgtgaagagccttcatcctttgcctcctacggtacatgggc

SEQ ID NO: 124525 - DNA, 75 bp, synthetic construct
  source 1..75: mol_type = other DNA
gcttatcagatcaacctgcttgataagagtgattatgttctcgctcatggactgaacaccgacgaccaactcgca

SEQ ID NO: 124526 - DNA, 75 bp, synthetic construct
  source 1..75: mol_type = other DNA
cactttacgcttgagggtaatccggataccggtgcgccgactaaatcactgattgcgcgaccggaaaacgtttca

SEQ ID NO: 124527 - DNA, 75 bp, synthetic construct
  source 1..75: mol_type = other DNA
atactggtgcgccaaccaaagtattagcgcccgatacggcggggaaatttttcccaataaagattgcagtagttt

SEQ ID NO: 124528 - DNA, 75 bp, synthetic construct
  source 1..75: mol_type = other DNA
tgataacgactatgccgggaccatgaccggcggacgtatcctgtccatcgatgccgccagccgcaccctgacact

SEQ ID NO: 124529 - DNA, 75 bp, synthetic construct
  source 1..75: mol_type = other DNA
tgctcatttcttagactattttgctggctctggtactacagggcatgcagtggtagatatgaatagggatgataa

SEQ ID NO: 124530 - DNA, 75 bp, synthetic construct
  source 1..75: mol_type = other DNA
tcaacctgtaagctgcaggtgctgaagaacggacaggaaatctttcagcaacccgcgacggatgtcagcagggta

SEQ ID NO: 124531 - DNA, 75 bp, synthetic construct
  source 1..75: mol_type = other DNA
atgacggattatcagccatacaggaaaggaactgtgcttgccccaactgggccatgcaatcatcttcatgtgatt

SEQ ID NO: 124532 - DNA, 75 bp, synthetic construct
  source 1..75: mol_type = other DNA
agccaggtcagttactccagcgcccgggccagtgctaacgtcagctggcgatttttcatggggcgtcgacgtttt

SEQ ID NO: 124533 - DNA, 75 bp, synthetic construct
  source 1..75: mol_type = other DNA
taccgcgctaacgggcgacagtgggcagtacgtactgggccaggcgctgggtggtggcctgaaagaaagtgccga

SEQ ID NO: 124534 - DNA, 75 bp, synthetic construct
  source 1..75: mol_type = other DNA
ggtcgggcagatgaaactctggcgtaaggaactggaaacggtaaaagccagcaacgccgcactggtgcaggaaaa

SEQ ID NO: 124535 - DNA, 75 bp, synthetic construct
  source 1..75: mol_type = other DNA
ctatatatttaccgtagataagttaccagaggaattatattcaattgtcattaagaatgatgcccaatgggaaca

SEQ ID NO: 124536 - DNA, 75 bp, synthetic construct
  source 1..75: mol_type = other DNA
cacaccccgcgccggaccggatacaggtcagcaccctgcctgatggtgtggagacatacggtgtatggggactct

SEQ ID NO: 124537 - DNA, 75 bp, synthetic construct
  source 1..75: mol_type = other DNA
acagacggtcagtaaaacgctggaagaccagagcgccaccattcagcagatacagcgcgtgcagaaggacacaaa

SEQ ID NO: 124538 - DNA, 75 bp, synthetic construct
  source 1..75: mol_type = other DNA
aatttcgccgcgccggtgttgatatcgataaaaacggggccgcggttgggtactggatagccgaggatacctatc

SEQ ID NO: 124539 - DNA, 75 bp, synthetic construct
  source 1..75: mol_type = other DNA
ggcctgacggtaaaacgccactacgccgttacgcggggtataacggcggcggtcccggtttcggtggccagctga

SEQ ID NO: 124540 - DNA, 75 bp, synthetic construct
  source 1..75: mol_type = other DNA
gatctggcgccgcatctgctcgatcaggccatgatgttgtttggtttaccgatcagtatgacagtggatttagcg

SEQ ID NO: 124541 - DNA, 75 bp, synthetic construct
  source 1..75: mol_type = other DNA
aaaaacggggctgaaatttataaccgaacggctctggataatactctgatttacacgggtgttattgatatgcca

SEQ ID NO: 124542 - DNA, 75 bp, synthetic construct
  source 1..75: mol_type = other DNA
aaatggttggtatcccacagcaagtatcagcgatttgctggttgttgtgatgaagaaagccactgcaggcatcac

SEQ ID NO: 124543 - DNA, 75 bp, synthetic construct
  source 1..75: mol_type = other DNA
tgctggtatctgcgtttatgctttctggttgtgatgataaacaagaaaaaattgatttctatatgaaagctgaaa

SEQ ID NO: 124544 - DNA, 75 bp, synthetic construct
  source 1..75: mol_type = other DNA
atggcaattaagcattttcccgtcgttcgctttacctccagagggcacgaatacgaggtcgacgaacgcctgatt

SEQ ID NO: 124545 - DNA, 75 bp, synthetic construct
  source 1..75: mol_type = other DNA
ggcgacctgcccaagcggcgctatctacaaacgcgaagaagacggcattgtgctgattgatcaggataaatgccg

SEQ ID NO: 124546 - DNA, 75 bp, synthetic construct
  source 1..75: mol_type = other DNA
tggttgtgatgataaacaagaaaaaattgatttctatatgaaagctgaaaatgcaggtgcttatcataaaggctt

SEQ ID NO: 124547 - DNA, 75 bp, synthetic construct
  source 1..75: mol_type = other DNA
attatcgttttaggtgcaatctggctgctgaatgattaccgtggcgttcctacacctgttctgctgctgacgttg

SEQ ID NO: 124548 - DNA, 75 bp, synthetic construct
  source 1..75: mol_type = other DNA
atgaaagcgtttgtcacttacctgaaaaaagaatcaccagccatgcagttgccgagtggttcaacgggctggata

SEQ ID NO: 124549 - DNA, 75 bp, synthetic construct
  source 1..75: mol_type = other DNA
tagacctggaagcatcaaacagacaaaatcctgaccaaacacgtctggcttatgctggtttgaactacaaagatt

SEQ ID NO: 124550 - DNA, 75 bp, synthetic construct
  source 1..75: mol_type = other DNA
ccgattatttccacgccatcttgtcctatccacagcggcgagtcatttttacacggtaccatgctggcagccgct

SEQ ID NO: 124551 - DNA, 75 bp, synthetic construct
  source 1..75: mol_type = other DNA
gggcgctacatctgcggtgaagaaaccgcgttaatcaactccctggaagggcgtcgtgctaacccacgctcgaaa

SEQ ID NO: 124552 - DNA, 75 bp, synthetic construct
  source 1..75: mol_type = other DNA
gtggaggctgttggtcagccgagtgatgatgcatccggctatctggattttttcaaaggcgagatagggaaaacc

SEQ ID NO: 124553 - DNA, 75 bp, synthetic construct
  source 1..75: mol_type = other DNA
acccggcgcatagctacaagttcaatggcagcttaccgcgccgcacgtggatgcagcgtatcttccgtttgtttg

SEQ ID NO: 124554 - DNA, 75 bp, synthetic construct
  source 1..75: mol_type = other DNA
ttcgtttcacttccagaggacgtgaatacgaagtcgacgaacgcctgattaccacaatcgacaaacaccgctcag

SEQ ID NO: 124555 - DNA, 75 bp, synthetic construct
  source 1..75: mol_type = other DNA
ataaattctccagcaagttacatataagtgaggagtgtttaccattttttcagcctgtcatggacgctgactcta

SEQ ID NO: 124556 - DNA, 75 bp, synthetic construct
  source 1..75: mol_type = other DNA
acgctcaaccgctacccggaatgccaaccgaaagcggtgattgaaaattacgcgcaatatgcaggcgtaaaaccg

SEQ ID NO: 124557 - DNA, 75 bp, synthetic construct
  source 1..75: mol_type = other DNA
aaaacccgctgctgcaggatgtgaacaaaggctggttgcagaaaatccgtgaagatgcaccggatcacgtcatgg

SEQ ID NO: 124558 - DNA, 75 bp, synthetic construct
  source 1..75: mol_type = other DNA
gacgccgtatcagtcggcgcgtcgtctgggcggtaacggcgatgtctggctgaacgccaacgaataccccactgc

SEQ ID NO: 124559 - DNA, 75 bp, synthetic construct
  source 1..75: mol_type = other DNA
caacgttttgcgcgatttaacacgcctgaagaagggatcagggcgctggcaaaccaggtgtcaagctattacaac

SEQ ID NO: 124560 - DNA, 75 bp, synthetic construct
  source 1..75: mol_type = other DNA
atcgacggttcgctgctgccgtatgaagagaacgtggcgctgaccgcagaagtggttcgcctggctcatgcggtt

SEQ ID NO: 124561 - DNA, 75 bp, synthetic construct
  source 1..75: mol_type = other DNA
agcgaacatgattttgtgggcgatgcctttttcgctcacgttcgcgaaattacccagcgtagtccggtcccgttt

SEQ ID NO: 124562 - DNA, 75 bp, synthetic construct
  source 1..75: mol_type = other DNA
gtgatgatgcatcaggctatctggattttttcaaaggcgagatagggaaaacccatctggctcaggagctgtgga

SEQ ID NO: 124563 - DNA, 75 bp, synthetic construct
  source 1..75: mol_type = other DNA
cagatgaaataagaaaggcacttgattcagcagaaaataatgaaaccatctatctttccgaacaggaagtagaaa

SEQ ID NO: 124564 - DNA, 75 bp, synthetic construct
  source 1..75: mol_type = other DNA
ggcgttcgagcattataacgaatggcatccgcatagtgcactgggttatcgctcgccacgggaatatctacggca

SEQ ID NO: 124565 - DNA, 75 bp, synthetic construct
  source 1..75: mol_type = other DNA
cggagcggtggccatcagggaccattaccgtcagggtttatgacgatcagccgtttgaccggcagattgttattc

SEQ ID NO: 124566 - DNA, 75 bp, synthetic construct
  source 1..75: mol_type = other DNA
aaatgcgagcagaccaactttgacacggtgctgacctacgcgaagctggacttgtgggcgaagtttcaggatttc

SEQ ID NO: 124567 - DNA, 75 bp, synthetic construct
  source 1..75: mol_type = other DNA
gctggggctgggtgttggtagtaccattgccggaaccactgataccaccgcaaaagagcgtgagcctgtcgatcc

SEQ ID NO: 124568 - DNA, 75 bp, synthetic construct
  source 1..75: mol_type = other DNA
ttcctgaagcgcctgacagcccccaccattaccagcggtggcagccctccggtattttccctgacatcagacgga

SEQ ID NO: 124569 - DNA, 75 bp, synthetic construct
  source 1..75: mol_type = other DNA
ggtattggtgccggtattgagaatacccctgacggtatgcagagtcaggtgctgctggcggcggacaggattgcg

SEQ ID NO: 124570 - DNA, 75 bp, synthetic construct
  source 1..75: mol_type = other DNA
gttgaggactaccgctgcacagcactggtggaaaacatccagattggcgacttcagcaccgccgcagaagccgga

SEQ ID NO: 124571 - DNA, 75 bp, synthetic construct
  source 1..75: mol_type = other DNA
gacggataatggttcatgctaccgggccaatgaaacacgacagttggcctggatgttgggccttgaaccgaagag

SEQ ID NO: 124572 - DNA, 75 bp, synthetic construct
  source 1..75: mol_type = other DNA
gacggataatggttcatgctaccgggctaatgaaacacgacagttggcccggatgttgggccttgaaccgaagaa

SEQ ID NO: 124573 - DNA, 75 bp, synthetic construct
  source 1..75: mol_type = other DNA
gacggataatggttcatgctaccgggcgaatgaaacacgacagttggcccggatgttgggccttgaaccgaagat

SEQ ID NO: 124574 - DNA, 75 bp, synthetic construct
  source 1..75: mol_type = other DNA
aaaaaaccgcttatgcaacagctaatgtgcttgatatgggcggcttagtgtcgggtgcaaccaacctgataggca

SEQ ID NO: 124575 - DNA, 75 bp, synthetic construct
  source 1..75: mol_type = other DNA
ccggcagtgcagcacctgacggtggaggtgagcgcagctgacagtcagtatctggcgctggcgaaatgggacacg

SEQ ID NO: 124576 - DNA, 75 bp, synthetic construct
  source 1..75: mol_type = other DNA
cagattgttattccggcggtggcattcagtggcgctaagcatgagagagagcatactgatatttactcctcatgc

SEQ ID NO: 124577 - DNA, 75 bp, synthetic construct
  source 1..75: mol_type = other DNA
aggtttttttaagtgatgccgacacctatgttccgcccgatcaagacggaatgggctatatgctggcggaaattg

SEQ ID NO: 124578 - DNA, 75 bp, synthetic construct
  source 1..75: mol_type = other DNA
tagaggcgcaaaaggcagcctttggtttaagtgacgatgatgctgtatccgaacagcaaaaaacggcttacgcaa

SEQ ID NO: 124579 - DNA, 75 bp, synthetic construct
  source 1..75: mol_type = other DNA
accagattgaaggcgatatagtcaaaacagtgggtaaggcttttccgcgggactcccgggcaccggagcggtggc

SEQ ID NO: 124580 - DNA, 75 bp, synthetic construct
  source 1..75: mol_type = other DNA
ctgaccgcagaagtcaccgcagacagcggggaataccaggtgctggcgcgctgggatacgccgaaggtggtgaag

SEQ ID NO: 124581 - DNA, 75 bp, synthetic construct
  source 1..75: mol_type = other DNA
tctgtgggcgaagtttcaggatttccaagtgcgcatccgtgacgccatcgtgaaacgtcaggcactggaccgcat

SEQ ID NO: 124582 - DNA, 75 bp, synthetic construct
  source 1..75: mol_type = other DNA
gacggataatggttcatgctaccgggctaatgaaacacgacagttggccaggatgttgggccttgaaccgaagac

SEQ ID NO: 124583 - DNA, 75 bp, synthetic construct
  source 1..75: mol_type = other DNA
cgcagtacacccggtgagcgtccgaaagggttgcatctggaaaaattagagacactgaatgtattcggtgtacgt

SEQ ID NO: 124584 - DNA, 75 bp, synthetic construct
  source 1..75: mol_type = other DNA
ccgaacaggctgactgtttcagccagaagcgcagattttcgggatgaatttaacgttaaacgtgaggtgtcctgg

SEQ ID NO: 124585 - DNA, 75 bp, synthetic construct
  source 1..75: mol_type = other DNA
ggcggcggatgtggacaagtgggcgctgtatgccattgcgcagtactgcgaccagacggtcccggatggtttcgg

SEQ ID NO: 124586 - DNA, 75 bp, synthetic construct
  source 1..75: mol_type = other DNA
ctcatgccgtctgatagtacgaaaaaacggtgctgaaatttataaccgaacggctctggataatacgctgatata

SEQ ID NO: 124587 - DNA, 75 bp, synthetic construct
  source 1..75: mol_type = other DNA
gaagccagaaatgtgctttttattgaggatactggtccattgtatctggagaaattattcagtaagatggttagc

SEQ ID NO: 124588 - DNA, 75 bp, synthetic construct
  source 1..75: mol_type = other DNA
atatttacattatttccagaacggtaatagccatcattacccggataaaatcatcctgcttacgccggatgaacg

SEQ ID NO: 124589 - DNA, 75 bp, synthetic construct
  source 1..75: mol_type = other DNA
gtgacttcgttaaagctgtatccaaatcattcccgaaacaggctggtacgtggggtaacacggaaacaccaaacg

SEQ ID NO: 124590 - DNA, 75 bp, synthetic construct
  source 1..75: mol_type = other DNA
gtggcggtacaacaaccattattgaccatatgggatttggcccaaacggctgtcggttacgccatcaactggagg

SEQ ID NO: 124591 - DNA, 75 bp, synthetic construct
  source 1..75: mol_type = other DNA
atgcgtgtattgatcaaaaacggcactgttgttaacgctgatgggcaagcaaagcaggatttgctgattgaaagc

SEQ ID NO: 124592 - DNA, 75 bp, synthetic construct
  source 1..75: mol_type = other DNA
agcttctggggaacgctgaaaaatgagagcctgagccactatcgttttaataaccgggatgaagccatctcagta

SEQ ID NO: 124593 - DNA, 75 bp, synthetic construct
  source 1..75: mol_type = other DNA
gaaggcgatatccagaccgcgcagaaactgcaaactgaatgcaacaaagtcattgatttactgatcaaaacgggc

SEQ ID NO: 124594 - DNA, 75 bp, synthetic construct
  source 1..75: mol_type = other DNA
ccagagcgccaccatacagcagatacagcgcgtgcagaaggacacaaatgatgacctggctgcgctgtacatgct

SEQ ID NO: 124595 - DNA, 75 bp, synthetic construct
  source 1..75: mol_type = other DNA
atcgtgaaggcgctgaaagaaggcgatatccagaccgcgcagaaactgcaaactgagtgcaataaagtcattgat

SEQ ID NO: 124596 - DNA, 75 bp, synthetic construct
  source 1..75: mol_type = other DNA
caagtggctgatatcgcaacagccatacaacaaaaacgcactgttaatcacgatacagaaatcattgatctactt

SEQ ID NO: 124597 - DNA, 75 bp, synthetic construct
  source 1..75: mol_type = other DNA
atgtgtcaggtatttggtgtatccaggagcggttattacaactgggtacagcatgaaccctcagacataaaacaa

SEQ ID NO: 124598 - DNA, 75 bp, synthetic construct
  source 1..75: mol_type = other DNA
tgcgcctgcataaaaagcttttatttagccgtttcggcatcttcagtatatttcctatgcttttggttgtgcttt

SEQ ID NO: 124599 - DNA, 75 bp, synthetic construct
  source 1..75: mol_type = other DNA
tgcgcggcgctggttgaaaacatcgaaatcggtgatttcaccccgcctgcagtagaaacaggaaacggagagtaa

SEQ ID NO: 124600 - DNA, 75 bp, synthetic construct
  source 1..75: mol_type = other DNA
tcgccgccatgcgcgaacgcgtcgcgcaaatcctcaatgaacgtcagtacctggtggatgcgctgcgcaccatcg

SEQ ID NO: 124601 - DNA, 75 bp, synthetic construct
  source 1..75: mol_type = other DNA
gcagcgcgacgaaagacggcgtaaccaccaaagatgcagtgaaagtgggtaaggagggcgactacgccaacctgg

SEQ ID NO: 124602 - DNA, 75 bp, synthetic construct
  source 1..75: mol_type = other DNA
caacgttacgttagcccggatgagttcgacgaaatgaaagccgaagcgctggcgatgggctttacccatgctgca

SEQ ID NO: 124603 - DNA, 75 bp, synthetic construct
  source 1..75: mol_type = other DNA
ggcgatgggctttacccatgctgcatgtgggcctttcgtccgttcttcgtaccatgccgatttgcaggccaaagg

SEQ ID NO: 124604 - DNA, 75 bp, synthetic construct
  source 1..75: mol_type = other DNA
attgccggaaccactgacaccaccgcgaaagagcgtgaacctgtcgacccgacgctgatggtcgatgtggaatat

SEQ ID NO: 124605 - DNA, 75 bp, synthetic construct
  source 1..75: mol_type = other DNA
cgcaccgctcattcggaatcaaaaacagcaccgatggctgaaggcaaagccacgaagtcatcacctgagcgcatt

SEQ ID NO: 124606 - DNA, 75 bp, synthetic construct
  source 1..75: mol_type = other DNA
aggctaaatcattgaaagaatggatagataatggcaacgacaaggcggctggcgcaccggtggtcgcgaaagccc

SEQ ID NO: 124607 - DNA, 75 bp, synthetic construct
  source 1..75: mol_type = other DNA
tcgcaggagagtgggctaaaactgagcgacctcctcggcggtggcagattacgtaccaaaatatcccctacacgc

SEQ ID NO: 124608 - DNA, 75 bp, synthetic construct
  source 1..75: mol_type = other DNA
cggtgctgacctacgcaaaactggacatgtgggcgaaattccaggacttccaggtgcgtattcgcaacgccatcg

SEQ ID NO: 124609 - DNA, 75 bp, synthetic construct
  source 1..75: mol_type = other DNA
ttgcgaaccgggccgcgatgcggtgctgttctgcccgccgacctacggtatgtacagcgtcagcgctgagaccat

SEQ ID NO: 124610 - DNA, 75 bp, synthetic construct
  source 1..75: mol_type = other DNA
gcactggtggtcgccgacgaagcctatattgagttctgccctcaggcgacgctggccggctggctggaagagtac

SEQ ID NO: 124611 - DNA, 75 bp, synthetic construct
  source 1..75: mol_type = other DNA
aatagacgccgctcgcgccactcaggatggtgagaaaatcaaacagatagcgcaccagttaaaaagcagttgcgc

SEQ ID NO: 124612 - DNA, 75 bp, synthetic construct
  source 1..75: mol_type = other DNA
tcgtcggccggtgcgaacaactggacgccgacaacgtacatcagtgatttactggttgtggtcatgaaaaaatcc

SEQ ID NO: 124613 - DNA, 75 bp, synthetic construct
  source 1..75: mol_type = other DNA
cgtcaggctgcggcttcccttgcgcccttgcaaccctgcaggcccggcaaagatggaggcacggcaccgcccggt

SEQ ID NO: 124614 - DNA, 75 bp, synthetic construct
  source 1..75: mol_type = other DNA
gaaaactggtttgaccgtaccgtgagtgctgatgccgcaggcatcattttgacttcccttgtgattaaccgccag

SEQ ID NO: 124615 - DNA, 75 bp, synthetic construct
  source 1..75: mol_type = other DNA
aaggatgtcaccattaacggcaagaccacctcacagttcctggcgtcggtgattctggataatctgcctccccgg

SEQ ID NO: 124616 - DNA, 75 bp, synthetic construct
  source 1..75: mol_type = other DNA
gctgcccgaatttctggcgcagtatcgccagtcaaacggccgaccaatgaccgaggcttacgaggattttgttgc

SEQ ID NO: 124617 - DNA, 75 bp, synthetic construct
  source 1..75: mol_type = other DNA
atgcaatatgcgaaacctgtcactctgaacgttgaagagtgcgaccgtttgtcttttctgccttacctgtttggc

SEQ ID NO: 124618 - DNA, 75 bp, synthetic construct
  source 1..75: mol_type = other DNA
gaagccagtggacgggcgagcaatgatgctgcgggctatctggaacttttccgggaaaagataggaaaaacgcat

SEQ ID NO: 124619 - DNA, 75 bp, synthetic construct
  source 1..75: mol_type = other DNA
gctggtgaattacgatattcatgatgcaacaaaagtaattatccgccgcatggacggttcctatatctgtgaggc

SEQ ID NO: 124620 - DNA, 75 bp, synthetic construct
  source 1..75: mol_type = other DNA
acgaacaggcagcaagacgcgcagcggcggcaaagtggcagcaactacaacgcggagccgcatcattctccatca

SEQ ID NO: 124621 - DNA, 75 bp, synthetic construct
  source 1..75: mol_type = other DNA
cattgataacagtggctttaccacgcagcttgagcttgaagccaaaatcccggaatggatagcagaaacagagta

SEQ ID NO: 124622 - DNA, 75 bp, synthetic construct
  source 1..75: mol_type = other DNA
tagctggtttccttctttggatgaagaatggcaggggtggatcaggctaggaaaggaaaagcaagttaattttga

SEQ ID NO: 124623 - DNA, 75 bp, synthetic construct
  source 1..75: mol_type = other DNA
gaaacagtacaggacgtcatgctgggagcagtggaacgccgctttggcagcgagcttccggcgtctccagtggag

SEQ ID NO: 124624 - DNA, 75 bp, synthetic construct
  source 1..75: mol_type = other DNA
caccgtttcagcggtctgccgccgggggaatacaccctgacggtcagggcgattaacagttatggccagcagggc

SEQ ID NO: 124625 - DNA, 75 bp, synthetic construct
  source 1..75: mol_type = other DNA
gctgattggctctcgcaaatttactgaaggctggagcagctggcgtgtatccaccatgggcctgcttaacatggg

SEQ ID NO: 124626 - DNA, 75 bp, synthetic construct
  source 1..75: mol_type = other DNA
ttgaccgcctgcgtgtcaccttcggggtgcagtcactggtgcagaccacgtcacagggtgaccgtaatccggctt

SEQ ID NO: 124627 - DNA, 75 bp, synthetic construct
  source 1..75: mol_type = other DNA
taaaaccggaagaaattagctggctgcctgaatttctggcgcagtatcgccaggtgaacggcagacctatgtctg

SEQ ID NO: 124628 - DNA, 75 bp, synthetic construct
  source 1..75: mol_type = other DNA
ttacgttcgcagtgtgaacaccgttggcaaatcggcattcgtggaggctgtcggtcagccgagtgatgatgcatc

SEQ ID NO: 124629 - DNA, 75 bp, synthetic construct
  source 1..75: mol_type = other DNA
cgagaaatagcagttatgccagcggtacaataacggtcacggtgtacgatgatcaggcttttgaccgtcagatag

SEQ ID NO: 124630 - DNA, 75 bp, synthetic construct
  source 1..75: mol_type = other DNA
ctgaaaccgcaaatcagcgaaatgctgatggatatcgaaatcgaccacgccgaccagaccgaagaaagcgacatg

SEQ ID NO: 124631 - DNA, 75 bp, synthetic construct
  source 1..75: mol_type = other DNA
gggttcgcgctggcgattgccgagggggaagtgccgccctcactgcgtaacgtgcggttgctgtcgctggatgtc

SEQ ID NO: 124632 - DNA, 75 bp, synthetic construct
  source 1..75: mol_type = other DNA
tgcgtgacgaacacggtcgcaaagtgcttatcagttatgacattcatgacgccgagcgaattacggtacgtcgca

SEQ ID NO: 124633 - DNA, 75 bp, synthetic construct
  source 1..75: mol_type = other DNA
tgtggctgattaaaacggaactgctggaaacgcagaccgtggacttcagcgtgggtgccgaagggcttcgccatg

SEQ ID NO: 124634 - DNA, 75 bp, synthetic construct
  source 1..75: mol_type = other DNA
accgtttctgtattactcggataacggttctggtgaaacggctgacatgctggacaaagaggtcgtagggattct

SEQ ID NO: 124635 - DNA, 75 bp, synthetic construct
  source 1..75: mol_type = other DNA
atgaccgacaccaccatgcaattgctcagtcagggcacggcccccgtgaaaatgccggattttgatattctctcg

SEQ ID NO: 124636 - DNA, 75 bp, synthetic construct
  source 1..75: mol_type = other DNA
gtaatctcgggcggctgaaagccattaactatcttgtcgaaaaagcccgtaaaggtgaactaccggaacgcctgc

SEQ ID NO: 124637 - DNA, 75 bp, synthetic construct
  source 1..75: mol_type = other DNA
atcgatgaagacggacaaaccctgttcttccatgagctgacacgcaacctgtttgaagtagattggatttccgag

SEQ ID NO: 124638 - DNA, 75 bp, synthetic construct
  source 1..75: mol_type = other DNA
atgcagaccaccatcacagaaacccgcaatgaaatcacacagacggtcagtaaaacgctggaggaccagagcgcc

SEQ ID NO: 124639 - DNA, 75 bp, synthetic construct
  source 1..75: mol_type = other DNA
ggaggcaatataaacatgctgatgaaatattcccttgtggcggtaatagtgttttggttaaaggtgctgggattt

SEQ ID NO: 124640 - DNA, 75 bp, synthetic construct
  source 1..75: mol_type = other DNA
gcggcagcaacgctaaaaaccgcaattaccgaaataataatctcggcaatcttgtttttgccaaccaggaagggg

SEQ ID NO: 124641 - DNA, 75 bp, synthetic construct
  source 1..75: mol_type = other DNA
tgacccgacggtgcagtttgagttctggttttcggaggcaaaaattgcagacgccgcacaggtggaaacctctgc

SEQ ID NO: 124642 - DNA, 75 bp, synthetic construct
  source 1..75: mol_type = other DNA
aaatcacgcagaccgtcaataagaaactggaagaccagagtgcagcgatccagcagatacagaaggttcaggttg

SEQ ID NO: 124643 - DNA, 75 bp, synthetic construct
  source 1..75: mol_type = other DNA
ggcggtggcattcagtggcgctaagcatgagagagagcatactgatatttactcctcatgccgtctgatagtgcg

SEQ ID NO: 124644 - DNA, 75 bp, synthetic construct
  source 1..75: mol_type = other DNA
ctaacctggaacttttcccacaagcgcctttgttgacgctggatacttatcgtcagattggcaaaaacgccgcgc

SEQ ID NO: 124645 - DNA, 75 bp, synthetic construct
  source 1..75: mol_type = other DNA
gctggggttgggtgttggcagcaccattgctggaaccactgataccaccgcgaaagagcgtgagcctgtcgatcc

SEQ ID NO: 124646 - DNA, 75 bp, synthetic construct
  source 1..75: mol_type = other DNA
atgaagtcattattgctgtaggcccggcgttcggcctggcgcaaaccgtcaatatcatcggtattccgcataaaa

SEQ ID NO: 124647 - DNA, 75 bp, synthetic construct
  source 1..75: mol_type = other DNA
gcaatgaaatcacacagacggtcagtaaaacgctggaggaccagagcgccaccatacagcaaatccagcgtgtgc

SEQ ID NO: 124648 - DNA, 75 bp, synthetic construct
  source 1..75: mol_type = other DNA
ggggacggatgaaaacgtgctggtacttaatcgcacttatgccaaccggagcaacgccgaacgagcggcgaaaat

SEQ ID NO: 124649 - DNA, 75 bp, synthetic construct
  source 1..75: mol_type = other DNA
cccgcgaacccgcgaagaaagaaagcaccgcggtgaagcgtaagcgcaggactaagaagcagaagaaagagccgg

SEQ ID NO: 124650 - DNA, 75 bp, synthetic construct
  source 1..75: mol_type = other DNA
tggcatgtacgacataactaaagagatcacaggtaaagcagaatctcttaaagaatgggtagaaaaggggaaaaa

SEQ ID NO: 124651 - DNA, 75 bp, synthetic construct
  source 1..75: mol_type = other DNA
tgtgaatgcgaacgccgggacgctcaacaatgtcacaattaatgagaactgtcagattaaggggaaactgtcagc

SEQ ID NO: 124652 - DNA, 75 bp, synthetic construct
  source 1..75: mol_type = other DNA
gcatagttcgctaccactacgtggaaacggtgaacattacaccccggcgcagttccgacgctacaaactggaaaa

SEQ ID NO: 124653 - DNA, 75 bp, synthetic construct
  source 1..75: mol_type = other DNA
tcaaaagtgctgcaaaaataggtgttaaatcagcagcatccacagcggcaagagcggtccctatcatcggttcgc

SEQ ID NO: 124654 - DNA, 75 bp, synthetic construct
  source 1..75: mol_type = other DNA
gttgctgttgctgatgcgttacgccacggaataaaaaatcacggcaaaccgtatatctattattcagataatggc

SEQ ID NO: 124655 - DNA, 75 bp, synthetic construct
  source 1..75: mol_type = other DNA
tggtgaacactcaaaaagcaacctctgcaacagcatttaataatgctgttgagacaaaatcagcacaagcagtag

SEQ ID NO: 124656 - DNA, 75 bp, synthetic construct
  source 1..75: mol_type = other DNA
ccggctccgagacggtactgggtgcggaagtgaaatacgacacgccgataacccggaccatcacgtcggcaaaca

SEQ ID NO: 124657 - DNA, 75 bp, synthetic construct
  source 1..75: mol_type = other DNA
ccaggactggataatcagcaaggtacagcatgacgttgatagcaacggatttactacacagcttaactttgaagc

SEQ ID NO: 124658 - DNA, 75 bp, synthetic construct
  source 1..75: mol_type = other DNA
acgagcagacagcaagacgcgcagcggcggcaaagtggcagcaactacaacgcggagccgcatcattctccatca

SEQ ID NO: 124659 - DNA, 75 bp, synthetic construct
  source 1..75: mol_type = other DNA
aggacgtccattacgaatgtcagcaatgaaatcacgcagaccgtcaataaaaaactggaagaccagagtgcggca

SEQ ID NO: 124660 - DNA, 75 bp, synthetic construct
  source 1..75: mol_type = other DNA
atttctcatgtggatacctctccggattgcagcggtaaaaatgtaaatccgcaaattgttgaaaactatcgtggt

SEQ ID NO: 124661 - DNA, 75 bp, synthetic construct
  source 1..75: mol_type = other DNA
ggcgaaaaatgcggatatcagtggcagtgtgaatgcgaactcaggaacgctcaacaatgtcacgattaaccagaa

SEQ ID NO: 124662 - DNA, 75 bp, synthetic construct
  source 1..75: mol_type = other DNA
ttgtgacactggaaggtatggaaaaagcagtgcaggtgattgtccgtattgccgagttaacggcgcaacgcaagt

SEQ ID NO: 124663 - DNA, 75 bp, synthetic construct
  source 1..75: mol_type = other DNA
atgaagccccaggagatatttctatcaaccctggggctgccactccaaacccaaacaatttggatggtagtccct

SEQ ID NO: 124664 - DNA, 75 bp, synthetic construct
  source 1..75: mol_type = other DNA
ggggatgtcattgaaatctgcgatgatgactatgcgggtatcagcaccggcgggcgcgtgctggcggtgaacagc

SEQ ID NO: 124665 - DNA, 75 bp, synthetic construct
  source 1..75: mol_type = other DNA
ttcctgacgttgattaacgtctcgccggttgatgagcagtctggacaactgctggggctgggcgtaggtagcacc

SEQ ID NO: 124666 - DNA, 75 bp, synthetic construct
  source 1..75: mol_type = other DNA
gaaggcgatattgtcaaaacggtcagcaagtctttcccccgcacgagcacttatgccagtggcaccatcacggta

SEQ ID NO: 124667 - DNA, 75 bp, synthetic construct
  source 1..75: mol_type = other DNA
cgggcgaatgacccgccaggaggaggcgaaaatttaccatgcgggcccgtccattattgattttctgccctgggt

SEQ ID NO: 124668 - DNA, 75 bp, synthetic construct
  source 1..75: mol_type = other DNA
cctgaaagactatccggatgtcgccgagaagatgctgaatatggccgagtggtgggtgtgcctgaccatgccgcc

SEQ ID NO: 124669 - DNA, 75 bp, synthetic construct
  source 1..75: mol_type = other DNA
cgccgccgttcagttatcgacaatccgaaacgtgaccggattgaaaattttgaatccgttaacgaagcctatgtg

SEQ ID NO: 124670 - DNA, 75 bp, synthetic construct
  source 1..75: mol_type = other DNA
caacagcacgccgttatttgtggcgcaggggaatcagctgttcatgaacgacgtgttcctgaagcgactgtttgc

SEQ ID NO: 124671 - DNA, 75 bp, synthetic construct
  source 1..75: mol_type = other DNA
ccgcgcaaggggcgtggctgtttgaccagcgtccgcataaggtcatcgtgctggacaggctgcgtaaagcaccca

SEQ ID NO: 124672 - DNA, 75 bp, synthetic construct
  source 1..75: mol_type = other DNA
caacgttgcacctgtatgctcggagcaacgccgtttgtttatgacctattgaatctacttgagaaacagcctgcc

SEQ ID NO: 124673 - DNA, 75 bp, synthetic construct
  source 1..75: mol_type = other DNA
caaataataatctgaacagcatgtgggctgtgaagctgcaacagatgaaggacggacgcctttatattgcgggta

SEQ ID NO: 124674 - DNA, 75 bp, synthetic construct
  source 1..75: mol_type = other DNA
gggtgctcaataagtgtcaggcaaaaatgttctttgcaccgacgttgtttaaacaaacgcgtccggtagatttaa

SEQ ID NO: 124675 - DNA, 75 bp, synthetic construct
  source 1..75: mol_type = other DNA
aagatattattgtccgcggcggcgaaaatattagcagtcgtgaagtggaagatattttattgcagcatcctaaaa

SEQ ID NO: 124676 - DNA, 75 bp, synthetic construct
  source 1..75: mol_type = other DNA
ctcagggcgtattttcctcagttatagatatgcctgccggacaggggacgctgacactgacattcaccgtatctt

SEQ ID NO: 124677 - DNA, 75 bp, synthetic construct
  source 1..75: mol_type = other DNA
gtgccactacagaacagcatgtgggctgtgaagctgcagcagatgcaggacggacgcctttatatcgcgggtatc

SEQ ID NO: 124678 - DNA, 75 bp, synthetic construct
  source 1..75: mol_type = other DNA
ttcctgacgctgattaatgtcacgccagtgactgagcagtctggtcagttgctggggctgggggttggcagcacc

SEQ ID NO: 124679 - DNA, 75 bp, synthetic construct
  source 1..75: mol_type = other DNA
ctcggaaaagcggattaccgatatcaggcaggttgaaaccacagcccgctatcttggcacggggctgtactggat

SEQ ID NO: 124680 - DNA, 75 bp, synthetic construct
  source 1..75: mol_type = other DNA
caggaaaacagtgaaaaactggctgccgatatgattatcagtcagaaacgcatgggaggcctgcaggccgtgcgt

SEQ ID NO: 124681 - DNA, 75 bp, synthetic construct
  source 1..75: mol_type = other DNA
ctcttatcgtggaccaggactggaggaagggatgaaaatcttccaggagctgaaacaaacgtttggtgtgaaaat

SEQ ID NO: 124682 - DNA, 75 bp, synthetic construct
  source 1..75: mol_type = other DNA
caggaaaacagtgaaaaactggccgccgatatgatcatcagtcagaaacgcatgggcggcctgcaggccgtgcgt

SEQ ID NO: 124683 - DNA, 75 bp, synthetic construct
  source 1..75: mol_type = other DNA
accgtcagggtttatgacgatcagccgtttgaccggcagattgttattccggcggtggcattcagcggcgctaaa

SEQ ID NO: 124684 - DNA, 75 bp, synthetic construct
  source 1..75: mol_type = other DNA
ccgctggctaaactggaaccgttcctcaagcagatgaaagcgattgatgatctggtgaaaggtttcgaagaactg

SEQ ID NO: 124685 - DNA, 75 bp, synthetic construct
  source 1..75: mol_type = other DNA
atgaaacaaaaagtggttagcattggcgacatcaacgtagcaaatgacctgccgttcgtactgtttggcggtatg

SEQ ID NO: 124686 - DNA, 75 bp, synthetic construct
  source 1..75: mol_type = other DNA
caggagcagtttggtctgaaaacatcaatgtcgcgtaaaggtaactgttacgacaacgctccgatggaaagcttc

SEQ ID NO: 124687 - DNA, 75 bp, synthetic construct
  source 1..75: mol_type = other DNA
ggtccgccttcgtgctggctgctgttgtggccctggttatttgtctgattaccttttttgtcactacctggattc

SEQ ID NO: 124688 - DNA, 75 bp, synthetic construct
  source 1..75: mol_type = other DNA
ggaccgtatccggcagtaaaactctccctgaaatatcaggcacgtccgaaggttgccccggagtttattccgcgt

SEQ ID NO: 124689 - DNA, 75 bp, synthetic construct
  source 1..75: mol_type = other DNA
caggaaaacagtgaaaaactggcagccgatatgatgatcagtcagaaacgcatgggaggcctgcaggccgtgcgt

SEQ ID NO: 124690 - DNA, 75 bp, synthetic construct
  source 1..75: mol_type = other DNA
caggaaaacagtgaaaaactggcagccgatatgataatcagtcagaaacgcatggggggcctgcaggccgtgcgt

SEQ ID NO: 124691 - DNA, 75 bp, synthetic construct
  source 1..75: mol_type = other DNA
tcatcaggagcgaataactggacaccaacaaccagtatcagcgatctgctggttgtggtgatgaaaaaatccaca

SEQ ID NO: 124692 - DNA, 75 bp, synthetic construct
  source 1..75: mol_type = other DNA
ggttaaacgtgatcgcctcattgaaaacgccaaaaggtcaggccggttaaagcgggcagctatcaagttactgaa

SEQ ID NO: 124693 - DNA, 75 bp, synthetic construct
  source 1..75: mol_type = other DNA
tgttcccgttatgcagattaacagtggtaaacgctatgaaagtaaaccgctgggttctcagggagcaaatactac

SEQ ID NO: 124694 - DNA, 75 bp, synthetic construct
  source 1..75: mol_type = other DNA
ccggagactcagcagtattaaggtcggagaggcagtaaccctgacaccttccggctccgtcagaaaagcaaaagg

SEQ ID NO: 124695 - DNA, 75 bp, synthetic construct
  source 1..75: mol_type = other DNA
tcaaatcgattattgataaattaagtctggcggggaaaagcggcgaaggactttatttcatcgataaagaactct

SEQ ID NO: 124696 - DNA, 75 bp, synthetic construct
  source 1..75: mol_type = other DNA
gtgagcaagattgactatcaggcattacgcgaacgctattcacctgcgccagtaccgaaatgccctatttgcggc

SEQ ID NO: 124697 - DNA, 75 bp, synthetic construct
  source 1..75: mol_type = other DNA
cggcccatcgtcaatattaccgatgaagcgcatatcatcaccgtcaacccgctgttggcgcggtttctgaccaag

SEQ ID NO: 124698 - DNA, 75 bp, synthetic construct
  source 1..75: mol_type = other DNA
aaaaattgccgatgcagtcaaagccagaggttatcagatcatgacttccccggataaagcttactactggatcca

SEQ ID NO: 124699 - DNA, 75 bp, synthetic construct
  source 1..75: mol_type = other DNA
tgctgatgagaacatcggtatacgaataggcatcgatttgggggaaaccaattacgtactttggggtaattatgg

SEQ ID NO: 124700 - DNA, 75 bp, synthetic construct
  source 1..75: mol_type = other DNA
ataaacgccggacctgggcagactggctgcagcataaagccagcgccggtgatgatgaggctcttaaaatcctgc

SEQ ID NO: 124701 - DNA, 75 bp, synthetic construct
  source 1..75: mol_type = other DNA
attacttaaaggtgcaggtgtaaataaacgctacctgtacagcgtggtcagtaaagcgctgggcgccgaacttga

SEQ ID NO: 124702 - DNA, 75 bp, synthetic construct
  source 1..75: mol_type = other DNA
taaccgtaccgcgctggataatacgctgatttacagtggtgttattgatatgcctgccggtcacggtcacatgac

SEQ ID NO: 124703 - DNA, 75 bp, synthetic construct
  source 1..75: mol_type = other DNA
ggctgtttaaggacacggaggtgaccggacaaccctggcgcggacagcagcgccggacccggatggtggtttacc

SEQ ID NO: 124704 - DNA, 75 bp, synthetic construct
  source 1..75: mol_type = other DNA
cttactggcgcacaaaaatatgtggccgaaagagaggaaaaacgccttaaagggttcgatataccgaaacataga

SEQ ID NO: 124705 - DNA, 75 bp, synthetic construct
  source 1..75: mol_type = other DNA
gaggatgcaccggatcacgtcatgggcagtaccacaacgggcggtgaaaccacaccgggcgcggtgaaagtaggt

SEQ ID NO: 124706 - DNA, 75 bp, synthetic construct
  source 1..75: mol_type = other DNA
ctcctgatgcgtgtctcgcgctgcttgagcagcagcgttgcacctgtatgctcggcgcaacgccgtttgtctatg

SEQ ID NO: 124707 - DNA, 75 bp, synthetic construct
  source 1..75: mol_type = other DNA
cgcggtggtgaatctcgacgatccgttgtcgcgccttatgcataccgatggttacgctgccgctggcgtggaaat

SEQ ID NO: 124708 - DNA, 75 bp, synthetic construct
  source 1..75: mol_type = other DNA
ttcatcctgacgctgactctggtggtggaagaccaggtgaaaacccacagcgaagccaacctgaagtacatggac

SEQ ID NO: 124709 - DNA, 75 bp, synthetic construct
  source 1..75: mol_type = other DNA
cagcgccctgaaggaccgccacacggcggtggaggtgaattacaccgacccgcagaacggctggcagacctccac

SEQ ID NO: 124710 - DNA, 75 bp, synthetic construct
  source 1..75: mol_type = other DNA
taccgctgcgcagcactggtggaaaacatccagattggcgattttagcgccgctgcagcagaagccggagcgtaa

SEQ ID NO: 124711 - DNA, 75 bp, synthetic construct
  source 1..75: mol_type = other DNA
gaaatgggacacgccgcgggtggtgaagggcgtgcgcttcagtctgcgcctgaccagtggaagcggtcaggacag

SEQ ID NO: 124712 - DNA, 75 bp, synthetic construct
  source 1..75: mol_type = other DNA
gccacaaactctaccgcagcgcgctggcattttacctttccgccccggataacagcgaactgacccgacgcgtgc

SEQ ID NO: 124713 - DNA, 75 bp, synthetic construct
  source 1..75: mol_type = other DNA
cgatcccgatgatatcgacaacgagcagcgcgatctgctgggcgagatggagatcacggcccgtctgatgatcac

SEQ ID NO: 124714 - DNA, 75 bp, synthetic construct
  source 1..75: mol_type = other DNA
tctcgcctgcctgaaaaccggcgcagtttccgtgccgttgttgccttcctggcgagaagcggaactggtgtgggt

SEQ ID NO: 124715 - DNA, 75 bp, synthetic construct
  source 1..75: mol_type = other DNA
tctctgccgtatggatgaggctggcggtaatgactccaacttattgatagtgttttatgttcagataatgcccga

SEQ ID NO: 124716 - DNA, 75 bp, synthetic construct
  source 1..75: mol_type = other DNA
tacacctatagctcgctcgatcatgccgcgagctgtctggcaagctggatgctggagaacggtattgaatccggc

SEQ ID NO: 124717 - DNA, 75 bp, synthetic construct
  source 1..75: mol_type = other DNA
aggcttttgaccgtcagatagtcgtcccccccgttctgtttcgcggtggtaagcatgaaaacttcaacagcaaca

SEQ ID NO: 124718 - DNA, 75 bp, synthetic construct
  source 1..75: mol_type = other DNA
tttatgacgatcagccgtttgaccgacagattgttattccggcggtggcattcagcggcgctaagcatgagagag

SEQ ID NO: 124719 - DNA, 75 bp, synthetic construct
  source 1..75: mol_type = other DNA
caggaaaacagtgaaaaactggcggccgatatgataatcagtcagaaacgcatgggaggcctgcaggccgtgcgt

SEQ ID NO: 124720 - DNA, 75 bp, synthetic construct
  source 1..75: mol_type = other DNA
ttgaggtgaactggattgacccggataacggctgggagacggcaacagagcttgtggaggacacgcaggccattg

SEQ ID NO: 124721 - DNA, 75 bp, synthetic construct
  source 1..75: mol_type = other DNA
gtaaagccctgtttatggcgctcaggagccagcgcccacctgccgggctaatccaccactctgatcgaggttcac

SEQ ID NO: 124722 - DNA, 75 bp, synthetic construct
  source 1..75: mol_type = other DNA
aatcgaacaatggcgacaacaatttcccattgaagcgatgtgtcaggtatttggtgtatccaggagcggttatta

SEQ ID NO: 124723 - DNA, 75 bp, synthetic construct
  source 1..75: mol_type = other DNA
ctcctcatgccgtctgatagtgcggaaaaacggtgctgaaatttataaccgtaccgcgctggataatacgctgat

SEQ ID NO: 124724 - DNA, 75 bp, synthetic construct
  source 1..75: mol_type = other DNA
tcgccaattctgtacgggtacgacgaagcaacctcaccatacggcataggccgcttgacctcagtcgatgatggc

SEQ ID NO: 124725 - DNA, 75 bp, synthetic construct
  source 1..75: mol_type = other DNA
acatgagcgggagaatagcgatacttattcgtcatgccgcctgatagtgaagaaaaacggggctgaaatttataa

SEQ ID NO: 124726 - DNA, 75 bp, synthetic construct
  source 1..75: mol_type = other DNA
gaatggatggtacccgacagcgagtattagcgatctgctggttgtcgtgatgaagaagtccacggcgggtatcgg

SEQ ID NO: 124727 - DNA, 75 bp, synthetic construct
  source 1..75: mol_type = other DNA
ggtctatcggtacacgccagactcgttgatttcagccatagacgacaatctcagctcatcagtcaatcagtcact

SEQ ID NO: 124728 - DNA, 75 bp, synthetic construct
  source 1..75: mol_type = other DNA
gggaatacaccctgacggtcagggcgataaacagctacggccagcagggcgaacctgcgaccactaccttcagga

SEQ ID NO: 124729 - DNA, 75 bp, synthetic construct
  source 1..75: mol_type = other DNA
gtggtggcagcgcaatcgcaactggcagaacaacaaaagcaactggccgatcctaatttccgcgcccgtgcgcaa

SEQ ID NO: 124730 - DNA, 75 bp, synthetic construct
  source 1..75: mol_type = other DNA
ggtccggtgaagggactgcagagtattctggtgaacaaaaccccgctgacggacacggacggtaatcccgtgata

SEQ ID NO: 124731 - DNA, 75 bp, synthetic construct
  source 1..75: mol_type = other DNA
ggaaacgcagaccgtggacttcagcgtgggtgccgaagggcttcgccatgtgccgggtgatgttattgaaatctg

SEQ ID NO: 124732 - DNA, 75 bp, synthetic construct
  source 1..75: mol_type = other DNA
aacggggccagctttgagccactgtccggttcgctgaacagcgtcatcccgccggcagtgcagcacctgacggtg

SEQ ID NO: 124733 - DNA, 75 bp, synthetic construct
  source 1..75: mol_type = other DNA
caacactaacgccgtgcgcgggctggcgaatatttaccgccagcaatcgccagaaaaagctgaagcgtttatcgc

SEQ ID NO: 124734 - DNA, 75 bp, synthetic construct
  source 1..75: mol_type = other DNA
gactacgaactcgaaccacaatctgccagttgcgccaaatctgctgaaccagacgttcgctcctacagcaccaaa

SEQ ID NO: 124735 - DNA, 75 bp, synthetic construct
  source 1..75: mol_type = other DNA
gcctttgtacaaagcctttccgagcgtgaacaggtactggaaatcgtcgccgaagaggcgaaaggtaagattaaa

SEQ ID NO: 124736 - DNA, 75 bp, synthetic construct
  source 1..75: mol_type = other DNA
gacgtccattacgaatgtcagcaatgaaatcacgcagaccgtcaataaaaaactggaaaatcagagtgcggcaat

SEQ ID NO: 124737 - DNA, 75 bp, synthetic construct
  source 1..75: mol_type = other DNA
gggcaaagctttcccccgggattcccgtgcaccggagcggtggccatcagggaccattaccgtcagggtttatga

SEQ ID NO: 124738 - DNA, 75 bp, synthetic construct
  source 1..75: mol_type = other DNA
cagacccatactgatatgccaggcagtgatgacctgaagggcattaacgtgaaataccgttatgaatttacggac

SEQ ID NO: 124739 - DNA, 75 bp, synthetic construct
  source 1..75: mol_type = other DNA
gtcagaaccctatcccgtggtgaaacgattttctgtgacggcacctttacaggcaaagccggacggggacgtttc

SEQ ID NO: 124740 - DNA, 75 bp, synthetic construct
  source 1..75: mol_type = other DNA
gaagaccagagtgcggcgatccagcagatacagaaggttcaggttgatacaaataataacctgaacagcatgtgg

SEQ ID NO: 124741 - DNA, 75 bp, synthetic construct
  source 1..75: mol_type = other DNA
acgccggaaggcaagctgacagcaagaaacgcggatatcagcggtaacaatgaacgcgaataccggcacgctcaa

SEQ ID NO: 124742 - DNA, 75 bp, synthetic construct
  source 1..75: mol_type = other DNA
cagtactgcgcatacgattaccgggtcatacaggagcagtttggtctgaaaacatcaatgtcgcgtaaaggtaac

SEQ ID NO: 124743 - DNA, 75 bp, synthetic construct
  source 1..75: mol_type = other DNA
tgaccggcagattgttattccggcggtggcattcagcggcgctaaacatgagaaagagcatactgatatttactc

SEQ ID NO: 124744 - DNA, 75 bp, synthetic construct
  source 1..75: mol_type = other DNA
gggaccggcagtcagtggagtgtatccggcccgcacattaagcctgggaaggatttctggttttacgtgcgcagc

SEQ ID NO: 124745 - DNA, 75 bp, synthetic construct
  source 1..75: mol_type = other DNA
actggctatgagctggatgctattgctgcggtggttctgggcggtacgagtctggcgggcggaaaaggtcgcatt

SEQ ID NO: 124746 - DNA, 75 bp, synthetic construct
  source 1..75: mol_type = other DNA
cgtgaatgcgaattccgggacgctcaacaacgtcacgattaacgagaactgtcgggttctgggaaaactgtccgc

SEQ ID NO: 124747 - DNA, 75 bp, synthetic construct
  source 1..75: mol_type = other DNA
cgcatggtcagtgtcaccgatcctgctggtggcagtattcagtaccagtacaacagcgctggcaagctggcggaa

SEQ ID NO: 124748 - DNA, 75 bp, synthetic construct
  source 1..75: mol_type = other DNA
gaataactggacaccaacaaccagtatcagcgatctgctggttgtggtgatgaagaaatccacagcaggtatcag

SEQ ID NO: 124749 - DNA, 75 bp, synthetic construct
  source 1..75: mol_type = other DNA
tggaggtgagcgcagctgacggtcagtatctggcgcaggcgaaatgggacacgccgaaggtggtgaagggcgtga

SEQ ID NO: 124750 - DNA, 75 bp, synthetic construct
  source 1..75: mol_type = other DNA
tcaattccgtattgctgaccgcgaggcgtatacgggggtacgcgcctactggcttgatcttaattacgggaaaaa

SEQ ID NO: 124751 - DNA, 75 bp, synthetic construct
  source 1..75: mol_type = other DNA
aaatgggatgacaactggggcacctgtacattacaggactgtagcggcaaccgcagccagtcggattccggtgcc

SEQ ID NO: 124752 - DNA, 75 bp, synthetic construct
  source 1..75: mol_type = other DNA
ctgcctggctggtgaatggatggtacccgacagcgagtattagcgatctgctggttgtcgtgatgaagaagtcca

SEQ ID NO: 124753 - DNA, 75 bp, synthetic construct
  source 1..75: mol_type = other DNA
ggcaccatcacggtaagaatcagtgatgatcagaaatttgaccggcaggtcatgataccgccagtgttattccgc

SEQ ID NO: 124754 - DNA, 75 bp, synthetic construct
  source 1..75: mol_type = other DNA
ttcttctgccaggatgaaaatgacgtggatgcgtatcttgattatctgaaaggctatgtgaaacctcacgcgcag

SEQ ID NO: 124755 - DNA, 75 bp, synthetic construct
  source 1..75: mol_type = other DNA
cagtaatacgggaatacattgagattttctacaatcgtcagcgtcgtcactctcgtctggggaatatctccccgg

SEQ ID NO: 124756 - DNA, 75 bp, synthetic construct
  source 1..75: mol_type = other DNA
agcgggatgttgaaagagccatcataaaggctggcggaaaagcattgtggcaggagaaacacgaggacggaacgc

SEQ ID NO: 124757 - DNA, 75 bp, synthetic construct
  source 1..75: mol_type = other DNA
ggaaaaactatcaattggcataagtaaaatttttcgtgaaagtggtgttttatcattcgctgtagctataggatt

SEQ ID NO: 124758 - DNA, 75 bp, synthetic construct
  source 1..75: mol_type = other DNA
tctatcaacacatgcttgttttttatgcggttatggcagcaatcgcatttcttatcacctggtttctttctcacg

SEQ ID NO: 124759 - DNA, 75 bp, synthetic construct
  source 1..75: mol_type = other DNA
gctgaaaaatgagagcctgagccactatcgttttaataaccgggataaagccatctcactaatacgggaatacat

SEQ ID NO: 124760 - DNA, 75 bp, synthetic construct
  source 1..75: mol_type = other DNA
actaatactgaattatcacaggcagagatctcctggcgtgtgggttatgaaaatgtcgatcactttgccaaactg

SEQ ID NO: 124761 - DNA, 75 bp, synthetic construct
  source 1..75: mol_type = other DNA
agtgcgaactcgggcacgctcaataatgtgaccattaaccagaactgccggatacttggaaaactgtctgccaac

SEQ ID NO: 124762 - DNA, 75 bp, synthetic construct
  source 1..75: mol_type = other DNA
tactccgatctgaaagcgcacaccaccatgttgcaggtggatgcgccgtattctgacgggcggatgttctttcgc

SEQ ID NO: 124763 - DNA, 75 bp, synthetic construct
  source 1..75: mol_type = other DNA
tgcaggtggatgcgccgtattctgacgggcggatgttctttcgcagtgatttcgtcaatatgaacgtcggcagtt

SEQ ID NO: 124764 - DNA, 75 bp, synthetic construct
  source 1..75: mol_type = other DNA
cgcacagcagcaacaacgacaaatggaacagtctgctgaaagtaaaccgctactggctggcaatccagcagggcg

SEQ ID NO: 124765 - DNA, 75 bp, synthetic construct
  source 1..75: mol_type = other DNA
ggaaccattagcgcagacagaatcatcggtgatatcgtcaagggctattccttcgaacctcgtgatggcacgctc

SEQ ID NO: 124766 - DNA, 75 bp, synthetic construct
  source 1..75: mol_type = other DNA
ctccgacgttttccctgacgccggacgggaaactgacagcccgtaatgcggatatcagcgggaatattaatgcga

SEQ ID NO: 124767 - DNA, 75 bp, synthetic construct
  source 1..75: mol_type = other DNA
tgcgtgtggcggtacaacaaccattattgaccatatgggatttggcccaaatggctgccggttacgccatcaact

SEQ ID NO: 124768 - DNA, 75 bp, synthetic construct
  source 1..75: mol_type = other DNA
ggcggcaaagtggcagcaactacaacgcggagccgcatcattctccatcacgctggcgcgtggacgtgcagagct

SEQ ID NO: 124769 - DNA, 75 bp, synthetic construct
  source 1..75: mol_type = other DNA
gtgacatcattgaaatctgtgataacgactacgccgggaccctgaccggcggacgcatcctgtccatggatgccg

SEQ ID NO: 124770 - DNA, 75 bp, synthetic construct
  source 1..75: mol_type = other DNA
gaacggcaacaccacgccgctgtttgtggcgcaggggaatcagctgttcatgaacgatgtgttcctgaagcggtt

SEQ ID NO: 124771 - DNA, 75 bp, synthetic construct
  source 1..75: mol_type = other DNA
caactaacgccgatgccattctggggctgacggaagtggatattgctgccggtgacacagcggcggcacgtagcc

SEQ ID NO: 124772 - DNA, 75 bp, synthetic construct
  source 1..75: mol_type = other DNA
caccgccatcactgcggatacagagcaccgtttcagcggtctgccgccgggggaatacaccctgacggtcagggc

SEQ ID NO: 124773 - DNA, 75 bp, synthetic construct
  source 1..75: mol_type = other DNA
caaacaggatttgctgattgaaagcgggattgttcgccagttgggcaccaatatttcgccgcagctcccgtatga

SEQ ID NO: 124774 - DNA, 75 bp, synthetic construct
  source 1..75: mol_type = other DNA
cacaccgcgtgaggcgaaggacaatctcaaatccacgcagatgatgagcgtgattgatgccattggtgagggacc

SEQ ID NO: 124775 - DNA, 75 bp, synthetic construct
  source 1..75: mol_type = other DNA
gccagtatctggcgcaggcgaaatgggacacgccgcgggtggtgaagggtgtgcgcttcagtctgcgcctgacca

SEQ ID NO: 124776 - DNA, 75 bp, synthetic construct
  source 1..75: mol_type = other DNA
gaagccgtgcgtgctgctgtacagctttctcaccgttatatcccggctcgacagctaccggacaaagccatcagt

SEQ ID NO: 124777 - DNA, 75 bp, synthetic construct
  source 1..75: mol_type = other DNA
atctacgtcaggctcccttattccgaacgcccgccgcgtccgtcccgcacattccagcaacgcatctggaggtaa

SEQ ID NO: 124778 - DNA, 75 bp, synthetic construct
  source 1..75: mol_type = other DNA
atcccccatgcactgaagaacaggccgaatggctcattcagtgttaccgcaggcgcggatacgaggttaaaaaag

SEQ ID NO: 124779 - DNA, 75 bp, synthetic construct
  source 1..75: mol_type = other DNA
gcctcgactaccgtcactggataatctacgtcaggctcctttattccgaacgcccgccgcgtccgtcccgcacat

SEQ ID NO: 124780 - DNA, 75 bp, synthetic construct
  source 1..75: mol_type = other DNA
acggcacttttgccatcacggcggtgcagcatgtgccggaaaaagaagccattgtggataacggggcccgctttg

SEQ ID NO: 124781 - DNA, 75 bp, synthetic construct
  source 1..75: mol_type = other DNA
atgacgacgaaagacatcacctacggtgtgccagcagaagtctggccgcgagattacactaacgttgaaaaacta

SEQ ID NO: 124782 - DNA, 75 bp, synthetic construct
  source 1..75: mol_type = other DNA
gggttttgttttttctggtcgttctggtttacaatccatccgtcagcctgaacaactggcacctgctgcgccagc

SEQ ID NO: 124783 - DNA, 75 bp, synthetic construct
  source 1..75: mol_type = other DNA
atctacgtcagactcccttattccgaacgcccaccgcgtccgtcccgcacattccagcaacggatctggaggtaa

SEQ ID NO: 124784 - DNA, 75 bp, synthetic construct
  source 1..75: mol_type = other DNA
aacggcactcaatcattgagtgatgtttttgctaacttaggaagcaatatactcggcaatatcggtaacagactc

SEQ ID NO: 124785 - DNA, 75 bp, synthetic construct
  source 1..75: mol_type = other DNA
gttttatcgccctgagcacggcacaaccgcgcgtgattaccattgaggccaccagcgaacaggaagcacgccagc

SEQ ID NO: 124786 - DNA, 75 bp, synthetic construct
  source 1..75: mol_type = other DNA
agaaaacagcctcacacagctggttgcgaaaaaaaatgatgagctgtcactgggtatatcacaggtgagccagag

SEQ ID NO: 124787 - DNA, 75 bp, synthetic construct
  source 1..75: mol_type = other DNA
cgggagtctgaaaccggcatacagcaataacccggcctggtgcctgtgggacatgctgacccacccgcgctacgg

SEQ ID NO: 124788 - DNA, 75 bp, synthetic construct
  source 1..75: mol_type = other DNA
aggtagctatgagaaattataccagacacccgcaagggcgggactcgtacaacctgaataaatacatctggcgtt

SEQ ID NO: 124789 - DNA, 75 bp, synthetic construct
  source 1..75: mol_type = other DNA
tctggtttatcgtatacatcacctcatttaccatacaaagataaaccatccacaaccattccgctaaatccgtcg

SEQ ID NO: 124790 - DNA, 75 bp, synthetic construct
  source 1..75: mol_type = other DNA
ggaaaagataggaaaaacgcatctggcagaggcgttgtgggcagagattgacaacagtcagctgaaggacgagat

SEQ ID NO: 124791 - DNA, 75 bp, synthetic construct
  source 1..75: mol_type = other DNA
cttcaacagatctaattcgttttactggaagagcaatgcgatttgaaaatgtcaatggcgacgatatattgcttt

SEQ ID NO: 124792 - DNA, 75 bp, synthetic construct
  source 1..75: mol_type = other DNA
gagatgaagaccaccatcacagaaacccgcaatgaaatcacacagacggtcagtaaaacgctggaagaccagagc

SEQ ID NO: 124793 - DNA, 75 bp, synthetic construct
  source 1..75: mol_type = other DNA
gaagttcgcaaaaacggtgtattaatcgcatccagagaaactaaaggggctattcccggtagctacagtgcggtt

SEQ ID NO: 124794 - DNA, 75 bp, synthetic construct
  source 1..75: mol_type = other DNA
aaaataggaaaactgcatctggctcaggggctgtgggagctgatagacaacagccagcttgcggatgagatggcg

SEQ ID NO: 124795 - DNA, 75 bp, synthetic construct
  source 1..75: mol_type = other DNA
acggtaaccgtcacagtttacgatgaccagggcttcgaccggcagatcatcattcccccggtgctgtttcgcggg

SEQ ID NO: 124796 - DNA, 75 bp, synthetic construct
  source 1..75: mol_type = other DNA
ggacggcagtctgaaaccggcatacagcaacaacccggcctggtgcctgtgggacatgctgactcacccgcgcta

SEQ ID NO: 124797 - DNA, 75 bp, synthetic construct
  source 1..75: mol_type = other DNA
gtcttccaagaagaatgctaaagctgtctggcgatatgatagtgagacctctttgcttggctggtcacttccctc

SEQ ID NO: 124798 - DNA, 75 bp, synthetic construct
  source 1..75: mol_type = other DNA
tgtacgccagtatgggccgttcaacgccatcgtcgaagccacggacaaaacgtggcagctgatgaagctgacggt

SEQ ID NO: 124799 - DNA, 75 bp, synthetic construct
  source 1..75: mol_type = other DNA
gccggctgtgcagcacctgacggtggaggtgagcgcggctgacggtcagtatctggcacaggcgaaatgggacac

SEQ ID NO: 124800 - DNA, 75 bp, synthetic construct
  source 1..75: mol_type = other DNA
atgcagaatattttgctgcaaaatgccgttggtcacgccgtccggaaagcaaaaaattttgctggtggcgcgact

SEQ ID NO: 124801 - DNA, 75 bp, synthetic construct
  source 1..75: mol_type = other DNA
cagttatagatatgcctgccggacaggggacgctgacactgacattcaccgtatcttcatcaggagcgaataact

SEQ ID NO: 124802 - DNA, 75 bp, synthetic construct
  source 1..75: mol_type = other DNA
acgactatgccgggaccctgaccggcggacgcatcctgtccattgatgccgccagccgcacactgacgctggacc

SEQ ID NO: 124803 - DNA, 75 bp, synthetic construct
  source 1..75: mol_type = other DNA
gcagttggtcgataaaattggcgatgaaagcaccaccattacggtagcgccatttggcagcgaccaacaacggcg

SEQ ID NO: 124804 - DNA, 75 bp, synthetic construct
  source 1..75: mol_type = other DNA
gggcacagaaccgcggatgacgtttaatgcgtacctgtcacaacagcgtaaggcgtgggacgttctcagtgattt

SEQ ID NO: 124805 - DNA, 75 bp, synthetic construct
  source 1..75: mol_type = other DNA
gcattcaaatatgactggtatcagcacgatccctgcactgaagaacaggccgaatggctgatccataactaccgc

SEQ ID NO: 124806 - DNA, 75 bp, synthetic construct
  source 1..75: mol_type = other DNA
acaatatcgaaaagcaaaaactttatatccgtgatttcactacaaaaacatgcattactgaccgcatgattaaag

SEQ ID NO: 124807 - DNA, 75 bp, synthetic construct
  source 1..75: mol_type = other DNA
cagcaggcacgggcggcgttctcatgcattcaaatatgactggtaccagcatgacccatgcactgaagaacaggc

SEQ ID NO: 124808 - DNA, 75 bp, synthetic construct
  source 1..75: mol_type = other DNA
tatccgtagcctgaccacaaaaacatgcattactgaccgcatgattaaagtcttcctaggtcgtgatggtttacc

SEQ ID NO: 124809 - DNA, 75 bp, synthetic construct
  source 1..75: mol_type = other DNA
atccggagaacggtaacaccactccagcactggtcacgcaggggggacagacgtttctcaatgaagcgctgatta

SEQ ID NO: 124810 - DNA, 75 bp, synthetic construct
  source 1..75: mol_type = other DNA
caccgtttcagcggcctgccgctgggggaatacaccctgacggtcagggcgattaacagttatggccagcagggc

SEQ ID NO: 124811 - DNA, 75 bp, synthetic construct
  source 1..75: mol_type = other DNA
tcctggcgattatgttcttcatgaaggccggacatatattgcctcggcaaacatattaaaaagcgaaaactatat

SEQ ID NO: 124812 - DNA, 75 bp, synthetic construct
  source 1..75: mol_type = other DNA
gaagctattacttataccgcgacggttaaaaagaatggggttgcccaggctaatgttcctgtttcatttgatatt

SEQ ID NO: 124813 - DNA, 75 bp, synthetic construct
  source 1..75: mol_type = other DNA
agtaaataccgaagtaaaagcaaagactgttgagtttttctcaaaactagcagtcgatagcaatatagatattat

SEQ ID NO: 124814 - DNA, 75 bp, synthetic construct
  source 1..75: mol_type = other DNA
attctgatgattctgccgtctttgccagcaggcacgggcggcgttcccgcactttcaaatctgactggttccagc

SEQ ID NO: 124815 - DNA, 75 bp, synthetic construct
  source 1..75: mol_type = other DNA
tcctggcgattatgttcttcatgaaggccggacatatattgctcggcaaacaatattaaaaagcgaaaactatat

SEQ ID NO: 124816 - DNA, 75 bp, synthetic construct
  source 1..75: mol_type = other DNA
accttaggtacgttaagtaagtccactgaaaaaacggatgcgaatggctatgctaaagtaacattaacatcgaag

SEQ ID NO: 124817 - DNA, 75 bp, synthetic construct
  source 1..75: mol_type = other DNA
ctcaataatgtcacgattaatgagaactgtcagattctggggaaactgtcagctaatcagattgaaggcgatatt

SEQ ID NO: 124818 - DNA, 75 bp, synthetic construct
  source 1..75: mol_type = other DNA
ccggctcactgaacagcgtcatcccgccggcggtgcagcacctcacggtggaggtgagtgcctcagacggccagt

SEQ ID NO: 124819 - DNA, 75 bp, synthetic construct
  source 1..75: mol_type = other DNA
gccgcgggtggtgaagggtgtgcgcttcagtctgcgcctgaccagcggaagcggtgaaaacagccgtctggtgac

SEQ ID NO: 124820 - DNA, 75 bp, synthetic construct
  source 1..75: mol_type = other DNA
tgttctcatcggtgatagatatgccggcagggcggggtcatgtcaccctgacgtttaatgtgtcgtcggccggtg

SEQ ID NO: 124821 - DNA, 75 bp, synthetic construct
  source 1..75: mol_type = other DNA
tatcaatgagcttaaagtcgaaatcatgggtcttgttgaacagcttgatgatcttttcggcgtgtcagatggcgt

SEQ ID NO: 124822 - DNA, 75 bp, synthetic construct
  source 1..75: mol_type = other DNA
cggcaaggccattgatgctgcattcgcccagggtaaaatcaccctccttgagtaccgcgccgcgcaaaaagggat

SEQ ID NO: 124823 - DNA, 75 bp, synthetic construct
  source 1..75: mol_type = other DNA
cagtacgtggatgacaaagggagtgaaatcacctcgaccacggataaaaagctggaagaccagagcgccaccata

SEQ ID NO: 124824 - DNA, 75 bp, synthetic construct
  source 1..75: mol_type = other DNA
tggggcagttcacgtatcagtaaccttcaggcgatagtggtgaagaaaaacagcgcggggatcagtatccgctga

SEQ ID NO: 124825 - DNA, 75 bp, synthetic construct
  source 1..75: mol_type = other DNA
ccaaaggtgcaaccagtaccgcggcaaaatatctggcgcaaactcagaacgcctcggacttgattggtggcgtga

SEQ ID NO: 124826 - DNA, 75 bp, synthetic construct
  source 1..75: mol_type = other DNA
tcgcggtcacatgacgctggagttttcggtatcagcgtggctggtaaatgactggtatcccacagccagtatcag

SEQ ID NO: 124827 - DNA, 75 bp, synthetic construct
  source 1..75: mol_type = other DNA
cagggcgaggttgtcgagcgaggtagtactgcggatgtgctcgcctctccgctgcacgacctcactaaacgactg

SEQ ID NO: 124828 - DNA, 75 bp, synthetic construct
  source 1..75: mol_type = other DNA
ctgcgtatcagtggcgaaattccgtttaaaagcccggagatcctgaagcgtattttcgaactggccagcgccacg

SEQ ID NO: 124829 - DNA, 75 bp, synthetic construct
  source 1..75: mol_type = other DNA
tcgcgtaggtgagcacggaatcccagagctattccagacgagcaatgggcgtcagtatatgattcctggcgagaa

SEQ ID NO: 124830 - DNA, 75 bp, synthetic construct
  source 1..75: mol_type = other DNA
gcggaccaggcttttgacagtatcgagcgtggcgcaaaacgcgctgaccgccaggtgaacacgcttaagacttca

SEQ ID NO: 124831 - DNA, 75 bp, synthetic construct
  source 1..75: mol_type = other DNA
tcgaaccggcggggcgtaacaccgcacctgccattgcgctggcggcgctggcggcaaaacgtcatagcccggaga

SEQ ID NO: 124832 - DNA, 75 bp, synthetic construct
  source 1..75: mol_type = other DNA
aaatgactggtatcccacagccagtatcagtgatttgctggttgtggtgatgaagaaatccacagcaggtatcac

SEQ ID NO: 124833 - DNA, 75 bp, synthetic construct
  source 1..75: mol_type = other DNA
tttctctaacaccaccgaagcgggtatcagctaccatgcgggcgataaattcgatgacgcgccagcggtaagcta

SEQ ID NO: 124834 - DNA, 75 bp, synthetic construct
  source 1..75: mol_type = other DNA
cggtgggaagcggagtttgccggaaataaagcggagagtgataccgcacagcaaaaaacgcgtctcgcttttgcc

SEQ ID NO: 124835 - DNA, 75 bp, synthetic construct
  source 1..75: mol_type = other DNA
atcaaccaactggatagcgataataagttgaatatcaataatgatgatattgtcgcggttgggatgacgtatcag

SEQ ID NO: 124836 - DNA, 75 bp, synthetic construct
  source 1..75: mol_type = other DNA
tgctgcgttatgcgcaagagtggcagctaccggaagcgtttgttcaatggctggataaagctaacagcttctgtt

SEQ ID NO: 124837 - DNA, 75 bp, synthetic construct
  source 1..75: mol_type = other DNA
aaggtgcagaaacgacgaaaccccgcactgtaggagcagtaacggggcttctaaccaccaacgataacgagagta

SEQ ID NO: 124838 - DNA, 75 bp, synthetic construct
  source 1..75: mol_type = other DNA
attccggtactggatttgcctcgtgatgaactggaatctttcgccagtgcagtcaccgggcgtttccgtaacccg

SEQ ID NO: 124839 - DNA, 75 bp, synthetic construct
  source 1..75: mol_type = other DNA
aaggaagataccagctatggcaattttattgtcaacaactggttgcatttctctaatttactcatcgcccattag

SEQ ID NO: 124840 - DNA, 75 bp, synthetic construct
  source 1..75: mol_type = other DNA
tggtgatgggcattgtggcatctgcatctgtacaggctgcagaaatatataacaaagacggtaataaactggatg

SEQ ID NO: 124841 - DNA, 75 bp, synthetic construct
  source 1..75: mol_type = other DNA
gtgtttatcgccgtggataacctgtttggcggcgatggacgcttcccgaccaaagtggaaggtcgcgagtttacc

SEQ ID NO: 124842 - DNA, 75 bp, synthetic construct
  source 1..75: mol_type = other DNA
gactgcagaaggtccaacactaaccggttttaattccgcttacagaactgcatcaaccagctccacagtatcgat

SEQ ID NO: 124843 - DNA, 75 bp, synthetic construct
  source 1..75: mol_type = other DNA
agacattgaatatcgtcaccatatggaaaatgcctggtgggatattattgtcattgatgaggcccataacgtcgc

SEQ ID NO: 124844 - DNA, 75 bp, synthetic construct
  source 1..75: mol_type = other DNA
ctggacaccgtaggcgaggcgatgaatgacgcagaaatttgcgcatttgttgaaaaagcgatctatgaagagatt

SEQ ID NO: 124845 - DNA, 75 bp, synthetic construct
  source 1..75: mol_type = other DNA
ccgtggatagtggtgagctttaaccgtgaatcgctaatcggcagtcagcctttcgctgagtttttacaacgtcat

SEQ ID NO: 124846 - DNA, 75 bp, synthetic construct
  source 1..75: mol_type = other DNA
agtggagtggctgacggataatggttcatgctaccgggctaatgaaacacgtcagtttgcccggatgttgggact

SEQ ID NO: 124847 - DNA, 75 bp, synthetic construct
  source 1..75: mol_type = other DNA
agtggagtggctgacggataatggttcatgctaccgggctaatgaaacacgacagtttgcccggatggtgggact

SEQ ID NO: 124848 - DNA, 75 bp, synthetic construct
  source 1..75: mol_type = other DNA
agtggagtggctgacggataatggttcatgctaccgggctaatgaaacacgccagtttgcccggatgctgggcct

SEQ ID NO: 124849 - DNA, 75 bp, synthetic construct
  source 1..75: mol_type = other DNA
aatacgtgcgcgaaaccatcgacaagctgatggcgggcgaactggacacgcggctggtttaccgtaaacgccttc

SEQ ID NO: 124850 - DNA, 75 bp, synthetic construct
  source 1..75: mol_type = other DNA
agtggagtggctgacggataatggttcatgctaccgggctaatgaaacacggcagtttgcccggatgatgggact

SEQ ID NO: 124851 - DNA, 75 bp, synthetic construct
  source 1..75: mol_type = other DNA
atggcgggtgaactggatgcgcgactggtttaccgtaaacgccttcgccgtccgctgagcgagtatcagcgtaat

SEQ ID NO: 124852 - DNA, 75 bp, synthetic construct
  source 1..75: mol_type = other DNA
ggtgggtaatgccgacccgtttgcagtcagccagtacggaaacagactggacagtgcttactgccacgggatact

SEQ ID NO: 124853 - DNA, 75 bp, synthetic construct
  source 1..75: mol_type = other DNA
cgatctgaattctggcgtggtcgttgttcgtccgattgaaacttcattcccaccgtcactgagcacgcaggatgg

SEQ ID NO: 124854 - DNA, 75 bp, synthetic construct
  source 1..75: mol_type = other DNA
agtggagtggctgacggataatggttcatgctaccgggctaatgaaacacgacagtttgcccggatgatggggct

SEQ ID NO: 124855 - DNA, 75 bp, synthetic construct
  source 1..75: mol_type = other DNA
gtgcgctgggttatcgctcgccacgggaatatctgcggcagcgggcttgtaatgggttaagtgataacagatgtc

SEQ ID NO: 124856 - DNA, 75 bp, synthetic construct
  source 1..75: mol_type = other DNA
accttcgtcctgagatccgagctcctagggatcgcctcagaaaacggaatctatggtcactcccgtttttgcaac

SEQ ID NO: 124857 - DNA, 75 bp, synthetic construct
  source 1..75: mol_type = other DNA
acgggaatattgacggcataatggggccttccacaaggcagtcaataaaaaattatcgcattgcgaacggactac

SEQ ID NO: 124858 - DNA, 75 bp, synthetic construct
  source 1..75: mol_type = other DNA
cagggggcatgatgtttaatactgcgtcaggtgttgggggtatggctggaaggtctttaggtaaaggcgttggca

SEQ ID NO: 124859 - DNA, 75 bp, synthetic construct
  source 1..75: mol_type = other DNA
tacagagatggatccatccagaagctgcgcttgaatatgatactgtcgatggaaaacctttttatggagcaagaa

SEQ ID NO: 124860 - DNA, 75 bp, synthetic construct
  source 1..75: mol_type = other DNA
aggtctttaggtaaaggcgttggcaaactagcacaagcaggtatgggtaaattgcgtggcggtgtgaaagctggc

SEQ ID NO: 124861 - DNA, 75 bp, synthetic construct
  source 1..75: mol_type = other DNA
tgtcccggtactggctgtgttccgtgtaaaaaacggcacgctggcccggatcctgaaattcactctcggtccact

SEQ ID NO: 124862 - DNA, 75 bp, synthetic construct
  source 1..75: mol_type = other DNA
gccagcagactggatcagttttcgaaagagtggaaagacgccaacgataaatggaatgccatgtggggcgtcaaa

SEQ ID NO: 124863 - DNA, 75 bp, synthetic construct
  source 1..75: mol_type = other DNA
aggcgacaggatcgttaaagtcgatggtcagccattaacacaatgggtggcgtttgtgatgcttgtccgggataa

SEQ ID NO: 124864 - DNA, 75 bp, synthetic construct
  source 1..75: mol_type = other DNA
gcagtcatagctcccatcgaagccatagttctcaccgatcatcatcaggtggcgggtactatggtggcagcactc

SEQ ID NO: 124865 - DNA, 75 bp, synthetic construct
  source 1..75: mol_type = other DNA
gtcccattttatatcgcagggcatcgaagccatagttctcataggagccatagctctcatagatcctcatcaggt

SEQ ID NO: 124866 - DNA, 75 bp, synthetic construct
  source 1..75: mol_type = other DNA
ggcgtcagtgccgaagtggtctggaacggcgtgcgagttaaccattacgcggtcaaatcgctggaagagttctta

SEQ ID NO: 124867 - DNA, 75 bp, synthetic construct
  source 1..75: mol_type = other DNA
tcattttgctgctctacttccggggtttttggcactcaataattctgtatgggcaagtgatttgcctggtatgac

SEQ ID NO: 124868 - DNA, 75 bp, synthetic construct
  source 1..75: mol_type = other DNA
gtttagctgcacaggtttatagcattgtagtaccactatggggctggcgttctcttttctttgtcggcatgcttc

SEQ ID NO: 124869 - DNA, 75 bp, synthetic construct
  source 1..75: mol_type = other DNA
aggtttggtataagcatctttcacccagacagtggaagatattcggtgcggcatggacaggttatttacttgatg

SEQ ID NO: 124870 - DNA, 75 bp, synthetic construct
  source 1..75: mol_type = other DNA
atgatgctgaggtgtatctcaatttttttgaagggaaaataaacagcaccctgctggggcaggagctgaacgatc

SEQ ID NO: 124871 - DNA, 75 bp, synthetic construct
  source 1..75: mol_type = other DNA
tccgtatccagccatatcatgaatttgcccgcaacctgccggtgccgaccaaccttaaccttatccacctgaaac

SEQ ID NO: 124872 - DNA, 75 bp, synthetic construct
  source 1..75: mol_type = other DNA
atataaataataagcttggttttaatctttcactcggctccagaatagaaaatcataaagaacgatgcttttgtg

SEQ ID NO: 124873 - DNA, 75 bp, synthetic construct
  source 1..75: mol_type = other DNA
atctgtacaggctgcagaaatatataacaaagacggtaataaactggatgtctatggcaaagttaaagccatgca

SEQ ID NO: 124874 - DNA, 75 bp, synthetic construct
  source 1..75: mol_type = other DNA
ggaaatcgagatcaccgaccttgatgttcagatcaacaccgggcgaaaactggtcaagaccatgaacaaaaccgg

SEQ ID NO: 124875 - DNA, 75 bp, synthetic construct
  source 1..75: mol_type = other DNA
tatatcgctgcgcctgtcgcagattttgaaactgaaacccggcgatgtcctgccgatagaaaaacccgatcgcat

SEQ ID NO: 124876 - DNA, 75 bp, synthetic construct
  source 1..75: mol_type = other DNA
tggctgggtaaaatataaccaccttctgataacgtcagctaccaatacatataatttgccagcgcctttactggc

SEQ ID NO: 124877 - DNA, 75 bp, synthetic construct
  source 1..75: mol_type = other DNA
tcaacaacgtcacgattaacgagaactgtcgggttctgggaaaactgtccgcgaaccagattgaaggcgatctcg

SEQ ID NO: 124878 - DNA, 75 bp, synthetic construct
  source 1..75: mol_type = other DNA
ttgctgggtaagatcaatctgctctactcgaaaggcaatggctgtccaaaagatattacatcaggcgggtgctac

SEQ ID NO: 124879 - DNA, 75 bp, synthetic construct
  source 1..75: mol_type = other DNA
ggaagacccggaagccatactgcgctacggacgcaacctgctgaagatggatgcgttcggctgcaccagtcgcgg

SEQ ID NO: 124880 - DNA, 75 bp, synthetic construct
  source 1..75: mol_type = other DNA
gaatgaaaacaataggctgggttttaatctagcacttgggtctggaacagaaaatcacaaagaacgctacttttg

SEQ ID NO: 124881 - DNA, 75 bp, synthetic construct
  source 1..75: mol_type = other DNA
gcaaaacagcagccagattattgctgaacaggtgatccctgaaaacgagggtggttggtggatacgtgaagtggg

SEQ ID NO: 124882 - DNA, 75 bp, synthetic construct
  source 1..75: mol_type = other DNA
gacaaaaaccgcgtactcatgcggaaacccgcagtgaagatactggcggtctgtcaagtaaagagctgggcgctt

SEQ ID NO: 124883 - DNA, 75 bp, synthetic construct
  source 1..75: mol_type = other DNA
tatttatgaatgaagtgttcctgaaatatctgacggctcccaccattaccagcggcggtaatcctccggcatttt

SEQ ID NO: 124884 - DNA, 75 bp, synthetic construct
  source 1..75: mol_type = other DNA
cccggggatggggagtaagcttagccagccgttgtctccgggtgtcgcgtgcgcagttgcacgtcattctcagac

SEQ ID NO: 124885 - DNA, 75 bp, synthetic construct
  source 1..75: mol_type = other DNA
tgaacgttgaagagtgcgaccgtctgtcttttctgccttacctgtttggcctggattttctgtatgccgaagcgt

SEQ ID NO: 124886 - DNA, 75 bp, synthetic construct
  source 1..75: mol_type = other DNA
ctgattaaaactgaactgctggagacgcagaccgtggatttcagcgtgggggccgaagggcttcgccatgtaccg

SEQ ID NO: 124887 - DNA, 75 bp, synthetic construct
  source 1..75: mol_type = other DNA
atgcaatatgcgaaacctgtcactctgaacgttgaagagtgcgaccgtctgttttttctgccttacctgtttggc

SEQ ID NO: 124888 - DNA, 75 bp, synthetic construct
  source 1..75: mol_type = other DNA
ctgattaaaactgaactgctggagacgcagaccgtggatttcagcgtgggcgcggaagggcttcgccatgtaccg

SEQ ID NO: 124889 - DNA, 75 bp, synthetic construct
  source 1..75: mol_type = other DNA
acgctgattggcggggggagttacctgcgacttgaagccgggaaggtcgagtatggtacgacggcaaagtatctg

SEQ ID NO: 124890 - DNA, 75 bp, synthetic construct
  source 1..75: mol_type = other DNA
tgcgcgatcgttggcgtgaacagggcggcccaggcagtggtatctggtacgatttagcaccgcatcttcttgatc

SEQ ID NO: 124891 - DNA, 75 bp, synthetic construct
  source 1..75: mol_type = other DNA
tggcagaaagagacggggtttgcctttccttccggtcacacgatgtttgctgccagttgggcactgctggccgtt

SEQ ID NO: 124892 - DNA, 75 bp, synthetic construct
  source 1..75: mol_type = other DNA
taccacgctgataagcctggttgacggccagggaagtccggtcagcgtggaggtacagtccgtcaccgacggcgt

SEQ ID NO: 124893 - DNA, 75 bp, synthetic construct
  source 1..75: mol_type = other DNA
gcctcgattatcgtcactggataatctccgtcaggcttccttactctgaacgcccaccgcgtccgtcccgcacat

SEQ ID NO: 124894 - DNA, 75 bp, synthetic construct
  source 1..75: mol_type = other DNA
taccacgctgataagcctggttgacggtcagggtaatccggtcagcgtggaggtacagtccgtcaccgacggcgt

SEQ ID NO: 124895 - DNA, 75 bp, synthetic construct
  source 1..75: mol_type = other DNA
cggcgatcctggtcggacaagcggtaaaatcctggattaaagacaaagttcaggaaccgcgcccgtttgttatct

SEQ ID NO: 124896 - DNA, 75 bp, synthetic construct
  source 1..75: mol_type = other DNA
gcaacctggcttgcgcaacgtatttgtgggccattaacaccaccgccggaagaaaatcgtgagatagcgcaacga

SEQ ID NO: 124897 - DNA, 75 bp, synthetic construct
  source 1..75: mol_type = other DNA
taccacgctgataagcctggttgacggacagggtattccggtcagcgtggaggtacagtccgtcaccgacggcgt

SEQ ID NO: 124898 - DNA, 75 bp, synthetic construct
  source 1..75: mol_type = other DNA
ggatgttgggacttgaaccgaagatcacggcggtgcggagtccggagagtaacggcatagcagagagcttcgtga

SEQ ID NO: 124899 - DNA, 75 bp, synthetic construct
  source 1..75: mol_type = other DNA
ggaatagtatattaaatctttcaggttatataataccaacgttggttgcaataccagcattaggttatatggcaa

SEQ ID NO: 124900 - DNA, 75 bp, synthetic construct
  source 1..75: mol_type = other DNA
tgcgtcataccctctgtcattatgcctggtcttgtgactttgacggcaggcagcacagtataagcagaattacgc

SEQ ID NO: 124901 - DNA, 75 bp, synthetic construct
  source 1..75: mol_type = other DNA
aggccgggtttgccgtgctgaaagcgcctgatattccctccattctggtcgaaacggcgtttatcagtaacgttg

SEQ ID NO: 124902 - DNA, 75 bp, synthetic construct
  source 1..75: mol_type = other DNA
ctgattaaaactgaactgctggagacgcagaccgtggatttcagcgttggtgccgaagggcttcgccatgtaccg

SEQ ID NO: 124903 - DNA, 75 bp, synthetic construct
  source 1..75: mol_type = other DNA
agggcggcgttcgcacgtatttaaaaccgactggtaccagcatcccccatgcactgaagaacaggccgaatggct

SEQ ID NO: 124904 - DNA, 75 bp, synthetic construct
  source 1..75: mol_type = other DNA
ggatgttggggcttgaaccgaagaacacggcggtgcggagtccggagagtaacggtatagcagagagcttcgtga

SEQ ID NO: 124905 - DNA, 75 bp, synthetic construct
  source 1..75: mol_type = other DNA
ctgattaaaactgaactgctggagacgcagaccgtggatttcagcgtaggcgcagaagggcttcgccatgtaccg

SEQ ID NO: 124906 - DNA, 75 bp, synthetic construct
  source 1..75: mol_type = other DNA
tgaacgttgaagagtgcgaccgtctctcctttctgccttacctgtttggcaacgattttctgtatgccgaggcgt

SEQ ID NO: 124907 - DNA, 75 bp, synthetic construct
  source 1..75: mol_type = other DNA
ggatgttgggtcttgaaccgaagaacacggcggtgcggagtccggagagtaacggaatagcagagagcttcgtga

SEQ ID NO: 124908 - DNA, 75 bp, synthetic construct
  source 1..75: mol_type = other DNA
ccctgaggtggtggagcaggtgctgcgtaaacacgggctggagggcgctgattttgaattcaggctggaacgcgc

SEQ ID NO: 124909 - DNA, 75 bp, synthetic construct
  source 1..75: mol_type = other DNA
ttgtactcaggataaacaagccaactttaaagataaagttaaaggcgaatgggacaaaattaagaaagatatgta

SEQ ID NO: 124910 - DNA, 75 bp, synthetic construct
  source 1..75: mol_type = other DNA
ctgaaagatgtccatgaggatgaagcagtgattgcactgcaactggaagggagtaaaacgaggcgtgaatggagc

SEQ ID NO: 124911 - DNA, 75 bp, synthetic construct
  source 1..75: mol_type = other DNA
gtggcggttacatgatgccggacggtgaccgattccacatggtgaacggtgcaaactggtttgaccgtaccgtga

SEQ ID NO: 124912 - DNA, 75 bp, synthetic construct
  source 1..75: mol_type = other DNA
tatccactggtctggttgtgtgcgctggtcggcacggtggcgctgttttacaccggctacctgctttaccttggt

SEQ ID NO: 124913 - DNA, 75 bp, synthetic construct
  source 1..75: mol_type = other DNA
atgtacacttcaggctatgcacatcgttcttcgtcgttctcatccgcagcaagtaaaattgcgcgtgtctctacg

SEQ ID NO: 124914 - DNA, 75 bp, synthetic construct
  source 1..75: mol_type = other DNA
gattaatcgcgaaaacgaaacgatttctcaccattacacccaccacgttttgctgatggcggcgattccggtgat

SEQ ID NO: 124915 - DNA, 75 bp, synthetic construct
  source 1..75: mol_type = other DNA
gcgttcagcgtttaatgccctgcaacaggacaagccactgagcgcccgtcagaaagccgcaatgcgcgagctgcc

SEQ ID NO: 124916 - DNA, 75 bp, synthetic construct
  source 1..75: mol_type = other DNA
gtcgccggatttcgctgaccgatctccgcttttttgctcctgcgctgacgaaggaggaatttcatggcaaccgtc

SEQ ID NO: 124917 - DNA, 75 bp, synthetic construct
  source 1..75: mol_type = other DNA
cagcgaagcgggcctgccggacggtgtatttaacgtgttgccgggcgtgggcgcggagaccgggcaatatctgac

SEQ ID NO: 124918 - DNA, 75 bp, synthetic construct
  source 1..75: mol_type = other DNA
ccgcgttaaagctggccgaaatttacagcgaagcgggcctgccggacggcgtatttaacgtgttgccgggcgtgg

SEQ ID NO: 124919 - DNA, 75 bp, synthetic construct
  source 1..75: mol_type = other DNA
aggcgcgaggtgttattgcccgtctgcatcttggcagactgatggatcgtatggcggagcagcatagcgtttcac

SEQ ID NO: 124920 - DNA, 75 bp, synthetic construct
  source 1..75: mol_type = other DNA
ttgttggatacagccgcagcccgcgtggcgctgtcgctgcacactccaccagcgaatatccagtttctgcgtcaa

SEQ ID NO: 124921 - DNA, 75 bp, synthetic construct
  source 1..75: mol_type = other DNA
gtgcttcgtcgttctcatccgcagcaagtaaaattgcgcgtgtctctacggaaaacactacagccgggcttatca

SEQ ID NO: 124922 - DNA, 75 bp, synthetic construct
  source 1..75: mol_type = other DNA
atatcgatccggtcaccggtcgcgaacacgagatccgtactatgacggatattctgctgcgccgtcgccagaaca

SEQ ID NO: 124923 - DNA, 75 bp, synthetic construct
  source 1..75: mol_type = other DNA
gaaaacactacagccgggctaattagtgaagttgtctatcgcgaagatcagcccatgatgacgcaactcctgctt

SEQ ID NO: 124924 - DNA, 75 bp, synthetic construct
  source 1..75: mol_type = other DNA
cgcggagccgcatcattctccatcacgctggcatgtggtcgtgcagaactctaccccgaaatgcatggcacggta

SEQ ID NO: 124925 - DNA, 75 bp, synthetic construct
  source 1..75: mol_type = other DNA
gcgcgatggaggatggcgaaggtgtccatatcgatttcaaaaataccacgctgttgctgaccactaatgcgggtg

SEQ ID NO: 124926 - DNA, 75 bp, synthetic construct
  source 1..75: mol_type = other DNA
tccggtcagcgtggaggtccagtccgtcaccgacggcgtgaaggtgaaagtgagccgtgttcctgacggcgttgc

SEQ ID NO: 124927 - DNA, 75 bp, synthetic construct
  source 1..75: mol_type = other DNA
gtcaggcaatgaggcgacgtaacatccatatggggaacgtttacaagacagaggcaacagctaatgaacccggag

SEQ ID NO: 124928 - DNA, 75 bp, synthetic construct
  source 1..75: mol_type = other DNA
ctgtacgggaaggtaaccttgacggtgcgggatatctgcatctggaagacgtcccgccagggagagtgctggtgg

SEQ ID NO: 124929 - DNA, 75 bp, synthetic construct
  source 1..75: mol_type = other DNA
gaaaactggtttgaccgcacggtcagtgccgatgccgcaggcatcattctgatgtctcttgtgattaaccgccag

SEQ ID NO: 124930 - DNA, 75 bp, synthetic construct
  source 1..75: mol_type = other DNA
gcaaactggtttgaccgtaccgtgagtgctgatgccgcaggcatcatccttacctcccttgtgattaaccgccag

SEQ ID NO: 124931 - DNA, 75 bp, synthetic construct
  source 1..75: mol_type = other DNA
taccacgctgataagcctggttgacgggcagggaactccggtcagcgtggaggtacagtccgtcaccgacggcgt

SEQ ID NO: 124932 - DNA, 75 bp, synthetic construct
  source 1..75: mol_type = other DNA
tggctgtgtaattcgaaacggctgaagcgggagtataaagtcagcacgccgaaatggcgcggcgtgctggacagg

SEQ ID NO: 124933 - DNA, 75 bp, synthetic construct
  source 1..75: mol_type = other DNA
tgttcaggcagttgaagcatatcggggttctccgcaactaatggaggaacgcctgaatgccctgactgaaaatca

SEQ ID NO: 124934 - DNA, 75 bp, synthetic construct
  source 1..75: mol_type = other DNA
ccgcgttaaagctggctgaaatttacagcgaagcgggcctgccggacggtgtatttaacgtgttgccgggcgtgg

SEQ ID NO: 124935 - DNA, 75 bp, synthetic construct
  source 1..75: mol_type = other DNA
gatgcaggactgacccagctttaccggatgcgcgatgcgcagttgtggcgtcacatcgaatttcaccctgaatgc

SEQ ID NO: 124936 - DNA, 75 bp, synthetic construct
  source 1..75: mol_type = other DNA
aacaggacaagcctctgaacgaccgccagaaagctgcaatgcgcgagctaccatcgtgggcggagcttattgagg

SEQ ID NO: 124937 - DNA, 75 bp, synthetic construct
  source 1..75: mol_type = other DNA
tcggataacggttccggtgaaacggctgacatgctggacaaagaggtcgtgggtattctgccacgcctggggatt

SEQ ID NO: 124938 - DNA, 75 bp, synthetic construct
  source 1..75: mol_type = other DNA
cggttgtttgttgggacatctctcagcgaggctgacattgactcactgatagcgaagtacagcgaaggtgtggaa

SEQ ID NO: 124939 - DNA, 75 bp, synthetic construct
  source 1..75: mol_type = other DNA
cgggactgacacacctgtaccggatgcgtgatgcgcagttgtggagccacatcgaatttcatcccgaatgcaacg

SEQ ID NO: 124940 - DNA, 75 bp, synthetic construct
  source 1..75: mol_type = other DNA
ctgattaaaactgaactgctggagacgcagaccgtggatttcagcgtaggagccgaagggcttcgccatgtaccg

SEQ ID NO: 124941 - DNA, 75 bp, synthetic construct
  source 1..75: mol_type = other DNA
aaagcaggtgccgccagcacaaagtggtccacaaccgggtaaagcagggcgcgatcgtccgattgtcattatgct

SEQ ID NO: 124942 - DNA, 75 bp, synthetic construct
  source 1..75: mol_type = other DNA
gggattgaggatactgatggccagtcactgagcaacatactgctgctggctgaccgtatcgcgatgataaatccg

SEQ ID NO: 124943 - DNA, 75 bp, synthetic construct
  source 1..75: mol_type = other DNA
aagcctttccccggaataacagttatgccagcgggacggtaaccgtcacagtttacgatgaccagggcttcgacc

SEQ ID NO: 124944 - DNA, 75 bp, synthetic construct
  source 1..75: mol_type = other DNA
cggtaaggcaaccgtaacgttgaagtcgggtacgccagggcaggtcgtcgtgtctgctaaaaccgcggagatgac

SEQ ID NO: 124945 - DNA, 75 bp, synthetic construct
  source 1..75: mol_type = other DNA
tccggtgcggtggggaaatacaaaacgcgcgaaaaagacgtggtattgcaaatagctcgccgtctgcgctctctg

SEQ ID NO: 124946 - DNA, 75 bp, synthetic construct
  source 1..75: mol_type = other DNA
aaggcgagatagggaaaacccatctggctcaggagctgtggacgcagattgataacggtcagcttgcgcctgacc

SEQ ID NO: 124947 - DNA, 75 bp, synthetic construct
  source 1..75: mol_type = other DNA
aactttggtaatctgggggggaattctcagacccaaattgtgcaaacggataaagatggtaaggctacggtaaaa

SEQ ID NO: 124948 - DNA, 75 bp, synthetic construct
  source 1..75: mol_type = other DNA
acattctcaacgaactttggtaatctggggggaaattctaatacccaaattgtgaaaacggataaagatggtagg

SEQ ID NO: 124949 - DNA, 75 bp, synthetic construct
  source 1..75: mol_type = other DNA
tatgccggcagggcggggtcatgtcaccctgacgtttaatgtgtcgtcggccggtgcgaacaactggacgccgac

SEQ ID NO: 124950 - DNA, 75 bp, synthetic construct
  source 1..75: mol_type = other DNA
ataccccgcgcgaagcaaaggacaacctgaagtccacgcagctgctgagtgtgatcgatgccatcagtgaagggc

SEQ ID NO: 124951 - DNA, 75 bp, synthetic construct
  source 1..75: mol_type = other DNA
caaaaccgatgtttgttggtcagggcgatcagatattcatgaacgacgtgttcctgaaacgcctgacggccccca

SEQ ID NO: 124952 - DNA, 75 bp, synthetic construct
  source 1..75: mol_type = other DNA
tatgggagaaaacacaaaatcttgcggaaaaggtatatcaaaaagacactgatttcattcctttggctggcgcat

SEQ ID NO: 124953 - DNA, 75 bp, synthetic construct
  source 1..75: mol_type = other DNA
cggacgtatcctgtccatcgatgccgccagccgccccctgacactggaccgtgaggtgaccctgccggagacagg

SEQ ID NO: 124954 - DNA, 75 bp, synthetic construct
  source 1..75: mol_type = other DNA
cctgtatgggcaacgctagataccatgtggagtacaactcagcttttggctgacaaagtttatgctatggatcaa

SEQ ID NO: 124955 - DNA, 75 bp, synthetic construct
  source 1..75: mol_type = other DNA
tattcgtaacctgaccacaaaaacatgcattactgactgcatgattaaagtcttcctcggtcgtgatggtttacc

SEQ ID NO: 124956 - DNA, 75 bp, synthetic construct
  source 1..75: mol_type = other DNA
tgtgaatgcgaactcagggacgctcaacaacgtcacgattaatgagaactgtcagattaaggggaaactgtcagc

SEQ ID NO: 124957 - DNA, 75 bp, synthetic construct
  source 1..75: mol_type = other DNA
aaaaacaggtgaaactgttgccaatatttctaaatcacagggtatcagtttatcggtaatttggtcactgaataa

SEQ ID NO: 124958 - DNA, 75 bp, synthetic construct
  source 1..75: mol_type = other DNA
tggaactgatgttaaagcgactgaggttactttttttgatgaactgaaaattgacaacaaggttgacattattgg

SEQ ID NO: 124959 - DNA, 75 bp, synthetic construct
  source 1..75: mol_type = other DNA
cggcggacgtgtcctgtccatcgatgccgccagccgcaccctgacgctggaccgtgaggtgacactgccggagac

SEQ ID NO: 124960 - DNA, 75 bp, synthetic construct
  source 1..75: mol_type = other DNA
ggaagtgacgaaggcaaaaccggtgacgcgcaccattacgtctgcgaacattgaccgcctgcgggttaccttcgg

SEQ ID NO: 124961 - DNA, 75 bp, synthetic construct
  source 1..75: mol_type = other DNA
atctataacagcatggacgttgcaaactagtgatgatgtgaagaaaggggtcaccagtacttacgatttggtaag

SEQ ID NO: 124962 - DNA, 75 bp, synthetic construct
  source 1..75: mol_type = other DNA
gtgataaagaccggactgctggaaacgcagacggtggatttcacgctcgggtctcaggggctgcgtcacacaccc

SEQ ID NO: 124963 - DNA, 75 bp, synthetic construct
  source 1..75: mol_type = other DNA
acagaacaagcacacggagctgacacccggcgcacccggtctgggcaaatcggtactcatcaacgcactgtcgga

SEQ ID NO: 124964 - DNA, 75 bp, synthetic construct
  source 1..75: mol_type = other DNA
atgtatgtcattgcaaaagaactgattggcgcgcccggaatgcctgctacaacaaaaggtattcgccaggcatta

SEQ ID NO: 124965 - DNA, 75 bp, synthetic construct
  source 1..75: mol_type = other DNA
ggctgaacgcccggcaacagtcagcgatgcgtgatttaccgtcctggtctgaactgattgatgccattcgtgatg

SEQ ID NO: 124966 - DNA, 75 bp, synthetic construct
  source 1..75: mol_type = other DNA
gtttccggtcaaattagtcgtttacttgttacacagcttagatttcttttgctcgggagaggcatgtcaggatcc

SEQ ID NO: 124967 - DNA, 75 bp, synthetic construct
  source 1..75: mol_type = other DNA
aaagcaaaacgtaaaaccgcagctgtttgccctcgcgccggtcgccgggtttaaagaacgtctggtgatggacct

SEQ ID NO: 124968 - DNA, 75 bp, synthetic construct
  source 1..75: mol_type = other DNA
tcgaggccgaaagcatccacatcttccgcgaggtggctagcgagtgcgagcggccggtcatgctctattcggtag

SEQ ID NO: 124969 - DNA, 75 bp, synthetic construct
  source 1..75: mol_type = other DNA
gttgctcctgatggtcgacgacgagcgcttcccgctgcggcccggcgagcagccggtgatgcgctcgatccgctt

SEQ ID NO: 124970 - DNA, 75 bp, synthetic construct
  source 1..75: mol_type = other DNA
ttctaactagccatttcgggatagtaggaacggcatatgcatggacattgagagttatgttcgattttattgcac

SEQ ID NO: 124971 - DNA, 75 bp, synthetic construct
  source 1..75: mol_type = other DNA
caggacccgctgctggcgctgctggaggattacaacaaaggcgacctcgaaaagcaggtgccgccagcgcaaagt

SEQ ID NO: 124972 - DNA, 75 bp, synthetic construct
  source 1..75: mol_type = other DNA
tgaccgttcagcaaccggtcgctgacgatgaacctgatgaagaatacgagcgtaatttccagcggggattgcagc

SEQ ID NO: 124973 - DNA, 75 bp, synthetic construct
  source 1..75: mol_type = other DNA
aacggttccggggaaaccgccgacatcctggataaggaagttgtggggattctgccgcgactggggattaatcac

SEQ ID NO: 124974 - DNA, 75 bp, synthetic construct
  source 1..75: mol_type = other DNA
tgagcagaccgaagacggcaaacattatgtcgccggtattggcctcagcatggaggagacggaagaaggcaaact

SEQ ID NO: 124975 - DNA, 75 bp, synthetic construct
  source 1..75: mol_type = other DNA
tggtaaatggctggtatcccacagcaagtatcagcgatttgctggttgttgtgatgaagaaagccactgcaggca

SEQ ID NO: 124976 - DNA, 75 bp, synthetic construct
  source 1..75: mol_type = other DNA
aggaacggcatatgcatggacattgagagttatgttcgattttattgcactatactttctttcatcctggttaat

SEQ ID NO: 124977 - DNA, 75 bp, synthetic construct
  source 1..75: mol_type = other DNA
cacagcacaggtggaaaaatctgcccgttatctggggaccggcagtcagtggactgtccaggggagccggattaa

SEQ ID NO: 124978 - DNA, 75 bp, synthetic construct
  source 1..75: mol_type = other DNA
ctgtcggccctgctggcgcagacggaggaagtgagcgtgccgctggcctcactgattaaatcaccgctgaatgtg

SEQ ID NO: 124979 - DNA, 75 bp, synthetic construct
  source 1..75: mol_type = other DNA
tggtgcttttttattattgattttctctgatggaatcgttaattatctaaaaatttctggtgttgaacatagtga

SEQ ID NO: 124980 - DNA, 75 bp, synthetic construct
  source 1..75: mol_type = other DNA
gcatttgtggaggctgttggccagccgagtgatgatgcatccggctatctgaattttttcaaaggagagataggg

SEQ ID NO: 124981 - DNA, 75 bp, synthetic construct
  source 1..75: mol_type = other DNA
gtgtgtgatcccaaacataagaacggcaatgatagtcgctatcagtctggttcagttcgttgccatacctgcaat

SEQ ID NO: 124982 - DNA, 75 bp, synthetic construct
  source 1..75: mol_type = other DNA
tttgaccggcaggtcatgatcccggctctgttgtttaaaggaagcaggaaggaaaattatggcagtaataatcaa

SEQ ID NO: 124983 - DNA, 75 bp, synthetic construct
  source 1..75: mol_type = other DNA
tcttcttcaatggtcaataactggacaccgacaaccagtatcagcgatttgctggttgtggtgatgaagaaatcc

SEQ ID NO: 124984 - DNA, 75 bp, synthetic construct
  source 1..75: mol_type = other DNA
tcacagttgcaggcctggttacaacattatggaacggcagaggttaatctgcagagcggtaataactttgacggt

SEQ ID NO: 124985 - DNA, 75 bp, synthetic construct
  source 1..75: mol_type = other DNA
tcgattatcgtcactggataatctacgtcaggctcccttattccgaacgcccgccgcgtccatcccgcacattcc

SEQ ID NO: 124986 - DNA, 75 bp, synthetic construct
  source 1..75: mol_type = other DNA
cggcgctaaacatgagagagagcatactgatatttactcctcatgccgtctgatagtgcggaaaaacggtgctga

SEQ ID NO: 124987 - DNA, 75 bp, synthetic construct
  source 1..75: mol_type = other DNA
cagatttgcacaaaaaattggctattgccgcctcttctctgtggaagaaaaacattggcgtgaacgtcaagctgg

SEQ ID NO: 124988 - DNA, 75 bp, synthetic construct
  source 1..75: mol_type = other DNA
aatgatgtgcgtgtgcgtaccgcactgaaactgggtatcgaccgcgatatcatcgttaataaagtcaaagcacag

SEQ ID NO: 124989 - DNA, 75 bp, synthetic construct
  source 1..75: mol_type = other DNA
acgcgaaagtctggaccttccatttgcgtaaagatgcgaaatggtctgatggcacgccagtcacagcacaagact

SEQ ID NO: 124990 - DNA, 75 bp, synthetic construct
  source 1..75: mol_type = other DNA
tgcttctgaagttaccgatgtcaaccgctaccgtagtggtgaaatcgacatgacttataacaacatgccgatcga

SEQ ID NO: 124991 - DNA, 75 bp, synthetic construct
  source 1..75: mol_type = other DNA
gccggcggtgtggagcctgagctgaagacaaaggcggaagaggcagagcagctgccgcccggcatcagtgaaagc

SEQ ID NO: 124992 - DNA, 75 bp, synthetic construct
  source 1..75: mol_type = other DNA
ctcaccagatagcgcataccctgctggcacgtctcggcctgcgctatgttcagatatcagtgattatcatcggac

SEQ ID NO: 124993 - DNA, 75 bp, synthetic construct
  source 1..75: mol_type = other DNA
tgggagaaaggcagtccgctgcataaatctacgcaacaggttagaacccaaggcccgatacggcatgcggactgc

SEQ ID NO: 124994 - DNA, 75 bp, synthetic construct
  source 1..75: mol_type = other DNA
aatggtctttacaaagcggaggtaatacaccgtaagagctggaaaaaccggcagaagtggaacaggccacactaa

SEQ ID NO: 124995 - DNA, 75 bp, synthetic construct
  source 1..75: mol_type = other DNA
atgcagcgaactgcatattgccccgtcaacgtattaccactgtcagcaacagcgacattcatccggataaacgca

SEQ ID NO: 124996 - DNA, 75 bp, synthetic construct
  source 1..75: mol_type = other DNA
gcggaggtaatacaccgtaagagctggaaaaaacgtgcagaagtggaactggccacactcacgtgggtggactgg

SEQ ID NO: 124997 - DNA, 75 bp, synthetic construct
  source 1..75: mol_type = other DNA
aattttattctgcaatgtctggcatggattggtgatgatatcgttatcgagcatttttcccagtggcgcaagaat

SEQ ID NO: 124998 - DNA, 75 bp, synthetic construct
  source 1..75: mol_type = other DNA
tatcagtgctgcaatccttgatccagcaactggtcagctggttggcgtgggtgatgctgccaacttactgattta

SEQ ID NO: 124999 - DNA, 75 bp, synthetic construct
  source 1..75: mol_type = other DNA
gacatcatcctgataaacgcagtgcccgtgcgcagcgcgatgactggctgaagaaagagatactgcgcgtgtacg

SEQ ID NO: 125000 - DNA, 75 bp, synthetic construct
  source 1..75: mol_type = other DNA
gtaaaaggtccgtactaccgtcagccggaaagccgtttccgcaggcgaccgcgtaaaccgtcagttcgtggcaga

SEQ ID NO: 125001 - DNA, 75 bp, synthetic construct
  source 1..75: mol_type = other DNA
actgctggcatcaacaggcagtacgggcgactcgtatgacaacgcgatggcggagagcatcaatggcctttacaa

SEQ ID NO: 125002 - DNA, 75 bp, synthetic construct
  source 1..75: mol_type = other DNA
atagttttgcctctcatctgctgacatatggcggtgagtattatcgtcaggaacaacatcctggcggtgcgacga

SEQ ID NO: 125003 - DNA, 75 bp, synthetic construct
  source 1..75: mol_type = other DNA
ctcatcgtctatggaaacgacattcgtgctggatgcgctggagcaggcgttttgggcccggcgtccgtccggcac

SEQ ID NO: 125004 - DNA, 75 bp, synthetic construct
  source 1..75: mol_type = other DNA
actactggcatcaacagggagtacaggcgactcgtatgacaacgcgatggcggagagcatcaatggcctttacaa

SEQ ID NO: 125005 - DNA, 75 bp, synthetic construct
  source 1..75: mol_type = other DNA
ccaacggtcaggatgtaaatatgcgtggctatgatcatcgcggcgtgctggttcttgtcgatggtgttcgccagg

SEQ ID NO: 125006 - DNA, 75 bp, synthetic construct
  source 1..75: mol_type = other DNA
atcaacactattatcatcaaccgttgcaggctcctgagatcattgcgctttatgatcaaggcgatgagcaggcaa

SEQ ID NO: 125007 - DNA, 75 bp, synthetic construct
  source 1..75: mol_type = other DNA
ctcatcgtctatggaaacgacattcgtgctggatgccctggagcaggcgttttgggcccgtcgcccgtccggcac

SEQ ID NO: 125008 - DNA, 75 bp, synthetic construct
  source 1..75: mol_type = other DNA
ttttagctccggctggctacaggatgagatcaccttacgcgatctgccgattaccctgcttggcggaacccgcta

SEQ ID NO: 125009 - DNA, 75 bp, synthetic construct
  source 1..75: mol_type = other DNA
gagcttgatcagtggatggaaagccggatttatccggagatgagtgcgatcccggcactggctggactgattacc

SEQ ID NO: 125010 - DNA, 75 bp, synthetic construct
  source 1..75: mol_type = other DNA
aacgacgtgcgcgtgcgtacagcgctgaaactgggtatggaccgcgatatcatcgttaataaagttaaagcacag

SEQ ID NO: 125011 - DNA, 75 bp, synthetic construct
  source 1..75: mol_type = other DNA
ccacactttagaagtcacattaagtgagcctgttccgtatttctataaattactggttcacccatcgacttctcc

SEQ ID NO: 125012 - DNA, 75 bp, synthetic construct
  source 1..75: mol_type = other DNA
gaaaagcgggtgccgacaccgcgtgacagctatgacgcatttttagatgcagtgtgcgagctggtggctgaagcc

SEQ ID NO: 125013 - DNA, 75 bp, synthetic construct
  source 1..75: mol_type = other DNA
actcctggcatcaacaggtagtactggcgactcgtatgacaacgcgatggcggagagcatcaatggcctttacaa

SEQ ID NO: 125014 - DNA, 75 bp, synthetic construct
  source 1..75: mol_type = other DNA
ccgatctgcataaaaagctggcgattgctgcctcttcattgtggaagaaaaacattggtgtaaacgtcaaactgg

SEQ ID NO: 125015 - DNA, 75 bp, synthetic construct
  source 1..75: mol_type = other DNA
cgcgctgaaacaacaactgaggattgcgataaaacgatgaaacacactgacattcgtgccgcagtgctggatgca

SEQ ID NO: 125016 - DNA, 75 bp, synthetic construct
  source 1..75: mol_type = other DNA
tggctatcctccaaaaggccgcgacatacttcgcgaagcgcctgaaattaagtatgtctttattgaaaaacatca

SEQ ID NO: 125017 - DNA, 75 bp, synthetic construct
  source 1..75: mol_type = other DNA
taatgaccctaaccgcagctacagcaaactggtggatacactgctttccatcaaaattgaaaaactgcgcacctt

SEQ ID NO: 125018 - DNA, 75 bp, synthetic construct
  source 1..75: mol_type = other DNA
tgggctgaagagcatggtgtaatgctggagtttattcaaccgggcaaaccgacgcagaatgcctttattgaacgt

SEQ ID NO: 125019 - DNA, 75 bp, synthetic construct
  source 1..75: mol_type = other DNA
tggctatcctccaaaaggccgacgacatacttcgcgaagcgcctgaaatgaagtatgtctttatgaaaacatcag

SEQ ID NO: 125020 - DNA, 75 bp, synthetic construct
  source 1..75: mol_type = other DNA
atgatttacgcaatcgcgggaggcgctcgcatgggtgccttccaactaaatgaatctttacttgaacgaatcacc

SEQ ID NO: 125021 - DNA, 75 bp, synthetic construct
  source 1..75: mol_type = other DNA
cgtcggccgtccggcacagtccatcacagtgataaaggttctcagtatatatcactggcctatacggagcgacta

SEQ ID NO: 125022 - DNA, 75 bp, synthetic construct
  source 1..75: mol_type = other DNA
acgatggttacgcagggctatgagtatcttcgtgatgacgatatggcattgtggagctctgcagatctgacttat

SEQ ID NO: 125023 - DNA, 75 bp, synthetic construct
  source 1..75: mol_type = other DNA
agcagtacggggtcggaccggtatgcagtgaactgcatattgccccatcaacgtattaccactgtccgcaacagc

SEQ ID NO: 125024 - DNA, 75 bp, synthetic construct
  source 1..75: mol_type = other DNA
ggcatcatcctgataaacgcagtgcccgtgcgcagcgcgatgactggctgaagaaagagatactgcgcgtatacg

SEQ ID NO: 125025 - DNA, 75 bp, synthetic construct
  source 1..75: mol_type = other DNA
gcagggcttcgtctgtgtggcgttcatcattgatgtgtttgccggatacattgtggggtggcgggtctcatcgtc

SEQ ID NO: 125026 - DNA, 75 bp, synthetic construct
  source 1..75: mol_type = other DNA
gtacgcattatggaagggcaactggtgtcgatgattaatgaattgcgtcagggagaattggatttcaccatcaat

SEQ ID NO: 125027 - DNA, 75 bp, synthetic construct
  source 1..75: mol_type = other DNA
agaatgggcagagaaacatacagtcaactggattttatccaactgggtaaaccgacacagaacgcattcattgaa

SEQ ID NO: 125028 - DNA, 75 bp, synthetic construct
  source 1..75: mol_type = other DNA
ttcgtacattcatcgtcatttatgactttaatcgcgaggcgttgcctatcgaaatagactttaatttaccggctc

SEQ ID NO: 125029 - DNA, 75 bp, synthetic construct
  source 1..75: mol_type = other DNA
aacgctgaatgaagtgcgtgaaatcacggaacaatggctgttagaatataactgtgaacgccctcatgaatcact

SEQ ID NO: 125030 - DNA, 75 bp, synthetic construct
  source 1..75: mol_type = other DNA
gaagagctggatacagatacctggagagccacactgcatattgaggtgtttttaccggcacaggtaccagattca

SEQ ID NO: 125031 - DNA, 75 bp, synthetic construct
  source 1..75: mol_type = other DNA
ggctatcccggcagtagcggctgcaaccaccgcacattcactgttcccaccgcagccgggtccggtggcgctggt

SEQ ID NO: 125032 - DNA, 75 bp, synthetic construct
  source 1..75: mol_type = other DNA
cgaactgtctcctcaggagaggcagcgtcgtgaagaagtgaacatcaacgttcaccgggcgcctgaaaaggatct

SEQ ID NO: 125033 - DNA, 75 bp, synthetic construct
  source 1..75: mol_type = other DNA
ttgccctttctgaagcctgggatgatgaatttacccaatatccgctggtgatggggttaattctcggcactggcg

SEQ ID NO: 125034 - DNA, 75 bp, synthetic construct
  source 1..75: mol_type = other DNA
tataacaatcgacgattgctgggaaggctgaggcatactcctccggcagaaaaagcgtattatgcttccatcgga

SEQ ID NO: 125035 - DNA, 75 bp, synthetic construct
  source 1..75: mol_type = other DNA
attgtctcccgatcaagcgcagcagatggctgattacgccacagaacggtttgtatctggagaatatcagcacgc

SEQ ID NO: 125036 - DNA, 75 bp, synthetic construct
  source 1..75: mol_type = other DNA
gaaaagcgggtgccgacgccgagtgacagctatgacgcatttttagatgcagtgtgtgagctggttagcgaagct

SEQ ID NO: 125037 - DNA, 75 bp, synthetic construct
  source 1..75: mol_type = other DNA
tatcccgccagcctggctgccggatgatgtatctgaatggcgtcggttacctgtaaacagcatgagacggggggt

SEQ ID NO: 125038 - DNA, 75 bp, synthetic construct
  source 1..75: mol_type = other DNA
agaaaccccgtaaacaacatacgcctgaatttcgtaacgaagccctgaaactcgctgaacgcatcggtgtggccg

SEQ ID NO: 125039 - DNA, 75 bp, synthetic construct
  source 1..75: mol_type = other DNA
aacgtattaccactgtcagcaacagcgacatcatcctgataaacgcagtgcccgtgctcagcgcgatgactggct

SEQ ID NO: 125040 - DNA, 75 bp, synthetic construct
  source 1..75: mol_type = other DNA
cgctgaaaatgcccgcctgaagcggcaactggcggtgcaggcagaggaactggctatcctccaaaaggccgcgac

SEQ ID NO: 125041 - DNA, 75 bp, synthetic construct
  source 1..75: mol_type = other DNA
aagaacgaaaccgcctaggatttagtcagtctgagtttgctgaattggtgggggcatcctataaaagccaattgc

SEQ ID NO: 125042 - DNA, 75 bp, synthetic construct
  source 1..75: mol_type = other DNA
ccctgcactggcgggcatgattaccacgatggtgcagcagggctatgagtatcgtcgcgatgacgatatggcgtt

SEQ ID NO: 125043 - DNA, 75 bp, synthetic construct
  source 1..75: mol_type = other DNA
cgtatgacaacgcgatggcggagagcatcaatggtctttacaaagcggaggtaatacaccgtaagagctggaaaa

SEQ ID NO: 125044 - DNA, 75 bp, synthetic construct
  source 1..75: mol_type = other DNA
gtgctggatgcactggagcaggtgttatgggcccgtcgaccgtccggcacggtccatcacagtgataaaggttct

SEQ ID NO: 125045 - DNA, 75 bp, synthetic construct
  source 1..75: mol_type = other DNA
ttaccctgcttggcggaactcgttatgacagctatcgcggtagtagcgacggttacaaagatgttgatgccgaca

SEQ ID NO: 125046 - DNA, 75 bp, synthetic construct
  source 1..75: mol_type = other DNA
cagaacatctggaagaacgtcggcttatgctgcaatggtgggcagattttctggatgcaaacagggaggagtgta

SEQ ID NO: 125047 - DNA, 75 bp, synthetic construct
  source 1..75: mol_type = other DNA
tatggaaacgacattcgtgctggatgcgctggagcaggcgttgtgggccgtcgtccgtctggcaccatccatcac

SEQ ID NO: 125048 - DNA, 75 bp, synthetic construct
  source 1..75: mol_type = other DNA
cttatagagcaacaaaagatccccggtatggcggtggcggtaatttatcagggtaaaccttattactttacctag

SEQ ID NO: 125049 - DNA, 75 bp, synthetic construct
  source 1..75: mol_type = other DNA
catggagacgacattcgtgctggatgcactggagcaggcgttattgtcaacgccaagattattggccgtttttcg

SEQ ID NO: 125050 - DNA, 75 bp, synthetic construct
  source 1..75: mol_type = other DNA
tgcgccgaggcagcgcgaaagcagggggcaacggtgattgccattacttcactgactgactctccgctgcggcgg

SEQ ID NO: 125051 - DNA, 75 bp, synthetic construct
  source 1..75: mol_type = other DNA
gtacggtgtgcgtaaaatctggcgtcagttgttacgggaaggtatcagagtggccagatgcactgtggcacgtct

SEQ ID NO: 125052 - DNA, 75 bp, synthetic construct
  source 1..75: mol_type = other DNA
tcgtatgacaacgcgatggcagagatcatcaagggcctttacaaagcggaggtaatacaccgtaagagctggaaa

SEQ ID NO: 125053 - DNA, 75 bp, synthetic construct
  source 1..75: mol_type = other DNA
cgccgatgatcaacatcctgctggcgaaaatctattttgaagctctggtgccttccatcccatcgtggatgtttg

SEQ ID NO: 125054 - DNA, 75 bp, synthetic construct
  source 1..75: mol_type = other DNA
ggctccagatatcgtgccggtcgattcgcttatccaacatgcagaatctccagcattacgtttttattctgccaa

SEQ ID NO: 125055 - DNA, 75 bp, synthetic construct
  source 1..75: mol_type = other DNA
gaatatttagaaaccttcggtgtaccgttaattggctatcagacaaaagcgctgcctgcgtttttctgccgtacc

SEQ ID NO: 125056 - DNA, 75 bp, synthetic construct
  source 1..75: mol_type = other DNA
gtgacggcttttgcccgcgcgatcggcgatgagacgtttcgtctggatcgcactgaacctacgctgaataccgcc

SEQ ID NO: 125057 - DNA, 75 bp, synthetic construct
  source 1..75: mol_type = other DNA
aatattaatgccgggcagattattggcgtttatcctgccagctacgttaataatcttcgtttttcagcggatggt

SEQ ID NO: 125058 - DNA, 75 bp, synthetic construct
  source 1..75: mol_type = other DNA
tgggcggcaatcggcctgatttacctggcttgtgtcaccaagagcttccgtaacccggttccgcagtacgaagac

SEQ ID NO: 125059 - DNA, 75 bp, synthetic construct
  source 1..75: mol_type = other DNA
acgcagttcccgtgcgcagcacgatgactggctgaagagagagatacagcgcgtatacgatgaaaatcatcaggt

SEQ ID NO: 125060 - DNA, 75 bp, synthetic construct
  source 1..75: mol_type = other DNA
acagctcggcatcagccagtcgagtattgtgaagtttgcccagaagctcggcgcgcaaggatttactgaattgcg

SEQ ID NO: 125061 - DNA, 75 bp, synthetic construct
  source 1..75: mol_type = other DNA
gaaatcgccggggcggcaactgccctgctggaaaatgctgcgccgttcccgcgacctgattatctgtttgccgat

SEQ ID NO: 125062 - DNA, 75 bp, synthetic construct
  source 1..75: mol_type = other DNA
atgaatctaaaaaaaatagccacaaacacaaaaaacaagataacagaaacattcaataaacttatattagaggca

SEQ ID NO: 125063 - DNA, 75 bp, synthetic construct
  source 1..75: mol_type = other DNA
aatcagataccaatctacttatctggcgggcatgggattttgaacctgattttgattataattttaagcagcagc

SEQ ID NO: 125064 - DNA, 75 bp, synthetic construct
  source 1..75: mol_type = other DNA
ggtatcaacctggatatgaatgccgataaatcgcgccaggcgctggacgagttaggcgtttgcttcctcttcgcg

SEQ ID NO: 125065 - DNA, 75 bp, synthetic construct
  source 1..75: mol_type = other DNA
ttttttgctctcaaccattaataaaatacgcaaacccaatacttattttattgagtggcctgctattgtctctca

SEQ ID NO: 125066 - DNA, 75 bp, synthetic construct
  source 1..75: mol_type = other DNA
cgcctgaccagctgtgggtggctgattttacttacgtcagcacatggcagggcttcgtctatgtggcgttatcat

SEQ ID NO: 125067 - DNA, 75 bp, synthetic construct
  source 1..75: mol_type = other DNA
gttagagtatagggcattgagatttgaaaatgaactattgccaatgaaaaattatcaaggcaatgcggtcattaa

SEQ ID NO: 125068 - DNA, 75 bp, synthetic construct
  source 1..75: mol_type = other DNA
gtggcgttcatcattgatgtgtttgccggatacattgtggggtggcgggtctcatcgtccatggagacgacattc

SEQ ID NO: 125069 - DNA, 75 bp, synthetic construct
  source 1..75: mol_type = other DNA
atgttgcaatggtgggccgattttctggatgcgaaccgggagaagggtatcagtccgtttgaatatgcaaagatt

SEQ ID NO: 125070 - DNA, 75 bp, synthetic construct
  source 1..75: mol_type = other DNA
atggctgacattctgctgctcgataatatcgactcttttacttacaacctggcagatcagttgcgcagcaatggt

SEQ ID NO: 125071 - DNA, 75 bp, synthetic construct
  source 1..75: mol_type = other DNA
atgtatcgctggcctacacacagcggcttaagggaagccggattactggcatcaacaggaagtacaggcgactcg

SEQ ID NO: 125072 - DNA, 75 bp, synthetic construct
  source 1..75: mol_type = other DNA
ctggcagttatgctgaatttactggtttttattcgttccagtgaactcagataagcccggtggtctgaaattgat

SEQ ID NO: 125073 - DNA, 75 bp, synthetic construct
  source 1..75: mol_type = other DNA
tatggaaacgacatttgtgctggatgctctggagcaggcgttatgggcccgtcgaccgtccggcacagtccatca

SEQ ID NO: 125074 - DNA, 75 bp, synthetic construct
  source 1..75: mol_type = other DNA
gtcgttttcaattatgagaccatactaaaaaaaggaatttctgcagagttagatgataatgatttaaaaatcgac

SEQ ID NO: 125075 - DNA, 75 bp, synthetic construct
  source 1..75: mol_type = other DNA
attgcgcgccaaaggcgtggagatggcgtttgtgacgttgcacgttggtgcgggcaccttccagccggtgcgcgt

SEQ ID NO: 125076 - DNA, 75 bp, synthetic construct
  source 1..75: mol_type = other DNA
tctatccgggcttccagtacaaagtggtcgatgcgctggtgacgaacttccacttgccagagtcgacgctgatta

SEQ ID NO: 125077 - DNA, 75 bp, synthetic construct
  source 1..75: mol_type = other DNA
atgagccggttaccgacattcgtgctggatgcgctggagcaggcgttgtgggcccgtcgtccgtctggcaccatc

SEQ ID NO: 125078 - DNA, 75 bp, synthetic construct
  source 1..75: mol_type = other DNA
gccccctcaccggtcttctatgcactggacaccttcacagtgaacctcggcgatgcggatcgcgttttgtacatc

SEQ ID NO: 125079 - DNA, 75 bp, synthetic construct
  source 1..75: mol_type = other DNA
tgacgacaaagcacagcaacacgtcgtactctcacctgtcttctatgcactggacacttttacggtcaatctggg

SEQ ID NO: 125080 - DNA, 75 bp, synthetic construct
  source 1..75: mol_type = other DNA
gtgatcccggcgcgcctgtttgggcgtaaagccagcggcggcaagattgaagtgctggttgagcggatgctcgac

SEQ ID NO: 125081 - DNA, 75 bp, synthetic construct
  source 1..75: mol_type = other DNA
tatgtcgtataacgtcccgaacgccaaaatctggggttgggatgtgatgacgaaatataccactgatctgtttag

SEQ ID NO: 125082 - DNA, 75 bp, synthetic construct
  source 1..75: mol_type = other DNA
cgcagcgattttcgccgccgttgctgcaaaagtgcactcagatatcccatcagcacaacaaaaaatggccagcgc

SEQ ID NO: 125083 - DNA, 75 bp, synthetic construct
  source 1..75: mol_type = other DNA
cgttgcagcgccgggcataaatcactgtggcacgaaagctggggcggcctgccaccagccagtttctttgatgag

SEQ ID NO: 125084 - DNA, 75 bp, synthetic construct
  source 1..75: mol_type = other DNA
ctcatcgtctatggaaacgacattcgtgctggatgctctggagcaggcgttttgggcccgccgcccgtccggcac

SEQ ID NO: 125085 - DNA, 75 bp, synthetic construct
  source 1..75: mol_type = other DNA
agctgcgtgagcagtacggggtcggaccggtatgcagtgaactgcatatcgccccgtcaacgaattaccactgtc

SEQ ID NO: 125086 - DNA, 75 bp, synthetic construct
  source 1..75: mol_type = other DNA
gaagtggaactggccacactaacgtgggtggactggtataacaatcgacgattgctggaaaggctgggccatact

SEQ ID NO: 125087 - DNA, 75 bp, synthetic construct
  source 1..75: mol_type = other DNA
ccctgcactggcaggcatgattaccacgatggttacgcagggctatgagtatcgtcgtgatgacgatatggcgtt

SEQ ID NO: 125088 - DNA, 75 bp, synthetic construct
  source 1..75: mol_type = other DNA
cgggaaggtatcagagtggccagatgcactgtggcacgcctcatggcagttatgggacttgccggtgttctccgg

SEQ ID NO: 125089 - DNA, 75 bp, synthetic construct
  source 1..75: mol_type = other DNA
atgatgccactgctggataagctgcgtgagcagtacggggtcggaccgctatgcagcgaacaatcaattatgacg

SEQ ID NO: 125090 - DNA, 75 bp, synthetic construct
  source 1..75: mol_type = other DNA
tgtggatgagcctgtttaccattctgtatacatgctttttcttaaaagtgactgtccaggcggtcatcaaattcg

SEQ ID NO: 125091 - DNA, 75 bp, synthetic construct
  source 1..75: mol_type = other DNA
aaagtatttgcaacggggggtattggtggtgtacatcgcggtgcggaacatacattcgatatttctgccgattta

SEQ ID NO: 125092 - DNA, 75 bp, synthetic construct
  source 1..75: mol_type = other DNA
atcatgctgtatgttgcgggtaaagcgttccaggtcggcgcgctgatcttctccaccattaccgtactggcgtcc

SEQ ID NO: 125093 - DNA, 75 bp, synthetic construct
  source 1..75: mol_type = other DNA
catcatcctgataaacgcagtgcccgtgcgcagcgcgatgactggctgaagagagatacagcgcgtatacgatga

SEQ ID NO: 125094 - DNA, 75 bp, synthetic construct
  source 1..75: mol_type = other DNA
gtctttacaaagcggaggtaatacaccgtaagagctggaaaaaccgtgcagaagtggagctggccacactcacgt

SEQ ID NO: 125095 - DNA, 75 bp, synthetic construct
  source 1..75: mol_type = other DNA
aattattacaaatttccccggaagtgcaggacgctttaaaaaacaaaaaaccggttgttgcgctggaatcgacca

SEQ ID NO: 125096 - DNA, 75 bp, synthetic construct
  source 1..75: mol_type = other DNA
aggccgtactggcacgccttcgggaacagtgtggagacagcgccacgttttttgacgggcttccggcatttattg

SEQ ID NO: 125097 - DNA, 75 bp, synthetic construct
  source 1..75: mol_type = other DNA
tggtggtgtgcatcgcggggcggaacataccttcgatatttctgccgatttgcaagaactggcaaatactaatgt

SEQ ID NO: 125098 - DNA, 75 bp, synthetic construct
  source 1..75: mol_type = other DNA
tcaacacaccatgaatgcctataaagcggcggtagaagagaaatatcgcttttttagttacggtgatgcgatgtt

SEQ ID NO: 125099 - DNA, 75 bp, synthetic construct
  source 1..75: mol_type = other DNA
ccctgcactggcaggactgattaccacgatggttacgcagggctatgagtatcgtcgtgatgacgatatggcgtt

SEQ ID NO: 125100 - DNA, 75 bp, synthetic construct
  source 1..75: mol_type = other DNA
taatcaaagcagttcgcgtttctgttgtagccgatgtttgcggtgtcagccaaagagcaatctacaaatggatga

SEQ ID NO: 125101 - DNA, 75 bp, synthetic construct
  source 1..75: mol_type = other DNA
agcggcttaaggaagccggattactggcatcaacaggaagtacaggcgactcgtatgacaacgcgatggcggaga

SEQ ID NO: 125102 - DNA, 75 bp, synthetic construct
  source 1..75: mol_type = other DNA
ggcgtgttgatatcacccagaataaacactatcagcatcaggccgaatcacagtcctatcagaccgcttctctag

SEQ ID NO: 125103 - DNA, 75 bp, synthetic construct
  source 1..75: mol_type = other DNA
gattattttctgctgatgcggttttgactattggcaggattaagcctacagcgaatgaatcactggcggtgaaca

SEQ ID NO: 125104 - DNA, 75 bp, synthetic construct
  source 1..75: mol_type = other DNA
atcattgatgtgtttgccggatacatcgtggggtggcgggtctcatcgtctatggaaacgcctggacgatgtttg

SEQ ID NO: 125105 - DNA, 75 bp, synthetic construct
  source 1..75: mol_type = other DNA
gtatgcagtgaactacatattgccccgtcaacgtattaccactgtcagcaacagcgacatcatcctgataaacgc

SEQ ID NO: 125106 - DNA, 75 bp, synthetic construct
  source 1..75: mol_type = other DNA
tccctctgcatataactggtatacggaacagtatggcatgaagtggcctgtggggcgaactggaatggtcttccc

SEQ ID NO: 125107 - DNA, 75 bp, synthetic construct
  source 1..75: mol_type = other DNA
ggagaaggctgaaacagaacgccagttgaaactggctgaagctgaagagaaacgactggctgcattgagtgaaga

SEQ ID NO: 125108 - DNA, 75 bp, synthetic construct
  source 1..75: mol_type = other DNA
atttgaaaacagcacagactaatctcctgaactcgcagattaaggatgctgtggatgcaacagttagcttttatc

SEQ ID NO: 125109 - DNA, 75 bp, synthetic construct
  source 1..75: mol_type = other DNA
tcaagttcgaaaacaattgaagacgatgaaaaagatcctccagcttaccgagcaaaagaagagtatgaaaaaata

SEQ ID NO: 125110 - DNA, 75 bp, synthetic construct
  source 1..75: mol_type = other DNA
cagaagaaaaagcccgtaaagaagcggaagcagcagaaaaggcttttcaggcagctgaacaacgacgtaaagaga

SEQ ID NO: 125111 - DNA, 75 bp, synthetic construct
  source 1..75: mol_type = other DNA
ccgcgtaaaccgtcagttcgtgggagaacgtcctgaccagctgtgggtggctgattttacttacgtcagcacatg

SEQ ID NO: 125112 - DNA, 75 bp, synthetic construct
  source 1..75: mol_type = other DNA
gccgggactgaaaaaactgctcaggacattatcggcaggtgacacgctgattatctggaaactggactggctggg

SEQ ID NO: 125113 - DNA, 75 bp, synthetic construct
  source 1..75: mol_type = other DNA
gggagtcttccattctaatggcgatttggctctttacaccagtttaatgctgcactttcgttaccttctaaaaga

SEQ ID NO: 125114 - DNA, 75 bp, synthetic construct
  source 1..75: mol_type = other DNA
gtgcaatcacttactacggcgctggaaaatctactgcgccatttgtcgcaagagattccggcgacacccggcatt

SEQ ID NO: 125115 - DNA, 75 bp, synthetic construct
  source 1..75: mol_type = other DNA
ggtcgcgttggtctcaagcaggttgatgttggtaaccaaatctccagtggtgataccaccgggattgtggtgatc

SEQ ID NO: 125116 - DNA, 75 bp, synthetic construct
  source 1..75: mol_type = other DNA
cacgctttaataatcaggatgatgcgctgtttcccaatcagtttgttaacgcgcgcatgttagtcgacaccgaac

SEQ ID NO: 125117 - DNA, 75 bp, synthetic construct
  source 1..75: mol_type = other DNA
atgagcccgtcgtccggtgatgctcttctctgttttgtaaaaaggacggtattctacatagcaacagcagcagat

SEQ ID NO: 125118 - DNA, 75 bp, synthetic construct
  source 1..75: mol_type = other DNA
acagtgataaaggttctcagtatgtatcgctggcctacacgcagcggcttaaggaagccggcttactggcatcaa

SEQ ID NO: 125119 - DNA, 75 bp, synthetic construct
  source 1..75: mol_type = other DNA
ggcttccgcttattttgcaaaggcggagttcgaccgcctctggaaaaaatgatgccactgctggataagctgcgt

SEQ ID NO: 125120 - DNA, 75 bp, synthetic construct
  source 1..75: mol_type = other DNA
aatattttttatcctattcaaccgtcagtcaattatctaacccagcgcggtgtaaccttttctggatttgagcgg

SEQ ID NO: 125121 - DNA, 75 bp, synthetic construct
  source 1..75: mol_type = other DNA
gagcagtacggggtcggaccggtatgcagcgaactgcatattgccccgtcaacgtattaccattgtcagcaacag

SEQ ID NO: 125122 - DNA, 75 bp, synthetic construct
  source 1..75: mol_type = other DNA
ttcgcaagtccggtcaatgcggcagcgatgatggctgccagtcgtcgactgaatctgaattgctaccatttttac

SEQ ID NO: 125123 - DNA, 75 bp, synthetic construct
  source 1..75: mol_type = other DNA
ttacaacaacatttacgtggagattcttgtgctgctggaagtcgggatagcgcttttgttgctacaacaacaagt

SEQ ID NO: 125124 - DNA, 75 bp, synthetic construct
  source 1..75: mol_type = other DNA
ctggctggccagtcagcaaacgtacccgcaattctactggcaacaacgtaatggtgatgaagaagctgccgtcct

SEQ ID NO: 125125 - DNA, 75 bp, synthetic construct
  source 1..75: mol_type = other DNA
ccgcaattttactggcaacaacgcaatggcgatgaagaagccgctgtgttgggcgcgttagttaattttcattca

SEQ ID NO: 125126 - DNA, 75 bp, synthetic construct
  source 1..75: mol_type = other DNA
atgcctctgctggataagctgcgtgagcagtacggggtcggaccggtatgcagtgaactgcatattgccccgtca

SEQ ID NO: 125127 - DNA, 75 bp, synthetic construct
  source 1..75: mol_type = other DNA
aaatggagaaaatgttgatgttgttacattttatgacgcacggcctgtcctgaaaacattattggttagtacatc

SEQ ID NO: 125128 - DNA, 75 bp, synthetic construct
  source 1..75: mol_type = other DNA
gaaaaagacgtttcccgtgttcacaggctggcggcgcagtatgccagccaggcacttcagcccctgcttgatgac

SEQ ID NO: 125129 - DNA, 75 bp, synthetic construct
  source 1..75: mol_type = other DNA
gggctgggttacgttaccgtattcctcgatctggtactggctccggcaacaccgtctaacaccgcgcgtgcgggc

SEQ ID NO: 125130 - DNA, 75 bp, synthetic construct
  source 1..75: mol_type = other DNA
gtagtgcctatatcgtagctatgttaccggtatttgccatgctggcgaatgtctccggtgcaccgttaatgttaa

SEQ ID NO: 125131 - DNA, 75 bp, synthetic construct
  source 1..75: mol_type = other DNA
acacctgtgaaattacgttttgcaatggcatcaatgggacaccctgagacaaaagtcagtagtgtcagcgccagt

SEQ ID NO: 125132 - DNA, 75 bp, synthetic construct
  source 1..75: mol_type = other DNA
tccgactgccaccagttgctgcgtgtgctgcaaggaaatcccgctcgatgccgccttcaccccggaaggcgcgga

SEQ ID NO: 125133 - DNA, 75 bp, synthetic construct
  source 1..75: mol_type = other DNA
gagtgctatcagcgcttccaggcgcgcgccaagaccgggagcgaaaccgatgccgatccgaacgcctgcgactca

SEQ ID NO: 125134 - DNA, 75 bp, synthetic construct
  source 1..75: mol_type = other DNA
accagagagcagttaatagctcacgcagaggagactattgaaacacagagactgtgcataccgggcacaatcgac

SEQ ID NO: 125135 - DNA, 75 bp, synthetic construct
  source 1..75: mol_type = other DNA
aaaagcgccgacggcaccggcaggcaataattccgcgcagcttgcaaacacggcctttgtgcaggcagtggtaac

SEQ ID NO: 125136 - DNA, 75 bp, synthetic construct
  source 1..75: mol_type = other DNA
ggattgccgggcatcattatgctgctggtcaccccgctggtgatttacaccatgtatccgccagaaattaagaag

SEQ ID NO: 125137 - DNA, 75 bp, synthetic construct
  source 1..75: mol_type = other DNA
cctacgttgggcttgaatgcatatttgatttctggcgaaaaagacgagcgtatcgggagcgatatgcgtatttat

SEQ ID NO: 125138 - DNA, 75 bp, synthetic construct
  source 1..75: mol_type = other DNA
atggcggcatggagcgagcttctggggcgttttatcgtcgaagagaatacgccgcttgagttaaaagccgttgat

SEQ ID NO: 125139 - DNA, 75 bp, synthetic construct
  source 1..75: mol_type = other DNA
ctggtaaagcagttaacctggcaactgaggaaagcgaagccggactgtaaattgccgggtaaggcgatggactac

SEQ ID NO: 125140 - DNA, 75 bp, synthetic construct
  source 1..75: mol_type = other DNA
ggaaggttgtggtgggagagtgatcctaaagcccgaacgttggatcaatttataaggagtttaagcagtggcaat

SEQ ID NO: 125141 - DNA, 75 bp, synthetic construct
  source 1..75: mol_type = other DNA
tttacgtttcaacagttgaggacgccataggctggcatcagcatttgcgtaaatcaggctataagcgttgcggat

SEQ ID NO: 125142 - DNA, 75 bp, synthetic construct
  source 1..75: mol_type = other DNA
ggagaaacgcgtcagcgcgtagcattaatttatgatgtaggagtgtcaacactataccgaaaatttcctgtaggc

SEQ ID NO: 125143 - DNA, 75 bp, synthetic construct
  source 1..75: mol_type = other DNA
cactttatttctgcattgcacggcagcggggttggcaatctgtttgaatcggtgcgcgaggcttatgacagttcg

SEQ ID NO: 125144 - DNA, 75 bp, synthetic construct
  source 1..75: mol_type = other DNA
atgttacgggttctctgattgataacactatggggtcagcttcctcagcatctggagtttttaatgttggttcta

SEQ ID NO: 125145 - DNA, 75 bp, synthetic construct
  source 1..75: mol_type = other DNA
gaactggtcaaaaaattgtcaccaagagctaatgatccgcttcagagtcgtccttttttctatgccaccagtcga

SEQ ID NO: 125146 - DNA, 75 bp, synthetic construct
  source 1..75: mol_type = other DNA
ttgtctggaagctggatcgtcttgggcggagtatgcggaacttggtcattctggtggaggaactaaagcaacgtt

SEQ ID NO: 125147 - DNA, 75 bp, synthetic construct
  source 1..75: mol_type = other DNA
ataagtttgttggatcttgaaaaaatggctgcacataatttacaaattttgacttcttatcagaagagaacctac

SEQ ID NO: 125148 - DNA, 75 bp, synthetic construct
  source 1..75: mol_type = other DNA
tagtgtcgtatatcgccgggatcttatgctccgggttggtaggctcaaagttatctgcctggaccggttacagtg

SEQ ID NO: 125149 - DNA, 75 bp, synthetic construct
  source 1..75: mol_type = other DNA
atggtattgatgtaccgggtgagatttcgttaattggctttgatgatgtgctggtgtcacgctatgtgcgtccgc

SEQ ID NO: 125150 - DNA, 75 bp, synthetic construct
  source 1..75: mol_type = other DNA
ggtaaaaaggtccgtactaccgtcagccggaaagccgttgccgcaggcgaccgcgtaaaccgtcagtttgtggca

SEQ ID NO: 125151 - DNA, 75 bp, synthetic construct
  source 1..75: mol_type = other DNA
gtgcgggcggtgatccagctcgcgcacgggctgggcatggaggtggtagccgagggtgtggaaaggcactgttgc

SEQ ID NO: 125152 - DNA, 75 bp, synthetic construct
  source 1..75: mol_type = other DNA
tgaggaaagcgaagccggactgtaaattaccggataaagcgatggactacctgaagcgaaacggactgataagcg

SEQ ID NO: 125153 - DNA, 75 bp, synthetic construct
  source 1..75: mol_type = other DNA
gcgtacgtaaacgcggcaaaatcaccgatgctgtagagaaattctccgtaatcaaaacgttgcaggcgattgaag

SEQ ID NO: 125154 - DNA, 75 bp, synthetic construct
  source 1..75: mol_type = other DNA
gatattttacgatgacctggcctgaagcattcacaacggtaggaattgcgatggcggtggcgctggtggtgtatt

SEQ ID NO: 125155 - DNA, 75 bp, synthetic construct
  source 1..75: mol_type = other DNA
ggggaaaaatattccagaatagctcaggatttagctgaaaaggcgaagggtagtaaatttagtagtgttgatgaa

SEQ ID NO: 125156 - DNA, 75 bp, synthetic construct
  source 1..75: mol_type = other DNA
atggagcagcagaaaaatgttgcttatctgcgtccggtaattgcctggtcgccgacggaagaattcaccgtttcc

SEQ ID NO: 125157 - DNA, 75 bp, synthetic construct
  source 1..75: mol_type = other DNA
agatagcggcatctacattaggtatggcagaatcatctaatactgtcgtaaatagacaaggtggtggtggttatg

SEQ ID NO: 125158 - DNA, 75 bp, synthetic construct
  source 1..75: mol_type = other DNA
cgtcgcgcctgtttattatgcgtccggtggccaccacgctgctgatggtggcgatcttactcgccgggattatcg

SEQ ID NO: 125159 - DNA, 75 bp, synthetic construct
  source 1..75: mol_type = other DNA
tacagtgggtaaaactctatgaaacgtccggtgatgcaggatttgtatgccgtcgctgtggcatttctcggccca

SEQ ID NO: 125160 - DNA, 75 bp, synthetic construct
  source 1..75: mol_type = other DNA
ccgccgttgccagcatgaagatttttgctggcagtgaagtgtcgatcttcacactggagaaagcatattccgcag

SEQ ID NO: 125161 - DNA, 75 bp, synthetic construct
  source 1..75: mol_type = other DNA
caggaatgaagaactgacggttggtgcatccacggctacgatttttgaggacagaacaaaaaatggcctcgaata

SEQ ID NO: 125162 - DNA, 75 bp, synthetic construct
  source 1..75: mol_type = other DNA
agtggcagtagctgcgttggccatcaaacttcttaccttcatcaacagtcaggatctaggaagcctgttcagtat

SEQ ID NO: 125163 - DNA, 75 bp, synthetic construct
  source 1..75: mol_type = other DNA
aatgaagagcatatacaggaacagaattacaagcttgaacttgaactgagaaaattgaaacgatgtctatgtcaa

SEQ ID NO: 125164 - DNA, 75 bp, synthetic construct
  source 1..75: mol_type = other DNA
gggatgagggcttgctggcttatttaacgcaagaccaatccaatactatggatgataaaattgagaaaataaaat

SEQ ID NO: 125165 - DNA, 75 bp, synthetic construct
  source 1..75: mol_type = other DNA
ccgactcgtacttatcgcggccacgctgctgataaaaaaaagcgaagaagaaataaggtaggaggaagagatgga

SEQ ID NO: 125166 - DNA, 75 bp, synthetic construct
  source 1..75: mol_type = other DNA
acgtattaccactgtcagcaacagcgacaccatcctgataaacgcaatgcccgtgcgcagcgcgatgactgcctg

SEQ ID NO: 125167 - DNA, 75 bp, synthetic construct
  source 1..75: mol_type = other DNA
acgtattaccaatgtcagcaacagcgacatcatccagataaacgcagtgcccgtgcacagcacgatgactggctg

SEQ ID NO: 125168 - DNA, 75 bp, synthetic construct
  source 1..75: mol_type = other DNA
tgctgttttatcatatatctatgaacagtctggattctccattgatctgaataaatgttttgtgcggctattcaa

SEQ ID NO: 125169 - DNA, 75 bp, synthetic construct
  source 1..75: mol_type = other DNA
ataaaagaggtcatcattattgatggtgatgatttcgggcagaagaaggtggagcagatccgccatattatgccc

SEQ ID NO: 125170 - DNA, 75 bp, synthetic construct
  source 1..75: mol_type = other DNA
tctggcaactctccggtaactccggatagttggataagctgtagtgagcgaatgccggacgataaacagtatgtt

SEQ ID NO: 125171 - DNA, 75 bp, synthetic construct
  source 1..75: mol_type = other DNA
atcgcttctggcgcatcgctcggcggccgtttttcatgacggtatccgcccgatcctgccgcaactgattgaagg

SEQ ID NO: 125172 - DNA, 75 bp, synthetic construct
  source 1..75: mol_type = other DNA
cgatcctgccgcaactgattgaaggctatatgaaccgtcgcgaggcggggagtatcgcttttggtctgagcattg

SEQ ID NO: 125173 - DNA, 75 bp, synthetic construct
  source 1..75: mol_type = other DNA
cgctcacgacattttttaagattttacagtcgcttgaactctcaatgacgctatgcgacacgaaaaatgcctcgc

SEQ ID NO: 125174 - DNA, 75 bp, synthetic construct
  source 1..75: mol_type = other DNA
atgcacagtagaacggctgatgaaggtgatggggcttgccggtgtgcgccggggtaaaaaggtccgcaccacagt

SEQ ID NO: 125175 - DNA, 75 bp, synthetic construct
  source 1..75: mol_type = other DNA
gattttatcgattgtgttattgaagaaatgcctttccctatacagcgcttacagacagaccggggaagagagttt

SEQ ID NO: 125176 - DNA, 75 bp, synthetic construct
  source 1..75: mol_type = other DNA
tccaaataagccagcctcacctcatcttaatggcaaagttgaacgttctcaaaagacagacaaagccgagtttta

SEQ ID NO: 125177 - DNA, 75 bp, synthetic construct
  source 1..75: mol_type = other DNA
gtggtctcagttcccactattttgctcagtgcttcgcaacaggtttcccaggttcggttctgcggcaactcatgt

SEQ ID NO: 125178 - DNA, 75 bp, synthetic construct
  source 1..75: mol_type = other DNA
tagcgcctctggtggataccctgcgtggtacgcacggggtcggaccggtatgccacgagctggctgtcgccccgt

SEQ ID NO: 125179 - DNA, 75 bp, synthetic construct
  source 1..75: mol_type = other DNA
cgcgaagtctgagcaggtgaaaaaagatgtattgcacaatacacaaagtgcgaccgagggagacgaaacgaaaca

SEQ ID NO: 125180 - DNA, 75 bp, synthetic construct
  source 1..75: mol_type = other DNA
gaaagccatagccgtcgccctaaacattcaccatcaacgaaaaccggcgctggcgaagtcgctctgattctggag

SEQ ID NO: 125181 - DNA, 75 bp, synthetic construct
  source 1..75: mol_type = other DNA
attgcacgtctcaaacgccagctggcagaacgggatgaagagctggctatcctccaaaaggccgcgacatacttc

SEQ ID NO: 125182 - DNA, 75 bp, synthetic construct
  source 1..75: mol_type = other DNA
atcttatcgtgacgcaattgcgtgagatcaaacaaaaacggcaggttttagtagtcacgcacaacgctaacatcg

SEQ ID NO: 125183 - DNA, 75 bp, synthetic construct
  source 1..75: mol_type = other DNA
accgccaggtgacgccactgcaactctcggaacaagggaaaatctttcattcgcagatccgccatctgttgcaac

SEQ ID NO: 125184 - DNA, 75 bp, synthetic construct
  source 1..75: mol_type = other DNA
tcatcacttctgatgagcagaatcatgagtcgctcaaaccgttgatttccatgtggctcagtattgccgccacca

SEQ ID NO: 125185 - DNA, 75 bp, synthetic construct
  source 1..75: mol_type = other DNA
aaaatccgcctgctggggataagcaaacgtggtgatacatatctgcgaaccctgtttattcatggcgcaagggca

SEQ ID NO: 125186 - DNA, 75 bp, synthetic construct
  source 1..75: mol_type = other DNA
atgcccgcctgaagcggcaactggcggagcaggcagaggaactggctatcctccaaaaggccgcgacatactttg

SEQ ID NO: 125187 - DNA, 75 bp, synthetic construct
  source 1..75: mol_type = other DNA
gagcttcggtgaaatcaacatgatgttgagcgcgctgtttggcgtgaagcccgcctggttcagcgatccgaccac

SEQ ID NO: 125188 - DNA, 75 bp, synthetic construct
  source 1..75: mol_type = other DNA
atgctaaatccccgtcaggtgatcggctggaagtcaaagataaccggcggcaaggtggtgctcaccgaactgcgc

SEQ ID NO: 125189 - DNA, 75 bp, synthetic construct
  source 1..75: mol_type = other DNA
caacgttgatgttcgcactgagctggatgtcgagtcgaaagagtttaacccgcctgcggcgctggctattcagtc

SEQ ID NO: 125190 - DNA, 75 bp, synthetic construct
  source 1..75: mol_type = other DNA
gaaacacccctgaagggtgttctgcctttgataataacacttgcttatcatgctcttttgtgaataaaaagattg

SEQ ID NO: 125191 - DNA, 75 bp, synthetic construct
  source 1..75: mol_type = other DNA
cccggaaaaccgggcagccggcgaaaccgtcgcgcagctgcttcacaaatcaaaagccgcacaggcgactgagta

SEQ ID NO: 125192 - DNA, 75 bp, synthetic construct
  source 1..75: mol_type = other DNA
cgggatttattcaaccgcggtgccgggtatcggcatacgtttcagtcgtggtgggaataaagtgaatataatgta

SEQ ID NO: 125193 - DNA, 75 bp, synthetic construct
  source 1..75: mol_type = other DNA
atggcagtgatttatatcgccggtcccatgaccggatgcaaagaccacaacaggacggcgtttttcacagaggcg

SEQ ID NO: 125194 - DNA, 75 bp, synthetic construct
  source 1..75: mol_type = other DNA
tacgctgaccaataaccagagtggtgtaaagtatcgccctaatgaccagacaggcttttaccagtccattaccgc

SEQ ID NO: 125195 - DNA, 75 bp, synthetic construct
  source 1..75: mol_type = other DNA
tccggggtaaaaaggtccgtacgaccatcagccggaaagccgttgccgcaggcgaccgcgtaaaccgtcagttcg

SEQ ID NO: 125196 - DNA, 75 bp, synthetic construct
  source 1..75: mol_type = other DNA
gctgccggaagtggactatccgaccattcaggtagtcacgctctacccaggtgcgagcccggatgtcatgacctc

SEQ ID NO: 125197 - DNA, 75 bp, synthetic construct
  source 1..75: mol_type = other DNA
tccgatcgtaccggttatggcatgagcatgacctggaatggcctgaaaaccgatccggaaaatggcatcgtggtt

SEQ ID NO: 125198 - DNA, 75 bp, synthetic construct
  source 1..75: mol_type = other DNA
cattcttcggtctggcgatgcagtatggactctcccacgcgctggtggattatcccagggtggacaccgaaaagg

SEQ ID NO: 125199 - DNA, 75 bp, synthetic construct
  source 1..75: mol_type = other DNA
gaaaccgaaggcacaattaaagccgaccaggccgccgtcgccagcgcccagctgcagctcgactggagccgcatc

SEQ ID NO: 125200 - DNA, 75 bp, synthetic construct
  source 1..75: mol_type = other DNA
ataataagattgatgaatttagtggtgtcgtgtgtaataatggttgctggattgatggtgaaggaatatacaaca

SEQ ID NO: 125201 - DNA, 75 bp, synthetic construct
  source 1..75: mol_type = other DNA
gcggatgccattcgttataatgctcgaatgcctctgcaaggttctttgctgccgttaacccgtctggtttgggta

SEQ ID NO: 125202 - DNA, 75 bp, synthetic construct
  source 1..75: mol_type = other DNA
gttttgtggcctcggtggggatctcttttaccctgaaaaccggcctgctcaatgcatggctgctttttcttccta

SEQ ID NO: 125203 - DNA, 75 bp, synthetic construct
  source 1..75: mol_type = other DNA
attttaggtgagcaggatgattcatctaataagactaatggcgtaggaaaatcgcttcttgtagagttcattaat

SEQ ID NO: 125204 - DNA, 75 bp, synthetic construct
  source 1..75: mol_type = other DNA
ccacgaaagcgatgcatcgtcgttactggtttactgatgttcatgctcgtggatattatccgcaacatatgctga

SEQ ID NO: 125205 - DNA, 75 bp, synthetic construct
  source 1..75: mol_type = other DNA
aatggtctttacaaagcggaggtaatacaccgtaagagctggaaaaaccgtgcagaagtggaactggccacactc

SEQ ID NO: 125206 - DNA, 75 bp, synthetic construct
  source 1..75: mol_type = other DNA
taagctatatacagtaaatagactttataaagaaaaagctagtgtttttgagcaggcgggggggtttaaaagcct

SEQ ID NO: 125207 - DNA, 75 bp, synthetic construct
  source 1..75: mol_type = other DNA
aaaaaccgcgccgaagtggaactggccacactgacgtgggtggactggtacaataaccgacggttgctggaacga

SEQ ID NO: 125208 - DNA, 75 bp, synthetic construct
  source 1..75: mol_type = other DNA
ctgttttctatgttgctacagcggtgaatattagccgtctcaagctgattggctatttctttacatcgttcattg

SEQ ID NO: 125209 - DNA, 75 bp, synthetic construct
  source 1..75: mol_type = other DNA
attacccaaaatcgtcaggcactgagcaacattaccgctatcctcccggatgacaacaaagtgatgatgagctcc

SEQ ID NO: 125210 - DNA, 75 bp, synthetic construct
  source 1..75: mol_type = other DNA
taccaggcggtacattacgagttagttgccagtgccctggcggtacagactggaaaatcgatcaatcctgaattt

SEQ ID NO: 125211 - DNA, 75 bp, synthetic construct
  source 1..75: mol_type = other DNA
tcaagctgaacatgccggtgtcattcccggaaaatcgggcggccggcgaaactgtcgcacagctgtttggcaaat

SEQ ID NO: 125212 - DNA, 75 bp, synthetic construct
  source 1..75: mol_type = other DNA
atcatcgtccatggaaacgacattcgtgctggatgcactggagcaggcgttatgggcccgtcgaccgtccggcac

SEQ ID NO: 125213 - DNA, 75 bp, synthetic construct
  source 1..75: mol_type = other DNA
gagccgaatgaagagggtttacaattttatgatgatctgttcgatgaatgccttaagcagggaatggaacctgtg

SEQ ID NO: 125214 - DNA, 75 bp, synthetic construct
  source 1..75: mol_type = other DNA
tcggtctggcagcagcaattgccacgctgatcttcctgctggtgggtgcgctggcgatagtgaacctgaaagcca

SEQ ID NO: 125215 - DNA, 75 bp, synthetic construct
  source 1..75: mol_type = other DNA
atacataagtatggtgctcatatatttcatacaaacgatcaatatatctggaattatataaataaattcgcttct

SEQ ID NO: 125216 - DNA, 75 bp, synthetic construct
  source 1..75: mol_type = other DNA
cgctggcgcgtaccgagcggaaatccggttccggttatactggttttacctgctatgccgcaccagatgttacgc

SEQ ID NO: 125217 - DNA, 75 bp, synthetic construct
  source 1..75: mol_type = other DNA
aaatgcattgctgacttcaaaaaaccatttgaagttgtaccacagagccatttgtggatgttgaatccattaaat

SEQ ID NO: 125218 - DNA, 75 bp, synthetic construct
  source 1..75: mol_type = other DNA
attgacgcctggcgtaaaccgcagcgtgtcgagcaactggcgttgaccagcgaggccgatgtacgcggcagaacc

SEQ ID NO: 125219 - DNA, 75 bp, synthetic construct
  source 1..75: mol_type = other DNA
gtgaagatttatctggtcggtggtgcggttcgggatgcgttgttagggctaccggtcaaagaccgagattgggta

SEQ ID NO: 125220 - DNA, 75 bp, synthetic construct
  source 1..75: mol_type = other DNA
acccgcaaaactgttcctgaatacccagatcccagcggccttatggtttatgcgccgagatcgtgaaaacagcag

SEQ ID NO: 125221 - DNA, 75 bp, synthetic construct
  source 1..75: mol_type = other DNA
tggcgcattgactacggtaaaacgccagcatcgccccgctcttgatctttctcgactgcctgaacttttgtcgcg

SEQ ID NO: 125222 - DNA, 75 bp, synthetic construct
  source 1..75: mol_type = other DNA
ttagcattgggtttataccctgatgtctctttatcagaggcgcgtttaaaacgtgatgaagcaagaaaattgatt

SEQ ID NO: 125223 - DNA, 75 bp, synthetic construct
  source 1..75: mol_type = other DNA
aagaacgtgaaatcatcgaaaactggcgttatgaatatgcgattccttactacgaagaagatcaggtagaaatcg

SEQ ID NO: 125224 - DNA, 75 bp, synthetic construct
  source 1..75: mol_type = other DNA
ttgtagcgaatgactataacctgtcagtgagcagctatgtggaagcgaaagataaccgcgaaattatcgatattg

SEQ ID NO: 125225 - DNA, 75 bp, synthetic construct
  source 1..75: mol_type = other DNA
tagcgactgatatattagacttagcaacaactcttcagcaagaagttgatgataaaaatgacatagagtatgcaa

SEQ ID NO: 125226 - DNA, 75 bp, synthetic construct
  source 1..75: mol_type = other DNA
cggggaaatcgtggcgtgggaaactgcctgcaggcctacagaggagctggtgaagcggatgttaaataaggggct

SEQ ID NO: 125227 - DNA, 75 bp, synthetic construct
  source 1..75: mol_type = other DNA
atgacaagtattcaacaacgtgcagagcttcatcgccagatctggcaaattgctaacgatgtcagggggtcagtc

SEQ ID NO: 125228 - DNA, 75 bp, synthetic construct
  source 1..75: mol_type = other DNA
gaaatgacattcagtatattacggatgcctgtgaaggatgtgtgaggtttattgatataccctgtcatatcatca

SEQ ID NO: 125229 - DNA, 75 bp, synthetic construct
  source 1..75: mol_type = other DNA
gaatacataacttactggaatcaaaaaagaataaaactcagtcttgggggactcaacccggtagaataccggact

SEQ ID NO: 125230 - DNA, 75 bp, synthetic construct
  source 1..75: mol_type = other DNA
tggaagatgatcttcagcgtcgcgatctgactatcaatgcgctggcccaggatgatgacggcgatattatcgatc

SEQ ID NO: 125231 - DNA, 75 bp, synthetic construct
  source 1..75: mol_type = other DNA
ttggtcatttaatcaaccgccgtagcaaagtgctttctgacgaagatatcaaaactattgctgacacctaccata

SEQ ID NO: 125232 - DNA, 75 bp, synthetic construct
  source 1..75: mol_type = other DNA
atgggactcgctgcagaaaatatccttcagcgacagttcaaagcggaagctccctgtgagaaatgggtgacagat

SEQ ID NO: 125233 - DNA, 75 bp, synthetic construct
  source 1..75: mol_type = other DNA
gccggaagcgctggagatggcagacagtcagggcgtggaagcggcactgggctggatacagacccgtccaggcat

SEQ ID NO: 125234 - DNA, 75 bp, synthetic construct
  source 1..75: mol_type = other DNA
gcgctggtaaaagcggtggatctggtcgcccagcagcatcagaaatacgtgctaatcggcaatagctatcatgaa

SEQ ID NO: 125235 - DNA, 75 bp, synthetic construct
  source 1..75: mol_type = other DNA
ccatcacctccgggcgcgacctgctcgaccaggcgaaagtgctggcccgttatctgaacgaacagccgcagggct

SEQ ID NO: 125236 - DNA, 75 bp, synthetic construct
  source 1..75: mol_type = other DNA
ggtttacggctcttaaagctgagtttgaagcacaactggtagaagaagcacgtcttaataaagctatcgctgaaa

SEQ ID NO: 125237 - DNA, 75 bp, synthetic construct
  source 1..75: mol_type = other DNA
gaagcactggagatggcagacagtcagggcgtggaagcggcgctgggctggatacagacccgtccgggcatcacc

SEQ ID NO: 125238 - DNA, 75 bp, synthetic construct
  source 1..75: mol_type = other DNA
ggcgttttttgttggcttggggtgataaaaccgatagatacctacattgcagagcatcagtcccacgcgcaaaaa

SEQ ID NO: 125239 - DNA, 75 bp, synthetic construct
  source 1..75: mol_type = other DNA
gtgaagatttatctggtcggtggtgctgttcgggatgcattgttagggctaccgatcaaagacagagattgggcg

SEQ ID NO: 125240 - DNA, 75 bp, synthetic construct
  source 1..75: mol_type = other DNA
acagggttcagccggataatcacagacgtgcgtatgaaaaaagcaataaatctgatgagatgcaggaacagtaac

SEQ ID NO: 125241 - DNA, 75 bp, synthetic construct
  source 1..75: mol_type = other DNA
aaacgccagcatcgccccgctcttgatctttctcgcctgcctgaacttttgtcgcgtattggcagttacaagggg

SEQ ID NO: 125242 - DNA, 75 bp, synthetic construct
  source 1..75: mol_type = other DNA
aatgcgcaaagccggctggatgagtgcgctgaaagagcaggatattgttccgccggaaagctggattggcaccgg

SEQ ID NO: 125243 - DNA, 75 bp, synthetic construct
  source 1..75: mol_type = other DNA
tacagtggtgggcagattttctggatgcgaacagagaacaatgtatcagcccgtttgaatatgcaaagattaaca

SEQ ID NO: 125244 - DNA, 75 bp, synthetic construct
  source 1..75: mol_type = other DNA
cactgccagtctgacctgttaaaggccgcagggctggccagaagcacgctgtactaccagctgtcactgcagaag

SEQ ID NO: 125245 - DNA, 75 bp, synthetic construct
  source 1..75: mol_type = other DNA
ttatagagagcctgccccgggatccggcaccggtatcgctggcgcggctgcgtgcacgcctcaatctgaagtctc

SEQ ID NO: 125246 - DNA, 75 bp, synthetic construct
  source 1..75: mol_type = other DNA
tcgaacagattatgcaggtatttgccagcaaggaagatgttgcccatctggcgaaatctgtcgcgtttgaagccg

SEQ ID NO: 125247 - DNA, 75 bp, synthetic construct
  source 1..75: mol_type = other DNA
tggttgggaacgctgttgattctttcatcagtgatattgatttcaatggactcccgccgtcgcaccagaaaaata

SEQ ID NO: 125248 - DNA, 75 bp, synthetic construct
  source 1..75: mol_type = other DNA
tgacactgacaccaaacaataataacactgtacaacctgtggtcctgatgcgtcttggggtgtttgtaccgaccc

SEQ ID NO: 125249 - DNA, 75 bp, synthetic construct
  source 1..75: mol_type = other DNA
gattggatatcttgattacacggagatccagcgggggcggacaaaattcttctgtattcactaccggcgtccccg

SEQ ID NO: 125250 - DNA, 75 bp, synthetic construct
  source 1..75: mol_type = other DNA
atgagttccaccagaaagggaatgctgaacgttctaattgccgccgttttgtgggggagttcaggggtctgcgca

SEQ ID NO: 125251 - DNA, 75 bp, synthetic construct
  source 1..75: mol_type = other DNA
aaaaccatgtccctgcagatgttacgggagcatatgacgctggaagggatggcaaaactctattgccgtggcctt

SEQ ID NO: 125252 - DNA, 75 bp, synthetic construct
  source 1..75: mol_type = other DNA
ccggaagagcagaaaccagatgggggccaggagaatcagacaaatgaacctgagaacaacacagtgattttcgca

SEQ ID NO: 125253 - DNA, 75 bp, synthetic construct
  source 1..75: mol_type = other DNA
ccgactgatgctacagtggtgggccgattttctgaatgcaaacagagaaagatttatcagtccatttgaatatgc

SEQ ID NO: 125254 - DNA, 75 bp, synthetic construct
  source 1..75: mol_type = other DNA
tcccacaggacaataaccacccgacagggcatcctgtaaactggtttcatcagaaaaaaaacaaccgttcggact

SEQ ID NO: 125255 - DNA, 75 bp, synthetic construct
  source 1..75: mol_type = other DNA
gcacgttaccagtcgtcggctggagtatgctgattggcggtctgattctgttgcctttttatgccagacaaggaa

SEQ ID NO: 125256 - DNA, 75 bp, synthetic construct
  source 1..75: mol_type = other DNA
cgcctggctgcggttctgaaaggggttgaagggctaaaacttggtgacttccacgaacatcagattgacctgttc

SEQ ID NO: 125257 - DNA, 75 bp, synthetic construct
  source 1..75: mol_type = other DNA
cgagcctctgccaggcgtaaatttctcgcaccggggttccaagatgagaactccgcatcttgttcccctcagcaa

SEQ ID NO: 125258 - DNA, 75 bp, synthetic construct
  source 1..75: mol_type = other DNA
ttgcctttctggatagtgacgatatatggtaccccaataaattggaagaacagtataattgttttctttccggtc

SEQ ID NO: 125259 - DNA, 75 bp, synthetic construct
  source 1..75: mol_type = other DNA
gatgcagcaacggattatgcagtcagccattaaggccacccacaaagggaaagaactgacaaaacggcagggtaa

SEQ ID NO: 125260 - DNA, 75 bp, synthetic construct
  source 1..75: mol_type = other DNA
tgtacagtggcgcgcctcatggcgggtattggggttgccggggttctccggggggaaaaaggccggactaccgtc

SEQ ID NO: 125261 - DNA, 75 bp, synthetic construct
  source 1..75: mol_type = other DNA
tccgggctgcaaagcccactgacaaggcttataaactcactgacggggctggcatgttcctgctggtacatccta

SEQ ID NO: 125262 - DNA, 75 bp, synthetic construct
  source 1..75: mol_type = other DNA
ttgatgtcgatgaagcggtcgataaactgcgtgaagggcaaagtgactgtattttttcctttcacgacgaagatt

SEQ ID NO: 125263 - DNA, 75 bp, synthetic construct
  source 1..75: mol_type = other DNA
tcactggtggtgttttcagcccggtaccgtccggcccgtcatgatgttgttgtgtttgagggccgtacactgacg

SEQ ID NO: 125264 - DNA, 75 bp, synthetic construct
  source 1..75: mol_type = other DNA
aggcgaagaagcactttgataaccatatcattgaagaaggtttttatggtcaggagataaatcatacaaccttta

SEQ ID NO: 125265 - DNA, 75 bp, synthetic construct
  source 1..75: mol_type = other DNA
actcaatcagatatactcaataaacaattggataaattagcattgctaataaatgaggatgttattaatacagat

SEQ ID NO: 125266 - DNA, 75 bp, synthetic construct
  source 1..75: mol_type = other DNA
ttgttacatttgaaaaaatgcttaaaagtaattttataggtaacttgacaggtgcatatgcctcctctttttttg

SEQ ID NO: 125267 - DNA, 75 bp, synthetic construct
  source 1..75: mol_type = other DNA
cggcggttatgcggttccggcattcaatattcacaatctcgaaacgatgcaagtggtggtggaaaccgctgccaa

SEQ ID NO: 125268 - DNA, 75 bp, synthetic construct
  source 1..75: mol_type = other DNA
acgtcgactgatgctacagtggtgggccgattttcttgatgcgaaccgggagaaggggatcagtccgtttgaata

SEQ ID NO: 125269 - DNA, 75 bp, synthetic construct
  source 1..75: mol_type = other DNA
cattacaggaaatggcatcgaatatagttcgctcacaactggctactcttgaccttagtaccgcagaaaaagaaa

SEQ ID NO: 125270 - DNA, 75 bp, synthetic construct
  source 1..75: mol_type = other DNA
cacaaactcagctatctgcatccggtgcccgcgagcgcgccgctgttggcaagcgaaaccgggcaaatcggcgtg

SEQ ID NO: 125271 - DNA, 75 bp, synthetic construct
  source 1..75: mol_type = other DNA
aagctgattgcacaactggctatgcacgggcagacccacgttaacaaaatctacgacccggcagcaggttccggt

SEQ ID NO: 125272 - DNA, 75 bp, synthetic construct
  source 1..75: mol_type = other DNA
atggcgtgcagtgcattgattgaatcaggtttgtggtcccgcgatgctgtggaacgtcagatgagccatcaggag

SEQ ID NO: 125273 - DNA, 75 bp, synthetic construct
  source 1..75: mol_type = other DNA
gatgcagcattttctgtatcacctgtcgccaaaaggtcaggctggtgttgtactggcaaaaggggctttaacatc

SEQ ID NO: 125274 - DNA, 75 bp, synthetic construct
  source 1..75: mol_type = other DNA
atgtggaacaggggaatttgctggaacgtcaaaggtccgccagtaatcatcacgctcatccaggggggcgcttga

SEQ ID NO: 125275 - DNA, 75 bp, synthetic construct
  source 1..75: mol_type = other DNA
gggcgtcctgcgaagtcggtgtttactgtgcacaacctggcctatcaaggcatgttttatgcacatcacatgaat

SEQ ID NO: 125276 - DNA, 75 bp, synthetic construct
  source 1..75: mol_type = other DNA
acaccttacgcaaaggcagcggtgccgcttttcacgccattatgcaggaaatcagtgttcccctacaccaacgcc

SEQ ID NO: 125277 - DNA, 75 bp, synthetic construct
  source 1..75: mol_type = other DNA
caaaagcattaacgataactatggacatgaatgtggcgataaagtgttaagcgtgtttgcccagcatattcagaa

SEQ ID NO: 125278 - DNA, 75 bp, synthetic construct
  source 1..75: mol_type = other DNA
tcgtggccttcaggacatcctgattgcctgcgtggacggcctgaaaggcttcccggaagcgataaatagcgtgta

SEQ ID NO: 125279 - DNA, 75 bp, synthetic construct
  source 1..75: mol_type = other DNA
gacaactggactgggacgatatccacctgcgtatcaacagtaaaacggctgctgacgtagagcgagcgctaaatg

SEQ ID NO: 125280 - DNA, 75 bp, synthetic construct
  source 1..75: mol_type = other DNA
tgtatcccattgtttatatggactgcatcgtcgtaaaaatccgtcagaatggcagcgtaataaacaaagccgtct

SEQ ID NO: 125281 - DNA, 75 bp, synthetic construct
  source 1..75: mol_type = other DNA
gggagatcaccgtgtccgtccatgcagtgcagcccaacggcatcctggaaattcgtggcgaaaaatggctcaccc

SEQ ID NO: 125282 - DNA, 75 bp, synthetic construct
  source 1..75: mol_type = other DNA
gcgtgacggcaagaccggttgagatgatgagtccggatctgcgcgttttgagcgcggtagacggtttacctccac

SEQ ID NO: 125283 - DNA, 75 bp, synthetic construct
  source 1..75: mol_type = other DNA
gaaatttactatcgccgggactacagaagtgtagaagagctggaaaatgccgttaacgaatacataacttactgg

SEQ ID NO: 125284 - DNA, 75 bp, synthetic construct
  source 1..75: mol_type = other DNA
ttattcgcagcatcgaaaccagcattaaaacagtgatgaatctaccatcagaaagcgtggaaggtctgcggttgc

SEQ ID NO: 125285 - DNA, 75 bp, synthetic construct
  source 1..75: mol_type = other DNA
ttcgcagcatcgaaaccagcattaaaacagtgataaacctgccgttggaaagcgtggaagggctgcggttgcaat

SEQ ID NO: 125286 - DNA, 75 bp, synthetic construct
  source 1..75: mol_type = other DNA
gccaagccgggagcgcaagcggattactaccgtagcgttctggttgagggtggcattgtggaaattaccggagaa

SEQ ID NO: 125287 - DNA, 75 bp, synthetic construct
  source 1..75: mol_type = other DNA
ttgagaaccgtcgaaatactgcaatacaccttacgcaaaggcagcggtgccgcttttcacgccatcatgcaggaa

SEQ ID NO: 125288 - DNA, 75 bp, synthetic construct
  source 1..75: mol_type = other DNA
aggcattgtagaaattaccggagaaaacatcagggttgatgtttatcaggggcaaaatggtcaatcaatcactct

SEQ ID NO: 125289 - DNA, 75 bp, synthetic construct
  source 1..75: mol_type = other DNA
tgaattactgaatgcaaagattggatttgcaacttcaggaaatggcccgcagcagcaaagtagtaaccagcagaa

SEQ ID NO: 125290 - DNA, 75 bp, synthetic construct
  source 1..75: mol_type = other DNA
tggctaacgaactggccaaaaatctcaaaacccctgaagatcttagtcagttcgatcgcctgctgaagaaaatta

SEQ ID NO: 125291 - DNA, 75 bp, synthetic construct
  source 1..75: mol_type = other DNA
ccgtcgaaacggcgctcaatgcagaactgactgaccatctcggtcatgagaaaaatgctcctaaatcaggctcta

SEQ ID NO: 125292 - DNA, 75 bp, synthetic construct
  source 1..75: mol_type = other DNA
ctgggtgtatgtcaacggtgtatttaatcaggggctggataaccgccgcgcgcgggagctgtcctggtgcttaaa

SEQ ID NO: 125293 - DNA, 75 bp, synthetic construct
  source 1..75: mol_type = other DNA
tgcaaccgctggcggaggcggaatatgccgagctaaaacagctgggtctcgatggcgtgatggtttatcaggaga

SEQ ID NO: 125294 - DNA, 75 bp, synthetic construct
  source 1..75: mol_type = other DNA
tggacgatgccactgcgggactggcgtatggcaatgagccgttttattatcgagttcggtgaccgcctggacggt

SEQ ID NO: 125295 - DNA, 75 bp, synthetic construct
  source 1..75: mol_type = other DNA
tgcagccggtatggaaagactgggacagcttatctgggacgcgcctcgcaaagactatgagacggaatgtaagaa

SEQ ID NO: 125296 - DNA, 75 bp, synthetic construct
  source 1..75: mol_type = other DNA
ggcaggctgcagcaaatccgggcggaaggcgctgaccttcctggccgcaccctgaagatggttttcccgggaatg

SEQ ID NO: 125297 - DNA, 75 bp, synthetic construct
  source 1..75: mol_type = other DNA
gctgacgtagagcgggcgctcaatgtttcgcaactcactcgcgacgatatgatggcattgctatcacctgccgcc

SEQ ID NO: 125298 - DNA, 75 bp, synthetic construct
  source 1..75: mol_type = other DNA
ggcgatcaaggatgcgtcaaagaaatggagtatgccgatccggaactggcggctggcgatgagccgttttattat

SEQ ID NO: 125299 - DNA, 75 bp, synthetic construct
  source 1..75: mol_type = other DNA
gacaactggactgggacgacatccgcctgcgtatcaacagcaaaacggctgctgacgtagagcgggcgctcaatg

SEQ ID NO: 125300 - DNA, 75 bp, synthetic construct
  source 1..75: mol_type = other DNA
tacgtcccgctttatctttccaatctttgcgctaacgactgcacttactgcggattttccatgagcaatcgcatc

SEQ ID NO: 125301 - DNA, 75 bp, synthetic construct
  source 1..75: mol_type = other DNA
atgaaaaccttcagcgatcgctggcgacaactggactgggatgacatccgcctgcgtatcaacggcaaaacggct

SEQ ID NO: 125302 - DNA, 75 bp, synthetic construct
  source 1..75: mol_type = other DNA
tctgcgccttccggctgcttgcaccggagattgaactgtcactctccacgcgggaatcaccgtggtttcgcgatc

SEQ ID NO: 125303 - DNA, 75 bp, synthetic construct
  source 1..75: mol_type = other DNA
attctgtttatcgatgcccgtaatcttggtcatttgattaatcgtcgtaccaaagtgctttctgacgacgatatt

SEQ ID NO: 125304 - DNA, 75 bp, synthetic construct
  source 1..75: mol_type = other DNA
ctggcacttggtgtatatccagaagtttctctctccgaagctcgtacaaaacgggatgaggcccgaaaactgatt

SEQ ID NO: 125305 - DNA, 75 bp, synthetic construct
  source 1..75: mol_type = other DNA
tgtccccgatacttgatttgtttaacggggaaatcgtggcgtgggaaacggcctgcaggcctacagaagagctgg

SEQ ID NO: 125306 - DNA, 75 bp, synthetic construct
  source 1..75: mol_type = other DNA
atgcagcagcttggcctgaagtctcctgtgcgcctgaagaaataccggtcttatcgggggaacatgggactcgct

SEQ ID NO: 125307 - DNA, 75 bp, synthetic construct
  source 1..75: mol_type = other DNA
actgttaactgaacatggcattcaacttcttggttacgccaggaaaatcctgcgttttaatgatgaggcctgctc

SEQ ID NO: 125308 - DNA, 75 bp, synthetic construct
  source 1..75: mol_type = other DNA
caacagtctgcgcttcgtgtcatggaaggactacaaagccgtcactcgcgacctgaaagcgatttatcaggcccc

SEQ ID NO: 125309 - DNA, 75 bp, synthetic construct
  source 1..75: mol_type = other DNA
atgcgaatatgcgtccttgtgggatcaatccaaccattatttatcgtccctacagttttatggccaaaatcagcg

SEQ ID NO: 125310 - DNA, 75 bp, synthetic construct
  source 1..75: mol_type = other DNA
ttatggataacattcccggtatggtgttaatcaaccgcgttgtgccggggtacgcccatcgttgcgtttgcctgg

SEQ ID NO: 125311 - DNA, 75 bp, synthetic construct
  source 1..75: mol_type = other DNA
accgcatagcacgatggtgtttatcgggattcagctgccggaggaagagattcgggcggcgtttgcggggttgag

SEQ ID NO: 125312 - DNA, 75 bp, synthetic construct
  source 1..75: mol_type = other DNA
gaactgccgccggacgtggacggcaaaacccggctggccccgccgcgcaccgagtcacgcaatcagcttaagcgg

SEQ ID NO: 125313 - DNA, 75 bp, synthetic construct
  source 1..75: mol_type = other DNA
cgcggataaacaaaacgatatttcgtcgattgtggtggaactggattacccggtagatatcagcgaagtttcccg

SEQ ID NO: 125314 - DNA, 75 bp, synthetic construct
  source 1..75: mol_type = other DNA
gacgcgcatgttactgaataacggtcatcagcgtatcggttatctttcttccagccacggtattgaagatgacgc

SEQ ID NO: 125315 - DNA, 75 bp, synthetic construct
  source 1..75: mol_type = other DNA
atgttattgactgtatcgttaacttacctgcaaaactgttcttgaacacccagatccccgccgctctatggttta

SEQ ID NO: 125316 - DNA, 75 bp, synthetic construct
  source 1..75: mol_type = other DNA
atggtttcaggacgatggcgtgtagttctttgattgaatcgggattgtggtcgagggatgcagtagagcggcaga

SEQ ID NO: 125317 - DNA, 75 bp, synthetic construct
  source 1..75: mol_type = other DNA
gttccgggcgatggcatgtagtgcgttaatagaatcaggtttgtggtcccgcgatgctgttgaacgtcagatgag

SEQ ID NO: 125318 - DNA, 75 bp, synthetic construct
  source 1..75: mol_type = other DNA
gggctgcaaagccctctgacaaggcttataaactcactgacggggctggcatgttcctgctggttcatcctaatg

SEQ ID NO: 125319 - DNA, 75 bp, synthetic construct
  source 1..75: mol_type = other DNA
atggtgggccgattttctggatgcgaaccgggagaagggtatcagtccgtttgaatatgcaaagattaacaatcc

SEQ ID NO: 125320 - DNA, 75 bp, synthetic construct
  source 1..75: mol_type = other DNA
ggcatatgatcggactgcattacaatccgattactaacacttttaagctcggtcccggcgtagatgtgaactata

SEQ ID NO: 125321 - DNA, 75 bp, synthetic construct
  source 1..75: mol_type = other DNA
cgcttaaccgcaacggcaagtcatggctgatggcggtggtcggcgcggaatatattttgcgcatggtgcctaaag

SEQ ID NO: 125322 - DNA, 75 bp, synthetic construct
  source 1..75: mol_type = other DNA
ttatggcccggggtggacagcaatgaggccggtctgacggcgggtgccataagcctgctgggatccgccgtggca

SEQ ID NO: 125323 - DNA, 75 bp, synthetic construct
  source 1..75: mol_type = other DNA
gcaactggctactgcgcctgttgatggcccgtgttgccgaacagactggaaaaaatgaccttgccctgcatctgc

SEQ ID NO: 125324 - DNA, 75 bp, synthetic construct
  source 1..75: mol_type = other DNA
atggcttccgttcattcactcctcagtgcatgtcagacgacaccccgggatgtggctgaaccggctcaggcgcgt

SEQ ID NO: 125325 - DNA, 75 bp, synthetic construct
  source 1..75: mol_type = other DNA
gggccgcattgcacgggccacgcagaaaatcgaagaggctaaacgcgagcttaccccggctattacgcagaagcc

SEQ ID NO: 125326 - DNA, 75 bp, synthetic construct
  source 1..75: mol_type = other DNA
ccgcattatcgaagcagctaatactgcaaatgcacgtcagggaaagcgaaccggtgtcagcaccggcagcctgga

SEQ ID NO: 125327 - DNA, 75 bp, synthetic construct
  source 1..75: mol_type = other DNA
tcatcagatataacccggctctggatatggctggtgcattgaccacggtaaaacgccagcatcgccctgctctgg

SEQ ID NO: 125328 - DNA, 75 bp, synthetic construct
  source 1..75: mol_type = other DNA
cccgcgatgctgttgaacgtcagatgagccatcaggaacgtaacggtgtacgcgctgcgtatatccataaagccg

SEQ ID NO: 125329 - DNA, 75 bp, synthetic construct
  source 1..75: mol_type = other DNA
ggctccaagatgcgaacaccacaccttgtgccactcagcaaacaggctgtagccatactgacagaactacagaca

SEQ ID NO: 125330 - DNA, 75 bp, synthetic construct
  source 1..75: mol_type = other DNA
cgcaaagcctttcacggcgaagtcgtcgattttgcaacctttcgcgagcaatatcttgcagaactggcgcaacac

SEQ ID NO: 125331 - DNA, 75 bp, synthetic construct
  source 1..75: mol_type = other DNA
gttgagttcagcgaaaatggcgttatcgataatctttttgaccgtcagttagattttattatctccccacagcat

SEQ ID NO: 125332 - DNA, 75 bp, synthetic construct
  source 1..75: mol_type = other DNA
aatcgtccggcgcgcggcatgagtgagaattaccagccaggcaccgcgcctccgttaaagatggtttctgccgct

SEQ ID NO: 125333 - DNA, 75 bp, synthetic construct
  source 1..75: mol_type = other DNA
cagaagtggaactggccacactcacgtgggtggactggtataacaatcgaagattgctggaaaggccgggccata

SEQ ID NO: 125334 - DNA, 75 bp, synthetic construct
  source 1..75: mol_type = other DNA
cagaagtggaactggccacactcacgtgggtggactggtataacaatcgacgattgctggaaaggcagggccata

SEQ ID NO: 125335 - DNA, 75 bp, synthetic construct
  source 1..75: mol_type = other DNA
gtcacgtcgacagacttgcaaaactgcaactggctaatgtcagttgccataaagtcgatctcaactggccggata

SEQ ID NO: 125336 - DNA, 75 bp, synthetic construct
  source 1..75: mol_type = other DNA
acctgcggaaaaagtcagtccggagatggtggagaagcttgccttgcttgaaaaactgggtatctcgctggatga

SEQ ID NO: 125337 - DNA, 75 bp, synthetic construct
  source 1..75: mol_type = other DNA
ccgtaagagctggaaaaaccgtgcagaagtggaactggccacactcacgtgggtggactggtataacaatcgatg

SEQ ID NO: 125338 - DNA, 75 bp, synthetic construct
  source 1..75: mol_type = other DNA
gcaggttcagcggcgttcgaagttatgcgcgatatggtctacaacctggcggtgttaaccccgccgcgttgggtt

SEQ ID NO: 125339 - DNA, 75 bp, synthetic construct
  source 1..75: mol_type = other DNA
cgtcaggctacggcggacattcttcgtgaagcgaatgtacctgtgaccgaactgcgggccggaattatcgttggc

SEQ ID NO: 125340 - DNA, 75 bp, synthetic construct
  source 1..75: mol_type = other DNA
cagaagtggaactggccacactcacgtgggtggactggtataacaatcgaggattgctgggaaggccgggccata

SEQ ID NO: 125341 - DNA, 75 bp, synthetic construct
  source 1..75: mol_type = other DNA
atgagttcaccggaacgttacaacgcgatggcggagagcatcaatggtctttacaaagcggaggtaatacaccgt

SEQ ID NO: 125342 - DNA, 75 bp, synthetic construct
  source 1..75: mol_type = other DNA
ctgatgatcccagcgcatctgtttatttttcgcggcatggcaaaacgaatcgccagacttgcagaacaaagcaca

SEQ ID NO: 125343 - DNA, 75 bp, synthetic construct
  source 1..75: mol_type = other DNA
cagaagtggaactggccacactcacgtgggtggactggtataacaatcgacgattgctggcaaggccgggccata

SEQ ID NO: 125344 - DNA, 75 bp, synthetic construct
  source 1..75: mol_type = other DNA
cagaagtggaactggccacactcacgtgggtggactggtataacaatcgacgattgctgggaaggcggggccata

SEQ ID NO: 125345 - DNA, 75 bp, synthetic construct
  source 1..75: mol_type = other DNA
agctacccgtgcgttgctgggaaaagatccgaaaaagagcgattttgaagaatgtacccagatagcaactcgcta

SEQ ID NO: 125346 - DNA, 75 bp, synthetic construct
  source 1..75: mol_type = other DNA
ttaagctgtgctgaaccattaagtagcgcgctgctctctttgctgttgctggggatcaccttcacattgccggac

SEQ ID NO: 125347 - DNA, 75 bp, synthetic construct
  source 1..75: mol_type = other DNA
ttctaaaatctggaattttttctccctatgatgttcaaagcggacgtataatcacgttaggagacacgtttttag

SEQ ID NO: 125348 - DNA, 75 bp, synthetic construct
  source 1..75: mol_type = other DNA
acgtattaccactgtcagcaacagcgacatcatcctgataaacgcggtgcacatgctcagcgcgatgactggctg

SEQ ID NO: 125349 - DNA, 75 bp, synthetic construct
  source 1..75: mol_type = other DNA
agcaagctatttctttggtgggacgagatatttataattgtttgattaaggagtacactgagaaacaatggggac

SEQ ID NO: 125350 - DNA, 75 bp, synthetic construct
  source 1..75: mol_type = other DNA
cctacatgggaaggaggagtgcctgaagaaaattactgctcattacaagaggtaaacataaataaaataattgat

SEQ ID NO: 125351 - DNA, 75 bp, synthetic construct
  source 1..75: mol_type = other DNA
tacgacaataactattttaaagataaatatcaagggatcccaattggaggttataataaaataatcgaaaaactt

SEQ ID NO: 125352 - DNA, 75 bp, synthetic construct
  source 1..75: mol_type = other DNA
acgtattaccactgtcagcaacagcgacatcatcctgataaacgccgtccacatgctcagcgcgatgactggctg

SEQ ID NO: 125353 - DNA, 75 bp, synthetic construct
  source 1..75: mol_type = other DNA
acgtattaccactgtcagcaacagcgacatcatcctgataaacgcggttcacatgcgcagcgcgatgactggctg

SEQ ID NO: 125354 - DNA, 75 bp, synthetic construct
  source 1..75: mol_type = other DNA
cagaggtgctcagttatcagcaacagtttgaacattttatggcggtgagcggtaagcgccgctggttgatcccca

SEQ ID NO: 125355 - DNA, 75 bp, synthetic construct
  source 1..75: mol_type = other DNA
gcattgaccacggtaaaacgccagcatcgccctgctctcgatctttctcgcctgcctgaacttatgtcgcgtatt

SEQ ID NO: 125356 - DNA, 75 bp, synthetic construct
  source 1..75: mol_type = other DNA
agttttaagcaacgtgttagctggctgtgtgagtatttaaaggaagatgcaaaaattaaaaaagataagttagag

SEQ ID NO: 125357 - DNA, 75 bp, synthetic construct
  source 1..75: mol_type = other DNA
atgcaatgcagcaggccgcacctttctttgccgatgatgaagacattttaatgctctacggcgacgtgccgctga

SEQ ID NO: 125358 - DNA, 75 bp, synthetic construct
  source 1..75: mol_type = other DNA
atgccaccgacgagcagcgtcagtcaggagatcaacaccggcattctgatcgctaacggcgcagatatgaaacgc

SEQ ID NO: 125359 - DNA, 75 bp, synthetic construct
  source 1..75: mol_type = other DNA
attactgatatttctgctatggaggtacagtttcactctcgaagaattccatgtagcgtagtgctaaaagaaaac

SEQ ID NO: 125360 - DNA, 75 bp, synthetic construct
  source 1..75: mol_type = other DNA
atgctctacggcgacgtgccgctgatctctgtcgaaacactccagcgcctgcgtgatgctaaaccgcagggtggc

SEQ ID NO: 125361 - DNA, 75 bp, synthetic construct
  source 1..75: mol_type = other DNA
gctagttcaaacctggcgcggtatctggcaatgtcagtagaaccatttatcgggatgacggagctggaaaaatcg

SEQ ID NO: 125362 - DNA, 75 bp, synthetic construct
  source 1..75: mol_type = other DNA
gcaccatccatcacagcgataaaggctctcagtatgtgtcactggcctatatggagcgactaaaagaagccggat

SEQ ID NO: 125363 - DNA, 75 bp, synthetic construct
  source 1..75: mol_type = other DNA
ctagcggttatgctgaatttactggtttttattcgttccagtgaactcagataagcccggtggtctgaaattgat

SEQ ID NO: 125364 - DNA, 75 bp, synthetic construct
  source 1..75: mol_type = other DNA
cagtatgtgtcactgacctatacggagcgactaaaagaagcaaaactgctggcatcaacagggagtacaggtgac

SEQ ID NO: 125365 - DNA, 75 bp, synthetic construct
  source 1..75: mol_type = other DNA
gccggattactggcatcaacaggaagtactggtgactcgtatgacaacgcgatggcggagagcatcaatggcctt

SEQ ID NO: 125366 - DNA, 75 bp, synthetic construct
  source 1..75: mol_type = other DNA
gtaggcattcatggacttttcgttgaggcgttaaatgacaaagccaaggcgttttataaaagtttagactttatc

SEQ ID NO: 125367 - DNA, 75 bp, synthetic construct
  source 1..75: mol_type = other DNA
agcaacagcgacatcatcctgataaacgcagcgcccgtgcgcagcgcgatgactggctgaagagagagatacagc

SEQ ID NO: 125368 - DNA, 75 bp, synthetic construct
  source 1..75: mol_type = other DNA
aatcagggaagggtgctttataatatcggagcaaaatggacttttgcccatcgaatcgttgcaatgacattcctg

SEQ ID NO: 125369 - DNA, 75 bp, synthetic construct
  source 1..75: mol_type = other DNA
cagtacagcggcaacacaacgcccccggaatacgatgaaggggtgatggtcaggaaagtggatatcagcggaaag

SEQ ID NO: 125370 - DNA, 75 bp, synthetic construct
  source 1..75: mol_type = other DNA
gcgtaaagtctggcgccagttgttacgggaaggtatcagggtggccagatgtacagtggcacgtctcatggcggt

SEQ ID NO: 125371 - DNA, 75 bp, synthetic construct
  source 1..75: mol_type = other DNA
gcgcgctgctctctttgctgttgctggggatcaccttcacattgccggactggctgggaacgctgctgattctgt

SEQ ID NO: 125372 - DNA, 75 bp, synthetic construct
  source 1..75: mol_type = other DNA
ctcgcagttatgctgaatttactggtttttattcgttccagtgaactcagataagcccgctggtctgaaattgat

SEQ ID NO: 125373 - DNA, 75 bp, synthetic construct
  source 1..75: mol_type = other DNA
gtaattatcaaggaaatgcggtaattaattattcagaaagaaaggtaccttacacaagaatcattgaacataaac

SEQ ID NO: 125374 - DNA, 75 bp, synthetic construct
  source 1..75: mol_type = other DNA
gctcaacgtacgctaaataaatcacgcatccccgaaatggtacgttatctgctggacaatcctaaagattatgta

SEQ ID NO: 125375 - DNA, 75 bp, synthetic construct
  source 1..75: mol_type = other DNA
tatttacgttaagcagcatcaaacaagctactcgtgcgttgctgggaaaagatcctaaagagagcgattttgaag

SEQ ID NO: 125376 - DNA, 75 bp, synthetic construct
  source 1..75: mol_type = other DNA
agccttcaggcgctatggcgggtggtcaatcaaatcggcggtaaagagcgttatttctttggcaatattttgtgg

SEQ ID NO: 125377 - DNA, 75 bp, synthetic construct
  source 1..75: mol_type = other DNA
tagctggaaagtgattgtcgttgaaccggaaaaacaacttacgttgttatttggcatgaaagcgccggggctggg

SEQ ID NO: 125378 - DNA, 75 bp, synthetic construct
  source 1..75: mol_type = other DNA
cggctgatcgctttcgatgacgcggtacgtcgcaccctgaaagaagaagaaaagctggtcaactccagcgactgg

SEQ ID NO: 125379 - DNA, 75 bp, synthetic construct
  source 1..75: mol_type = other DNA
ctagccgttatgctgaatttactggtttttattcgttccagtgaactcagataagcccgctggtctgaaattgat

SEQ ID NO: 125380 - DNA, 75 bp, synthetic construct
  source 1..75: mol_type = other DNA
caggtgccggcagccggattaaatatggcgtcgtgaacgattacggggcggtgcgtgaatatgaaggagtcgtcc

SEQ ID NO: 125381 - DNA, 75 bp, synthetic construct
  source 1..75: mol_type = other DNA
ggcttccgcttattttgcgaaggcggagttcgaccgcctctggaaaaaataatgccactgctggataagctgcgt

SEQ ID NO: 125382 - DNA, 75 bp, synthetic construct
  source 1..75: mol_type = other DNA
ctagcagttatgctgaatttactggtttttattcgttccagtgaactcagataagcccgatggtctgaaattgat

SEQ ID NO: 125383 - DNA, 75 bp, synthetic construct
  source 1..75: mol_type = other DNA
tccccaaaatttttagctttgatgaaaatgatgttcctccagagttgcgcgcgcaacgcaccctcaataaatctc

SEQ ID NO: 125384 - DNA, 75 bp, synthetic construct
  source 1..75: mol_type = other DNA
atacggagcgactaaaagaagcaaaactgctggcatcaacagggagtacaggtgactcgtatgacaacgcgatgg

SEQ ID NO: 125385 - DNA, 75 bp, synthetic construct
  source 1..75: mol_type = other DNA
gtccataaatatggtgcgcacatatttcatacaaatgataaaaacatatgggactatgtcaatagtttcgttgag

SEQ ID NO: 125386 - DNA, 75 bp, synthetic construct
  source 1..75: mol_type = other DNA
ctttcaccgtccgtatcgtgaaaaaaggcacggtccccgaagaccgggaaacactttactgggctgtctctaact

SEQ ID NO: 125387 - DNA, 75 bp, synthetic construct
  source 1..75: mol_type = other DNA
aacgacctgaccagctgtgggtggctgattttacttacggtgtgcccggagttcagggcgggcatggatgcttaa

SEQ ID NO: 125388 - DNA, 75 bp, synthetic construct
  source 1..75: mol_type = other DNA
gccggaaaaccgttgccgcaggtgaccgcgtaaaccgtcagtgcgtggcagaacgtcctgaccagttgtgggtgg

SEQ ID NO: 125389 - DNA, 75 bp, synthetic construct
  source 1..75: mol_type = other DNA
agcaagcaatatctttggttggtcgagatatctacgaatgcttgataaaaggttataccgaaaaacaatggggaa

SEQ ID NO: 125390 - DNA, 75 bp, synthetic construct
  source 1..75: mol_type = other DNA
gtggctgactggcaaattccaatcatcattcttgccggagcttcgctggttgctggctttatcctgctgaaaaag

SEQ ID NO: 125391 - DNA, 75 bp, synthetic construct
  source 1..75: mol_type = other DNA
gtcaggcggcgagttctttacaccgcagcacgtctccaggctgattgcacaactggcaatgcacggccagaccca

SEQ ID NO: 125392 - DNA, 75 bp, synthetic construct
  source 1..75: mol_type = other DNA
gccgatggtgcaaaacgccgatgaagcccgtgaggcggtacgcgccacccgttatccccccgccggtattcgcgg

SEQ ID NO: 125393 - DNA, 75 bp, synthetic construct
  source 1..75: mol_type = other DNA
atcgccttcagcagggaggtgggttggttatgtgcggcaagcctggtactggtaaaaaccaccttgcgctggcaa

SEQ ID NO: 125394 - DNA, 75 bp, synthetic construct
  source 1..75: mol_type = other DNA
tgatgacattaaagacgatgccatcaaaactaaaggctacttcatctaccccagtcagcttttctgcaacgtagc

SEQ ID NO: 125395 - DNA, 75 bp, synthetic construct
  source 1..75: mol_type = other DNA
ttgcgggtactgtgatctcgttttcccgcacaacggaaaagcacaccaaagagtacatcactcacctggtacagt

SEQ ID NO: 125396 - DNA, 75 bp, synthetic construct
  source 1..75: mol_type = other DNA
gacaaccgcgaagtggtggacattgctcagctcaacgccgagctgaaatctactgtcgccaggattgaccagctt

SEQ ID NO: 125397 - DNA, 75 bp, synthetic construct
  source 1..75: mol_type = other DNA
actggctgaagaaagagatactgcgcgtatacgatgggaatcatcaggtatacggtgtgcgtaaagtctggcgtc

SEQ ID NO: 125398 - DNA, 75 bp, synthetic construct
  source 1..75: mol_type = other DNA
cacccgtgaaaacggcaaagttaccggcattgttgagcacaaagatgccaccgacgagcagcgtcagattcagga

SEQ ID NO: 125399 - DNA, 75 bp, synthetic construct
  source 1..75: mol_type = other DNA
gtgaataaccgcctgcaactctcccgactggagcgcgtttaccagtccgaacaggctgaaaaactgctgttagca

SEQ ID NO: 125400 - DNA, 75 bp, synthetic construct
  source 1..75: mol_type = other DNA
ctatcgaaaaaatgctggaagtccttggtagacctccagagcagctccctaactgcgagaccgtcttcgaaacag

SEQ ID NO: 125401 - DNA, 75 bp, synthetic construct
  source 1..75: mol_type = other DNA
gtctttacaaagcggagggaatacatcgtaagagctggaaaaaccgtgcaaaagtggaactggccacactcacgt

SEQ ID NO: 125402 - DNA, 75 bp, synthetic construct
  source 1..75: mol_type = other DNA
ttgtagcgaatgactataacctgtcggtgagcagttatgtggaagtgaaagataaccgcgaaattatcgatattg

SEQ ID NO: 125403 - DNA, 75 bp, synthetic construct
  source 1..75: mol_type = other DNA
ccgccgtactccgtgaaatgggtgggcagtgatgacccgaccctgattaacgatgaccgctttgcaccggcgggt

SEQ ID NO: 125404 - DNA, 75 bp, synthetic construct
  source 1..75: mol_type = other DNA
ttagcccatataccgtcgtggaagacgcgaatctggcggcggcctgtaccattggcccgtttgcccgtttgcgtc

SEQ ID NO: 125405 - DNA, 75 bp, synthetic construct
  source 1..75: mol_type = other DNA
atggcaatacgaaaacgctttatcgctggtgcaaaatgtccagcctgtcaggcgcaggattcaatggcgatgtgg

SEQ ID NO: 125406 - DNA, 75 bp, synthetic construct
  source 1..75: mol_type = other DNA
agttgagtttcagcaccttttttgtctcttcgatgagcgagcttttaaagcaggttgccctcgacggctgtggga

SEQ ID NO: 125407 - DNA, 75 bp, synthetic construct
  source 1..75: mol_type = other DNA
cgcatcagcccttccctgaaacgcattgccggtaccgtgatctccttttcccgcaccgatgagaagcacacccgg

SEQ ID NO: 125408 - DNA, 75 bp, synthetic construct
  source 1..75: mol_type = other DNA
catcatcgaagaaggctttttcggacaggaaatcaaccatacgacctataatctggcacgtatgaacatgttttt

SEQ ID NO: 125409 - DNA, 75 bp, synthetic construct
  source 1..75: mol_type = other DNA
actttccgttactgaattacagccgcaactcctacatgggacgattgattaatcgcactctgacgcgccacagtg

SEQ ID NO: 125410 - DNA, 75 bp, synthetic construct
  source 1..75: mol_type = other DNA
gagagttgcttaatagaggttattgggcgctctccttctatgaaaacactcaacctaatcggggaccggggcata

SEQ ID NO: 125411 - DNA, 75 bp, synthetic construct
  source 1..75: mol_type = other DNA
ttctgaccctggaaaaatgtcgcaatttttcccaggcggcagtcagtcgcaacgtctcgcaaccagcattcagcc

SEQ ID NO: 125412 - DNA, 75 bp, synthetic construct
  source 1..75: mol_type = other DNA
gtcaggcggcgagttctttacaccgcagcacgtctctaagctgattgcacaactggctatgcacgggcagaccca

SEQ ID NO: 125413 - DNA, 75 bp, synthetic construct
  source 1..75: mol_type = other DNA
ctcgcccgcgccgctgaagcgctggcagcacggtttggtgctcaggccaccgccgtgaagcccggcgtgtattaa

SEQ ID NO: 125414 - DNA, 75 bp, synthetic construct
  source 1..75: mol_type = other DNA
cccgctggtctgaaattgatattgacaatgccatgtggactattccagccgaacgcgaacctctgccaggcgtaa

SEQ ID NO: 125415 - DNA, 75 bp, synthetic construct
  source 1..75: mol_type = other DNA
ttttttaccgtggcggcgcagagcagaaaatccgtcagtatctggtcgacaataactatgtagaaaccgtgattt

SEQ ID NO: 125416 - DNA, 75 bp, synthetic construct
  source 1..75: mol_type = other DNA
tgaactgtaccagtttgacagaaaagtccttctccagcttaaggcgattaatgccctgaagcgacgggagtccgc

SEQ ID NO: 125417 - DNA, 75 bp, synthetic construct
  source 1..75: mol_type = other DNA
cacggtcagcaaaatcgaccagttgcgtaaagatattgatgcaattgtggcaaagattgaaggtgacgaggcgca

SEQ ID NO: 125418 - DNA, 75 bp, synthetic construct
  source 1..75: mol_type = other DNA
tgggattttaagcagtacgttttgggcgcgcttttttaccgttttatcagcgaaaatttttccagttatattgaa

SEQ ID NO: 125419 - DNA, 75 bp, synthetic construct
  source 1..75: mol_type = other DNA
gcagattttctggatgcgaacagagaacaatgtatcagcccgtttgaatatgcaaagattaacaatccattaaaa

SEQ ID NO: 125420 - DNA, 75 bp, synthetic construct
  source 1..75: mol_type = other DNA
aagggcgagaaagtgccggagctgtttatcgttgagttaccgcaagatgaagctggctggaaagcagcaggtgat

SEQ ID NO: 125421 - DNA, 75 bp, synthetic construct
  source 1..75: mol_type = other DNA
acgtattaccactgtcagcaacagcgacatcatcctgataaacgctgttcacatgctcagcgcgatgactggctg

SEQ ID NO: 125422 - DNA, 75 bp, synthetic construct
  source 1..75: mol_type = other DNA
taagtggaacggaaacaaccctgcccgcgccaccgcgtggcgtcgtgcagcgacgtttaacctttacgcaccatc

SEQ ID NO: 125423 - DNA, 75 bp, synthetic construct
  source 1..75: mol_type = other DNA
acgtattaccactgtcagcaacagcgacatcatcctgataaacgctgtacacatgcgcagcgcgatgactggctg

SEQ ID NO: 125424 - DNA, 75 bp, synthetic construct
  source 1..75: mol_type = other DNA
tggcgcctgaactggctaagggccttaaaaccgaagctgatcttaaccagttttcccgtatgctgactaagctga

SEQ ID NO: 125425 - DNA, 75 bp, synthetic construct
  source 1..75: mol_type = other DNA
acgtattaccactgtcagcaacagcgacatcatcctgataaacgcagtacacatgctcagcgcgatgactggctg

SEQ ID NO: 125426 - DNA, 75 bp, synthetic construct
  source 1..75: mol_type = other DNA
acgtattaccactgtcagcaacagcgacatcatcctgataaacgcagttcacatgcacagcgcgatgactggctg

SEQ ID NO: 125427 - DNA, 75 bp, synthetic construct
  source 1..75: mol_type = other DNA
atgtcccaccatctgggctacgataaaaaccagcctaaaccgggtgccaactcccgcaatggctattccacaaag

SEQ ID NO: 125428 - DNA, 75 bp, synthetic construct
  source 1..75: mol_type = other DNA
gcattgaccacggtaaaacgccagcatcgccctgctctcgatctttcacgcctgcctgaacttttgtcgcgtatt

SEQ ID NO: 125429 - DNA, 75 bp, synthetic construct
  source 1..75: mol_type = other DNA
acgtattaccactgtcagcaacagcgacatcatcctgataaacgccgttcacatgcccagcgcgatgactggctg

SEQ ID NO: 125430 - DNA, 75 bp, synthetic construct
  source 1..75: mol_type = other DNA
aaaaccagcctaaaccgggtgccaactcccgcaatggctattccacaaagaccgttatcatcggtgatggccccc

SEQ ID NO: 125431 - DNA, 75 bp, synthetic construct
  source 1..75: mol_type = other DNA
caccgcgaacgcattggcggcattatgctggatgcagatttagcacccggtgaatatcgtccattaactgaagaa

SEQ ID NO: 125432 - DNA, 75 bp, synthetic construct
  source 1..75: mol_type = other DNA
agcaactcggcgttagccgtgctattgccgggcgtgaaatccgtgcgaaccgtgtcaccgtcgatggcgaaatcg

SEQ ID NO: 125433 - DNA, 75 bp, synthetic construct
  source 1..75: mol_type = other DNA
acgtattaccactgtcagcaacagcgacatcatcctgataaacgctgtgcacatgcacagcgcgatgactggctg

SEQ ID NO: 125434 - DNA, 75 bp, synthetic construct
  source 1..75: mol_type = other DNA
aggtgccattccggaagaccgggaaacattgttctgggctgtctcaaactccttgcccggaggggggcgcggtga

SEQ ID NO: 125435 - DNA, 75 bp, synthetic construct
  source 1..75: mol_type = other DNA
gataatcgtattgcctgtgcacatgcgcaaagcggtgaagttgagtatttaaccgaaaatcacgccaaccaacct

SEQ ID NO: 125436 - DNA, 75 bp, synthetic construct
  source 1..75: mol_type = other DNA
aataatcgtattgcctgcgcacatgtacaaagcggtaaaattgattatttaaccgagggccacgccaacccacct

SEQ ID NO: 125437 - DNA, 75 bp, synthetic construct
  source 1..75: mol_type = other DNA
tgatttacagctctcttttgaacatattgcgcgacgctggcatgccagtaataaacaatgggcacaatcacacag

SEQ ID NO: 125438 - DNA, 75 bp, synthetic construct
  source 1..75: mol_type = other DNA
ggtgttatgctgcgcgatccggcgcgttttgatctgcgtggttcgcttactcacgggcgtgatgttgaaattgat

SEQ ID NO: 125439 - DNA, 75 bp, synthetic construct
  source 1..75: mol_type = other DNA
gtgcagcgacgtttaacctttacccaccatcgggcttatccggggttagtcaacgtcccgcgccactgggtgcgc

SEQ ID NO: 125440 - DNA, 75 bp, synthetic construct
  source 1..75: mol_type = other DNA
attgctggaaaggctgggccatatcctccggcagaagcagaaaaagcttattatgcttccatcggaaacgatgat

SEQ ID NO: 125441 - DNA, 75 bp, synthetic construct
  source 1..75: mol_type = other DNA
gtcgtgttggtggcagaagaccaaagtttactgacgatcagtggaaggaaattggtgaactgatagctgccggag

SEQ ID NO: 125442 - DNA, 75 bp, synthetic construct
  source 1..75: mol_type = other DNA
gatggatgggattttaagcaatacgttctgggcgcgcttttctaccgttttatcagcgaaaatttttccagctat

SEQ ID NO: 125443 - DNA, 75 bp, synthetic construct
  source 1..75: mol_type = other DNA
gtgcaaccatcaatattcacgcagtctattgatttatctctgccaacatgtcaactccaagattattggccgttt

SEQ ID NO: 125444 - DNA, 75 bp, synthetic construct
  source 1..75: mol_type = other DNA
gctggatgaaaaccagcgtcagcgtgatgcgctggagcgcagtgcgccgctgaccatcacgccgtctccggaaac

SEQ ID NO: 125445 - DNA, 75 bp, synthetic construct
  source 1..75: mol_type = other DNA
cgatggcgtgcagtgcattgattgaatcaggtttgtggtcccgcgatgctgtggaacgtcagatgagccatcagg

SEQ ID NO: 125446 - DNA, 75 bp, synthetic construct
  source 1..75: mol_type = other DNA
cagtgacttttcgatgtcacatgatgcgaggaattttgccgccggtgtcagtctgccgtatggctataccctggt

SEQ ID NO: 125447 - DNA, 75 bp, synthetic construct
  source 1..75: mol_type = other DNA
atcctgatgaaacatggcattacgatttccatcatcgacgcggagtcattgctgaaggcggcaaggtgagcaatc

SEQ ID NO: 125448 - DNA, 75 bp, synthetic construct
  source 1..75: mol_type = other DNA
gcgtgcagtgcattgattgaatcaggtttgtggtcccgcgatgctgtggaacgtcagatgagccatcaggagcgt

SEQ ID NO: 125449 - DNA, 75 bp, synthetic construct
  source 1..75: mol_type = other DNA
taatgaatatgcagtccatgagcaagttggtgcgttcacaaaccagcatttgaacggacatgccggattgatcct

SEQ ID NO: 125450 - DNA, 75 bp, synthetic construct
  source 1..75: mol_type = other DNA
acttcttatattaggggataccaatagtgcattatctgctatatcagccaaaagaagaaaaattcctatttttca

SEQ ID NO: 125451 - DNA, 75 bp, synthetic construct
  source 1..75: mol_type = other DNA
atgcttacagtaatcgctgaaatccgtactcgtcctggccaacatcaccgtcaggcggtattggatcagtttgct

SEQ ID NO: 125452 - DNA, 75 bp, synthetic construct
  source 1..75: mol_type = other DNA
ctgcaaaccccgcacatgaaggcgtacagcgaagccgtaaaaggcgacgtgctggagatgaatatccgcatcctg

SEQ ID NO: 125453 - DNA, 75 bp, synthetic construct
  source 1..75: mol_type = other DNA
attgctcataccgttgatcgcaacggcttatggcacgcgctgacgccgcaattttttcctcgtgagctgttacat

SEQ ID NO: 125454 - DNA, 75 bp, synthetic construct
  source 1..75: mol_type = other DNA
tggctggcactgaagcactggttactacgttggggatattttcagctaataaaggggtaattcctgcatttacgc

SEQ ID NO: 125455 - DNA, 75 bp, synthetic construct
  source 1..75: mol_type = other DNA
agcgtgccgattccgtgctggcaggtctgaaagccgctggcgacgcgcagtgggtattggtgcatgacgccgctc

SEQ ID NO: 125456 - DNA, 75 bp, synthetic construct
  source 1..75: mol_type = other DNA
gtgcggtcaataacgtgccctatgctgtggggatcaacaaccacatgggcagcaagatgacctctaacctgtttg

SEQ ID NO: 125457 - DNA, 75 bp, synthetic construct
  source 1..75: mol_type = other DNA
ttcctcccccgtacttgctggcaaacttgccatcgttattgatgattttggctatcgcccgcacaacgaaaacca

SEQ ID NO: 125458 - DNA, 75 bp, synthetic construct
  source 1..75: mol_type = other DNA
accggatatgggagcattcgcttctggttcgggatggttcaggctaccaggtggatatattgttcagtttggcac

SEQ ID NO: 125459 - DNA, 75 bp, synthetic construct
  source 1..75: mol_type = other DNA
ccaggacccggtgaaatttatttccagaacaggcgtacccggtatcggtgcttcatttttcgcattagggtgtta

SEQ ID NO: 125460 - DNA, 75 bp, synthetic construct
  source 1..75: mol_type = other DNA
cgtgaagcccatgaaagacctgaaggttttgaagaagcatctgttatgtttactggtatgaatgttgaaagaatt

SEQ ID NO: 125461 - DNA, 75 bp, synthetic construct
  source 1..75: mol_type = other DNA
gaggtgagcgcggctgacggccagtatctggcacaggcgaaatgggacacgccgcgggtggtgaagggggtgcgc

SEQ ID NO: 125462 - DNA, 75 bp, synthetic construct
  source 1..75: mol_type = other DNA
atgattacagtaatcgcagaaatccgtactcgccctggccaacatcaccgtcaggcggtattggatcagtttgct

SEQ ID NO: 125463 - DNA, 75 bp, synthetic construct
  source 1..75: mol_type = other DNA
cacccagatgaactcgaaagccgatgaagacgtccgtaaagagcttaatgccattgctgacgtatcagccggccg

SEQ ID NO: 125464 - DNA, 75 bp, synthetic construct
  source 1..75: mol_type = other DNA
ggtgtaggcgttcatattttcgcaagctatgtttatacaaaaaatgaagatattaataatcagttggcaaataat

SEQ ID NO: 125465 - DNA, 75 bp, synthetic construct
  source 1..75: mol_type = other DNA
aaaggtggcggcaaggcgcacacgccggtagaggcaaaggacaatcttaagtccacgcagatgatgagcgtgatt

SEQ ID NO: 125466 - DNA, 75 bp, synthetic construct
  source 1..75: mol_type = other DNA
cctagtgatttcattgcttcccttgcaggggttaagagagcccctgacattccactcatattctcaccagcatat

SEQ ID NO: 125467 - DNA, 75 bp, synthetic construct
  source 1..75: mol_type = other DNA
ccatagaaccttcaaaggagcgtgttggtttagattttaatcctgcaggaaaaggcggcttctatgtaactacag

SEQ ID NO: 125468 - DNA, 75 bp, synthetic construct
  source 1..75: mol_type = other DNA
cagcacttaagcgtaacttgagtgaaagtgagaagagtttttattttaataaaaacaatgtggataaattagaat

SEQ ID NO: 125469 - DNA, 75 bp, synthetic construct
  source 1..75: mol_type = other DNA
gaattacgcgggttgatcaccgtttttgctttcctggcttcggcctggtactgcgttgtacagtacagaaaagag

SEQ ID NO: 125470 - DNA, 75 bp, synthetic construct
  source 1..75: mol_type = other DNA
atccgggaaaacacggacggcacctttgccatcacggcggtgcagcacgtacctgaaaaagaagccatcgtggat

SEQ ID NO: 125471 - DNA, 75 bp, synthetic construct
  source 1..75: mol_type = other DNA
cagtaatcatccaggctacgcggctcgatacatcagttcttccacgcaatatcttctcgcagtcgtatctgcttt

SEQ ID NO: 125472 - DNA, 75 bp, synthetic construct
  source 1..75: mol_type = other DNA
gcggaaccgcaaacaggtcaatgcagctaacattttccggttctgttcctgacacactggtaagcagtcgcaact

SEQ ID NO: 125473 - DNA, 75 bp, synthetic construct
  source 1..75: mol_type = other DNA
gacgctggtacattttgccgctgatgctggcgtcattcaggaatttaccccgctgatgctggcggacaatggcga

SEQ ID NO: 125474 - DNA, 75 bp, synthetic construct
  source 1..75: mol_type = other DNA
atctggcgcaggctaaatgggacacgccgcgggtggtgaagggcgtgcgcttcagtctgcgcctgaccgtggcag

SEQ ID NO: 125475 - DNA, 75 bp, synthetic construct
  source 1..75: mol_type = other DNA
gctgtgcgatgttccgcaacagcaatcgccgggtgacctttcgcccacagcatgggcagcaggttttagttcgcg

SEQ ID NO: 125476 - DNA, 75 bp, synthetic construct
  source 1..75: mol_type = other DNA
gtttaagccgtgggatggtaaggaatctggcaaggctgtttatctgacctcgtaccctgtggacacgtcaaagca

SEQ ID NO: 125477 - DNA, 75 bp, synthetic construct
  source 1..75: mol_type = other DNA
ttaacttattatcacgataaaattcgagcttctgtcattgttcaacatttatccttaacagcgaacgagtatttt

SEQ ID NO: 125478 - DNA, 75 bp, synthetic construct
  source 1..75: mol_type = other DNA
cggtgtatgacccgacggtgcagtttgagttctggttttcggaggcaaaaattgcagacgccgcacaggtggaaa

SEQ ID NO: 125479 - DNA, 75 bp, synthetic construct
  source 1..75: mol_type = other DNA
tgcactatggatgaagatgattttaacctggacgcagatggccctgatatttcagcatgggaaccggaacgacca

SEQ ID NO: 125480 - DNA, 75 bp, synthetic construct
  source 1..75: mol_type = other DNA
aagcggaagagaatgaagaggttgtctttagctggattgaatacccttcaaaagaggtccgcgacgctgctactc

SEQ ID NO: 125481 - DNA, 75 bp, synthetic construct
  source 1..75: mol_type = other DNA
cggcaatccccctacgttctccctgacgccggaaggcaggctgacggcccgtaatgcggatatcagcggacatat

SEQ ID NO: 125482 - DNA, 75 bp, synthetic construct
  source 1..75: mol_type = other DNA
ccctgcaacgctggctcgggatagcgaagcgttattaaaagcaggatataccattgcgcgactggcgatgctgga

SEQ ID NO: 125483 - DNA, 75 bp, synthetic construct
  source 1..75: mol_type = other DNA
ccggagctgaaactgtactgggtgtggaagtgacgaaggcaaaaccggtgacacgcaccattacgtcagcgaaca

SEQ ID NO: 125484 - DNA, 75 bp, synthetic construct
  source 1..75: mol_type = other DNA
tgcagcatggatgaagattatttaaatccggttgcagatgaccccgatatttccgcctgggaaccggaacgacca

SEQ ID NO: 125485 - DNA, 75 bp, synthetic construct
  source 1..75: mol_type = other DNA
atggccgctaaggctgcgccattgtttaaagagtttggcgcgcttcgtattgtcgaatgctgggccagcgatgta

SEQ ID NO: 125486 - DNA, 75 bp, synthetic construct
  source 1..75: mol_type = other DNA
gtcacggtaaatgaagactgtacgattaagggcatgctggaggcgactcaggtcagaggtgacttcgttaaagct

SEQ ID NO: 125487 - DNA, 75 bp, synthetic construct
  source 1..75: mol_type = other DNA
tagaacgtgatgaatatggctgctggacacatccggagtatgaaaagttttgcgcaggtcgtgaatatatttcca

SEQ ID NO: 125488 - DNA, 75 bp, synthetic construct
  source 1..75: mol_type = other DNA
atgcagaaagctaattttcagcttttagcggcagcaccagaattacttgaagccctgcaagcggtggttcgtgtt

SEQ ID NO: 125489 - DNA, 75 bp, synthetic construct
  source 1..75: mol_type = other DNA
gacacatcctgaatatgaaaaattctgtgacggtcgggaatatatttcaacggaagagtttaacgcctggatgga

SEQ ID NO: 125490 - DNA, 75 bp, synthetic construct
  source 1..75: mol_type = other DNA
gcttccgctacagcttcagcgccctgaaggaccgtcacacggcggtggaggtgaactggaccgacccgcagaatg

SEQ ID NO: 125491 - DNA, 75 bp, synthetic construct
  source 1..75: mol_type = other DNA
gtgaagtgacacttccggagaccggtgccgccacggtgaacctgattaacggcagcggtaagccggtgagtgtgg

SEQ ID NO: 125492 - DNA, 75 bp, synthetic construct
  source 1..75: mol_type = other DNA
cacccagatgaactctaaagccgatgatgacgtccgtaaagagcttaatgccattgctgacgtatcagccggccg

SEQ ID NO: 125493 - DNA, 75 bp, synthetic construct
  source 1..75: mol_type = other DNA
cacccagatgaactcaaaagccgatgaggacgtccgtaaagagcttaatgccattgctgacgtatcagccggccg

SEQ ID NO: 125494 - DNA, 75 bp, synthetic construct
  source 1..75: mol_type = other DNA
gctacaacagatggtttataacctgccgccagacattacgctggtgaaagccagcagcttgctgaatgaaccgca

SEQ ID NO: 125495 - DNA, 75 bp, synthetic construct
  source 1..75: mol_type = other DNA
cacccagatgaactccaaagccgatgacgaagtccgtaaagagcttaatgccattgctgacgtatcagccggccg

SEQ ID NO: 125496 - DNA, 75 bp, synthetic construct
  source 1..75: mol_type = other DNA
caccacgcagattgcgaccaccgcgtttgttcaggcggctctgacggctcttattaatggtgcgccagccacgct

SEQ ID NO: 125497 - DNA, 75 bp, synthetic construct
  source 1..75: mol_type = other DNA
gacgaagtattaggcttccatctcagaaaggttcatgtcaatattggtgaatatgcatcatattcatactcatgt

SEQ ID NO: 125498 - DNA, 75 bp, synthetic construct
  source 1..75: mol_type = other DNA
gatcctggaatgccagcattgagcagatacagaaagttcaggaggacacgcgccggaacctgaacagcatgtggg

SEQ ID NO: 125499 - DNA, 75 bp, synthetic construct
  source 1..75: mol_type = other DNA
atccagcacgactctgccgctgaactggcgcaaccgctggatgtgaaagactggaaaaaaggcgaatgcgacctg

SEQ ID NO: 125500 - DNA, 75 bp, synthetic construct
  source 1..75: mol_type = other DNA
taacggaactggtggcgaaaaagagcggtgaacagtcgctggccattgcgaaagtcgacaggaaagttgacagcg

SEQ ID NO: 125501 - DNA, 75 bp, synthetic construct
  source 1..75: mol_type = other DNA
aagcaatctcagtacattgagagcgttactggcatcccaaaagaaagactgcgtcctgatgttttccaaaagtct

SEQ ID NO: 125502 - DNA, 75 bp, synthetic construct
  source 1..75: mol_type = other DNA
ttcgccgtatgtgaatattctggtggcacgggaagataataagaatgcagaaaacgtgaaggaatttctgcaatc

SEQ ID NO: 125503 - DNA, 75 bp, synthetic construct
  source 1..75: mol_type = other DNA
gaaattttcgatgactactgtctggcagccgtcgtcggattttcgacaacgggcagcagtgtggggtatggctct

SEQ ID NO: 125504 - DNA, 75 bp, synthetic construct
  source 1..75: mol_type = other DNA
tcgccagcttgcaggagtaacgcttgataaagtctttgaagataagctgtcaggtaaagacactaaccgtccagg

SEQ ID NO: 125505 - DNA, 75 bp, synthetic construct
  source 1..75: mol_type = other DNA
gaacaacttaataatcgaggtgtaattgttcgatttcacaaagaagggatcattgcagacattacaagcgcgatg

SEQ ID NO: 125506 - DNA, 75 bp, synthetic construct
  source 1..75: mol_type = other DNA
ctggtaaagacactaaccgcccaggcttacaagcgtgtttagcctatctgagagaaggcgacaccttacacgtgc

SEQ ID NO: 125507 - DNA, 75 bp, synthetic construct
  source 1..75: mol_type = other DNA
gcagagtatcctggtgaacaaaaccccgctgacggacacggacggcaatcctgtgatacatggtgtgacagcggt

SEQ ID NO: 125508 - DNA, 75 bp, synthetic construct
  source 1..75: mol_type = other DNA
aacggatcacggaacccaaaggaacccaaagatctaaaccccacacataacgcacgcgagagtgctccgaccagt

SEQ ID NO: 125509 - DNA, 75 bp, synthetic construct
  source 1..75: mol_type = other DNA
acaaagcaaattgtggtgtaccgacttatcggtgtagaagaaagtgttgccgagcctgaatacacccaaaaacgg

SEQ ID NO: 125510 - DNA, 75 bp, synthetic construct
  source 1..75: mol_type = other DNA
ctgaaggtgcagaaaacgaaaaacggcattccgtatgttgccggtattggtgcggggattgaggatgctgatggc

SEQ ID NO: 125511 - DNA, 75 bp, synthetic construct
  source 1..75: mol_type = other DNA
gggcggtgaccagcggcataacccgcggtttacgtgacggtgaagcgcatccgtatgtctatggtcgctacgtta

SEQ ID NO: 125512 - DNA, 75 bp, synthetic construct
  source 1..75: mol_type = other DNA
atcggggaccattaccgtcaggatttatgacgatcagccttttgaccggcaaattgtgatcccggcagtggcttt

SEQ ID NO: 125513 - DNA, 75 bp, synthetic construct
  source 1..75: mol_type = other DNA
gccgcacagaccggtctgaaagcgggtacgcccgttgtcggtggcctttttgatgtggtttccaccgcactctgc

SEQ ID NO: 125514 - DNA, 75 bp, synthetic construct
  source 1..75: mol_type = other DNA
tgcaaccttgattatgtcgacattagggatgatggttggtcgctttatcggctcaattattgggaaaaagcggaa

SEQ ID NO: 125515 - DNA, 75 bp, synthetic construct
  source 1..75: mol_type = other DNA
tacggacgcaacctgctgaagatggacgcgttcggctgtaccagccgcggtcaggcccaccgcgccggactgtgg

SEQ ID NO: 125516 - DNA, 75 bp, synthetic construct
  source 1..75: mol_type = other DNA
aaagcggaaattcttggcgggctggtgcttattggcattggcgcccagatcctctggacgcactaccacggctaa

SEQ ID NO: 125517 - DNA, 75 bp, synthetic construct
  source 1..75: mol_type = other DNA
caccgccatcaccgcagacacggagcaccgtttcagtggtctgccgctgggggaatacaccctgacggtgcgggc

SEQ ID NO: 125518 - DNA, 75 bp, synthetic construct
  source 1..75: mol_type = other DNA
acggtagaaaagatgcatgacaaagagcagtttagtgagaacgcactggaaaatatggtggcgttatcggctaaa

SEQ ID NO: 125519 - DNA, 75 bp, synthetic construct
  source 1..75: mol_type = other DNA
atggctgattcgaatctcaatgagccagtaatcatccaggctacgcggctcgatacatcagttcttccacgcaat

SEQ ID NO: 125520 - DNA, 75 bp, synthetic construct
  source 1..75: mol_type = other DNA
ctgttattgtgcaggcgacgcggctcgatacatcaatccttccacgcaatatcttcagccagtcttacctgttgt

SEQ ID NO: 125521 - DNA, 75 bp, synthetic construct
  source 1..75: mol_type = other DNA
aacggagcccgctttgagccgcagtcaggcaccctgaacagcgttatcccaccggcagtacagcacctgacggtg

SEQ ID NO: 125522 - DNA, 75 bp, synthetic construct
  source 1..75: mol_type = other DNA
ttcaacgagaacaaaaccctgttcttcaagctgtcgatcgtcgggacgtggcccagcggaaccgccaacaggtca

SEQ ID NO: 125523 - DNA, 75 bp, synthetic construct
  source 1..75: mol_type = other DNA
ccaatgcgcttatagcggctcgcaaacgcattctggcgcttgagcaggccatgagaacccacggacaaatcgact

SEQ ID NO: 125524 - DNA, 75 bp, synthetic construct
  source 1..75: mol_type = other DNA
tattgcatttgaagccggttatagtagcccaagcctgtttattaaaacgtttaagaaactaacatcttttacacc

SEQ ID NO: 125525 - DNA, 75 bp, synthetic construct
  source 1..75: mol_type = other DNA
ctgctgaaaacgctcacgccgtcatccggcacattggcgccattcttcgacaccgttaacaacaagatggttgtg

SEQ ID NO: 125526 - DNA, 75 bp, synthetic construct
  source 1..75: mol_type = other DNA
atgaggggatctctcagtgccacgcgcatattgaacgttgggatcagtaaacgcttttttgagcagcattacctg

SEQ ID NO: 125527 - DNA, 75 bp, synthetic construct
  source 1..75: mol_type = other DNA
ccgcgaacaaaaatgaggttcagctaaacgcagacaacagcaatgagattatttttaactacgcccactggtcaa

SEQ ID NO: 125528 - DNA, 75 bp, synthetic construct
  source 1..75: mol_type = other DNA
ggaagttacgttttcgctttttctatactccggagtttaaacctaaaaatggtgttaccagtggaacgttattac

SEQ ID NO: 125529 - DNA, 75 bp, synthetic construct
  source 1..75: mol_type = other DNA
cgctgaatctcgtcgcatcttctgtaacgtggtcgatgcgccgaaagccgccagcttcattatgccgtcgattat

SEQ ID NO: 125530 - DNA, 75 bp, synthetic construct
  source 1..75: mol_type = other DNA
ggaagaatttgttgagatagtcactttttatgtcattaaccgtttacgtcattaccgcgaagaacaggtgattga

SEQ ID NO: 125531 - DNA, 75 bp, synthetic construct
  source 1..75: mol_type = other DNA
acgcgagcgactcaacgatattatggcaaaacgccaatgcagattattaatgaaatccgtattaattttgccaaa

SEQ ID NO: 125532 - DNA, 75 bp, synthetic construct
  source 1..75: mol_type = other DNA
cagtcagtggactgtccagggaagccggattaagccggggacggatttctggttttacgtgcgcagcgtcaacct

SEQ ID NO: 125533 - DNA, 75 bp, synthetic construct
  source 1..75: mol_type = other DNA
tgaagttcgcaaaaacggtgtattaatcgcatccagagaaactaaaggggccattcccggtagttacagtgcagt

SEQ ID NO: 125534 - DNA, 75 bp, synthetic construct
  source 1..75: mol_type = other DNA
tgtagtggcgttgcatggattatcgctgccggcatcatcataacgttgatgctgaaggggaaggagccgggggac

SEQ ID NO: 125535 - DNA, 75 bp, synthetic construct
  source 1..75: mol_type = other DNA
gtcgtttctgatgcccgccatcaccgccgtggtgcttggcggtgccaatatttatggtggttccggttccattat

SEQ ID NO: 125536 - DNA, 75 bp, synthetic construct
  source 1..75: mol_type = other DNA
agacagcggacagcaccccggaccagctgcagaataagacgctctggtcgtcatacaccgaaatcatcgatgtga

SEQ ID NO: 125537 - DNA, 75 bp, synthetic construct
  source 1..75: mol_type = other DNA
tctataccaaagttaacccgctggtgattacgcttggcacgctgtatctgtttgccggaagcgccctgctgcttt

SEQ ID NO: 125538 - DNA, 75 bp, synthetic construct
  source 1..75: mol_type = other DNA
tcctctgaccgccgggcgatggcaatcgttcgtcgctggcaggaagaagacgtaccggaaaagctctacccactg

SEQ ID NO: 125539 - DNA, 75 bp, synthetic construct
  source 1..75: mol_type = other DNA
gagtccgaagccagcaacgatcaagcgccggttcaaatgccgcgtgactattctgaaggcgcatccggcctgctg

SEQ ID NO: 125540 - DNA, 75 bp, synthetic construct
  source 1..75: mol_type = other DNA
gtggtaagcatgagaatttcaacagtaataaccaacagtcttactggtattcaacctgccggttaagagtgaccc

SEQ ID NO: 125541 - DNA, 75 bp, synthetic construct
  source 1..75: mol_type = other DNA
ctacccgcagtgggaaaccgtggggatcgagcttcttgatcgttgcgtcactaaggacggattgactgacgtcgg

SEQ ID NO: 125542 - DNA, 75 bp, synthetic construct
  source 1..75: mol_type = other DNA
ttttcttcagttatagatatgcctgccggacaggggacgctgacactgacattcaccgtatcttcatcaggagcg

SEQ ID NO: 125543 - DNA, 75 bp, synthetic construct
  source 1..75: mol_type = other DNA
atgcggatatcagtggcagtgtgaatgcgaactccgggacgctcaacaacgtcacgattaatgagaactgtcaga

SEQ ID NO: 125544 - DNA, 75 bp, synthetic construct
  source 1..75: mol_type = other DNA
cggcgtgaacgaacccatcggaaaatttccgatgaccgatagctggtatccgtcacgggattttcgacgacgggc

SEQ ID NO: 125545 - DNA, 75 bp, synthetic construct
  source 1..75: mol_type = other DNA
tttccgatggtcgatgactggcatccgtcgccggattttcgacgacgggctgcgttgtgggggatggctttgccg

SEQ ID NO: 125546 - DNA, 75 bp, synthetic construct
  source 1..75: mol_type = other DNA
tggagtggcattgcgtggattatcgttgccggcatcatcataacgctgatgctgaaggggaaagagccgggtgac

SEQ ID NO: 125547 - DNA, 75 bp, synthetic construct
  source 1..75: mol_type = other DNA
gagtctgaagccagcaacgatcaggctccagtgcagatgccgcgtgactattctgaaggcgcatccggtctgctg

SEQ ID NO: 125548 - DNA, 75 bp, synthetic construct
  source 1..75: mol_type = other DNA
atcggtatctccgcacagggaaagggtttgtttttgctggataaaaacgacaagccgctcggtaacgctattttg

SEQ ID NO: 125549 - DNA, 75 bp, synthetic construct
  source 1..75: mol_type = other DNA
tctctttttcctgccgttcctgtacggcagcaacgccggactcgagatgaccagcggtttctacgggatgcaggc

SEQ ID NO: 125550 - DNA, 75 bp, synthetic construct
  source 1..75: mol_type = other DNA
tgcaggccattcacacccgcgcgcacctgttgcaggccatttatgaaggcgtggtgttcagccatatgacccatc

SEQ ID NO: 125551 - DNA, 75 bp, synthetic construct
  source 1..75: mol_type = other DNA
cgtgaaaacggatttatcagcgacggaaacggcctggaagctgtgggaactcatgggggaggtttattcgaaccg

SEQ ID NO: 125552 - DNA, 75 bp, synthetic construct
  source 1..75: mol_type = other DNA
aacccaaagatctaaaccccacacataacgcacgtgagagtgctccgaccagtgagcagggagttttgtcgctac

SEQ ID NO: 125553 - DNA, 75 bp, synthetic construct
  source 1..75: mol_type = other DNA
tcgcgaccgcattggccattggttgtgcaaccttgattatgtcgacattagggatgatggttggtcgctttatcg

SEQ ID NO: 125554 - DNA, 75 bp, synthetic construct
  source 1..75: mol_type = other DNA
ttgaccgtctgcgttttactttcggtgtgcaggcactggtggaaaccacttcaaagggggactggaatccttcgg

SEQ ID NO: 125555 - DNA, 75 bp, synthetic construct
  source 1..75: mol_type = other DNA
acacccggtgacattattgaaatctgtgataacgactatgccgggaccatgaccggcggacgtatcctgtccatc

SEQ ID NO: 125556 - DNA, 75 bp, synthetic construct
  source 1..75: mol_type = other DNA
atttctggttttatgtgcgcagcgtcaatctggtgggcaagtctgcgtttgtggaagccagcgggcaggccagta

SEQ ID NO: 125557 - DNA, 75 bp, synthetic construct
  source 1..75: mol_type = other DNA
gtctctgtatacgtttttagtgctttttcagtatttgtttttctgggaggtgtttttattatattagagttggaa

SEQ ID NO: 125558 - DNA, 75 bp, synthetic construct
  source 1..75: mol_type = other DNA
tctttcccccgcacgagcacttatgccagtggcaccatcacggtaagaatcagtgatgatcagaagtttgaccgg

SEQ ID NO: 125559 - DNA, 75 bp, synthetic construct
  source 1..75: mol_type = other DNA
tcaggtgctggcgcgctgggacacgccgaaggtggtgaagggggtgagctttatgcttcgcctgaccgtggcagc

SEQ ID NO: 125560 - DNA, 75 bp, synthetic construct
  source 1..75: mol_type = other DNA
caggtgttattgatatgcctgctggtcgcggtcacatgacgctggagttttcggtatcagcgtggctggtaaatg

SEQ ID NO: 125561 - DNA, 75 bp, synthetic construct
  source 1..75: mol_type = other DNA
atgcacatcaatcgctatgcttgcgcgaacacttttgtcgttcgtgtatgcatgtttgctgggggcgatggtgtg

SEQ ID NO: 125562 - DNA, 75 bp, synthetic construct
  source 1..75: mol_type = other DNA
ttcaggcgaaatacagtatcctcgaccgggcaatggaaaacgaactgctgccgctatgtcgtgataatggcattg

SEQ ID NO: 125563 - DNA, 75 bp, synthetic construct
  source 1..75: mol_type = other DNA
ggattcgacaggcagatcatcattccgccggtactgttccggggggcgagacatgagcaccagtccagcaaagat

SEQ ID NO: 125564 - DNA, 75 bp, synthetic construct
  source 1..75: mol_type = other DNA
gaactggatctgattatctggatcctgcgggctgatgaacgtgcgtatgctgccgatattgccatgcatcagttt

SEQ ID NO: 125565 - DNA, 75 bp, synthetic construct
  source 1..75: mol_type = other DNA
acgactatgccgggaccctgaccggcggacgtatcctgtccatcgatgccgccagccgcacactgacgctggacc

SEQ ID NO: 125566 - DNA, 75 bp, synthetic construct
  source 1..75: mol_type = other DNA
acggacagtatctggcgcaggcgaaatgggacacgccgcgggtggtgaagggtgtgcgcttcagtctgcgcctga

SEQ ID NO: 125567 - DNA, 75 bp, synthetic construct
  source 1..75: mol_type = other DNA
ctggcggcagacaggattgcgatgattaatcctgcgaatggcaacacaaagccgatgtttgttggtcagggcgat

SEQ ID NO: 125568 - DNA, 75 bp, synthetic construct
  source 1..75: mol_type = other DNA
gacacggagcaccgtttcagcggcctgccgctcggggaatacaccctgacggtgcgggcgataaacagctatggc

SEQ ID NO: 125569 - DNA, 75 bp, synthetic construct
  source 1..75: mol_type = other DNA
gaactggatattattcaggcgaaatacagtatcctcgaccgggcaatggaaaacgaactgctgccgctatgtcgt

SEQ ID NO: 125570 - DNA, 75 bp, synthetic construct
  source 1..75: mol_type = other DNA
atgtcattcagccattcttccctctcctctcaagttaaatcacatctgacgtttcttcctgaagaaattcgccag

SEQ ID NO: 125571 - DNA, 75 bp, synthetic construct
  source 1..75: mol_type = other DNA
accaggtgctggcgcgctgggatacgccgaaggtggtgaagggggtgagctttatgcttcgcctgaccgtggcag

SEQ ID NO: 125572 - DNA, 75 bp, synthetic construct
  source 1..75: mol_type = other DNA
cacgccgaaggtggtgaagggggtgagttttatgcttcgcctgaccgtggccgcggatgacggcagtgagcggct

SEQ ID NO: 125573 - DNA, 75 bp, synthetic construct
  source 1..75: mol_type = other DNA
atgtcattcagccattcttccctctcctcgcaagtcaaatcagatctgacgtttcttcctgaagaaattcgccag

SEQ ID NO: 125574 - DNA, 75 bp, synthetic construct
  source 1..75: mol_type = other DNA
acagaaaacgaaagacggcattccgtatgttgccggtattggtgcggggattgaggatgtcgatggtcagaccat

SEQ ID NO: 125575 - DNA, 75 bp, synthetic construct
  source 1..75: mol_type = other DNA
aactggatattattcaggcgaaatacagtatcctcgaccgggcaatggaaaacgaactgctgccgctatgtcgtg

SEQ ID NO: 125576 - DNA, 75 bp, synthetic construct
  source 1..75: mol_type = other DNA
caggccgaactggactccgtggctaaacgtcatacgcgttcccgctcgctcgcccaacgaggggctatttctgcg

SEQ ID NO: 125577 - DNA, 75 bp, synthetic construct
  source 1..75: mol_type = other DNA
gtcactgatgatccacgcactgccaccacaggcaaccagcgcggtttattcacatatccggggggaaaaccgctc

SEQ ID NO: 125578 - DNA, 75 bp, synthetic construct
  source 1..75: mol_type = other DNA
gctcatcgccttacccttcagttcggtgaacgcagaatgacgttggtcgatctgcccggcatcggtgaaacaccg

SEQ ID NO: 125579 - DNA, 75 bp, synthetic construct
  source 1..75: mol_type = other DNA
tttatcaatctgaagtccgatccacaaaaatccctgttaaatcagcagatatacccgagcattaagccagggtat

SEQ ID NO: 125580 - DNA, 75 bp, synthetic construct
  source 1..75: mol_type = other DNA
gctgacgatgatcgaaacgccgaccggcggcgaactgtattaccaggggcaggatctgctcaagcacgatccgca

SEQ ID NO: 125581 - DNA, 75 bp, synthetic construct
  source 1..75: mol_type = other DNA
aagcgcccgccagcgggaaattttaaccatgctggcggcgggcgaatcgaataaagagattggtcgggcattaaa

SEQ ID NO: 125582 - DNA, 75 bp, synthetic construct
  source 1..75: mol_type = other DNA
catctggaatcgctctatcggcgtctggaagtgaaaaatcgcactcaggcggcaatgatgttaaatatctcctcc

SEQ ID NO: 125583 - DNA, 75 bp, synthetic construct
  source 1..75: mol_type = other DNA
gccatgcatcagtttttactgaatgaaggtgcagatccctcgcgttttctgtttgttctcagccatgccgatcgc

SEQ ID NO: 125584 - DNA, 75 bp, synthetic construct
  source 1..75: mol_type = other DNA
cagtcatactggtattcaacctgtaagctgcaggtactgaagaacggacaggaaatctttcagcaacccgcgacg

SEQ ID NO: 125585 - DNA, 75 bp, synthetic construct
  source 1..75: mol_type = other DNA
ccggtgatgaatataacgctaaaaacgccatcttcaccgtttcggaagcaatggagcacttctcctatttgccga

SEQ ID NO: 125586 - DNA, 75 bp, synthetic construct
  source 1..75: mol_type = other DNA
gtcgcggattgagctgacaccggggtattttcagataacggcggtcccgaaactggctgtatatgacccgacggt

SEQ ID NO: 125587 - DNA, 75 bp, synthetic construct
  source 1..75: mol_type = other DNA
aacgcgtgtagaagctgcgcaagccactgaacggcgcattgccgcagatatcgatgacagtgaactaaaagcccc

SEQ ID NO: 125588 - DNA, 75 bp, synthetic construct
  source 1..75: mol_type = other DNA
tccacaaaaatccctgttaaatcagcaaatatacccaagcattaagccagggtatcacatgaataaaaagcactg

SEQ ID NO: 125589 - DNA, 75 bp, synthetic construct
  source 1..75: mol_type = other DNA
cgtcggtcaggcgttaaaaaaactgccccgtgaacaggttgtagtagaaaccaaatgcggcattgtctgggaacg

SEQ ID NO: 125590 - DNA, 75 bp, synthetic construct
  source 1..75: mol_type = other DNA
aacagggctggttcgttatggaacaacatttgtgcctgaggaaagggggtgtagtatctgaggcaacagaagttt

SEQ ID NO: 125591 - DNA, 75 bp, synthetic construct
  source 1..75: mol_type = other DNA
gcttttgaccgtcagatagtagtcccccccgttctgtttcgtgggggtaagcatgaaaacttcaacagccacaac

SEQ ID NO: 125592 - DNA, 75 bp, synthetic construct
  source 1..75: mol_type = other DNA
acgtcgccgttgcccgtttcagttttccggcctggatgttacagcttctgcgtaaagcccgggaccgcattatcc

SEQ ID NO: 125593 - DNA, 75 bp, synthetic construct
  source 1..75: mol_type = other DNA
gcagtagattacttttcggtggatggcgtaaaagactggcataccatttggctgatgtttgcagggtatgctctt

SEQ ID NO: 125594 - DNA, 75 bp, synthetic construct
  source 1..75: mol_type = other DNA
tgggcgctctgtctgtggatatgacgcaggctaattccacacttcccgatgacagtcagcatgacggacaatcgg

SEQ ID NO: 125595 - DNA, 75 bp, synthetic construct
  source 1..75: mol_type = other DNA
tacggcactgtactgggtagcctccggccagaatattaagccgggccatgattattacttttatgttcgcagtgt

SEQ ID NO: 125596 - DNA, 75 bp, synthetic construct
  source 1..75: mol_type = other DNA
caagctgaactggactccgtagccaaacgtcatacccgttcccgctcgctcgcccatcgtggggctatttctgcg

SEQ ID NO: 125597 - DNA, 75 bp, synthetic construct
  source 1..75: mol_type = other DNA
ctggatgatgaaacccaggcaattgccagtgagattgttcgtcacgatctgtttgaccgggtgcatatcggcctt

SEQ ID NO: 125598 - DNA, 75 bp, synthetic construct
  source 1..75: mol_type = other DNA
cgctctgtgcttctttatcgaattgctcttttagctctggagaaattcgcattctgaattgtggggattgcccgt

SEQ ID NO: 125599 - DNA, 75 bp, synthetic construct
  source 1..75: mol_type = other DNA
tggttaaggctcctggcgctgataatgtcaaaatagagaaccagaccggaattcataccgactggcgtggctatg

SEQ ID NO: 125600 - DNA, 75 bp, synthetic construct
  source 1..75: mol_type = other DNA
aactgtttatttttggggggcagatactagagatggaaagcttgtcatggtaaatggcaatgatagatatacttt

SEQ ID NO: 125601 - DNA, 75 bp, synthetic construct
  source 1..75: mol_type = other DNA
tgctaactcatcattaggtaatggtgcatctcaggatgttaactctttcactaacatgtttggtggatttttagg

SEQ ID NO: 125602 - DNA, 75 bp, synthetic construct
  source 1..75: mol_type = other DNA
caggggaatcagctgttcatgaacgacgtgttcctgaagcgactatttgcggtgagcatcccgtcatccggtaat

SEQ ID NO: 125603 - DNA, 75 bp, synthetic construct
  source 1..75: mol_type = other DNA
tccggtctggatgttacatcttctgcgtaaagcccgggatcgcattatccacctgctgagcgcactgtgggagcg

SEQ ID NO: 125604 - DNA, 75 bp, synthetic construct
  source 1..75: mol_type = other DNA
atttttgaagagagcggcgagttgattggttgtgaaggccacatgatggcgcgagcggcgacacctgcggccaga

SEQ ID NO: 125605 - DNA, 75 bp, synthetic construct
  source 1..75: mol_type = other DNA
tcgtcggcgcttcggcccctgcacccagttgcagccgcagctaaaagactacggcggtcaactggtagcttgttt

SEQ ID NO: 125606 - DNA, 75 bp, synthetic construct
  source 1..75: mol_type = other DNA
ggtgttgacgctgaccagtcagtgtccttttgatgagcactctgaccagctatggactgcctggttgaccagttt

SEQ ID NO: 125607 - DNA, 75 bp, synthetic construct
  source 1..75: mol_type = other DNA
atgtcattcagccattcttccctctcctcacaagtgaaatcaaatctgacgtttcttcctgaagaaattcgccag

SEQ ID NO: 125608 - DNA, 75 bp, synthetic construct
  source 1..75: mol_type = other DNA
aaaagcagtgaaatcatctcgacgacagacaaaaaactgggcgagcaggaagcaacaatccagcagatacaaaag

SEQ ID NO: 125609 - DNA, 75 bp, synthetic construct
  source 1..75: mol_type = other DNA
cagccgtattgactttatgttgcaggcggattcgcgtccagactgctatattgaagtgaaatcggttacgttagc

SEQ ID NO: 125610 - DNA, 75 bp, synthetic construct
  source 1..75: mol_type = other DNA
cgttgataagccctttaccgtgacactgtcacaagcgcgagaactggatgcgctggcaaaaagccttggacgcgt

SEQ ID NO: 125611 - DNA, 75 bp, synthetic construct
  source 1..75: mol_type = other DNA
aacagccgttgttgcaggcgatagatctgaaaaaacattacccggttaagaagggcatgttcgcgccggaacgtc

SEQ ID NO: 125612 - DNA, 75 bp, synthetic construct
  source 1..75: mol_type = other DNA
acggaggtcacgcaactggaagaagacatccgtcagcggatggacacggatatcgcagaagtgacccggaaaatc

SEQ ID NO: 125613 - DNA, 75 bp, synthetic construct
  source 1..75: mol_type = other DNA
aaggtgcagaaaacaaaaaacggtattccctatgtggctgggattggcgcggggattgaggatgttgatggtcag

SEQ ID NO: 125614 - DNA, 75 bp, synthetic construct
  source 1..75: mol_type = other DNA
ctggacgccaacgaccagtatcagcgaccttcttgttattgtgatgaagaaatctacagccggtatcagtatcag

SEQ ID NO: 125615 - DNA, 75 bp, synthetic construct
  source 1..75: mol_type = other DNA
gaagggaacgaaagaccaaatcttcaataacccgcgccatccgtacactcaggcgctactttccgcgacgccgcg

SEQ ID NO: 125616 - DNA, 75 bp, synthetic construct
  source 1..75: mol_type = other DNA
atgacctcggtaccgacattgatccgccacgttcccggaaaaacggaaccggtcctccatctggaacatattcag

SEQ ID NO: 125617 - DNA, 75 bp, synthetic construct
  source 1..75: mol_type = other DNA
ctggacatgaactatcgtggtctgatcaacatgctgattttctgcggctgtgtcggtcagagcggcggtggctgg

SEQ ID NO: 125618 - DNA, 75 bp, synthetic construct
  source 1..75: mol_type = other DNA
aaattaacaacaacctgcagcgtgtacgtgaactgaaccgccccgggtttcctggagagtgttttatctgtgaac

SEQ ID NO: 125619 - DNA, 75 bp, synthetic construct
  source 1..75: mol_type = other DNA
aagcctgggtcaatgattttgtcagggaagctttcggacctatggtggaagagggcgactggaaagacagctcta

SEQ ID NO: 125620 - DNA, 75 bp, synthetic construct
  source 1..75: mol_type = other DNA
ctgaactggcgcaaccgctggatgtgaaagactggaaaaaaggcgaatgcgacctgctcccaggtaaaactgcac

SEQ ID NO: 125621 - DNA, 75 bp, synthetic construct
  source 1..75: mol_type = other DNA
cggcgctggggaatgatccgaactttgccacgacaataactaactcccttgcggggaagcagccaaaggatgcta

SEQ ID NO: 125622 - DNA, 75 bp, synthetic construct
  source 1..75: mol_type = other DNA
gtgatatcacttcatttaagggggtgggaggagccccggcagcaaaaaaagggactgtgaagctggcttttagtg

SEQ ID NO: 125623 - DNA, 75 bp, synthetic construct
  source 1..75: mol_type = other DNA
ccagcctgcaccgtgaggctgaagcacagttccggcctgagctggagaaaatcgtcagcgggattgaaacaggtt

SEQ ID NO: 125624 - DNA, 75 bp, synthetic construct
  source 1..75: mol_type = other DNA
aaaatcgtcagggggattgaaacaggttttcgtggtacggccctgtatgccacagaaaagatcgccggacgcatc

SEQ ID NO: 125625 - DNA, 75 bp, synthetic construct
  source 1..75: mol_type = other DNA
aaattcagtgatcgcagggcagcccttgaactgatgacgcaaatcgaatcgaccgtgaccagcctgcaccgtgag

SEQ ID NO: 125626 - DNA, 75 bp, synthetic construct
  source 1..75: mol_type = other DNA
gcagaatcagccggtagatttaattctgctggatatcaacttacccgatgaaaatggccttgcgtattaccgtga

SEQ ID NO: 125627 - DNA, 75 bp, synthetic construct
  source 1..75: mol_type = other DNA
ggatgtgagccgcagcgtgatcaatatcaacaaggtcagagaggaagtgatgtcactgacccgggcatatttcgg

SEQ ID NO: 125628 - DNA, 75 bp, synthetic construct
  source 1..75: mol_type = other DNA
tgaagaatatcccaaactggcaaaggtttatccgacaaataaattgcctgatttacgtggtgagtttattcgtgg

SEQ ID NO: 125629 - DNA, 75 bp, synthetic construct
  source 1..75: mol_type = other DNA
ttgtttatttatctccgtaatgttaatgttttattgcgactaaaactgtatggaagtcgaaaaaacggttttttt

SEQ ID NO: 125630 - DNA, 75 bp, synthetic construct
  source 1..75: mol_type = other DNA
tcactgccgcaaccgaccattagttttgccgggcagctgcacgccgcgctcgatcgcataagcgatacacaaaca

SEQ ID NO: 125631 - DNA, 75 bp, synthetic construct
  source 1..75: mol_type = other DNA
tcaggtatgaagcaggtgtgcttttttacaggggtggttcaatacttcatgatacgagtcaaattcggatcccgg

SEQ ID NO: 125632 - DNA, 75 bp, synthetic construct
  source 1..75: mol_type = other DNA
ctgtatgccatcgggcagtactgcgaccagatggtgccggatggcttcgggggcaccgagccgcggatgaccttt

SEQ ID NO: 125633 - DNA, 75 bp, synthetic construct
  source 1..75: mol_type = other DNA
tgtctttcaactagtaaaatttactatagattcaatcgtattaaatcaaaactaggaatagaaaccaccagaaag

SEQ ID NO: 125634 - DNA, 75 bp, synthetic construct
  source 1..75: mol_type = other DNA
tagtacgtgatgaatatggctgctggacgcatcctgaatatgaaaaattctgtgatggtagagaacttatttcaa

SEQ ID NO: 125635 - DNA, 75 bp, synthetic construct
  source 1..75: mol_type = other DNA
atgacgcatccggctatctggattttttcaaaggcgagatagggaaaacccatctggctcaggagctgtggacgc

SEQ ID NO: 125636 - DNA, 75 bp, synthetic construct
  source 1..75: mol_type = other DNA
gagagaaacgcattcgctttctttcacgatattttcggaaccggaaatcagcatgacaggatgcgggactttgac

SEQ ID NO: 125637 - DNA, 75 bp, synthetic construct
  source 1..75: mol_type = other DNA
tctgtacattcagggaaaaagtcgaacagctacgtaacacactcattcagagctcagaagatcataaacgcgatc

SEQ ID NO: 125638 - DNA, 75 bp, synthetic construct
  source 1..75: mol_type = other DNA
cctccatctggaacatattcagcccgtccgcaatttattaatcacactgcaggaaaaactcgccaccccggcagg

SEQ ID NO: 125639 - DNA, 75 bp, synthetic construct
  source 1..75: mol_type = other DNA
ttgccgggcagcttcatgctgcgctcgatcgcatcagcgatacgcaaaacgccgcccgcgtgcagactgaaaaat

SEQ ID NO: 125640 - DNA, 75 bp, synthetic construct
  source 1..75: mol_type = other DNA
tcggtatcagcatggtgggtaaatggctggtatcccacagcaagtatcagcgatttgctggttgtggtgatgaag

SEQ ID NO: 125641 - DNA, 75 bp, synthetic construct
  source 1..75: mol_type = other DNA
gtccgccaggaaatcgatgcttttttctgtacattcagggagaaagttgaacagctacgtaacacgcttattcag

SEQ ID NO: 125642 - DNA, 75 bp, synthetic construct
  source 1..75: mol_type = other DNA
acacgcgccgtatcgactttcgtcaactgcggtaaagcgttgccggaacatggcattgaaatccgcaatgaagca

SEQ ID NO: 125643 - DNA, 75 bp, synthetic construct
  source 1..75: mol_type = other DNA
aactatcgctcgcgaagcggaaaaagcgggcatgaatccggtggattacaccgtgaaatccctgaaagagggttc

SEQ ID NO: 125644 - DNA, 75 bp, synthetic construct
  source 1..75: mol_type = other DNA
agcttcctgcttcgcctgaccgtggcagcggatgacggccgtgagcgactggtcagcacggcccggacgacggaa

SEQ ID NO: 125645 - DNA, 75 bp, synthetic construct
  source 1..75: mol_type = other DNA
aagcctgggtcgatgattttgtcagggaagccttcggtcgcatgaaaaaagaatacgtctgtaaagacagtgaaa

SEQ ID NO: 125646 - DNA, 75 bp, synthetic construct
  source 1..75: mol_type = other DNA
actttggtggcgacggcacggaacacttcaacaaagtggaactggaaaacgtgctgctgcacaaactgccggtga

SEQ ID NO: 125647 - DNA, 75 bp, synthetic construct
  source 1..75: mol_type = other DNA
agcccccactgccgcacagtcggttaacaatacacagattgccaccacggcttttgtgaaatcggcaattgcggc

SEQ ID NO: 125648 - DNA, 75 bp, synthetic construct
  source 1..75: mol_type = other DNA
gcctgatgagcggttactttggcgaccaggtttcgcaagacgagattgccgcgacgggctggttagacaccggcg

SEQ ID NO: 125649 - DNA, 75 bp, synthetic construct
  source 1..75: mol_type = other DNA
aggagaacagtcagagccgtttgatccggaaaaacattttgactgttatacggtgcgttatctgtaccagcttaa

SEQ ID NO: 125650 - DNA, 75 bp, synthetic construct
  source 1..75: mol_type = other DNA
gagggcttcactgtaaaaatcactttcccggcagtcagccagttacagaccaggatcgcggtaaaaacaaatctg

SEQ ID NO: 125651 - DNA, 75 bp, synthetic construct
  source 1..75: mol_type = other DNA
gttctcggaaaagcggattaccgatatcaggcaggttgagaccacagcccgctatcttggtacggcgctgtactg

SEQ ID NO: 125652 - DNA, 75 bp, synthetic construct
  source 1..75: mol_type = other DNA
attttgatccatgggcgctgtcttcgtttatttgccgttcagaatccccgacgtttgaacttttttaccaggaat

SEQ ID NO: 125653 - DNA, 75 bp, synthetic construct
  source 1..75: mol_type = other DNA
tttatgctgattccgcgtaatatccggagaaaagtggatggattcagacaatcagaaggcgaagcaacaaaacaa

SEQ ID NO: 125654 - DNA, 75 bp, synthetic construct
  source 1..75: mol_type = other DNA
gattcagacagtcaaaaggtgaagcaaccccaaaatcggctcaaccgttcacgggcagtttgtatgaggttttga

SEQ ID NO: 125655 - DNA, 75 bp, synthetic construct
  source 1..75: mol_type = other DNA
atgaaactgacaacacatcatctacgaacaggagcagcgttattactggcaggaatactactggtaggctgcgac

SEQ ID NO: 125656 - DNA, 75 bp, synthetic construct
  source 1..75: mol_type = other DNA
aaaatcgtcagcgggattgaaacaggttttcgtggcacggccctgtacgccacagaaaacattgccggtcgcatc

SEQ ID NO: 125657 - DNA, 75 bp, synthetic construct
  source 1..75: mol_type = other DNA
aggacgtccattacggatgtcagcaatgaaatcacgcagaccgtcaataagaaactggaagaccagagtgcggca

SEQ ID NO: 125658 - DNA, 75 bp, synthetic construct
  source 1..75: mol_type = other DNA
atgcgggatcaactgcagaaagcctctgcggtgctggctgtgatggattacacccagatgaactcaaaagcagat

SEQ ID NO: 125659 - DNA, 75 bp, synthetic construct
  source 1..75: mol_type = other DNA
ggaagctttcggacctatggtggaagaggacgactggaaagacagcactaaggtaaataaaaaggcagaaaaact

SEQ ID NO: 125660 - DNA, 75 bp, synthetic construct
  source 1..75: mol_type = other DNA
gagaaacttgagaacacagcaaaaataatttcaaaagatggtaataaaagaatcgtctcttttgataaaaatatc

SEQ ID NO: 125661 - DNA, 75 bp, synthetic construct
  source 1..75: mol_type = other DNA
aagcacagttccggcctgagctggagaaaatcgtcagcgggattgaaacaggttttcgtggcacggccctgtacg

SEQ ID NO: 125662 - DNA, 75 bp, synthetic construct
  source 1..75: mol_type = other DNA
attatactgcgattgttaagaagtcgtcagccaataatgcccaagttactgagggtgctttttctgcagtcgcaa

SEQ ID NO: 125663 - DNA, 75 bp, synthetic construct
  source 1..75: mol_type = other DNA
ccattgctgacgtatcagccggccgcctgtttgtgctggtcaataaatttgatgaaaaagaccgcaatggcgatg

SEQ ID NO: 125664 - DNA, 75 bp, synthetic construct
  source 1..75: mol_type = other DNA
atctgattattattcgtggccgtaatatctggccgcaggatattgaatatatagcggaacaggaaccggaaattc

SEQ ID NO: 125665 - DNA, 75 bp, synthetic construct
  source 1..75: mol_type = other DNA
tactggatattctgacggatgatggctggctcaaaaatgaataccacggggaggaggaaatctttaccggactgg

SEQ ID NO: 125666 - DNA, 75 bp, synthetic construct
  source 1..75: mol_type = other DNA
gactatcgctggcgaagcggaaaaagccgggatgaatccggtggactatacggtgaaatccctgaaagagggttc

SEQ ID NO: 125667 - DNA, 75 bp, synthetic construct
  source 1..75: mol_type = other DNA
ttactgcatttgttaagaaagatgacggaaatggcctcgtaaaagaaggtgccttctcagcagttgcgaatttca

SEQ ID NO: 125668 - DNA, 75 bp, synthetic construct
  source 1..75: mol_type = other DNA
cagtgggtgatggtgtgaattttatagccgtcagaccacgtaacatcgcatttaactttctggtgagggctaaat

SEQ ID NO: 125669 - DNA, 75 bp, synthetic construct
  source 1..75: mol_type = other DNA
gtccagttccaaacgatatcgcctacctccagtacacctccggcagcacccgttttccccgtggcgttatcatta

SEQ ID NO: 125670 - DNA, 75 bp, synthetic construct
  source 1..75: mol_type = other DNA
atgcagccagtgattaacgcgccggaaattgccactgcccgagaacagcagttgtttaatggcaaaaatttccat

SEQ ID NO: 125671 - DNA, 75 bp, synthetic construct
  source 1..75: mol_type = other DNA
caacttttgaccagaatttggaattacaactggaggcgctcaggagttcaggatgtgaccggatttttgaagata

SEQ ID NO: 125672 - DNA, 75 bp, synthetic construct
  source 1..75: mol_type = other DNA
tcccaacctggacggcacgttcaccgcgatgacgtataccaaaagtaaaacgtttaaaaccgaaaatggtgcccg

SEQ ID NO: 125673 - DNA, 75 bp, synthetic construct
  source 1..75: mol_type = other DNA
cagcttcaaaaaggtgacacgctggttgtctggaaactggatcgccttgggcgaagcatgaaacatctgatttct

SEQ ID NO: 125674 - DNA, 75 bp, synthetic construct
  source 1..75: mol_type = other DNA
caacaaatgaccagaacatcgcattacagcgaaatgaactggagtgcgcaggatgtgagctgattttcgaagata

SEQ ID NO: 125675 - DNA, 75 bp, synthetic construct
  source 1..75: mol_type = other DNA
cctgcggtttacagggggggatcgtggagattgcctccgttgatgttgttgacgggaaaatcgttaatccgatga

SEQ ID NO: 125676 - DNA, 75 bp, synthetic construct
  source 1..75: mol_type = other DNA
ggtgttaactgtacaggctcctgcagctggaaaatctacgttaaaaagggtctggtcacctgggaaatccaacag

SEQ ID NO: 125677 - DNA, 75 bp, synthetic construct
  source 1..75: mol_type = other DNA
ggtgttaactgtacaggctcctgcagctggaaaatctacgttaaaaacggtctggtgacctgggaaatccaacag

SEQ ID NO: 125678 - DNA, 75 bp, synthetic construct
  source 1..75: mol_type = other DNA
acgaatctctggtgtacggcgtgtttccaaaccaagacggtacgttcaccgcgatgacgtataccagaagcaaaa

SEQ ID NO: 125679 - DNA, 75 bp, synthetic construct
  source 1..75: mol_type = other DNA
gcaatgacgtataccagaagcaaaacgtttaaaaccgaagctggtgcgcgtcgctggctggaaagaaactcagat

SEQ ID NO: 125680 - DNA, 75 bp, synthetic construct
  source 1..75: mol_type = other DNA
aaattgatacccggttaaatcagttgttgaatcgctatgtcattttactggatacgaaggtggaacaaagtcagt

SEQ ID NO: 125681 - DNA, 75 bp, synthetic construct
  source 1..75: mol_type = other DNA
ggtgttaactgtacaggctcctgcagctggaaaatctacgttaaaaatggtctggtcacctgggaaagccaacag

SEQ ID NO: 125682 - DNA, 75 bp, synthetic construct
  source 1..75: mol_type = other DNA
aggaacgcttcaagcgcgtgcgcatcaccgacacctccagcgtgttcaacaccgacctgctctacaccattgagc

SEQ ID NO: 125683 - DNA, 75 bp, synthetic construct
  source 1..75: mol_type = other DNA
atgacgtataccaaaagcaaaacgtttaaaaccgaatctggcgcgcgtcgctggttagccagaaatactgactga

SEQ ID NO: 125684 - DNA, 75 bp, synthetic construct
  source 1..75: mol_type = other DNA
ggtgttaactgtacaggctcctgcagctggaaaatctacgttaaaaatggtctggtgacctgggaaacccaacag

SEQ ID NO: 125685 - DNA, 75 bp, synthetic construct
  source 1..75: mol_type = other DNA
acttacaccagaacaatgggcgcaggccggacgattaattgcagcaggaattcctcgccagaaggtagcgatcat

SEQ ID NO: 125686 - DNA, 75 bp, synthetic construct
  source 1..75: mol_type = other DNA
gtgccctggctgaaatggagcgagaactcattgtcgagcggacacgcgccggactggaggcggccagagccaaag

SEQ ID NO: 125687 - DNA, 75 bp, synthetic construct
  source 1..75: mol_type = other DNA
ctgatagaagagttgcggcagcgaggcgtgaatttccgaagcctgactgacagtattgataccagcaccccaatg

SEQ ID NO: 125688 - DNA, 75 bp, synthetic construct
  source 1..75: mol_type = other DNA
gcgaactgatagttgaacgtaccagggcggggctggctgcagctcgtgctaaaggcagagtaggtggacgccgtc

SEQ ID NO: 125689 - DNA, 75 bp, synthetic construct
  source 1..75: mol_type = other DNA
aaaccattcgcaataatgacatgacgaatgcgagggctattagggggcaggatctttcctataaggctcaaatgg

SEQ ID NO: 125690 - DNA, 75 bp, synthetic construct
  source 1..75: mol_type = other DNA
caaccagcaatataacgttaatgttggtaaatctcagcggcagcaatctcaacctgcacaggtatcacagccagc

SEQ ID NO: 125691 - DNA, 75 bp, synthetic construct
  source 1..75: mol_type = other DNA
atggccctgacagcgatacgaattcctgagtgggtgcacctgcaggcggtccatgtgctccgccagttcagagcc

SEQ ID NO: 125692 - DNA, 75 bp, synthetic construct
  source 1..75: mol_type = other DNA
cgcaggatgtgaactgatttttgaagataaaatcagcggaacgaaatcagccagaccgggattgaaaaaactgct

SEQ ID NO: 125693 - DNA, 75 bp, synthetic construct
  source 1..75: mol_type = other DNA
ataaaactgctgaggctgatgcgtgtcatgcgccgcctgcgggagctgcagcgtggcgtaacggcggtagaggag

SEQ ID NO: 125694 - DNA, 75 bp, synthetic construct
  source 1..75: mol_type = other DNA
gttttgtttgtcggtgccagagaaggttataaaaatttcgttcttgcagtcaaagctgtagggaaattacatggc

SEQ ID NO: 125695 - DNA, 75 bp, synthetic construct
  source 1..75: mol_type = other DNA
gggcttccatgctccagccgggccgcagggcctcagggagcgttgagagtacaccggtggttgaaatgccgatgg

SEQ ID NO: 125696 - DNA, 75 bp, synthetic construct
  source 1..75: mol_type = other DNA
gcactgatttttgatgtaggtgtttccacaatttatagaaaatttccggcgaatgagagcaatgaatcgccctga

SEQ ID NO: 125697 - DNA, 75 bp, synthetic construct
  source 1..75: mol_type = other DNA
atgcaaaaaatcgacctcggcaacaacgaatccctggtgtgcggcgtgttccccaaccaggacggtacgttcacc

SEQ ID NO: 125698 - DNA, 75 bp, synthetic construct
  source 1..75: mol_type = other DNA
accggggctgaaaaagctgctcaggacactatcggcaggagacacgctggttgtctggaagctggacaggttggg

SEQ ID NO: 125699 - DNA, 75 bp, synthetic construct
  source 1..75: mol_type = other DNA
ggcctgcctgttcataattcgacaatcagccggatggaagatgccctgaagtacctcttcccctggatgccggac

SEQ ID NO: 125700 - DNA, 75 bp, synthetic construct
  source 1..75: mol_type = other DNA
tccgctccaactggcaggagctaaatcagctgattgccgctgctaacgtctggaccatcaaaacttacggcccgg

SEQ ID NO: 125701 - DNA, 75 bp, synthetic construct
  source 1..75: mol_type = other DNA
tacagtgaaaacctgctaatgctgacgctctctcgcggtggaccgattgtctggctcagcgaaaccgatgcccgt

SEQ ID NO: 125702 - DNA, 75 bp, synthetic construct
  source 1..75: mol_type = other DNA
gctggtggcagcaaacaccagcggtggcgtgaccggcaagatgatctccccgcaatctatcgccgtggcctgtgc

SEQ ID NO: 125703 - DNA, 75 bp, synthetic construct
  source 1..75: mol_type = other DNA
acaccaagcgtgatggcccggcacaggggcgtccgctgattgataccgcgattgatgcctcagaagtgattctgg

SEQ ID NO: 125704 - DNA, 75 bp, synthetic construct
  source 1..75: mol_type = other DNA
ttgttcgatcagcaatacaaaaaaccgctcccctcacccgcgcactgcgtcggtgtgatcacctcaaaaaccggt

SEQ ID NO: 125705 - DNA, 75 bp, synthetic construct
  source 1..75: mol_type = other DNA
gcgatggtgtggtggtcagtgaagtcagcacgataatgaaaacgcgtaaatcgcttaagaaaccgacaaacctgt

SEQ ID NO: 125706 - DNA, 75 bp, synthetic construct
  source 1..75: mol_type = other DNA
acgaatctctggtgtacggcgtgtttccaaaccaggacggtacgttcaccgcgatgacgtataccaaaagcaaaa

SEQ ID NO: 125707 - DNA, 75 bp, synthetic construct
  source 1..75: mol_type = other DNA
cgcaagtgtgcgtggggcatctcggcaaagaaaccgacgtggtattacaaccactgctgcatgactccccggcag

SEQ ID NO: 125708 - DNA, 75 bp, synthetic construct
  source 1..75: mol_type = other DNA
gatattacttcggcgctggtgagtatcgtctcactctctttattccttaaagtctggcggccaaaaaataccgaa

SEQ ID NO: 125709 - DNA, 75 bp, synthetic construct
  source 1..75: mol_type = other DNA
acagcgacatgccgatgctggtaatgctggaacctcgcgacgatggcagctacgttcccgggcgcatggtccgcg

SEQ ID NO: 125710 - DNA, 75 bp, synthetic construct
  source 1..75: mol_type = other DNA
tatgataggtaatgctgttcctgtaaacttaggtaaagcgattggtctttcaatagtacatcatttgaaagagtt

SEQ ID NO: 125711 - DNA, 75 bp, synthetic construct
  source 1..75: mol_type = other DNA
cgatcacgtttcctataacgcgggatacaccaacgttcatgagttaattccgtggcgcacgctgtcgggacgcca

SEQ ID NO: 125712 - DNA, 75 bp, synthetic construct
  source 1..75: mol_type = other DNA
ggcactgttagaaggcaaaaatctgcgtgaatgcgcacgctttgccaatgcaacggcggctatctcggttctaag

SEQ ID NO: 125713 - DNA, 75 bp, synthetic construct
  source 1..75: mol_type = other DNA
atgtttgaagaacgtttagagactattcggtctgtttgtgaaaacttaaagttacaaactaaaccagccttaaga

SEQ ID NO: 125714 - DNA, 75 bp, synthetic construct
  source 1..75: mol_type = other DNA
tattatgcaatggttaatcttgataccgtaacatttcttgatccagcaagtctatataacaagctggaactgggt

SEQ ID NO: 125715 - DNA, 75 bp, synthetic construct
  source 1..75: mol_type = other DNA
gcgatgacgtataccaaaagcaaaacgtttaaaaccgaagctggcgcgcgtcgctggttagccagaaatactgac

SEQ ID NO: 125716 - DNA, 75 bp, synthetic construct
  source 1..75: mol_type = other DNA
ggtgttaactgtacaggctcctgcagctggaaaatctacgttaaaaaaggtctggttacctgggaaaaccaacag

SEQ ID NO: 125717 - DNA, 75 bp, synthetic construct
  source 1..75: mol_type = other DNA
atgcttattggctatgtacgtgtatcaacaaatgaccagaataccgatctacaacgcaatgcgctgaactgtgca

SEQ ID NO: 125718 - DNA, 75 bp, synthetic construct
  source 1..75: mol_type = other DNA
gcgaatctctggtatgtggcgtgttccccaaccaggacggtacgttcaccgcgatgacgtataccagaagcaaaa

SEQ ID NO: 125719 - DNA, 75 bp, synthetic construct
  source 1..75: mol_type = other DNA
caactaatgaccaaaacactgctttacaacgaaacgctcttgaaagcgcaggatgtgagctaatttttgaggaca

SEQ ID NO: 125720 - DNA, 75 bp, synthetic construct
  source 1..75: mol_type = other DNA
tgctcaagccaaattatgcgctggcgactcaggtagagtttaccgacccggaaattgttgctgagtacatcacgt

SEQ ID NO: 125721 - DNA, 75 bp, synthetic construct
  source 1..75: mol_type = other DNA
cgctaccccggcgttaaggggaaatgaggtcagcatggatactatcgatcttggcaacagcgaatctctggtatg

SEQ ID NO: 125722 - DNA, 75 bp, synthetic construct
  source 1..75: mol_type = other DNA
atgaaatttacgaaactgaccgatcatctgaaacttgccgcagacaaactcgtggggtttaaaccagagccttac

SEQ ID NO: 125723 - DNA, 75 bp, synthetic construct
  source 1..75: mol_type = other DNA
ttcaaaccgttatacgcggcggggctgtgtctgatagccaacactgcgccggtggcgtttggtgcgttgggcgtg

SEQ ID NO: 125724 - DNA, 75 bp, synthetic construct
  source 1..75: mol_type = other DNA
caaaacccgcaaccgcatattcatcgggcgcaaactcgcattcagcaactggaatatcgtctgacagaaacgctc

SEQ ID NO: 125725 - DNA, 75 bp, synthetic construct
  source 1..75: mol_type = other DNA
cttcattctcggcgtggggatcaaaaaaggcattgctgtcttcgcagaaacgctaattagcctgaagtggccgat

SEQ ID NO: 125726 - DNA, 75 bp, synthetic construct
  source 1..75: mol_type = other DNA
caaagaaaccgacgtggtattacaacccctactgcatgactctccggcagaactctcccagccgtgtgaagtgct

SEQ ID NO: 125727 - DNA, 75 bp, synthetic construct
  source 1..75: mol_type = other DNA
gtacagggtgatgatgcgcctgggcaaattgttcgcgccattgaactggcgaataagcgcaacgagtgcgacgta

SEQ ID NO: 125728 - DNA, 75 bp, synthetic construct
  source 1..75: mol_type = other DNA
ggtgtttaaattcgaccccctctcggctggcggcaccgctatttttattgcggcgattatctctatcttcatcct

SEQ ID NO: 125729 - DNA, 75 bp, synthetic construct
  source 1..75: mol_type = other DNA
actgggttatcaaattattaaaacggcgatgggggaattcagacattttagccagcgtgcggaactgcaggaagg

SEQ ID NO: 125730 - DNA, 75 bp, synthetic construct
  source 1..75: mol_type = other DNA
cgatttgcaacgtaatgcactgaactgcgcgggatgtgagcggatttttgaggataaaatcagtggcactaagtc

SEQ ID NO: 125731 - DNA, 75 bp, synthetic construct
  source 1..75: mol_type = other DNA
ttctcccaaaccaacgtttatgaaagtgcagagataatggctaactggcatcatccccggtttttattcagggga

SEQ ID NO: 125732 - DNA, 75 bp, synthetic construct
  source 1..75: mol_type = other DNA
ccggtgattaatgacagcatctggcatgtgctggcccatcaggacgatatcgaacacctgcagaacaccgctttt

SEQ ID NO: 125733 - DNA, 75 bp, synthetic construct
  source 1..75: mol_type = other DNA
ttatcccagatccctgccgctacccccaaagcatggggcagcaatgatgagcgaaaactgacttttagtattgaa

SEQ ID NO: 125734 - DNA, 75 bp, synthetic construct
  source 1..75: mol_type = other DNA
agaggggctttttatgatgcaggaacacgatctgcgagaatgccgaataacacaactgatataggcaaaaccgat

SEQ ID NO: 125735 - DNA, 75 bp, synthetic construct
  source 1..75: mol_type = other DNA
tttttctgatggaacaaatcagaacccctttcagcttaatatggacaattatgtcacctacagtgttgttctttt

SEQ ID NO: 125736 - DNA, 75 bp, synthetic construct
  source 1..75: mol_type = other DNA
gcgatttgggcgctttcacttgcactgctgagaaggatggctaaatccgatccgatgttgcgacaggtctatctc

SEQ ID NO: 125737 - DNA, 75 bp, synthetic construct
  source 1..75: mol_type = other DNA
tccgcgacagcggcacagggcaacccgttgcaccggtatcccgtatcctgcctgaggtaccggaatgtctgccgg

SEQ ID NO: 125738 - DNA, 75 bp, synthetic construct
  source 1..75: mol_type = other DNA
atatctgtacccctggatccccgacctgatggagtcaggactggggcgacatcaggttactgcactgctggcact

SEQ ID NO: 125739 - DNA, 75 bp, synthetic construct
  source 1..75: mol_type = other DNA
atgctgaatcctgtaaagtcatgaccgttctggaaggtatatcctctatcaggcaggaatatccaaacggtgaag

SEQ ID NO: 125740 - DNA, 75 bp, synthetic construct
  source 1..75: mol_type = other DNA
tccccgctgttcactgacacctggactgccgatattccggtgggcaccttatgcccggaatgggcgcagcgtctc

SEQ ID NO: 125741 - DNA, 75 bp, synthetic construct
  source 1..75: mol_type = other DNA
gcgcggatgttagcgggctggttaccctctccgatgggtacggagaagagaatggtggagaagagggcaatggcg

SEQ ID NO: 125742 - DNA, 75 bp, synthetic construct
  source 1..75: mol_type = other DNA
acgctgtttctgacacaggcctcactgaaaaaggcgggcttccttcccccgaggagcgtgcagacaaggcgtctt

SEQ ID NO: 125743 - DNA, 75 bp, synthetic construct
  source 1..75: mol_type = other DNA
ttttctgcgtccggaaccagtgtggtatgtcagcgaggctgccagccacgaggatcatcttgcacaggtggaaaa

SEQ ID NO: 125744 - DNA, 75 bp, synthetic construct
  source 1..75: mol_type = other DNA
aaatgatggtgatatatccgcattagctggccttctggcaaaactttctggaagtgttgcgctgtggttaattga

SEQ ID NO: 125745 - DNA, 75 bp, synthetic construct
  source 1..75: mol_type = other DNA
ccatggtggagaatacacctggcactccgggcaaacacttgaggtgcgagaagcgcttaaggcccgtattaaagc

SEQ ID NO: 125746 - DNA, 75 bp, synthetic construct
  source 1..75: mol_type = other DNA
cagcgtattgcactgatttttgatgtgggcgtttctaccatttatagaaaatttccggcgaataagagcaattaa

SEQ ID NO: 125747 - DNA, 75 bp, synthetic construct
  source 1..75: mol_type = other DNA
taaaattgatggtattcttaaagttgataaatatgtggcaatgccaggtcaggagacaacactacatatagatcg

SEQ ID NO: 125748 - DNA, 75 bp, synthetic construct
  source 1..75: mol_type = other DNA
acaagtttaaactcactaaatgatatatccaatagttgtacgttattgttcttacaggcttcagataaaaaatca

SEQ ID NO: 125749 - DNA, 75 bp, synthetic construct
  source 1..75: mol_type = other DNA
tgacggatatcggcgcggcgaaactggcaagcgccgccgcactcggtgtcccgttgaaaattacccatatggcgg

SEQ ID NO: 125750 - DNA, 75 bp, synthetic construct
  source 1..75: mol_type = other DNA
actgatagttgaacgtaccagggcggggctggctgcagctcgtgctaaaggtagagtaggtggacgccgtcctaa

SEQ ID NO: 125751 - DNA, 75 bp, synthetic construct
  source 1..75: mol_type = other DNA
ggcctgcggaccgcggtatgctcaccatctggctggcgcatgtcactttctgtacggcttatgtggcggtcgtta

SEQ ID NO: 125752 - DNA, 75 bp, synthetic construct
  source 1..75: mol_type = other DNA
gggcgctttttctttcacgtaatgggggcgctggcagaaatggaacgtgaacttattgttgaacgtacacgcgct

SEQ ID NO: 125753 - DNA, 75 bp, synthetic construct
  source 1..75: mol_type = other DNA
tggtaagcctgtggaaataatggtgtgtgatgatcaggaactgcattttttgttccaaagaattaaacagttaat

SEQ ID NO: 125754 - DNA, 75 bp, synthetic construct
  source 1..75: mol_type = other DNA
acctggattaaaacgcgctttaaagcgccttcaaaaaggtgacacactggttgtctggaaactggatcgcctcgg

SEQ ID NO: 125755 - DNA, 75 bp, synthetic construct
  source 1..75: mol_type = other DNA
tgtttccggacccggtgccaccacattgccgatgttggttttttccagcgtgcggatgggggtgaatccggagat

SEQ ID NO: 125756 - DNA, 75 bp, synthetic construct
  source 1..75: mol_type = other DNA
ggctttgcctttatgataaccgcaccgctggtgatgccggatgtgatcacgggcttgtcgctgttgttattgttt

SEQ ID NO: 125757 - DNA, 75 bp, synthetic construct
  source 1..75: mol_type = other DNA
tctgatacgcaattaaactcacttaacgagatatccaacagctgtgcattattattcttacaggcttcagataaa

SEQ ID NO: 125758 - DNA, 75 bp, synthetic construct
  source 1..75: mol_type = other DNA
tgcactgatttttgatgtaggcgtttctaccatttatagaaaatttccggcaaataagatcaatgaatccccctg

SEQ ID NO: 125759 - DNA, 75 bp, synthetic construct
  source 1..75: mol_type = other DNA
ggtttctgcggagcgggggatcatctcgccactgaagtttattgctatcgcggaagatatcgcttttatcaatga

SEQ ID NO: 125760 - DNA, 75 bp, synthetic construct
  source 1..75: mol_type = other DNA
atgatgcatggcagctttatcaacaggatccggccaggtttaatagtctgttaaatgctagccgccttgccactc

SEQ ID NO: 125761 - DNA, 75 bp, synthetic construct
  source 1..75: mol_type = other DNA
atccggcctacaattgctttgatcgtccgggtaaaaaatgtatctcttttacgctacgcatcaacggcaaagatc

SEQ ID NO: 125762 - DNA, 75 bp, synthetic construct
  source 1..75: mol_type = other DNA
ccaagaatcaactcgctcgtgaaaaactgattatttataatagcgaaggtaattataatattattgattctgtcg

SEQ ID NO: 125763 - DNA, 75 bp, synthetic construct
  source 1..75: mol_type = other DNA
gcgggggatcatttcaccgctgaagttcattaccattgctgaagatatcgggtttatcaatgagctgggttatca

SEQ ID NO: 125764 - DNA, 75 bp, synthetic construct
  source 1..75: mol_type = other DNA
agctgaccaccatgttctgctacatcgtcggtgtgagtaaatgcctgcgtgatatccagacgcacgcggagtaca

SEQ ID NO: 125765 - DNA, 75 bp, synthetic construct
  source 1..75: mol_type = other DNA
ccaatttgggaaagcaaacatctggtagaggcggccacaaccgcaaagagtaccacctcacccttgatacagcca

SEQ ID NO: 125766 - DNA, 75 bp, synthetic construct
  source 1..75: mol_type = other DNA
gttgatcaccttgggatggctgcgcttggtccgattgattacttcaatgttcaggacaagatggctggtcgggat

SEQ ID NO: 125767 - DNA, 75 bp, synthetic construct
  source 1..75: mol_type = other DNA
gtttctgaaacaaggtcatgaaatcattgccaagaatcaactcgctcgcgaaaaattgattatttataatagcga

SEQ ID NO: 125768 - DNA, 75 bp, synthetic construct
  source 1..75: mol_type = other DNA
ggcggcagcaagagacatgggtgccagtggtattaacaccgttgcagaagcgaagatgtattttcaggggatgcc

SEQ ID NO: 125769 - DNA, 75 bp, synthetic construct
  source 1..75: mol_type = other DNA
tggtcggtggcttcagatgactctaacaacagctggaatccggcatacaattgctttgatcgtccgggtaaaaaa

SEQ ID NO: 125770 - DNA, 75 bp, synthetic construct
  source 1..75: mol_type = other DNA
ttgaactctgcggcaaaacgttttctttcctcaagttatggcgatagccaacctcaacagcaattgtccgatgac

SEQ ID NO: 125771 - DNA, 75 bp, synthetic construct
  source 1..75: mol_type = other DNA
gcaggcaacaaagcttctccctcccggccctgcatcagataaggatattgagtttgcaaggaaaggcattccaag

SEQ ID NO: 125772 - DNA, 75 bp, synthetic construct
  source 1..75: mol_type = other DNA
aattttcagtgagccggaattcagtgttggtgaactggatgatatcgaatatctgcagaatgaggcatttcacct

SEQ ID NO: 125773 - DNA, 75 bp, synthetic construct
  source 1..75: mol_type = other DNA
gctgcgatatcgtgacattcaatgccgatctttatttactcctgtgccgggaaaatgtccagacgtttacccgta

SEQ ID NO: 125774 - DNA, 75 bp, synthetic construct
  source 1..75: mol_type = other DNA
aagccatcacgctgaaaattgacccgtctgtggttctggcaacccgcaaatatgtggatgataaaatatcagagc

SEQ ID NO: 125775 - DNA, 75 bp, synthetic construct
  source 1..75: mol_type = other DNA
accgctgaagttcattaccattgctgaagatatcgggtttatcaatgagctgggttatcagattattaaaacggc

SEQ ID NO: 125776 - DNA, 75 bp, synthetic construct
  source 1..75: mol_type = other DNA
ctgaacgagtatcttgatcaaatcagcgctaatgatgaagttctatttttgaaacaaggtcatgagatcattgcc

SEQ ID NO: 125777 - DNA, 75 bp, synthetic construct
  source 1..75: mol_type = other DNA
gggctggctgcagctcgtgccaaaggcagagtaggtggacgccatcctaagttgaccaccgaacagtgggcacag

SEQ ID NO: 125778 - DNA, 75 bp, synthetic construct
  source 1..75: mol_type = other DNA
gcaagacaaattcacgaggaacaactcggcagaaaagtttctcttcgtgaactggcagatttgttaacccatgaa

SEQ ID NO: 125779 - DNA, 75 bp, synthetic construct
  source 1..75: mol_type = other DNA
ccgttaccagatactgacggaactctggaaagaaacaggggacccgcgtttttaccgtattcatgtgctgttcaa

SEQ ID NO: 125780 - DNA, 75 bp, synthetic construct
  source 1..75: mol_type = other DNA
caggaagcggactgatactgcttcctttgattgaacgcgttctgcaaagcgcacaggaaccgttgtctcaggaca

SEQ ID NO: 125781 - DNA, 75 bp, synthetic construct
  source 1..75: mol_type = other DNA
gcaagacaaatccatgaggaacaactgggcagaacagtgtctcttcgtgaactggctgatttgttaacccatgaa

SEQ ID NO: 125782 - DNA, 75 bp, synthetic construct
  source 1..75: mol_type = other DNA
caagctataaataaagcaacgaaagaacttatgcttgcaaatgaagaacaacgcttagctttagagcaaaaaata

SEQ ID NO: 125783 - DNA, 75 bp, synthetic construct
  source 1..75: mol_type = other DNA
gcggaaatgaaagacgccgaaattgaacggtcgaataaactgctgtcactgatctcctacgatcaggaaagtggt

SEQ ID NO: 125784 - DNA, 75 bp, synthetic construct
  source 1..75: mol_type = other DNA
ccaagaaataaaagatgcatttcaactagtaaattacaatggctctgcctttaggtccgcaaaaataagtgacat

SEQ ID NO: 125785 - DNA, 75 bp, synthetic construct
  source 1..75: mol_type = other DNA
ctgatggaatcaggactggggcgtccacaggttacagcactcctcgcacttcgtcaggacgcagaacgtgtatgg

SEQ ID NO: 125786 - DNA, 75 bp, synthetic construct
  source 1..75: mol_type = other DNA
cgtaaacaaggggtacggatatcgattgatgactttggcaccggtttgtcaaacctgaaacgtttttatgaaatt

SEQ ID NO: 125787 - DNA, 75 bp, synthetic construct
  source 1..75: mol_type = other DNA
ttaccgccggtagcacgcccaaaggcatgtatgaatacctcaccaccctggttaaaggtaagccctggtacgata

SEQ ID NO: 125788 - DNA, 75 bp, synthetic construct
  source 1..75: mol_type = other DNA
gatcacgacgatcttacacgcttgcagatccagctatacgaagcattaggcgagcgtgcacatttgtgtttttcc

SEQ ID NO: 125789 - DNA, 75 bp, synthetic construct
  source 1..75: mol_type = other DNA
gacctctgcgaggtacgaatccgaaccggccagacggaggtcgctgttttcacagtctacgaacctgatgagtaa

SEQ ID NO: 125790 - DNA, 75 bp, synthetic construct
  source 1..75: mol_type = other DNA
ccgtgcgccgtcccggactgctcggttggcccgcattattacccggcgtgctggctggcttttgcctcggcgcat

SEQ ID NO: 125791 - DNA, 75 bp, synthetic construct
  source 1..75: mol_type = other DNA
gacctctgcgaggtacgaatccgaaccggtcagacggaggttgctgtcttcacagcttacgaacctgaggagtaa

SEQ ID NO: 125792 - DNA, 75 bp, synthetic construct
  source 1..75: mol_type = other DNA
ccagagtatgtgtttataccagcggcagcagggattgggctggcagtatccatgacgggcggatctttcaaaaaa

SEQ ID NO: 125793 - DNA, 75 bp, synthetic construct
  source 1..75: mol_type = other DNA
cctgatttacgcggtgaatttattcgcggctgggatgacgggcgtggagttgattcgggccgaactatattgaac

SEQ ID NO: 125794 - DNA, 75 bp, synthetic construct
  source 1..75: mol_type = other DNA
atgctcgtcacatgtaggttagcctcttacgtgccgaaaggcaaggagaagcaggctatgaagcagcaaaaggcg

SEQ ID NO: 125795 - DNA, 75 bp, synthetic construct
  source 1..75: mol_type = other DNA
acacccgctgacgtaccgatttattcgggaggttgtgaagttctgggatattccgctaaccgtgttgcaggtcga

SEQ ID NO: 125796 - DNA, 75 bp, synthetic construct
  source 1..75: mol_type = other DNA
tatgacagcgctgactgctatctcgatattcaggccggctccggtggtactgaagcacaggattgggcgagcatg

SEQ ID NO: 125797 - DNA, 75 bp, synthetic construct
  source 1..75: mol_type = other DNA
atctttcggtgtatcacgttcgtctgaaaagtgggcagatgattagcgcccagctacaaaacgcccatcgtcatc

SEQ ID NO: 125798 - DNA, 75 bp, synthetic construct
  source 1..75: mol_type = other DNA
cgaaaagctggcgctagcgtccatttcatttttatggataccggctgtgaacatcctctgacgtatcgctttatt

SEQ ID NO: 125799 - DNA, 75 bp, synthetic construct
  source 1..75: mol_type = other DNA
aaagctgtccgtaatttctggcgtagccagattgacaaaagggccgctgaaaaaatcagtgccgggcagcaggac

SEQ ID NO: 125800 - DNA, 75 bp, synthetic construct
  source 1..75: mol_type = other DNA
taaaccgtttatggacatggttaaaaagtacggcacgccatacatcggcggcgcgttctgtactgacaggctaaa

SEQ ID NO: 125801 - DNA, 75 bp, synthetic construct
  source 1..75: mol_type = other DNA
tgattagccatcgcactaaccctgagtgttacccatcgtttgaggtaacaacatgccgcacagaatataattttg

SEQ ID NO: 125802 - DNA, 75 bp, synthetic construct
  source 1..75: mol_type = other DNA
aggaaagacctctgcgaggtacgaatccgaaccgggcagacggaggtcgctgtcttcgtagactacgaatctaga

SEQ ID NO: 125803 - DNA, 75 bp, synthetic construct
  source 1..75: mol_type = other DNA
agagagtacaccgttcctgctggcgcgtgttgcggagctaacaggcggtgatagcctgaaatccaatattcaact

SEQ ID NO: 125804 - DNA, 75 bp, synthetic construct
  source 1..75: mol_type = other DNA
acattatcggcaggtgacactctggttgtctggaagctggatcggctggggcgtagtatgcggcatcttgtcgtg

SEQ ID NO: 125805 - DNA, 75 bp, synthetic construct
  source 1..75: mol_type = other DNA
gcgttgctggggaacaaagcctggctactgagcgcagtaggcagtgacttttatggtcaatcgctgctaacgcaa

SEQ ID NO: 125806 - DNA, 75 bp, synthetic construct
  source 1..75: mol_type = other DNA
cattctcgatttagggttaaccacggaatatttagaaacatttggtgtacctttaattggctatcagacaagatc

SEQ ID NO: 125807 - DNA, 75 bp, synthetic construct
  source 1..75: mol_type = other DNA
tatctgacagtaagaacgaaaacggactgctttttgataaacagaaagcactgaaaaggattgaggagctggagg

SEQ ID NO: 125808 - DNA, 75 bp, synthetic construct
  source 1..75: mol_type = other DNA
ggatctctatcaccaatgccactgttcttgaggttacgaagggcagaagtgccagcgatatgatgacgggaatgc

SEQ ID NO: 125809 - DNA, 75 bp, synthetic construct
  source 1..75: mol_type = other DNA
cccgtccgcaatttattaatcacactgcaggaaaaactcgccaccccggcaggacagcaagtcgcacagaccctg

SEQ ID NO: 125810 - DNA, 75 bp, synthetic construct
  source 1..75: mol_type = other DNA
tgaccgtctgcatggagcaggtccacaaacctcataacgtttctgcgattattcgtaccgcagatgccgttggcg

SEQ ID NO: 125811 - DNA, 75 bp, synthetic construct
  source 1..75: mol_type = other DNA
gcaggctatgaagcagcaaaaggcgatgctaatcgccctgatcgtcatctgtttaaccgtcatagtgacggcact

SEQ ID NO: 125812 - DNA, 75 bp, synthetic construct
  source 1..75: mol_type = other DNA
gagcgcggcgctgattgcctcgctcaacgggcagagcggcttattctggacagaggctgttaccgcggtaatccg

SEQ ID NO: 125813 - DNA, 75 bp, synthetic construct
  source 1..75: mol_type = other DNA
tggcgaaagtcgcaaaacgcaaaggcctgccctacccccacgttaatcagcaaggcgaaattgaagccgatgctg

SEQ ID NO: 125814 - DNA, 75 bp, synthetic construct
  source 1..75: mol_type = other DNA
aggaaaggcctctgcgaggtacggatccgaaccggccagacggaggtcgctggcttcgcagcttacgaacctgag

SEQ ID NO: 125815 - DNA, 75 bp, synthetic construct
  source 1..75: mol_type = other DNA
catgccaggcgtatgattgtctccagcctggtggctacggggctggtgtggctggcggtaccggtttttttcgta

SEQ ID NO: 125816 - DNA, 75 bp, synthetic construct
  source 1..75: mol_type = other DNA
ctgcttgccgattcgctggctttaaaaagagtggaactcggcattgtgacgttcggcccggtgcatgtggaacaa

SEQ ID NO: 125817 - DNA, 75 bp, synthetic construct
  source 1..75: mol_type = other DNA
gcgattaacacagcggctgaatcagcaaaatccacagccgaagattcatcgcgcgcaaacgcgcattcagcaact

SEQ ID NO: 125818 - DNA, 75 bp, synthetic construct
  source 1..75: mol_type = other DNA
ctccggttctggcgcgcctgttgcgcgaaaaactcgaatcactgctgccgttacatctgggccaggtagcgaaat

SEQ ID NO: 125819 - DNA, 75 bp, synthetic construct
  source 1..75: mol_type = other DNA
ctggttgctctgcctattcgggtattccgctcacgcatcgcgattatgctcagagcgtgcgcttaatcaccggac

SEQ ID NO: 125820 - DNA, 75 bp, synthetic construct
  source 1..75: mol_type = other DNA
agacatgagcgggagaacagcgatacttattcgtcatgccgcctgatagtgaagaaaaacggtgctgaaatttat

SEQ ID NO: 125821 - DNA, 75 bp, synthetic construct
  source 1..75: mol_type = other DNA
cgacgaacgtgtagcgcgggcgatttttgccagccgcattccggtcgtcagcgccgtcgggcatgagacggatgt

SEQ ID NO: 125822 - DNA, 75 bp, synthetic construct
  source 1..75: mol_type = other DNA
ctgcaggagctgtatattaccccgtccatgctgaacaaggtgaagtgggatacgctggcgaaggctgcaaaatgg

SEQ ID NO: 125823 - DNA, 75 bp, synthetic construct
  source 1..75: mol_type = other DNA
tccgtacaagccttatttgcattacaacagttggatggatatcggctttttcactccgtacaccgaacaggatgt

SEQ ID NO: 125824 - DNA, 75 bp, synthetic construct
  source 1..75: mol_type = other DNA
acctgttggtgtccctgttccgtggccttcagctacgccgccaacaggctggctgaaatgcaatggcgctgcctt

SEQ ID NO: 125825 - DNA, 75 bp, synthetic construct
  source 1..75: mol_type = other DNA
ctcttttgatgttgttcgcctgcgaatgcagtatcgcgttgcctatggcgacggcggttttagcgaactacaaag

SEQ ID NO: 125826 - DNA, 75 bp, synthetic construct
  source 1..75: mol_type = other DNA
tggtgtgcgctgttgctgatggtgctggcaaatctttggtacatgccctgggagttggttttctccctgcgttag

SEQ ID NO: 125827 - DNA, 75 bp, synthetic construct
  source 1..75: mol_type = other DNA
acttaaaaaccggtggcgagctggactgggaaaacctggcagccgaaaaacagacgctggtgttctatatggggc

SEQ ID NO: 125828 - DNA, 75 bp, synthetic construct
  source 1..75: mol_type = other DNA
aaattgttcgcgccattgaactggcgaatcagcgcaacgagtgtgacgtattaatcgtcgggcgcggcggcggtt

SEQ ID NO: 125829 - DNA, 75 bp, synthetic construct
  source 1..75: mol_type = other DNA
tattgatgctgtttatggaaatgaatggcgcagaaacctggatggtacatatttgcggcattgttctgcttgccg

SEQ ID NO: 125830 - DNA, 75 bp, synthetic construct
  source 1..75: mol_type = other DNA
gccggaagttacggaatggaaaccgggagaaaagccgccgtgcggcgtgtggcttgattgtattggattggcaag

SEQ ID NO: 125831 - DNA, 75 bp, synthetic construct
  source 1..75: mol_type = other DNA
gcttctctctgatgtgctttggtgggttcgtaacccacctgctgtagataaagtcaataatccgtacggtaagaa

SEQ ID NO: 125832 - DNA, 75 bp, synthetic construct
  source 1..75: mol_type = other DNA
tttcaggtggacgaacatcggcttatctcgttcatctgatggaagcacagcgaaaagctggcgctagcgtccatt

SEQ ID NO: 125833 - DNA, 75 bp, synthetic construct
  source 1..75: mol_type = other DNA
acaaaccaggacaggttttcaggcctggatgagtggtgccggtggattcaacctctcatatatagctgtggggta

SEQ ID NO: 125834 - DNA, 75 bp, synthetic construct
  source 1..75: mol_type = other DNA
caaccttttgatttgcaaatcccggagcacctcgggaactgtgttttctgcatcaaaaagtcaacgcaaaagctg

SEQ ID NO: 125835 - DNA, 75 bp, synthetic construct
  source 1..75: mol_type = other DNA
agaaaagctggtgaaaacgttcattacatactcatggatacgggatgtgaacacccgctgacgtaccggtttatt

SEQ ID NO: 125836 - DNA, 75 bp, synthetic construct
  source 1..75: mol_type = other DNA
ctggtctgctggaactggctgtagaagctgacgacgaagaaacctttaacgaagccgttgctgaactcgacgccc

SEQ ID NO: 125837 - DNA, 75 bp, synthetic construct
  source 1..75: mol_type = other DNA
taacgccagttcgcatatcaaaggcagctcgttcgcctcagatttcgatgcatcaatcgccctgctgcacaatat

SEQ ID NO: 125838 - DNA, 75 bp, synthetic construct
  source 1..75: mol_type = other DNA
catacggggaatgctggtaacaaatgggcctatgagtacagcgatgatagttggtatttgaggtttcgttttttc

SEQ ID NO: 125839 - DNA, 75 bp, synthetic construct
  source 1..75: mol_type = other DNA
tctaccgatgtaattgtcacctggaatgcccgtaaggctgatgatgtccacattttaggaattgggaaattatga

SEQ ID NO: 125840 - DNA, 75 bp, synthetic construct
  source 1..75: mol_type = other DNA
ataaacccagcgacgccacactagtaggtaaaacgactggctctgcttcaggcgtggctgtaaaagtgcattcga

SEQ ID NO: 125841 - DNA, 75 bp, synthetic construct
  source 1..75: mol_type = other DNA
cgactgggagatggcgtggtcgtcagtgaagtgagtgcggtgacgaaaacccgcaagccgcgtaaaaaaacctga

SEQ ID NO: 125842 - DNA, 75 bp, synthetic construct
  source 1..75: mol_type = other DNA
ggcaaaacatcttgccgcaccagacccgcattcacagtatgcacccaaagaaagtccaacgtttaccggaacccc

SEQ ID NO: 125843 - DNA, 75 bp, synthetic construct
  source 1..75: mol_type = other DNA
aaatcgttcgcgccattgagctggcgaacgcccgcaatgagtgcgacgtactgattgtcgggcgtggcggtggtt

SEQ ID NO: 125844 - DNA, 75 bp, synthetic construct
  source 1..75: mol_type = other DNA
atgaaaggacataacttcttaccactggcggtctctctggtgtttctttctggctgccagcagctcaacgaaagc

SEQ ID NO: 125845 - DNA, 75 bp, synthetic construct
  source 1..75: mol_type = other DNA
acagaagaaagttacgctcccagatacaggcttctgaaactgaaggtgtcactgccggccaagaaaggaatcctg

SEQ ID NO: 125846 - DNA, 75 bp, synthetic construct
  source 1..75: mol_type = other DNA
attcttatcctcttgaaagaatcgcaatgaccaccgggggtgatgcaataaatgaagcaacaattatttctcgtc

SEQ ID NO: 125847 - DNA, 75 bp, synthetic construct
  source 1..75: mol_type = other DNA
tttaccgcgatgacgtataccagaagcaaaacgtttaaaactgaagctggcgcgcatcgctggttagccagaaac

SEQ ID NO: 125848 - DNA, 75 bp, synthetic construct
  source 1..75: mol_type = other DNA
gttgaccaccgaacagtgggcacagatcgggcgtttactcgaggccggagaatcaatacagcgtattgcactgat

SEQ ID NO: 125849 - DNA, 75 bp, synthetic construct
  source 1..75: mol_type = other DNA
ggtatgcgggttatggaaacgcgatccagcggttttgatgtcagccatgatgttggctatacgcgctttggcagg

SEQ ID NO: 125850 - DNA, 75 bp, synthetic construct
  source 1..75: mol_type = other DNA
gtgccctggctgaaatggaacgcgaactgatagttgaacgtaccagggcagggctggctgcagcagctcgtgcca

SEQ ID NO: 125851 - DNA, 75 bp, synthetic construct
  source 1..75: mol_type = other DNA
gtggcactaagtccgacagaccggggcttaaaaaactgctcaggacactatcggcaggtgacacactggttgtct

SEQ ID NO: 125852 - DNA, 75 bp, synthetic construct
  source 1..75: mol_type = other DNA
attaccgacgtcgataagaatgccctgacctcacgcgcattcgggcgtgcagctgtaattaccgacgtcggaatt

SEQ ID NO: 125853 - DNA, 75 bp, synthetic construct
  source 1..75: mol_type = other DNA
ttcggaactaaaaacggcggtgtacggcatccggcagtcgttaaaggagccgccgctggaagaactgcttcggca

SEQ ID NO: 125854 - DNA, 75 bp, synthetic construct
  source 1..75: mol_type = other DNA
gccggtgtatcctggcacaatgacctgtttaccactgctcttgacattgatctgactcctgccagtggcttcact

SEQ ID NO: 125855 - DNA, 75 bp, synthetic construct
  source 1..75: mol_type = other DNA
atgacgtataccaaaagcaaaacgtttaaaaccgaagctagcgcgcgtcgctggttatccagaaatactgactga

SEQ ID NO: 125856 - DNA, 75 bp, synthetic construct
  source 1..75: mol_type = other DNA
atgttgagttttctcaccaaaaacgcttgaccaacatcagtgagaaaactaaattaccatccatcaagacaccgc

SEQ ID NO: 125857 - DNA, 75 bp, synthetic construct
  source 1..75: mol_type = other DNA
gatacaggcttctgaaactgaagatgtcactgccggccaggaaaggaattctgcactgccagagctctggtacgc

SEQ ID NO: 125858 - DNA, 75 bp, synthetic construct
  source 1..75: mol_type = other DNA
cttatacagacctgaatgacaactggactgtcggtcttgttgcccagaacatcattccacgcagtattgatacta

SEQ ID NO: 125859 - DNA, 75 bp, synthetic construct
  source 1..75: mol_type = other DNA
ttaacgccaacggcgcgctgactgcccgcgcggtggtcagccaacgtgtaccgccgggcatgaccatgatgtatc

SEQ ID NO: 125860 - DNA, 75 bp, synthetic construct
  source 1..75: mol_type = other DNA
ataaatacaaaaagttctttattatcaaatctccagagcaccttgacgctttgattaactgcatgtcaccagcct

SEQ ID NO: 125861 - DNA, 75 bp, synthetic construct
  source 1..75: mol_type = other DNA
cagcatagacacgtcgactccaatggggcgattcttttttcatgtcatgggtgcgttggcagaaatggaaaggga

SEQ ID NO: 125862 - DNA, 75 bp, synthetic construct
  source 1..75: mol_type = other DNA
gagggagcgaggggtaaacttccgtagcctgaccgacagtatagatacctcaacaccaatggggcgctttttctt

SEQ ID NO: 125863 - DNA, 75 bp, synthetic construct
  source 1..75: mol_type = other DNA
actggctggtacaggcgtgatgttcccgtttttctcaccgtttctcggctggctgggcgtattccttaccggctc

SEQ ID NO: 125864 - DNA, 75 bp, synthetic construct
  source 1..75: mol_type = other DNA
ggtttctggttgttcatttttgcctttcttcaaactcttaacacgcgctaagtttattactaatattgatggcct

SEQ ID NO: 125865 - DNA, 75 bp, synthetic construct
  source 1..75: mol_type = other DNA
gatgatctccccgcaatctatcgccgtggcctgcgccgcgacgggcatggtgggccgagaatctgaactgttccg

SEQ ID NO: 125866 - DNA, 75 bp, synthetic construct
  source 1..75: mol_type = other DNA
gaaaatcacaataaccgccttaaaggtaactatgaacaagatgaactggtggggctgttcaaggagatgaactac

SEQ ID NO: 125867 - DNA, 75 bp, synthetic construct
  source 1..75: mol_type = other DNA
acgaatctctggtatgtggcgtgttccccaaccaggacggcacgtttaccgcgatgacgtataccagaagcaaaa

SEQ ID NO: 125868 - DNA, 75 bp, synthetic construct
  source 1..75: mol_type = other DNA
ttctcccaaaccaacgtttatgaaaatgcagagataatggctaactggcatcatccccggtttttattcaggggg

SEQ ID NO: 125869 - DNA, 75 bp, synthetic construct
  source 1..75: mol_type = other DNA
agcgaggcgtgaatttccgaagcctgactgacagtattgataccagcaccccaatgggccgtttcttttttcatg

SEQ ID NO: 125870 - DNA, 75 bp, synthetic construct
  source 1..75: mol_type = other DNA
gcgtgtcaacaaatgaccagaacaccgatttgcaacgtaatgcactgaactgcgcgggatgtgagcggatttttg

SEQ ID NO: 125871 - DNA, 75 bp, synthetic construct
  source 1..75: mol_type = other DNA
caaccttgtcattccatcagatactgtttctggtcgctggatgaagatactgaataactttaaaggtgatgaagg

SEQ ID NO: 125872 - DNA, 75 bp, synthetic construct
  source 1..75: mol_type = other DNA
ttacggcattagtatatcgacgatttatcgttaccaccccgcaggagaatcaagcggaacaattgagaagagtca

SEQ ID NO: 125873 - DNA, 75 bp, synthetic construct
  source 1..75: mol_type = other DNA
atgacggcgggaacactttgtataacagcgcagcaggtttttagttccgctaccccagcgttaaggggaaatgag

SEQ ID NO: 125874 - DNA, 75 bp, synthetic construct
  source 1..75: mol_type = other DNA
aagcctgggtcgatgattttgtcagggaagctttcggtcgcatgaaaaaagaatacgtctgtaaagacagcgaac

SEQ ID NO: 125875 - DNA, 75 bp, synthetic construct
  source 1..75: mol_type = other DNA
cggcgaggttgagtatttaaccgaaaaccacgccaatccaccttctgcggacgccgtggttttctcgccggatgg

SEQ ID NO: 125876 - DNA, 75 bp, synthetic construct
  source 1..75: mol_type = other DNA
caacaaatgaccagaacacggaattgcagcgtaacgcgctggaatgcgcgggatgtgagctgatttttgaggata

SEQ ID NO: 125877 - DNA, 75 bp, synthetic construct
  source 1..75: mol_type = other DNA
taacacgctgattcagagctctgaagatcataaacgcgatcagcaggcgcaggaacggcttaccgggcgacttca

SEQ ID NO: 125878 - DNA, 75 bp, synthetic construct
  source 1..75: mol_type = other DNA
caacttttgaccaaaatttagaattacaactggaggcgctcaggagttcaggatgtgaccggatttttgaagata

SEQ ID NO: 125879 - DNA, 75 bp, synthetic construct
  source 1..75: mol_type = other DNA
agccagttacagacccggctcgcgatgaaaaccaacttaagcactcttctggaagaacgaccagagaagatcaca

SEQ ID NO: 125880 - DNA, 75 bp, synthetic construct
  source 1..75: mol_type = other DNA
atagcgaggctgattaaaaacggccacgacagaaaacagctggccataatttacgacatcggtatatcgacgatt

SEQ ID NO: 125881 - DNA, 75 bp, synthetic construct
  source 1..75: mol_type = other DNA
acacgctgggggaactggcgatcatcgtggtgttcggtgcggtcatcggtaaattgatggtcgactccggcgcgg

SEQ ID NO: 125882 - DNA, 75 bp, synthetic construct
  source 1..75: mol_type = other DNA
acaatttcgaagtccgtggattcgctaccgtcaacaatgcggatatgccagttcgtctggttgttctgagaaacg

SEQ ID NO: 125883 - DNA, 75 bp, synthetic construct
  source 1..75: mol_type = other DNA
atgcttattggctatgtacgtgtatcaacaaatgaccagaacacagatctacaacgtaatgcgctgaactgtgca

SEQ ID NO: 125884 - DNA, 75 bp, synthetic construct
  source 1..75: mol_type = other DNA
gtcagaatggccatggaggagatcgatactaaaacccgggaattactgacgggggtctgcacctcactggaagag

SEQ ID NO: 125885 - DNA, 75 bp, synthetic construct
  source 1..75: mol_type = other DNA
taatgcgtgatgataacggcattgtgcaactgtggcttatctcgccacagggcggtgaaccacgccagttaaccc

SEQ ID NO: 125886 - DNA, 75 bp, synthetic construct
  source 1..75: mol_type = other DNA
cagcctgctggcggatatccgggaaatagcagactgtcaggagcaggtgaccgctgatgtcagaatggccatgga

SEQ ID NO: 125887 - DNA, 75 bp, synthetic construct
  source 1..75: mol_type = other DNA
attttcatttaacgctgcagcagcgacgtcatattttgaagcgcgtaacgatgcaatgggtggcaccggggtggc

SEQ ID NO: 125888 - DNA, 75 bp, synthetic construct
  source 1..75: mol_type = other DNA
gcaacgtaatgcactgaactgcgcgggatgtgaccggatttttgaggacaaaatcagtggcactaagtccgacag

SEQ ID NO: 125889 - DNA, 75 bp, synthetic construct
  source 1..75: mol_type = other DNA
atgacggcgggaacactttatataacagcgcagcaggtttttagttccgctaccccggcgttaaggggaaatgag

SEQ ID NO: 125890 - DNA, 75 bp, synthetic construct
  source 1..75: mol_type = other DNA
ggcgaataggtgggcgtcgatcaaagctaactgatgaacagtgggcgcaggcaggaaggttggttgcagcaggtg

SEQ ID NO: 125891 - DNA, 75 bp, synthetic construct
  source 1..75: mol_type = other DNA
ctcctcgccagaaggtggcgattatctatgatgtgggtgtatcgactttgtataagaagtttccggtcggagata

SEQ ID NO: 125892 - DNA, 75 bp, synthetic construct
  source 1..75: mol_type = other DNA
atagcgaggctgattaaatacggtcatgacaggaaacaactggcgatcatttacgacatcggcatatcgacgatt

SEQ ID NO: 125893 - DNA, 75 bp, synthetic construct
  source 1..75: mol_type = other DNA
ccgccggtcagaaatggtcactgggcttcacacccaaataccagcgcgtggatctgttcaactacaacgtctccg

SEQ ID NO: 125894 - DNA, 75 bp, synthetic construct
  source 1..75: mol_type = other DNA
acgctctataaaaaatttccctcatcagcgacaaagaataaattgtgtcatcccttagccaaccgggacaaatag

SEQ ID NO: 125895 - DNA, 75 bp, synthetic construct
  source 1..75: mol_type = other DNA
tgcaatgctggctatctctaccctgaccgttttacctgcgtatttaatgaccacggcatacctgtttaaactatg

SEQ ID NO: 125896 - DNA, 75 bp, synthetic construct
  source 1..75: mol_type = other DNA
ttttgatgtgggcatttctaccatttatagaaaatttccggcaaataagagcagtgaatcccctgaatcagcata

SEQ ID NO: 125897 - DNA, 75 bp, synthetic construct
  source 1..75: mol_type = other DNA
cagcaaaccggggatacccgcgaactactggatattctggcggatgatggctggctcaaaaatgaataccacggg

SEQ ID NO: 125898 - DNA, 75 bp, synthetic construct
  source 1..75: mol_type = other DNA
ataataaacgtcgttactattctatcgataatacactcttatatattgaagatgttgaaaacaataaacccttaa

SEQ ID NO: 125899 - DNA, 75 bp, synthetic construct
  source 1..75: mol_type = other DNA
actgatagttgaacgtaccagggcggggattgctgcagctcgtgctaaaggcagagtaggtggacgccgtcctaa

SEQ ID NO: 125900 - DNA, 75 bp, synthetic construct
  source 1..75: mol_type = other DNA
atgatcttgcttccggcggtcgtgatgatcgccctggcttgactgcctgcctcaagtcattgcgtgacggcgatg

SEQ ID NO: 125901 - DNA, 75 bp, synthetic construct
  source 1..75: mol_type = other DNA
aggcagcggcaaatcttaaacatcgtctgcaggaattccgcaatatcaatgcagatgctcaggtaggtgtatcag

SEQ ID NO: 125902 - DNA, 75 bp, synthetic construct
  source 1..75: mol_type = other DNA
atcgagcgcgtcactctctaccgatatgtcggtcccaaaggcgagctcagagaccatggaaagcatgttctcgga

SEQ ID NO: 125903 - DNA, 75 bp, synthetic construct
  source 1..75: mol_type = other DNA
attctttggtactgaagaacagtatgcccagtttaaagcgggtgagaataatgtcgctctggctgcggtaaattg

SEQ ID NO: 125904 - DNA, 75 bp, synthetic construct
  source 1..75: mol_type = other DNA
gtgtttcccgtcgacgttttataaacgaattaatgcaggagatcgcaggggagcgtgtgaggcgcttcgctggtg

SEQ ID NO: 125905 - DNA, 75 bp, synthetic construct
  source 1..75: mol_type = other DNA
attctggtggatggtaagcctgttattcctggcatgaagctgtcaaaggaaaaatgcgaccgggttaatgccatc

SEQ ID NO: 125906 - DNA, 75 bp, synthetic construct
  source 1..75: mol_type = other DNA
cggattaatgccggtgatcgcaagggagcctgcgaggcgattcgctggtggattaaggacggtggcagggactgc

SEQ ID NO: 125907 - DNA, 75 bp, synthetic construct
  source 1..75: mol_type = other DNA
caggttaacgccattgaacgtgataaggcgctggcatgggtggcgaaaaacatcagagtgccactgaccgaaccc

SEQ ID NO: 125908 - DNA, 75 bp, synthetic construct
  source 1..75: mol_type = other DNA
gtgaagcaatccgctggtggatcaaagacggtggccgcgattgccgactaaccaaaggccagaagaatggctgct

SEQ ID NO: 125909 - DNA, 75 bp, synthetic construct
  source 1..75: mol_type = other DNA
cggggagctaccacggttgacggcaagcctgttaccccaggtatgaggctatcgccagagaaatgtaatcaggtg

SEQ ID NO: 125910 - DNA, 75 bp, synthetic construct
  source 1..75: mol_type = other DNA
tgtcagctgccgttctggcgctgattgctgcaggcgcgtctgctcctcaaatacttgaccagtttctggatgaaa

SEQ ID NO: 125911 - DNA, 75 bp, synthetic construct
  source 1..75: mol_type = other DNA
ggcagagactgccgtatccgttcaaataattgctacggtcaggtctcacggcgtgaccaggagagcgcgctggcg

SEQ ID NO: 125912 - DNA, 75 bp, synthetic construct
  source 1..75: mol_type = other DNA
cgaaccccagaaagcggggattgcgtcattctgtccgtacaacattggccccggtaagtgtttcccgtcgacgtt

SEQ ID NO: 125913 - DNA, 75 bp, synthetic construct
  source 1..75: mol_type = other DNA
gcctgaaatcctcgaccagtttctggatgaaaaggaaggtaaccacaccacggcataccgtgatggcgcgggtat

SEQ ID NO: 125914 - DNA, 75 bp, synthetic construct
  source 1..75: mol_type = other DNA
aaccccagaaagcggggatcgcgtcattctgtccgtacaacattggtcccggtaagtgtttcccgtcgacgtttt

SEQ ID NO: 125915 - DNA, 75 bp, synthetic construct
  source 1..75: mol_type = other DNA
ttcacagataaaacactctccaggaaacccggggcggttcagactgtatgtcacggacacaccggaaaagacatc

SEQ ID NO: 125916 - DNA, 75 bp, synthetic construct
  source 1..75: mol_type = other DNA
atgactatgtggcttcgcgtccggtatttaccgaagtggaagcgattcgccgcgtactgtacctggcgaaagttg

SEQ ID NO: 125917 - DNA, 75 bp, synthetic construct
  source 1..75: mol_type = other DNA
agttatggatgcgtctggtctggtggtttcgccgggcatggttgatgcgcacacccatatttctgaaccgggtcg

SEQ ID NO: 125918 - DNA, 75 bp, synthetic construct
  source 1..75: mol_type = other DNA
tcaaataattgctatggtcaggtatcccgtcgtgaccaggagagcgcgctggcgtgctggggaatcgacagataa

SEQ ID NO: 125919 - DNA, 75 bp, synthetic construct
  source 1..75: mol_type = other DNA
aagccgggcgtctcgacagcctgcaactactgcacttccacctcggttcgcagatggcgaatattcgcgatatcg

SEQ ID NO: 125920 - DNA, 75 bp, synthetic construct
  source 1..75: mol_type = other DNA
gcagttcttcaaaggcgcgcagaagctgggcgaactggggcagccggtgctggtgcactgcgaaaacgcgctgat

SEQ ID NO: 125921 - DNA, 75 bp, synthetic construct
  source 1..75: mol_type = other DNA
tgggaaaaactgtttaacggtgaaatcgactgcctggtttccgaccactcaccatgccctccggaaatgaaagcc

SEQ ID NO: 125922 - DNA, 75 bp, synthetic construct
  source 1..75: mol_type = other DNA
tgtcggctgccgttctggcgctgattggcgcaggtgcttctgcacctgtaattctcgatcagtttctggatgaaa

SEQ ID NO: 125923 - DNA, 75 bp, synthetic construct
  source 1..75: mol_type = other DNA
atctgccgtggtgccacccgggtggatggcagacctgtagtccccggcatgaagctgacgaaggaaaaatgcgac

SEQ ID NO: 125924 - DNA, 75 bp, synthetic construct
  source 1..75: mol_type = other DNA
atgaacgcaaaaatcagatacggcctgtcggctgccgttctggcactgattgccgctggtgcgcctgcgcctgac

SEQ ID NO: 125925 - DNA, 75 bp, synthetic construct
  source 1..75: mol_type = other DNA
atgagcaggaaactccgctatggtttatcggctgccgttctggcgctgattggtgcaggggcttctgcgcctgaa

SEQ ID NO: 125926 - DNA, 75 bp, synthetic construct
  source 1..75: mol_type = other DNA
accccagaaagcggggatcgcgtcattctgtccgtacaacattggtcccggtaagtgtttcccgtcgacgtttta

SEQ ID NO: 125927 - DNA, 75 bp, synthetic construct
  source 1..75: mol_type = other DNA
cagaaagcggggattgcgtcattctgtccgtacaacattggtcccggtaagtgtttcccgtctacgttttacaga

SEQ ID NO: 125928 - DNA, 75 bp, synthetic construct
  source 1..75: mol_type = other DNA
gtatgttacgggcatacaggaaaagacatcattcccggtaaaacgtataccgaagcagagtgcaaagccctcctg

SEQ ID NO: 125929 - DNA, 75 bp, synthetic construct
  source 1..75: mol_type = other DNA
ttgtccctataacattggccccggtaagtgtttcccgtcgacgttttataagcggctgaatgctggtgatcgtaa

SEQ ID NO: 125930 - DNA, 75 bp, synthetic construct
  source 1..75: mol_type = other DNA
aaatgcgaccgggttaacgccattgagcgtgataaggcgctggcatgggtggagaaaaacatcaaagtgccattg

SEQ ID NO: 125931 - DNA, 75 bp, synthetic construct
  source 1..75: mol_type = other DNA
agctacgtcgctggacatacgctggcggtaagcaatggaaaggcctgatgactcgccgtgagattgagcgtgaaa

SEQ ID NO: 125932 - DNA, 75 bp, synthetic construct
  source 1..75: mol_type = other DNA
cgtatccgctcaaatattgctacggtcaggtatcccggcgagatcaggaaagtgcgctggcgtgcgtggggaatc

SEQ ID NO: 125933 - DNA, 75 bp, synthetic construct
  source 1..75: mol_type = other DNA
aaaggatgcgtaccacggcaggactctacgatattgagacgccggacaagacatggacatcctgcgaccttgtga

SEQ ID NO: 125934 - DNA, 75 bp, synthetic construct
  source 1..75: mol_type = other DNA
tggcgtatggactgtatgtcacggacacaccggaaaagacatcatgctcggtaaaacgtataccgaagcagaatg

SEQ ID NO: 125935 - DNA, 75 bp, synthetic construct
  source 1..75: mol_type = other DNA
tgttcaaccgtctgcaaaaaacgctccgggccatgcctccggataaccgtgacaacctgcccctgctgtatcaga

SEQ ID NO: 125936 - DNA, 75 bp, synthetic construct
  source 1..75: mol_type = other DNA
cgaattaatgcaggcgatcgccggggtgcatgcgaggcgattcgctggtggattaaagacggtggcagagactgc

SEQ ID NO: 125937 - DNA, 75 bp, synthetic construct
  source 1..75: mol_type = other DNA
aagtttttaaaatataaaactgatattgataatgattctctaatgaaagccagaggtgataaaccagaagcggtg

SEQ ID NO: 125938 - DNA, 75 bp, synthetic construct
  source 1..75: mol_type = other DNA
cgctggcggtaagcaatggaaagggctgatgacccgtcgtgagattgagcgtgaagtctgtttgtgggggcaaca

SEQ ID NO: 125939 - DNA, 75 bp, synthetic construct
  source 1..75: mol_type = other DNA
aaccagggcgatatcaaaggcgcatgtgatcagctacgtcgctggacatacgctggcggtaagcaatggaaaggg

SEQ ID NO: 125940 - DNA, 75 bp, synthetic construct
  source 1..75: mol_type = other DNA
cgaattaatgcaggagatcgaaaaggtgcctgcgaagcgattcgctggtggattaaggacggtggcagagactgc

SEQ ID NO: 125941 - DNA, 75 bp, synthetic construct
  source 1..75: mol_type = other DNA
atgaagctgtcgaaggaaaaatgcgaccgggttaacgctatcgaacgggataaggcgctggcatgggtggagaaa

SEQ ID NO: 125942 - DNA, 75 bp, synthetic construct
  source 1..75: mol_type = other DNA
atcgccaccgaagatcgcgaaactaaaaccttgatcgtggaagctatcgtgcgcgaaaccggcgcctgtaatgta

SEQ ID NO: 125943 - DNA, 75 bp, synthetic construct
  source 1..75: mol_type = other DNA
gagaaaaacatcaaagtgccactgactgaaccccagaaagcgggtattgcgtcattctgtccttacaacattggc

SEQ ID NO: 125944 - DNA, 75 bp, synthetic construct
  source 1..75: mol_type = other DNA
gtggtagagactgccgtatccgttcaaataattgctacggtcaggtctcacggcgtgaccaggagagcgcgctgg

SEQ ID NO: 125945 - DNA, 75 bp, synthetic construct
  source 1..75: mol_type = other DNA
cgtattcgctcaaacaactgctacggtcaggtatcccgtcgcgaccaggagagtgcgctggcgtgctggggaatt

SEQ ID NO: 125946 - DNA, 75 bp, synthetic construct
  source 1..75: mol_type = other DNA
ccgagcagagttggtatttcggatggcttcagctcaggtttacgcttacgacgatttggtactttgtagatgtgt

SEQ ID NO: 125947 - DNA, 75 bp, synthetic construct
  source 1..75: mol_type = other DNA
gccattacatacgccagggattcttacctggcattcccgaccacgcgctgcttttctcaaatcagccatgattcc

SEQ ID NO: 125948 - DNA, 75 bp, synthetic construct
  source 1..75: mol_type = other DNA
gtatgttacgggcacaccggaaaagacattatgctcggtaaaacgtataccgaagcagaatgcaaaaccctcctg

SEQ ID NO: 125949 - DNA, 75 bp, synthetic construct
  source 1..75: mol_type = other DNA
ccctgaataacttttcgctcagtgaaagtaacgtactgagtgcagttcgtggcggcggtgtcctgggactcatta

SEQ ID NO: 125950 - DNA, 75 bp, synthetic construct
  source 1..75: mol_type = other DNA
aaacaacgcgcggcgctctttactcgttcgtttacaacgtgggcgctggcaatttcagaacatcgacgcttcttc

SEQ ID NO: 125951 - DNA, 75 bp, synthetic construct
  source 1..75: mol_type = other DNA
gctattggtggtggggctgttgccatagcgtctgtgctcatcactggtccaagtggtaacgatggtctggaaggt

SEQ ID NO: 125952 - DNA, 75 bp, synthetic construct
  source 1..75: mol_type = other DNA
gattaactataccgccagccgtcttgctgctgcgttcaatcacggatttatcaataagtctttgcgtgaagtttt

SEQ ID NO: 125953 - DNA, 75 bp, synthetic construct
  source 1..75: mol_type = other DNA
tgcagagcttgagactaatctcgcggcgctggcggcggagaatgaactggctcgtaaggcagttcaggcattctg

SEQ ID NO: 125954 - DNA, 75 bp, synthetic construct
  source 1..75: mol_type = other DNA
gcgaggaacgggagaagatatagaaggcgctatggctatcgtttatgaagagtacaaaggtcagcctgacgctca

SEQ ID NO: 125955 - DNA, 75 bp, synthetic construct
  source 1..75: mol_type = other DNA
tctacccccgttccggttttgtcagccagaccgatgatgacaaagcggcagccctggtggcccagcgggtggcag

SEQ ID NO: 125956 - DNA, 75 bp, synthetic construct
  source 1..75: mol_type = other DNA
ccggtgccatttctcagagctgcatcagctggcgggtcagcggtatctgttactggctgcactgctcctggtcgg

SEQ ID NO: 125957 - DNA, 75 bp, synthetic construct
  source 1..75: mol_type = other DNA
tgctatatcaccacaaaagcccattccagccaccgatgctttcctggctgaaatacgtgcggaggcacgcaacga

SEQ ID NO: 125958 - DNA, 75 bp, synthetic construct
  source 1..75: mol_type = other DNA
ataatgtcacatgagaattacccagattacttagaggtagggtgcatatgcgctggtcacttggagaatgattat

SEQ ID NO: 125959 - DNA, 75 bp, synthetic construct
  source 1..75: mol_type = other DNA
tctgggatcgcgatacgattcggattactcatcctggccatataagtcagtcaaaatgggcggtgtgagcctatg

SEQ ID NO: 125960 - DNA, 75 bp, synthetic construct
  source 1..75: mol_type = other DNA
tacgctggcgaaacactgcaatctcaacttgtttccagttatagccatagtaaagattacaactacgatccacat

SEQ ID NO: 125961 - DNA, 75 bp, synthetic construct
  source 1..75: mol_type = other DNA
ggtaaaccaatggcaacatccagtatgacaaccggccagagcactaccatcgataatagtttccgcaatgatagc

SEQ ID NO: 125962 - DNA, 75 bp, synthetic construct
  source 1..75: mol_type = other DNA
tggcagtcaccggggacgaagccaagaaaatggcaaacagcggtttgcttgatcctgttcaggcgaaggctatcc

SEQ ID NO: 125963 - DNA, 75 bp, synthetic construct
  source 1..75: mol_type = other DNA
atcttcagttacaaggtgaccacaatttttgcagatggctcccgcgaaactgtcagagccctgcggcttaaagga

SEQ ID NO: 125964 - DNA, 75 bp, synthetic construct
  source 1..75: mol_type = other DNA
aggatgcgaaggacgcagaagatgccgcgaaggcgctggttgaggcagccgaagcgaagcaggctgaagcggaag

SEQ ID NO: 125965 - DNA, 75 bp, synthetic construct
  source 1..75: mol_type = other DNA
cccggatggtgtggaagcggaccgttctggtgatgatttaattctgcgtaaaaaggaagatgatacagaaatccg

SEQ ID NO: 125966 - DNA, 75 bp, synthetic construct
  source 1..75: mol_type = other DNA
tcataaatgagacaaaacagaatataaataattattataatagacttagagctgaagatgtacataaggaatatg

SEQ ID NO: 125967 - DNA, 75 bp, synthetic construct
  source 1..75: mol_type = other DNA
gaagaaggcaactgtagattcaattggtcaacgcaacagttatgtgaaaacatggggttgcggaggttttttgaa

SEQ ID NO: 125968 - DNA, 75 bp, synthetic construct
  source 1..75: mol_type = other DNA
aggaagcggcagcggcagtggcagcggccacggcggcagtggaagcagcggaagcagcggaccaggccgcgaagg

SEQ ID NO: 125969 - DNA, 75 bp, synthetic construct
  source 1..75: mol_type = other DNA
gaagccctgaaaggtcgtctggatgcggtggatggtatccaggtaccggcggtgaacgatgcagacggcaacggc

SEQ ID NO: 125970 - DNA, 75 bp, synthetic construct
  source 1..75: mol_type = other DNA
gacctctatcatgatggaagggcttgttccgctttccaacgtagcacgcaaaaaactggtcaaacgtttcccgga

SEQ ID NO: 125971 - DNA, 75 bp, synthetic construct
  source 1..75: mol_type = other DNA
atatctgcatagcatatatatcctgttgctactttggctatggcacttatgggatagctaaacttaccaaagctc

SEQ ID NO: 125972 - DNA, 75 bp, synthetic construct
  source 1..75: mol_type = other DNA
gaagaagagaatatgtggggcaatgtgtatcccataagcgctaacttaagggttgaaccatctgaagaatgcgac

SEQ ID NO: 125973 - DNA, 75 bp, synthetic construct
  source 1..75: mol_type = other DNA
gacagggatagcgatgaattcaaactcattattgagcatattaagatagcgcagaagaaacggtttgatgaatca

SEQ ID NO: 125974 - DNA, 75 bp, synthetic construct
  source 1..75: mol_type = other DNA
ggcatggcgtggctttggttttcttgacagggatagcgatgaattcaaactcattattgagcatattaagatagc

SEQ ID NO: 125975 - DNA, 75 bp, synthetic construct
  source 1..75: mol_type = other DNA
ctgctgccacaccactgaggccttattttctcagcacactggacagccttgcctggcgtaccggcatgcctgaat

SEQ ID NO: 125976 - DNA, 75 bp, synthetic construct
  source 1..75: mol_type = other DNA
actggtccaagtggtaacgatggtctggaaggtgtcagctacataccatacaaagatatcgttggtgtatggact

SEQ ID NO: 125977 - DNA, 75 bp, synthetic construct
  source 1..75: mol_type = other DNA
agcgtctgcctgcactgttctgtttcccacagatcctgcagcaccgtttgcgttccattaacgccgcgtttaaac

SEQ ID NO: 125978 - DNA, 75 bp, synthetic construct
  source 1..75: mol_type = other DNA
gcaagaacgcgcatgggcggaacagctctatttgagtatgtgccatgaagtgcagaaacaactggacccgcaaaa

SEQ ID NO: 125979 - DNA, 75 bp, synthetic construct
  source 1..75: mol_type = other DNA
atggtggatggaaaacccgtttttcccggtatgaaactgtcgaaggaaaaatgcgaccaggtcaacgccattgag

SEQ ID NO: 125980 - DNA, 75 bp, synthetic construct
  source 1..75: mol_type = other DNA
catcagagtgccattgagtgaaccccagaaagcggggatcgcgtcattctgtccgtacaacattggtcccggtaa

SEQ ID NO: 125981 - DNA, 75 bp, synthetic construct
  source 1..75: mol_type = other DNA
cagaaagccggtatcgcgtcattctgtccctataacattggccctggtaagtgttttccgtcgacgttttataag

SEQ ID NO: 125982 - DNA, 75 bp, synthetic construct
  source 1..75: mol_type = other DNA
ctggtggggcaataactactatgacgttaacgagctgggccacattagcgtgtgcccggacccggacgtcccgga

SEQ ID NO: 125983 - DNA, 75 bp, synthetic construct
  source 1..75: mol_type = other DNA
ggtctgccacatccgacggtgatcaccgaatcgggtcgtgcggtgactgcgcatcacactgtgctggtttccaat

SEQ ID NO: 125984 - DNA, 75 bp, synthetic construct
  source 1..75: mol_type = other DNA
ggcgtcaacattcagtgctttgacgttggcggtggtctgggcgtggattatgaaggcacccgttcgcaatccgat

SEQ ID NO: 125985 - DNA, 75 bp, synthetic construct
  source 1..75: mol_type = other DNA
tgaatggttacacgacagtcagatggatctgcacgacattcatatcggctactcttccggcacctttagcctgca

SEQ ID NO: 125986 - DNA, 75 bp, synthetic construct
  source 1..75: mol_type = other DNA
tattgccacgacaatgccaatgccggagtacgatccagagaatccgccgatgctcggtttctttatggtcggcgc

SEQ ID NO: 125987 - DNA, 75 bp, synthetic construct
  source 1..75: mol_type = other DNA
cggcagcgtagaagtggagctgtctgacgagggcgataccgttgcggatatgctgcaatatgtgcagctcgatcc

SEQ ID NO: 125988 - DNA, 75 bp, synthetic construct
  source 1..75: mol_type = other DNA
agggcgcgatgcctttgtgctggcttcggtcggctgccgcgtgcggatgctggagcgtaatccagtggttgccgc

SEQ ID NO: 125989 - DNA, 75 bp, synthetic construct
  source 1..75: mol_type = other DNA
tgttctggcggcccgctgggggctggaacatgatgaagacaacctgatggcgctggtattaacgccggagcatct

SEQ ID NO: 125990 - DNA, 75 bp, synthetic construct
  source 1..75: mol_type = other DNA
atgccgatgcggaaatcggcggctggttacaggaacgtttgcagttaattcacgcctccagcctgacggcgctga

SEQ ID NO: 125991 - DNA, 75 bp, synthetic construct
  source 1..75: mol_type = other DNA
actgattaaatcacaactcattaccagctatagccatagcaaagattacaactacgatccccattatggtcgtta

SEQ ID NO: 125992 - DNA, 75 bp, synthetic construct
  source 1..75: mol_type = other DNA
gcgaccagctgcgccgctggacttacgccaagggcaagcagtggaaaggcctggtaactcgccgcgagattgagc

SEQ ID NO: 125993 - DNA, 75 bp, synthetic construct
  source 1..75: mol_type = other DNA
aaacaacgcgcggcgctctttactcgttcgtctacaacgtgggtgctggcaatttcagaacatcgacgcttcttc

SEQ ID NO: 125994 - DNA, 75 bp, synthetic construct
  source 1..75: mol_type = other DNA
tggacgttatgtcgtggcgtgacggttatcgatggtaagcgtgtcgtcaaagggatgacggcaacaaaagcgcag

SEQ ID NO: 125995 - DNA, 75 bp, synthetic construct
  source 1..75: mol_type = other DNA
cggattaatgctggtgaccgcaggggagcatgcgaggcgattcgctggtggattaaggacggtggcagagactgc

SEQ ID NO: 125996 - DNA, 75 bp, synthetic construct
  source 1..75: mol_type = other DNA
agaaaaacatcaaagtgccattgagcgaaccccagaaagcggggatcgcgtcattctgtccgtacaacattggtc

SEQ ID NO: 125997 - DNA, 75 bp, synthetic construct
  source 1..75: mol_type = other DNA
ggtctatctcgatccgatgttcccacataagcagaaaagcgcgctggtgaaaaaagagatgcgtgtctttcagtc

SEQ ID NO: 125998 - DNA, 75 bp, synthetic construct
  source 1..75: mol_type = other DNA
aaaaagagatgcgcgtgttccagtcgctggtggggccggatctcgacgctgatggattgctggagcctgcacgct

SEQ ID NO: 125999 - DNA, 75 bp, synthetic construct
  source 1..75: mol_type = other DNA
cggcccgctgggggctggaacacgatgaagacaacctgatggcgctggtgttaacgccggagcatctggaactgc

SEQ ID NO: 126000 - DNA, 75 bp, synthetic construct
  source 1..75: mol_type = other DNA
tgatccggcgaagctgcaagaatccagcccgctgccggttctcggcgctgtgccgtggagctttgacctgatcgc

SEQ ID NO: 126001 - DNA, 75 bp, synthetic construct
  source 1..75: mol_type = other DNA
acagcgttctgccgacctgatctccattgggccaatgctgcaaggtatgcgcaaaccggttaacgacctgtcccg

SEQ ID NO: 126002 - DNA, 75 bp, synthetic construct
  source 1..75: mol_type = other DNA
cctgcagagcttcaaccaggaagttccggttgacgatcacgaacgtatcgagaaagttcaggaatacgttgctaa

SEQ ID NO: 126003 - DNA, 75 bp, synthetic construct
  source 1..75: mol_type = other DNA
gcttggtctgtgggttgccgcacaggttgccggttccaccaacatcagcaacatcaccgacaccgtttatcactg

SEQ ID NO: 126004 - DNA, 75 bp, synthetic construct
  source 1..75: mol_type = other DNA
gatctgatcgcaactcgtgcgatcgatatggcacgccacctgaacgccaccatcatcaacgaaggcgacatcaac

SEQ ID NO: 126005 - DNA, 75 bp, synthetic construct
  source 1..75: mol_type = other DNA
ctatgttgctcgtctggtcgagctgcgtaagaacaaaggcatgaccgaaaccgttgcccgcgaacagctggaaga

SEQ ID NO: 126006 - DNA, 75 bp, synthetic construct
  source 1..75: mol_type = other DNA
atttttgatgaatccacggctgaaggcgtgggtggtgatttttacgagatgagtaaccgtgcacaggagagcact

SEQ ID NO: 126007 - DNA, 75 bp, synthetic construct
  source 1..75: mol_type = other DNA
tttatggcgtgagcattgacgagttgcaggataagtttaacgaagttgccggggaaatgaaccgtggcaacgatg

SEQ ID NO: 126008 - DNA, 75 bp, synthetic construct
  source 1..75: mol_type = other DNA
tatgcgggcctgttaattcatgtcagagataaccagccgtgggatcagccagtaacaaaaggcgtaggcattgcc

SEQ ID NO: 126009 - DNA, 75 bp, synthetic construct
  source 1..75: mol_type = other DNA
tggtttccggtgctgttcacaccaccgcaaacaccatccgtccgccgctgcagctgatcaaaactgcaccgggca

SEQ ID NO: 126010 - DNA, 75 bp, synthetic construct
  source 1..75: mol_type = other DNA
ccgttgcccgcgaacagctggaagacaacgtggttctcggtacgctgatgctggaacaggatgaagttgatggtc

SEQ ID NO: 126011 - DNA, 75 bp, synthetic construct
  source 1..75: mol_type = other DNA
tgagctacatgattgcccaggagatgcgcgccagaatgccggtgagggtaaaacagaaaacggataaacgcagaa

SEQ ID NO: 126012 - DNA, 75 bp, synthetic construct
  source 1..75: mol_type = other DNA
cgtctgaattccccatgggcagaacaagcccgacagttggttgatgctaacagcacgatcacttcagcgttacac

SEQ ID NO: 126013 - DNA, 75 bp, synthetic construct
  source 1..75: mol_type = other DNA
gctgcagccgaaaggcgagccggaatttaacatgaaagcgttgcaggcggcctgggatcaaatcatggccccatc

SEQ ID NO: 126014 - DNA, 75 bp, synthetic construct
  source 1..75: mol_type = other DNA
ggatcaaatcatgaccccatctaccgccgctgcgaccacctctgtcgccacggatgacgtacatcctgaagtgac

SEQ ID NO: 126015 - DNA, 75 bp, synthetic construct
  source 1..75: mol_type = other DNA
attttccaccgagatcgtccgttatgagctttcaggcccacaaggcatcgaacaagcaatccgttttttaagcca

SEQ ID NO: 126016 - DNA, 75 bp, synthetic construct
  source 1..75: mol_type = other DNA
tcttctttgaaaaattcccacgcctgaaggcggcaatcactgatgatgttccccgctggcgtgaggcgctgcgca

SEQ ID NO: 126017 - DNA, 75 bp, synthetic construct
  source 1..75: mol_type = other DNA
tgatgccgatgcggtggtgatttctgattttatcgcccagcggttgcctgacgacgtgacgagtaaagtgaaaga

SEQ ID NO: 126018 - DNA, 75 bp, synthetic construct
  source 1..75: mol_type = other DNA
tgctgaaagaagcgctctcttatctggcgaatacgactggcaagctgaccatcacgccagaaacggtaaaccatg

SEQ ID NO: 126019 - DNA, 75 bp, synthetic construct
  source 1..75: mol_type = other DNA
tgacgcagcacaggcgcgttcattgtggcagcaggggatcgaccctaaacgcccgatgccgccggtaattgtctc

SEQ ID NO: 126020 - DNA, 75 bp, synthetic construct
  source 1..75: mol_type = other DNA
actgccgttcgacctggcggaagccgagcaggagttgcaggaaggtccgctctctgagtatagcggcagcggctt

SEQ ID NO: 126021 - DNA, 75 bp, synthetic construct
  source 1..75: mol_type = other DNA
aatagtctgacagtcgaaatgttgaatcaggatctgcgccagcaactgtcgaacgatatggcgttaattctgctg

SEQ ID NO: 126022 - DNA, 75 bp, synthetic construct
  source 1..75: mol_type = other DNA
tcagaaactgcgtcaggatttccttaacagcctgacggtagagatgttaaatcaggatctgcgtcagcagttgtc

SEQ ID NO: 126023 - DNA, 75 bp, synthetic construct
  source 1..75: mol_type = other DNA
tgataccgatattctgatggggcagcggatgcgttcgttgcaaaatcaggtcgtcgatatcgcgccggagcaata

SEQ ID NO: 126024 - DNA, 75 bp, synthetic construct
  source 1..75: mol_type = other DNA
tacttttcagcaatagccggactgctggtgacacaatagacgtattgaatgaaaaactagctgaccttgcggcaa

SEQ ID NO: 126025 - DNA, 75 bp, synthetic construct
  source 1..75: mol_type = other DNA
aacgttagtggctcgatgaccgctggcacgctgaccagccagtggctgaagcaaaccgataaagccattctggat

SEQ ID NO: 126026 - DNA, 75 bp, synthetic construct
  source 1..75: mol_type = other DNA
agccatcagttgcttgcaccggcggacaatatctccattgcaaaaaatgagctggcggttctggggacgatttca

SEQ ID NO: 126027 - DNA, 75 bp, synthetic construct
  source 1..75: mol_type = other DNA
tctccctttcgctggtttatccgcagcgtcgggagctttcccggcgtgtaaacctgtttatgcagtggctggctg

SEQ ID NO: 126028 - DNA, 75 bp, synthetic construct
  source 1..75: mol_type = other DNA
gagaaatgcagaaaacaagcccaatacaaaaaacaaaaaaatgttcctagtgtctgttcgcgcatttaaaacaaa

SEQ ID NO: 126029 - DNA, 75 bp, synthetic construct
  source 1..75: mol_type = other DNA
ccaacaggaaaaatgctgggaatggtttcaggggcccttgcatgggttgatgagcctccgctttcaccagaacag

SEQ ID NO: 126030 - DNA, 75 bp, synthetic construct
  source 1..75: mol_type = other DNA
ggggggaacctggcgcacctggtgcagtggggcccgcaggcccacggggaccggctggtgcagctggtcccaaag

SEQ ID NO: 126031 - DNA, 75 bp, synthetic construct
  source 1..75: mol_type = other DNA
cccacgtggagaggccggaccacccggaccacagggtccggcagggcaaaccggcccgaaaggggataaaggtga

SEQ ID NO: 126032 - DNA, 75 bp, synthetic construct
  source 1..75: mol_type = other DNA
tgagatcgcaaagaacacgccaagcgcagcaaacatcgttgcctatgcaatgcaggttcgtgaaaccgcaatgga

SEQ ID NO: 126033 - DNA, 75 bp, synthetic construct
  source 1..75: mol_type = other DNA
gactatgtcgtctgggctaaagaagtgcccggcattacccgcgcatggacataccgtcactggatgggaacgggg

SEQ ID NO: 126034 - DNA, 75 bp, synthetic construct
  source 1..75: mol_type = other DNA
agacaccctgacaggtggatttgatactgaagagctggaaacgtggcgcgcccgcgtcattgagcggtattactg

SEQ ID NO: 126035 - DNA, 75 bp, synthetic construct
  source 1..75: mol_type = other DNA
tgaagcgaaaacaaaggcagaagaggctgcagcaggaggtggtgttcccggtccgaaaggagataaaggggacac

SEQ ID NO: 126036 - DNA, 75 bp, synthetic construct
  source 1..75: mol_type = other DNA
catcaaccgaagacctgcgttacttcaacagccgctgcatgacccgcagggaggaaatcggtggcgagattgaag

SEQ ID NO: 126037 - DNA, 75 bp, synthetic construct
  source 1..75: mol_type = other DNA
gcgcgaaaaattcaatgaagcggcagaggatataaacaaagggaatgatgtgatgatggcattacagggagccac

SEQ ID NO: 126038 - DNA, 75 bp, synthetic construct
  source 1..75: mol_type = other DNA
taatgccgtctctgatgaatgcattatttttgatgaatccacggctgaaggcgtgggtggtgatttttacgagat

SEQ ID NO: 126039 - DNA, 75 bp, synthetic construct
  source 1..75: mol_type = other DNA
tcaacctgcaaaccgcagccgctggtatcgatattccaacgcgtatcctggttgggaatcagcagggcgaacgcg

SEQ ID NO: 126040 - DNA, 75 bp, synthetic construct
  source 1..75: mol_type = other DNA
gatccgcgaagctgccggatatgaagggccaacgcaggaagtagaagtggaagacgaggacgataaagatgaaga

SEQ ID NO: 126041 - DNA, 75 bp, synthetic construct
  source 1..75: mol_type = other DNA
ggaagcggcacacaagatggcgcaaatcaatcaggcatgtctcgctactggtgaggaaatatttagcggcgatga

SEQ ID NO: 126042 - DNA, 75 bp, synthetic construct
  source 1..75: mol_type = other DNA
ggctcgagtatccaggtggcaacctcattccgctcaggtacggtgcagcgcctgcatatctcagagcacggcaaa

SEQ ID NO: 126043 - DNA, 75 bp, synthetic construct
  source 1..75: mol_type = other DNA
gtagctgcaaatgaaagttatgagcggtatgaaaatcttgtagaagaaggtaagatatctctaccccgttctctt

SEQ ID NO: 126044 - DNA, 75 bp, synthetic construct
  source 1..75: mol_type = other DNA
acgggcaaaagatgtgttgagtaatctcaacgaactggacggtctgtttcaacaggatgccaccagtatcagcgg

SEQ ID NO: 126045 - DNA, 75 bp, synthetic construct
  source 1..75: mol_type = other DNA
aggaatgaaaacgctcctgaataatggaatatcagggatccgctggtcaggcacattatcggaatgtagtggcac

SEQ ID NO: 126046 - DNA, 75 bp, synthetic construct
  source 1..75: mol_type = other DNA
tacaggaacgaagaccaaagcacagtctctgcgtgacgggaataaagccgaacagcaccggacgctgatgaatta

SEQ ID NO: 126047 - DNA, 75 bp, synthetic construct
  source 1..75: mol_type = other DNA
ctattttgatattagtagtctttggattatactattatcaatttggtggaagctcaaccactctttctgaaaaca

SEQ ID NO: 126048 - DNA, 75 bp, synthetic construct
  source 1..75: mol_type = other DNA
cgatgactacccagttttcagccatgtatgccggaagtcaggcgatgggcgtcagcgtggcgggtacggcgcaga

SEQ ID NO: 126049 - DNA, 75 bp, synthetic construct
  source 1..75: mol_type = other DNA
attaatgctggtgatcgcaggggagcatgcgaggcgattcgctggtggattaaggacggtggcagagactgccgt

SEQ ID NO: 126050 - DNA, 75 bp, synthetic construct
  source 1..75: mol_type = other DNA
cgtattcgctcaaataattgctacggtcaggtatcccgtcgcgaccaggagagtgcgctggcatgctggggtatc

SEQ ID NO: 126051 - DNA, 75 bp, synthetic construct
  source 1..75: mol_type = other DNA
tgatgtgtgacagtgcgggcaacatctcctatacccgcgccggatcgtttgaaaccgacaaggacggctatatcg

SEQ ID NO: 126052 - DNA, 75 bp, synthetic construct
  source 1..75: mol_type = other DNA
gcgacgacgctatcgaccgcactaccgtaccgttcgacgcgaccaacagcagctcgtataccgacagctacacca

SEQ ID NO: 126053 - DNA, 75 bp, synthetic construct
  source 1..75: mol_type = other DNA
gaaacggacaaagacggctatatcgtcaacgcctcgggcgcttatttgcagggctatccggtcgatgacagcggc

SEQ ID NO: 126054 - DNA, 75 bp, synthetic construct
  source 1..75: mol_type = other DNA
aaacgttgaagcattgccggcactctccgttgatgagccgaccgtttccatgttcttctgcgttaacacctctcc

SEQ ID NO: 126055 - DNA, 75 bp, synthetic construct
  source 1..75: mol_type = other DNA
gtctgaacaaagaactggtacacaacgttgcgctgcgcgtagaagaaaccgaagacgccgatgcgttccgcgttt

SEQ ID NO: 126056 - DNA, 75 bp, synthetic construct
  source 1..75: mol_type = other DNA
gctttttctgcttctgccggaggagtatggcccagcctttccagcaatcgtcgattgttataccagtccacccac

SEQ ID NO: 126057 - DNA, 75 bp, synthetic construct
  source 1..75: mol_type = other DNA
ttttataaacgaattaatgcaggcgatcgcaggggagcgtgtgaagcgattcgctggtggattaaggacggtggc

SEQ ID NO: 126058 - DNA, 75 bp, synthetic construct
  source 1..75: mol_type = other DNA
cgtatccgctcaaataattgctacggtcaggtatcccgtcgcgaccaggagagtgcgctggcgtgctggggaatc

SEQ ID NO: 126059 - DNA, 75 bp, synthetic construct
  source 1..75: mol_type = other DNA
cgaaggcaaaacccgtaacgcgaaagtcggtaaagtgctgggccacctcggtctggaacgtatcgaaaccgatct

SEQ ID NO: 126060 - DNA, 75 bp, synthetic construct
  source 1..75: mol_type = other DNA
atttcgcgtcaaacttgtgccagcgatcgtcgggctaaacgtattaaactgacggaaaaggcagagccactgatc

SEQ ID NO: 126061 - DNA, 75 bp, synthetic construct
  source 1..75: mol_type = other DNA
tcgtttacaacgtgggtgctggcaatttcagaacatcgacgcttcttcgcaaaataaaccagggcgatatcaaag

SEQ ID NO: 126062 - DNA, 75 bp, synthetic construct
  source 1..75: mol_type = other DNA
ctacaaccagcagatgcagaagaaagaggggggcggcgacccgggccaggctcaaattaactctgacgtgatcac

SEQ ID NO: 126063 - DNA, 75 bp, synthetic construct
  source 1..75: mol_type = other DNA
agaacgatccgatgaaagaactgattatcaatgcgctgcaagccgctggtaagccgaccgaaggcaagtccgacg

SEQ ID NO: 126064 - DNA, 75 bp, synthetic construct
  source 1..75: mol_type = other DNA
agagactgccgtattcgctcaaataactgttacggtcaggtatcccgtcgtgaccaggagagcgcgctggcgtgc

SEQ ID NO: 126065 - DNA, 75 bp, synthetic construct
  source 1..75: mol_type = other DNA
gtgaccagctgcgtcgctggacatacgctggcggtaagcaatggaaagggctgatgacccgtcgcgatattgagc

SEQ ID NO: 126066 - DNA, 75 bp, synthetic construct
  source 1..75: mol_type = other DNA
gattaaggacagggggcacgattgccgcattcgttcaaataactgttatggtcaggttattcgtcgtgaccagga

SEQ ID NO: 126067 - DNA, 75 bp, synthetic construct
  source 1..75: mol_type = other DNA
gtaagggatgttattttagaggtcgctgatgcacttctgacgattgctgctattgtttccgggactattttttta

SEQ ID NO: 126068 - DNA, 75 bp, synthetic construct
  source 1..75: mol_type = other DNA
gtatgccggaagccaggcgatgggtgtcagcgtggcgggcacggcgcaaagtatttcgcgcggcggttcgctggt

SEQ ID NO: 126069 - DNA, 75 bp, synthetic construct
  source 1..75: mol_type = other DNA
tatataaagaaaatattaactctttttcctgatatcttgtttgttttagatgaggcttatattgaattttcatct

SEQ ID NO: 126070 - DNA, 75 bp, synthetic construct
  source 1..75: mol_type = other DNA
gtgtttcccgtcgacgttttacagacggattaatgcaggagatcgaaaaggtgcctgcgaagctattcgctggtg

SEQ ID NO: 126071 - DNA, 75 bp, synthetic construct
  source 1..75: mol_type = other DNA
atttaccgcgacgaggtctataaccccgattcactggcaaagggagaggctgaaatcattgtcagcaagcagcgt

SEQ ID NO: 126072 - DNA, 75 bp, synthetic construct
  source 1..75: mol_type = other DNA
gatgagcaggcaatctactcactggtgttgaatgaagagggcaccattcgcggagacgtctatgtgctgtgcagc

SEQ ID NO: 126073 - DNA, 75 bp, synthetic construct
  source 1..75: mol_type = other DNA
gaacccccagcaagggaaactctccactggctggcacgacatacacccggaaaaagatatcctgggaagaagtta

SEQ ID NO: 126074 - DNA, 75 bp, synthetic construct
  source 1..75: mol_type = other DNA
ttatataattctttaccgtgtggccgcttcaagtattgaaattgtaagtatcgtacacgccagacgtcagtttcc

SEQ ID NO: 126075 - DNA, 75 bp, synthetic construct
  source 1..75: mol_type = other DNA
gtatgaacgtctgggttatgaacatgccgatgtgctgagtctgggcaagcgattaattgaagatgaagagtactg

SEQ ID NO: 126076 - DNA, 75 bp, synthetic construct
  source 1..75: mol_type = other DNA
cggtaagcaatggaaagggctgatgactcgccgtgagattgagcgtgaagtctgtttgtggggggcaacaatgag

SEQ ID NO: 126077 - DNA, 75 bp, synthetic construct
  source 1..75: mol_type = other DNA
gctctttattcgttcgtttacaacgtgggcgcaggcaatttcagaacatcgactcttcttcgcaaaataaaccag

SEQ ID NO: 126078 - DNA, 75 bp, synthetic construct
  source 1..75: mol_type = other DNA
cacccgcgaaacccgtaatacctgcacctattgttctgttggttgtgggctgctgatgtacagcctcggtgacgg

SEQ ID NO: 126079 - DNA, 75 bp, synthetic construct
  source 1..75: mol_type = other DNA
ttatatcgtgttgtaccgagtagcaacttcaagcattgaaattgcgaatattgtgcatgcccgtcgacaatttcc

SEQ ID NO: 126080 - DNA, 75 bp, synthetic construct
  source 1..75: mol_type = other DNA
tcgcggcgttttacgattattgcattgaagttactcgcaggaattttgtgaaggcttttgaggagagtaaatctc

SEQ ID NO: 126081 - DNA, 75 bp, synthetic construct
  source 1..75: mol_type = other DNA
gttatctgagcatccgtatttatatccaccaagcgacagagtgcctggcttgcgtgagattgtggcccaccctaa

SEQ ID NO: 126082 - DNA, 75 bp, synthetic construct
  source 1..75: mol_type = other DNA
cctccaagcgatagagttcttggccttcgtgaaattgttgcccaccctaacttcgtcatactttacagagtagcg

SEQ ID NO: 126083 - DNA, 75 bp, synthetic construct
  source 1..75: mol_type = other DNA
cataacttacatcgccaaggagaacccaccggcagcgcgcagactaaaaatacgcattgaaacatcggtattacc

SEQ ID NO: 126084 - DNA, 75 bp, synthetic construct
  source 1..75: mol_type = other DNA
cgcgttcgttcaaataactgttacggtcaggttattcgtcgtgaccaggagagcgcattaacctgctgggggata

SEQ ID NO: 126085 - DNA, 75 bp, synthetic construct
  source 1..75: mol_type = other DNA
catgggttcatttttgttgacgacgacgatcaatcagtccttgttgtggcctcctgggtgatagatgagtacggt

SEQ ID NO: 126086 - DNA, 75 bp, synthetic construct
  source 1..75: mol_type = other DNA
gtgtttcccgtcgacgttttacagacgaattaatgcaggtgatcgcaggggagcgtgtgaggcgattcgctggtg

SEQ ID NO: 126087 - DNA, 75 bp, synthetic construct
  source 1..75: mol_type = other DNA
aaattaaatcttggccgaagtagtattatcggtacgcttatcggagcattacccggcgctggagcggatattgct

SEQ ID NO: 126088 - DNA, 75 bp, synthetic construct
  source 1..75: mol_type = other DNA
atagtaaacctgtcgtcccgggcatgaagttgtcgaaggagaaatgcgaccaggttaacgccattgaacgtgata

SEQ ID NO: 126089 - DNA, 75 bp, synthetic construct
  source 1..75: mol_type = other DNA
aggcgctggcatgggtggagcgcaatataaaagttccactgaccgagccacagaaagccggtatcgcatcattct

SEQ ID NO: 126090 - DNA, 75 bp, synthetic construct
  source 1..75: mol_type = other DNA
gattgccgtctaaccaaaggccagaagaatggctgctatggtcaggttgagcgacgggaccaggaaagcgcgctg

SEQ ID NO: 126091 - DNA, 75 bp, synthetic construct
  source 1..75: mol_type = other DNA
acgaattaatgcaggagatcgaaaaggtgcctgcgaagcgattcgctggtggattaaggacggtggcagagactg

SEQ ID NO: 126092 - DNA, 75 bp, synthetic construct
  source 1..75: mol_type = other DNA
gaagaagctcattgcccgtggctgtccgaagattcaaatcaacgtgccggaagataatgacatggtgctcgggat

SEQ ID NO: 126093 - DNA, 75 bp, synthetic construct
  source 1..75: mol_type = other DNA
aaataccaaagtttcagtaaaaaaaacaaaactgattttgaacaggcatgtaaaaaaattattagatcagacaaa

SEQ ID NO: 126094 - DNA, 75 bp, synthetic construct
  source 1..75: mol_type = other DNA
tgatttcctaatggagaatgtagattcttttgaatcaattgaaaagtttaggtctttgagtcgacatataaaaca

SEQ ID NO: 126095 - DNA, 75 bp, synthetic construct
  source 1..75: mol_type = other DNA
caaggttccactgacagcgccacaaaaggtaggcattgcgtccttctgcccgtacaacattggtccaggtaaatg

SEQ ID NO: 126096 - DNA, 75 bp, synthetic construct
  source 1..75: mol_type = other DNA
gaagtgctgcaaaaatccggaggtaaaactgtcagcgaagaagacgtgctgcaactggtccagttaagcaaaccg

SEQ ID NO: 126097 - DNA, 75 bp, synthetic construct
  source 1..75: mol_type = other DNA
acagaacacgtatttttcgtcactggacaacatgattgcccaggggaatccggtgccggtgccttacggtgaaat

SEQ ID NO: 126098 - DNA, 75 bp, synthetic construct
  source 1..75: mol_type = other DNA
cgtattttcgtattgcaccggaagactggctgcgggcagagatgcagggggagattgtggcactggtccacagcc

SEQ ID NO: 126099 - DNA, 75 bp, synthetic construct
  source 1..75: mol_type = other DNA
tgcgcctgcggagtcgtgcggcttcgtggtgagaacgccggagggggagcggtatatcccttgtgtgaatatctc

SEQ ID NO: 126100 - DNA, 75 bp, synthetic construct
  source 1..75: mol_type = other DNA
gtcagcggcgcagccgggcgatgtgctgctgtgctgctttggttcatcggtgccgaatcatgccgcaatttactg

SEQ ID NO: 126101 - DNA, 75 bp, synthetic construct
  source 1..75: mol_type = other DNA
tcgcgcaatcacgctatacgggggatgatattaacgcactgatggaaacgtccgggaaagcagacatgaaaaatg

SEQ ID NO: 126102 - DNA, 75 bp, synthetic construct
  source 1..75: mol_type = other DNA
atggctccggaggactggctgcaggcagagatgcagggtgagattgtggcgctggtccacagtcatctcggtggt

SEQ ID NO: 126103 - DNA, 75 bp, synthetic construct
  source 1..75: mol_type = other DNA
cagtgtttgaaatgccactctcccaggcactacatttgggacgctaccacccactggatatctatcgtcgaggcg

SEQ ID NO: 126104 - DNA, 75 bp, synthetic construct
  source 1..75: mol_type = other DNA
tgttaatccccatcgtccgtcgaccgcaaccggggttgttgctgactcagcgttcaattcatctgcgtaaacacg

SEQ ID NO: 126105 - DNA, 75 bp, synthetic construct
  source 1..75: mol_type = other DNA
gtacttttcgtcgctggataacatgattgcccaggggaacccgatgccggtgccttacggtgaaatgctggttgg

SEQ ID NO: 126106 - DNA, 75 bp, synthetic construct
  source 1..75: mol_type = other DNA
ctgggcggtgtggcccagatgctggccccgaaggcaaaaacaccggattaccgcgcaacggataacggcagacag

SEQ ID NO: 126107 - DNA, 75 bp, synthetic construct
  source 1..75: mol_type = other DNA
ccgggaggatgactggtggcgtcacggtcagaatctctatcttgacaatatggaggcgacgggtttttaccgtgt

SEQ ID NO: 126108 - DNA, 75 bp, synthetic construct
  source 1..75: mol_type = other DNA
acgaacgcattcagcctggcgtcaccgggcatggcgcgcatctgcctttacggggatttacaacgatttggccgc

SEQ ID NO: 126109 - DNA, 75 bp, synthetic construct
  source 1..75: mol_type = other DNA
tgcagataaaaagcgcactgccctggtggctggtctgccgggggaaattcataaattccgctgtgtgccacatct

SEQ ID NO: 126110 - DNA, 75 bp, synthetic construct
  source 1..75: mol_type = other DNA
ccacgggattttaccgggtgcccctgccctctgcacagccgggcgatatcctgctgtgctgctttggcgcatcgg

SEQ ID NO: 126111 - DNA, 75 bp, synthetic construct
  source 1..75: mol_type = other DNA
ccggatgactggctgcaggcaacactgcacggtgagattgtggcactggtccacagtcaccccggtggtctgccc

SEQ ID NO: 126112 - DNA, 75 bp, synthetic construct
  source 1..75: mol_type = other DNA
caaatgatgatctggacgaactgacagctatgttgcaatcacttgatgaaccggtaaaaaaagctgcacaggttg

SEQ ID NO: 126113 - DNA, 75 bp, synthetic construct
  source 1..75: mol_type = other DNA
gccatgagttctgatgatgttgccgaagaactgttcaatgaagaaaaagcaggtgatttcagctccgctttaaat

SEQ ID NO: 126114 - DNA, 75 bp, synthetic construct
  source 1..75: mol_type = other DNA
gatgtggtcttgacgcctgaacaatatgacactctattaactacatggtgcctgtatgatggtagtttgctaaca

SEQ ID NO: 126115 - DNA, 75 bp, synthetic construct
  source 1..75: mol_type = other DNA
gtatcgcgcgcctttccagacgcttccactaacacacacactgattcaggctctgggctcctccccgttcgctcg

SEQ ID NO: 126116 - DNA, 75 bp, synthetic construct
  source 1..75: mol_type = other DNA
caaatggtgccgtgatccacatcgtgccgcgtctggcgggagctaaaagtggcggtgtgtttcaggtggtgctgg

SEQ ID NO: 126117 - DNA, 75 bp, synthetic construct
  source 1..75: mol_type = other DNA
cggggattgagatgccggattttcatcgcgaggatgactggtggcgtaacggtcagaatctctatctggataatc

SEQ ID NO: 126118 - DNA, 75 bp, synthetic construct
  source 1..75: mol_type = other DNA
aatggtgcggtgctccacatcgttccgcgtctggctggcgcgaaaagtggtggtgtgtttcagacggtgctgggt

SEQ ID NO: 126119 - DNA, 75 bp, synthetic construct
  source 1..75: mol_type = other DNA
ccgcagagccggaggcgtattttcgtattgcaccggaagactggctgcaggcacagatgcagggggagattgtgg

SEQ ID NO: 126120 - DNA, 75 bp, synthetic construct
  source 1..75: mol_type = other DNA
tatgttcctgtattttttgtgtatctgcttattttcttgtcggtggaatggtgtcgtttatcatctgcattacga

SEQ ID NO: 126121 - DNA, 75 bp, synthetic construct
  source 1..75: mol_type = other DNA
ggacacggcaccggaggcggtgtacgcccgtcttcacgaacagctgggtgagggaacggtcatccacattgtgcc

SEQ ID NO: 126122 - DNA, 75 bp, synthetic construct
  source 1..75: mol_type = other DNA
ctgttccgggatgcttaccatctggcggggattgagatgccggattttcatcgcgaggatgactggtggcgtcac

SEQ ID NO: 126123 - DNA, 75 bp, synthetic construct
  source 1..75: mol_type = other DNA
atccgatcgattctctggagcatcatgcagagatcgctaaagacggttctttcaccattaaagtgctgccgagct

SEQ ID NO: 126124 - DNA, 75 bp, synthetic construct
  source 1..75: mol_type = other DNA
ggcgtccggacaaagccttcaacatcgaacaggcgacctttaacgactacatggcgaagctgggtgaagtctctg

SEQ ID NO: 126125 - DNA, 75 bp, synthetic construct
  source 1..75: mol_type = other DNA
tccgcacactatcggcaacccgttataccactggacgcacctcgaactgcgtcgtccgttcggtatcactggcaa

SEQ ID NO: 126126 - DNA, 75 bp, synthetic construct
  source 1..75: mol_type = other DNA
ttactgcggcaacggtgagctgcttcaccatctgcctgaacaactgagtaaacgggagaggtattccgaaaaatg

SEQ ID NO: 126127 - DNA, 75 bp, synthetic construct
  source 1..75: mol_type = other DNA
gccatttgccgccgcagcagattgcggaagactatcgttttaaaaacctgtatgacatctggctaaaaggcgatc

SEQ ID NO: 126128 - DNA, 75 bp, synthetic construct
  source 1..75: mol_type = other DNA
aaaggtgaagatgatttatattgatcctccatacaatacaggtaaggatggattcgcctataacgatgatcgcaa

SEQ ID NO: 126129 - DNA, 75 bp, synthetic construct
  source 1..75: mol_type = other DNA
caaagactttgcccctaacaaagttgtgttttatggcagcaactttgaaagtgcgaaacagatggaacttaatga

SEQ ID NO: 126130 - DNA, 75 bp, synthetic construct
  source 1..75: mol_type = other DNA
agcataattccggtcaatggagtgagaaaaaagatggattagatgaaatctataaggcatttgatggctttagaa

SEQ ID NO: 126131 - DNA, 75 bp, synthetic construct
  source 1..75: mol_type = other DNA
ctgagcaagcagaatgaagaaaacctgctgccgaaaaccattctctactgcctgaacccgcgcgataacgaagtg

SEQ ID NO: 126132 - DNA, 75 bp, synthetic construct
  source 1..75: mol_type = other DNA
cgggaattgagatgccggattttcatcgcggggataactggtggcgtcacggtcagaatctctatctggataatc

SEQ ID NO: 126133 - DNA, 75 bp, synthetic construct
  source 1..75: mol_type = other DNA
agtgtggagccgtcgcggtatggcacgccaactatccacggaatgtggctgaggttaagtcttacaccctctcga

SEQ ID NO: 126134 - DNA, 75 bp, synthetic construct
  source 1..75: mol_type = other DNA
cggggcatcaatggcgttatggggttcagccctggcagccggtggtttttctgccaccacgatgctgttttcact

SEQ ID NO: 126135 - DNA, 75 bp, synthetic construct
  source 1..75: mol_type = other DNA
ttttctgccaccacgatgctgttttcactgggggccagcatgatactgggtggtgtggcccagatgctggccccg

SEQ ID NO: 126136 - DNA, 75 bp, synthetic construct
  source 1..75: mol_type = other DNA
tgcctgaacaactgagtaaacgggagaggtattccgaaaaatggcaacgacgaacgcattctgtctggcgtcacc

SEQ ID NO: 126137 - DNA, 75 bp, synthetic construct
  source 1..75: mol_type = other DNA
ggtaatcaacggtattatcggtacggtctgcgcattatggctgtataacaattttgtcggctggttgaccttcct

SEQ ID NO: 126138 - DNA, 75 bp, synthetic construct
  source 1..75: mol_type = other DNA
cgtcttctttggcatttcggcgctgacggttctttcggtgattgcggttccggctattgcctgccttggcggtta

SEQ ID NO: 126139 - DNA, 75 bp, synthetic construct
  source 1..75: mol_type = other DNA
ccgccagtatgtggaccggcggtactctcggaaccggtcttagctatcatgatttcttcctcgcagttctcatcg

SEQ ID NO: 126140 - DNA, 75 bp, synthetic construct
  source 1..75: mol_type = other DNA
aacctgtacctggataatctggcggcaggcggttttcaccgggtggccctgtcagcggcacagccgggtgatgtg

SEQ ID NO: 126141 - DNA, 75 bp, synthetic construct
  source 1..75: mol_type = other DNA
atggctacatacggcggtcagtttacgcttacgtattttcgtattgcaccggaagactggctgcgggcagagatg

SEQ ID NO: 126142 - DNA, 75 bp, synthetic construct
  source 1..75: mol_type = other DNA
gttggctcccgccgtatatcccaggacatcagcacccgtgatgaaggcgggggcggaacggtcgtggttgtcggg

SEQ ID NO: 126143 - DNA, 75 bp, synthetic construct
  source 1..75: mol_type = other DNA
tggaggcaactggtttttaccgtgtcgcactgacagcggcgcagccgggcgatgtgctgctgtgctgttttggtt

SEQ ID NO: 126144 - DNA, 75 bp, synthetic construct
  source 1..75: mol_type = other DNA
tttactggctggcctctctactcaaaagcagggggaatcatggctatcgaagctgtttccgcaactgttccgcta

SEQ ID NO: 126145 - DNA, 75 bp, synthetic construct
  source 1..75: mol_type = other DNA
cgggatgcgtaccatctggcggggactgaaatgccggattttcatcgcgaggatgactggtggcgcaacggccag

SEQ ID NO: 126146 - DNA, 75 bp, synthetic construct
  source 1..75: mol_type = other DNA
tggctgagcgaggctgaccggcggctacagataaaaagcgcactgccctggtggctggtctgccggggtgacatt

SEQ ID NO: 126147 - DNA, 75 bp, synthetic construct
  source 1..75: mol_type = other DNA
ggatgactggtggcgcaacggtcagaacctttacctggacaatatggcggtcaccggcttttaccggatgtccct

SEQ ID NO: 126148 - DNA, 75 bp, synthetic construct
  source 1..75: mol_type = other DNA
ttttctgccaccacgatgctgttttcactgggtgccagtatgattctgggcggtgtggcccagatgctggccccg

SEQ ID NO: 126149 - DNA, 75 bp, synthetic construct
  source 1..75: mol_type = other DNA
tctggcggggattgagatgccggattttcatcgcgaggatgactggtggcgtaacggtcagaatctctatctgga

SEQ ID NO: 126150 - DNA, 75 bp, synthetic construct
  source 1..75: mol_type = other DNA
cggtcgttcccgcacaaccattagatttcaatgtcgcgctggcgctggttgtggggtcatttatcagtgcgggta

SEQ ID NO: 126151 - DNA, 75 bp, synthetic construct
  source 1..75: mol_type = other DNA
ttccgtgtggctggccgttaacggcatgggcggcctggaggcattaaaagcggtcgttcccgcacaaccgttaga

SEQ ID NO: 126152 - DNA, 75 bp, synthetic construct
  source 1..75: mol_type = other DNA
actctttcagtaatcaacggtattatcggcacggtctgcgcactatggctgtataacaattttgtcggctggcta

SEQ ID NO: 126153 - DNA, 75 bp, synthetic construct
  source 1..75: mol_type = other DNA
gccggaggggtattttcgtatcgctccggaagactggctgcgggcagagatgcagggggagattgtggccctggt

SEQ ID NO: 126154 - DNA, 75 bp, synthetic construct
  source 1..75: mol_type = other DNA
gccggaggtgtattttcgtatcgcgccggaagactggctgcgggcagagatgcagggggagattgtggccctggt

SEQ ID NO: 126155 - DNA, 75 bp, synthetic construct
  source 1..75: mol_type = other DNA
ctggatattaatttgctgattgccgtctccggtttactgatgaccgtcaccgtcttctttggcatttcggcgctg

SEQ ID NO: 126156 - DNA, 75 bp, synthetic construct
  source 1..75: mol_type = other DNA
gccggaggcgtattttcgtattgcaccggaagactggctgcaggcagagatgcagggggagattgtggcactggt

SEQ ID NO: 126157 - DNA, 75 bp, synthetic construct
  source 1..75: mol_type = other DNA
cagaaggctgcaacatgatgttgcgcgggagcatggctttgacatgagagacagagtgagcagacaggaccgaac

SEQ ID NO: 126158 - DNA, 75 bp, synthetic construct
  source 1..75: mol_type = other DNA
agattgtggcgctggtccacagtcatcccggtggtctgccctggctgagcgaggcggaccggcggctgcagataa

SEQ ID NO: 126159 - DNA, 75 bp, synthetic construct
  source 1..75: mol_type = other DNA
aacatatgagaaaaaatggctttgaaaggggcttcattgactgtcggacgctgaaagaacagggcattgaacgac

SEQ ID NO: 126160 - DNA, 75 bp, synthetic construct
  source 1..75: mol_type = other DNA
ctcacagcccttccgttcctcgtcattttactggtgaaagtcggcggatttattcgctggctgaaacaggattac

SEQ ID NO: 126161 - DNA, 75 bp, synthetic construct
  source 1..75: mol_type = other DNA
cgcacacactccctctggcgtcacctggcatggcacgcatctgcctttacggggattttcaacgatttggccgcc

SEQ ID NO: 126162 - DNA, 75 bp, synthetic construct
  source 1..75: mol_type = other DNA
gctgttttcactgggggccagcatgatactgggtggtgtggctcagatgcttgccccgaaggctaaagtaccgga

SEQ ID NO: 126163 - DNA, 75 bp, synthetic construct
  source 1..75: mol_type = other DNA
ctgcagccatcgtgggctctttcttcaccgccggtgcaacgatggcgttgtggggcgcagccctgagtgccggag

SEQ ID NO: 126164 - DNA, 75 bp, synthetic construct
  source 1..75: mol_type = other DNA
gccggtgccttacggtgaaatgctggttggctcccggcgaatctcccaggacatcagcacccgtgatgaaggcgg

SEQ ID NO: 126165 - DNA, 75 bp, synthetic construct
  source 1..75: mol_type = other DNA
tttctgccaccacgatgctgttttcactgggggccagcatgatactgggtggtgtggctcagatgctggccccga

SEQ ID NO: 126166 - DNA, 75 bp, synthetic construct
  source 1..75: mol_type = other DNA
ccggaatacagggcaacggataacggtaaacagaacacgtatttttcgtcactggacaacatgattgcccagggg

SEQ ID NO: 126167 - DNA, 75 bp, synthetic construct
  source 1..75: mol_type = other DNA
tggcgcatgcccggcggtgtgcgcctgcggagtcgtgcggcttcgtgataagcacgccggagggcaaccagtacc

SEQ ID NO: 126168 - DNA, 75 bp, synthetic construct
  source 1..75: mol_type = other DNA
tcagaaaataatatagtacaagatactcaggaagcacttgatctggcgtctacgcttttccccggtgttgatgag

SEQ ID NO: 126169 - DNA, 75 bp, synthetic construct
  source 1..75: mol_type = other DNA
cgattttgttcaacaggaaattggcgaccggcacgcttatcaatttgccattcataaccccagagcggcgattga

SEQ ID NO: 126170 - DNA, 75 bp, synthetic construct
  source 1..75: mol_type = other DNA
tcgccaaaatcgtcaggttttttaattattcgtattgtccactttgttattaaaggggtgaaacatgtcacgcga

SEQ ID NO: 126171 - DNA, 75 bp, synthetic construct
  source 1..75: mol_type = other DNA
catctctgctcgttaagcaaagtccaggcatgcattacggtcacggctggatcgcgggtaaagatggtaagcgct

SEQ ID NO: 126172 - DNA, 75 bp, synthetic construct
  source 1..75: mol_type = other DNA
gacccgatcgagaaagacgagatgaaccgggtgtttatcttcgggaaagttattgggagcatgccgcaaacatat

SEQ ID NO: 126173 - DNA, 75 bp, synthetic construct
  source 1..75: mol_type = other DNA
cagaatggttatcttctggcgttggaaatatgtcagacagtacagtgcaaccaatacaatcaactgtcagccatt

SEQ ID NO: 126174 - DNA, 75 bp, synthetic construct
  source 1..75: mol_type = other DNA
ggaaggcaccgatacgctggcgtataccgatgcgcagtatcaacagcttgcggcggttacacgggcactgattca

SEQ ID NO: 126175 - DNA, 75 bp, synthetic construct
  source 1..75: mol_type = other DNA
accgacaagtggacaggcatccgggtctgccgggctaccgcccattgcacaggcattaaaagatcatttagctgc

SEQ ID NO: 126176 - DNA, 75 bp, synthetic construct
  source 1..75: mol_type = other DNA
tttaccgcccattgcacaggcattaaaagatcacttgactgcctatgaaaaatcgaaaggctctgaggttttagg

SEQ ID NO: 126177 - DNA, 75 bp, synthetic construct
  source 1..75: mol_type = other DNA
gatgagatgaaccgggtatttatcttcgggaaagttattgggagcatgccgcagacgtataggaagcatggatag

SEQ ID NO: 126178 - DNA, 75 bp, synthetic construct
  source 1..75: mol_type = other DNA
tgaaggcttaaccgctggggtgaactggcgtatttccggatatcgtaacgatgtcagtgacttgatcgattatga

SEQ ID NO: 126179 - DNA, 75 bp, synthetic construct
  source 1..75: mol_type = other DNA
atgctcggcagtgcgcaagggtggcaaccagcagcttatttaccttgcccggtcactctcgagggtctggcgaag

SEQ ID NO: 126180 - DNA, 75 bp, synthetic construct
  source 1..75: mol_type = other DNA
cagctacacgccattcctaatgccactgaacaggggttatggcgaatcgcccacgctgccgggctactctccacc

SEQ ID NO: 126181 - DNA, 75 bp, synthetic construct
  source 1..75: mol_type = other DNA
tagttccttttctcagactgcttcttacttgaagcttttgagttttttaccaataattattggtatagcgacagt

SEQ ID NO: 126182 - DNA, 75 bp, synthetic construct
  source 1..75: mol_type = other DNA
cgacctcggtcaatgatgtgctgcgccgtctccctggcgtggatatcacccaaaacggcggttcaggtcagcttt

SEQ ID NO: 126183 - DNA, 75 bp, synthetic construct
  source 1..75: mol_type = other DNA
gcaggacagcgtaattgcgcatccagagtggctgacggaactggaaagccagccgccgcaggccgacgaatggca

SEQ ID NO: 126184 - DNA, 75 bp, synthetic construct
  source 1..75: mol_type = other DNA
tcaaggcgcggattatgggcgatagcgaaggcgtctatgctaacgagttgcgtgcgatgctgcgcccgtttgttt

SEQ ID NO: 126185 - DNA, 75 bp, synthetic construct
  source 1..75: mol_type = other DNA
gcagcggaagccatccgggcgctgtcgttacaggtgcccggattccgccgtcagatgaacgaaggctggtaccag

SEQ ID NO: 126186 - DNA, 75 bp, synthetic construct
  source 1..75: mol_type = other DNA
gcattatgcatctgttcagtacgcgtacctcttccggcattttgtatgaagtggatgcacggctacgcccgtccg

SEQ ID NO: 126187 - DNA, 75 bp, synthetic construct
  source 1..75: mol_type = other DNA
aaccgtgcgcggctggcatgggcaatggatttcgcggactggccgcaactaaccggggcgctgaccggacatatg

SEQ ID NO: 126188 - DNA, 75 bp, synthetic construct
  source 1..75: mol_type = other DNA
atgaagaacaacagcttgaggcgttgcgtcaatttaaacaggcacagttgttacgtattgctgccgcggatattg

SEQ ID NO: 126189 - DNA, 75 bp, synthetic construct
  source 1..75: mol_type = other DNA
atctggaccaccaacgataacgcgctctatgcgtcgggtttaggtttcgccaacattaccggtatgtcgagcaaa

SEQ ID NO: 126190 - DNA, 75 bp, synthetic construct
  source 1..75: mol_type = other DNA
atgatagtagctatgtattggttattgttctttctcacgttagaagcatatttcggggtgttttcctttaaaaga

SEQ ID NO: 126191 - DNA, 75 bp, synthetic construct
  source 1..75: mol_type = other DNA
tgggctttcacattcagacaaagtttctccctatggggaaaaatatgatgatagattgctccatcaaaggtgatg

SEQ ID NO: 126192 - DNA, 75 bp, synthetic construct
  source 1..75: mol_type = other DNA
ggagcaaatgctgagtaattacttttacaataaagtattacggccggatacggagaaaacataccgtaagatggt

SEQ ID NO: 126193 - DNA, 75 bp, synthetic construct
  source 1..75: mol_type = other DNA
ggatgatggagcaatttaaacaactggaggagacaatgcctcagggattagcgagatacagtcattgtgcattgt

SEQ ID NO: 126194 - DNA, 75 bp, synthetic construct
  source 1..75: mol_type = other DNA
gataatggcaaaaactcgattgacagagctatcaaatccatcagtactagagccacggaagggatggttgccgac

SEQ ID NO: 126195 - DNA, 75 bp, synthetic construct
  source 1..75: mol_type = other DNA
cagcctgagtctggctgattcagagaagtcgcaggcgtcgaagctgaaaaaaggtcagaagatcaccgtgacttg

SEQ ID NO: 126196 - DNA, 75 bp, synthetic construct
  source 1..75: mol_type = other DNA
cagcctgagtatgtcggactcagagaaagcgcaggcgtcgaaattgaaaaagggccaaaagatcaccgtaacttg

SEQ ID NO: 126197 - DNA, 75 bp, synthetic construct
  source 1..75: mol_type = other DNA
aggggagaagttgtttcagttacagaggaacgatttaaacataggtcgctctatctttccactttatataaatta

SEQ ID NO: 126198 - DNA, 75 bp, synthetic construct
  source 1..75: mol_type = other DNA
atatctttatctttaattgatatattaagagtggctgaggatcatcggcaactattacacaggggagttgatcca

SEQ ID NO: 126199 - DNA, 75 bp, synthetic construct
  source 1..75: mol_type = other DNA
atgtaaagctagcggtgatgactctgttaattgtcgaaatgctaaaggcgcattgttccagattaaacaggagag

SEQ ID NO: 126200 - DNA, 75 bp, synthetic construct
  source 1..75: mol_type = other DNA
tggcgttgtccgtaccgcgtctggtgggctggcgggcagtacgctgtctgttgatgcggcagtgcgcaatatggt

SEQ ID NO: 126201 - DNA, 75 bp, synthetic construct
  source 1..75: mol_type = other DNA
tgctgggtgttgatggtgttctgggatcgcttaaaccgggcaaacgcgccagcgtcgttgcgctggatagcgggc

SEQ ID NO: 126202 - DNA, 75 bp, synthetic construct
  source 1..75: mol_type = other DNA
ctgattctctgctcagagattactaccaattagatgaggcttcagaaaaaattggttgtaatgaaaaggatatac

SEQ ID NO: 126203 - DNA, 75 bp, synthetic construct
  source 1..75: mol_type = other DNA
tgaagagggggcagaagatcactgtgacctgcgaaaagatgcagcttttcatcgctgctccgtctggcggcaact

SEQ ID NO: 126204 - DNA, 75 bp, synthetic construct
  source 1..75: mol_type = other DNA
tgtacgctgcgcataaaactggcacccgatggtatgttactggatatcaaacctgaaggtggcgatcccgcactt

SEQ ID NO: 126205 - DNA, 75 bp, synthetic construct
  source 1..75: mol_type = other DNA
gggctggcgggcagtacgctgtctgttgatgcggcagtgcgcaatatggtcgagttgacgggcgtaacgcctgcg

SEQ ID NO: 126206 - DNA, 75 bp, synthetic construct
  source 1..75: mol_type = other DNA
taacaatcgcgtccctaacacagcggtgctggctcttctactccagcagtgcttatctcatttccagtgcgaaga

SEQ ID NO: 126207 - DNA, 75 bp, synthetic construct
  source 1..75: mol_type = other DNA
ttattatatggttgttaagtatttcctttttatctttatctaacgggattagaagtggattatcttctgctttct

SEQ ID NO: 126208 - DNA, 75 bp, synthetic construct
  source 1..75: mol_type = other DNA
aatggggtaacagcattgcccttcgactaacgggaaaccttaaaaccgttccgggtttttcagtgggtgatatcg

SEQ ID NO: 126209 - DNA, 75 bp, synthetic construct
  source 1..75: mol_type = other DNA
ccaccaacaagcggccagacatctgggtctgccgggctaccgcccattgcacaggcattaaaaaatcatttagct

SEQ ID NO: 126210 - DNA, 75 bp, synthetic construct
  source 1..75: mol_type = other DNA
ttttaagcccgcccgtcaggcaccgccgccaccgacaaggtcgacaggcactcccgggcatcccgaccttaccgc

SEQ ID NO: 126211 - DNA, 75 bp, synthetic construct
  source 1..75: mol_type = other DNA
atgcgtaaaagcctgttagctattcttgcagtctcctcgttggtattcagttcggcgtcgtttgccgctgatctt

SEQ ID NO: 126212 - DNA, 75 bp, synthetic construct
  source 1..75: mol_type = other DNA
gcgacggctgcgtttatcgccgtcattatcatcagcctgctgctggatgagtccggcttttttgaatgggcggcg

SEQ ID NO: 126213 - DNA, 75 bp, synthetic construct
  source 1..75: mol_type = other DNA
cgagattctccgttctgttgagtatgagccagctgaagcccggcacatgttcgatgggcgtaaggctgagaacat

SEQ ID NO: 126214 - DNA, 75 bp, synthetic construct
  source 1..75: mol_type = other DNA
tggtcagcgccgttctggcgctggtagtgggtggcggagccggatggggagtctggcatcattatgccggaaaag

SEQ ID NO: 126215 - DNA, 75 bp, synthetic construct
  source 1..75: mol_type = other DNA
aaggggctgttcattttagaagcaggagcacagcgacaaaaaaagaaagaatcagcggtcgtgcaaagggacgtt

SEQ ID NO: 126216 - DNA, 75 bp, synthetic construct
  source 1..75: mol_type = other DNA
atggttgtttttagtcaacaaccattttcgtttgatggaataaaaccttggttgtacatttggactatgaaaaca

SEQ ID NO: 126217 - DNA, 75 bp, synthetic construct
  source 1..75: mol_type = other DNA
agtgagtgccgggccgggagtcatcaaccgtgagtttgtagaagttctacgctcggttgagtactcgtttgacga

SEQ ID NO: 126218 - DNA, 75 bp, synthetic construct
  source 1..75: mol_type = other DNA
ttgttgccagatgtggcgattagtcttgaccgtactgaaggtgccacgctggagttttacgaagctgaggcgaaa

SEQ ID NO: 126219 - DNA, 75 bp, synthetic construct
  source 1..75: mol_type = other DNA
aagcaacaggtggattaggttccaccgcaaccagtaatcagttagcaacaatcgcaccaactcttggccagcaat

SEQ ID NO: 126220 - DNA, 75 bp, synthetic construct
  source 1..75: mol_type = other DNA
gaatctttcctctcttcaggggcaaggtcaggcgcttaaccagtattacaactctcagcagtataaagaccttgc

SEQ ID NO: 126221 - DNA, 75 bp, synthetic construct
  source 1..75: mol_type = other DNA
gatggtccgttaccggaaaagcggcccgtcattttagaggcgcaggatgtgttgataacctacagaggaaaacta

SEQ ID NO: 126222 - DNA, 75 bp, synthetic construct
  source 1..75: mol_type = other DNA
gatggtccgttgccggaaaagcggcccatcattttagaggcgcaggatgtgttgataacctacagaggaaaacta

SEQ ID NO: 126223 - DNA, 75 bp, synthetic construct
  source 1..75: mol_type = other DNA
tcatcgacgccaacccgcagtcagcaaaaattgcgacattatctgccagcaataatggtgtgctcgccaatgaga

SEQ ID NO: 126224 - DNA, 75 bp, synthetic construct
  source 1..75: mol_type = other DNA
agcacctcagcaaagctgtttgctgcaaaggtggcagtgatggaggttcaaaggcacaggcacgcgcaactgaaa

SEQ ID NO: 126225 - DNA, 75 bp, synthetic construct
  source 1..75: mol_type = other DNA
gcaccgttcacgccactcgctcaacagtacgtatcagagttgcagaatctttcctctcttcaggggcaaggtcag

SEQ ID NO: 126226 - DNA, 75 bp, synthetic construct
  source 1..75: mol_type = other DNA
gtataaagaccttgcaggtcaggctcgttaccagagtcttgctgctgcggaggcgacgggtggacttggttcgac

SEQ ID NO: 126227 - DNA, 75 bp, synthetic construct
  source 1..75: mol_type = other DNA
aaccatcaggccttcagacagcaattagcggcggagcttcaggggctatgactggcgctgctcttggctctattg

SEQ ID NO: 126228 - DNA, 75 bp, synthetic construct
  source 1..75: mol_type = other DNA
gccggtgcaggtcttgccggccttttgggaacatcaacaccttggggcgctggcattggtgctggtatcggattg

SEQ ID NO: 126229 - DNA, 75 bp, synthetic construct
  source 1..75: mol_type = other DNA
cgtttactcctctggctgagaagtatgtcggcagcctcgagaacttatcgtctctggaggggcaaggtcaggcac

SEQ ID NO: 126230 - DNA, 75 bp, synthetic construct
  source 1..75: mol_type = other DNA
atcgaactggcgctcgttcgaattaaaggggcagcgtacccgaaggcgattttcggctcgacgccaaccgtcacc

SEQ ID NO: 126231 - DNA, 75 bp, synthetic construct
  source 1..75: mol_type = other DNA
gccagccaggttcctgacggtgttgtttatataaccggcggcatcgactctcagacgtccgggcgctacgagtgt

SEQ ID NO: 126232 - DNA, 75 bp, synthetic construct
  source 1..75: mol_type = other DNA
ttgattttcgcggtgcgagtacaccgggtaattttcgtcgactgacaaaacaggttgttgaaggcgatgaggttg

SEQ ID NO: 126233 - DNA, 75 bp, synthetic construct
  source 1..75: mol_type = other DNA
gggtgtattacgggggcggtaattacatttattgtaatgttttttaatctgatggacagactcagttcccgtaaa

SEQ ID NO: 126234 - DNA, 75 bp, synthetic construct
  source 1..75: mol_type = other DNA
ttcacgacgtatctctcaggacatcagcacccgtgatgaaggcgggggcggaagggtcgtggttatcgggcggca

SEQ ID NO: 126235 - DNA, 75 bp, synthetic construct
  source 1..75: mol_type = other DNA
ctgctgtgctgctttggcgcatcggtggccaatcatgccgccatttactgcggcaacggtgagctgcttcaccat

SEQ ID NO: 126236 - DNA, 75 bp, synthetic construct
  source 1..75: mol_type = other DNA
aacaccatgaccacctcgctcaatcacggttatcgtggtgcgatggcgtctattgccggtttgcagacggggctg

SEQ ID NO: 126237 - DNA, 75 bp, synthetic construct
  source 1..75: mol_type = other DNA
gtcctcggcacaggcaggcgatatcctgctgtgctgctttggcgcatcggtaccaaaacatgcagccatttactg

SEQ ID NO: 126238 - DNA, 75 bp, synthetic construct
  source 1..75: mol_type = other DNA
gtggctggtctgccggggggacattcataaattccgctgtgtgccgcacctgaccgggcgtcgttttgaacacgg

SEQ ID NO: 126239 - DNA, 75 bp, synthetic construct
  source 1..75: mol_type = other DNA
aaaaggcaaaggcgagggctcgcccatcgaactggcgctcgttcgaattaaaggggcagcgtacccgaaggcgat

SEQ ID NO: 126240 - DNA, 75 bp, synthetic construct
  source 1..75: mol_type = other DNA
cgtttcgtttttacctgacatgtccgcattgtggcgaggagcaggtcctggtatttggtttcgacggtatcgaat

SEQ ID NO: 126241 - DNA, 75 bp, synthetic construct
  source 1..75: mol_type = other DNA
gcttgtgaattcatgaaacaacctccggaaggaaaaattcttggggcagatgataatggtatgcctgcatggatt

SEQ ID NO: 126242 - DNA, 75 bp, synthetic construct
  source 1..75: mol_type = other DNA
aaaaacctactgaaagagttatgcttgctcacttagagcaagctgggtattcagttagcagaaatactttgcgca

SEQ ID NO: 126243 - DNA, 75 bp, synthetic construct
  source 1..75: mol_type = other DNA
aacttccgcgttcgacttatgaacagcaggaaatgggtaaatctgtttcccgcagtaatttgcgtacaggtgatt

SEQ ID NO: 126244 - DNA, 75 bp, synthetic construct
  source 1..75: mol_type = other DNA
gagcgtcactggcagacctggaaattcccggacgaaaccccggaatttgccgcacatatcaatgttaatggagga

SEQ ID NO: 126245 - DNA, 75 bp, synthetic construct
  source 1..75: mol_type = other DNA
gaagcttattctgagagggttaagtctctggactggtatacaccagaaaactcattcttaaatacgcaagaacct

SEQ ID NO: 126246 - DNA, 75 bp, synthetic construct
  source 1..75: mol_type = other DNA
tcaacaggacagagcattttccttcattaaatcttccttctgatacatcctgggttgtttggtggtatggtttct

SEQ ID NO: 126247 - DNA, 75 bp, synthetic construct
  source 1..75: mol_type = other DNA
gcgccctgtcgatgcagatgccgggctttcgccgtcagatgaacgaaggctggtaccagatacgtattcgcggtg

SEQ ID NO: 126248 - DNA, 75 bp, synthetic construct
  source 1..75: mol_type = other DNA
aacgaggcctggacgtgggaacatcaggcgctggtgcgtgcgcgtgtagtgtacggcgatccgcagctcaccgcg

SEQ ID NO: 126249 - DNA, 75 bp, synthetic construct
  source 1..75: mol_type = other DNA
cgtgcgatgctgcgcccgtttgttttccgccgttacatcgatttcagcgtgattcagtcgctgcgcaacatgaaa

SEQ ID NO: 126250 - DNA, 75 bp, synthetic construct
  source 1..75: mol_type = other DNA
cgattgttctggtttcgtacagcgtacattccgtgagcaatttggcttagaacttccgcgttcgacttacgaaca

SEQ ID NO: 126251 - DNA, 75 bp, synthetic construct
  source 1..75: mol_type = other DNA
tggcgtcaccgccactggcacgcatctgccttcacggggatttacaacgatttggccgccgcttcagcctgtatg

SEQ ID NO: 126252 - DNA, 75 bp, synthetic construct
  source 1..75: mol_type = other DNA
ggcaaactttaccctcgaaaataacggtattgccatcacccagggccaatggggaagcgcatgtcacgctcaaag

SEQ ID NO: 126253 - DNA, 75 bp, synthetic construct
  source 1..75: mol_type = other DNA
tgcaaccggtaatcagttagcaacaatcgcaccaacgcttggtcagcagtggctgtctggtcagatgaacaacta

SEQ ID NO: 126254 - DNA, 75 bp, synthetic construct
  source 1..75: mol_type = other DNA
cgcagacctgcaaaatcagcagttcaacaccatcatgaacaacctgaagccgtttactcctctggctgataagta

SEQ ID NO: 126255 - DNA, 75 bp, synthetic construct
  source 1..75: mol_type = other DNA
tagcggcggaacgtccggtgcgattgccggtgcaggtcttgccagccttttgggaacatcaacaccttggggcgc

SEQ ID NO: 126256 - DNA, 75 bp, synthetic construct
  source 1..75: mol_type = other DNA
cggtgcggcatcaggggcgatgattggctctgtggtgccaggaataggtacggctgttggcgctattggtggcgg

SEQ ID NO: 126257 - DNA, 75 bp, synthetic construct
  source 1..75: mol_type = other DNA
ctcagcagtacgtatcacagttgcagaatctttcctctcttcaggggcaaggtcaggcgcttaaccagtattaca

SEQ ID NO: 126258 - DNA, 75 bp, synthetic construct
  source 1..75: mol_type = other DNA
atgttatatgcatttaagctgggcagaaaactgcgcggagaggaaccttattgccctgaaaaaggcgggaaaggt

SEQ ID NO: 126259 - DNA, 75 bp, synthetic construct
  source 1..75: mol_type = other DNA
atcaatgatcataccgtcacgtttgcggtattaagcggatcggcaacttccttcaacaatcaaaacaccgcaaaa

SEQ ID NO: 126260 - DNA, 75 bp, synthetic construct
  source 1..75: mol_type = other DNA
tggccaatcatgccgccatttactgcggcaacggtgaactgcttcaccatatacctgaacaactgagtaaacggg

SEQ ID NO: 126261 - DNA, 75 bp, synthetic construct
  source 1..75: mol_type = other DNA
atgattgccaccacagaagctgctttgctcgatgctgttcgtgggttgttcggacgaacactgcgggatgtaaaa

SEQ ID NO: 126262 - DNA, 75 bp, synthetic construct
  source 1..75: mol_type = other DNA
gccggtgcaggtcttgccagccttttgggaacatcaacgccttggggcgctggcattggtgctggtatcggattg

SEQ ID NO: 126263 - DNA, 75 bp, synthetic construct
  source 1..75: mol_type = other DNA
atgccagtcagttgtatcaacagcaggcagcagcagtcgcagcaaatgccaaccgaccatctacaggtcagaaat

SEQ ID NO: 126264 - DNA, 75 bp, synthetic construct
  source 1..75: mol_type = other DNA
gatgacagcagtgagcgcgtccagaaagttctggcgatgttgaagcctgattcattttacagccgaccacacaaa

SEQ ID NO: 126265 - DNA, 75 bp, synthetic construct
  source 1..75: mol_type = other DNA
tcactgccgggtgctggttacggtcagtatgaacataaaatcggtgacctgattgcccggtttaaagaggctggt

SEQ ID NO: 126266 - DNA, 75 bp, synthetic construct
  source 1..75: mol_type = other DNA
gcatatcgtaagcagcttggcctgaaagacttctctcctaaaagccaggatgctgtggcattgcagcagattaag

SEQ ID NO: 126267 - DNA, 75 bp, synthetic construct
  source 1..75: mol_type = other DNA
gcttaccgcaagcagttagggctgacagacttctctcctaaaagccaggatgctgttgcattgcagcagattaag

SEQ ID NO: 126268 - DNA, 75 bp, synthetic construct
  source 1..75: mol_type = other DNA
gaatgattatgaatatagggaaaacattctttcctacattctaaacaggaatcaaccattagcatcttctattac

SEQ ID NO: 126269 - DNA, 75 bp, synthetic construct
  source 1..75: mol_type = other DNA
cgctgtggcgctgcagcagattaaagagcgtggcgctttaccgatgattgaccgtggcgatattcgtcaggcaat

SEQ ID NO: 126270 - DNA, 75 bp, synthetic construct
  source 1..75: mol_type = other DNA
gctgacctcttccggtgcgatggcggcggtgattggcttccagtcgccgtataacgaccagcgtagcgtgattgc

SEQ ID NO: 126271 - DNA, 75 bp, synthetic construct
  source 1..75: mol_type = other DNA
tacaggccacagaaagctgggtgaaaacgccgatgcgtcagacgccattcccggggattgtgccggacgaaaacg

SEQ ID NO: 126272 - DNA, 75 bp, synthetic construct
  source 1..75: mol_type = other DNA
tcaatcactgaatgtgaaaaatgacctgtcgcacttcccgataccgttcttcgacccacgcgataaccgtactaa

SEQ ID NO: 126273 - DNA, 75 bp, synthetic construct
  source 1..75: mol_type = other DNA
ccagcttctttcccgttggtgggatgcataccgtaagcagcttgggctgaaagacttctctccgaaaagccagga

SEQ ID NO: 126274 - DNA, 75 bp, synthetic construct
  source 1..75: mol_type = other DNA
agttttcggaaagcgaattgcatcagcagctggaaacgttcggcaaccatgataaacagctttcacgcttgatcc

SEQ ID NO: 126275 - DNA, 75 bp, synthetic construct
  source 1..75: mol_type = other DNA
gtatgccttcggcgatgctcgtgagatgagcgagaagctgcaggcgcatgccgaaaagctgctggctgccggtaa

SEQ ID NO: 126276 - DNA, 75 bp, synthetic construct
  source 1..75: mol_type = other DNA
cggcctgacctccgatcgcgccattaaactggtacgcggcctgaaagatctcaacatcgttgggatggacgtagt

SEQ ID NO: 126277 - DNA, 75 bp, synthetic construct
  source 1..75: mol_type = other DNA
tcggcagcaaatgtaatgatgatggcgtttgctatcactcgcacgaaacaatgtcgaagataaccggactgagcg

SEQ ID NO: 126278 - DNA, 75 bp, synthetic construct
  source 1..75: mol_type = other DNA
gctttgagtgtgaaatcgtcgccttcccgcagcacggtttgctgctgtcgaaatctgaacctttaatgcgtgaag

SEQ ID NO: 126279 - DNA, 75 bp, synthetic construct
  source 1..75: mol_type = other DNA
gcggtgctggcgcgacgtcaggcgggctttgagtgtgaaatcgtcgccttcccgcacacggtttgctgctgtcga

SEQ ID NO: 126280 - DNA, 75 bp, synthetic construct
  source 1..75: mol_type = other DNA
aacaggctttatgctttggttaggtcgacaagctaagcgagataatatttctcatctatatttcttatcgagaga

SEQ ID NO: 126281 - DNA, 75 bp, synthetic construct
  source 1..75: mol_type = other DNA
cgttctgctattgctggactgacggctcaaaaactatttgataatgaggccggtccccatgaaaaaaatagtcat

SEQ ID NO: 126282 - DNA, 75 bp, synthetic construct
  source 1..75: mol_type = other DNA
cacgcaaaaatggaacggcgtgattatatggattacctagaaagtacgggatttattgatgaacctaaccctgcg

SEQ ID NO: 126283 - DNA, 75 bp, synthetic construct
  source 1..75: mol_type = other DNA
gctccggcatacgatcagtcggaaatcactgctctggcagcggcaacgctggcgctggaaatgctgtatattcag

SEQ ID NO: 126284 - DNA, 75 bp, synthetic construct
  source 1..75: mol_type = other DNA
tcaaatggcacatatgatgtgggccgtatgcagttcaatacggtttatttaaaggatctggaaaaatacggcatt

SEQ ID NO: 126285 - DNA, 75 bp, synthetic construct
  source 1..75: mol_type = other DNA
ctgcttgccgaccgctttggaatagacccttcttcaattactaatgagcaatggaaagaagcagaatttattggt

SEQ ID NO: 126286 - DNA, 75 bp, synthetic construct
  source 1..75: mol_type = other DNA
aagacttctctcccaaaagccaggatgctgtggcattgcagcagattaaagagcgtggcgctttaccgatgattg

SEQ ID NO: 126287 - DNA, 75 bp, synthetic construct
  source 1..75: mol_type = other DNA
aagtgggtgtctctcaagattatttagctttctttctggcggtgtgactaaggctttggaaagtaaactaaatga

SEQ ID NO: 126288 - DNA, 75 bp, synthetic construct
  source 1..75: mol_type = other DNA
atcttctttgttacgtcgcgtacagtctacggaacgtcttgagtatcctggggctacaacatcaactcctttttc

SEQ ID NO: 126289 - DNA, 75 bp, synthetic construct
  source 1..75: mol_type = other DNA
tttgttacgtcgtgtacagtctaccgaacgtcttgataatagggctatagcaacaagagcttcctcttatagcgt

SEQ ID NO: 126290 - DNA, 75 bp, synthetic construct
  source 1..75: mol_type = other DNA
atgccagcgcctttgtatggtgcggatgacgcgcgccgctgttccggcaattccgtatcggaggtgctggataaa

SEQ ID NO: 126291 - DNA, 75 bp, synthetic construct
  source 1..75: mol_type = other DNA
atgacccgcgcaattgctccggtagctccaaggcggaggtgctggataaattcagaaaaaactacgatcgaataa

SEQ ID NO: 126292 - DNA, 75 bp, synthetic construct
  source 1..75: mol_type = other DNA
ttccgtatcggaggtgctggataaattcaggaaaaactacgaccggataatgtcgctaccgcaggaaacgaaaga

SEQ ID NO: 126293 - DNA, 75 bp, synthetic construct
  source 1..75: mol_type = other DNA
gccaacttggtcactatgttattgagtccctggtgaaaaccgttcctgccagccaaatagtggctatcgcacgta

SEQ ID NO: 126294 - DNA, 75 bp, synthetic construct
  source 1..75: mol_type = other DNA
cactgacatctgcacttcagggagtggaaaaactactgctgatctcttccagcgaagtgggtcaacgtgccccgc

SEQ ID NO: 126295 - DNA, 75 bp, synthetic construct
  source 1..75: mol_type = other DNA
gaaagaagaacgcgagcgaatttaccagacatcaatccgaccattccgcaaagccacatatacccacttccctga

SEQ ID NO: 126296 - DNA, 75 bp, synthetic construct
  source 1..75: mol_type = other DNA
tacgtcaaactgctggtggtgtttggtcgtgacgacaaagacctgttgcaggcagcgaaaggtatcgctcagggt

SEQ ID NO: 126297 - DNA, 75 bp, synthetic construct
  source 1..75: mol_type = other DNA
taaccatccgcaaaatccctacgtcaaactgctggtggtatttggtcgtgatgacaaagacctgttgcaggcggc

SEQ ID NO: 126298 - DNA, 75 bp, synthetic construct
  source 1..75: mol_type = other DNA
gggcgtgcagggagcggatgcgccagtcgtcgcgcagaacggctcttcgcgtgatgtgaagctgacctttgcgca

SEQ ID NO: 126299 - DNA, 75 bp, synthetic construct
  source 1..75: mol_type = other DNA
gaatccttacgtcaaactgctggtggtgtttggtcgtgacgacaaagacctgttgcaggcagcgaaaggtatcgc

SEQ ID NO: 126300 - DNA, 75 bp, synthetic construct
  source 1..75: mol_type = other DNA
ccgttccccggcattgtgccggacgagagcgatcgcgcggcagaaacccagtcaacgctgacctcttccggtgcg

SEQ ID NO: 126301 - DNA, 75 bp, synthetic construct
  source 1..75: mol_type = other DNA
ccactagtaaatattaatttttattcgtggatcattaattcaattatcttgttccattatccagatttgaaattt

SEQ ID NO: 126302 - DNA, 75 bp, synthetic construct
  source 1..75: mol_type = other DNA
gatgatttggttagaatttctagatgtaataaatttattagaagttctgaagagttacttgaagcgtttcctagg

SEQ ID NO: 126303 - DNA, 75 bp, synthetic construct
  source 1..75: mol_type = other DNA
gcctaccgtaagcagcttggcctgaaagatttttcgccagaaagtcaggacgctgtggcgctgcagcagattaaa

SEQ ID NO: 126304 - DNA, 75 bp, synthetic construct
  source 1..75: mol_type = other DNA
agttcgagcataaggttgacaacctgattgcaaaattcaaagaagctggcggaacggtcagagagattgaggtat

SEQ ID NO: 126305 - DNA, 75 bp, synthetic construct
  source 1..75: mol_type = other DNA
cttgtaccgctgtgctgactgatatgctaacggagcatgcaaaagaatcttttcctgaaatattttcattgtatt

SEQ ID NO: 126306 - DNA, 75 bp, synthetic construct
  source 1..75: mol_type = other DNA
cactcggagcgcaataatgttcgtgcagcttatatccatacttcagagcatttggacgaacgtcgattgatgatg

SEQ ID NO: 126307 - DNA, 75 bp, synthetic construct
  source 1..75: mol_type = other DNA
atcaccatgccggaacagatcatcaaagtgagtgagtgccaaccgacaactgtttggcgcattgtcgtactcttc

SEQ ID NO: 126308 - DNA, 75 bp, synthetic construct
  source 1..75: mol_type = other DNA
atgacgaggaataagcaacaagcaccggaaataacagctgcaacgctgattaaagacagcgcagaatgtctggca

SEQ ID NO: 126309 - DNA, 75 bp, synthetic construct
  source 1..75: mol_type = other DNA
tgaccatcaccgactgggaactgtgatgacacaaaaccctccggatgtatggatacgcgccgtcggatgttgtgc

SEQ ID NO: 126310 - DNA, 75 bp, synthetic construct
  source 1..75: mol_type = other DNA
tacgcttgcagctgctgttgcatattttaccgatctcggctgccgcattttcaacctgtcattgggaaacgctaa

SEQ ID NO: 126311 - DNA, 75 bp, synthetic construct
  source 1..75: mol_type = other DNA
gttgacgctactcacgttgaaattacgccgaagccagttgcgctggatgatgtttccctgtctccggagcagcgt

SEQ ID NO: 126312 - DNA, 75 bp, synthetic construct
  source 1..75: mol_type = other DNA
gattcagcgcagagtcattagatattattgagaaaaaattgtcttctccagattttaagcataccaactggggag

SEQ ID NO: 126313 - DNA, 75 bp, synthetic construct
  source 1..75: mol_type = other DNA
ctggcaatcactgtgtgctttgggcctatcttcatcttctgcctgttgttcaagccgctgtatggcatgttcaat

SEQ ID NO: 126314 - DNA, 75 bp, synthetic construct
  source 1..75: mol_type = other DNA
gaagtggctccggcatacgatcagtcggaaatcactgctctggctgcggcgacgctggcgctggagatgctgtat

SEQ ID NO: 126315 - DNA, 75 bp, synthetic construct
  source 1..75: mol_type = other DNA
tggatgacgttatcgcccaggtgaaacaaattgtgggtgatatgccggtttacctgacctttgatatcgactgcc

SEQ ID NO: 126316 - DNA, 75 bp, synthetic construct
  source 1..75: mol_type = other DNA
atctggtgctggatatcgactacaacgatgctgtcgttgtgattcacaccagtccgggcgcggcacagttgattg

SEQ ID NO: 126317 - DNA, 75 bp, synthetic construct
  source 1..75: mol_type = other DNA
tcgccagggcttaaaatagcaactattgaattaaatactcctgatgtggatatgtcaactctcttagatacagca

SEQ ID NO: 126318 - DNA, 75 bp, synthetic construct
  source 1..75: mol_type = other DNA
ttttatttcttagctcaatatcttttcaatcctgtgcagaaacttattttggtgtgctcaggggtaatgaaatta

SEQ ID NO: 126319 - DNA, 75 bp, synthetic construct
  source 1..75: mol_type = other DNA
gggtggaggttgggggacaagttatcaatgatgctcccaatatgcgggataaattatctgttattgcagagatat

SEQ ID NO: 126320 - DNA, 75 bp, synthetic construct
  source 1..75: mol_type = other DNA
attgaccagccgcagaccccgacgcttgagttgcagattaaggtcgcctgttacatggcggtgctgaaatgggaa

SEQ ID NO: 126321 - DNA, 75 bp, synthetic construct
  source 1..75: mol_type = other DNA
ttacatggcggtgctgaaatgggaaccccggtcaccctgtcatccgtcaccactgagcgcagttttgacgggcga

SEQ ID NO: 126322 - DNA, 75 bp, synthetic construct
  source 1..75: mol_type = other DNA
atcgttaaagatatgggtggtggcttcctgcaaaaactgacggaaggggcgtctattctcggcctgtttgtcatg

SEQ ID NO: 126323 - DNA, 75 bp, synthetic construct
  source 1..75: mol_type = other DNA
atcgcccacgatcatctggtgatctgtaatggtggcggtggtgttccggtggttgaaaaagccgatggataccat

SEQ ID NO: 126324 - DNA, 75 bp, synthetic construct
  source 1..75: mol_type = other DNA
ttttttatagacaaagtcgtatatctttattcatccaaacctttagaatacccaggtgtgttgtgttttctaaat

SEQ ID NO: 126325 - DNA, 75 bp, synthetic construct
  source 1..75: mol_type = other DNA
accgaaatactggcctcggcatcagcgataccgagcatatcagccagagcatgcgcgacattctgctgacgccgg

SEQ ID NO: 126326 - DNA, 75 bp, synthetic construct
  source 1..75: mol_type = other DNA
atttaagcgcggcgacaaaatcagcttcactggtgtgaaattcctgtctcagatggcgaagaacgtgctgactga

SEQ ID NO: 126327 - DNA, 75 bp, synthetic construct
  source 1..75: mol_type = other DNA
cctgctgaacgtggcaacaactaccgcaaacgtgttctgggctgacgattcaattcgcctcctgtctcagccaat

SEQ ID NO: 126328 - DNA, 75 bp, synthetic construct
  source 1..75: mol_type = other DNA
catgatcaacaaggcgctgcgtaagatgggctatgacaccacgcaggatatttgcggtcatggtttccgcacact

SEQ ID NO: 126329 - DNA, 75 bp, synthetic construct
  source 1..75: mol_type = other DNA
aagaatcctgcctccaggcaagagacgagcaaaaaatttctggtgaatgcctcccggtaaaaaaagtatcgctgt

SEQ ID NO: 126330 - DNA, 75 bp, synthetic construct
  source 1..75: mol_type = other DNA
ttacatggcggtgctgaaatgggaaccccgcgtcaccctgtcatccgtcaccactgagcgcagttttgacggcga

SEQ ID NO: 126331 - DNA, 75 bp, synthetic construct
  source 1..75: mol_type = other DNA
atacgatgtccagtaataatcatgatgtcattgtccgttttcctgaaggcagtggagtttctccgctatatattt

SEQ ID NO: 126332 - DNA, 75 bp, synthetic construct
  source 1..75: mol_type = other DNA
ggttacacagcaactggagcaggtaacggatatccctgccagccagttaccagcagcgggtaataatgtaccggt

SEQ ID NO: 126333 - DNA, 75 bp, synthetic construct
  source 1..75: mol_type = other DNA
acgtcatcctggcgaacgacgttcgtatccgggtatcgctatcaccttctgacgtgttccagcagctcagcaaaa

SEQ ID NO: 126334 - DNA, 75 bp, synthetic construct
  source 1..75: mol_type = other DNA
gtgagttccacggtgaagatcgctacaccaccaaagagagcgagcgcctgctgcgcctgccgctgttctacaatc

SEQ ID NO: 126335 - DNA, 75 bp, synthetic construct
  source 1..75: mol_type = other DNA
gttctacattaaactgcgggatattgatgaccggagcgcgttgattaactttctgaaagaagcggaaatcatggc

SEQ ID NO: 126336 - DNA, 75 bp, synthetic construct
  source 1..75: mol_type = other DNA
tggagatggcggcgctgctgctcgatatccagcctggcgatgaagtgatcatgccgagctacacctttgtctcca

SEQ ID NO: 126337 - DNA, 75 bp, synthetic construct
  source 1..75: mol_type = other DNA
gcgccagtttacccgtgtcgggctgtacctgacggtgattggctacctgttgttactgttgtttgccgccacctg

SEQ ID NO: 126338 - DNA, 75 bp, synthetic construct
  source 1..75: mol_type = other DNA
cagcagccgcagcattattatcggtgccattgtggtgaccatcgtcctgagcctggtcgtacccagtgccactgc

SEQ ID NO: 126339 - DNA, 75 bp, synthetic construct
  source 1..75: mol_type = other DNA
cgccgcttttttaatcatcattcacctgggctttgccagcgctactgcgctaacggctgcattgctgcctatcct

SEQ ID NO: 126340 - DNA, 75 bp, synthetic construct
  source 1..75: mol_type = other DNA
tctcccttgcgacatcatccttcagttgcctggcatttaaatcctcgcccaatgtgctaccaggaccaacgaatc

SEQ ID NO: 126341 - DNA, 75 bp, synthetic construct
  source 1..75: mol_type = other DNA
aaaactttcggcgccgggcattctgttagttggctggattggctgttagcgggcgccccctggagcctcgctatg

SEQ ID NO: 126342 - DNA, 75 bp, synthetic construct
  source 1..75: mol_type = other DNA
cgccgctttcttgataatcattcacctggggtttgccagtgccactgcgctaactgccgcattgctgcccatcct

SEQ ID NO: 126343 - DNA, 75 bp, synthetic construct
  source 1..75: mol_type = other DNA
gatgtggggcacctggtgggtatgggacgcacgcctgacttctgaactggtgctgctgtttctgtatgttggtgt

SEQ ID NO: 126344 - DNA, 75 bp, synthetic construct
  source 1..75: mol_type = other DNA
tgaatgccgctattttaaacctgcaaaaatagctatgaataagaataatttgattataaggacgagtgatgtaga

SEQ ID NO: 126345 - DNA, 75 bp, synthetic construct
  source 1..75: mol_type = other DNA
gcatggaggtggcacatgattaaaacctacgatgtgcatatggatcccctcgaacgcacaagccagatcatcaca

SEQ ID NO: 126346 - DNA, 75 bp, synthetic construct
  source 1..75: mol_type = other DNA
atgagcaccttaggtcatcaatacgataactcactggtttccaatgcctttggttttttacgcctgccgatgaac

SEQ ID NO: 126347 - DNA, 75 bp, synthetic construct
  source 1..75: mol_type = other DNA
cagaacactcagtgagttattggcggttctgaagcggcggtgggatgtgacaccggcaatcatccgtgcggtgga

SEQ ID NO: 126348 - DNA, 75 bp, synthetic construct
  source 1..75: mol_type = other DNA
ggtttgcccgcaaagatgagttcccggcagggaagctcggtgagctaatgcaaatcacgctgctgattaaaactg

SEQ ID NO: 126349 - DNA, 75 bp, synthetic construct
  source 1..75: mol_type = other DNA
tgtttcttattccatggagcaacaagcatctatagtagctgattattggctattgattaactacggactggtagc

SEQ ID NO: 126350 - DNA, 75 bp, synthetic construct
  source 1..75: mol_type = other DNA
atggttgcgtgcagaatgcgcatatgttctacattaaattgcgggatattgatgaccggagcgcgttgataaact

SEQ ID NO: 126351 - DNA, 75 bp, synthetic construct
  source 1..75: mol_type = other DNA
cgacaaaacgcgcgttattgtgccggtgcattacgcgggggtggcctgtgaaatggacactataatggcgctggc

SEQ ID NO: 126352 - DNA, 75 bp, synthetic construct
  source 1..75: mol_type = other DNA
tgagaatttacggactggatgtcctaccatgtatcgcaaatggtgctatagcaattgctggagcgctgactggca

SEQ ID NO: 126353 - DNA, 75 bp, synthetic construct
  source 1..75: mol_type = other DNA
tttttcctgagttatataatcaggtaatagagttttggcaggtaacatccgatattggtgtaatacatttgcagg

SEQ ID NO: 126354 - DNA, 75 bp, synthetic construct
  source 1..75: mol_type = other DNA
atgtcattaaggagaatgacatctggtgaattaacattggccagatcgatttttgagaatacaattgattatagc

SEQ ID NO: 126355 - DNA, 75 bp, synthetic construct
  source 1..75: mol_type = other DNA
ggatctggttgtgtttggtgaagttgggctggcaggagagatccgcccggtgcccagcggtcaggagcgaatttc

SEQ ID NO: 126356 - DNA, 75 bp, synthetic construct
  source 1..75: mol_type = other DNA
cggcagcaatggtgcaggcgcaggtcgatcgcaacgatgagatttatcgccgtcagcgtgaaatgaaagaggagc

SEQ ID NO: 126357 - DNA, 75 bp, synthetic construct
  source 1..75: mol_type = other DNA
acgccgctcttctcccttcacggtgagcgacagcctgatgtttccaccaccgcgttgttgttgctctcaggcggc

SEQ ID NO: 126358 - DNA, 75 bp, synthetic construct
  source 1..75: mol_type = other DNA
gggctggcaggtgagatccgcccggtgcccagcggtcaggaacgaatctctgaagcggcgaaacacggttttcgc

SEQ ID NO: 126359 - DNA, 75 bp, synthetic construct
  source 1..75: mol_type = other DNA
agcgcctgtcatgcctggaacaccatcaccgaggtgcgtcttgctgcgtcgccaacggtggcgcgtaacgagcgt

SEQ ID NO: 126360 - DNA, 75 bp, synthetic construct
  source 1..75: mol_type = other DNA
gggcgtcttcgcgatgaccgaacaggggctgcgtgaagtcagcaacccttccgccatctttttaagccgtggcga

SEQ ID NO: 126361 - DNA, 75 bp, synthetic construct
  source 1..75: mol_type = other DNA
agtataccaactccctacatcacccacagcggcagcggagcacaactgctcagccaactggggcgagcattcagt

SEQ ID NO: 126362 - DNA, 75 bp, synthetic construct
  source 1..75: mol_type = other DNA
cggcggaagaactggtacaactggatggcgcaatgctgcaggcaatggtgaggcgggggtttaaaattcatgagc

SEQ ID NO: 126363 - DNA, 75 bp, synthetic construct
  source 1..75: mol_type = other DNA
cgccagcgtgagatgaaggaacaactgaataatctgaatgacttggcttcaattcgagcgtttggcatttgctaa

SEQ ID NO: 126364 - DNA, 75 bp, synthetic construct
  source 1..75: mol_type = other DNA
tttacccggctggacgatccgcatgccaccattctccacagccaggggcgcccgttgtcccctctggatgaaatc

SEQ ID NO: 126365 - DNA, 75 bp, synthetic construct
  source 1..75: mol_type = other DNA
aaaaacgcctgacggctctcgccgtcggcaagatagacaaaaaacgcctgacggctctcgccgtcgaccgttatc

SEQ ID NO: 126366 - DNA, 75 bp, synthetic construct
  source 1..75: mol_type = other DNA
ctgcgaaatccgacattgtacgggacgtgatgacgtggggtgatgccgataatcagcaggtgaaactgtcgatgc

SEQ ID NO: 126367 - DNA, 75 bp, synthetic construct
  source 1..75: mol_type = other DNA
cgcacctggaacgctggccccgactcaatggcccgtctttatccggtagtaatggcggcgaaatctgacacggcg

SEQ ID NO: 126368 - DNA, 75 bp, synthetic construct
  source 1..75: mol_type = other DNA
acagcaatggcacgggcgcaagttaaccgcaacgatgaaatttatcggcgtcagcgacagatgaaggacgtgctg

SEQ ID NO: 126369 - DNA, 75 bp, synthetic construct
  source 1..75: mol_type = other DNA
gccgtttacgttcgaatggaacggtcgcacctggaacgctggccccgactcaatggcccgtctttatccggtagt

SEQ ID NO: 126370 - DNA, 75 bp, synthetic construct
  source 1..75: mol_type = other DNA
cggcggaagaactggtacaactggatggcgcaatgctgcaggcaatggtgatgcggggttttaaaattcatgagc

SEQ ID NO: 126371 - DNA, 75 bp, synthetic construct
  source 1..75: mol_type = other DNA
acgagatttatcagcgccagcgtgaaatgaaggagcagctttcccggctgtccatattggacgaggtgagagcgt

SEQ ID NO: 126372 - DNA, 75 bp, synthetic construct
  source 1..75: mol_type = other DNA
cggagggctttaaaatccacgaacgtcagcgggagatgaaagaggaactgagcagcctggaggatttacgctcaa

SEQ ID NO: 126373 - DNA, 75 bp, synthetic construct
  source 1..75: mol_type = other DNA
accgcttcggcgcggtgaatgaactgggcgtcttcgcgatgaccgaacaggggctgcgtgaagtcagcaaccctt

SEQ ID NO: 126374 - DNA, 75 bp, synthetic construct
  source 1..75: mol_type = other DNA
ttccgcaccttgcgtagccataaaaaccgcttcggcgcggtgaatgagctgggtgtattcgcgatgaccgaacag

SEQ ID NO: 126375 - DNA, 75 bp, synthetic construct
  source 1..75: mol_type = other DNA
gagtggcgaaagtccagaaactgtcggatatcagccttgaggaattgccgcgtttttctaccggatttaaagagt

SEQ ID NO: 126376 - DNA, 75 bp, synthetic construct
  source 1..75: mol_type = other DNA
agtaatcaccgggggtaatgaaatcagcatctgcatccctcgtcatgccagccatcattatctcctgactaaaaa

SEQ ID NO: 126377 - DNA, 75 bp, synthetic construct
  source 1..75: mol_type = other DNA
tcagcgggagatgaaagagaggttgagcaacctggatgatttgcgctcaatcagagcgatgacgattagcagcag

SEQ ID NO: 126378 - DNA, 75 bp, synthetic construct
  source 1..75: mol_type = other DNA
gaagagttacagagcggcaagtggggggaaattgccccattcaccgtcacgcctgaacttatcgcagcggcaaaa

SEQ ID NO: 126379 - DNA, 75 bp, synthetic construct
  source 1..75: mol_type = other DNA
tggccggaagatgcagatcatattgcttttattcgcgggcgtattggttttgaactgcctgcctggtttatcccg

SEQ ID NO: 126380 - DNA, 75 bp, synthetic construct
  source 1..75: mol_type = other DNA
ccggaagatgcggagcatattacttttattcgcgggcgtattggttttgaactgcctgactggtttatcccgaag

SEQ ID NO: 126381 - DNA, 75 bp, synthetic construct
  source 1..75: mol_type = other DNA
ccggaagatgcggaacatattgcttttattcgcgggcgtattggttttgaactgcctgactggtttatcccgaag

SEQ ID NO: 126382 - DNA, 75 bp, synthetic construct
  source 1..75: mol_type = other DNA
ggcgtcactctggagccaatcaacagtcagaacgcaccaaaaggtcacttcttcctgcacccgcgtgcacgttca

SEQ ID NO: 126383 - DNA, 75 bp, synthetic construct
  source 1..75: mol_type = other DNA
tcgaattgttcattaaatccccgcttgataacggacttactagtggcgaacaaatggaactggcacggattgctc

SEQ ID NO: 126384 - DNA, 75 bp, synthetic construct
  source 1..75: mol_type = other DNA
ccgcgccgccatgcttcagtccggaaactttcgggaaaacaagaattcgtcaaccaataattttcgggatattgc

SEQ ID NO: 126385 - DNA, 75 bp, synthetic construct
  source 1..75: mol_type = other DNA
ccggaagatgcagaacatattacttttattcgcgggcgtattggttttgaactgcctgactggtttatcccgaag

SEQ ID NO: 126386 - DNA, 75 bp, synthetic construct
  source 1..75: mol_type = other DNA
acaattttctggcacgtcgtgagcggtgcttacggaaaagcagcaagcgcgctgcatcgggtgaagagtggtatc

SEQ ID NO: 126387 - DNA, 75 bp, synthetic construct
  source 1..75: mol_type = other DNA
tgcattacctgagaacgacgatgaggacgggcatgacattgattatcttgagccatctgaagtttacgcgcttgg

SEQ ID NO: 126388 - DNA, 75 bp, synthetic construct
  source 1..75: mol_type = other DNA
ccggaagatgccgaccatattacttttattcgcgggcgtattggttttgaactgcctgactggtttatcccgaag

SEQ ID NO: 126389 - DNA, 75 bp, synthetic construct
  source 1..75: mol_type = other DNA
ccggaagatgccgaacatattccttttattcgcgggcgtattggttttgaactgcctgactggtttatcccgaag

SEQ ID NO: 126390 - DNA, 75 bp, synthetic construct
  source 1..75: mol_type = other DNA
ccggaagatgctgatcatattacttttattcgcgggcgtattggttttgaactgcctgactggtttatcccgaag

SEQ ID NO: 126391 - DNA, 75 bp, synthetic construct
  source 1..75: mol_type = other DNA
tggaacgctggccccgactcaatggcccgtctttatcctgtggtaatggctgcaaaatctgatacggcacgaact

SEQ ID NO: 126392 - DNA, 75 bp, synthetic construct
  source 1..75: mol_type = other DNA
ctggtgcctggcctatgttgagatgctggcgcgtgatgaaagccgtttgcaggacgcgcttaagcgtctggatgt

SEQ ID NO: 126393 - DNA, 75 bp, synthetic construct
  source 1..75: mol_type = other DNA
cgcaccatattgtgggtgaagcggtggtggaagccattcgtcagggcaaaccactggaagaactgccgctggctg

SEQ ID NO: 126394 - DNA, 75 bp, synthetic construct
  source 1..75: mol_type = other DNA
gcgggaacggcctatgaaatcgaccgtgaacagttagcaggctggctgggctttgcctcggcgacccgtaacagt

SEQ ID NO: 126395 - DNA, 75 bp, synthetic construct
  source 1..75: mol_type = other DNA
aggatgcacttaagcgtctggatgtcagcccgctaggctgtggcgcgctggcgggaacggcctatgaaatcgacc

SEQ ID NO: 126396 - DNA, 75 bp, synthetic construct
  source 1..75: mol_type = other DNA
agatgttcgcgccaggccacaacaaatccttgaaagcgacgccgaagatatccatagctgggtggaaggcaaact

SEQ ID NO: 126397 - DNA, 75 bp, synthetic construct
  source 1..75: mol_type = other DNA
acgttgctgtttgttgccattttttatggcggcgacgtctgccgtacgctggtggctaacggcgcgattcccctc

SEQ ID NO: 126398 - DNA, 75 bp, synthetic construct
  source 1..75: mol_type = other DNA
acagagaaaccgatcagcaaatcagggagcattcagccagacgaaccattaacagcgatcaggaagaacgcacaa

SEQ ID NO: 126399 - DNA, 75 bp, synthetic construct
  source 1..75: mol_type = other DNA
gtgcggtggcagcgggggtagcctgggaaaatgctcctgcaaacagcgccactgtggcggtaaaaatcaatgtct

SEQ ID NO: 126400 - DNA, 75 bp, synthetic construct
  source 1..75: mol_type = other DNA
ttgcgcgttacgctgcgcgcgagcgggtttatccgttttgttactggaacgagcggagattcccggcagcaaaaa

SEQ ID NO: 126401 - DNA, 75 bp, synthetic construct
  source 1..75: mol_type = other DNA
gcgttggggatcaaagaagtgctgtcgctggaaacatccgctattgaagaacgttttcatctggagaataacgaa

SEQ ID NO: 126402 - DNA, 75 bp, synthetic construct
  source 1..75: mol_type = other DNA
gatgcactgtatgaagaaaacggcagggtgtgtggtgtcatttgtggtgacgatattctccgcgcccgttatgtg

SEQ ID NO: 126403 - DNA, 75 bp, synthetic construct
  source 1..75: mol_type = other DNA
aaccttcttccctgacttctctaaagtcggcaccctggttgtgtttgttgccttcattttgagttatatgggggt

SEQ ID NO: 126404 - DNA, 75 bp, synthetic construct
  source 1..75: mol_type = other DNA
agtccttaaacatcctgacttaaaacgcacatttaatatccctggtggtaaaggcgtgaaactggttgtggctat

SEQ ID NO: 126405 - DNA, 75 bp, synthetic construct
  source 1..75: mol_type = other DNA
gcgatttatctgcactccggtgcgtcggttgctatcgaaatggatgcgaaaaccttcttccctgatttctctaaa

SEQ ID NO: 126406 - DNA, 75 bp, synthetic construct
  source 1..75: mol_type = other DNA
cgcgtctgcaatgcatgagtgctgccgtgattgcgctgacacgatgggaaccccgcattgccctggatgccatcg

SEQ ID NO: 126407 - DNA, 75 bp, synthetic construct
  source 1..75: mol_type = other DNA
cgttgtctggaaggcaggaggccgcgccggggtgacgctgtcgggcactgtcatgcagaccatgcagaatgttga

SEQ ID NO: 126408 - DNA, 75 bp, synthetic construct
  source 1..75: mol_type = other DNA
gtcagggacatcctgaccaccccgctggcaagccgggttatgcgacgggaatatggcagccttgtgcctgatttg

SEQ ID NO: 126409 - DNA, 75 bp, synthetic construct
  source 1..75: mol_type = other DNA
gtgaatgtcgatcacaccaccatttaccgctggagaattatgtgcctgaaatggaaaagcagtctgatgctttac

SEQ ID NO: 126410 - DNA, 75 bp, synthetic construct
  source 1..75: mol_type = other DNA
gacgttgaacaccgacagattaagtaccggaacaacgtgattgaatgcgatcatggcaaactgaaacggataatc

SEQ ID NO: 126411 - DNA, 75 bp, synthetic construct
  source 1..75: mol_type = other DNA
tgcccgtggcacatggatgaaacctacgtgaaggtcaatggccgctgggcgtatctgtaccgggccgtcgacagc

SEQ ID NO: 126412 - DNA, 75 bp, synthetic construct
  source 1..75: mol_type = other DNA
gttagtttcctggtggtacttgccctgccctttattctctatgctgttcatgatcgtaaaggcaaagcgaatacc

SEQ ID NO: 126413 - DNA, 75 bp, synthetic construct
  source 1..75: mol_type = other DNA
aagcaaagcagctaacattactcggcttcttcgccattacggcatcgatggtcatggctgtttatgaatacccaa

SEQ ID NO: 126414 - DNA, 75 bp, synthetic construct
  source 1..75: mol_type = other DNA
gtaatggctgtttatgaataccctacctttgcaacatccggtttttcattagttttcttcctgctattaggcggg

SEQ ID NO: 126415 - DNA, 75 bp, synthetic construct
  source 1..75: mol_type = other DNA
tggataacaactggacctatgatgaaaacttactgagtaataaagcgggcagcgacgatgcacctttggccattt

SEQ ID NO: 126416 - DNA, 75 bp, synthetic construct
  source 1..75: mol_type = other DNA
ggaaaaggaatttcgccactgtatatggcttgcagagaaagaagaacgagagcgaatttaccagacatcaatccg

SEQ ID NO: 126417 - DNA, 75 bp, synthetic construct
  source 1..75: mol_type = other DNA
tcctgctgctgtctgccacgctgacgctgatgcggatgcgtaatttgattttgctgatggaaaaacgccgtccgt

SEQ ID NO: 126418 - DNA, 75 bp, synthetic construct
  source 1..75: mol_type = other DNA
atcaagaataatctcgacgcgtttcttgctctgccaccagaaacaaaagaagaacggaagtgccgacgcgatata

SEQ ID NO: 126419 - DNA, 75 bp, synthetic construct
  source 1..75: mol_type = other DNA
ggtaaagcaattaaagaggaagaccctcgccgtaaacttccatggttgcgctatgttgcactgtgctcaccacta

SEQ ID NO: 126420 - DNA, 75 bp, synthetic construct
  source 1..75: mol_type = other DNA
aaacttgctgagtaataaagcgggcagcgacgatgcacctttggccattttaaccgagccccgtggccgccaggg

SEQ ID NO: 126421 - DNA, 75 bp, synthetic construct
  source 1..75: mol_type = other DNA
ggtcgtgatagtgcactgaaccagatagcgacgttaatccaaaaacttgatgatatctccagcctgacatccagt

SEQ ID NO: 126422 - DNA, 75 bp, synthetic construct
  source 1..75: mol_type = other DNA
tttgggcgtgatggccaggcctggcgttatttctcaggttacgttgagcgcgatcaaccggcagaaaacggcgcc

SEQ ID NO: 126423 - DNA, 75 bp, synthetic construct
  source 1..75: mol_type = other DNA
atccgcgccatcctcgcccacttcgagaagcacggcgcgcgggaagaagcgcactacaggcccgcagcgcgcgcg

SEQ ID NO: 126424 - DNA, 75 bp, synthetic construct
  source 1..75: mol_type = other DNA
cgatcccaccacggctgtatcaaatctgtggctggtttataccgtggctggcaattgccagtgtggtcgtgctta

SEQ ID NO: 126425 - DNA, 75 bp, synthetic construct
  source 1..75: mol_type = other DNA
ggcgcgagaaaaggcaatggtatagtgattttctggatagccatccgctgagttttgagggcttcaagagattga

SEQ ID NO: 126426 - DNA, 75 bp, synthetic construct
  source 1..75: mol_type = other DNA
tctattcaattcagactacagagtgggcgattttaatctatggcctggtgatgatcttctttttatacatgtatg

SEQ ID NO: 126427 - DNA, 75 bp, synthetic construct
  source 1..75: mol_type = other DNA
agaacaggaccgcatccgggcagaacagcgtgcggcagaagtcgtcgtactgccgctggtcccggcagcaggtct

SEQ ID NO: 126428 - DNA, 75 bp, synthetic construct
  source 1..75: mol_type = other DNA
ccgtggcacagcctctgctgctggcagaacaggaccgcatccgggcagaacagcgtgcggcagaagtcgtcgtac

SEQ ID NO: 126429 - DNA, 75 bp, synthetic construct
  source 1..75: mol_type = other DNA
ctgcaggcctgtcacgatgcaggaattactgtgagaatacagatcaatgaatgtagcactcccgaggaggggcgc

SEQ ID NO: 126430 - DNA, 75 bp, synthetic construct
  source 1..75: mol_type = other DNA
agcccgtgatgacgaaatctcccgccagcgccagttgaaggtgcacagtctgcccttgcgcgagtcgacaaccgg

SEQ ID NO: 126431 - DNA, 75 bp, synthetic construct
  source 1..75: mol_type = other DNA
atcaggcctgccgtggggattttgtggtgcgtctcgacggcagcacctgtctgcagttatggaataaagaaggca

SEQ ID NO: 126432 - DNA, 75 bp, synthetic construct
  source 1..75: mol_type = other DNA
ggccgtggcacagcctctgctgctggcagaacaggaccgcctccgggcagaacagcgcgcggcagaagtcgtcga

SEQ ID NO: 126433 - DNA, 75 bp, synthetic construct
  source 1..75: mol_type = other DNA
ccatcagtggtttgcctcttcgaccgtttcgacgggcggggatcatgctgattttttaagttggctgggaaagtg

SEQ ID NO: 126434 - DNA, 75 bp, synthetic construct
  source 1..75: mol_type = other DNA
ataatgagttgcgtaaaatttcccgactggaaatggtgctggcaattgtcggtaccatgaaagcagggaaatcaa

SEQ ID NO: 126435 - DNA, 75 bp, synthetic construct
  source 1..75: mol_type = other DNA
ggagtttgtccatctggcggggctggagagttatcccggtcagttgacgttactggataccccccgggccaaatg

SEQ ID NO: 126436 - DNA, 75 bp, synthetic construct
  source 1..75: mol_type = other DNA
gcgcagacagataacgatggttttttaagtaaaacgctttatggcgcgctggagcataactttactgatgcctag

SEQ ID NO: 126437 - DNA, 75 bp, synthetic construct
  source 1..75: mol_type = other DNA
ccaggaagaacgcgaggctgaaacggcacgacaacgtctgagagacgtccggcgtttgccgttacgccagacggt

SEQ ID NO: 126438 - DNA, 75 bp, synthetic construct
  source 1..75: mol_type = other DNA
ggaagctccggtctacggaccaaacctgcgcgcctcctgccggcgcatggaagcatcaggctggcttcgcaccct

SEQ ID NO: 126439 - DNA, 75 bp, synthetic construct
  source 1..75: mol_type = other DNA
gtggcagatcccgcgattcatcaacacggataaagcgcccggctatggtcgcgcgcttgctctgctcaaacgcga

SEQ ID NO: 126440 - DNA, 75 bp, synthetic construct
  source 1..75: mol_type = other DNA
gtgaagaagtggcagatcccgcgattcatcaacacggataaagcgcccgccaatggtcgcgcgcttgctctgctc

SEQ ID NO: 126441 - DNA, 75 bp, synthetic construct
  source 1..75: mol_type = other DNA
ctgcgctggtactggcgtaacccttccgatctttgcccgtggcacatggatgaaacctacgtgaaggtcaatggc

SEQ ID NO: 126442 - DNA, 75 bp, synthetic construct
  source 1..75: mol_type = other DNA
ggcagcaaagtctttagcgaacgcgtcaatcagtacttacgtgaacgtgaaatgtttggcgcagaagaagatccc

SEQ ID NO: 126443 - DNA, 75 bp, synthetic construct
  source 1..75: mol_type = other DNA
ttcagcgtgctgacggagcgtgagctggatgttctgcacgagctggcgcaagggctgtcgaataagcaaattgcc

SEQ ID NO: 126444 - DNA, 75 bp, synthetic construct
  source 1..75: mol_type = other DNA
aagacagcgacccggaagtattgctggaagcaattcgcgccggagcaaaaggcagcaaagtctttagcgaacgcg

SEQ ID NO: 126445 - DNA, 75 bp, synthetic construct
  source 1..75: mol_type = other DNA
aaacgttttcaggcatggcaaggattgggggcagatggcgctattggcccggcaacgcgtgactggttaaacgta

SEQ ID NO: 126446 - DNA, 75 bp, synthetic construct
  source 1..75: mol_type = other DNA
cgaaatgagctttgcccgggatgttgcggaccgggcgatttttatggaccaggggcggatagtcgagcagggggt

SEQ ID NO: 126447 - DNA, 75 bp, synthetic construct
  source 1..75: mol_type = other DNA
ggaaaagcgcacgatggtgattgtgacgcacgaaatgagctttgcccgggatgttgcggaccgggcgatttttat

SEQ ID NO: 126448 - DNA, 75 bp, synthetic construct
  source 1..75: mol_type = other DNA
caatgtggtggtgaatccgccgtggaacgtaccgccgacgctggcacgcaaagatattctgccgaaagtgcgtaa

SEQ ID NO: 126449 - DNA, 75 bp, synthetic construct
  source 1..75: mol_type = other DNA
caaaggcactcgctggctatatagcagtaaaccttatgcgcttgcaacgccgccgctttcggtgattaaccaatg

SEQ ID NO: 126450 - DNA, 75 bp, synthetic construct
  source 1..75: mol_type = other DNA
gccggtttccagccgcagtttaataaatgggtagagttactgaccgatcctggtgttaacgggatggcacgcgac

SEQ ID NO: 126451 - DNA, 75 bp, synthetic construct
  source 1..75: mol_type = other DNA
tcggtaaaacggtcgaccaactgacgctgaacgaaatggcggtgatagccgggctgccgaaagcgccttccacct

SEQ ID NO: 126452 - DNA, 75 bp, synthetic construct
  source 1..75: mol_type = other DNA
gacgccatcaaattgcagcaggaactggaatccctggtgctgggcgacgtcgaggtcttcggttttgaagagcgc

SEQ ID NO: 126453 - DNA, 75 bp, synthetic construct
  source 1..75: mol_type = other DNA
gccagtggcagcgggcgattgtcagccactggaatcaggacttcgctggccgctatccgttcaaagcctcacaga

SEQ ID NO: 126454 - DNA, 75 bp, synthetic construct
  source 1..75: mol_type = other DNA
gttcgtccgcccggtggagcagtcgtggcggcaggtgctgacgcctgcggcggacagcctgaaccgtcagtggca

SEQ ID NO: 126455 - DNA, 75 bp, synthetic construct
  source 1..75: mol_type = other DNA
tgtctggcgaccggatattcctgccgtagtcaggtcaaacgggttgaaggcacgggggtacgccatcctgtgcag

SEQ ID NO: 126456 - DNA, 75 bp, synthetic construct
  source 1..75: mol_type = other DNA
atgagtcaaaccattttatttgtctgcgccacgggtattgccacatccacggcggtaacagaaaaagtcatggaa

SEQ ID NO: 126457 - DNA, 75 bp, synthetic construct
  source 1..75: mol_type = other DNA
tctggtgctcgatctgggcgaagagacggagcgccagaaggaagagcacaccgagatcagtcgcgaagtggcctc

SEQ ID NO: 126458 - DNA, 75 bp, synthetic construct
  source 1..75: mol_type = other DNA
gtaggcaactgtagcctttttgcgggttccttatgtttgaatacggaattcactttgtcatatcagtgccatcat

SEQ ID NO: 126459 - DNA, 75 bp, synthetic construct
  source 1..75: mol_type = other DNA
cggggcagcctccgggctggccggtattcttcgaggccggtattctcacccccgtctgggctatcgccatcgagc

SEQ ID NO: 126460 - DNA, 75 bp, synthetic construct
  source 1..75: mol_type = other DNA
tggaggcgaaagggatggcttttgcgctgcattatcgtcaggctccgcagcatgaagacgcattaatgacattag

SEQ ID NO: 126461 - DNA, 75 bp, synthetic construct
  source 1..75: mol_type = other DNA
acccggactttatccgcgccctgaaccgcctgcacgacgtggccgataccgcctttgccagcggcgatgccggaa

SEQ ID NO: 126462 - DNA, 75 bp, synthetic construct
  source 1..75: mol_type = other DNA
gctcaggcggggcagccttcgggctggccggtacccattgaggccggtttctcacccccgtctgggctaccaccc

SEQ ID NO: 126463 - DNA, 75 bp, synthetic construct
  source 1..75: mol_type = other DNA
ccacgcgatcccctttggtcagccagtaggcaactgtagcctttttgcgggttccttatgtttgaatacggaatt

SEQ ID NO: 126464 - DNA, 75 bp, synthetic construct
  source 1..75: mol_type = other DNA
aaaacgtgggaaatagtgctgggcaaatacctgatatgtcttactggtcttcaccggcaggcggaattaatttcc

SEQ ID NO: 126465 - DNA, 75 bp, synthetic construct
  source 1..75: mol_type = other DNA
cattaacaaaacctggtctggcgttccggggacaggtgctcaggacgctggtgaatcagttttttatattgcagt

SEQ ID NO: 126466 - DNA, 75 bp, synthetic construct
  source 1..75: mol_type = other DNA
tccgtggccttccgccactccgccaacaggctggctgaaatgcaacggtgcagcattttctgctgaagaataccc

SEQ ID NO: 126467 - DNA, 75 bp, synthetic construct
  source 1..75: mol_type = other DNA
ggcaatggctacattaacgaagcgcaaaatatgggctggttgcagcgtttcttccttaacctgtcgccaatgtaa

SEQ ID NO: 126468 - DNA, 75 bp, synthetic construct
  source 1..75: mol_type = other DNA
attgcgaatgtgatttttgaaaaattatacagtcgtattgactttaacaaagaacaatatatatcctttataaag

SEQ ID NO: 126469 - DNA, 75 bp, synthetic construct
  source 1..75: mol_type = other DNA
cgacattgggtctggtcattcaatcaataactatgaccaaattgtttctaaccaaccaggcttttcccgtttttc

SEQ ID NO: 126470 - DNA, 75 bp, synthetic construct
  source 1..75: mol_type = other DNA
gaaactgtttggttacgcaaaaacggggctgctctcctcttctgctgcctcgggtgtgccgcaggtcgaaaatct

SEQ ID NO: 126471 - DNA, 75 bp, synthetic construct
  source 1..75: mol_type = other DNA
atagttgttagtgcatataattgtcttaagtcatatgcttactacgaaaacttaaattttttcctaaaggaagaa

SEQ ID NO: 126472 - DNA, 75 bp, synthetic construct
  source 1..75: mol_type = other DNA
tgcttactacgaaaacttaaattttttcctaaaggaagaaatcgctcaatttgaagattctctctatgacgaaaa

SEQ ID NO: 126473 - DNA, 75 bp, synthetic construct
  source 1..75: mol_type = other DNA
caaaaccagcactcagggagttcttgattaccttggtttgggggaaggctctgcactgcccgttggtgtacccgt

SEQ ID NO: 126474 - DNA, 75 bp, synthetic construct
  source 1..75: mol_type = other DNA
aaccgcatcggcggtcgtcacggcctgggcatgagcgaccagattgaaaaccgtattgttgcgcctcgcgtttag

SEQ ID NO: 126475 - DNA, 75 bp, synthetic construct
  source 1..75: mol_type = other DNA
ccggtattcacaacgaagacaccattgagcagtatcatgcgcatggacgtcaattgggccgtctgctgtaccagg

SEQ ID NO: 126476 - DNA, 75 bp, synthetic construct
  source 1..75: mol_type = other DNA
attaccccgctgaccgcgttgaagctggcagagctggcgaaggatatcttcccggcaggcgtgattaacgtactg

SEQ ID NO: 126477 - DNA, 75 bp, synthetic construct
  source 1..75: mol_type = other DNA
gaaaatggtcaggtttttgccgaactggagtcccgtaattgtggcaaaccgctgcatagtgcgttcaatgatgaa

SEQ ID NO: 126478 - DNA, 75 bp, synthetic construct
  source 1..75: mol_type = other DNA
tgctggcgatgaatcgcggcgaatacaccattgccaaaaccgccgtttctgccgctgctcgtctgtttgctgctc

SEQ ID NO: 126479 - DNA, 75 bp, synthetic construct
  source 1..75: mol_type = other DNA
ggcgcacagtacgaaggcggtcgtcatcaacaacgcgtggaggcgattacggcaatagagcagcggagaaattga

SEQ ID NO: 126480 - DNA, 75 bp, synthetic construct
  source 1..75: mol_type = other DNA
acaggaggccgcagaagcgattacgaggggactggaggctctttaccatgccggagcgctaaaaacgcgtcagga

SEQ ID NO: 126481 - DNA, 75 bp, synthetic construct
  source 1..75: mol_type = other DNA
gccgcacggtggtcagaaactttctggttacggcaaggatatgtcactttatgggctggaggattacaccgtcgt

SEQ ID NO: 126482 - DNA, 75 bp, synthetic construct
  source 1..75: mol_type = other DNA
cgcgaggcgcagccctcatcagaagccagcgaaagccgccggacgttgctggctgaagcggccatggcggtgcgg

SEQ ID NO: 126483 - DNA, 75 bp, synthetic construct
  source 1..75: mol_type = other DNA
ttgctggctgaagcggcaatggcggtgcgggcgctgctgggccgaccgcgtgcatccatcgcgctgattgattaa

SEQ ID NO: 126484 - DNA, 75 bp, synthetic construct
  source 1..75: mol_type = other DNA
ggaacaacaacccaactgaactacaaagcgagttatgtcgttgtaaacgccaatgcaacgtctggacatgcaaat

SEQ ID NO: 126485 - DNA, 75 bp, synthetic construct
  source 1..75: mol_type = other DNA
ggacgtgatgttcgatgaagcggtacagaaacgcggtatgtctctgccgatgttcggcaaattaatggcgactaa

SEQ ID NO: 126486 - DNA, 75 bp, synthetic construct
  source 1..75: mol_type = other DNA
gtaagtaactgtagtctgattgcgggggcgttatgtctgaatacggaatttacgttgtcgtatcagtgccaaaat

SEQ ID NO: 126487 - DNA, 75 bp, synthetic construct
  source 1..75: mol_type = other DNA
gtaagtaactgtagtctgtttgcgggatcgttatgcctgaatacggaatttacgctgtcgtatcagtgccaaaat

SEQ ID NO: 126488 - DNA, 75 bp, synthetic construct
  source 1..75: mol_type = other DNA
ccaactacgaccgttatctcgaggagtacaccaacacgctggtcgaggtgtacaccatgaaagccagcatggcgg

SEQ ID NO: 126489 - DNA, 75 bp, synthetic construct
  source 1..75: mol_type = other DNA
gactccgatgacaatccgggcgtgtcggcggcactggtaaaaaccgacggcaccaccacgattatgctcacctcc

SEQ ID NO: 126490 - DNA, 75 bp, synthetic construct
  source 1..75: mol_type = other DNA
atgatcaacccaagaaccattgcgcaagaaatcgcgtatgcggatgtcgccactcaggcggcaaacttgcaggag

SEQ ID NO: 126491 - DNA, 75 bp, synthetic construct
  source 1..75: mol_type = other DNA
tggtctattctattttgtattggcactatgggtaaatttgctgtaataaccccaattttaattttctatataatc

SEQ ID NO: 126492 - DNA, 75 bp, synthetic construct
  source 1..75: mol_type = other DNA
gaaaaatgcttatgaaaaatcatatagggaatttaactggtatttataatgctaacaaattgggtaaattttatc

SEQ ID NO: 126493 - DNA, 75 bp, synthetic construct
  source 1..75: mol_type = other DNA
atggagtatatatagagaacatttacatttgtcctttccaaaaacattatattattttttattatatgcttcaaa

SEQ ID NO: 126494 - DNA, 75 bp, synthetic construct
  source 1..75: mol_type = other DNA
ggtgtatcacaaataggattcatctttgcggttgaaaaaataaaaccatcggctcagaagattagtgtaaaaaat

SEQ ID NO: 126495 - DNA, 75 bp, synthetic construct
  source 1..75: mol_type = other DNA
caatagactcgctaaatagaccgtttttgtatgccattcgagaaatattaggtgcggtattaaatatatttttat

SEQ ID NO: 126496 - DNA, 75 bp, synthetic construct
  source 1..75: mol_type = other DNA
taaagacaccaggtcgtcagagcgcactgattatccgcattatgccagtgaagttgcactggcttttggttcacg

SEQ ID NO: 126497 - DNA, 75 bp, synthetic construct
  source 1..75: mol_type = other DNA
agtgcagacctttgtcgatgcctataacacgctgattgataccgtcgattcactgaccaccagcggcagcgacag

SEQ ID NO: 126498 - DNA, 75 bp, synthetic construct
  source 1..75: mol_type = other DNA
ctcacattgcgatttgcctatactataaactcggggagactccattgcctttagttattgaaacaggaaaagatg

SEQ ID NO: 126499 - DNA, 75 bp, synthetic construct
  source 1..75: mol_type = other DNA
agatgaggtgaaacgagaagccaaggatactgatggtaaccctgaaattaaaggggagcgccgtcgccttcattc

SEQ ID NO: 126500 - DNA, 75 bp, synthetic construct
  source 1..75: mol_type = other DNA
tgttccgcgacaacaagccagtcgatggtctgacattgttcgacgcgcttgaaggcaaagggctcgcggagcagg

SEQ ID NO: 126501 - DNA, 75 bp, synthetic construct
  source 1..75: mol_type = other DNA
gtgcagctggaggaccggaccgttgatgctctggttacgccagtttatgccctggaaagtttcagcagacgtcgc

SEQ ID NO: 126502 - DNA, 75 bp, synthetic construct
  source 1..75: mol_type = other DNA
aattcgctgattcatcgtggcgccgcgccgtgaattcgctcgacgttagccagcaggcgtggttgcgctattgct

SEQ ID NO: 126503 - DNA, 75 bp, synthetic construct
  source 1..75: mol_type = other DNA
ctgtacgggcagatggcgatcaactgcgcggttcgtgagaaaaagccagcgctgatgttcagcctggaaatgccg

SEQ ID NO: 126504 - DNA, 75 bp, synthetic construct
  source 1..75: mol_type = other DNA
cccatgtggaaagttaatgttcccctgaaaaaaaagcacttcaaatcacgaactttgcgagcgatggatgctggt

SEQ ID NO: 126505 - DNA, 75 bp, synthetic construct
  source 1..75: mol_type = other DNA
ggtgtattgcaatcagattaacggggcaatttacgacacagaccagcaggccgccgccgcagaacgccgcgggcg

SEQ ID NO: 126506 - DNA, 75 bp, synthetic construct
  source 1..75: mol_type = other DNA
agtgatgctgagccggtaatgctggaacaaatcagccgtatttcacaacaaatcggctactacctgcatcgcgcc

SEQ ID NO: 126507 - DNA, 75 bp, synthetic construct
  source 1..75: mol_type = other DNA
acaaccgggaactactcaaccctaccaccacgagggaacttaccagcctggtacgtaacctgaaccgactgttaa

SEQ ID NO: 126508 - DNA, 75 bp, synthetic construct
  source 1..75: mol_type = other DNA
cagaatgattttgtcgaagtgatgggcaacgtgctggataatgcctgtaaatattgcctcgaatttgtcgaaatt

SEQ ID NO: 126509 - DNA, 75 bp, synthetic construct
  source 1..75: mol_type = other DNA
atacccgcataaaactgcgcgctgcattgcgggatttgtctggtggttctaaggggcaactggaagcattgtgtg

SEQ ID NO: 126510 - DNA, 75 bp, synthetic construct
  source 1..75: mol_type = other DNA
ccggtacgctgccggtaatgaaagtgagcgatcacttaacctggctggcggaagccatgattgatgccgttgttc

SEQ ID NO: 126511 - DNA, 75 bp, synthetic construct
  source 1..75: mol_type = other DNA
gcaggacagcgtgattgcgcatccagagtggctgacggaactggaaagccaaccgccgcaggccgacgaatggca

SEQ ID NO: 126512 - DNA, 75 bp, synthetic construct
  source 1..75: mol_type = other DNA
cgtgatggttatccgcagggagaactgaaggtatcgcgtatcagtgaggcgatttccggtgcgaacggggaatac

SEQ ID NO: 126513 - DNA, 75 bp, synthetic construct
  source 1..75: mol_type = other DNA
cggtgccacagaaaaagtcatcccgatgacgattgcattatcgaaagacacaccgcagatcaggactgcaataaa

SEQ ID NO: 126514 - DNA, 75 bp, synthetic construct
  source 1..75: mol_type = other DNA
tacaagtttcgatgcaatcactattactcaaagcaggtttaaacacagaacaggttgcgcaactggagtccgaaa

SEQ ID NO: 126515 - DNA, 75 bp, synthetic construct
  source 1..75: mol_type = other DNA
agcgcagggaccgaaaggggagaaaggcgaccccggtcccagaggtgagcgtggagaaaccgggccgatggggcc

SEQ ID NO: 126516 - DNA, 75 bp, synthetic construct
  source 1..75: mol_type = other DNA
tgacatttgatggttctcagtggcgtacagtcagcgtgggtgagtatgtgtcgtcaggagcgccggggcgtgagt

SEQ ID NO: 126517 - DNA, 75 bp, synthetic construct
  source 1..75: mol_type = other DNA
ccgaagggggatgtcggtcctaaaggcgaaacaggtccagtgggccctcaagggcccgcagggccgaaaggtgag

SEQ ID NO: 126518 - DNA, 75 bp, synthetic construct
  source 1..75: mol_type = other DNA
cgtcattaatgcagtcagagaacacattcttcctctgacaccggttgccggaagtggattgtatgtattcggtgc

SEQ ID NO: 126519 - DNA, 75 bp, synthetic construct
  source 1..75: mol_type = other DNA
ctatacagccagatggcaatcaactgcgcagttcatgagaaaaagcccgctctgatgttcagccttgaaatgcca

SEQ ID NO: 126520 - DNA, 75 bp, synthetic construct
  source 1..75: mol_type = other DNA
gcaatttacgacacagaccagcaggccgccgccgcagaacgtcgcgggcgcgagcagcagccgaaaaagaaaggg

SEQ ID NO: 126521 - DNA, 75 bp, synthetic construct
  source 1..75: mol_type = other DNA
agccataaactcctttctccaacagttgatacgccagttgcaaaaaatgaactggctgtactgggggtaataacg

SEQ ID NO: 126522 - DNA, 75 bp, synthetic construct
  source 1..75: mol_type = other DNA
ccggcctcccgcaacttatttctatgatccggagcgatttattaacccgctttgagcaggatacgctgcttcgtc

SEQ ID NO: 126523 - DNA, 75 bp, synthetic construct
  source 1..75: mol_type = other DNA
tggatttgctgatgataattttgaaacaaaacctgttcattatcaggatttattaacacgatttagtgcctttca

SEQ ID NO: 126524 - DNA, 75 bp, synthetic construct
  source 1..75: mol_type = other DNA
aaacagatgtctgcgtgttttggtctcacaagactacacaccagatagcggggctgttggttatattgcctgtgc

SEQ ID NO: 126525 - DNA, 75 bp, synthetic construct
  source 1..75: mol_type = other DNA
cagcattttcttctgaaatgtatcccggactggcaaaagcctaccccgcaaataaattaccggatttacggggag

SEQ ID NO: 126526 - DNA, 75 bp, synthetic construct
  source 1..75: mol_type = other DNA
atgattctggttgtcacgaacaccgaagccatcacgctgaaaatcgacccgtctgtggttctggcaacccgcaaa

SEQ ID NO: 126527 - DNA, 75 bp, synthetic construct
  source 1..75: mol_type = other DNA
gtaaaatggacaaaagagttaataaatgattatttgtatggctgtttactatctctgtactctatctgtgcaagg

SEQ ID NO: 126528 - DNA, 75 bp, synthetic construct
  source 1..75: mol_type = other DNA
tatcataatattcggtcatgggatgcgtgggataacacggtactggtgccaaatgacaaaagagggatagtccgt

SEQ ID NO: 126529 - DNA, 75 bp, synthetic construct
  source 1..75: mol_type = other DNA
tacagtgcaacggagctacgttcaccaaagaacaatatcctgttctggccagagcctacccgaccctccgttatg

SEQ ID NO: 126530 - DNA, 75 bp, synthetic construct
  source 1..75: mol_type = other DNA
gctggttacagtgcaacggagctacgttcaccaaagaacaatatcctgttctggccagagtctacccgaccctcc

SEQ ID NO: 126531 - DNA, 75 bp, synthetic construct
  source 1..75: mol_type = other DNA
cggaaacctctggtacgctgcgtgaattgcaagatacgctggaagcggcgggcgacaaattacaggctaacctgt

SEQ ID NO: 126532 - DNA, 75 bp, synthetic construct
  source 1..75: mol_type = other DNA
ggtgctaatgccagcaatacctttagcggcacattaacagtgacggtcgatcaggtgctggccaacggtaacctg

SEQ ID NO: 126533 - DNA, 75 bp, synthetic construct
  source 1..75: mol_type = other DNA
gcgttgatctcatgcaactcggtctggaagccgacaaccgtggcggtattgccgtcgataacttatgccgtaccg

SEQ ID NO: 126534 - DNA, 75 bp, synthetic construct
  source 1..75: mol_type = other DNA
tacgtgtaaacgatcaacaaatcctcgctcgtaatgtcgtgattgcaacgggttctcagccgcgtcagatgtctg

SEQ ID NO: 126535 - DNA, 75 bp, synthetic construct
  source 1..75: mol_type = other DNA
tacaccgaaagctgtcaaggctgcatatgacctggctaacgggaagtacacagcccaggatgcaaccacgacaca

SEQ ID NO: 126536 - DNA, 75 bp, synthetic construct
  source 1..75: mol_type = other DNA
gtggattaattatcaccggtatttcaggaggtttgtatctttttattcttaacatgattagcgcgatatacagta

SEQ ID NO: 126537 - DNA, 75 bp, synthetic construct
  source 1..75: mol_type = other DNA
atgaaatatctggaaaaactccacagtaccgacatcgagctgacagcactgaccgtctggatagccagaaaaacc

SEQ ID NO: 126538 - DNA, 75 bp, synthetic construct
  source 1..75: mol_type = other DNA
gccgccagcaggctggttgaagtgcgacggacgctcctttacaaaagaacaatatcctgttctggcccgagtcta

SEQ ID NO: 126539 - DNA, 75 bp, synthetic construct
  source 1..75: mol_type = other DNA
taatgaggtcataacagccattaatcttgttcccgcaagaattgcagaacaattaggccatcatgacgccataga

SEQ ID NO: 126540 - DNA, 75 bp, synthetic construct
  source 1..75: mol_type = other DNA
tgatagccttcataaagaacttcaaaaaaataacagattaaagccaaacagtgagttagatatgccactaattgg

SEQ ID NO: 126541 - DNA, 75 bp, synthetic construct
  source 1..75: mol_type = other DNA
cgattttccgtccagaatatgcatcaataaactgctcctgaactccgaaagggaggacagtgtggcaaccatggc

SEQ ID NO: 126542 - DNA, 75 bp, synthetic construct
  source 1..75: mol_type = other DNA
gcaggtaattttgacattgggtctggtcattcaatcaataactatgaccaaatccttgacaaccaacctggattc

SEQ ID NO: 126543 - DNA, 75 bp, synthetic construct
  source 1..75: mol_type = other DNA
tctacccgaccctccgtcttcccgatttgcgcggtgagtttatccgtggatgggacgacgggcgaaaagtggata

SEQ ID NO: 126544 - DNA, 75 bp, synthetic construct
  source 1..75: mol_type = other DNA
gccgccgacaggctggctgaaatgcaacggggctgctttttcggctgaagaatacccggaactggcaaaggctta

SEQ ID NO: 126545 - DNA, 75 bp, synthetic construct
  source 1..75: mol_type = other DNA
acccttacagctattggtcgcgcgattatcgctaagggcagtataaaagatgtcctcaattaccttggtttgggg

SEQ ID NO: 126546 - DNA, 75 bp, synthetic construct
  source 1..75: mol_type = other DNA
agggatcgtacaactgagcagtgccaccaacagcacctctgaaacgctggccgccacaccaaaggccgtcaaggc

SEQ ID NO: 126547 - DNA, 75 bp, synthetic construct
  source 1..75: mol_type = other DNA
attattacggttacgatctgaatactaatgtcaaagtaggtatcgcttttgctactgctgattctgttataaccg

SEQ ID NO: 126548 - DNA, 75 bp, synthetic construct
  source 1..75: mol_type = other DNA
tggcaaagataatctgggactggtgattgaatgctccggtgcccaatatcgcactgaaacaagccatcgaaatgc

SEQ ID NO: 126549 - DNA, 75 bp, synthetic construct
  source 1..75: mol_type = other DNA
atggcctatgactccacctcatggcgtaacgctatccggctattagccagcggcgctatcaaagtcaaaccgatg

SEQ ID NO: 126550 - DNA, 75 bp, synthetic construct
  source 1..75: mol_type = other DNA
ttctgtcccaactggccggagggcaggtttatccttacgtggtcccgctgacggagggaaagcctgcggtatctc

SEQ ID NO: 126551 - DNA, 75 bp, synthetic construct
  source 1..75: mol_type = other DNA
caaagaagactggcagcagacctttgcggtcaacgttggcggtgcgtttaacctgtttcagcaaaccatgaacca

SEQ ID NO: 126552 - DNA, 75 bp, synthetic construct
  source 1..75: mol_type = other DNA
gtctgacacggcatctgatgtgcttgatgggcaggctgaatccagaattaccgtgcagatcgatgtctgggcgac

SEQ ID NO: 126553 - DNA, 75 bp, synthetic construct
  source 1..75: mol_type = other DNA
ggggggcaggcagagtcatcggtgtcggtgcagattgacgtctatgcggtgacgctcacacaggcgcgtcagata

SEQ ID NO: 126554 - DNA, 75 bp, synthetic construct
  source 1..75: mol_type = other DNA
tcagagcgagtagttattccgaaaattgcggaagagatgggtgtttcccttgatccatcattcgttcccgtcgtt

SEQ ID NO: 126555 - DNA, 75 bp, synthetic construct
  source 1..75: mol_type = other DNA
cctcgttaaagacacttgcctgaataaaaaaaccgtgcaggccgggcttatatcgctcatgaaaatggggcttat

SEQ ID NO: 126556 - DNA, 75 bp, synthetic construct
  source 1..75: mol_type = other DNA
agcggctttatttgcggcgcggttgccggtatggcggggcttgccagccactcaatggcagcgccggggctattt

SEQ ID NO: 126557 - DNA, 75 bp, synthetic construct
  source 1..75: mol_type = other DNA
ctggcatctcaccgcgaattcactacctggcgtgcagagctggatggtaaacctgttatcgtctgctctaccggt

SEQ ID NO: 126558 - DNA, 75 bp, synthetic construct
  source 1..75: mol_type = other DNA
accacctggcgtgcagagctggatggtaaacctgttattgtttgttctaccggtatcggtggtccgtcgacttct

SEQ ID NO: 126559 - DNA, 75 bp, synthetic construct
  source 1..75: mol_type = other DNA
tgagattccacatgccactttgctcgatcttgatctggggcgccgacatggtggggcgaatgccatgagaagctg

SEQ ID NO: 126560 - DNA, 75 bp, synthetic construct
  source 1..75: mol_type = other DNA
ggagctacacctgacggcgataccatcctgtggtggttgaaacaaagccctgaagcacgagctgcaatctgtatt

SEQ ID NO: 126561 - DNA, 75 bp, synthetic construct
  source 1..75: mol_type = other DNA
gcttatcctgtccgtgggaatattttaatgatcaggatgttcgaacaatcgttaatcttggtcagtttattggtt

SEQ ID NO: 126562 - DNA, 75 bp, synthetic construct
  source 1..75: mol_type = other DNA
ggcaagggaatgcggtacttcttctcgccactgattaacattctgcccttcgatcctccggtgtttatcggttgc

SEQ ID NO: 126563 - DNA, 75 bp, synthetic construct
  source 1..75: mol_type = other DNA
aagaactggtttaactctctggagaaaaagaacatcgccgcaccgtctccgtgggatgttctgcaatccacgcag

SEQ ID NO: 126564 - DNA, 75 bp, synthetic construct
  source 1..75: mol_type = other DNA
aaaagaacattgccgacccgcgaccgtgggcaggtatgcaacccacacagaattatcctttccttccgcagcaat

SEQ ID NO: 126565 - DNA, 75 bp, synthetic construct
  source 1..75: mol_type = other DNA
tacggcgcaaatatgtcgcagttcgcccggaaccatcagaaggctatgagccttgtcaaagccacaacggaggcc

SEQ ID NO: 126566 - DNA, 75 bp, synthetic construct
  source 1..75: mol_type = other DNA
gtggatgatggccaccgtaaataccgaaagtaaaaaatcctcgaaatgtgtgttatgcggtgaatgcgcaaacgc

SEQ ID NO: 126567 - DNA, 75 bp, synthetic construct
  source 1..75: mol_type = other DNA
gggttaccggcgcgggtaaaggtatcggttacgccacggcgctggcgtttgttgacgcgggtgcgaaagttacag

SEQ ID NO: 126568 - DNA, 75 bp, synthetic construct
  source 1..75: mol_type = other DNA
tgcttacggtgcgtcgaaagcggcgctgaaaagcctggcgttgagcgtcgggctggaactggcgggtagcggcgt

SEQ ID NO: 126569 - DNA, 75 bp, synthetic construct
  source 1..75: mol_type = other DNA
gctcggaatcatgcgcaaagacgaccaaaagactggatgctgtgtgggatgcgcaaaagtttgaattaaatggtc

SEQ ID NO: 126570 - DNA, 75 bp, synthetic construct
  source 1..75: mol_type = other DNA
tctgcctacgcattcatatacttttactaaaaaagtagatggtgtaaccacttttgttgaagctaccacacatca

SEQ ID NO: 126571 - DNA, 75 bp, synthetic construct
  source 1..75: mol_type = other DNA
atctcttgtaccaacttcaacgatggctcagtagggacattcttctcccgtatcaaaatccatcgcaattatttc

SEQ ID NO: 126572 - DNA, 75 bp, synthetic construct
  source 1..75: mol_type = other DNA
atgccgcgaacggcggcgaaatgggcactggtagcgatactggtgcctttttttctggtgggatgcgtcagtctg

SEQ ID NO: 126573 - DNA, 75 bp, synthetic construct
  source 1..75: mol_type = other DNA
aacactggaagatggtggtggtgttgctggctatttgtggcgcaatgctgttactgcgttgggcggcaatgattt

SEQ ID NO: 126574 - DNA, 75 bp, synthetic construct
  source 1..75: mol_type = other DNA
tcaactacccgcgagagatattaggaaatttatattaccagttattaatagaagccttcaaaataaaattactaa

SEQ ID NO: 126575 - DNA, 75 bp, synthetic construct
  source 1..75: mol_type = other DNA
cactggtagcgatactggtgccttttttattggtggggtgcgtcagtctggataaggcgcgccagcttttcgata

SEQ ID NO: 126576 - DNA, 75 bp, synthetic construct
  source 1..75: mol_type = other DNA
gataaggcgcgtcagcttttcgatacagcttctcaggtctgcgaaattgttgatagtgtccggcagtgtatgcag

SEQ ID NO: 126577 - DNA, 75 bp, synthetic construct
  source 1..75: mol_type = other DNA
tggcgcgagcctgcacttcgctccgctggagttcccggctgtcgcagatttcgaatgtacgaccgcgctggttga

SEQ ID NO: 126578 - DNA, 75 bp, synthetic construct
  source 1..75: mol_type = other DNA
acgcagcctacacagcaagcggtacgcgaggtagggacaaccattatcgataatggtgaggctcaggagttgttc

SEQ ID NO: 126579 - DNA, 75 bp, synthetic construct
  source 1..75: mol_type = other DNA
tggtgagccaggctggcagggtaccggctggcgtgcaggtcgtgatttgcagcgtcgcgatatcggcgggaaaac

SEQ ID NO: 126580 - DNA, 75 bp, synthetic construct
  source 1..75: mol_type = other DNA
gccgacgccgcgtaaagtgaccgatgttctacaaacggggcagcaaatctgggttcgtcaggtaggcgagatctg

SEQ ID NO: 126581 - DNA, 75 bp, synthetic construct
  source 1..75: mol_type = other DNA
taagaccattaatttcaattgataaaaaaattaacaataattatcaaatcaataaaaccctggaacaaatgtccc

SEQ ID NO: 126582 - DNA, 75 bp, synthetic construct
  source 1..75: mol_type = other DNA
ggctggcgagcaggtcgtgatttacaacggcatgatataggcggaaaaacgggtaccactaacagttcgaaagat

SEQ ID NO: 126583 - DNA, 75 bp, synthetic construct
  source 1..75: mol_type = other DNA
cacaaaacggcgcggttatggcgttagtcggtggctttgacttcaaccaaagcaaatttaaccgcgctacccagg

SEQ ID NO: 126584 - DNA, 75 bp, synthetic construct
  source 1..75: mol_type = other DNA
gctgaaatggctattttgcaggaaattatcaatgcccggtacgaaagtatcctgcccaccatcctgatcagcaac

SEQ ID NO: 126585 - DNA, 75 bp, synthetic construct
  source 1..75: mol_type = other DNA
ggtagttgcggaaccgggaaaaatcatctggcggtatcaatggcaaaacacatcatccgtaactatctggccagt

SEQ ID NO: 126586 - DNA, 75 bp, synthetic construct
  source 1..75: mol_type = other DNA
cactacgcaattgcaacgggccgggcgtagtacaatcctgcggctgatctctccagtgccctcgaagtgcatcaa

SEQ ID NO: 126587 - DNA, 75 bp, synthetic construct
  source 1..75: mol_type = other DNA
tggtcgaagtggctgatggcgaatatgacgtgattgtgctgcctggtggcatcaaaggcgcagagtgttttcgcg

SEQ ID NO: 126588 - DNA, 75 bp, synthetic construct
  source 1..75: mol_type = other DNA
cagccaccgtgctggtcccgcacgatatcttcccgattggcaatatgaccggcttcccgacgctgaaagacaaaa

SEQ ID NO: 126589 - DNA, 75 bp, synthetic construct
  source 1..75: mol_type = other DNA
atttccgcccgcctgacaccacagcaaggggaaattcgctacgagaaccgttcgctgtacgcgatgagcgaggcc

SEQ ID NO: 126590 - DNA, 75 bp, synthetic construct
  source 1..75: mol_type = other DNA
gtagtaaatggttctaccgaagatgtggtggcgcgctgccagcaaatttgtggcaaagacaatctgggactggtg

SEQ ID NO: 126591 - DNA, 75 bp, synthetic construct
  source 1..75: mol_type = other DNA
gtggatgatggccaccgtaccgaaagtaaaaaatcctcgaaatgtgtgttatgcggtgaatgcgcaaacgcctgc

SEQ ID NO: 126592 - DNA, 75 bp, synthetic construct
  source 1..75: mol_type = other DNA
tgttatgcggtgaatgcgcaaatgcctgtccgacaggggcgttaaaaattattgagtggaaagatattactgtgt

SEQ ID NO: 126593 - DNA, 75 bp, synthetic construct
  source 1..75: mol_type = other DNA
tgaagaggaaagaaagcgtatcggaagtatctgtggagataattataccctatttgatgggcatgggggggacca

SEQ ID NO: 126594 - DNA, 75 bp, synthetic construct
  source 1..75: mol_type = other DNA
acttatggcttaccggtatcaggcaagaaagaaccagagttatcaccgaaggagaacaaaaacaccaccccgtta

SEQ ID NO: 126595 - DNA, 75 bp, synthetic construct
  source 1..75: mol_type = other DNA
gatgatggaaagccagggggaaaatgcaaagcaatgccgccggattttgcgtgacgctatccaggaaatgcctgt

SEQ ID NO: 126596 - DNA, 75 bp, synthetic construct
  source 1..75: mol_type = other DNA
cattattggtcgtgcagtgatgaccggactgaaagatgccgtggctgaaatgaagcgcctgatgctggaagccag

SEQ ID NO: 126597 - DNA, 75 bp, synthetic construct
  source 1..75: mol_type = other DNA
cattattggtcgcgcagtaatgaccggactgaaagatgccgtggcagaaatgaaacgcctgatgctggaagcgcg

SEQ ID NO: 126598 - DNA, 75 bp, synthetic construct
  source 1..75: mol_type = other DNA
ctatgggattatgccaaccgctcacaggcattattccgcgaattgtatccagcgctaaagcaaattcaatcgaac

SEQ ID NO: 126599 - DNA, 75 bp, synthetic construct
  source 1..75: mol_type = other DNA
attgtacccaatgaccaggttgatcagcctgattcccaggtcgtcggccattgcgctaatgatacgcataaaatt

SEQ ID NO: 126600 - DNA, 75 bp, synthetic construct
  source 1..75: mol_type = other DNA
acatcaagtgtctctggaagcattcagggcaattgaggccgcgttagtaaagcacgataagaatacgaaggatta

SEQ ID NO: 126601 - DNA, 75 bp, synthetic construct
  source 1..75: mol_type = other DNA
gaagatgatctgatcagtagtgccaacgtaaaaaaacacctcaagatctattcctcatttttcaaggtgttcctt

SEQ ID NO: 126602 - DNA, 75 bp, synthetic construct
  source 1..75: mol_type = other DNA
ctgacctggccgatgtcggtgggtaaatggacgcttgaagggatcgaaactcgtgcgcagttgctggattctgac

SEQ ID NO: 126603 - DNA, 75 bp, synthetic construct
  source 1..75: mol_type = other DNA
gggagcaggagttggcggttcggctatcgctatgccggcaaacccaaaatgatctcgcttggtgtttacccaacg

SEQ ID NO: 126604 - DNA, 75 bp, synthetic construct
  source 1..75: mol_type = other DNA
ggcgctaaaacaaattcaatcgaactattccggcagatgctacgactacggtcatgaattctcgtatgttatcgg

SEQ ID NO: 126605 - DNA, 75 bp, synthetic construct
  source 1..75: mol_type = other DNA
gttaagttaaaacagaggtttgtcaaaggtatttcggaaatcgaaataccttctgctggcggtaaacagttaatg

SEQ ID NO: 126606 - DNA, 75 bp, synthetic construct
  source 1..75: mol_type = other DNA
cagatcgcacaatcaatgttccattccacggaacaaatctctttttggttggaattaacaatgagccttatgttc

SEQ ID NO: 126607 - DNA, 75 bp, synthetic construct
  source 1..75: mol_type = other DNA
acagcaggaagccattaaacaactcgtcatgagtcgcggtcagtctctgccaaaagaaaaacaggctaaggcgat

SEQ ID NO: 126608 - DNA, 75 bp, synthetic construct
  source 1..75: mol_type = other DNA
tggttaggtttacgggttttgctaaagggaacaatagagaattaacagaatattacagtttagatattggtgacg

SEQ ID NO: 126609 - DNA, 75 bp, synthetic construct
  source 1..75: mol_type = other DNA
atgaaactttcactaaaagaatatattgaattgtattacaacactcagcgggatttcgctagcgcccttaaagtc

SEQ ID NO: 126610 - DNA, 75 bp, synthetic construct
  source 1..75: mol_type = other DNA
gttcagggctgcgccccgaaacccgctaacaacctctcagctactggatatcaccccatgccatctgaatatgat

SEQ ID NO: 126611 - DNA, 75 bp, synthetic construct
  source 1..75: mol_type = other DNA
ccctgaagatttatgctcactgtgtggcggaaatcatggcaaagccgccatgatcgaatgtaaggacaaaatcca

SEQ ID NO: 126612 - DNA, 75 bp, synthetic construct
  source 1..75: mol_type = other DNA
gtatattcctcagcctcaagatgcggaaaaattttggaataatttacaatataaggtgactcttcccattcatta

SEQ ID NO: 126613 - DNA, 75 bp, synthetic construct
  source 1..75: mol_type = other DNA
atgttaaagtacgacggtcaaaaaatggttaggtttacgggttttgctaaaggtaacaatagagaattaacagag

SEQ ID NO: 126614 - DNA, 75 bp, synthetic construct
  source 1..75: mol_type = other DNA
aaacaagagaaaacgcgtttgctgcttttaccatgggaccgctgactgatttctggcgtcagcgtgatgaagccg

SEQ ID NO: 126615 - DNA, 75 bp, synthetic construct
  source 1..75: mol_type = other DNA
tgaagaggaacgcgtggtggataaccgcatgcacgaccgtttttgtgaactacgcaccgctgcgggccatcctgt

SEQ ID NO: 126616 - DNA, 75 bp, synthetic construct
  source 1..75: mol_type = other DNA
atgctcgacgcagcgcaaaaccagtggggacgtctggactgcctgctcaacaacgcaggcatttcagtgaaaaaa

SEQ ID NO: 126617 - DNA, 75 bp, synthetic construct
  source 1..75: mol_type = other DNA
agtctgagggcgaaaaattggttggtgagtattatcaaattgcccccaggctccttgaaaaaattgacgcaagag

SEQ ID NO: 126618 - DNA, 75 bp, synthetic construct
  source 1..75: mol_type = other DNA
ttgataaactggtcagcttgctacaggatgatccgcaacatgatacctggtccaccccatggaagctgttaaaaa

SEQ ID NO: 126619 - DNA, 75 bp, synthetic construct
  source 1..75: mol_type = other DNA
ggctatgacctcttgcaggctgggcgtcaccaggaagcaaaagaactttatataaaactcgttacaacattaatg

SEQ ID NO: 126620 - DNA, 75 bp, synthetic construct
  source 1..75: mol_type = other DNA
gataacacaccgccacaatggcgattgttcagagctggcgaatataagctgcaaatcgacacccgctccggcacg

SEQ ID NO: 126621 - DNA, 75 bp, synthetic construct
  source 1..75: mol_type = other DNA
atgaaactcgccgcctgttttctgacactccttcctggcttcgccgttgccgccagctggacttctccggggttc

SEQ ID NO: 126622 - DNA, 75 bp, synthetic construct
  source 1..75: mol_type = other DNA
gtatattattggtggttgctttttttatttcaagtatagccagagcagaatggaccggagataaaaaggatggaa

SEQ ID NO: 126623 - DNA, 75 bp, synthetic construct
  source 1..75: mol_type = other DNA
atgccaatatgggcagcgaagccgatctacggacgctggttgatagcgcgcatcagcgcggtattcgtattctct

SEQ ID NO: 126624 - DNA, 75 bp, synthetic construct
  source 1..75: mol_type = other DNA
cggtcggttgcctggcgcagatggatacgacctggcagcaaatggcagagaaactacaggatttcaacgtgctga

SEQ ID NO: 126625 - DNA, 75 bp, synthetic construct
  source 1..75: mol_type = other DNA
tcaactggcataacgccacggtttactttgtgctgacagaccgtttcgaaaacggtgatcccagcaacgaccaga

SEQ ID NO: 126626 - DNA, 75 bp, synthetic construct
  source 1..75: mol_type = other DNA
atgaaacggatcataataacatccacactaattggcctggggtttcccataaccagttctgcgacggatattaat

SEQ ID NO: 126627 - DNA, 75 bp, synthetic construct
  source 1..75: mol_type = other DNA
taaaattgccaatgctcatgctgatgctcaagccaattttcaattggtggccaaagattgtagtgagggttattc

SEQ ID NO: 126628 - DNA, 75 bp, synthetic construct
  source 1..75: mol_type = other DNA
ggtagcaacggtgaatatagcctgacaattcccgatgttggcctggataaagttgtcactggagatgttgcagct

SEQ ID NO: 126629 - DNA, 75 bp, synthetic construct
  source 1..75: mol_type = other DNA
acaacgaagggaagggaacgctggaacggatacgtaaagcgtcgttttactggtatcgggatctcatcgccaaca

SEQ ID NO: 126630 - DNA, 75 bp, synthetic construct
  source 1..75: mol_type = other DNA
aaaagagcgtgtgccggaatcggtattttttgaatgtgaggctattgcccgtagcaaagccctggtgactgtgcc

SEQ ID NO: 126631 - DNA, 75 bp, synthetic construct
  source 1..75: mol_type = other DNA
tgaccatccctagtgttggactggataaaatagctaatgcacatgcagatgcccaggctaactttcaattagtgg

SEQ ID NO: 126632 - DNA, 75 bp, synthetic construct
  source 1..75: mol_type = other DNA
atgaaaaaatcactgttaattatcccgcttctgctggcagggtgtgcaaaggttagcgactatcaggcaagttgc

SEQ ID NO: 126633 - DNA, 75 bp, synthetic construct
  source 1..75: mol_type = other DNA
gaacgtgttcgggttgtattcggaacaaaaggggggcgtccgagagagacaacagtttttgacagggaaaaagtt

SEQ ID NO: 126634 - DNA, 75 bp, synthetic construct
  source 1..75: mol_type = other DNA
aaaaacagcttgtcacacttgctcgtaagggacagggtagttttaaaaccgtagcagatcgttccagaattgcag

SEQ ID NO: 126635 - DNA, 75 bp, synthetic construct
  source 1..75: mol_type = other DNA
acccttcaaacgaaatctaccttcaccccgtaaaagatgggtttggcagcacacttgccttatatctactcattt

SEQ ID NO: 126636 - DNA, 75 bp, synthetic construct
  source 1..75: mol_type = other DNA
cgtgaagaacgactcacgcatggcatcagcaccaacacctaagctgtatgtccttgctgcgaagatgctcgggca

SEQ ID NO: 126637 - DNA, 75 bp, synthetic construct
  source 1..75: mol_type = other DNA
caaagccaagcattccagcaggctttattgaattatcaggctgtaaacacaatgcaagcgatcgagcaaaaagcg

SEQ ID NO: 126638 - DNA, 75 bp, synthetic construct
  source 1..75: mol_type = other DNA
cgtcaatgctttatggataagcgccccatttgagcaaattcacggctgggtcggcggcggtacaaaaggcgattt

SEQ ID NO: 126639 - DNA, 75 bp, synthetic construct
  source 1..75: mol_type = other DNA
gcagaaactgacacctctgcctctttcgactggcataacgccaccgtttactttgtgctgacagaccgtttcgaa

SEQ ID NO: 126640 - DNA, 75 bp, synthetic construct
  source 1..75: mol_type = other DNA
caggcgcggtacaaatcttttatggcgatgaatcctcgcgtccgttcggtcctaccggttctgatccgctgcaag

SEQ ID NO: 126641 - DNA, 75 bp, synthetic construct
  source 1..75: mol_type = other DNA
ctgccagcgtcgccagcgatggcaacctggcaattacctgctcgcgcggcgtaaagatgctggcggatgcgccgc

SEQ ID NO: 126642 - DNA, 75 bp, synthetic construct
  source 1..75: mol_type = other DNA
gtaccgctatcgactttggtctgaaaattatcgatctgctggttgggcgtgagaaggcccatgaggtggcatcac

SEQ ID NO: 126643 - DNA, 75 bp, synthetic construct
  source 1..75: mol_type = other DNA
ttcccgctgaacaatggcaggacaagcgcgtcgtctgggatgcacgggtaaaattgctgaccagccaggggccgg

SEQ ID NO: 126644 - DNA, 75 bp, synthetic construct
  source 1..75: mol_type = other DNA
cactgggtgccagtatgattctgggtggtgtggcccagatgctggcaccgaaggcaaaaacaccggattaccgcg

SEQ ID NO: 126645 - DNA, 75 bp, synthetic construct
  source 1..75: mol_type = other DNA
gtcagacaacctgaatatctggggcaatgttggcgttcaggtcggcgataaagggtacagtgatgcccaggcaat

SEQ ID NO: 126646 - DNA, 75 bp, synthetic construct
  source 1..75: mol_type = other DNA
aatggcggcacactcagtgggcagggtaccgttgcaggtcatgtaaataaccagggaacgctggcatcactgaat

SEQ ID NO: 126647 - DNA, 75 bp, synthetic construct
  source 1..75: mol_type = other DNA
gatgctggcagtgatttccagatcctgggggctcaggctcagggattatatgtaactggtggtgcgacagcgacg

SEQ ID NO: 126648 - DNA, 75 bp, synthetic construct
  source 1..75: mol_type = other DNA
agcggggtgattggtgcatctggcagtacccaggcggtgaatgttgcggagggagctaccttcggcggcagcggc

SEQ ID NO: 126649 - DNA, 75 bp, synthetic construct
  source 1..75: mol_type = other DNA
aaggtggtgaaagaagatgccaacaccattacggttgctcatgccaacacctacagcggcggcacggacattgaa

SEQ ID NO: 126650 - DNA, 75 bp, synthetic construct
  source 1..75: mol_type = other DNA
taggaattgctttatcagcaatggttctggggggcgctattgtaatgaattgcaatagcgcaatggcagatgtca

SEQ ID NO: 126651 - DNA, 75 bp, synthetic construct
  source 1..75: mol_type = other DNA
tggtttaataataccgttaatggtgaaaaactggctgcggagtcctggaaatcccgtggatttaccggttcagtg

SEQ ID NO: 126652 - DNA, 75 bp, synthetic construct
  source 1..75: mol_type = other DNA
caacattgatttcactaccggtacagataatatcggcgtctgggttgataatggtcgttttgaaaatacaggaag

SEQ ID NO: 126653 - DNA, 75 bp, synthetic construct
  source 1..75: mol_type = other DNA
aatagctccgggatgaaaaacaccggggttattaatgttaacggtctgaacagtaccggactgcaggcaatcaat

SEQ ID NO: 126654 - DNA, 75 bp, synthetic construct
  source 1..75: mol_type = other DNA
agggctgaatacgaaggggttgacccatgccatgttggtgtctgaaaccggaaatatcacaacggttggctccgg

SEQ ID NO: 126655 - DNA, 75 bp, synthetic construct
  source 1..75: mol_type = other DNA
cctccgggacaggcagccgggggatctgggccaccggtaaaggcagtgatgtacaggcggaggccggcagtgatt

SEQ ID NO: 126656 - DNA, 75 bp, synthetic construct
  source 1..75: mol_type = other DNA
ctgacggaagtgaaaccgataataacctggatatgtctgactccgctggattagtcattaatctgaaaggcacgg

SEQ ID NO: 126657 - DNA, 75 bp, synthetic construct
  source 1..75: mol_type = other DNA
tcgttttttatcgccaccgggcttggtcagctacccgcaaccatcgtctattcctgggcgggtagcatgttaacg

SEQ ID NO: 126658 - DNA, 75 bp, synthetic construct
  source 1..75: mol_type = other DNA
agtgatgggccgcgaagtggtggaaaaattaaccggtaaaaccgtgcttgacagtatggacggctttttcactcg

SEQ ID NO: 126659 - DNA, 75 bp, synthetic construct
  source 1..75: mol_type = other DNA
atgaagatgcaatcgcgtaaaatctggtactaccgtataaccctcatcatcctgttgttcgctatgctgctggca

SEQ ID NO: 126660 - DNA, 75 bp, synthetic construct
  source 1..75: mol_type = other DNA
aacgtcccgcaagtgctggaaacgctgggcggtgaaactgctgtgcaacaagttctgatgtcattacccgccggt

SEQ ID NO: 126661 - DNA, 75 bp, synthetic construct
  source 1..75: mol_type = other DNA
aagattgatcgcccggaagagtacgccgacatcgcgactaaatgtgtgactaacttccgcgagaagaatcgcgat

SEQ ID NO: 126662 - DNA, 75 bp, synthetic construct
  source 1..75: mol_type = other DNA
gacaaaatgctgcaactcaatgttgacgagcgtccgctgatttgtggcgttgggctgggcggttactgggccgag

SEQ ID NO: 126663 - DNA, 75 bp, synthetic construct
  source 1..75: mol_type = other DNA
caatggttagcgccggtaaagcggatgtctgtatcgcgggcaatctctcttccacggcgaatgtgctgcgtgccg

SEQ ID NO: 126664 - DNA, 75 bp, synthetic construct
  source 1..75: mol_type = other DNA
gagtcagagctttgattctgtatctgtgggtgtgggcagtatgcttgatctggacggtggtgagttgacgatcgg

SEQ ID NO: 126665 - DNA, 75 bp, synthetic construct
  source 1..75: mol_type = other DNA
acagcgacaactggaatacccggttagggctgcgtgttgatggcaaactgcacaagaataaaacctccattattc

SEQ ID NO: 126666 - DNA, 75 bp, synthetic construct
  source 1..75: mol_type = other DNA
cgcatggcaacctcgcaatgcgggaagaatttgctcatcgctggctggcccgcgcgggcgaaaaaacgccgccgg

SEQ ID NO: 126667 - DNA, 75 bp, synthetic construct
  source 1..75: mol_type = other DNA
gattacgcattatcggcttgcagccaggctgtaaaacgctctcatccattttcctgatgctgccacagtacagcg

SEQ ID NO: 126668 - DNA, 75 bp, synthetic construct
  source 1..75: mol_type = other DNA
ctggtggtggatggcgagttacagtttgacgccgccttcgtgccggaagtggcggcgcaaaaagcgcctgccagc

SEQ ID NO: 126669 - DNA, 75 bp, synthetic construct
  source 1..75: mol_type = other DNA
ttgagtttattaatcctcccgcgaccgaaactgttgttggggtggcaagatttgctaatgaacaagaaattgagg

SEQ ID NO: 126670 - DNA, 75 bp, synthetic construct
  source 1..75: mol_type = other DNA
cagcgcgaaaaggccttgttcagctcagtagcgccaccaacagcgattctgaaacgctggccgcaacgccaaagg

SEQ ID NO: 126671 - DNA, 75 bp, synthetic construct
  source 1..75: mol_type = other DNA
aaatataccgcacaggatgccaccaccgcgcgaaaaggtcttgtccagctaagtagcgccaccaacagcgattct

SEQ ID NO: 126672 - DNA, 75 bp, synthetic construct
  source 1..75: mol_type = other DNA
ctgaaacgcaggctgcaacgccgaaagcagtaaaggccgcgtatgatcttgctaacgcaaaatataccgctcagg

SEQ ID NO: 126673 - DNA, 75 bp, synthetic construct
  source 1..75: mol_type = other DNA
accggaacgccaacaacaccaactgcgcgacagggaacgaataatacccaaatcgcaagcacggctttcgttatg

SEQ ID NO: 126674 - DNA, 75 bp, synthetic construct
  source 1..75: mol_type = other DNA
ccatgccccaggccagttccgtggtttacataagcctgattggtggtgctggatataatgttaactcccctatgc

SEQ ID NO: 126675 - DNA, 75 bp, synthetic construct
  source 1..75: mol_type = other DNA
gacgcttaagtctgatgcactacgggttaccgggcaggtgataccatcaaatttcagcaattttgactcccgcta

SEQ ID NO: 126676 - DNA, 75 bp, synthetic construct
  source 1..75: mol_type = other DNA
ataaatgtcggaacatgaattcggtaaatccgttgaaactggttaactgtgatgaactggattttcaaaatagaa

SEQ ID NO: 126677 - DNA, 75 bp, synthetic construct
  source 1..75: mol_type = other DNA
agaaattacaggaaggggaaaaacttccctcctttggataaactggccttaatagctaaagcctgtaattgttca

SEQ ID NO: 126678 - DNA, 75 bp, synthetic construct
  source 1..75: mol_type = other DNA
tgcgctttgtctccggtagcattcaaagtaataaaaccataaatattacggggcgtgttaatccctcggattacg

SEQ ID NO: 126679 - DNA, 75 bp, synthetic construct
  source 1..75: mol_type = other DNA
aaagttataaacccgctcttgccgaaggctcagggcgttcgcagacctgccgcatggtcatcatcgtcagcagtg

SEQ ID NO: 126680 - DNA, 75 bp, synthetic construct
  source 1..75: mol_type = other DNA
gcttttaaaaacattcaggcaggtgatagtaaaaaattctcgctatccagctccaacaactccacgaagaacgca

SEQ ID NO: 126681 - DNA, 75 bp, synthetic construct
  source 1..75: mol_type = other DNA
accaagcataattacaatgtggatatgactgctgggggacgcatagactcaacgccttataaagaaaatgtaggg

SEQ ID NO: 126682 - DNA, 75 bp, synthetic construct
  source 1..75: mol_type = other DNA
agaaaaaaatgtaaatcaactcgcttaggaattgctttatcagcaatggttctggggggcgctattgcaattaat

SEQ ID NO: 126683 - DNA, 75 bp, synthetic construct
  source 1..75: mol_type = other DNA
tggacggtggtgagttgacgatcggacatggttctcgatatagatgggtctccttttttgaggggatcgttaccg

SEQ ID NO: 126684 - DNA, 75 bp, synthetic construct
  source 1..75: mol_type = other DNA
ggaacaattactgattgggcgggaaaagtacaccatattaactctcttgatgatttaaagcaatataatcaatat

SEQ ID NO: 126685 - DNA, 75 bp, synthetic construct
  source 1..75: mol_type = other DNA
aattacagttggcgttgcggaaaatggaacagcagctcattcggctgttggttctgttgcgattgaagttgcaaa

SEQ ID NO: 126686 - DNA, 75 bp, synthetic construct
  source 1..75: mol_type = other DNA
ggtgaaggggttaacaacggtacaattaatattaccgcagatccctcaactattgacagcaagggaaagacccgg

SEQ ID NO: 126687 - DNA, 75 bp, synthetic construct
  source 1..75: mol_type = other DNA
gacttcacgaactaacgaccagactctggaaagttttacaggcaccacgattttaaaacaaatcacgcccctgtc

SEQ ID NO: 126688 - DNA, 75 bp, synthetic construct
  source 1..75: mol_type = other DNA
tggcgcattacagaaaaaccagaacggcgcagatattcccgataaaaaactattcctgcgtaatatcggcacaac

SEQ ID NO: 126689 - DNA, 75 bp, synthetic construct
  source 1..75: mol_type = other DNA
cggcgttgggcaacgacccgaattttgcgaccaccatgactaacgcgcttgcgggtaagcaaccgaaagatgcca

SEQ ID NO: 126690 - DNA, 75 bp, synthetic construct
  source 1..75: mol_type = other DNA
ccctttataaaagcgaattactggcgtgattgcattccgctggtgcgggatgcgtatcttgccaatgcgcaaaac

SEQ ID NO: 126691 - DNA, 75 bp, synthetic construct
  source 1..75: mol_type = other DNA
ggacgttatctattccacctcagtctgccacattctggctgtacgaaagagtacactgttgccaatcgacacaat

SEQ ID NO: 126692 - DNA, 75 bp, synthetic construct
  source 1..75: mol_type = other DNA
ttcgcctgggtacgcgtgttgttcaattgatggcgcgtggtggtcgttatgaaaaagccggacacgcaattaccg

SEQ ID NO: 126693 - DNA, 75 bp, synthetic construct
  source 1..75: mol_type = other DNA
ggtcaggtcattctgcctgcctgtacgttggcgatggaagatacgtatcaggtaatcgacatgggagaaacacct

SEQ ID NO: 126694 - DNA, 75 bp, synthetic construct
  source 1..75: mol_type = other DNA
tggaacatgacggcgtttgtcttcaccgtgctaatcatcgcgattctggttgtaggctccatctggatcatgtgg

SEQ ID NO: 126695 - DNA, 75 bp, synthetic construct
  source 1..75: mol_type = other DNA
cccgctggtattggtgctgccagggttgatagcgtttcatctgtatcaggatttaccgaaagctgatatggctta

SEQ ID NO: 126696 - DNA, 75 bp, synthetic construct
  source 1..75: mol_type = other DNA
gcggtgaaaccaatctcttcaacagcgcacgaaatattgcctgcgccattaaaataggtcagggaattaaaaact

SEQ ID NO: 126697 - DNA, 75 bp, synthetic construct
  source 1..75: mol_type = other DNA
caaagcactcctgtcgggcctgaaaaaaaattccgtctacgtctgcgtaactgcgagttggccggaaccggaaag

SEQ ID NO: 126698 - DNA, 75 bp, synthetic construct
  source 1..75: mol_type = other DNA
aaggtatcaatctgcagattatggataattacggatatccggcgagagcaggaaaaagcatgccacctttaattc

SEQ ID NO: 126699 - DNA, 75 bp, synthetic construct
  source 1..75: mol_type = other DNA
agcgccagtacgttattcagtatgggtatttaccgtcgcatcattaaccagaatgccgagccgcaacagctggtc

SEQ ID NO: 126700 - DNA, 75 bp, synthetic construct
  source 1..75: mol_type = other DNA
aaatagatattcagcgcgatgagcatgatttagctacagtccgacaaatccaggcttttcatatgcgcgaattgc

SEQ ID NO: 126701 - DNA, 75 bp, synthetic construct
  source 1..75: mol_type = other DNA
cgcctgcatagcgccacaggcagactggcaacagtttgtccggaaaagggctgaacagtgccgccggcgctgccg

SEQ ID NO: 126702 - DNA, 75 bp, synthetic construct
  source 1..75: mol_type = other DNA
cagtcggcggtccaaccgatcccttgccaattggtgcggcatttaccggtttgattctggttaacaccttttact

SEQ ID NO: 126703 - DNA, 75 bp, synthetic construct
  source 1..75: mol_type = other DNA
atttcggcactggcgagtgtccgccggagtgggacgctgattactggttcgatggggcgaactatcttagcgaac

SEQ ID NO: 126704 - DNA, 75 bp, synthetic construct
  source 1..75: mol_type = other DNA
gcgcggtgttatttggtgcggtgatcagtaccttcaacggctttctgaatagcgccagtacgttattcagtatgg

SEQ ID NO: 126705 - DNA, 75 bp, synthetic construct
  source 1..75: mol_type = other DNA
ggttcgctacacacaaaacgggaaagcgattggtagttttccgttagctgtaacgaatggctacggcgataataa

SEQ ID NO: 126706 - DNA, 75 bp, synthetic construct
  source 1..75: mol_type = other DNA
tgggctctctggtgtgtctggcgctgtttaatctcttttcgctgcatagcctgtggggctggctgttcctgctgg

SEQ ID NO: 126707 - DNA, 75 bp, synthetic construct
  source 1..75: mol_type = other DNA
aacgcactgtcaaaggcgcgttactgactaacttgctgtttgttttgggaatattcttaagccagtgggtagcat

SEQ ID NO: 126708 - DNA, 75 bp, synthetic construct
  source 1..75: mol_type = other DNA
acaaattatcgcctatgcaattggctttgtgaaaagggagttaaatggttatgtttttatatcagaagattggcg

SEQ ID NO: 126709 - DNA, 75 bp, synthetic construct
  source 1..75: mol_type = other DNA
gaaaaagatgatggtgaaacttttcttttgtatgatgattgtcgtgacacaaatcaaagtaaattggctgagtgg

SEQ ID NO: 126710 - DNA, 75 bp, synthetic construct
  source 1..75: mol_type = other DNA
agcaaggacagcagcagaaagcgcagccgcagcagaatcataacggtggatataaagaaccaccaatggattttg

SEQ ID NO: 126711 - DNA, 75 bp, synthetic construct
  source 1..75: mol_type = other DNA
tacttcggtatcgatatgccgaagaactttaccgattttggcggtaatctgattaacggtctgatgaacggtatc

SEQ ID NO: 126712 - DNA, 75 bp, synthetic construct
  source 1..75: mol_type = other DNA
tcaatcatctgctttccatgcgtcagaactgggatcaatatcagtcgaataaagccaaaatgggtgacccggcat

SEQ ID NO: 126713 - DNA, 75 bp, synthetic construct
  source 1..75: mol_type = other DNA
cttgcccgttacggtcatttgggggggagcgtagcgaacaggttgaacgctgatttacagcgtgtttcacgcact

SEQ ID NO: 126714 - DNA, 75 bp, synthetic construct
  source 1..75: mol_type = other DNA
atcatggcggcgggatattcaggtcgtggcgcagctgcaactggcagcggaacatctggcggtatccaggtcagc

SEQ ID NO: 126715 - DNA, 75 bp, synthetic construct
  source 1..75: mol_type = other DNA
gtttaaggaaaagctgggcattcattcgccgagccgtgtgtttataggctttggtgacaacattgcgcagggggc

SEQ ID NO: 126716 - DNA, 75 bp, synthetic construct
  source 1..75: mol_type = other DNA
gatctgcccgcgaagttcactgacttcggtggccatcttatcgacgggctgataaacggcatcaaaaacaaatgg

SEQ ID NO: 126717 - DNA, 75 bp, synthetic construct
  source 1..75: mol_type = other DNA
atccaactgctggacaccctggcgcagctaaaaaataacggaatgacgatgctgatgtcgacccatcatccgcta

SEQ ID NO: 126718 - DNA, 75 bp, synthetic construct
  source 1..75: mol_type = other DNA
cctcgctgggttatttccgtcaaccggtactacacggtatttctttcagcttgtcacagggatcaatttgctgtc

SEQ ID NO: 126719 - DNA, 75 bp, synthetic construct
  source 1..75: mol_type = other DNA
tgcacgtaacattctggaacgcgacgtgcgtatcaacagcaacgaggagctggcgctgccgaaagagaagttgca

SEQ ID NO: 126720 - DNA, 75 bp, synthetic construct
  source 1..75: mol_type = other DNA
gtaggcgtggtcgatgaaatgatctacgcgctgcaaccggaaatcgcgccgaatatcggcaaatttttctatccg

SEQ ID NO: 126721 - DNA, 75 bp, synthetic construct
  source 1..75: mol_type = other DNA
acagcaggggcagttgctggaaaaagcgcgaaatgaaatgggcgaactggcctatatggtgccggtgaaagaact

SEQ ID NO: 126722 - DNA, 75 bp, synthetic construct
  source 1..75: mol_type = other DNA
accgcggcatggatgccgtcactcacaaccgataaacaaggcaaagcgtatttcacgttcctgatgcctgattcg

SEQ ID NO: 126723 - DNA, 75 bp, synthetic construct
  source 1..75: mol_type = other DNA
aagattatctcccgcagacaccggtagaagcatcggaaaaaaatccgctgatcccggcaggaaccgtattcaaag

SEQ ID NO: 126724 - DNA, 75 bp, synthetic construct
  source 1..75: mol_type = other DNA
gatattcctgcccatcaaattgaaaattatctcccgcaaacaccggtcatcacgtcagaaaagacaccggctatc

SEQ ID NO: 126725 - DNA, 75 bp, synthetic construct
  source 1..75: mol_type = other DNA
atctccaggaaggtgacgatcctgaccgtgggctgcgtcttttctggtgcgtggtaatcaccctgatcccgcttt

SEQ ID NO: 126726 - DNA, 75 bp, synthetic construct
  source 1..75: mol_type = other DNA
actcgttgcaggaagctcaggatattgcacgtaacattctggaacgcgacgtgcgtatcaacagcaacgaggagc

SEQ ID NO: 126727 - DNA, 75 bp, synthetic construct
  source 1..75: mol_type = other DNA
taagcagaaaacaacaaccaatgacacctcaagcagtatctaaagcattagcagcagttcgcaaagattttttgc

SEQ ID NO: 126728 - DNA, 75 bp, synthetic construct
  source 1..75: mol_type = other DNA
tgaatgggcctattattatcaaacgcctggattaaatatcgcaccgcgttcacaacaggcactcgaatttagcgt

SEQ ID NO: 126729 - DNA, 75 bp, synthetic construct
  source 1..75: mol_type = other DNA
agtagtggtttccgtaactatggtgcctgggtggaaggtgccggaagcaatgttaatgtatccggaaaaatcagt

SEQ ID NO: 126730 - DNA, 75 bp, synthetic construct
  source 1..75: mol_type = other DNA
cactattaatgtagacggcagtggaattgcactggcgttccagaaagctgacggaagtgaaaccgataataacct

SEQ ID NO: 126731 - DNA, 75 bp, synthetic construct
  source 1..75: mol_type = other DNA
agttgacggaaatgaatacgctctggatggcagtattacacaaacgaatactggctcggttattaccaatgaggc

SEQ ID NO: 126732 - DNA, 75 bp, synthetic construct
  source 1..75: mol_type = other DNA
cattcagcttgatagcggtagtgtgctaacggtcagcggcacgcagcgtcagccgggcgatgataatggtggcat

SEQ ID NO: 126733 - DNA, 75 bp, synthetic construct
  source 1..75: mol_type = other DNA
gggttattcatgttaacggtctgaacagtaccggactgcaggcaatcaatgcaggacaactaaattctgacggta

SEQ ID NO: 126734 - DNA, 75 bp, synthetic construct
  source 1..75: mol_type = other DNA
tattgacagcaagggaaaaacccgggggataagtgttggtaccggagggatttttactaacgcagcgggtggtaa

SEQ ID NO: 126735 - DNA, 75 bp, synthetic construct
  source 1..75: mol_type = other DNA
ttttcgcgtggcaaactacatcaaaccccattttgagattggtttagctctcgataaaaaagagttcaaaactgg

SEQ ID NO: 126736 - DNA, 75 bp, synthetic construct
  source 1..75: mol_type = other DNA
catgggccaaacataagttaaccggaggaggcgaatactggcgttgggttggtcagggcgtgccggacattctct

SEQ ID NO: 126737 - DNA, 75 bp, synthetic construct
  source 1..75: mol_type = other DNA
ttgggccgttggtggagatataagtggatcacttttcatccgtcgttgacacgactggaagcgccggggcgtgat

SEQ ID NO: 126738 - DNA, 75 bp, synthetic construct
  source 1..75: mol_type = other DNA
aacgttctgtacttttccgtattgaagatggggcaaaacaggccggctctctgctgatgaaaacctccgggacag

SEQ ID NO: 126739 - DNA, 75 bp, synthetic construct
  source 1..75: mol_type = other DNA
gatgcatcattatattgctggatttttgcagccataagcgcattgtttcttctttcggtgatacaaacaccaaag

SEQ ID NO: 126740 - DNA, 75 bp, synthetic construct
  source 1..75: mol_type = other DNA
cgggcaggggcgtgcttatctgcgttcggaaaaaaatctctacatgaagtggagtatgccaacggtgtatcgcat

SEQ ID NO: 126741 - DNA, 75 bp, synthetic construct
  source 1..75: mol_type = other DNA
gcctgccagtattgccagcttaagcacactggccgttcccgtttgcggcgtactcttttcctggtggctgctcgg

SEQ ID NO: 126742 - DNA, 75 bp, synthetic construct
  source 1..75: mol_type = other DNA
atcaaagaacagaaaaaaccattaagcaaaaaatagcatcagcgcagatgcgtttgaatcgtctcaagaccaaag

SEQ ID NO: 126743 - DNA, 75 bp, synthetic construct
  source 1..75: mol_type = other DNA
aaaaaagcccggttggctgtctgttttatgattttttcggcgggaataccctcaaggcggacgtctctatttcgg

SEQ ID NO: 126744 - DNA, 75 bp, synthetic construct
  source 1..75: mol_type = other DNA
cagaacgaaagaaagttgaaacccggctaaagattatacttggtgcggaagtagctaaagctatgcattgcgata

SEQ ID NO: 126745 - DNA, 75 bp, synthetic construct
  source 1..75: mol_type = other DNA
gacctgaatgatattgaaaaaataacatatataaaagcaggtaggaagtttctcgcgcaaatggatggaagacaa

SEQ ID NO: 126746 - DNA, 75 bp, synthetic construct
  source 1..75: mol_type = other DNA
gtggatttattgtcgttaacatcctggcagatgctgtatgcggcgctggtgatgagtgtggtcgctttactggtg

SEQ ID NO: 126747 - DNA, 75 bp, synthetic construct
  source 1..75: mol_type = other DNA
caaaaggcaatcgacgagctggaccagcgcattcgtgacaccgtctccttcgaacttattcgcaatggagtgtca

SEQ ID NO: 126748 - DNA, 75 bp, synthetic construct
  source 1..75: mol_type = other DNA
atggctgagaaaattattacgctatctggcgctgctactgacgtgctctatgcgctgtttttccgcggcgcgttg

SEQ ID NO: 126749 - DNA, 75 bp, synthetic construct
  source 1..75: mol_type = other DNA
caaacgtgcgttcgacctgaacctgcgtgtgaaaaacatgctgccgtctctgtatcgtgaagatcctgaattcta

SEQ ID NO: 126750 - DNA, 75 bp, synthetic construct
  source 1..75: mol_type = other DNA
aaaccagaaagaaaccacgaatcaaaaagacactggaacagcaattagcatctgctcagatgcgtttaaatcgtt

SEQ ID NO: 126751 - DNA, 75 bp, synthetic construct
  source 1..75: mol_type = other DNA
gacctgaatgatattgagaaaataaagcatataaaagcaggaagatggtttcttgctcaaatggaggggagacaa

SEQ ID NO: 126752 - DNA, 75 bp, synthetic construct
  source 1..75: mol_type = other DNA
actggcttcctatgtccgcacggccatcatgatggaatgtttacccggtggtgttatctggtggcagtgccgtcg

SEQ ID NO: 126753 - DNA, 75 bp, synthetic construct
  source 1..75: mol_type = other DNA
gatcgtcaactctatcgtcttatcgatagcggtgggtattggctgcactttcttcggtctggtgctggcgatata

SEQ ID NO: 126754 - DNA, 75 bp, synthetic construct
  source 1..75: mol_type = other DNA
ttttatgatcctcgatggggccattaaaaccattcatccctcgctggaagaggcttcttacaccctgcgcgccag

SEQ ID NO: 126755 - DNA, 75 bp, synthetic construct
  source 1..75: mol_type = other DNA
tcaggaagttgactatttcggtaactggcgtaatgaggaaaaccgggcaatcatcgcatcagcactgaatatatc

SEQ ID NO: 126756 - DNA, 75 bp, synthetic construct
  source 1..75: mol_type = other DNA
acgtaaattggtcgagggtggtattgacctgaaagatgtcaacgtcggtaacatgcatttctcggaagggaagaa

SEQ ID NO: 126757 - DNA, 75 bp, synthetic construct
  source 1..75: mol_type = other DNA
cgatgtccagccactaccggtcaccctggtgtgtagcgtggtcgccatacttgcgatatggattgcctttaacgc

SEQ ID NO: 126758 - DNA, 75 bp, synthetic construct
  source 1..75: mol_type = other DNA
ggtctggggcagatcgacaaatcgctggatgaagcctcactcagcctgcgcgcgggttccttgcgaaccataacc

SEQ ID NO: 126759 - DNA, 75 bp, synthetic construct
  source 1..75: mol_type = other DNA
gaaaaatgacggaacggaaaacaaatttggcgcaaatgtcgttcacgccatgatggggtgtgccaggattggaca

SEQ ID NO: 126760 - DNA, 75 bp, synthetic construct
  source 1..75: mol_type = other DNA
gctggtgtttaccggcgattactttttagatgaacaaggattgccgacagcgaaaagcactgcagtgtttaatat

SEQ ID NO: 126761 - DNA, 75 bp, synthetic construct
  source 1..75: mol_type = other DNA
ttagatgaacaaggattgccaacagccaaaagcaccgcggtgtttaatatgttcaaacacctggcccatgtgctt

SEQ ID NO: 126762 - DNA, 75 bp, synthetic construct
  source 1..75: mol_type = other DNA
cgctatttcggggccgtgctgcacatccctcccgtctggccaactgagccactgggcatcatctcagactggcga

SEQ ID NO: 126763 - DNA, 75 bp, synthetic construct
  source 1..75: mol_type = other DNA
cgcctttgccgctgcaatagccgtcaagaaatggctggaacaatatgggcacggtgcgcttttatggttgtcctg

SEQ ID NO: 126764 - DNA, 75 bp, synthetic construct
  source 1..75: mol_type = other DNA
gctctccggagaacggtcaccttactgtcgttatttacgaccccaccatcaaaaagaacgttggccttaatacca

SEQ ID NO: 126765 - DNA, 75 bp, synthetic construct
  source 1..75: mol_type = other DNA
aaactggatctggttctcaacgagcacgatctggccgcgccggtggactaccgcgagcaggcggaatcgatgttc

SEQ ID NO: 126766 - DNA, 75 bp, synthetic construct
  source 1..75: mol_type = other DNA
ttaccagcaacctgtcggcctgaggggtatcttgccgcgcaacgtaatggcacgctgattcaggttgcaccgcag

SEQ ID NO: 126767 - DNA, 75 bp, synthetic construct
  source 1..75: mol_type = other DNA
aggacaaagtcccgaccgatatctggggcgacaacctgatgctgcattacgtcggcaaaccccagccgggcaccg

SEQ ID NO: 126768 - DNA, 75 bp, synthetic construct
  source 1..75: mol_type = other DNA
cctcaccatgtgcaatatgtttcgccagcctaaaccggcgacagaggtgatagagacctatggctgttttgcctt

SEQ ID NO: 126769 - DNA, 75 bp, synthetic construct
  source 1..75: mol_type = other DNA
tcgcgagcaggcggagtccatgtttaacgaggagagcaaggccatccgtcgcgccacgaatggcgtgaatctgcg

SEQ ID NO: 126770 - DNA, 75 bp, synthetic construct
  source 1..75: mol_type = other DNA
ccggccatgtaaaaaaactgacagccagtgagcgctgggccggtggtaagggtaaccccatcggggtgattgaag

SEQ ID NO: 126771 - DNA, 75 bp, synthetic construct
  source 1..75: mol_type = other DNA
agtaacgatctccgcttcctatcctggcgctgatgcaaaaacagtgcaggatactgttacacaggttatcgaaca

SEQ ID NO: 126772 - DNA, 75 bp, synthetic construct
  source 1..75: mol_type = other DNA
cttcctgatggttgtcggcgttatcaacaccgatggcaccatgacgcaggaggatatctctgactacgtagcggc

SEQ ID NO: 126773 - DNA, 75 bp, synthetic construct
  source 1..75: mol_type = other DNA
tcggcaatggcactgtcggtactggtggcattgatcctgactccggcgctttgtgcgaccatgctgaaaccgatt

SEQ ID NO: 126774 - DNA, 75 bp, synthetic construct
  source 1..75: mol_type = other DNA
tgctacacggtgaaatggcctgtgccgcgatggatgaagcatggatggaattagacggagatatgttacgcctta

SEQ ID NO: 126775 - DNA, 75 bp, synthetic construct
  source 1..75: mol_type = other DNA
cagcaatgcaaccggcatccgaacaggacgatattgtaaattcacttaattacgagggcattgcagtaattgagt

SEQ ID NO: 126776 - DNA, 75 bp, synthetic construct
  source 1..75: mol_type = other DNA
gctggctgcccttgatgaaaaacggccaggacccgtgctgacgcgggacatagaacgggtgctggagcaaagcgg

SEQ ID NO: 126777 - DNA, 75 bp, synthetic construct
  source 1..75: mol_type = other DNA
ccaagcttttagtgcatttcccgatgaagaccaagaaaaaatgcttcaggaaataaaaaataagaaaaagtcaat

SEQ ID NO: 126778 - DNA, 75 bp, synthetic construct
  source 1..75: mol_type = other DNA
agcttagataagttggtcgaggttacagggcatccactacattggtttttattacctccagaagagggagagcaa

SEQ ID NO: 126779 - DNA, 75 bp, synthetic construct
  source 1..75: mol_type = other DNA
aacgaagcctacatgatgcacaccaccacttctcctcactacggtatcgtggcgtccactgaaaccgctgcggcg

SEQ ID NO: 126780 - DNA, 75 bp, synthetic construct
  source 1..75: mol_type = other DNA
tgctaacagtgctggtgttgacgcaaatatatttgtctgcaaatttgaacaaagcgcatgcttacttccgtctgc

SEQ ID NO: 126781 - DNA, 75 bp, synthetic construct
  source 1..75: mol_type = other DNA
aatgggcatgaacattattaatgacgacatcaccgggcgagtacataaggaccgtaaagttctcaccggcgacag

SEQ ID NO: 126782 - DNA, 75 bp, synthetic construct
  source 1..75: mol_type = other DNA
atccgtctataaatgaaacagaactaaaatcattttctgaaataataaaagataaaatatttaacaaggtttttg

SEQ ID NO: 126783 - DNA, 75 bp, synthetic construct
  source 1..75: mol_type = other DNA
tgaaaactaatgatccggcggaaaagacccgcttgtataaggcggcgcaggatatcatctggcaagagtcgccgt

SEQ ID NO: 126784 - DNA, 75 bp, synthetic construct
  source 1..75: mol_type = other DNA
atgaatgaatatgtttatagcgcaaggcataatgcttttttccctgtggatatgattgataaatataaatcagag

SEQ ID NO: 126785 - DNA, 75 bp, synthetic construct
  source 1..75: mol_type = other DNA
ggcactgttcaattttttgttcgattgttttcatatggcaaaaaaaagcggcctaatggccgccaatgatgtcaa

SEQ ID NO: 126786 - DNA, 75 bp, synthetic construct
  source 1..75: mol_type = other DNA
caaaagtatctcgatacctattttgccgacctgaaatccactactgaccggctccagccgctgaccttagatacc

SEQ ID NO: 126787 - DNA, 75 bp, synthetic construct
  source 1..75: mol_type = other DNA
gcatcacgccgttaccgtccggtgtggatctggactcgctggatgattacgagcgccactggcagacctggaaat

SEQ ID NO: 126788 - DNA, 75 bp, synthetic construct
  source 1..75: mol_type = other DNA
taaataataatggtattttgaatatgagcaaatataaattctctttaccccgtcttgatattaccggtgtgtggg

SEQ ID NO: 126789 - DNA, 75 bp, synthetic construct
  source 1..75: mol_type = other DNA
agtcggcggaaggtttgcgcgagcatttttactggcaaaaatcgcgcaaaaccagaagcgggacaacgttgagtc

SEQ ID NO: 126790 - DNA, 75 bp, synthetic construct
  source 1..75: mol_type = other DNA
cccgacttgatattacgggaatgtgggtattttccctgggtgtctggtttcatatcgtcgcccgtcttgtttaca

SEQ ID NO: 126791 - DNA, 75 bp, synthetic construct
  source 1..75: mol_type = other DNA
agccgggaggaaagggaagctctggaagcccgtcaggccgccattcttgctgcagaaaaggagagcagacatgtc

SEQ ID NO: 126792 - DNA, 75 bp, synthetic construct
  source 1..75: mol_type = other DNA
aaaccctggatggctttctttctggcggagctgattgcggccattctcgttctgtttggggcataccagatactg

SEQ ID NO: 126793 - DNA, 75 bp, synthetic construct
  source 1..75: mol_type = other DNA
aaaggaaaggaaaggaattttgcgatgtaatggtcgtctttggcaatgatgtaatcatcatgtcagataaactta

SEQ ID NO: 126794 - DNA, 75 bp, synthetic construct
  source 1..75: mol_type = other DNA
atggcgttatttcgcatcttagtcatcgtggtgaacttgatccttctggcgatctccacgcacaggcaacggcgt

SEQ ID NO: 126795 - DNA, 75 bp, synthetic construct
  source 1..75: mol_type = other DNA
agctgggcctgaacctcaatcaacgcaaaagctgcctggtcgcggcctgtaagcgccagcaagtaaccgggattg

SEQ ID NO: 126796 - DNA, 75 bp, synthetic construct
  source 1..75: mol_type = other DNA
ctctgcaaggaactcggcatcgagcgcgtcactctctaccgatatgtcggtcccaaaggcgagctcagagaccat

SEQ ID NO: 126797 - DNA, 75 bp, synthetic construct
  source 1..75: mol_type = other DNA
aaaggaaaggaaaggaaaggaaaggaaaggaaaggaaaggaattttgcgatgtaatggtcgtctttggcaatgat

SEQ ID NO: 126798 - DNA, 75 bp, synthetic construct
  source 1..75: mol_type = other DNA
ttaattataatattgaaattgacgaaaaaatcgcatggaatagatggtataaaagtgctatcgaaagcagcataa

SEQ ID NO: 126799 - DNA, 75 bp, synthetic construct
  source 1..75: mol_type = other DNA
aggacgagatattgcgacatttgatcttgccataatgcgaactctcccaaggcttaaaggaatttcagctaacct

SEQ ID NO: 126800 - DNA, 75 bp, synthetic construct
  source 1..75: mol_type = other DNA
cgcgcgctggttttcggacaaggctaataaagatccggttttccagttcaaagcaatgcaggttgtctggcagtg

SEQ ID NO: 126801 - DNA, 75 bp, synthetic construct
  source 1..75: mol_type = other DNA
caaggtaatgcagttccggttgagggatatgataattgctctttgaatactcttcagggaagctttgatacggat

SEQ ID NO: 126802 - DNA, 75 bp, synthetic construct
  source 1..75: mol_type = other DNA
atgcttccccgttttgccgatatttttcagcagggtaaccgctggcttaactggctggagaaacagccggaaggt

SEQ ID NO: 126803 - DNA, 75 bp, synthetic construct
  source 1..75: mol_type = other DNA
atgctggaaaaatctctggcaatactcttcgcgttgttaattttagcaacgctgataaaccgttttctggtatgg

SEQ ID NO: 126804 - DNA, 75 bp, synthetic construct
  source 1..75: mol_type = other DNA
cgttactggtgttatttcttttggcattaaccgagtcaaacgatattgcacagtatttatgggggaaatcctgcg

SEQ ID NO: 126805 - DNA, 75 bp, synthetic construct
  source 1..75: mol_type = other DNA
tgcgttggaatattcaacggggagtggtcgttattccgaaatcgacacatcaacagcgtatcgaagaaaattttg

SEQ ID NO: 126806 - DNA, 75 bp, synthetic construct
  source 1..75: mol_type = other DNA
ttgaatgctatccgcacgggttatcgactcatcgacactgcagcggtatacggtaatgaagatgccgtcggtgaa

SEQ ID NO: 126807 - DNA, 75 bp, synthetic construct
  source 1..75: mol_type = other DNA
catcgacactgcagcggtatacggtaatgaagatgccgtcggtgaagccgttcgtgaagccatatctgaaggttt

SEQ ID NO: 126808 - DNA, 75 bp, synthetic construct
  source 1..75: mol_type = other DNA
agttcatttgtcatccggtcccgtcaaagaagaatggaagatcgagcaccaggttgaaaaaccaaatccggcaaa

SEQ ID NO: 126809 - DNA, 75 bp, synthetic construct
  source 1..75: mol_type = other DNA
gttctgtttggcgcataccagatactggatacgtggattgcccgcgtcagccgggaagagcgtgaggcactggaa

SEQ ID NO: 126810 - DNA, 75 bp, synthetic construct
  source 1..75: mol_type = other DNA
gtgggtattttccctgggtgtctggtttcatatcgtcgcccgtcttgttcacagcaaacccgggatggctttttt

SEQ ID NO: 126811 - DNA, 75 bp, synthetic construct
  source 1..75: mol_type = other DNA
tgccctgaaaacggcacaggaaaaccacaatataaccagtgaaaccggattacggcattacctgcttgaatggct

SEQ ID NO: 126812 - DNA, 75 bp, synthetic construct
  source 1..75: mol_type = other DNA
gcttttttgagctggagtccggtttcaaaaaactgctgtccatcgtgctgattggccagccggaactggcgacaa

SEQ ID NO: 126813 - DNA, 75 bp, synthetic construct
  source 1..75: mol_type = other DNA
atggacgttgagtacggccagtacggtgtcatcctgctggttgaaggttttccgccgtcacatgccggcaccatc

SEQ ID NO: 126814 - DNA, 75 bp, synthetic construct
  source 1..75: mol_type = other DNA
ctgtgctttgccgtaccgggtacggtggcggcgtttcgtatattcttgcctttaacagcgctccggtttatctca

SEQ ID NO: 126815 - DNA, 75 bp, synthetic construct
  source 1..75: mol_type = other DNA
tctcgatggtgatgcgtaacgttccggtgggtattcgcgccgggattgcaggtctggggcagatcgacaaatcgc

SEQ ID NO: 126816 - DNA, 75 bp, synthetic construct
  source 1..75: mol_type = other DNA
tgagaggatacgaacatcaattcgggatcgaacgcagagaaaccctctttcacaccctatttatcgggctgccca

SEQ ID NO: 126817 - DNA, 75 bp, synthetic construct
  source 1..75: mol_type = other DNA
aacgacgcaaagggtaaaaccctgaaagctgccgccatagcagaagccatcatcaacaccatcgcgccgctggag

SEQ ID NO: 126818 - DNA, 75 bp, synthetic construct
  source 1..75: mol_type = other DNA
cccgtatcgataaccgtctggttcatggccaggttggcgtgacctggacatccaccatcggtgcgaatctgctgg

SEQ ID NO: 126819 - DNA, 75 bp, synthetic construct
  source 1..75: mol_type = other DNA
gttttattaaacaacgtggcgtgggtaatgactctaacttattgatagtgttttatgttcagataatgcccgatg

SEQ ID NO: 126820 - DNA, 75 bp, synthetic construct
  source 1..75: mol_type = other DNA
cgctgcgccgcgacctgattgaacgcgtcaaccgcgagaacgcgccggtgattgttatcgagccatacatcatcg

SEQ ID NO: 126821 - DNA, 75 bp, synthetic construct
  source 1..75: mol_type = other DNA
tccgtgacccgttcgccgatgaagccatgcagggcgcggacgatgtgttcaccacgccggatatccgctacgtgc

SEQ ID NO: 126822 - DNA, 75 bp, synthetic construct
  source 1..75: mol_type = other DNA
ggtgtttggctcagcctgtatgggacagcatttcggcatgtagagactatggcaatccaatagggaaatgtcttt

SEQ ID NO: 126823 - DNA, 75 bp, synthetic construct
  source 1..75: mol_type = other DNA
tcaggacgcccgctttcgccaggtgcatcgcgtcctgaaagacagccgccaggcggggttcagccacgttctggt

SEQ ID NO: 126824 - DNA, 75 bp, synthetic construct
  source 1..75: mol_type = other DNA
tcaggacgcccgctttcgccagctgcatcgcgtcctgaaagacagcggccaggcggggttcagccacgttctggt

SEQ ID NO: 126825 - DNA, 75 bp, synthetic construct
  source 1..75: mol_type = other DNA
tatcaaccgcgagaatgcgccggttattgttatcgagccatacatcatcgcaatggaagacaacgatgtgaaagg

SEQ ID NO: 126826 - DNA, 75 bp, synthetic construct
  source 1..75: mol_type = other DNA
cgttgaaggctggttcaccgacgataccgcaatgcgtttcgaagcttacggctggcacgttattcgcgacatcga

SEQ ID NO: 126827 - DNA, 75 bp, synthetic construct
  source 1..75: mol_type = other DNA
tgactgccgaaggcgtgaaagcgcgcgtggtgtccatgccgtctaccgacgcatttgacaagcaggatgctgctt

SEQ ID NO: 126828 - DNA, 75 bp, synthetic construct
  source 1..75: mol_type = other DNA
tggccgtcagtaacctggttatagccgccatgaatctggccgctgaaatcggggttccacaggtcaacgctgacg

SEQ ID NO: 126829 - DNA, 75 bp, synthetic construct
  source 1..75: mol_type = other DNA
gtcattattttgatgccggctgggcattgctttgtatagcgtttatggtcatcagtgccaccatcgttggccgcg

SEQ ID NO: 126830 - DNA, 75 bp, synthetic construct
  source 1..75: mol_type = other DNA
gctggcgattattttcctctttgactggctgatcggagaagcacgtatctcccgttctaaagccaaaaaccaggc

SEQ ID NO: 126831 - DNA, 75 bp, synthetic construct
  source 1..75: mol_type = other DNA
cagctttgtgcgggccatcacgacggtcagcgccatcgtctttctcgtcacgccggacacccgcgtggcaaccgc

SEQ ID NO: 126832 - DNA, 75 bp, synthetic construct
  source 1..75: mol_type = other DNA
gaggccacgctggcccagattgtgaatcataacgcgtggccccgcacctgccccggagaagtgcgccggcgtctt

SEQ ID NO: 126833 - DNA, 75 bp, synthetic construct
  source 1..75: mol_type = other DNA
ggctacggtacgcgctggttagcgatgatcagttatttcatcgctgccgtagtgattgtctacctgatttttgac

SEQ ID NO: 126834 - DNA, 75 bp, synthetic construct
  source 1..75: mol_type = other DNA
tggcataatcagctacatcaccatcaactatctggtgaagttcgacttccatttcctctatgtgctggcctgtac

SEQ ID NO: 126835 - DNA, 75 bp, synthetic construct
  source 1..75: mol_type = other DNA
acgttcgtatcctacggtacttttgttggaagaagcgcatcattacctgcgtgacccttatgctgaaattgactc

SEQ ID NO: 126836 - DNA, 75 bp, synthetic construct
  source 1..75: mol_type = other DNA
aaaatccgcgactggcttaaatccatggctaagaaaaactgctctgttcttatggcaactcagcagcttagtgat

SEQ ID NO: 126837 - DNA, 75 bp, synthetic construct
  source 1..75: mol_type = other DNA
ctcctatgcgaaatgctattgctgacgccattaagagtatgtctgagactcactccaaaaccctgtctgaattta

SEQ ID NO: 126838 - DNA, 75 bp, synthetic construct
  source 1..75: mol_type = other DNA
gatggctgggttgatgaatggctacgcactaagggactggacttaaatgattacgagtatgaggttgctgcatga

SEQ ID NO: 126839 - DNA, 75 bp, synthetic construct
  source 1..75: mol_type = other DNA
cccgtctactcgtttcaaagtgaaaacggcagattataaatcaacggtaaaactgatggagtcatttaatctgcg

SEQ ID NO: 126840 - DNA, 75 bp, synthetic construct
  source 1..75: mol_type = other DNA
tcctcatacccgctttaagagcttaacggctgactatcaggaaacggttaaactgatggagtcgtttggcctgcg

SEQ ID NO: 126841 - DNA, 75 bp, synthetic construct
  source 1..75: mol_type = other DNA
gtgccccaggcgcaatcggcccttatgttcaaggcgttgatttaggcagcatggtcttcacctccggtcaaattc

SEQ ID NO: 126842 - DNA, 75 bp, synthetic construct
  source 1..75: mol_type = other DNA
gctttatgtcccagctattcaataccaataacggttacgttgatgaggacgccttgtccatggtcaacgatgcat

SEQ ID NO: 126843 - DNA, 75 bp, synthetic construct
  source 1..75: mol_type = other DNA
tgtatgacgacctgaatgtgaatggcctgcctgatgaaagcacggccatgaaggcttctgatattccggggactc

SEQ ID NO: 126844 - DNA, 75 bp, synthetic construct
  source 1..75: mol_type = other DNA
caggggaatgaacgtcaggaggttaaactgaacagcggtgttcgtgacggtggtcaagggattccggttgcacta

SEQ ID NO: 126845 - DNA, 75 bp, synthetic construct
  source 1..75: mol_type = other DNA
gttttatgtctcagctgttcaataccaataacggctacgttgatgaagacgcattgtctatggtcaacgatgcat

SEQ ID NO: 126846 - DNA, 75 bp, synthetic construct
  source 1..75: mol_type = other DNA
aagaccgtgcaaaggttgaagacagcgcagaatttatgcgcaaggccatcaacaacctgggctttacatcgcgta

SEQ ID NO: 126847 - DNA, 75 bp, synthetic construct
  source 1..75: mol_type = other DNA
ttgcgctgataggtctgatcttgcttggcatgatgctggctttctatttgcgtatggtgaaggaatatcacctta

SEQ ID NO: 126848 - DNA, 75 bp, synthetic construct
  source 1..75: mol_type = other DNA
aaaagcaggtgatattcacccggtctataaggcattaaatacgctggactataccgtcggcacgcttggcaacca

SEQ ID NO: 126849 - DNA, 75 bp, synthetic construct
  source 1..75: mol_type = other DNA
gcacaatctgtcatgtgctgacctgcacaaatggggagaaaatgtggcgcgttggaaggatgttccggtgatggt

SEQ ID NO: 126850 - DNA, 75 bp, synthetic construct
  source 1..75: mol_type = other DNA
cattgtttaatgaattctcctgcatgataaacgaatgggaatcaattaggaatgagtttgattctatggttgcag

SEQ ID NO: 126851 - DNA, 75 bp, synthetic construct
  source 1..75: mol_type = other DNA
aacagctccttaattctggtattaaaccagaaacaatatatatatcatctgaagctcaagaagttaaaagtatgt

SEQ ID NO: 126852 - DNA, 75 bp, synthetic construct
  source 1..75: mol_type = other DNA
acggtcgatattgatactgttgatgatttccagttggctgcagaaatttactctattagaaaaaaatatgagaag

SEQ ID NO: 126853 - DNA, 75 bp, synthetic construct
  source 1..75: mol_type = other DNA
aacggctggcagttcttcagcccggcgatgaacgaaatggtaaaagagcgtttggttttaggcgcagcgctaaaa

SEQ ID NO: 126854 - DNA, 75 bp, synthetic construct
  source 1..75: mol_type = other DNA
tgatgttctggaagtaacagacaaaggccaagaggttgagttttgggaccgtgaggaaggtgcctgtgtcggtca

SEQ ID NO: 126855 - DNA, 75 bp, synthetic construct
  source 1..75: mol_type = other DNA
caaagctgtgctactccttgcaggataatgacattgtgttcaataagggcttccccatccgggtcaaccatggct

SEQ ID NO: 126856 - DNA, 75 bp, synthetic construct
  source 1..75: mol_type = other DNA
acggctggcagttcttcagcccggcgatgaacgaaatggtaaaagagcgtttggttttaggcgcagcgctgaaag

SEQ ID NO: 126857 - DNA, 75 bp, synthetic construct
  source 1..75: mol_type = other DNA
gccagcgttaaagggatgaatgaacctgctgatgctgcaatgaatcttgttaaaacaagtaatggctggaaagct

SEQ ID NO: 126858 - DNA, 75 bp, synthetic construct
  source 1..75: mol_type = other DNA
tggtgagaaaggtgagtttgagaaagcgattaatgccaagattgggcaagacaaatattgcttctcgttggataa

SEQ ID NO: 126859 - DNA, 75 bp, synthetic construct
  source 1..75: mol_type = other DNA
tcgaactggaaaaaaatggttcgggaacacacatgtatatcacttacagcgcttcgtacagtgataccctgactc

SEQ ID NO: 126860 - DNA, 75 bp, synthetic construct
  source 1..75: mol_type = other DNA
tcagtgggccgcagaagccattgccgctgaagggcatacatttgaagcgacaccgggcagttattataaattcgg

SEQ ID NO: 126861 - DNA, 75 bp, synthetic construct
  source 1..75: mol_type = other DNA
cttgttttttcgtatttctgttggccgggtgttcaacgcaggaaatcgcagagtggaatcagaagatcagtgact

SEQ ID NO: 126862 - DNA, 75 bp, synthetic construct
  source 1..75: mol_type = other DNA
atgggtaaaatcttgcttgtcgtatcagataagggtggtgtaggcaaaagcacctacgtggctaacacaggctca

SEQ ID NO: 126863 - DNA, 75 bp, synthetic construct
  source 1..75: mol_type = other DNA
aagcgccaaaacaacggattgcctccagttcctgtctatgaagcttacggcgatatcagtaaagagattcaacgc

SEQ ID NO: 126864 - DNA, 75 bp, synthetic construct
  source 1..75: mol_type = other DNA
acgatcagcgtcgcgccatttactcccagcgtaacgaactgctggatgtcagcgatgtgagcgaaaccatcaaca

SEQ ID NO: 126865 - DNA, 75 bp, synthetic construct
  source 1..75: mol_type = other DNA
tcgcctccagcgcattgaaacgaagctgtacgtaccatctttccgccggggaaaaaccctccaaaatgctatctg

SEQ ID NO: 126866 - DNA, 75 bp, synthetic construct
  source 1..75: mol_type = other DNA
ctcgcgctgttgttgctggatggtgtgatgtggggactgctcaactctgccgatagcgcgctgttgttggaaacc

SEQ ID NO: 126867 - DNA, 75 bp, synthetic construct
  source 1..75: mol_type = other DNA
tatcgactggtatgcgttttcactgccgaaaatgaaagccagtaaagaagttaccatggacgatgaattacgtat

SEQ ID NO: 126868 - DNA, 75 bp, synthetic construct
  source 1..75: mol_type = other DNA
cgtgaacatttagagaaaaatagtcatttattagatggggctattgggcgtgcaatgactccaagagaaaaatta

SEQ ID NO: 126869 - DNA, 75 bp, synthetic construct
  source 1..75: mol_type = other DNA
cgcgagcatttacagaacaacactcatttattagaaggagcggtcggtagggcaatgacaccgggtgagaaacta

SEQ ID NO: 126870 - DNA, 75 bp, synthetic construct
  source 1..75: mol_type = other DNA
aatttcataggaccagcatttttactggctgtctcttttttagttgcaagagtatatcagttttttcatgaccta

SEQ ID NO: 126871 - DNA, 75 bp, synthetic construct
  source 1..75: mol_type = other DNA
tttccaggtcggcaagtcgatctgcctgttgcccggtgataagatgaaacccccatcggtcccatctcaccagat

SEQ ID NO: 126872 - DNA, 75 bp, synthetic construct
  source 1..75: mol_type = other DNA
aaacacctcatccttattctggtgcagttgttcaaatgtgctcaggatgttcgcttcgctgatttccggaaaatt

SEQ ID NO: 126873 - DNA, 75 bp, synthetic construct
  source 1..75: mol_type = other DNA
cggcattctctgcggcgtattcgtgacactttgcgtttgttatttgctaaacctcgttatgtaaaaccggccggt

SEQ ID NO: 126874 - DNA, 75 bp, synthetic construct
  source 1..75: mol_type = other DNA
ggtggaaggtgcgtatggcgcacagatggtggcgggcagtggtgaattacgtctgaacggtgcaatgccggaacg

SEQ ID NO: 126875 - DNA, 75 bp, synthetic construct
  source 1..75: mol_type = other DNA
tggaaggcccggtgaccagcacccgtaacccgtgggtgtggaaagtcgggcagggaaatgaaggtctggaggtta

SEQ ID NO: 126876 - DNA, 75 bp, synthetic construct
  source 1..75: mol_type = other DNA
atttcagtgatgcctccctgcgtcaggttgaaggtgcgtatggtgcacagactgtggcaggcagtggtgaattac

SEQ ID NO: 126877 - DNA, 75 bp, synthetic construct
  source 1..75: mol_type = other DNA
ttgaagcggcctgtaatgaaggcgctggcgttcatgatgtacgtcgcgcatccagcctttctacagctaaagcac

SEQ ID NO: 126878 - DNA, 75 bp, synthetic construct
  source 1..75: mol_type = other DNA
tctgatttgatcctcgtgttgctgtcgctggtggatatgacgctggttggcggtttgctggtgatggtgatgttt

SEQ ID NO: 126879 - DNA, 75 bp, synthetic construct
  source 1..75: mol_type = other DNA
tgttcagcttcccggccttcgccactgaggtggtgcaatgggaaaacatcccactgcctgtgacactacatgtcg

SEQ ID NO: 126880 - DNA, 75 bp, synthetic construct
  source 1..75: mol_type = other DNA
atccgcgccagcttcaggggcagttttacgccgcctccttccagcatcgctggctggggcctgcgggcagcgccg

SEQ ID NO: 126881 - DNA, 75 bp, synthetic construct
  source 1..75: mol_type = other DNA
ctgcccgtcagcaccataccgatcggcggctggcgactggatccttatcacctggcggcgatccggctgcagaat

SEQ ID NO: 126882 - DNA, 75 bp, synthetic construct
  source 1..75: mol_type = other DNA
ccgggcaggagcggatcgtctttgtggaccggaatgttcgggtgggctatcccgccacgctggaaggcaagctgc

SEQ ID NO: 126883 - DNA, 75 bp, synthetic construct
  source 1..75: mol_type = other DNA
cagaactgggcgcactgattaaccgtaataacaggctgatgcacctgtccttcagccccccttttcgtgaaataa

SEQ ID NO: 126884 - DNA, 75 bp, synthetic construct
  source 1..75: mol_type = other DNA
accggaggtccgttacgcagagcgtcgtctcctaggcgtaaatgatgatgtggaaactgtcattcaggatgcttt

SEQ ID NO: 126885 - DNA, 75 bp, synthetic construct
  source 1..75: mol_type = other DNA
gtggctgaactgcagaagatggacgactggctgagtgccttgctggcgaatctggaaccagccacgagaagccgc

SEQ ID NO: 126886 - DNA, 75 bp, synthetic construct
  source 1..75: mol_type = other DNA
atcagggacgagaatttgtctgccgaccgggtgatattttgctgttcccgccaggagagattcatcactacggtc

SEQ ID NO: 126887 - DNA, 75 bp, synthetic construct
  source 1..75: mol_type = other DNA
atggaacgccgcttcagcagaacgcctttgttccgtgcaataatcgccagcgtagtgctgttcgtaatggcaacg

SEQ ID NO: 126888 - DNA, 75 bp, synthetic construct
  source 1..75: mol_type = other DNA
atcggcagaatgctctccgcgattgacagctgtctgagcgcggcatatgcagaacttcctgcccggaaaaccagc

SEQ ID NO: 126889 - DNA, 75 bp, synthetic construct
  source 1..75: mol_type = other DNA
gattttattcaccaactgcaacagggcgacgccgaccaggtgcttgccttgttaaatcaaaccctcagctcataa

SEQ ID NO: 126890 - DNA, 75 bp, synthetic construct
  source 1..75: mol_type = other DNA
atggcagcacttactgcaagctgtattgacctgaatattcagggcaacggcgcttattccattctgaagcaactg

SEQ ID NO: 126891 - DNA, 75 bp, synthetic construct
  source 1..75: mol_type = other DNA
gattttatcaaccaactgcgacagggcgacgccgaccaggtgcttgctttgttaaatcaaaccctcagctcataa

SEQ ID NO: 126892 - DNA, 75 bp, synthetic construct
  source 1..75: mol_type = other DNA
gtggctgaactgcagaaagtggacgactggctgagtgccttgctggcgaatctggagccagctgcaagaagccgt

SEQ ID NO: 126893 - DNA, 75 bp, synthetic construct
  source 1..75: mol_type = other DNA
cagcacgcagtaaaaaaggccgtatcaaacggcagatgtttacaaaacttcgcaccacaaaatacctgaaaactg

SEQ ID NO: 126894 - DNA, 75 bp, synthetic construct
  source 1..75: mol_type = other DNA
caggatgcaacgcaatcctgatggcagcagctatgaaccgaggcgagtaacagcacgcagtaaaaaaggccgtat

SEQ ID NO: 126895 - DNA, 75 bp, synthetic construct
  source 1..75: mol_type = other DNA
tctggaaccagccacgagaagcagcatgatgcgccagctggcgcaggaacttcgccggacacagcagcagaacat

SEQ ID NO: 126896 - DNA, 75 bp, synthetic construct
  source 1..75: mol_type = other DNA
cgattattaggtttcaataacgatataatgttgaagttaattgatctgttaactcggcatttaattaatccaaac

SEQ ID NO: 126897 - DNA, 75 bp, synthetic construct
  source 1..75: mol_type = other DNA
ccgccagcgccgactctgccagcgtgcagtttgaaggtaaggtacagcgcattgcccgtgttcaccattacggtc

SEQ ID NO: 126898 - DNA, 75 bp, synthetic construct
  source 1..75: mol_type = other DNA
cggcgctggtggcgcaaggctttcagattatctggccacaaaacagcgttgatttgctgaaatttatcgaacata

SEQ ID NO: 126899 - DNA, 75 bp, synthetic construct
  source 1..75: mol_type = other DNA
tggttttttgaatatgcgctggggcaggcggaagatatcgccattcgtatgcgtcagtacaccgacgaatatctt

SEQ ID NO: 126900 - DNA, 75 bp, synthetic construct
  source 1..75: mol_type = other DNA
gtagtagagaaaaccggcccttataacctgctgtttctctttagtattggcatcgataaaaccaaagcaatggga

SEQ ID NO: 126901 - DNA, 75 bp, synthetic construct
  source 1..75: mol_type = other DNA
cagaatgcagcgcaatccagatggccgcagttatgaacctcgacgggtaacagcacgcagtaaaaaggggcgcat

SEQ ID NO: 126902 - DNA, 75 bp, synthetic construct
  source 1..75: mol_type = other DNA
actggctgagtgccttgctggcgaatctagaaccagccgcaagaagccgcatgatgcgccagctgtcgcaggaac

SEQ ID NO: 126903 - DNA, 75 bp, synthetic construct
  source 1..75: mol_type = other DNA
ccgccagcgccgattctgccagcgtgcagtttgaaggcaaggtacagcgcattgcccgtgttcatcactacggct

SEQ ID NO: 126904 - DNA, 75 bp, synthetic construct
  source 1..75: mol_type = other DNA
ccgccagcgccgactctgccagcgtgcagtttgaaggtaaggtgcagcgcattgcgcgggttcaccattacggcc

SEQ ID NO: 126905 - DNA, 75 bp, synthetic construct
  source 1..75: mol_type = other DNA
gtggctgaactgcagaaagtggacgactggctgagtgccttgctggcgaatctggagccagccgccagaagccgc

SEQ ID NO: 126906 - DNA, 75 bp, synthetic construct
  source 1..75: mol_type = other DNA
tgcgtgatcgcgtcagtcgcaaaggacctgaggtccgttacgcagagcgtcgtcttctgggcgtaaatgatgatg

SEQ ID NO: 126907 - DNA, 75 bp, synthetic construct
  source 1..75: mol_type = other DNA
tcatcagaaatatcagaggaaacttatgatgacagaaaacaaaaagaatcaggaattcaaaatcagaaaaattaa

SEQ ID NO: 126908 - DNA, 75 bp, synthetic construct
  source 1..75: mol_type = other DNA
gaaattgtcgtttcgctgtgtcttaccttttctgtttctgttgtgttttttgtgggggcaattgtgggatggatt

SEQ ID NO: 126909 - DNA, 75 bp, synthetic construct
  source 1..75: mol_type = other DNA
gtctgaaatatattacagccgcatgaccggtctgaatgaatcatcagaaatatcagaggaaacttataatgaaag

SEQ ID NO: 126910 - DNA, 75 bp, synthetic construct
  source 1..75: mol_type = other DNA
cggcccaatgctgccggagctgcttggtggttcagcggatctggctcccagcaacctcaccatctggaaaggttc

SEQ ID NO: 126911 - DNA, 75 bp, synthetic construct
  source 1..75: mol_type = other DNA
ttatacgaaggtgacgctacctacagagctgccattgacaaagcgttaaatccggtaggcctgaaagacatgttt

SEQ ID NO: 126912 - DNA, 75 bp, synthetic construct
  source 1..75: mol_type = other DNA
atcccgccagccctgtagaaattgtcgtttcgctgtgtcttaccttttctgtttctgttgtgtttttggtggggg

SEQ ID NO: 126913 - DNA, 75 bp, synthetic construct
  source 1..75: mol_type = other DNA
ttttctctgaaatgtatttttctggtggttttttagaatgttatagcagttctaatttataccttttatctgtat

SEQ ID NO: 126914 - DNA, 75 bp, synthetic construct
  source 1..75: mol_type = other DNA
tgacaatcacaaatatgacaacacccttattaatggaagtatattatcgaaattctctgtttcgccgaacactcc

SEQ ID NO: 126915 - DNA, 75 bp, synthetic construct
  source 1..75: mol_type = other DNA
atttttttgcctattatcttgcagcaagaaaaagacgagtgagtcttttttttactattcttttatactctatca

SEQ ID NO: 126916 - DNA, 75 bp, synthetic construct
  source 1..75: mol_type = other DNA
atgtttaatcaaaatatcagtctgatatccgatagtttaggtctgttttttatgccaatattattcggttataac

SEQ ID NO: 126917 - DNA, 75 bp, synthetic construct
  source 1..75: mol_type = other DNA
ttcccaaatgcagaaatggaaacgccagacctgtcaattatacagtctgattactcaaggcttaatgtaggtgat

SEQ ID NO: 126918 - DNA, 75 bp, synthetic construct
  source 1..75: mol_type = other DNA
ataactatacggatattattgcaatctccattaagaaagataaagatgtcattttaaatgaagtgctatctatta

SEQ ID NO: 126919 - DNA, 75 bp, synthetic construct
  source 1..75: mol_type = other DNA
ttggctgattgtggctttatctaccttattagcggcgctggcgacattcccactggcgcgcggtttgctggctcc

SEQ ID NO: 126920 - DNA, 75 bp, synthetic construct
  source 1..75: mol_type = other DNA
tggttgatcaaaacaacaaagtgctggttggcccgcgagcaccggttccacccgacggcacacggcggcccatta

SEQ ID NO: 126921 - DNA, 75 bp, synthetic construct
  source 1..75: mol_type = other DNA
caaaccggggcccggtatgccgccacacggctggcgtactcagttctgggtggttgatcaaaacaacaaagtgct

SEQ ID NO: 126922 - DNA, 75 bp, synthetic construct
  source 1..75: mol_type = other DNA
atgatgcgccagctggcgcaggaactgcgccggacacagcagcagaacatcaggatgcagcgcaatccagatggc

SEQ ID NO: 126923 - DNA, 75 bp, synthetic construct
  source 1..75: mol_type = other DNA
agcagttatgagccgcgacgggcaacagcacgcagtaaaaaaggccgcatcaaacgccagatgtttgcaaagctg

SEQ ID NO: 126924 - DNA, 75 bp, synthetic construct
  source 1..75: mol_type = other DNA
ttggctgattgtcggcctggcaacattactggcggccttcgccacgtttctgctggcgcgcggtttgctggctcc

SEQ ID NO: 126925 - DNA, 75 bp, synthetic construct
  source 1..75: mol_type = other DNA
tctaaagtgagtattcttgagccttataaaccgtatttaatcaaacgtgtaaatgccgccgatccagaatggata

SEQ ID NO: 126926 - DNA, 75 bp, synthetic construct
  source 1..75: mol_type = other DNA
caatccaaatacttcatcaacaaggtcaatctattaaggcaattagccgcgaactcggtatttctagaaatactg

SEQ ID NO: 126927 - DNA, 75 bp, synthetic construct
  source 1..75: mol_type = other DNA
gcgatagcggaacgcacgctggcggcgcagtttaaccaaccggaccatgagattgtcgatcacttcacttatgtg

SEQ ID NO: 126928 - DNA, 75 bp, synthetic construct
  source 1..75: mol_type = other DNA
ctgcaaatgctcggagatgcacttggcgagcagtacgcccagcacggtaactggcgctttctgcgtaataacgat

SEQ ID NO: 126929 - DNA, 75 bp, synthetic construct
  source 1..75: mol_type = other DNA
aaacggtgcgcctgacctttgccgacagcgcgccgggcgtcagtgacgatcagctacaaaaattgtttgaacgtt

SEQ ID NO: 126930 - DNA, 75 bp, synthetic construct
  source 1..75: mol_type = other DNA
cccatcatcactcatacctcatgagagtgttcaacaccccttatcaatctatgatgaattactggaggtttctta

SEQ ID NO: 126931 - DNA, 75 bp, synthetic construct
  source 1..75: mol_type = other DNA
ccggggttgatatctgcagatgcgccgctggagttggtttcccgcgtcagtgatgtcaccgtgcaggaggcaata

SEQ ID NO: 126932 - DNA, 75 bp, synthetic construct
  source 1..75: mol_type = other DNA
atgagcgcttacccgatttttgatcgtattgaagaaatggcatgggctcgccactaccagcagatcgttcgtgaa

SEQ ID NO: 126933 - DNA, 75 bp, synthetic construct
  source 1..75: mol_type = other DNA
cagatgatctatcagctgaggacatcaaggcgattattaccgctgcacaaacatcacgccgattctcataccgag

SEQ ID NO: 126934 - DNA, 75 bp, synthetic construct
  source 1..75: mol_type = other DNA
acaacctgaccatccggttattaaagggttctctgaatatccttttttcctaggttataaccgggcgatcgctaa

SEQ ID NO: 126935 - DNA, 75 bp, synthetic construct
  source 1..75: mol_type = other DNA
aaccaagtatgtcgaagatgataccgagtgcgcacgaagaacgattatatccacgagtccaaactccaggaccaa

SEQ ID NO: 126936 - DNA, 75 bp, synthetic construct
  source 1..75: mol_type = other DNA
atgaacgcttattacatccaggatcggattgaggcccagagctgggcgcgtcactaccagcagatcgcccgtgaa

SEQ ID NO: 126937 - DNA, 75 bp, synthetic construct
  source 1..75: mol_type = other DNA
cgcatgttcttttgtatgcatggctatgccataaaaatatagagatgataaatatagatgatatattttatgact

SEQ ID NO: 126938 - DNA, 75 bp, synthetic construct
  source 1..75: mol_type = other DNA
ctgctgaacctgcaaacttacttcaccgctggggtgaaagaagtgcgtgcatggaccattccggttggagcaacc

SEQ ID NO: 126939 - DNA, 75 bp, synthetic construct
  source 1..75: mol_type = other DNA
ttccggtttgtgctgctgttgaagcagacattgccgaactggacgacgaagaacgtgacgagtttatgcaggaac

SEQ ID NO: 126940 - DNA, 75 bp, synthetic construct
  source 1..75: mol_type = other DNA
acgaagacggttttgaaaacaacccgtatcttgaccaggtgcgtgagattgcggcgaaagaaggctctatcgtgg

SEQ ID NO: 126941 - DNA, 75 bp, synthetic construct
  source 1..75: mol_type = other DNA
ataccaaaagcaaaacgtttaaaaccgaaaatggtgcccgtcgctggctggaaagaaactcaggtgagtgatatg

SEQ ID NO: 126942 - DNA, 75 bp, synthetic construct
  source 1..75: mol_type = other DNA
gaccggatgtgggtctgtgactgggttgccccttttggacataccccggatatgagttgtcttgtccggcaggat

SEQ ID NO: 126943 - DNA, 75 bp, synthetic construct
  source 1..75: mol_type = other DNA
atgaatgcctggcttatccccgatcgcattgaagagctgtcatgggcacgacactaccggaaaattgcccgtgaa

SEQ ID NO: 126944 - DNA, 75 bp, synthetic construct
  source 1..75: mol_type = other DNA
gtagtaatactttcctgctacaaaatgatactttttatcagcttcgcataaaaccaaacgctctcgaactgatta

SEQ ID NO: 126945 - DNA, 75 bp, synthetic construct
  source 1..75: mol_type = other DNA
aaaattcgctttgaattcaataggataaatgcgggttttattaaggagctagaggagttcataaaagaaaattaa

SEQ ID NO: 126946 - DNA, 75 bp, synthetic construct
  source 1..75: mol_type = other DNA
actgacgcccgcacggctgaaaggcattgccgacgatgtgcgccaggtgtgcaatctcgccgatccggtggggca

SEQ ID NO: 126947 - DNA, 75 bp, synthetic construct
  source 1..75: mol_type = other DNA
caaatggcggaaagcggcgtgacattacacgcagatgtagctgcgctggcgcagttgcaggcaggccccgcgaag

SEQ ID NO: 126948 - DNA, 75 bp, synthetic construct
  source 1..75: mol_type = other DNA
gccgcgaacagtcgacaattccggtgatcactggtggtataggcgtatgccatatttacgttgatgaaagcgcag

SEQ ID NO: 126949 - DNA, 75 bp, synthetic construct
  source 1..75: mol_type = other DNA
gcaacctcgccgatccagtggggcaggtaatcgatggcggcgtactggacagcggcctgcgtcttgagcgtcgtc

SEQ ID NO: 126950 - DNA, 75 bp, synthetic construct
  source 1..75: mol_type = other DNA
catatttacgttgatgaaagtgcagagatcgctgaagccctgaaagtaatcgtcaacgcgaaaactcagcgtccg

SEQ ID NO: 126951 - DNA, 75 bp, synthetic construct
  source 1..75: mol_type = other DNA
agcacatgtaatacggtagaaacgttgctggtaaataaaaacatcgccgatagcttcctgcccgcattaagcaag

SEQ ID NO: 126952 - DNA, 75 bp, synthetic construct
  source 1..75: mol_type = other DNA
ggtggggctggtttgcataaactgtgccgcgaacagtcgacgatcccggtgatcactggtggtataggcgtatgc

SEQ ID NO: 126953 - DNA, 75 bp, synthetic construct
  source 1..75: mol_type = other DNA
gcgaagcgatgcttgaccgtctggcactgacgcccgcacggctgaaaggcattgccgacgatgtacgtcaggtgt

SEQ ID NO: 126954 - DNA, 75 bp, synthetic construct
  source 1..75: mol_type = other DNA
ttatcgtcgatggaatcaagtaccacaaaattggtgatgatcagttctatgctcaggaattattccaacaaaacg

SEQ ID NO: 126955 - DNA, 75 bp, synthetic construct
  source 1..75: mol_type = other DNA
gcgtggcggtaaagaaacctgccgcactaatgctgcaacggtagcggtgattcaggatgctctgaattcctgcgg

SEQ ID NO: 126956 - DNA, 75 bp, synthetic construct
  source 1..75: mol_type = other DNA
gcgtgccgctgggggtgattggcgtgatttatgaagcgcgcccgaacgtgacggttgatgttgcttcactgtgcc

SEQ ID NO: 126957 - DNA, 75 bp, synthetic construct
  source 1..75: mol_type = other DNA
cgtcaacgcgaaaactcagcgtccgagcacatgtaatacggttgaaacgttgctggtgaataaaaacatcgccga

SEQ ID NO: 126958 - DNA, 75 bp, synthetic construct
  source 1..75: mol_type = other DNA
gatgcagagaaagaaatgaaagctatctggtgtgcgaaagataaaaacaaagcgtttgatgatgtgatggcaggt

SEQ ID NO: 126959 - DNA, 75 bp, synthetic construct
  source 1..75: mol_type = other DNA
gatcaccggcggtattggcgtctgccatatttatgttgatgaaagtgcagagatagctgaagccctgaaagtaat

SEQ ID NO: 126960 - DNA, 75 bp, synthetic construct
  source 1..75: mol_type = other DNA
gatttatgaagcgcgcccgaacgtgacggttgatgtcgcttccctgtgcctgaaaaccggtaacgcggtgatcct

SEQ ID NO: 126961 - DNA, 75 bp, synthetic construct
  source 1..75: mol_type = other DNA
cagtatcaaactcgcggcgcgttcgcttatatttctgaccaacaaaaagtgtacgcccgtttcttctggcagcaa

SEQ ID NO: 126962 - DNA, 75 bp, synthetic construct
  source 1..75: mol_type = other DNA
tcaccgatgatggtaaacacatcattcaggggccaatgtatgacgttagcggcgcggcaccgatcaacgtcacca

SEQ ID NO: 126963 - DNA, 75 bp, synthetic construct
  source 1..75: mol_type = other DNA
atgaagaaaggttttatgttgtttactttgttgacggcgttttctggctttgttcaggcggatgacgcggcaata

SEQ ID NO: 126964 - DNA, 75 bp, synthetic construct
  source 1..75: mol_type = other DNA
tgctggtaaataaaaacatcgcagatagcttcctgcccgcattaagcaagcaaatggcggaaagcggcgtgacat

SEQ ID NO: 126965 - DNA, 75 bp, synthetic construct
  source 1..75: mol_type = other DNA
cttaccggcgggtgccgtgcaggcaattgataatcctgaccgtgcgctggtcagtgaaatgctgcgtatggataa

SEQ ID NO: 126966 - DNA, 75 bp, synthetic construct
  source 1..75: mol_type = other DNA
gccggagccgacgccgcagtgctcgccgacatgctcggacgccttgcagaagaagctcgatattatgctgagcga

SEQ ID NO: 126967 - DNA, 75 bp, synthetic construct
  source 1..75: mol_type = other DNA
attgataatcctgatcgcgcgctggtcagtgaaatgttgcgtatggataaatacatcgacatgctgatccctcgt

SEQ ID NO: 126968 - DNA, 75 bp, synthetic construct
  source 1..75: mol_type = other DNA
ccgaacaatgtcggcaggccgtgctggcgatacgacaagacagaatatgtgcgaaagggggcagcgcctcagatc

SEQ ID NO: 126969 - DNA, 75 bp, synthetic construct
  source 1..75: mol_type = other DNA
cgaaaattaccgcgctggattgacatgtgaacgcatttataattcagtcagagattcaagttatctgacagagac

SEQ ID NO: 126970 - DNA, 75 bp, synthetic construct
  source 1..75: mol_type = other DNA
tatttaatggaagattataacttatggttaagaatattggcagccggctatgaaacttataatatgaataagatt

SEQ ID NO: 126971 - DNA, 75 bp, synthetic construct
  source 1..75: mol_type = other DNA
tggtggagtaccccattggtcatgctcgccgccgtcaggatggcattccgaaactggtcgataaattcaaaatca

SEQ ID NO: 126972 - DNA, 75 bp, synthetic construct
  source 1..75: mol_type = other DNA
aactgctggggccaattgtccccggcaccgtcgtacctaacggcgtgcgcgtccccggaactcagttccagctcg

SEQ ID NO: 126973 - DNA, 75 bp, synthetic construct
  source 1..75: mol_type = other DNA
tcgccctggcgcgactggtactcgtttagtgatgatggcacggcgctcgactggctgggctatgccagcttgccg

SEQ ID NO: 126974 - DNA, 75 bp, synthetic construct
  source 1..75: mol_type = other DNA
tgcccccatttgttaaacaaagcaaagatcaactgctcattacactgtggctgacgggcgaagacccaccgcagc

SEQ ID NO: 126975 - DNA, 75 bp, synthetic construct
  source 1..75: mol_type = other DNA
ggtagcgggctgggtggctgaaaaccagaccgcgctgctctacctgatgacccgcgagcagcgggcggtcaggca

SEQ ID NO: 126976 - DNA, 75 bp, synthetic construct
  source 1..75: mol_type = other DNA
agtggggccatccttccgacaacctcggcggtattctggcaacggcagactggctttcacgcaacgcggtcgcca

SEQ ID NO: 126977 - DNA, 75 bp, synthetic construct
  source 1..75: mol_type = other DNA
cgcggttgagtattccgcctcgcgataaaagcgttgtggcagtccctcgcccagcgattgatgaaaactgcgcac

SEQ ID NO: 126978 - DNA, 75 bp, synthetic construct
  source 1..75: mol_type = other DNA
cactaacggtagcgtgtcaagcgttgaagcagtgccggagccggacgaacccgaagaaatgtggacggtgaaacg

SEQ ID NO: 126979 - DNA, 75 bp, synthetic construct
  source 1..75: mol_type = other DNA
ttctggaggtttctctcgacagagctcgcctggaacagatgccggtcaatgagtatctcgacctgtacgtcattt

SEQ ID NO: 126980 - DNA, 75 bp, synthetic construct
  source 1..75: mol_type = other DNA
ggcgcttaacggcggcagattacgaagacaacgttgcgcaagataaacgcatcgacgccctgcgcgagaagatca

SEQ ID NO: 126981 - DNA, 75 bp, synthetic construct
  source 1..75: mol_type = other DNA
ttgagttcaccgacggtacgcgatttgaagaagtggtggtggagtacccaattggtcatgctcgccgccgtcagg

SEQ ID NO: 126982 - DNA, 75 bp, synthetic construct
  source 1..75: mol_type = other DNA
tggactacccaacacgatctgatcgcatatgcgaaccaggctgacgaaactcgtttgctgtccacggctcgcact

SEQ ID NO: 126983 - DNA, 75 bp, synthetic construct
  source 1..75: mol_type = other DNA
ttggaaaacttcaagacttacttattttacaaagaggatttgatcttccttctacccaaagaaatatcggtttac

SEQ ID NO: 126984 - DNA, 75 bp, synthetic construct
  source 1..75: mol_type = other DNA
ctggaacaaatgtcccaaaccctgttcaaatcctggtttgtggattttgatccggtggttgataacgctctggat

SEQ ID NO: 126985 - DNA, 75 bp, synthetic construct
  source 1..75: mol_type = other DNA
cagtaagctggttgtgacgccactcggtagcctggcgttccagtatgccgaaggcggtgatgctgccaacttact

SEQ ID NO: 126986 - DNA, 75 bp, synthetic construct
  source 1..75: mol_type = other DNA
gggtgtggcgcaggctgctgacgtaacagctcaggctgtagcgacctggtcggcaacagccccaccagtaagctg

SEQ ID NO: 126987 - DNA, 75 bp, synthetic construct
  source 1..75: mol_type = other DNA
gcaatggaagagcgcatcggtcaaatgcgtgcaacccctcgctacctggtaaacggcattctttcaactcgtgag

SEQ ID NO: 126988 - DNA, 75 bp, synthetic construct
  source 1..75: mol_type = other DNA
gcgcaatggcaacgtaaagaaggtcacgggcaactggcggatggcattttgacattgcctgcgatatcggcgacg

SEQ ID NO: 126989 - DNA, 75 bp, synthetic construct
  source 1..75: mol_type = other DNA
atgcataaacagcgcagtcagccgcagcctggcgtaacggcatggcgagcagtgattgctctctcttgcgggcag

SEQ ID NO: 126990 - DNA, 75 bp, synthetic construct
  source 1..75: mol_type = other DNA
cggtgcccccatttgttaaacaaagcaaagataaactgctcattacactgtggctgatgggcgaagagtcgccgc

SEQ ID NO: 126991 - DNA, 75 bp, synthetic construct
  source 1..75: mol_type = other DNA
gcgaaagaaacccagccggaagcgtatattgtcggcgaacattttggcgatgcacggcaatggttacaggccgat

SEQ ID NO: 126992 - DNA, 75 bp, synthetic construct
  source 1..75: mol_type = other DNA
tcgccacgtcgatccgcagtttggcggcgacggggcgttgctgcgtttgaggcacaatacgcagcaacagggaat

SEQ ID NO: 126993 - DNA, 75 bp, synthetic construct
  source 1..75: mol_type = other DNA
agtggtctggcagtccacggtatgcaggtttactacgtcaaatagcatccaagtctgcgatattacaagattttg

SEQ ID NO: 126994 - DNA, 75 bp, synthetic construct
  source 1..75: mol_type = other DNA
cgctgtgggatcgtattaaatacaaaactacgttccgcgtgaactttgataccagggcattgatcgagaagtgcg

SEQ ID NO: 126995 - DNA, 75 bp, synthetic construct
  source 1..75: mol_type = other DNA
caaggagcttggcgagctactccgcgcactggatgaaaaaattttcccgccgtactacagcgctttaattcgcct

SEQ ID NO: 126996 - DNA, 75 bp, synthetic construct
  source 1..75: mol_type = other DNA
cgtaacgaagctggttgagcagaacaggcatacaggcttattgctcggagaactgaaagggcaatcatctgtatc

SEQ ID NO: 126997 - DNA, 75 bp, synthetic construct
  source 1..75: mol_type = other DNA
aaaacgaaggtcgccatattcaggccaataccggaaagcattttaccgttcgtcacgcagctggtggagcagaac

SEQ ID NO: 126998 - DNA, 75 bp, synthetic construct
  source 1..75: mol_type = other DNA
gtattgaagaaatggcatgggctcgccactaccagcagatcgttcgtgaagaaaaagaaacggaactggcggacg

SEQ ID NO: 126999 - DNA, 75 bp, synthetic construct
  source 1..75: mol_type = other DNA
gttattcggcgacccatgtggaaaagcaccatatgctctacaagctggactctgttgatgcctacgagcaaaaac

SEQ ID NO: 127000 - DNA, 75 bp, synthetic construct
  source 1..75: mol_type = other DNA
tgctgactaacccattgggcagcaccgagctggagctgaatgcgcaaccaggtaacgtgcagttagtggataaca

SEQ ID NO: 127001 - DNA, 75 bp, synthetic construct
  source 1..75: mol_type = other DNA
ctgtggggggtttgtaagcatgttgggagacagcagaacgttagtgatctagactttattaaggagtcggttaga

SEQ ID NO: 127002 - DNA, 75 bp, synthetic construct
  source 1..75: mol_type = other DNA
cgttatatcaccgggggcagcagaccgggttacgggtgatgaatttcagtggtacgcaagtcagtcgtgaagagg

SEQ ID NO: 127003 - DNA, 75 bp, synthetic construct
  source 1..75: mol_type = other DNA
ccgcgcaccagttgccaggaatgcaacgagtctataatcactcccgttatcttgatgcaaaacgtgacgctctta

SEQ ID NO: 127004 - DNA, 75 bp, synthetic construct
  source 1..75: mol_type = other DNA
cctgattgtttttggatgccgtaccactgagctaaggcgctctgaggtgcaggagtgggattttaaagaaatgct

SEQ ID NO: 127005 - DNA, 75 bp, synthetic construct
  source 1..75: mol_type = other DNA
tggataagcacatcatttgccatataggggcaatccctcttgataaatgcgatacaaggcagtggatcgcatgtt

SEQ ID NO: 127006 - DNA, 75 bp, synthetic construct
  source 1..75: mol_type = other DNA
catttgtttgtggataacggttcgctggttgctacgggggccagctccatgtcatgggagtaccgttacaccctg

SEQ ID NO: 127007 - DNA, 75 bp, synthetic construct
  source 1..75: mol_type = other DNA
agctgacggagcgtgtggtggtcagcactgacggcagtgtgtcgggcgttgaagcggtagcggaacctgatgaac

SEQ ID NO: 127008 - DNA, 75 bp, synthetic construct
  source 1..75: mol_type = other DNA
aaccaggacagcatgaatgttgatgaactgtgtgaacacctgacgcaaatcgcaaagcaaacctgcgtcgtctgg

SEQ ID NO: 127009 - DNA, 75 bp, synthetic construct
  source 1..75: mol_type = other DNA
gtcatgggagtaccgttacaccctgaacgtggtgattgaggatttcagcggcgaccataatctgctgatggcccc

SEQ ID NO: 127010 - DNA, 75 bp, synthetic construct
  source 1..75: mol_type = other DNA
gtgaacaaaccgcagtccttacgcagcgccctgaataaaacggttgcttatgtccgtgacaacccggacaagctg

SEQ ID NO: 127011 - DNA, 75 bp, synthetic construct
  source 1..75: mol_type = other DNA
cggtgcgtttttatgagcaggtaaaaaatgagaatccggcagtcgaaaccggagcatggaaagacgctgttgact

SEQ ID NO: 127012 - DNA, 75 bp, synthetic construct
  source 1..75: mol_type = other DNA
ggcaaaatgcgtgcagaaggtaaagattacattgtgaaagatggcgatgtgatgaacttccttttcaacgtctaa

SEQ ID NO: 127013 - DNA, 75 bp, synthetic construct
  source 1..75: mol_type = other DNA
ctcgatgatctgaacgtggcggacgttgggaaaaaaccggatataagcgaacgtgtcttaagcaccaaagaactg

SEQ ID NO: 127014 - DNA, 75 bp, synthetic construct
  source 1..75: mol_type = other DNA
gatccgcatgtcgtggagcagcttacaggacaccagatgccagggatgcaacgagtctataatcactcccgttat

SEQ ID NO: 127015 - DNA, 75 bp, synthetic construct
  source 1..75: mol_type = other DNA
ggaatcggttcagatggtgtacggcgatgccagggtcgaggcagttgaatttgtgcccggcgagaacgccggaga

SEQ ID NO: 127016 - DNA, 75 bp, synthetic construct
  source 1..75: mol_type = other DNA
gtaagcacacacactcaagatgagtggatgattgccgtggacttacagtgcggcagcccgtggaatgcggctgcc

SEQ ID NO: 127017 - DNA, 75 bp, synthetic construct
  source 1..75: mol_type = other DNA
tggcggacctcgacacctgcgaacgtgcgattcatcgcgtacagaagaaagccaaaggtggcgataaagacgcga

SEQ ID NO: 127018 - DNA, 75 bp, synthetic construct
  source 1..75: mol_type = other DNA
cgatttttgcgtgggtgatcgccatcattatcatgttggcagggggactcgcgatcctcaaactgccggtggcgc

SEQ ID NO: 127019 - DNA, 75 bp, synthetic construct
  source 1..75: mol_type = other DNA
ttgcattagatgaagtcacattatcacaactaacattaataagttactttaaagtatctacaaaaatcgatagta

SEQ ID NO: 127020 - DNA, 75 bp, synthetic construct
  source 1..75: mol_type = other DNA
ttgatcaaaacataaagtctactgtcgtgggtaagaacaatacgacaattatcacgcaagtcattgttaatgcca

SEQ ID NO: 127021 - DNA, 75 bp, synthetic construct
  source 1..75: mol_type = other DNA
atgacttatgataaaaaagtaacttccggtacaacaagccagaaacaaaacaacattgtcactcaaaaaatatct

SEQ ID NO: 127022 - DNA, 75 bp, synthetic construct
  source 1..75: mol_type = other DNA
caacggtaaaagacgccgccatgcagtggggattctggcatctggggcaatttgccacggattatcagcaactgt

SEQ ID NO: 127023 - DNA, 75 bp, synthetic construct
  source 1..75: mol_type = other DNA
cggatcgggtattacatatgctgcgtagccagtcggcgctggaagtgaaagagcagcataaagccgcgctgtggg

SEQ ID NO: 127024 - DNA, 75 bp, synthetic construct
  source 1..75: mol_type = other DNA
cccccacataagtatctcattagaaaagtcatcctttcagttatatatcatttctatctttaacaaaaaacacaa

SEQ ID NO: 127025 - DNA, 75 bp, synthetic construct
  source 1..75: mol_type = other DNA
caaatctgcaacgctggtatcagcaactcactgaacgccccgcagtgcgcaaagtggtgatgattcccgttagct

SEQ ID NO: 127026 - DNA, 75 bp, synthetic construct
  source 1..75: mol_type = other DNA
gtgggtgcacgaagcagtgtttttaaatcgcttccggcaaatgtggtttgccgggggaatcccgcagtggtgata

SEQ ID NO: 127027 - DNA, 75 bp, synthetic construct
  source 1..75: mol_type = other DNA
taccactacacttgatcaccagacgttgctcacttgcgcggcagaatgcattaccgaagagggatttttctgcgt

SEQ ID NO: 127028 - DNA, 75 bp, synthetic construct
  source 1..75: mol_type = other DNA
cttttttatcggctattcatcaccagatcattgaaaaccaactggatacagaaacaataactattagttatgaat

SEQ ID NO: 127029 - DNA, 75 bp, synthetic construct
  source 1..75: mol_type = other DNA
ttcaggctcatgaaatgaaaatggcagaaagtcgccgtgctgataaagaattacgcaaagcaaagacccggttac

SEQ ID NO: 127030 - DNA, 75 bp, synthetic construct
  source 1..75: mol_type = other DNA
tcggtatttctattcggacacttcagcgctggactaatggcaacgtcatcaccacggaccgaagatccgatactg

SEQ ID NO: 127031 - DNA, 75 bp, synthetic construct
  source 1..75: mol_type = other DNA
atggcgtttttaaagaggaaaaaacagaacaagggcctgtgccatcaatatttgaagagtattctcagtcagagg

SEQ ID NO: 127032 - DNA, 75 bp, synthetic construct
  source 1..75: mol_type = other DNA
tgtcacaactgatgctaaaatatattatgatgacgaaaaccaaagcctaacatttaataatttgcctgttgaagc

SEQ ID NO: 127033 - DNA, 75 bp, synthetic construct
  source 1..75: mol_type = other DNA
tggaaatgcttcatgcccctatggaactactaaagtcatgctggagcaggttttatcagactatgcgaagtcaga

SEQ ID NO: 127034 - DNA, 75 bp, synthetic construct
  source 1..75: mol_type = other DNA
agttggtcatcacccgaaaaagcaaataagtatctcaattggaaagctaaaagggagttggaaacaatgcttgag

SEQ ID NO: 127035 - DNA, 75 bp, synthetic construct
  source 1..75: mol_type = other DNA
ataagtatctcaattggagtgctaaaagggcgttggaaacaatgcttgaggatgcctggcgctggcaattgaaga

SEQ ID NO: 127036 - DNA, 75 bp, synthetic construct
  source 1..75: mol_type = other DNA
gtaattcatcttgcgagagcattcgaaggattgaattactagctaaaaaaaaagttgttttctatgaattaaaca

SEQ ID NO: 127037 - DNA, 75 bp, synthetic construct
  source 1..75: mol_type = other DNA
gccacttaaaagtaggcgaaaaaggtattttgcagtacatggagcaatacaggatgtattcaagtagcagaaaaa

SEQ ID NO: 127038 - DNA, 75 bp, synthetic construct
  source 1..75: mol_type = other DNA
ttattgggtatggtttactgatggctgtcaccgatacactgattgatgaaacgcctgtggaaaaagcgaataagt

SEQ ID NO: 127039 - DNA, 75 bp, synthetic construct
  source 1..75: mol_type = other DNA
cgtcagccgccgcacgctacaaaacgcatttcacgccattttgggcattggtccgaacgcgtggctgaaacgtat

SEQ ID NO: 127040 - DNA, 75 bp, synthetic construct
  source 1..75: mol_type = other DNA
ctggttatattggttcacataccgttctacaattaattgagggcgggtatgatgttgttgtgcttgataacctga

SEQ ID NO: 127041 - DNA, 75 bp, synthetic construct
  source 1..75: mol_type = other DNA
tttatagccatctggaaagtgagaattatagcggaattttaacagtcactaatcacacccttactacgacctctc

SEQ ID NO: 127042 - DNA, 75 bp, synthetic construct
  source 1..75: mol_type = other DNA
ggcgaacataaacccggtgcacgtttatctggctggtacgattttaacgacaactggcgactcggtactgaactg

SEQ ID NO: 127043 - DNA, 75 bp, synthetic construct
  source 1..75: mol_type = other DNA
gtagccatcgcatctattctattaaacaatagagaaatctcttgtgaatttcatgttttcacagattatatcagt

SEQ ID NO: 127044 - DNA, 75 bp, synthetic construct
  source 1..75: mol_type = other DNA
ggcggtcaggataacagcattccgcaggagagcgtcgaaaccatgcgtcaggcgctacgagcagcgaacgcgaaa

SEQ ID NO: 127045 - DNA, 75 bp, synthetic construct
  source 1..75: mol_type = other DNA
tgtcgccgtctggcgctggaggggtatctggctatcgcaccagaactttacttccgcgaaggcgatccgaatgat

SEQ ID NO: 127046 - DNA, 75 bp, synthetic construct
  source 1..75: mol_type = other DNA
gaaaaacattctcagtttgctactgcatccgcgtcttggtgcggtgatccagcaaatgctggaaatgcccggaca

SEQ ID NO: 127047 - DNA, 75 bp, synthetic construct
  source 1..75: mol_type = other DNA
ttccggaaccacgccgctggctgtattaacaaagttgcgtctacaaatagcggcccagatgttttcccgggaaat

SEQ ID NO: 127048 - DNA, 75 bp, synthetic construct
  source 1..75: mol_type = other DNA
ctataccttgatgcagatattgcttgcaagggtagtattaaagaactcttagattatcaattctctactaatgaa

SEQ ID NO: 127049 - DNA, 75 bp, synthetic construct
  source 1..75: mol_type = other DNA
cggcgcaacagcgcgacccgatggtcatcctgccggtgccggttgacgagccggtgattaaaaacacggcctttt

SEQ ID NO: 127050 - DNA, 75 bp, synthetic construct
  source 1..75: mol_type = other DNA
tcgcccgagctatcatgctgagtcggcgaaagatggctggcagcgtatgctggagtggtttaagcggtatggtgg

SEQ ID NO: 127051 - DNA, 75 bp, synthetic construct
  source 1..75: mol_type = other DNA
ggcggccaggataacagcattccgcaagagagcgtggaaacgatgcgccaggcgctgcgggcagcaaacgcgaaa

SEQ ID NO: 127052 - DNA, 75 bp, synthetic construct
  source 1..75: mol_type = other DNA
caccattgatgacctatggcgggatatgcgctggtcggtctcgcgtctgcaggacaagccgcgctgcatcgtggg

SEQ ID NO: 127053 - DNA, 75 bp, synthetic construct
  source 1..75: mol_type = other DNA
aggaggctcctgtatccggtgagggtacggtggtcatcccgcaaccggcaggcgacgagccggtgattaaaaaca

SEQ ID NO: 127054 - DNA, 75 bp, synthetic construct
  source 1..75: mol_type = other DNA
cgcgtcgctttatgagcgttatcgcggcgtggatgccagtgcgaaaggcgacaagaaggctgacagcattgacag

SEQ ID NO: 127055 - DNA, 75 bp, synthetic construct
  source 1..75: mol_type = other DNA
gattttggcgtggtggcgttgttcggtaacgatgatttccgtaccctgccgttttatctctaccagcaaattggc

SEQ ID NO: 127056 - DNA, 75 bp, synthetic construct
  source 1..75: mol_type = other DNA
gcgcttatctttatgctctgtttcgccagcttcgccaccgtgctgtcgctgggcggcggtccgcaggcgaccact

SEQ ID NO: 127057 - DNA, 75 bp, synthetic construct
  source 1..75: mol_type = other DNA
gggcattgaaggctggtcgcgcttaaaagtggtggaactgcgcgccctgaaacgcccactggcgcaggcgctggc

SEQ ID NO: 127058 - DNA, 75 bp, synthetic construct
  source 1..75: mol_type = other DNA
ttcgatactggtgcctgatacttcaaccgcttctggtggtgggttacttgtttatctttataacagtaatgcagg

SEQ ID NO: 127059 - DNA, 75 bp, synthetic construct
  source 1..75: mol_type = other DNA
cgtcgacatgaactgcccctatagcctgggaacaatgaaagttacaataacatcaaatggtcagacaggtaattc

SEQ ID NO: 127060 - DNA, 75 bp, synthetic construct
  source 1..75: mol_type = other DNA
gctgctctctgtcgtgcccgcgatattccttgcccgcgccctctaccgcaggcgctttccggggcggctggcgct

SEQ ID NO: 127061 - DNA, 75 bp, synthetic construct
  source 1..75: mol_type = other DNA
gccacgaaacttatccaggagagaggggtatgatattgaggtaatacaaaaaaaacatgatgatacgtattccat

SEQ ID NO: 127062 - DNA, 75 bp, synthetic construct
  source 1..75: mol_type = other DNA
ccgaaaacgggaatatacccaaaaacgggatgttgaatgatcccaaaaacgggatgttgaatgatcccaaaaacg

SEQ ID NO: 127063 - DNA, 75 bp, synthetic construct
  source 1..75: mol_type = other DNA
atgacgtgatagtcaccggactggacgggaagccggaaattttcaccgactacagtgaccacccgttcgcgcatg

SEQ ID NO: 127064 - DNA, 75 bp, synthetic construct
  source 1..75: mol_type = other DNA
acggcgacaaatcccgccggttgctgcgcttatctttatgctctgtttcgccagcttcgccaccgtgctatcgct

SEQ ID NO: 127065 - DNA, 75 bp, synthetic construct
  source 1..75: mol_type = other DNA
cattgcgcccggcaccacgctgctgcaaggctggcgcgacccggacgatcgtctgcatagccgcatttgcgacac

SEQ ID NO: 127066 - DNA, 75 bp, synthetic construct
  source 1..75: mol_type = other DNA
ctggcaggcggatgaaccgaaaaacgacggcggcgaaatttcgctggtactgatggcaaaacaaagcaaacgcat

SEQ ID NO: 127067 - DNA, 75 bp, synthetic construct
  source 1..75: mol_type = other DNA
tgcggtatctgttaatcgggctggctccggaagggaaaataggagtgtggctggagaaacctgacaagcccaata

SEQ ID NO: 127068 - DNA, 75 bp, synthetic construct
  source 1..75: mol_type = other DNA
tgtggtacagcgaaatcagtgaatacctcatcagcaggggtaaaacgttcgccactccagcttgggtaaaagatg

SEQ ID NO: 127069 - DNA, 75 bp, synthetic construct
  source 1..75: mol_type = other DNA
aattgcatcgcggcaacttcaccgctatcggccagcagatccagccttatctggaggaaggcaaatgctttcgca

SEQ ID NO: 127070 - DNA, 75 bp, synthetic construct
  source 1..75: mol_type = other DNA
ggctgaagaggggattgcgttgcgggcggatcgtcagatggtgtttgatttgccggtcaacctgcgcactaccca

SEQ ID NO: 127071 - DNA, 75 bp, synthetic construct
  source 1..75: mol_type = other DNA
caagccactgacagctatgccggggttaacccgcgatggtgtgctgggaaaatggatctggcagttggcagaaga

SEQ ID NO: 127072 - DNA, 75 bp, synthetic construct
  source 1..75: mol_type = other DNA
cgtcacctcattagcgccgctggccgtaaataccagagcgctgcctgcgtggcgatcattgagcaattacgacgt

SEQ ID NO: 127073 - DNA, 75 bp, synthetic construct
  source 1..75: mol_type = other DNA
caggttatataggttctcatactgtactggaactattaagtcgtggtgatgacgttgttgtaatcgataatcttg

SEQ ID NO: 127074 - DNA, 75 bp, synthetic construct
  source 1..75: mol_type = other DNA
agcttcattgggaagcaaagcgtacacttgaggatatgattactgatgcttggagatggcaaaataaaaatccga

SEQ ID NO: 127075 - DNA, 75 bp, synthetic construct
  source 1..75: mol_type = other DNA
aggtggagcattaaccaacgctataaacggagatgatcctcttactggggcgattacaaatggagcgggggccgg

SEQ ID NO: 127076 - DNA, 75 bp, synthetic construct
  source 1..75: mol_type = other DNA
atgaagctgatcctgcctttcccgcccagcgtgaactcgtactggcgacaccccaacaagggggaatttgctggt

SEQ ID NO: 127077 - DNA, 75 bp, synthetic construct
  source 1..75: mol_type = other DNA
gtgaacctcccacaagacggcatcaaacttcatcgcggtaacttcaccgctatcggtcagcagctccagccttat

SEQ ID NO: 127078 - DNA, 75 bp, synthetic construct
  source 1..75: mol_type = other DNA
tgggcgatgaacatcggctgtcacctgaccatcccttccgactcccaataccagaaattgagggaggcccaagat

SEQ ID NO: 127079 - DNA, 75 bp, synthetic construct
  source 1..75: mol_type = other DNA
atgaagctgatcttgcctttcccgcccagcgtgaacacgtactggcgacaccccaacaaaggggcgtttgtaggt

SEQ ID NO: 127080 - DNA, 75 bp, synthetic construct
  source 1..75: mol_type = other DNA
atggcaatcgaatgggggcctgtagtaaagcctggaagggtagagataacgatcagccgatttgaaaccgtggcg

SEQ ID NO: 127081 - DNA, 75 bp, synthetic construct
  source 1..75: mol_type = other DNA
caggtgaaaagaatgctggtggagtggggaccggttatcccggaagggaaggtcgagatcactatcagtaagtac

SEQ ID NO: 127082 - DNA, 75 bp, synthetic construct
  source 1..75: mol_type = other DNA
aagtgcaggagtgtgctgcgtggtggattttggagagacaaagtaaactaacaaagttaatgtcagaaacaatgt

SEQ ID NO: 127083 - DNA, 75 bp, synthetic construct
  source 1..75: mol_type = other DNA
atatctgtatcttcacgattaagaacaaaccggcgcatattcgggaacgattcaacctgaactcagggcgaatgt

SEQ ID NO: 127084 - DNA, 75 bp, synthetic construct
  source 1..75: mol_type = other DNA
atgaagctgattctgccttttccacccagcgtgaacacctactggcgacaccccaacaaaggggcattcgctggt

SEQ ID NO: 127085 - DNA, 75 bp, synthetic construct
  source 1..75: mol_type = other DNA
ggaggacgacagccaggtaaagcgcatgctggtggagtgggggccagtggtgccgaaaggaaaggttgaaataac

SEQ ID NO: 127086 - DNA, 75 bp, synthetic construct
  source 1..75: mol_type = other DNA
gattcagtagcgcgttttatggtgaagagattagcgagacactgttcctgcaagtgcttgatgattccagccatc

SEQ ID NO: 127087 - DNA, 75 bp, synthetic construct
  source 1..75: mol_type = other DNA
ttatcgataatacgattcgccagagtgcttattgcttccctcggttaacggaactggatgtgctgacttcagcgt

SEQ ID NO: 127088 - DNA, 75 bp, synthetic construct
  source 1..75: mol_type = other DNA
atgaagctgatcgtgcctttccctcccagcgtgaacacgtactggcgacaccccaacaaaggggggtttgctggt

SEQ ID NO: 127089 - DNA, 75 bp, synthetic construct
  source 1..75: mol_type = other DNA
atgaagctgatcctgcctttcccccccagcgtgaacacgtactggcgacaccccaacaaaggggtgtttgctggt

SEQ ID NO: 127090 - DNA, 75 bp, synthetic construct
  source 1..75: mol_type = other DNA
atgaagctgatcttgcctttcccccccagcgtgaacacgtactggcgacaccccaacaaaggggcgtttgctggt

SEQ ID NO: 127091 - DNA, 75 bp, synthetic construct
  source 1..75: mol_type = other DNA
atgattacgctgtggggtcggaataattcaaccaacgttaaaaaagtgttgctaacactcgaagaactggaactg

SEQ ID NO: 127092 - DNA, 75 bp, synthetic construct
  source 1..75: mol_type = other DNA
cactggacgagagctgtgatattggtagaacaactaacccatatgggacctctaaatatcttgttgaacgaattc

SEQ ID NO: 127093 - DNA, 75 bp, synthetic construct
  source 1..75: mol_type = other DNA
tcgtcaccagagttagctaaaaaagaacttcattgggaagctaagcgtagtcttgaggatatggttattgatgct

SEQ ID NO: 127094 - DNA, 75 bp, synthetic construct
  source 1..75: mol_type = other DNA
taggttatattggttctcatatcgttgtggatttattaaattcacaattcaaggttgcagttgttgataatttat

SEQ ID NO: 127095 - DNA, 75 bp, synthetic construct
  source 1..75: mol_type = other DNA
gtaaaatggttctctggcgacgagtttggtgtgggcgatatcgctatcgcaccgttcatccaagaagaagtaaat

SEQ ID NO: 127096 - DNA, 75 bp, synthetic construct
  source 1..75: mol_type = other DNA
cccatcgtgggatcctgatgggattagtcagaacgccaccagaagaacgtaatcaggccgccattgatgccagct

SEQ ID NO: 127097 - DNA, 75 bp, synthetic construct
  source 1..75: mol_type = other DNA
ttggttatatcgcttcgcacactattataactttactagaaaaaggtgaagaagttataatacttgataatttat

SEQ ID NO: 127098 - DNA, 75 bp, synthetic construct
  source 1..75: mol_type = other DNA
taccgctcaatgaaaactcccgtacgggcggtaccactaatccatatggcacatccaaatatatggttgaacaga

SEQ ID NO: 127099 - DNA, 75 bp, synthetic construct
  source 1..75: mol_type = other DNA
taagcgttcaaggtggcaattatatatttccattggtcacactgccttatcttgtcaggatccttgaacctacag

SEQ ID NO: 127100 - DNA, 75 bp, synthetic construct
  source 1..75: mol_type = other DNA
atatgggggggattatcctacggttgatggcaccggagttagagattacatacatgttatggacttagcggaagg

SEQ ID NO: 127101 - DNA, 75 bp, synthetic construct
  source 1..75: mol_type = other DNA
ctttggtagcgattatccaacaaaagatggtacaggtgttcgtgattatatccatgtcatggatcttgctgaagg

SEQ ID NO: 127102 - DNA, 75 bp, synthetic construct
  source 1..75: mol_type = other DNA
agatatttcaaccctgtcggtgctcatccatctggtgaaataggggaagatcccaatggtatacctaacaactta

SEQ ID NO: 127103 - DNA, 75 bp, synthetic construct
  source 1..75: mol_type = other DNA
aactaggatggaaagccactcttaatttagaggatatgctgcgcgattcatggaactggcagaaaaataatcctg

SEQ ID NO: 127104 - DNA, 75 bp, synthetic construct
  source 1..75: mol_type = other DNA
ttatggtggcgattatgaaaccattgatggaacaggggtacgcgactttatccatgtagtagatcttgcctcagg

SEQ ID NO: 127105 - DNA, 75 bp, synthetic construct
  source 1..75: mol_type = other DNA
agcatttgctttatcgaaatggatatacttaacacagaattattacacgaagtaattattaataaagatattgat

SEQ ID NO: 127106 - DNA, 75 bp, synthetic construct
  source 1..75: mol_type = other DNA
tccctctaactgaagactgtaagacagagaaacctacaaatccttacggatattcgaaattagtagtggagaata

SEQ ID NO: 127107 - DNA, 75 bp, synthetic construct
  source 1..75: mol_type = other DNA
atcttgggtggaaagcaaaatatgacattcaaaaaatggtttttgatacatggaactggcaacaaaagaatccaa

SEQ ID NO: 127108 - DNA, 75 bp, synthetic construct
  source 1..75: mol_type = other DNA
ttatgggggagattatccaacgcgtgatggttcgggagttagagattatatccatgttatggatttggctgaggg

SEQ ID NO: 127109 - DNA, 75 bp, synthetic construct
  source 1..75: mol_type = other DNA
ccctaccacgagctgggcaaacacaaatgggtggcaatgggtgaagagtacaaactcgacggtgttaaaccacct

SEQ ID NO: 127110 - DNA, 75 bp, synthetic construct
  source 1..75: mol_type = other DNA
gcctgtattgtcataaccgcgacacctgggatacgcatggcggtaaagaagttaccgttgaagatttaatgaaag

SEQ ID NO: 127111 - DNA, 75 bp, synthetic construct
  source 1..75: mol_type = other DNA
tagaagagttacactggaaagccgaaaaagatttaagtgatatgttaaaagatgcttgggcttgggaaatgcgag

SEQ ID NO: 127112 - DNA, 75 bp, synthetic construct
  source 1..75: mol_type = other DNA
tactacaagatatctcatgctctaaccaaaaatttcgtacgactatattaagatattttaatccagtgggagctc

SEQ ID NO: 127113 - DNA, 75 bp, synthetic construct
  source 1..75: mol_type = other DNA
acaaccttggaacaggaattggatactctgtgttggaattattagaagcatttcagaaagttacaactcggagag

SEQ ID NO: 127114 - DNA, 75 bp, synthetic construct
  source 1..75: mol_type = other DNA
caaactcgacggtgtgaaaccaccgaaaaaagaaaccatggagcgcgtaaaagggattcttgagcaatatggtca

SEQ ID NO: 127115 - DNA, 75 bp, synthetic construct
  source 1..75: mol_type = other DNA
aaatcgaattgcgacccatatagattgtaaaagcaaagacagtcagcttactcataccgaattgttcgctgttaa

SEQ ID NO: 127116 - DNA, 75 bp, synthetic construct
  source 1..75: mol_type = other DNA
gctgacgttcttattttcattcataacaaaaataataatatttatatcttcagatgtaaaaaaaaatacaaaaat

SEQ ID NO: 127117 - DNA, 75 bp, synthetic construct
  source 1..75: mol_type = other DNA
ctatgacggtcgtttggttttatcacaatcgtacaggagcgggagtaggaagtttgttataatcaatggcggaca

SEQ ID NO: 127118 - DNA, 75 bp, synthetic construct
  source 1..75: mol_type = other DNA
atattgggctggataaagccgcgtttcttcatgcatccgacatcatgccgcatactgagtgtgtggcgggtgaag

SEQ ID NO: 127119 - DNA, 75 bp, synthetic construct
  source 1..75: mol_type = other DNA
gaagcgacgcaggctatcgctcgccagttacggttgcgtaatctgggcgggattatcattattgatttcatcgat

SEQ ID NO: 127120 - DNA, 75 bp, synthetic construct
  source 1..75: mol_type = other DNA
cccgagatgaccagcaagctggagcattacacaggccgccaaccgattttcgatctctttgatgttgaaaacgaa

SEQ ID NO: 127121 - DNA, 75 bp, synthetic construct
  source 1..75: mol_type = other DNA
acgtgctgtgaaaaatattgccatacagggcaataccatcaccggcgcaatgggcggcagggtcaaaaatccgga

SEQ ID NO: 127122 - DNA, 75 bp, synthetic construct
  source 1..75: mol_type = other DNA
gtgactgacctcgcggtgcttgagcggtggtgcgtggcctatgagttctggcgacgtgctgtgaaaaatattgcc

SEQ ID NO: 127123 - DNA, 75 bp, synthetic construct
  source 1..75: mol_type = other DNA
agccgccagcgtctgattggcctggcggggcagaagaaagccactaacccgtttctgaaaatcatcgaatcatga

SEQ ID NO: 127124 - DNA, 75 bp, synthetic construct
  source 1..75: mol_type = other DNA
aatagagataaacgtgggcagtggtttggcctgagtgcaactatttttacagtagcttgtgcaacattattaggt

SEQ ID NO: 127125 - DNA, 75 bp, synthetic construct
  source 1..75: mol_type = other DNA
ggtgcgtggcctatgagttctggcgacgtgccgtgaaaaatattgccagccatggcaacaccattaccggtgcaa

SEQ ID NO: 127126 - DNA, 75 bp, synthetic construct
  source 1..75: mol_type = other DNA
ctgtttttacgcccatcaaaggtgttgagccaccggagtggttcgcagaagaagatctccctctcgccacgatca

SEQ ID NO: 127127 - DNA, 75 bp, synthetic construct
  source 1..75: mol_type = other DNA
gtggcgcaggaaggggagtcggagaaatattccctgaccctgaaattgtttgaactgggcgctcgcgcgttacaa

SEQ ID NO: 127128 - DNA, 75 bp, synthetic construct
  source 1..75: mol_type = other DNA
tacaaaacgttgatctcatccgtagtgcagatatccagatgcgtgaaatctcgcgcctcactaaagaaactatcc

SEQ ID NO: 127129 - DNA, 75 bp, synthetic construct
  source 1..75: mol_type = other DNA
acctcggcgcactggacgaagacagtattgtttacatccacaaaattgactctatgtacaatttgcgcatgtatt

SEQ ID NO: 127130 - DNA, 75 bp, synthetic construct
  source 1..75: mol_type = other DNA
tgagcttaccaagacagaaatcttcgcagtcaagcgccaaatttctgagcttcgctcatgccttacagctacaag

SEQ ID NO: 127131 - DNA, 75 bp, synthetic construct
  source 1..75: mol_type = other DNA
taaccgagttgtcgcagcgcgtcatgatgtcaaaaagcaccgtttatcgctttttacagaccatgaaaaccttag

SEQ ID NO: 127132 - DNA, 75 bp, synthetic construct
  source 1..75: mol_type = other DNA
gaccctgaaattgtttgaactgggcgctcgcgcgttacaaaacgtcgatttaattcgtagcgcagatatccagat

SEQ ID NO: 127133 - DNA, 75 bp, synthetic construct
  source 1..75: mol_type = other DNA
cttcgcttagcgtccctggataagcttcctttgtccgttcctgccatcaacatagaagcctggaaatctctgagc

SEQ ID NO: 127134 - DNA, 75 bp, synthetic construct
  source 1..75: mol_type = other DNA
ccaacgtatcgaaagcgaatccgaacgtgaacgcctgaaaaaagtggtcgcagagtattgcgacgagcagggcgg

SEQ ID NO: 127135 - DNA, 75 bp, synthetic construct
  source 1..75: mol_type = other DNA
ccatctcgctatctggtttttatgccaggtgcttctcatgttggggtttcccaacgtatcgaaagcgaatccgaa

SEQ ID NO: 127136 - DNA, 75 bp, synthetic construct
  source 1..75: mol_type = other DNA
aagagcaaagatagccagcttactcatacagagcttttcgcagtgaagcgactactcgtagagcttcgcaataac

SEQ ID NO: 127137 - DNA, 75 bp, synthetic construct
  source 1..75: mol_type = other DNA
attgcgtcagtgtcagattaaatgatgaagagctaacgcttctcaatgagaaacgaggtcgtcatcgtaaaggcg

SEQ ID NO: 127138 - DNA, 75 bp, synthetic construct
  source 1..75: mol_type = other DNA
ttcgcatgaatcttgtcagtgcaaatctatggggagagaaaatgaatgaaggggatgcagaagataaagcgaggt

SEQ ID NO: 127139 - DNA, 75 bp, synthetic construct
  source 1..75: mol_type = other DNA
tggcgcggcgacacgattagggatgaagcgcaccacgctgctgtcacgaatgcagcgtctgggaatctcggttcg

SEQ ID NO: 127140 - DNA, 75 bp, synthetic construct
  source 1..75: mol_type = other DNA
gagccggaaagggcggactgcagattgtgctgggggcggcagccatcgtgggctctttcttcacggccggagcat

SEQ ID NO: 127141 - DNA, 75 bp, synthetic construct
  source 1..75: mol_type = other DNA
gtgaacacggcagcggaagccatccgtgccctgtcgatgcagatgccgggctttcgccgtcagatgaacgaaggc

SEQ ID NO: 127142 - DNA, 75 bp, synthetic construct
  source 1..75: mol_type = other DNA
cgctaaaactgaacagtcgggcgccggacgttggcgcggcacaggcaaaggccaacgccgcgctcgacagccaca

SEQ ID NO: 127143 - DNA, 75 bp, synthetic construct
  source 1..75: mol_type = other DNA
gtggctgattgataaatcgactcacagttttgtgcgcagcggctataccactgaaatcgacgtgtcacgcgggcc

SEQ ID NO: 127144 - DNA, 75 bp, synthetic construct
  source 1..75: mol_type = other DNA
agctgctcgattgtggtcagtatattattgataaaattgatatttcatcgccaccttctacggtaaatattgatg

SEQ ID NO: 127145 - DNA, 75 bp, synthetic construct
  source 1..75: mol_type = other DNA
ggcgtattttcgtattgcaccggaagactggctgcgggcagagatgcagggggagattgtggcactggtccacag

SEQ ID NO: 127146 - DNA, 75 bp, synthetic construct
  source 1..75: mol_type = other DNA
gggtacagccctgagtgccggtggtttttctgccaccacgatgctgttttcactgggggccagcatgatactggg

SEQ ID NO: 127147 - DNA, 75 bp, synthetic construct
  source 1..75: mol_type = other DNA
gtatttttcctcactggacaacatgattgcccagggtaacccgatgccggtgccttacggggaaatgctggttgg

SEQ ID NO: 127148 - DNA, 75 bp, synthetic construct
  source 1..75: mol_type = other DNA
ctctatctggataatctggaggccacagggctgtatcaggtgccgttgtcatcagcacaaccgggcgatgtgctg

SEQ ID NO: 127149 - DNA, 75 bp, synthetic construct
  source 1..75: mol_type = other DNA
gacgagatcgaagtgagttcgcccgcttccgttgtttctatccgtggggtggccacctcggttaatagtgctctg

SEQ ID NO: 127150 - DNA, 75 bp, synthetic construct
  source 1..75: mol_type = other DNA
agaacaccacgctggcagctgttgcggggcggattgccagaaagcaccggctgaaactggtgggcagcattgagt

SEQ ID NO: 127151 - DNA, 75 bp, synthetic construct
  source 1..75: mol_type = other DNA
gccaacggcgcgcaaggcgctggccggaaaccccggcaagcgagccctgaataaagatgaacctgtttttacgcc

SEQ ID NO: 127152 - DNA, 75 bp, synthetic construct
  source 1..75: mol_type = other DNA
atggctgagataaacagtactgcgcaagacgtatcagcgttaaccggcgtcagcgatgtgctgacgccggtgttc

SEQ ID NO: 127153 - DNA, 75 bp, synthetic construct
  source 1..75: mol_type = other DNA
cttccgttgtttctatccgtggcgtggccacctcggttaacagtgccctgcggactaaaaccagtcgtggtttcg

SEQ ID NO: 127154 - DNA, 75 bp, synthetic construct
  source 1..75: mol_type = other DNA
ccagctggttttttctcatctggccacgctgcgcggtcaggagccagttaagcagcttaagccgcaggatgtggc

SEQ ID NO: 127155 - DNA, 75 bp, synthetic construct
  source 1..75: mol_type = other DNA
aagtcacatcagcgttaaccggcgtcagcgatgtgctaacaccggtgttcactttgtggtatctgcagaaaaaca

SEQ ID NO: 127156 - DNA, 75 bp, synthetic construct
  source 1..75: mol_type = other DNA
ctcaactgacagcaggcaacaaaattgaactggtgggctttggacagttatccggtccatggctgataatcactg

SEQ ID NO: 127157 - DNA, 75 bp, synthetic construct
  source 1..75: mol_type = other DNA
ctcaactgactgcaggcaacaaaattgaactggtgggttttggacagttatccgggccatggctgataaccactg

SEQ ID NO: 127158 - DNA, 75 bp, synthetic construct
  source 1..75: mol_type = other DNA
agcaatactgaacctaatcccctttgcagctttcatcatgagttagatgatgcttcacttagcggccacatgatg

SEQ ID NO: 127159 - DNA, 75 bp, synthetic construct
  source 1..75: mol_type = other DNA
aaaagcagatcttgatatgtgattttaaaggttcggtatctccagaaattaaccaatgccgaccagtgttgattt

SEQ ID NO: 127160 - DNA, 75 bp, synthetic construct
  source 1..75: mol_type = other DNA
gctgtcctgcggtacgttctctatagacgagatcgaagtgagttcgcccgcttccgttgtttctatccgtggggt

SEQ ID NO: 127161 - DNA, 75 bp, synthetic construct
  source 1..75: mol_type = other DNA
gagataagtattgatgcagtggtaagccggataccggaggcagtgtatgttctgacgcaggacgatgatacgcca

SEQ ID NO: 127162 - DNA, 75 bp, synthetic construct
  source 1..75: mol_type = other DNA
atgctgaaaagtgaaccgtcattcgcatctctgctcgttaagcaaagccccggcatgcactacggccacggctgg

SEQ ID NO: 127163 - DNA, 75 bp, synthetic construct
  source 1..75: mol_type = other DNA
gacgggggaagcggcgcagcgtgctggcgctggtctagtccgagtactgacccgcagtgaaaacattgcgccgct

SEQ ID NO: 127164 - DNA, 75 bp, synthetic construct
  source 1..75: mol_type = other DNA
ccgcaggatcgggaaatcagcgaagtcttgctacaattacctgaattacaaaatattgcggcaaacgtgcgctga

SEQ ID NO: 127165 - DNA, 75 bp, synthetic construct
  source 1..75: mol_type = other DNA
gagaccggatgctggcgcaatcctggaaacaatccgttgtgttccaggtgcacgtcaggttttgcctgatggtgt

SEQ ID NO: 127166 - DNA, 75 bp, synthetic construct
  source 1..75: mol_type = other DNA
cgcaatcccgtgaggtgcttgatgcacagtatcccgactggcacatgctgagggggaaaccggaatgctttatca

SEQ ID NO: 127167 - DNA, 75 bp, synthetic construct
  source 1..75: mol_type = other DNA
atccagcgggcgctggagcgtaaagttgaactgaaatccggcggttatctgattatcgatcagaccgaagcgatg

SEQ ID NO: 127168 - DNA, 75 bp, synthetic construct
  source 1..75: mol_type = other DNA
ctggaccaaagtgatggaacgtaaaaagcgtccacagacccgttatcaactgtacggcgaactggcgctggcgca

SEQ ID NO: 127169 - DNA, 75 bp, synthetic construct
  source 1..75: mol_type = other DNA
ccaacgcattgaaagtgaatctgaacgtgaacgcctgaaaaaagtggtcgcagagtattgcgacgagcagggcgg

SEQ ID NO: 127170 - DNA, 75 bp, synthetic construct
  source 1..75: mol_type = other DNA
aaagtaagataacacattatactactatcactattgctctcacaggggcagtggtttatctacaaaccattctac

SEQ ID NO: 127171 - DNA, 75 bp, synthetic construct
  source 1..75: mol_type = other DNA
gggagtaaaataatatatttattaactttcaataaaaaatcaaaacgtattttggataaatctaacttccatttt

SEQ ID NO: 127172 - DNA, 75 bp, synthetic construct
  source 1..75: mol_type = other DNA
aaaagcatggccaattaatggcggtattcctagctggacattagcgcgtacccctgacggtacagcagcccgacc

SEQ ID NO: 127173 - DNA, 75 bp, synthetic construct
  source 1..75: mol_type = other DNA
caggctttaaacaactggccgacgtgcctggcgccgaggaaatcgacggcgagaatgtgcgaattttccactacc

SEQ ID NO: 127174 - DNA, 75 bp, synthetic construct
  source 1..75: mol_type = other DNA
ggtggtgatggactggggtgaagcaaaagctgacttcaccgatgcggtcattgataacgcgttcgaaggcggcta

SEQ ID NO: 127175 - DNA, 75 bp, synthetic construct
  source 1..75: mol_type = other DNA
cgccggcgctgaccacgaacgtgcgcacgcgcgcttcttacgccggcgctgaccacgatccatcagccaaaagat

SEQ ID NO: 127176 - DNA, 75 bp, synthetic construct
  source 1..75: mol_type = other DNA
gatcaccggattctgctggggtggacgtatcacctggctgtatgctgcgcataacccgcaactgaaagcggcggt

SEQ ID NO: 127177 - DNA, 75 bp, synthetic construct
  source 1..75: mol_type = other DNA
aacccctggtttttaaaaattgtgcatagtgaaaatcaaagtaaaggtgtgcattatgcaaaggaaggtgcgaat

SEQ ID NO: 127178 - DNA, 75 bp, synthetic construct
  source 1..75: mol_type = other DNA
tggtttcaccgcaggcactggaagccagacgtaaggtcatcaaagagacgatccttagctggcttttggttgacc

SEQ ID NO: 127179 - DNA, 75 bp, synthetic construct
  source 1..75: mol_type = other DNA
ggaaaccctgacggcacgcgaggctgaagttactttttgcgaatgttatcaacgatgcgctattcattacgatgg

SEQ ID NO: 127180 - DNA, 75 bp, synthetic construct
  source 1..75: mol_type = other DNA
gctctggacgctaatcccgcaatggtatcgtgaacactggttactttgctgtcggctattggtcgtcagtgagcg

SEQ ID NO: 127181 - DNA, 75 bp, synthetic construct
  source 1..75: mol_type = other DNA
gggaaattagtgaagtcttgctacaattacctgaattacaaaatattgtaggcaaacgtgcgctagtcttgcgtg

SEQ ID NO: 127182 - DNA, 75 bp, synthetic construct
  source 1..75: mol_type = other DNA
tttgatgcactggcgttgcagtataaaaccagaattaaaatatatctgattaatggtgatcgactgcgctcattg

SEQ ID NO: 127183 - DNA, 75 bp, synthetic construct
  source 1..75: mol_type = other DNA
ttatttgccaggggtcaatagaaccgttaatcaatttctcatttccagatcataaagtcgcaatggttgtggcgg

SEQ ID NO: 127184 - DNA, 75 bp, synthetic construct
  source 1..75: mol_type = other DNA
ttgctgatataaaatacaatacccagtttagcttaaattatcagctcaaagaaagttttaaaaatccagtaacca

SEQ ID NO: 127185 - DNA, 75 bp, synthetic construct
  source 1..75: mol_type = other DNA
cgactcgaaggtgatgcgcgtcgtgtcgccattctgtgtctttctacgggagctcggtggggtgaggcggcggaa

SEQ ID NO: 127186 - DNA, 75 bp, synthetic construct
  source 1..75: mol_type = other DNA
aatgggagatccacgcgccagccagatgacgcgaaaatttatgcttgaatatcggtcagagaaattacaggccgg

SEQ ID NO: 127187 - DNA, 75 bp, synthetic construct
  source 1..75: mol_type = other DNA
ttgtgctggcaacgggcttctttttactgctcaacaacactatcggcctgccacaatctgctgacggcattgtga

SEQ ID NO: 127188 - DNA, 75 bp, synthetic construct
  source 1..75: mol_type = other DNA
aggggaatttctattctttatgtatctccacgagaaatggctttcctgtcccagaaggaagtggcgctattgctc

SEQ ID NO: 127189 - DNA, 75 bp, synthetic construct
  source 1..75: mol_type = other DNA
gatacactggagggcgactactggcgtgttgcgcttttgtgtttaagcacaggggcgcgctggagtgaagcttgt

SEQ ID NO: 127190 - DNA, 75 bp, synthetic construct
  source 1..75: mol_type = other DNA
gaactttgagtgagttgctggacatctggtggaaatatcacgggcaaaaccacgagcatggaacaaaagagttta

SEQ ID NO: 127191 - DNA, 75 bp, synthetic construct
  source 1..75: mol_type = other DNA
ccacctgcatggagcagtttcgcccgaagaccatcccaccgctggcgatccctgaacgtttgaatgcgcattgtg

SEQ ID NO: 127192 - DNA, 75 bp, synthetic construct
  source 1..75: mol_type = other DNA
gagcttcgccagcacctgctaaatgctgacatatggagcaaacccgatgaagggtatgcagaagatcaaaagggg

SEQ ID NO: 127193 - DNA, 75 bp, synthetic construct
  source 1..75: mol_type = other DNA
gatcattgcgaacacactgtgtcagtgtccgtcttaataactcggaacttcaattactcaacacaaaacgaggtt

SEQ ID NO: 127194 - DNA, 75 bp, synthetic construct
  source 1..75: mol_type = other DNA
tttgctggcccatgtgttttttaatctgccgatggcgagccgtttattactccaggcactggaaaacattcccgg

SEQ ID NO: 127195 - DNA, 75 bp, synthetic construct
  source 1..75: mol_type = other DNA
accgctgctgaaaaagatcattcccgatcttaaattcactgccgcttttgggcgtgggcgctacgtttgcccgcg

SEQ ID NO: 127196 - DNA, 75 bp, synthetic construct
  source 1..75: mol_type = other DNA
accggcgttgggaaaacgctctcctatttgatccccggcatcgccattgcccgcgaagagcaaaaaacgctggtg

SEQ ID NO: 127197 - DNA, 75 bp, synthetic construct
  source 1..75: mol_type = other DNA
aacttgattttgagagatttaaaaataatgtcagtaatattattccagtagatgaggaattaagaaaaaattcaa

SEQ ID NO: 127198 - DNA, 75 bp, synthetic construct
  source 1..75: mol_type = other DNA
tcccattgttttactggctactaacggagggagcgccactaatgcagtggatttgcccctatatttccagacatc

SEQ ID NO: 127199 - DNA, 75 bp, synthetic construct
  source 1..75: mol_type = other DNA
taataatgacgttattctcgataaaacagaaaaaacgttaactattcgcgattcagtttttacttataccgagaa

SEQ ID NO: 127200 - DNA, 75 bp, synthetic construct
  source 1..75: mol_type = other DNA
tggcagtgggtgagactcagcaaccgacgaatggggttgatgaaatattacgggatgatggattgcggtttttgc

SEQ ID NO: 127201 - DNA, 75 bp, synthetic construct
  source 1..75: mol_type = other DNA
agaagctacaaattactggttggcagagttgaatggtatgacaatgactgagcatgcctggataaaaatggtaga

SEQ ID NO: 127202 - DNA, 75 bp, synthetic construct
  source 1..75: mol_type = other DNA
atagttgaacctgatacaacatttttagaacttgtttgtgctgctaaacgtaaagaagctgttgaccactgggtg

SEQ ID NO: 127203 - DNA, 75 bp, synthetic construct
  source 1..75: mol_type = other DNA
ctgaccctgagttaataacaggtctgattgcccagcgccttgtaaaaaagctatgttcagaatgtagtttatcgc

SEQ ID NO: 127204 - DNA, 75 bp, synthetic construct
  source 1..75: mol_type = other DNA
tgactgggcatcaggtttggacatcattgcatgcaaatagtgctgtttctatatttgatcgtttaaaagatcagg

SEQ ID NO: 127205 - DNA, 75 bp, synthetic construct
  source 1..75: mol_type = other DNA
aagctagggaagaagccacagcattacccttaaaaatcagggtgaagtttgaccgtctcattagcaaactggagt

SEQ ID NO: 127206 - DNA, 75 bp, synthetic construct
  source 1..75: mol_type = other DNA
cgtgaaagtggatcgcgaagcgcgtcgcctggcgggttaccgttatggtcgccagattgccgatgacttccttac

SEQ ID NO: 127207 - DNA, 75 bp, synthetic construct
  source 1..75: mol_type = other DNA
tatctcctacggtgcctgcggtaacagcggcgggatcttccacgatctctactgcgtgtggggcggtacggataa

SEQ ID NO: 127208 - DNA, 75 bp, synthetic construct
  source 1..75: mol_type = other DNA
tcaaacgttctgcctacgtttaccgcgtggactgcggcggctgcaacggctgcgaaattgaaattttcgctacct

SEQ ID NO: 127209 - DNA, 75 bp, synthetic construct
  source 1..75: mol_type = other DNA
gcgtagtggtatatcaatcactcaactacagaaattacagaaggcatttagagcaactggtattgatgccgaagg

SEQ ID NO: 127210 - DNA, 75 bp, synthetic construct
  source 1..75: mol_type = other DNA
ggggtctgccggtgttcatactcatggtaatggtattcgttggccaggaggcggcggttctgcgttagcatttta

SEQ ID NO: 127211 - DNA, 75 bp, synthetic construct
  source 1..75: mol_type = other DNA
ccatcgtttacatcgcattgattggtggcgctggttacaacgtcggctccccacagcaggcaggcatttcagaac

SEQ ID NO: 127212 - DNA, 75 bp, synthetic construct
  source 1..75: mol_type = other DNA
cggggcagggtggttcaaactggcaacggttaccatgccacaagcgagttccatcgtttacatcgcattgattgg

SEQ ID NO: 127213 - DNA, 75 bp, synthetic construct
  source 1..75: mol_type = other DNA
tgtctgttgtgcataatcaaaactatgcaacatcatctgctggcgcacatacccactcactgtccggcactgctg

SEQ ID NO: 127214 - DNA, 75 bp, synthetic construct
  source 1..75: mol_type = other DNA
acccagtcggcgcaccaatcccgtggccatcagataccgttccgtctggttatgccctgatgcaggggcagactt

SEQ ID NO: 127215 - DNA, 75 bp, synthetic construct
  source 1..75: mol_type = other DNA
gtcacagtgtaaataatggctatatcagcaccagtctgtctcgtctggagcgtatgaatgaaatgataaaggaaa

SEQ ID NO: 127216 - DNA, 75 bp, synthetic construct
  source 1..75: mol_type = other DNA
atgcaagtacgacgaaaaaggggatagtacagctcagcagtgcaaccaacagcacatctgaaacgcttgccgcga

SEQ ID NO: 127217 - DNA, 75 bp, synthetic construct
  source 1..75: mol_type = other DNA
ttgtggcggttgatatcccttccggcctgctggctgaaaccggcgctacgccaggcgcggtaatcaacgccgatc

SEQ ID NO: 127218 - DNA, 75 bp, synthetic construct
  source 1..75: mol_type = other DNA
tggtgctgtgcggtcatggtaataacggcggcgatggctacgtggtcgcgcggctggccacagcggtcggcattg

SEQ ID NO: 127219 - DNA, 75 bp, synthetic construct
  source 1..75: mol_type = other DNA
gccgcgaagaagtcagccagtgatgccagcacatctgccagtgaggcggcaactcatgcaaccgatgctgcaggc

SEQ ID NO: 127220 - DNA, 75 bp, synthetic construct
  source 1..75: mol_type = other DNA
gtgctgcttcctcggcaacggcggcaggcaattccgcgaaggcggcaaagacgtctgagacaaacgccagatctt

SEQ ID NO: 127221 - DNA, 75 bp, synthetic construct
  source 1..75: mol_type = other DNA
gcggggctgggtggttcaaactggctacggttaccatgccacaagcgagttccatcgtttacatcgcattgattg

SEQ ID NO: 127222 - DNA, 75 bp, synthetic construct
  source 1..75: mol_type = other DNA
ttatttcccagccggcgacgcgcagtaatatgcagaagctcgggctggacctgggctggagcagcgatctgatgt

SEQ ID NO: 127223 - DNA, 75 bp, synthetic construct
  source 1..75: mol_type = other DNA
tctgaactgacagatgaacttatggcaaaaatcagaacccacgaatacaatcgctcaatggatgtcatcagctga

SEQ ID NO: 127224 - DNA, 75 bp, synthetic construct
  source 1..75: mol_type = other DNA
ctttgcagtgggtttctgaactaacagatgaactcatggcaaaaatcggaacccacgaatacaaccgctcaatgg

SEQ ID NO: 127225 - DNA, 75 bp, synthetic construct
  source 1..75: mol_type = other DNA
ctgccggcgatggctatccagcgggcgaatcccggcctgtatgaaatgctgaccaacggggtgttgcaggccaat

SEQ ID NO: 127226 - DNA, 75 bp, synthetic construct
  source 1..75: mol_type = other DNA
gtacggatgcgaaggaatgtaccagtggtgactcagaccagcagccgggaacggcggtggccggaacagggtttt

SEQ ID NO: 127227 - DNA, 75 bp, synthetic construct
  source 1..75: mol_type = other DNA
ccggttcatgacatgacggccgcggggtttaatatgatgaacagtctgccggtgaccagtacatctggtgttggt

SEQ ID NO: 127228 - DNA, 75 bp, synthetic construct
  source 1..75: mol_type = other DNA
ggctatccagtgggtgtccgaactgacagatgagttgatggcgaaaattcgcagccatgaatacagccgatcaat

SEQ ID NO: 127229 - DNA, 75 bp, synthetic construct
  source 1..75: mol_type = other DNA
tcttaagcttgtagcggctagtgagtgtagtgatgaagagaaggggctggctttgcagtgggtttctgaactgac

SEQ ID NO: 127230 - DNA, 75 bp, synthetic construct
  source 1..75: mol_type = other DNA
caaaactactgctgaatccgctgcgacccgtgcggaagctgctgctgatcgtgctgaagagattgccggtgcagt

SEQ ID NO: 127231 - DNA, 75 bp, synthetic construct
  source 1..75: mol_type = other DNA
ctctgcagtgggtttctgaattgactgatgaactcatggcaaagatcagaatccacgaatacagccgctcaatgg

SEQ ID NO: 127232 - DNA, 75 bp, synthetic construct
  source 1..75: mol_type = other DNA
tgtagtgatgaagagaaggggctggctttgcagtgggtttctgaactaacagatgaactcatggcaaaaatcaga

SEQ ID NO: 127233 - DNA, 75 bp, synthetic construct
  source 1..75: mol_type = other DNA
aacgttctgccgcgcatcaccgcaccgccgctgaataagcatgaggtggcgcaactggattttatcgacctgaca

SEQ ID NO: 127234 - DNA, 75 bp, synthetic construct
  source 1..75: mol_type = other DNA
ccgacactgaccgcgctattgctacctctatcgtcgatgccgttgatgacaccggttatctgactgtcccgctgg

SEQ ID NO: 127235 - DNA, 75 bp, synthetic construct
  source 1..75: mol_type = other DNA
atgtgtacccgaaggccggtgtagtggattttcgcgggactctcaaaacgtggataggtaagcgggaagccctgc

SEQ ID NO: 127236 - DNA, 75 bp, synthetic construct
  source 1..75: mol_type = other DNA
gcgggggcagaaagaaacctacatccccatgttctttaatcaaccgttttcgctgtcccgtaatgtggctgatgc

SEQ ID NO: 127237 - DNA, 75 bp, synthetic construct
  source 1..75: mol_type = other DNA
atcatggtggcacgccgcactgttgcgaagtaccgagagtctttatccattccgccgtcaaaccagcgtaaacag

SEQ ID NO: 127238 - DNA, 75 bp, synthetic construct
  source 1..75: mol_type = other DNA
ctccatcgttgatgccgttgatgataccggttatctcaccgtcccactggaagatattctcgaaagcatgggcga

SEQ ID NO: 127239 - DNA, 75 bp, synthetic construct
  source 1..75: mol_type = other DNA
atccaactctcccaattcgacaaaacgacgccgtggctggaagaagctcgactgatcattagcgatcatctcgat

SEQ ID NO: 127240 - DNA, 75 bp, synthetic construct
  source 1..75: mol_type = other DNA
tgcatctctactgtgattgtcgccagtgtacaaatggtaaatatcaaacgccagacttcggtgagtatatcggta

SEQ ID NO: 127241 - DNA, 75 bp, synthetic construct
  source 1..75: mol_type = other DNA
tattaatgatgcagcctcatccgtatgacaattccagcaaacggaaaagggccaatataagattcacaggattgc

SEQ ID NO: 127242 - DNA, 75 bp, synthetic construct
  source 1..75: mol_type = other DNA
ggcccgtaaagacgggtggcgaataagcaaagacaaaacacgtacttttgcgcccgggcataaagttttgaggat

SEQ ID NO: 127243 - DNA, 75 bp, synthetic construct
  source 1..75: mol_type = other DNA
aatatttgatgaatacattggaaaaaagtactatttttaataaacatcttaacaaaactgatggatggacaactt

SEQ ID NO: 127244 - DNA, 75 bp, synthetic construct
  source 1..75: mol_type = other DNA
atggatcgcctgatttataccgccctgagtggggcttctcagactctgtacgagcagcaaattagcgccaataac

SEQ ID NO: 127245 - DNA, 75 bp, synthetic construct
  source 1..75: mol_type = other DNA
catcaaagttagcggcggttttctggagggcagtaacgtctcggcggtgagcgagatgatgtcgtccatcgccat

SEQ ID NO: 127246 - DNA, 75 bp, synthetic construct
  source 1..75: mol_type = other DNA
gccaacgactggagggactatttcaggtccgttgtctgttactgatgggatcaccggggcactgaaggggaacgc

SEQ ID NO: 127247 - DNA, 75 bp, synthetic construct
  source 1..75: mol_type = other DNA
atcaacacatccggcgatacatatgatatttacgttgaggttggcaattatgcgacgagtgtaaatatccattgg

SEQ ID NO: 127248 - DNA, 75 bp, synthetic construct
  source 1..75: mol_type = other DNA
tggtactttaaattcagtaacgatgtctttctctggcggggctgggtggttcaaactggctacggttaccatgcc

SEQ ID NO: 127249 - DNA, 75 bp, synthetic construct
  source 1..75: mol_type = other DNA
tattggagcactgccaacaaccggaggaacagtttcaggtccgttgtctgttacaggtggattaactggttcatt

SEQ ID NO: 127250 - DNA, 75 bp, synthetic construct
  source 1..75: mol_type = other DNA
cgaaaaaggggatagtacagctcagcagtgcgaccaacagcacatctgaaacgcttgccgcgacaccgaaggcag

SEQ ID NO: 127251 - DNA, 75 bp, synthetic construct
  source 1..75: mol_type = other DNA
acatcatcagatggtgctcatacccactcgctgtccggcactgctgcaagcgcaggcgcacacgcacatactgtc

SEQ ID NO: 127252 - DNA, 75 bp, synthetic construct
  source 1..75: mol_type = other DNA
atgctggtacctgaggcgctacgctatcagacctacaaaacctgcacgttagccctttgtaggccagataagacg

SEQ ID NO: 127253 - DNA, 75 bp, synthetic construct
  source 1..75: mol_type = other DNA
tccggtcggtgtggcggcaaaagatctgcgtgactgcctgctgatccaactctcccaattcgataaaaccacgcc

SEQ ID NO: 127254 - DNA, 75 bp, synthetic construct
  source 1..75: mol_type = other DNA
tgaagagatcgacatcgacgaggttgaagccgtccttaagcggatccaacggtttgatccggtcggtgtggcggc

SEQ ID NO: 127255 - DNA, 75 bp, synthetic construct
  source 1..75: mol_type = other DNA
accgtgtatgaagattctcaacccggtacgctgaatgattttctcggcgcaatgacggaggatgatgcccgtccg

SEQ ID NO: 127256 - DNA, 75 bp, synthetic construct
  source 1..75: mol_type = other DNA
tccggatgaagccgggcgttatagtatggacgttgagtatggccagtacagcgtcaccctgctggttgaaggttt

SEQ ID NO: 127257 - DNA, 75 bp, synthetic construct
  source 1..75: mol_type = other DNA
taataatcagcacaataatcagcccaaccacggagttgaccagctccagcagaccccaggttttcaacgtgtctt

SEQ ID NO: 127258 - DNA, 75 bp, synthetic construct
  source 1..75: mol_type = other DNA
gatcttcctcaggctgaaatgacagccagagagcttgcttataacgcaccaggaaatcagggactgcgcattgat

SEQ ID NO: 127259 - DNA, 75 bp, synthetic construct
  source 1..75: mol_type = other DNA
gttcgctggtatcaaaatgagcggcgtaagtacggtgtctcctgggctttcactgatttttccgacagtaaccag

SEQ ID NO: 127260 - DNA, 75 bp, synthetic construct
  source 1..75: mol_type = other DNA
tttgattgtcgatttcctacccagtctgtattacgaacaaaatacagaacacgataccccggtaatgactccaac

SEQ ID NO: 127261 - DNA, 75 bp, synthetic construct
  source 1..75: mol_type = other DNA
gtactgtttttcctgatcagatattcgcttgcgcgttatacaggaccggggcgtcagtatcttgattacattccc

SEQ ID NO: 127262 - DNA, 75 bp, synthetic construct
  source 1..75: mol_type = other DNA
atgacgaaacaacagaaaacagcgctgaacatggctaaattcatccagcatcaatctctgctcctgctggagaag

SEQ ID NO: 127263 - DNA, 75 bp, synthetic construct
  source 1..75: mol_type = other DNA
gcaaaagtcaggcggattccgatcgtgctctttattattcccgcggattccagatcgataactatatggttgatg

SEQ ID NO: 127264 - DNA, 75 bp, synthetic construct
  source 1..75: mol_type = other DNA
atgaagccagaactcaggggcggggagggggaaacattttatggttatctggttgcgctgaaaacggatgctgaa

SEQ ID NO: 127265 - DNA, 75 bp, synthetic construct
  source 1..75: mol_type = other DNA
gtatcagtaccgggttttgttcgtggttaatcaggtcgacaaggccgaaccctgtcatgaatggtgtaccaccga

SEQ ID NO: 127266 - DNA, 75 bp, synthetic construct
  source 1..75: mol_type = other DNA
tctctctgcaattccctgttccagggagaagtcacgtcggtcagcgatgtggaggcctgcacccgcgatgtgctg

SEQ ID NO: 127267 - DNA, 75 bp, synthetic construct
  source 1..75: mol_type = other DNA
gcgacacaactgcacgggaggctctgcacggagccggtaaagtcgcaggcccgtgacggcttcggtgaggcggta

SEQ ID NO: 127268 - DNA, 75 bp, synthetic construct
  source 1..75: mol_type = other DNA
gcacagagcctgtcaggtcacaggcccgtgatggcttcggtgaggccgtggggcgggtgttcgatacggcagaat

SEQ ID NO: 127269 - DNA, 75 bp, synthetic construct
  source 1..75: mol_type = other DNA
ccattagcgcaatgttcagcccccatcacccggtctgtgtggtgtcagcactgaccggatggggcgttgaggaga

SEQ ID NO: 127270 - DNA, 75 bp, synthetic construct
  source 1..75: mol_type = other DNA
atcacctcatcgtccgctccggctttgcgcagttgctggggctggaacctgatttgcaggtagttgccgagtttg

SEQ ID NO: 127271 - DNA, 75 bp, synthetic construct
  source 1..75: mol_type = other DNA
gccaggacccgctgaccaaacgtgaacgccaggtggcggaaaaactggcgcaaggaatggcggtgaaagagattg

SEQ ID NO: 127272 - DNA, 75 bp, synthetic construct
  source 1..75: mol_type = other DNA
tggtgaagcgcaactggcgcaccgcatcagcgagtatctgccggaacaggggcaactgtttgtcggtaacagcct

SEQ ID NO: 127273 - DNA, 75 bp, synthetic construct
  source 1..75: mol_type = other DNA
acgttacaacggcctgccatctatggaaatcttaggccagcaccgggtaaaagtaccggtgaagcaatggagctg

SEQ ID NO: 127274 - DNA, 75 bp, synthetic construct
  source 1..75: mol_type = other DNA
ctgatgacttcactggcgtttatcctcggtgttatgccgctggttatcagtactggtgctggttccggcgcacag

SEQ ID NO: 127275 - DNA, 75 bp, synthetic construct
  source 1..75: mol_type = other DNA
gggggcattgacctgaccagtccaacaggaaaaatgatgatgcaagtaatttcagcagtcgctgaatttgaacga

SEQ ID NO: 127276 - DNA, 75 bp, synthetic construct
  source 1..75: mol_type = other DNA
tggagctgcatccggcagaaaaacgccagccctggtgcgttgaaatcccgcgcctggcggaacaggcaatgcagg

SEQ ID NO: 127277 - DNA, 75 bp, synthetic construct
  source 1..75: mol_type = other DNA
agtcacaaaactggatcgcctcggtcgtaatgcaatggatatcaggaaaacagtggagcaactgaccgaatctgg

SEQ ID NO: 127278 - DNA, 75 bp, synthetic construct
  source 1..75: mol_type = other DNA
atcaggagatatgttttacttggacagtcacttgcaatggcaatgaaaagttgcggttatgacttcccatcgaaa

SEQ ID NO: 127279 - DNA, 75 bp, synthetic construct
  source 1..75: mol_type = other DNA
aactcttggctggccgctgattggcgacgtgctgtcgcaaaccggacagccgctgccgtgtgccgatctctggtt

SEQ ID NO: 127280 - DNA, 75 bp, synthetic construct
  source 1..75: mol_type = other DNA
gctgccatgttcgagctgaaatatcatcgcccacaaagctgggatgaatttgagtcggtcctggcgggtgcgtgg

SEQ ID NO: 127281 - DNA, 75 bp, synthetic construct
  source 1..75: mol_type = other DNA
acgactactgcaatggcaggcgaattgcgaaccagaagaatactggattgtcgataacatcgaagggcggcttga

SEQ ID NO: 127282 - DNA, 75 bp, synthetic construct
  source 1..75: mol_type = other DNA
atgaagagaaatttaatgctgtgttttgtcgttaatgcattatttagcgccagtgcgatggctctgacgctggat

SEQ ID NO: 127283 - DNA, 75 bp, synthetic construct
  source 1..75: mol_type = other DNA
gggcagaaactggtagcaaaagctaagccgggagaatacattcgcgggataaacggaatgtggttgcaaaaataa

SEQ ID NO: 127284 - DNA, 75 bp, synthetic construct
  source 1..75: mol_type = other DNA
tgcattaaaggcggataccgaaacacagatgttagtcaaaaggattaatgaatcgcgtaataagagctatcaaca

SEQ ID NO: 127285 - DNA, 75 bp, synthetic construct
  source 1..75: mol_type = other DNA
atgtatgaggagtgtgtgacatttttcatgagagtaaaacaggtgataacctcctttcgtaaggggaattcacag

SEQ ID NO: 127286 - DNA, 75 bp, synthetic construct
  source 1..75: mol_type = other DNA
atgtatgaggagagtgtgacatttttcatgatagtaaaacaggtgataacctcctttcgtaaggggcattcacag

SEQ ID NO: 127287 - DNA, 75 bp, synthetic construct
  source 1..75: mol_type = other DNA
tgattggcccgcggatacccgttccccttcttacgtctccttttgttataagtacatggttatacatacttgctc

SEQ ID NO: 127288 - DNA, 75 bp, synthetic construct
  source 1..75: mol_type = other DNA
taacggtggcgcatgctctaaattcggcagcgcggaagaggcggcggccatgaccgtgaaggtgctgggcgatcg

SEQ ID NO: 127289 - DNA, 75 bp, synthetic construct
  source 1..75: mol_type = other DNA
ccggccacgcgcggcaatatgcagaagctggggctgaataccggctggagcagtgacctgatgtgcggcaatttt

SEQ ID NO: 127290 - DNA, 75 bp, synthetic construct
  source 1..75: mol_type = other DNA
gaacgggagaatgaacgggttgggaacaatccgatgattcagcagacagataatgctgacagtcggatgcacacg

SEQ ID NO: 127291 - DNA, 75 bp, synthetic construct
  source 1..75: mol_type = other DNA
actaaagagatagccaaactggctggacaaaagcttgttgctcgcgcgaagtcggggcaatatgttcagggagtt

SEQ ID NO: 127292 - DNA, 75 bp, synthetic construct
  source 1..75: mol_type = other DNA
gtgaaacgcttaacggttacctggtggcgctacaaacggatgccgaaacacaggcattagtaaaagatattaatg

SEQ ID NO: 127293 - DNA, 75 bp, synthetic construct
  source 1..75: mol_type = other DNA
agcctgcaatacgtgtcacccatgatcttgtcgctgcaggctacaacatgatgaacggtttacctgttaccgcta

SEQ ID NO: 127294 - DNA, 75 bp, synthetic construct
  source 1..75: mol_type = other DNA
agcgcagtgtattggtaggtttacagtcttttgccgaaggccttgatctgaaaggtgacctgctaagtcaggtgc

SEQ ID NO: 127295 - DNA, 75 bp, synthetic construct
  source 1..75: mol_type = other DNA
tggcaaaactcaccgagatgctgcgtggtctggcggagttatttcttaacgatttaagtgagaaaaccggcagcc

SEQ ID NO: 127296 - DNA, 75 bp, synthetic construct
  source 1..75: mol_type = other DNA
gtgccgaaatcaccgcgccctggtatcgactacagctggacttgttcacgaaactggtcgctacctgcatggagc

SEQ ID NO: 127297 - DNA, 75 bp, synthetic construct
  source 1..75: mol_type = other DNA
ccattgagaagcctctggcttcactgccccatactcttcgcagtctaattcttaaacgccttcgtagtctcacac

SEQ ID NO: 127298 - DNA, 75 bp, synthetic construct
  source 1..75: mol_type = other DNA
atgaaagatgagcgtcgccctatttgcgaagtggttgcagagagtatcgaacggttgattatcgacggcgtgttg

SEQ ID NO: 127299 - DNA, 75 bp, synthetic construct
  source 1..75: mol_type = other DNA
atctcggcatgttggtgctgtttgccagcggacgggcgatgcagaggtttctcgactatgtgacggatttacgtc

SEQ ID NO: 127300 - DNA, 75 bp, synthetic construct
  source 1..75: mol_type = other DNA
attaaccaggccgacaaaatcgaaccctgtcatgaatgggataccctcaccagcaagccttcaccgcaccaactg

SEQ ID NO: 127301 - DNA, 75 bp, synthetic construct
  source 1..75: mol_type = other DNA
aattctgccgactggcctgacgccggaagggatgaatgtcctgagcgatgccaaagcgaaaggtgttgagctggc

SEQ ID NO: 127302 - DNA, 75 bp, synthetic construct
  source 1..75: mol_type = other DNA
atgtatgaggagcgtgtgacatttttcatgacagtaaaacaggtgataacctcctttcgtaaggggtattcacag

SEQ ID NO: 127303 - DNA, 75 bp, synthetic construct
  source 1..75: mol_type = other DNA
aaaccatgcgctggtgatggcggcgatggaaagcgaagccgtactacctgacccgaaaaatctgctgctggtgct

SEQ ID NO: 127304 - DNA, 75 bp, synthetic construct
  source 1..75: mol_type = other DNA
gcctgaccgcgccaccagcccgctggcgactcaactgcatggcaggctctgcacggaggcggtaaaaaagcaggc

SEQ ID NO: 127305 - DNA, 75 bp, synthetic construct
  source 1..75: mol_type = other DNA
gtgacacaactgcaagggagactctgcacagagccggtaaagtcgcaggcccgtgacagtttcggtgacgcagtg

SEQ ID NO: 127306 - DNA, 75 bp, synthetic construct
  source 1..75: mol_type = other DNA
gcgccaggctaatagcgatgaaccctatatcgaaattatttgtatggattcagaagctgaaattaagaaagcaga

SEQ ID NO: 127307 - DNA, 75 bp, synthetic construct
  source 1..75: mol_type = other DNA
gaacttgaactactctgggcaatttacgccagctctttacgcaaggttccaaagcgtaaagcgattgctgaaaga

SEQ ID NO: 127308 - DNA, 75 bp, synthetic construct
  source 1..75: mol_type = other DNA
tatctgtggtgtttgctgtgttattatatttgtatttttgggagacagactgtatgatgcagtaatagtttcgct

SEQ ID NO: 127309 - DNA, 75 bp, synthetic construct
  source 1..75: mol_type = other DNA
caatctggcattgccatgctggacatcggaatcaataaccgggcagttgctggactggatagcacttggtattta

SEQ ID NO: 127310 - DNA, 75 bp, synthetic construct
  source 1..75: mol_type = other DNA
tgaaaaggcacgcctggctaatggcgtgaaccctatatcgaaattatttgtatggattcagaaactgaaattcag

SEQ ID NO: 127311 - DNA, 75 bp, synthetic construct
  source 1..75: mol_type = other DNA
gctattgatggagtcgtcccatcagaaaaaaatgcagctacttacgtttatctgaacggcacgcgcctgaccgta

SEQ ID NO: 127312 - DNA, 75 bp, synthetic construct
  source 1..75: mol_type = other DNA
cggaaaatcgaccactatcggtattatcagctctctggtaaataaaacctccgggcgggtcagcgtatttggtta

SEQ ID NO: 127313 - DNA, 75 bp, synthetic construct
  source 1..75: mol_type = other DNA
ggagaatgtggataccctttatttcaccgtagacgactgctaccgcgtggacttcacaccacacggactggcgtt

SEQ ID NO: 127314 - DNA, 75 bp, synthetic construct
  source 1..75: mol_type = other DNA
gcctcgctgagtgaatacaccgctgaatttgaccgcctttccgccattttctcgcaggagtggcagcgcgtgacg

SEQ ID NO: 127315 - DNA, 75 bp, synthetic construct
  source 1..75: mol_type = other DNA
gtacaccctgacaccacacggcgactccctgctggcgtattacaactccccggcctccgtatttgcggcaatgct

SEQ ID NO: 127316 - DNA, 75 bp, synthetic construct
  source 1..75: mol_type = other DNA
aagctgaaatcagaaacctttattctcgatctcgcaccgaaaagcccgttaccgaagctcgatggctatcagtat

SEQ ID NO: 127317 - DNA, 75 bp, synthetic construct
  source 1..75: mol_type = other DNA
cacaggaatttaacttcaacccgtttgaaaccgtgcagcaaattgtggtgaatcaggcagggtactacggtgtgg

SEQ ID NO: 127318 - DNA, 75 bp, synthetic construct
  source 1..75: mol_type = other DNA
gcggcgatcctgtaatcgagtggccggcagtggagccgtcgcttgatgcagcgaaagaagctgcgccaggactca

SEQ ID NO: 127319 - DNA, 75 bp, synthetic construct
  source 1..75: mol_type = other DNA
tggaagcatggaagcccaatttttatatatctgctgataatgaaaacatcacggataaaataagaaaaggtttga

SEQ ID NO: 127320 - DNA, 75 bp, synthetic construct
  source 1..75: mol_type = other DNA
gctaaaaccacgcgtatcaaagcggtttgcagacaatgttatcacgcaactcgatcaggtcggcgagtcagatat

SEQ ID NO: 127321 - DNA, 75 bp, synthetic construct
  source 1..75: mol_type = other DNA
atgacgcataaatcagcagccggagagcttcagaaggaagtcgaaaatactaccgttctattggacgatatttta

SEQ ID NO: 127322 - DNA, 75 bp, synthetic construct
  source 1..75: mol_type = other DNA
cctgggtcttgcgtggggcgccatagtcaaaacctcccaggactggagcaacctatctcccattctcgaagtacc

SEQ ID NO: 127323 - DNA, 75 bp, synthetic construct
  source 1..75: mol_type = other DNA
gggtgataatgacacgggctttaaacaaaatggcgatggtaatctggatgtttatgctaattacgtccatgttat

SEQ ID NO: 127324 - DNA, 75 bp, synthetic construct
  source 1..75: mol_type = other DNA
gtgcagaagtaccgcgccaccattaccgaatgtattccgatgatgatccgtacgttgatggtgcagccgccttca

SEQ ID NO: 127325 - DNA, 75 bp, synthetic construct
  source 1..75: mol_type = other DNA
ttaccttgcagaccgcgccggcatcagagatcggttcagcgatgcagatgcataccatctggaccaggcctttcc

SEQ ID NO: 127326 - DNA, 75 bp, synthetic construct
  source 1..75: mol_type = other DNA
aatattaacttggaatttttataaggctgacggttcgcatttctgcattgattggttaaagcgccgtgtggcacg

SEQ ID NO: 127327 - DNA, 75 bp, synthetic construct
  source 1..75: mol_type = other DNA
atgtttgtgaaacctgttaaagggcggtcagtgcctgaccctgcccgcggagaccttttgcccgccgaggggcga

SEQ ID NO: 127328 - DNA, 75 bp, synthetic construct
  source 1..75: mol_type = other DNA
gaattgatgcaattgaggggcaatactaccgggcaattttgagcagcgagtggggaaacactcacctacagcaca

SEQ ID NO: 127329 - DNA, 75 bp, synthetic construct
  source 1..75: mol_type = other DNA
atatgatgcgtatggtgcgcagcagttctattttcctaatgtgctgaagtatgacccagaacaatttaaagatac

SEQ ID NO: 127330 - DNA, 75 bp, synthetic construct
  source 1..75: mol_type = other DNA
gcgaccagatggccgatatcttcaaggatattggcgataaaattggcgatgctgtactgaataaatcgggtgaag

SEQ ID NO: 127331 - DNA, 75 bp, synthetic construct
  source 1..75: mol_type = other DNA
acacagggcgccagcttctcacccgttattaacatgaatgtgaatggtgacccttccgacactcagattgccatg

SEQ ID NO: 127332 - DNA, 75 bp, synthetic construct
  source 1..75: mol_type = other DNA
aagaagctggaatcagcatttaagtctctggaaatgagttatcagcgccagattgcgttaattgacataactggc

SEQ ID NO: 127333 - DNA, 75 bp, synthetic construct
  source 1..75: mol_type = other DNA
cccgccgcaggagtccgtcgaactgctggcgagtctgtccgacagtctcagtaaggcggtggccagcagtaaaaa

SEQ ID NO: 127334 - DNA, 75 bp, synthetic construct
  source 1..75: mol_type = other DNA
tgaaaagctggtcagagtcaacgccctgtttgaggatatggagacgcaggtcaacggcgtcaaaattgaacttgc

SEQ ID NO: 127335 - DNA, 75 bp, synthetic construct
  source 1..75: mol_type = other DNA
taacgactgagaaaaaaatcgctagatacctcgtagatcagataatccaacgaacagatctagcattcattgttg

SEQ ID NO: 127336 - DNA, 75 bp, synthetic construct
  source 1..75: mol_type = other DNA
atcactctgcgcggcggcgagttgcttcactggcaagcaggaaaaggattatctgcgccgctttccggagtgccg

SEQ ID NO: 127337 - DNA, 75 bp, synthetic construct
  source 1..75: mol_type = other DNA
cccggatgataatccttttataaaggaatccggtgcgcgcgccgagatctggtcttatggcattcgtaatccgca

SEQ ID NO: 127338 - DNA, 75 bp, synthetic construct
  source 1..75: mol_type = other DNA
gctctgggcgaaaacaatcagcgcccgacggcgcaggatctggataaattacagggcaaactggtgcgtctgacc

SEQ ID NO: 127339 - DNA, 75 bp, synthetic construct
  source 1..75: mol_type = other DNA
tcagggtggtgaaaagcttcgtcagtacatggatgcggcaaagcagttcggtgttgcccctgatgatgcagacat

SEQ ID NO: 127340 - DNA, 75 bp, synthetic construct
  source 1..75: mol_type = other DNA
accagatgaatgaagaacgagaagcaattctacgccagaatgatttactaattcaggataaggaaacatttgaaa

SEQ ID NO: 127341 - DNA, 75 bp, synthetic construct
  source 1..75: mol_type = other DNA
tcccggatgataatccttttataaaggaatccggtgtgcgcgccgagatctggtcttatggcattcgtaatccgc

SEQ ID NO: 127342 - DNA, 75 bp, synthetic construct
  source 1..75: mol_type = other DNA
gggggtggatgctgttatagaagctgcaaaaaatctggtggctcaggaatatgagtataaggatttcaaagcggc

SEQ ID NO: 127343 - DNA, 75 bp, synthetic construct
  source 1..75: mol_type = other DNA
tgcgtgaggcggcagagcaggcaatgcatgacgacaggggatttgacgcggaccttttccatgagctggtaacac

SEQ ID NO: 127344 - DNA, 75 bp, synthetic construct
  source 1..75: mol_type = other DNA
cacggtatccaccggtaaatccaccctgatgcgtaaaattatgaagcagctgcgtgacaggggcgatctggtcat

SEQ ID NO: 127345 - DNA, 75 bp, synthetic construct
  source 1..75: mol_type = other DNA
cgcagataaaatgcagccacctccaaatttatttaacattctaggtacacttgtagataaaaaatcagcagcaaa

SEQ ID NO: 127346 - DNA, 75 bp, synthetic construct
  source 1..75: mol_type = other DNA
tgatcagcgatttggcaacgcaactggaagtgcaactggtgcgtgctaatgcgctggcggcggagaatgcggggc

SEQ ID NO: 127347 - DNA, 75 bp, synthetic construct
  source 1..75: mol_type = other DNA
atgcggggctgaaacatgcaatggctgtaactcttgagcatgtgtcggtcacggatgcagggcaggccggagttg

SEQ ID NO: 127348 - DNA, 75 bp, synthetic construct
  source 1..75: mol_type = other DNA
atgcgatacctgcagggtatcgatcgtgcgggacgggagaaattcaccatccgggaatggatgaagggccaggcc

SEQ ID NO: 127349 - DNA, 75 bp, synthetic construct
  source 1..75: mol_type = other DNA
tccacactggttgacggcaagattgagaaaacagctatctccatccgaagtgtgctgaccaactatgtcaaggca

SEQ ID NO: 127350 - DNA, 75 bp, synthetic construct
  source 1..75: mol_type = other DNA
tggcagacgtttgtgaatggctgcatttactggtggtgcaccacgctggaaggcatgcgggatttaatcaggtcc

SEQ ID NO: 127351 - DNA, 75 bp, synthetic construct
  source 1..75: mol_type = other DNA
gaaagcggctgcggggctgtttgacctgctgaatacaaagttcttttttcgctctccgagcgcccagattgcgaa

SEQ ID NO: 127352 - DNA, 75 bp, synthetic construct
  source 1..75: mol_type = other DNA
agctgatggctgccgttctcgcggaagcgaacacgcctccggaaacgcgtccattacagacagaagatgctgccg

SEQ ID NO: 127353 - DNA, 75 bp, synthetic construct
  source 1..75: mol_type = other DNA
tgagtctcttaagccattgatttcactgtggctaagtattgcagccaccagtctgctggcgatggggccgaaccg

SEQ ID NO: 127354 - DNA, 75 bp, synthetic construct
  source 1..75: mol_type = other DNA
ggagggggttgcctacattttccaactcttcggcccgtcagtgtagccaagagctcaaaatcacctcagccaaaa

SEQ ID NO: 127355 - DNA, 75 bp, synthetic construct
  source 1..75: mol_type = other DNA
tgtcaaagtgcttagcgatgctaagtacaaagatctggtgaagcgaaaaatcaagggaagactggcaacggtacg

SEQ ID NO: 127356 - DNA, 75 bp, synthetic construct
  source 1..75: mol_type = other DNA
aacagatgtggccttgagtgctgtagggaagtatgaggagatacaggcagccctaaccgaaggttccgcgctggc

SEQ ID NO: 127357 - DNA, 75 bp, synthetic construct
  source 1..75: mol_type = other DNA
actccaataaagtggaagctgtggtctggacggtacctatcttaatcatcatcttccttgcggtactgacctgga

SEQ ID NO: 127358 - DNA, 75 bp, synthetic construct
  source 1..75: mol_type = other DNA
ccgtcatcagcgctggtgcaggcgtttagtgagcatttacaagcgggattaccgaaactggtcacttctcttgac

SEQ ID NO: 127359 - DNA, 75 bp, synthetic construct
  source 1..75: mol_type = other DNA
ttgtgtcatagccataatatccccgttgaattaatccagtgtcgggttaatgaaatagaaacctatatggatggt

SEQ ID NO: 127360 - DNA, 75 bp, synthetic construct
  source 1..75: mol_type = other DNA
gcactcctgtctcagtcattacgttttttgccagcgtcattattcttatctgcattattaaaaagaaatatgcag

SEQ ID NO: 127361 - DNA, 75 bp, synthetic construct
  source 1..75: mol_type = other DNA
gcactcctgcctcagtcattacgtttttgccagcgtcattattcttatctgcattattaaaaagaaatatgcaga

SEQ ID NO: 127362 - DNA, 75 bp, synthetic construct
  source 1..75: mol_type = other DNA
ctcgatgaagtgggcgatatgccgctggagttacagccgaagttgctgcgtgtattacaggaacaggagtttgaa

SEQ ID NO: 127363 - DNA, 75 bp, synthetic construct
  source 1..75: mol_type = other DNA
ctccgacggggttattcgtcgagaggcaacttgaccaggaagcaatggaagagcagaagcggcaccaggaacgat

SEQ ID NO: 127364 - DNA, 75 bp, synthetic construct
  source 1..75: mol_type = other DNA
attttcattatcttactaaacttactgagcatgatgttgatttaatcaggtctcttcgtgaagaagggttaactt

SEQ ID NO: 127365 - DNA, 75 bp, synthetic construct
  source 1..75: mol_type = other DNA
gcactcctgtctctgtcattacgttttttgcaagcatcattattcttatctgtataattaaaaagatatatgcag

SEQ ID NO: 127366 - DNA, 75 bp, synthetic construct
  source 1..75: mol_type = other DNA
gagccagaccaactttgggagaaccttctcgcggtcgcatttatgccgatgtgaacggttttctggatccggtag

SEQ ID NO: 127367 - DNA, 75 bp, synthetic construct
  source 1..75: mol_type = other DNA
gagccagaccgacgctgggagaaccttctcgcggtcgcatttatgccgatgtgaacggttttctggatccggtag

SEQ ID NO: 127368 - DNA, 75 bp, synthetic construct
  source 1..75: mol_type = other DNA
gtggatgatgcggatagggccgaaagcctctaatgaagccctcattcaggtatcgcatgttgataatgacatcga

SEQ ID NO: 127369 - DNA, 75 bp, synthetic construct
  source 1..75: mol_type = other DNA
ggaccgtaaagacgggtggcgaataagcaaagacaaaacacgtgcttttgcgccagggcataaagttttaaggat

SEQ ID NO: 127370 - DNA, 75 bp, synthetic construct
  source 1..75: mol_type = other DNA
taattgggatgccttctcaactcttcactatggctcgttcttttaaagccgtagctaatggcaaaatttatatcg

SEQ ID NO: 127371 - DNA, 75 bp, synthetic construct
  source 1..75: mol_type = other DNA
tcgtggctggccctatggctacggcgggtgggggtggtataatcccgggcccgcgagaggacaaacagttgtaac

SEQ ID NO: 127372 - DNA, 75 bp, synthetic construct
  source 1..75: mol_type = other DNA
tatgaagttcaaggctatcgctacaccggatcgtgccgcattcgaacaatgggtcgcgaaagcgaaacagtcacc

SEQ ID NO: 127373 - DNA, 75 bp, synthetic construct
  source 1..75: mol_type = other DNA
aatacaaccaggtggaatatttctccaacgtgaaaccagacttgtttgccgatgtaattaacaagtttatggctc

SEQ ID NO: 127374 - DNA, 75 bp, synthetic construct
  source 1..75: mol_type = other DNA
catgaagttcaaagctattgcaacaccggatcgcgccgaattcgaccaatgggtcgcaaaagcgaaacagtcgcc

SEQ ID NO: 127375 - DNA, 75 bp, synthetic construct
  source 1..75: mol_type = other DNA
tgggtgcgttattacttatgcaatctgcgtttgccgatacggtcaaaccggaaatcggtaaatatgtttttggct

SEQ ID NO: 127376 - DNA, 75 bp, synthetic construct
  source 1..75: mol_type = other DNA
tgcactctcttctgccgcgcgctttcagccgtttcagccaaaccatgatgtggatcgacacggtaaacggtttga

SEQ ID NO: 127377 - DNA, 75 bp, synthetic construct
  source 1..75: mol_type = other DNA
cccgattgaactgacgctgaccgaatgggttcgctccggtagtgcggcacagggcttccagctgcttgatgaagc

SEQ ID NO: 127378 - DNA, 75 bp, synthetic construct
  source 1..75: mol_type = other DNA
taagcggatagccgagcgcggggagaatatccaggtctggatagatcctgtggtgtttaatgacctgctgaactg

SEQ ID NO: 127379 - DNA, 75 bp, synthetic construct
  source 1..75: mol_type = other DNA
gcgctgcgggtgacacaaattgatgtcagtgctgctgagaagcctgggatggtgaatgtgcagcgactggagttt

SEQ ID NO: 127380 - DNA, 75 bp, synthetic construct
  source 1..75: mol_type = other DNA
gtgcttccgcgcactctgtggtcatcaagcggatagccgagcgcggggagaatattcaggtctggatagaacctg

SEQ ID NO: 127381 - DNA, 75 bp, synthetic construct
  source 1..75: mol_type = other DNA
tagccgagcgtggggagaatattcaggtctggatagaacctgtggtgtttaatgacctgctgaactggttaaacg

SEQ ID NO: 127382 - DNA, 75 bp, synthetic construct
  source 1..75: mol_type = other DNA
ggagacgatgttgcagcagctggtggcgatgaacacccgactgaagagcgccgcgccggatattattgcggcgcg

SEQ ID NO: 127383 - DNA, 75 bp, synthetic construct
  source 1..75: mol_type = other DNA
gcgctgcgggtgacacaaattgatgtcagtgcaggtgagaagccaggaatggtgaatgtgcagcgactggagttt

SEQ ID NO: 127384 - DNA, 75 bp, synthetic construct
  source 1..75: mol_type = other DNA
tcagcgcccctgtcgatggcgcaatatcaggcttgtcagtacaaaatggtatcgctattggtcctgttaaatggt

SEQ ID NO: 127385 - DNA, 75 bp, synthetic construct
  source 1..75: mol_type = other DNA
tttactgaaaagcaaggttaaaaatgaagatgttaatgtttcaaaagacaatgatgattttatcaaaaccacaat

SEQ ID NO: 127386 - DNA, 75 bp, synthetic construct
  source 1..75: mol_type = other DNA
cgactggtcgataccgcgacgctggaagttgaagtgctgcgtgagcaggggatcaacagcgtatttacgcagtta

SEQ ID NO: 127387 - DNA, 75 bp, synthetic construct
  source 1..75: mol_type = other DNA
attttcagcaatggcgtgagcggcagttaagtcggggcgaacaatggctgtcacagcatctggcggggcgttcac

SEQ ID NO: 127388 - DNA, 75 bp, synthetic construct
  source 1..75: mol_type = other DNA
gcgcacagagtttttattccatgagtctgcaacattacccgatgaagaagagcagtttcgcgtgtattgttctgt

SEQ ID NO: 127389 - DNA, 75 bp, synthetic construct
  source 1..75: mol_type = other DNA
cctgcattttgttagccaacgatctgttgccatcacagataaccagcctgaataaagcacacattcttggcattt

SEQ ID NO: 127390 - DNA, 75 bp, synthetic construct
  source 1..75: mol_type = other DNA
ccgcaacggttgtcgctcaggagggcgaagatgaatatcagttgattgttcgcgtgctgaaagaaactaacggcg

SEQ ID NO: 127391 - DNA, 75 bp, synthetic construct
  source 1..75: mol_type = other DNA
cgtcttattacgcgtcgcgtgaaaaagacacccccattaaatatgaagacgaaactgttctggcacacggtccgg

SEQ ID NO: 127392 - DNA, 75 bp, synthetic construct
  source 1..75: mol_type = other DNA
taaaatccgaaacaaactgttggtctaaccttacagaaatatcccaaaaaataaataacaaccccagcttcttgt

SEQ ID NO: 127393 - DNA, 75 bp, synthetic construct
  source 1..75: mol_type = other DNA
aattgccgcgactaaccgcgatctgaaaaaaatggttgccgaccgcgagttccgtagcgatctctattaccgtct

SEQ ID NO: 127394 - DNA, 75 bp, synthetic construct
  source 1..75: mol_type = other DNA
ctggaaaatgttattgagcgtgcggtactgctgactcgcggtaatgttctacaactctctttacccgatatctca

SEQ ID NO: 127395 - DNA, 75 bp, synthetic construct
  source 1..75: mol_type = other DNA
gagtttgaacgtctcggcagcaacaaaatcattcagacggacgtgcgtctaattgccgcgactaaccgcgatctg

SEQ ID NO: 127396 - DNA, 75 bp, synthetic construct
  source 1..75: mol_type = other DNA
atgaaaaaagttcaattcagaattgatgaaaatcagcatgatgatttgctggattgccttaaaactctttatcca

SEQ ID NO: 127397 - DNA, 75 bp, synthetic construct
  source 1..75: mol_type = other DNA
tggtgtttaatgacctgctgaactggttaaacgcactggatgaaaaatatgcgctgcgggtgacacaaattgatg

SEQ ID NO: 127398 - DNA, 75 bp, synthetic construct
  source 1..75: mol_type = other DNA
ggagacgatgttgcagcagctggtggcgatgaacacccgactgaagaacgccgcgccggatattattgcagcgcg

SEQ ID NO: 127399 - DNA, 75 bp, synthetic construct
  source 1..75: mol_type = other DNA
caagaattgatggctacaaatatgttgtcacaatcatctaaaacgaaaggtgcaagtgttaaaaccacttaccaa

SEQ ID NO: 127400 - DNA, 75 bp, synthetic construct
  source 1..75: mol_type = other DNA
atcagagatcagcaaattactggacactctgaccggcgacgatcgacgcgtagcactgctatgcctcagcactgg

SEQ ID NO: 127401 - DNA, 75 bp, synthetic construct
  source 1..75: mol_type = other DNA
ccagccgttaaccgactgaacaagcgaatgattgcacagcaccgaagccaaaggctggaagacagtatcagtgca

SEQ ID NO: 127402 - DNA, 75 bp, synthetic construct
  source 1..75: mol_type = other DNA
ggctgccgatgaactgacctgtatgacagcgcgaattaaccgtggtgagacgatacctgaaccagtaaaacaact

SEQ ID NO: 127403 - DNA, 75 bp, synthetic construct
  source 1..75: mol_type = other DNA
gcgtggtcgcgtttaccacgctggtgcagggatcgctccctgaattacatcaggcgtggcaggtggtggacgagc

SEQ ID NO: 127404 - DNA, 75 bp, synthetic construct
  source 1..75: mol_type = other DNA
cgctatcccgtatacaaggattggcaaagttggctgagattcgcgagaagcacggactgagaagacgtaaacaat

SEQ ID NO: 127405 - DNA, 75 bp, synthetic construct
  source 1..75: mol_type = other DNA
tgatgcgctcagtgccatgcgttcgctgaaaggcattggcgcaacgcatcttcacgcagggcgcgaccagcgagt

SEQ ID NO: 127406 - DNA, 75 bp, synthetic construct
  source 1..75: mol_type = other DNA
ttcaacccatcacgctgtggtttgatgacgcactcagcgccatgcgttcactgaaaggtattggcgcaacgcatc

SEQ ID NO: 127407 - DNA, 75 bp, synthetic construct
  source 1..75: mol_type = other DNA
atgttctcgtacaaagtcgctaaaaaaacaatatcaaaaggacttattgcaatcatagtggcagcaggtggtgcg

SEQ ID NO: 127408 - DNA, 75 bp, synthetic construct
  source 1..75: mol_type = other DNA
ttggtgatatctatgagcagtttcttgaaaaagattttcagttacaacgtgccattcatgaaattgaaagatatc

SEQ ID NO: 127409 - DNA, 75 bp, synthetic construct
  source 1..75: mol_type = other DNA
ggccacgcatggtcttaacctgatctgtgcagtcacggatgagcatacccgtcagatagttgacttttgcgataa

SEQ ID NO: 127410 - DNA, 75 bp, synthetic construct
  source 1..75: mol_type = other DNA
atgaaacttttcggtatttcatcccgggattcaggcatggatgcgatgttttatattcaggccagcacaaaacaa

SEQ ID NO: 127411 - DNA, 75 bp, synthetic construct
  source 1..75: mol_type = other DNA
ccagcacaaaacaacaggcaagcttcatatttgacttcctcgccacccggctgtatgcgcattgccagcttattg

SEQ ID NO: 127412 - DNA, 75 bp, synthetic construct
  source 1..75: mol_type = other DNA
ttctatcacggtgagcgcagcccgtacccgtacagcatgaactggctggactgttttgagaatccggcacttgcg

SEQ ID NO: 127413 - DNA, 75 bp, synthetic construct
  source 1..75: mol_type = other DNA
tgaggtgatccctgaaccagtaaaacaacttcctgtcatgggcggcagacctctaaggaaggtgcgaataagcgg

SEQ ID NO: 127414 - DNA, 75 bp, synthetic construct
  source 1..75: mol_type = other DNA
tgcgctgactgatgcggaattacggcgcaaggctgccgatgaactgacttgtatgaccgcgcgaattaaccgtgg

SEQ ID NO: 127415 - DNA, 75 bp, synthetic construct
  source 1..75: mol_type = other DNA
aacgtgtttgaacgtggcccgcaatacgctcaggttgtttctgcaaccccaatcaaggaaacggttaaaacaccg

SEQ ID NO: 127416 - DNA, 75 bp, synthetic construct
  source 1..75: mol_type = other DNA
aacttatcatgcagggaaaaacacacctggaagctgagagaaatgcagtcatgctggaatacatgaaagagaaag

SEQ ID NO: 127417 - DNA, 75 bp, synthetic construct
  source 1..75: mol_type = other DNA
acgaaaaaaactcaattgcttgcaaagctggaacgtctggagagacagggacagtttttattaccgggattcgat

SEQ ID NO: 127418 - DNA, 75 bp, synthetic construct
  source 1..75: mol_type = other DNA
accggtaaagtcgttgcaccctggattccacgcgaccatagttcagctattacagaagaagaatatgttggtagc

SEQ ID NO: 127419 - DNA, 75 bp, synthetic construct
  source 1..75: mol_type = other DNA
acggccaactccgggagccgtgattatggcattcaggctctgctaaaaatgccagataacattccggcctcccct

SEQ ID NO: 127420 - DNA, 75 bp, synthetic construct
  source 1..75: mol_type = other DNA
tgccggtaaccagatccagggctctctccaggaaagcgatacttacacgactacgcaacagcgttgtaaaacggt

SEQ ID NO: 127421 - DNA, 75 bp, synthetic construct
  source 1..75: mol_type = other DNA
gatttttgacaagaaacagatttactaccgcatggactttagtggcttcgttatgctggttatgggatttaacgg

SEQ ID NO: 127422 - DNA, 75 bp, synthetic construct
  source 1..75: mol_type = other DNA
ggaagaacgaaaaaaactcaattgcttgcaaagctgaaacgcctggaaaggcagggacagtttttattaccggga

SEQ ID NO: 127423 - DNA, 75 bp, synthetic construct
  source 1..75: mol_type = other DNA
cgctggggaaaaattaagaagccacagctgctggctagaattgaacgccttgaacagcacgggcaaaccgtaatc

SEQ ID NO: 127424 - DNA, 75 bp, synthetic construct
  source 1..75: mol_type = other DNA
gccgtaatgctggagtacatgaaagagaaggatgtcgccagcatgtcaggccgtttgctcaatcgctggggctga

SEQ ID NO: 127425 - DNA, 75 bp, synthetic construct
  source 1..75: mol_type = other DNA
ttccagatcgcaaaggcatttggtaagcgtcatgcggacgtattgagggcgctgaaaaattgtcattgctctgaa

SEQ ID NO: 127426 - DNA, 75 bp, synthetic construct
  source 1..75: mol_type = other DNA
gcagaactccgtaagtacagcgaaagttatgaagcagaacgcaacgccataatgctggagtatatgaaagagaag

SEQ ID NO: 127427 - DNA, 75 bp, synthetic construct
  source 1..75: mol_type = other DNA
atcgcggtgaaaaatttgacgttatcgtgatggacccgccgaagtttgttgagaacaaaagtcagctaatgggcg

SEQ ID NO: 127428 - DNA, 75 bp, synthetic construct
  source 1..75: mol_type = other DNA
gccctgctgccgattgaagaacacggcatgaagctgctggtggacattcagcacgggcacaaaacgggctactac

SEQ ID NO: 127429 - DNA, 75 bp, synthetic construct
  source 1..75: mol_type = other DNA
agctatcgtttaatcgccggagaatctgatggcctgccgggtattactatcgatcgtttcggtaattttctggtg

SEQ ID NO: 127430 - DNA, 75 bp, synthetic construct
  source 1..75: mol_type = other DNA
actttcccggcgagtctggctaaccgtgaccagaacgaactgaacgaaatccgccgccagtgggttctggctttc

SEQ ID NO: 127431 - DNA, 75 bp, synthetic construct
  source 1..75: mol_type = other DNA
gagggcggtgttctcctgacgttctcctgttcaggcctgatgaccagcgatttatttcagaaaatcatcgcggat

SEQ ID NO: 127432 - DNA, 75 bp, synthetic construct
  source 1..75: mol_type = other DNA
ctctaaaccgtgtgcaggctctggcgaagatcgcagaaatcaaagctaagttcgggctgaaaggagcgatgaaat

SEQ ID NO: 127433 - DNA, 75 bp, synthetic construct
  source 1..75: mol_type = other DNA
atcagatattttcatgtagctaaagaacttgataattttgaaaattatacaagtaatgatggaaaaatagttgag

SEQ ID NO: 127434 - DNA, 75 bp, synthetic construct
  source 1..75: mol_type = other DNA
tgacaattagagatggaagaagacgaaacacttcattccaagaagagttgaaaaatcacataagggataatgcta

SEQ ID NO: 127435 - DNA, 75 bp, synthetic construct
  source 1..75: mol_type = other DNA
ctacgttgaaaataaacgcgtactgaactgtttctcctataccggtggtttcgcagtatcggcattaatgggcgg

SEQ ID NO: 127436 - DNA, 75 bp, synthetic construct
  source 1..75: mol_type = other DNA
cagcagcaggaaaacgccggtgaaatggagctggctgatcttgaaggtttctaccgcgatgcgaaaaagcattac

SEQ ID NO: 127437 - DNA, 75 bp, synthetic construct
  source 1..75: mol_type = other DNA
atccgtaccgctggaacaccacatgtttggcatgatgctgggtaaagacggcaaaccgtttaaaacccgtgctgg

SEQ ID NO: 127438 - DNA, 75 bp, synthetic construct
  source 1..75: mol_type = other DNA
tttaccgcgagcctcgtgggcctatgacaacgaggctaaaattactgaatacaatccggcaaaatcgcgcgaaca

SEQ ID NO: 127439 - DNA, 75 bp, synthetic construct
  source 1..75: mol_type = other DNA
cgatccgaaattcgacagcgtattgcgtaaggcgctctcctcgcagcaactggcggcgcgcatcgaagcctatga

SEQ ID NO: 127440 - DNA, 75 bp, synthetic construct
  source 1..75: mol_type = other DNA
agtacgtacccttgagttcctcggccacaacgtaattcgcgcaaaccacgtcggcgactggggaacccagttcgg

SEQ ID NO: 127441 - DNA, 75 bp, synthetic construct
  source 1..75: mol_type = other DNA
taataaattcgatgattttcttatctatggcgcttataatgactcgcctctatatgctagtttattgtccaatga

SEQ ID NO: 127442 - DNA, 75 bp, synthetic construct
  source 1..75: mol_type = other DNA
ttgctaatagggatgctgacaatgtatatctagtcgcagccaatgatggacagttgttgtcaagttggcgcgatt

SEQ ID NO: 127443 - DNA, 75 bp, synthetic construct
  source 1..75: mol_type = other DNA
catgttcggcatgatgctgggcaaagacggcaaaccgttcaaaacccgcgcgggtggtacagtgaaactggcaga

SEQ ID NO: 127444 - DNA, 75 bp, synthetic construct
  source 1..75: mol_type = other DNA
atcgtacgcaaagcaggttatgtaccagaatccgtaccgctggaacaccacatgttcggcatgatgctgggtaaa

SEQ ID NO: 127445 - DNA, 75 bp, synthetic construct
  source 1..75: mol_type = other DNA
gaaacactgcatgccgatcgcgtgttgtattacatcgactcccgtcagcatcagcacctgatgcaggcatgggca

SEQ ID NO: 127446 - DNA, 75 bp, synthetic construct
  source 1..75: mol_type = other DNA
tattctgacggcggtggatgcgggtacgcgtgctgcgcgctttatgttgcaggatctgctgggcgtggtgtctcc

SEQ ID NO: 127447 - DNA, 75 bp, synthetic construct
  source 1..75: mol_type = other DNA
ctaaaccagattgccagcgaagtgggtgaacagtcgatcatttcccgtgcgggcggtgcgccgacgctggcggtg

SEQ ID NO: 127448 - DNA, 75 bp, synthetic construct
  source 1..75: mol_type = other DNA
cagggggcgcatcccgcgcaggaaagggagctgaccggacatgaaaatgaggtggtatcagcgcagccggatacc

SEQ ID NO: 127449 - DNA, 75 bp, synthetic construct
  source 1..75: mol_type = other DNA
cgcaaatgggctacctgccggggatgatctggctgcttgccggggtggttctcgccggtgcggtgcaggatttca

SEQ ID NO: 127450 - DNA, 75 bp, synthetic construct
  source 1..75: mol_type = other DNA
gatacgctcaaccagattgccagcgaagtgggtgaacagtcgatcatttcccgtgcgggcggtgcgccgacgctg

SEQ ID NO: 127451 - DNA, 75 bp, synthetic construct
  source 1..75: mol_type = other DNA
gctccggcagggacggcggatgtagtcgcttctgccgcgcaggtggtgagtagctggggctttagcattacacca

SEQ ID NO: 127452 - DNA, 75 bp, synthetic construct
  source 1..75: mol_type = other DNA
gtcttcaggagctgggtgagcaactgaaccgcgatgtcagtttgacgggaacgaaagaagaactggcgctccgtg

SEQ ID NO: 127453 - DNA, 75 bp, synthetic construct
  source 1..75: mol_type = other DNA
caatcgaagactgcgtaacggcctgtaaagcacgcggctggctgccgattgttctctgcgttgactggatgcagg

SEQ ID NO: 127454 - DNA, 75 bp, synthetic construct
  source 1..75: mol_type = other DNA
gacaacgaggctaaaattactgaatacaatccggcaaaatcgcgcgaacagttgaaggcgttggggctggaaaac

SEQ ID NO: 127455 - DNA, 75 bp, synthetic construct
  source 1..75: mol_type = other DNA
gcacggtcgcccggaagagggcgttaagaaaaccggttttgcgctggtgacgctgaaaaagcctctggagttcaa

SEQ ID NO: 127456 - DNA, 75 bp, synthetic construct
  source 1..75: mol_type = other DNA
cgaagctgaaacctggcaggaggcggtgaaaatcggcgttgacctgctggtggcggcagatgtggtagagccacg

SEQ ID NO: 127457 - DNA, 75 bp, synthetic construct
  source 1..75: mol_type = other DNA
gtcttcaggtgctgggtgagcaactgaaccgtgatgtcagcctgacggggacgaaagaagaactggcgctccgtg

SEQ ID NO: 127458 - DNA, 75 bp, synthetic construct
  source 1..75: mol_type = other DNA
accgaaaatctgtacatgccttttcgcatgttacgttacagtgtggcggcgatgcagagacatctggagcagcac

SEQ ID NO: 127459 - DNA, 75 bp, synthetic construct
  source 1..75: mol_type = other DNA
ccctggccattgcgcgtcagcttcagaaaatggggatgacacctgagcagattaagcaggccaccggactttccg

SEQ ID NO: 127460 - DNA, 75 bp, synthetic construct
  source 1..75: mol_type = other DNA
ttaggaccgttcccattgagcataatgatatttgtttatatgcaaaaaaaagaaatccgtttaaccatatgactg

SEQ ID NO: 127461 - DNA, 75 bp, synthetic construct
  source 1..75: mol_type = other DNA
ttctttaatctcgattacgacaaagagactctggctaaagttcttgcccataaagcagaagaacttccgttaatc

SEQ ID NO: 127462 - DNA, 75 bp, synthetic construct
  source 1..75: mol_type = other DNA
cacgtgcaaaccgtatgcatatacccatccgtgatctgcttcttctcagtgttaatatattattgggtgatcagc

SEQ ID NO: 127463 - DNA, 75 bp, synthetic construct
  source 1..75: mol_type = other DNA
gtgttttttgggggagagcttagtttgaaaaaaatattgtttacttttttgtttgtcgtttcttcagtcgtgaat

SEQ ID NO: 127464 - DNA, 75 bp, synthetic construct
  source 1..75: mol_type = other DNA
atttgcagaatgagacggtcgtcccatccataagcccgatttcgctttcacttaacccctggtcgatcaattctc

SEQ ID NO: 127465 - DNA, 75 bp, synthetic construct
  source 1..75: mol_type = other DNA
tgcttaccgtcgtcttgctcatgttggcaccggctctcgcccaggtgatgacagtgatgtgcgggtctatacctc

SEQ ID NO: 127466 - DNA, 75 bp, synthetic construct
  source 1..75: mol_type = other DNA
taatccgcagtttgacagcattctgcgcaaggccctctcttcgcagcagctttcatcgcgaattgacgcctatga

SEQ ID NO: 127467 - DNA, 75 bp, synthetic construct
  source 1..75: mol_type = other DNA
aaaacaagcagcggtctcattgtcgacacgttagcggcacaattgtatgaccgactgctagatgtggacccctac

SEQ ID NO: 127468 - DNA, 75 bp, synthetic construct
  source 1..75: mol_type = other DNA
gacatctggagcagcacaaaacgttgccactggtcattccggtgctgttctatcacggtgagcgcagcccgtacc

SEQ ID NO: 127469 - DNA, 75 bp, synthetic construct
  source 1..75: mol_type = other DNA
acttaaatttgccaaccaagtgtatatcgataccggagcagtgttctgcggaaacctcacattgattcaggtaca

SEQ ID NO: 127470 - DNA, 75 bp, synthetic construct
  source 1..75: mol_type = other DNA
cctgaagtatgccaaccagatgtacatcgacaccggcgccgtgttctgcggaaacctcacgctggtaaaggtgca

SEQ ID NO: 127471 - DNA, 75 bp, synthetic construct
  source 1..75: mol_type = other DNA
atgggtaaaacgaacgactggctggactttgatcaactggcggaagaaaaagttcgcgacgcgctaaaaccgcca

SEQ ID NO: 127472 - DNA, 75 bp, synthetic construct
  source 1..75: mol_type = other DNA
cctgaagtataccaaccagatgtacatcgacacaggagcggtgttttgcggaaacctcacgctggttcaggtgca

SEQ ID NO: 127473 - DNA, 75 bp, synthetic construct
  source 1..75: mol_type = other DNA
ctggctggtaaatggtggcggttggttcttcaatctcgactatgacaaagaagtgctggctaaggctctggttca

SEQ ID NO: 127474 - DNA, 75 bp, synthetic construct
  source 1..75: mol_type = other DNA
tgcatacccttgccgggaaagcgatggttcagcatgtcattgatgctgcgaatgaattaggcgcagcgcacgttc

SEQ ID NO: 127475 - DNA, 75 bp, synthetic construct
  source 1..75: mol_type = other DNA
tggcgaagctgaccaacaataatgctcagggtgaatactacatcaccgacattattgcgctggcgtatcaggaag

SEQ ID NO: 127476 - DNA, 75 bp, synthetic construct
  source 1..75: mol_type = other DNA
ctgagttgaatgcagagctgaaaaccacggtcagcaaaatcgaccagttgcgcaaagatattgatgcgattgtgg

SEQ ID NO: 127477 - DNA, 75 bp, synthetic construct
  source 1..75: mol_type = other DNA
ttgaagggctaaaacttggtgacttccatgaacatcagattgacctgttcggtgacgcctatgagttcctgattt

SEQ ID NO: 127478 - DNA, 75 bp, synthetic construct
  source 1..75: mol_type = other DNA
cgtcaataaaatctatgaccctgcggccggttcaggttctctgctgcttcaggccaagaaacactttgataatca

SEQ ID NO: 127479 - DNA, 75 bp, synthetic construct
  source 1..75: mol_type = other DNA
ctttgccgatgatgaagacattttaatgctctacggcgacgtgccgctgatctctgtcgaaacactccagcgcct

SEQ ID NO: 127480 - DNA, 75 bp, synthetic construct
  source 1..75: mol_type = other DNA
gaaaatccgtcagtatctggtcgataataactatgtagaaaccgtgatttcactggcaccaaacctgttctttgg

SEQ ID NO: 127481 - DNA, 75 bp, synthetic construct
  source 1..75: mol_type = other DNA
aactggctatgcacgggcagacccacgttaacaaaatctacgacccggccgcaggttccggttcgctgttgttgc

SEQ ID NO: 127482 - DNA, 75 bp, synthetic construct
  source 1..75: mol_type = other DNA
cactggctccgaacctgttctttggcaccaccattgccgtcaatattctggtgttgtctaaacataaaaccgata

SEQ ID NO: 127483 - DNA, 75 bp, synthetic construct
  source 1..75: mol_type = other DNA
gttctggcccccaaatccaaagctgactttgcgtttgtattacatgcgctgaactatctttcggccaaaggtcgc

SEQ ID NO: 127484 - DNA, 75 bp, synthetic construct
  source 1..75: mol_type = other DNA
ttgtagcgaatgactataacctgtcagtgagcagctatgtggaagcgaaagataaccgcgaaataatcaatattg

SEQ ID NO: 127485 - DNA, 75 bp, synthetic construct
  source 1..75: mol_type = other DNA
catcatttgctgatgtgccgccatttgccggacggcggcaagctgacactgaccaattttcattttacccattat

SEQ ID NO: 127486 - DNA, 75 bp, synthetic construct
  source 1..75: mol_type = other DNA
acccaccgtttaacgtttccgactggtctggtgagcagcttcgtggtgatgcccgctggcaatatggcattccac

SEQ ID NO: 127487 - DNA, 75 bp, synthetic construct
  source 1..75: mol_type = other DNA
atgggcaggagtccaaccagaccacttggcgtctggcaaaaatgaacctggcaattcgtgggattaattctgaac

SEQ ID NO: 127488 - DNA, 75 bp, synthetic construct
  source 1..75: mol_type = other DNA
aatctgctaaaaatgacgtgtaatccgacagataagaaaactctgttttctctcataccgtcaacaacaggagca

SEQ ID NO: 127489 - DNA, 75 bp, synthetic construct
  source 1..75: mol_type = other DNA
gtctatgctcgccagaacctcgacgccactgtacttggtgaactgatagatctgattggcaacattgcactaggt

SEQ ID NO: 127490 - DNA, 75 bp, synthetic construct
  source 1..75: mol_type = other DNA
ctggcgtctggcaaaaatgaacctggcaattcgtggcattaactccgaacacgttcgctggaataatgaaggttc

SEQ ID NO: 127491 - DNA, 75 bp, synthetic construct
  source 1..75: mol_type = other DNA
ggcaaacagggcggtcagttctatacgccaaaatccatcgtaagcctgctggttaacatgctggaaccctataaa

SEQ ID NO: 127492 - DNA, 75 bp, synthetic construct
  source 1..75: mol_type = other DNA
accgttcgatgcgattgtctctaaccctccgtactcggttaagtggattggcagtgacgacccgaccctgattaa

SEQ ID NO: 127493 - DNA, 75 bp, synthetic construct
  source 1..75: mol_type = other DNA
ggcgatgcctatgagttcctgatttctaactatgccgcgaatgccggtaagtcaggcggcgagttctttacaccg

SEQ ID NO: 127494 - DNA, 75 bp, synthetic construct
  source 1..75: mol_type = other DNA
cagcaaggaagatgttgctcatctggcaaaatctgtcgcgtttgaaaccattgtagcgaatgactataacctgtc

SEQ ID NO: 127495 - DNA, 75 bp, synthetic construct
  source 1..75: mol_type = other DNA
ctatgttgctaatagccggatgctcctcatcacaggaagctgtcaataatcagatagatgagttaggaaaagaaa

SEQ ID NO: 127496 - DNA, 75 bp, synthetic construct
  source 1..75: mol_type = other DNA
atgacaagtattcaacaacgtgcagagcttcatcgccagatctggcaaattgccaatgatgtcagaggttctgtt

SEQ ID NO: 127497 - DNA, 75 bp, synthetic construct
  source 1..75: mol_type = other DNA
agcaaaatcgaccagttgcgcaaagatattgatgcgattgtggctgaaattgaaggctgcgaggtgcagaaatga

SEQ ID NO: 127498 - DNA, 75 bp, synthetic construct
  source 1..75: mol_type = other DNA
gggcgatgcggaaatcggtgataacgttaacatcggtgcaggaaccattacctgcaactatgatggtgcgaataa

SEQ ID NO: 127499 - DNA, 75 bp, synthetic construct
  source 1..75: mol_type = other DNA
gtgaagcgggtgtcccggtgaccgaactacgtgccggaattatcgttggcgcgggttcagcggcattcgaagtca

SEQ ID NO: 127500 - DNA, 75 bp, synthetic construct
  source 1..75: mol_type = other DNA
ttcggtgtggtttctcaatgtgattacctccgttccctctactactgccaaagcgttgattcaggggctgaaaca

SEQ ID NO: 127501 - DNA, 75 bp, synthetic construct
  source 1..75: mol_type = other DNA
cgatgtgtttgtcggttccgacactcagctggtggccccggtaacagtaggcaaaggcgcgaccattgctgcggg

SEQ ID NO: 127502 - DNA, 75 bp, synthetic construct
  source 1..75: mol_type = other DNA
cgcgaatctggcagcggcctgtactattggcccgtttgcccgtctgcgtcctggtgctgagttgctggaaggtgc

SEQ ID NO: 127503 - DNA, 75 bp, synthetic construct
  source 1..75: mol_type = other DNA
gtctggagcgcgtttaccagtccgaacaggctgaaaaactgctgttagcaggcgttatgctgcgcgatccggcgc

SEQ ID NO: 127504 - DNA, 75 bp, synthetic construct
  source 1..75: mol_type = other DNA
gaacatcgcatcttcgaagccgccggaccagaagtgctcagttatcagcaacagtttgaacattttatggcggtg

SEQ ID NO: 127505 - DNA, 75 bp, synthetic construct
  source 1..75: mol_type = other DNA
cgatctgctggcagatgacaccgcactacgcgcgctcatcccacaaccgttaatcgccttcgatgacgcggtacg

SEQ ID NO: 127506 - DNA, 75 bp, synthetic construct
  source 1..75: mol_type = other DNA
ttttgtggcaaacccgggcgttgatggaccgcgcgatcggtcataagctggcgaaaggccgcccggagcgtgaat

SEQ ID NO: 127507 - DNA, 75 bp, synthetic construct
  source 1..75: mol_type = other DNA
tcagttcattgcaggccccgcctcacgagcagtcggaccatctgcgcgcccgtcaggctacggcggatattcttc

SEQ ID NO: 127508 - DNA, 75 bp, synthetic construct
  source 1..75: mol_type = other DNA
caacgtccgtgatgcgctgcgtgaagtgccggttaagcaagtcatctttcttagttcattgcaggctccgcccca

SEQ ID NO: 127509 - DNA, 75 bp, synthetic construct
  source 1..75: mol_type = other DNA
gtgccgcaacgcattttagttctcggtgccagtggctacattggtcagcatctggtgcgcacactcagccagcag

SEQ ID NO: 127510 - DNA, 75 bp, synthetic construct
  source 1..75: mol_type = other DNA
atatttaaaactaggacaatgggccgtcttatttttgaccctcaaggagatgttagagaggaagagcaacgatta

SEQ ID NO: 127511 - DNA, 75 bp, synthetic construct
  source 1..75: mol_type = other DNA
gtgttgaggctgctctcaacgctgaactgactcaccatctgggacatgaaaaaaatcagcccaaatcgggaacca

SEQ ID NO: 127512 - DNA, 75 bp, synthetic construct
  source 1..75: mol_type = other DNA
cctaaaaaaggctctgatgcccgcaatggctactcgtcaaaaacgctgctttgcgatgacggcgagattgagctg

SEQ ID NO: 127513 - DNA, 75 bp, synthetic construct
  source 1..75: mol_type = other DNA
cgaactgttcaaaaaagagactaataacaacatcctgaccgatgctcatatcgaacagattatgcaggtatttgc

SEQ ID NO: 127514 - DNA, 75 bp, synthetic construct
  source 1..75: mol_type = other DNA
caggaaatcaaccatacgacctataacctggcgcgtatgaacatgttcctgcacaacatcaactacgacaaattt

SEQ ID NO: 127515 - DNA, 75 bp, synthetic construct
  source 1..75: mol_type = other DNA
ctaagaataaaaacaaatttgtggatgaggcacttttcaataacaatacaaacagtcttttccttgagagacatc

SEQ ID NO: 127516 - DNA, 75 bp, synthetic construct
  source 1..75: mol_type = other DNA
gaccgttatcatcggtgatggccccctggaactacgcactccgcgcgatcgtgatggctcttttgaaccgcaact

SEQ ID NO: 127517 - DNA, 75 bp, synthetic construct
  source 1..75: mol_type = other DNA
agaatttgatagaagtgcaaaatcaatagtctatactggtccaatagatagatactttgactatcgatttggtcg

SEQ ID NO: 127518 - DNA, 75 bp, synthetic construct
  source 1..75: mol_type = other DNA
aaaagaatattatttatcaatagctgataagattatattcaccggaatgattgatcagtattatgattattgcta

SEQ ID NO: 127519 - DNA, 75 bp, synthetic construct
  source 1..75: mol_type = other DNA
catcgtgaacgtattggcggcattacgctggatgctgatttagcccccggtgaatatcgtccgttaactgaagaa

SEQ ID NO: 127520 - DNA, 75 bp, synthetic construct
  source 1..75: mol_type = other DNA
tctattttctggatgaaccggtagcgtggaaactgcacgccgcagggcgtctggatatcgataccaccggtctgg

SEQ ID NO: 127521 - DNA, 75 bp, synthetic construct
  source 1..75: mol_type = other DNA
cgttgtatgccaaagggatggccacccgtgagatagctgctgcgttcaaagaactgtatgacgcagatgtttcac

SEQ ID NO: 127522 - DNA, 75 bp, synthetic construct
  source 1..75: mol_type = other DNA
atgctggcaggtcgtgatcttaaggccgtgttcgcattaggtgccggcgttgattcgattttgagtaaattacag

SEQ ID NO: 127523 - DNA, 75 bp, synthetic construct
  source 1..75: mol_type = other DNA
ctgttccactttttcgcctggaagataccggtatgggtgagcaaatgcaggaatatgctgttagccaggttctac

SEQ ID NO: 127524 - DNA, 75 bp, synthetic construct
  source 1..75: mol_type = other DNA
ttctgcataagagtattggacttaatgcgctgcttatcatggatgccaacatgtgttggcatattagctttatta

SEQ ID NO: 127525 - DNA, 75 bp, synthetic construct
  source 1..75: mol_type = other DNA
gtgctggcacccagcaattacgagaaagaattagccgtgttttgggcgacgttattacgccagatcatcataaac

SEQ ID NO: 127526 - DNA, 75 bp, synthetic construct
  source 1..75: mol_type = other DNA
ccaaagagcagttgattgagcaggctaagaagaatattgaggttcttcgcgttgcggtggaaagagtcccgggcg

SEQ ID NO: 127527 - DNA, 75 bp, synthetic construct
  source 1..75: mol_type = other DNA
aaccgtgacaaaaactgctcttatgattaccttctgcatccggcaatttctatttctaaaatcattggcggctgc

SEQ ID NO: 127528 - DNA, 75 bp, synthetic construct
  source 1..75: mol_type = other DNA
atgaacaaatttattaaagttgcactggtaggtgcagtactggctacgttaactgcatgtactggtcatattgaa

SEQ ID NO: 127529 - DNA, 75 bp, synthetic construct
  source 1..75: mol_type = other DNA
attgaaactaatttaacagaggaggtccttgatattgaagacctaaatatcaatcttatagccaatttatctaaa

SEQ ID NO: 127530 - DNA, 75 bp, synthetic construct
  source 1..75: mol_type = other DNA
atggctaacctacgcaaagaagcacgcggcagagaatgccaggtacgtatttacggcgtatgcaatggcaatcct

SEQ ID NO: 127531 - DNA, 75 bp, synthetic construct
  source 1..75: mol_type = other DNA
cgtcgagcattgaacatgacggtcaggcgatgtttgccggattaacaaacccactaccggttgcgcgttatcact

SEQ ID NO: 127532 - DNA, 75 bp, synthetic construct
  source 1..75: mol_type = other DNA
gaaaacccgcaccctgttcaacgtgctggggccattgattaacccggcgcatccgccgctggcgctaattggtgt

SEQ ID NO: 127533 - DNA, 75 bp, synthetic construct
  source 1..75: mol_type = other DNA
agtacatggaagagaaggatgtcgccagcatgtcaggccgtctgctcaatcgctgggggagaacgaaaaaacctc

SEQ ID NO: 127534 - DNA, 75 bp, synthetic construct
  source 1..75: mol_type = other DNA
tcgatggatcgctgggatcatggtggtctggggagttgcttccacctgcacaatgtttgcaacaagccccgaaac

SEQ ID NO: 127535 - DNA, 75 bp, synthetic construct
  source 1..75: mol_type = other DNA
accatcgcatgcagcagttgccacgacgagattgatcgccgcacccgtctggtcgatgcggaatttgcaaaggag

SEQ ID NO: 127536 - DNA, 75 bp, synthetic construct
  source 1..75: mol_type = other DNA
gcaacagtatcaatatttctaccgccagtgcgtttgtcgccgcggcctgtgggctgaaagtggcgaaacacggca

SEQ ID NO: 127537 - DNA, 75 bp, synthetic construct
  source 1..75: mol_type = other DNA
ggctgactggattgtgcggcaccggtaccaaaccgccagacctgattgccaccattgcatgttctgcctgccacg

SEQ ID NO: 127538 - DNA, 75 bp, synthetic construct
  source 1..75: mol_type = other DNA
cgactctaaagagaacaataaccatattgttagggaatttgatttaagggttatatctactgataaagcagaggc

SEQ ID NO: 127539 - DNA, 75 bp, synthetic construct
  source 1..75: mol_type = other DNA
aacaaacgctggcctgggcgcagcagaaactagagccaaccaacacgctgcaaccgattctggaaaaactgtatc

SEQ ID NO: 127540 - DNA, 75 bp, synthetic construct
  source 1..75: mol_type = other DNA
gccggaactcctcacccgcctgcgcggcaagctggctattattggcatttgcctcggtcatcaggcgattgtcga

SEQ ID NO: 127541 - DNA, 75 bp, synthetic construct
  source 1..75: mol_type = other DNA
gggctgaaagtggcgaaacacggcaaccgtagcgtctccagtaaatctggttcgtccgatctgctggcggcgttc

SEQ ID NO: 127542 - DNA, 75 bp, synthetic construct
  source 1..75: mol_type = other DNA
ttgtcctgaaggttcggcaggacagtcgcgtaatcaataaatccgtattcctcgcactgggtatcaatatcgaag

SEQ ID NO: 127543 - DNA, 75 bp, synthetic construct
  source 1..75: mol_type = other DNA
gcaacagcctgcggttcgtggcgtggaaagactataaagcggtaatccgtgacctgaaacaggtttaccgcgcag

SEQ ID NO: 127544 - DNA, 75 bp, synthetic construct
  source 1..75: mol_type = other DNA
gctgaagaaaaatcagacccgcattaccggcatggataaccaaatcctgtcgctgtacgccaaagggatgaccac

SEQ ID NO: 127545 - DNA, 75 bp, synthetic construct
  source 1..75: mol_type = other DNA
tagtgtggccagttccacttctgtccggtttttccagctcttacggtgtattacctccgctttgtaaagaccatt

SEQ ID NO: 127546 - DNA, 75 bp, synthetic construct
  source 1..75: mol_type = other DNA
actgaaaaatcgcgggctgaacgatatccttatcgcctgtgtggacggcctgaaaggcttcccggaagcgattaa

SEQ ID NO: 127547 - DNA, 75 bp, synthetic construct
  source 1..75: mol_type = other DNA
tatcgtcctgaaagtcggcagacagtcgcggtcatcaacaaatcgtgtctgccactgggcatcattatcgagtca

SEQ ID NO: 127548 - DNA, 75 bp, synthetic construct
  source 1..75: mol_type = other DNA
tgaaagttcggcaggacagtcgcgtcatcaacaaatcggtgttcctggcactgggcatcaatatcgaaggtcaga

SEQ ID NO: 127549 - DNA, 75 bp, synthetic construct
  source 1..75: mol_type = other DNA
ttgatggtaaccacccatcgtccttcagcgtttaaggcattgaacctgcgaacctcgccaacacactggtactgc

SEQ ID NO: 127550 - DNA, 75 bp, synthetic construct
  source 1..75: mol_type = other DNA
tggaagactgttatttcaaccaaaaacaaccaccagcggcacaaaacacatctatcgaaaatgatggatgcgcat

SEQ ID NO: 127551 - DNA, 75 bp, synthetic construct
  source 1..75: mol_type = other DNA
cagctctgcatcatccatatggtgcgcaacagcctgaaattcgtgtcgtggaaggattacaaagccgtcaccagc

SEQ ID NO: 127552 - DNA, 75 bp, synthetic construct
  source 1..75: mol_type = other DNA
tggctggccgaaaatgaaggcgcaaagttctggctgaatgtgctgacggagctgaaaaatcgtggcctccaggac

SEQ ID NO: 127553 - DNA, 75 bp, synthetic construct
  source 1..75: mol_type = other DNA
atgttgacaaagcttaccgtcgaaacggcgctcaatgcagaactgactgaccatctcggtcatgagaaaaatgct

SEQ ID NO: 127554 - DNA, 75 bp, synthetic construct
  source 1..75: mol_type = other DNA
ctgtgttgcgtagactggcaggcaactatccggatattccggatagttcggtgccagcgccaggaaagggcgtca

SEQ ID NO: 127555 - DNA, 75 bp, synthetic construct
  source 1..75: mol_type = other DNA
aatttaaatattttacaagtaaaaggtagaagcgacttattcctccaacttgagataatgaagaagttaataggt

SEQ ID NO: 127556 - DNA, 75 bp, synthetic construct
  source 1..75: mol_type = other DNA
tgctacaggataaatatcccggccagtaccccaacagccttcgaagaacaatgcaacggcgggttcgcgaatgga

SEQ ID NO: 127557 - DNA, 75 bp, synthetic construct
  source 1..75: mol_type = other DNA
ttacgcaacggataacgtctggatcgataatagtgaaatcagccagggtgcatatataagtgacagtgtcaccat

SEQ ID NO: 127558 - DNA, 75 bp, synthetic construct
  source 1..75: mol_type = other DNA
ggaaggtaattgtgtgttaaaacatcatgtcttgattggcggaaatgccgtggtacgtggcggaccgattctgct

SEQ ID NO: 127559 - DNA, 75 bp, synthetic construct
  source 1..75: mol_type = other DNA
tggcaatcgctgggatgatggcaccgaatatccggatccgcactcagttacgcactggcgtgaaatgccagcagc

SEQ ID NO: 127560 - DNA, 75 bp, synthetic construct
  source 1..75: mol_type = other DNA
gttcccgacagacgactcggtgaaaaagtggtgtggctggcaatccagtctgcgtcccagaaatggacgatgccg

SEQ ID NO: 127561 - DNA, 75 bp, synthetic construct
  source 1..75: mol_type = other DNA
tggacgatgccgttgaaggactggcgtatggcaatgagccgctttattatcgacttcggtgaccgcctgggtggt

SEQ ID NO: 127562 - DNA, 75 bp, synthetic construct
  source 1..75: mol_type = other DNA
aaaaatcagtccaaaccgggaactaactcccgcaacggttattccacaaagaccgttatcacaggcgacggtcca

SEQ ID NO: 127563 - DNA, 75 bp, synthetic construct
  source 1..75: mol_type = other DNA
gtatcgatatgcggatgacaaactgggcgaagatttttaccaggatgcgataatctactccatcaaatttaactt

SEQ ID NO: 127564 - DNA, 75 bp, synthetic construct
  source 1..75: mol_type = other DNA
cgagtttgaccgtgacgctacctatgcagcgggtaatggcggtaaagaagggctgaatggcgcagttgcactgtg

SEQ ID NO: 127565 - DNA, 75 bp, synthetic construct
  source 1..75: mol_type = other DNA
gtgtatctggcgatcaaggatgcgtcgaaaaaatggcgtatgccgatccagaactggcggctggcaatgagtcgt

SEQ ID NO: 127566 - DNA, 75 bp, synthetic construct
  source 1..75: mol_type = other DNA
gcgtttagcccggatgcgaaagtcggcttcctggccattgctaacaagttccaggcaatgatcgacagcggcaat

SEQ ID NO: 127567 - DNA, 75 bp, synthetic construct
  source 1..75: mol_type = other DNA
cagcatcggacgttatttacccggtaatgctcaggtcaaaaataaaataaaacgtgttgatcgtctgctcggtaa

SEQ ID NO: 127568 - DNA, 75 bp, synthetic construct
  source 1..75: mol_type = other DNA
aaagactctattacaggcttaaaggaattcgcagagaatatcaagccagctaagttaaggtttgatactgtcact

SEQ ID NO: 127569 - DNA, 75 bp, synthetic construct
  source 1..75: mol_type = other DNA
atgaaacagaatctttctgatctcgttcctgatcaatataaaggcgctggcactgcaacaactgcacctgataat

SEQ ID NO: 127570 - DNA, 75 bp, synthetic construct
  source 1..75: mol_type = other DNA
acccattatgcttcggtcatgtcggcagaatatgcccggaagttagagaaagaagatcgccaggagcaactcgac

SEQ ID NO: 127571 - DNA, 75 bp, synthetic construct
  source 1..75: mol_type = other DNA
ctgtattcctggtaatgacgcatttacagtacgatatactcctactggttatatctatgcacaaactgtaatttt

SEQ ID NO: 127572 - DNA, 75 bp, synthetic construct
  source 1..75: mol_type = other DNA
tgttgctttcggtggtatgcgtacaactggctggctagccgttccacgttccgtagcatggggtacagaatttta

SEQ ID NO: 127573 - DNA, 75 bp, synthetic construct
  source 1..75: mol_type = other DNA
gaataatgcacttagtgggctttctgactcacaagggatcgcctttgttgatggctttatgaaatctcttgatcc

SEQ ID NO: 127574 - DNA, 75 bp, synthetic construct
  source 1..75: mol_type = other DNA
cgatagcggcatcaatactttaatgaatgaaggattcctaactaaaaaggatctaaaagactttgctgataatcc

SEQ ID NO: 127575 - DNA, 75 bp, synthetic construct
  source 1..75: mol_type = other DNA
aaagcagaagtagaaaaacttcgtaaacaaatggcggcggtgaaagatatagaattgcgtgttaagacacataaa

SEQ ID NO: 127576 - DNA, 75 bp, synthetic construct
  source 1..75: mol_type = other DNA
agcctctggaaaatggctaacagaaacacagcaagactctattgttaaattcagagaactaaacagacagctttc

SEQ ID NO: 127577 - DNA, 75 bp, synthetic construct
  source 1..75: mol_type = other DNA
agcagcacgcagtgagaaggcagccttaaaactgttagacgttggatcaagcattagtgcaatgcaccgtctctc

SEQ ID NO: 127578 - DNA, 75 bp, synthetic construct
  source 1..75: mol_type = other DNA
tgctggcgtgatggctgcaagcaaaaccgccgagtttatggctaatagcttcgctaacgcagagacccaagggga

SEQ ID NO: 127579 - DNA, 75 bp, synthetic construct
  source 1..75: mol_type = other DNA
gatagtctttcacaacgtgaccgccaggcctttgccgcggagctggagaagtggtggctggaagtgcaacgtagt

SEQ ID NO: 127580 - DNA, 75 bp, synthetic construct
  source 1..75: mol_type = other DNA
atggcaatttcatcgcgtaacacacttcttgccgcactggcattcatcgcttttcaggcgcaagcggtgaacgtc

SEQ ID NO: 127581 - DNA, 75 bp, synthetic construct
  source 1..75: mol_type = other DNA
cactggaattggtaagcttctgttatttgagcttcctgattatttcaggtgcatttgtcacgcaatacattcgca

SEQ ID NO: 127582 - DNA, 75 bp, synthetic construct
  source 1..75: mol_type = other DNA
gcggctggtttcgatgttgccgataacgaaatcgtacgccagtgtgcggcgggggatttagtggtaaccgcggat

SEQ ID NO: 127583 - DNA, 75 bp, synthetic construct
  source 1..75: mol_type = other DNA
cgtgtcccaatgtaattaaagagattttgtatcgcgcggctgaacgtatgcagatgccgctggtactggtagcaa

SEQ ID NO: 127584 - DNA, 75 bp, synthetic construct
  source 1..75: mol_type = other DNA
gcgcttaatccgcgcggcgaacgttacacgccagcgaccattcgtgagcgcctgacgatgcgcgattttatggat

SEQ ID NO: 127585 - DNA, 75 bp, synthetic construct
  source 1..75: mol_type = other DNA
gtacttagcccgtttggtaacgcctcctttgctggggtgtatcgcgagaaacaggatgaggtgaaaaaaccatga

SEQ ID NO: 127586 - DNA, 75 bp, synthetic construct
  source 1..75: mol_type = other DNA
cgtaaggcgctctcctcgcagcagctggcggcgcgtattgaagcctatgacgaagcgcagagtattctggcgcag

SEQ ID NO: 127587 - DNA, 75 bp, synthetic construct
  source 1..75: mol_type = other DNA
taaaagtggtgattgtgccggtagaaggtcgctttcaggaggcgcggttgatggatatgagccatgatctgacgt

SEQ ID NO: 127588 - DNA, 75 bp, synthetic construct
  source 1..75: mol_type = other DNA
gttgatgccgcaggtggtggtggatttaggctctggtggcaccggacgtctgtcgaaactattgaccggtgaatg

SEQ ID NO: 127589 - DNA, 75 bp, synthetic construct
  source 1..75: mol_type = other DNA
gcggttttgtctattgcgtcagcggacaggtcaacacctttaacccatccaaagcgagcagtgggttaattgtcg

SEQ ID NO: 127590 - DNA, 75 bp, synthetic construct
  source 1..75: mol_type = other DNA
ccgactggtttactcccactcgtaaaatgaatgccgacgatgtggtgtttaccttccagcgaatttttgaccgca

SEQ ID NO: 127591 - DNA, 75 bp, synthetic construct
  source 1..75: mol_type = other DNA
actatccatcgcctacggtatcgctcaggcgatgcatcgcgaaggagctgaactggcattcacctaccagaacga

SEQ ID NO: 127592 - DNA, 75 bp, synthetic construct
  source 1..75: mol_type = other DNA
gtgagaaagttaagccgacttgaaaaatatcacatgaacaaggtttcaatgcgccgtccttcaaaggttatcgcc

SEQ ID NO: 127593 - DNA, 75 bp, synthetic construct
  source 1..75: mol_type = other DNA
aaaataatcagacaccaaaaaaacaaagacccggcatatccctttcgggaacatttgttgatgcaactctgtatt

SEQ ID NO: 127594 - DNA, 75 bp, synthetic construct
  source 1..75: mol_type = other DNA
acgggtgcagatgcaggatgtggaaagcggcgaggttctgctgtttgatatcgccgccggtgaaaaagggccgac

SEQ ID NO: 127595 - DNA, 75 bp, synthetic construct
  source 1..75: mol_type = other DNA
gttgcactgaaactgacgagtacggtaagccgcaaaattatccttgatccgcgggcacttcagggaaaattcatt

SEQ ID NO: 127596 - DNA, 75 bp, synthetic construct
  source 1..75: mol_type = other DNA
ttcaacattgtacgttatcttggtgcattttatttgctctatctggggagtaaaattctctacgcgaccctgaag

SEQ ID NO: 127597 - DNA, 75 bp, synthetic construct
  source 1..75: mol_type = other DNA
gctgataaagtgaaagataagctggaaatgacagcgacgttaaccgggctggattacgggcgtttcacccgttcg

SEQ ID NO: 127598 - DNA, 75 bp, synthetic construct
  source 1..75: mol_type = other DNA
gcacgtaaccagccggacggtaatttgcaggtgccgcgcgtagagctggcgcgctgtgcagacggcaaaatcctc

SEQ ID NO: 127599 - DNA, 75 bp, synthetic construct
  source 1..75: mol_type = other DNA
ctaccgccctggcgcaacatgctgagcaacgcccactgcgtcagcacctggtcgcgctacatggacagattgttc

SEQ ID NO: 127600 - DNA, 75 bp, synthetic construct
  source 1..75: mol_type = other DNA
atggcgcactggatatgaccaaaggttccgccagcgatctggaatcttttgataatatttatgccatctataatt

SEQ ID NO: 127601 - DNA, 75 bp, synthetic construct
  source 1..75: mol_type = other DNA
agtatcaacaacaaatagaacaacgccatcagcaactctctgcaacattagcaagttacgcgctgacattaccgc

SEQ ID NO: 127602 - DNA, 75 bp, synthetic construct
  source 1..75: mol_type = other DNA
ggattacgggcgtttcacccgttcgatgctgctttcgcagggacaatttgctgccttcctcaatgccaaaccgaa

SEQ ID NO: 127603 - DNA, 75 bp, synthetic construct
  source 1..75: mol_type = other DNA
tgactagcgcgcttgcgggtaagcaaccgaaagatgccaccctgacggcgctggccgggcttgctactgcggcag

SEQ ID NO: 127604 - DNA, 75 bp, synthetic construct
  source 1..75: mol_type = other DNA
aaacttattaacgagtgcacgtgctgatattcagtcactgcaatacagaactatttcagcaatatcccttggtaa

SEQ ID NO: 127605 - DNA, 75 bp, synthetic construct
  source 1..75: mol_type = other DNA
ttgctagtgcgaatgcgagtacttcgacatcaatggcctatgatttagggagcatgtcgaaagatgacgttattg

SEQ ID NO: 127606 - DNA, 75 bp, synthetic construct
  source 1..75: mol_type = other DNA
tgcccgcatgacctttcaggatgccctgaaaacgctcagcgacggcggtgtgccgtggctgcaggagcgcctgat

SEQ ID NO: 127607 - DNA, 75 bp, synthetic construct
  source 1..75: mol_type = other DNA
ctgctcaacctctccacgctgattggtgcccgcatgacctttcaggatgccctgaaaacgctcagcgacggcggt

SEQ ID NO: 127608 - DNA, 75 bp, synthetic construct
  source 1..75: mol_type = other DNA
atgatcagcgctctacaagagcgagcgcaatccgctgttacagtcatggagcaaagtagtcggcaagcgcacacg

SEQ ID NO: 127609 - DNA, 75 bp, synthetic construct
  source 1..75: mol_type = other DNA
tttattggcgatgcggtattgatgtttctggcatgggctggagtggcgacattaattaagaccaccccgatatta

SEQ ID NO: 127610 - DNA, 75 bp, synthetic construct
  source 1..75: mol_type = other DNA
atcaagtattcttaatctttctgtttctgatagtttatttcccggggcaggccttgatgcacctggtctctgatc

SEQ ID NO: 127611 - DNA, 75 bp, synthetic construct
  source 1..75: mol_type = other DNA
ccagcgatgcggccggtcagtcaggtggtgcagaccggagtgcttccggagcaggctcgtcagcccccaccggca

SEQ ID NO: 127612 - DNA, 75 bp, synthetic construct
  source 1..75: mol_type = other DNA
ttaaagattcacgaaatgggatttccataagtagtgatattgatatcaaccaacctttgggtgttggtgacctgc

SEQ ID NO: 127613 - DNA, 75 bp, synthetic construct
  source 1..75: mol_type = other DNA
aagatttaaaaggcggcgaaaagatccgcacgtggtatgggtataaatttattatagctgccttttcttttgggc

SEQ ID NO: 127614 - DNA, 75 bp, synthetic construct
  source 1..75: mol_type = other DNA
atgagccccaatacggtgccatttttaaacgcgcgttaattttgagcctgactaatccgaaagccattttgttct

SEQ ID NO: 127615 - DNA, 75 bp, synthetic construct
  source 1..75: mol_type = other DNA
gcaacaactttaaaaatctgtttctctatgccccacaggggaaagccgacggcattaaaattatcccgctcagtg

SEQ ID NO: 127616 - DNA, 75 bp, synthetic construct
  source 1..75: mol_type = other DNA
gtaatgcgtttctggaaaagcgctacagcaccaccggtaaggtcatcagactggaaacctcaccggcaaaatatc

SEQ ID NO: 127617 - DNA, 75 bp, synthetic construct
  source 1..75: mol_type = other DNA
atgagcaagaaaaaagggaaaacaccgcagccagcggtgaaaacaatgaccgccagcgccccgaaaatggaggca

SEQ ID NO: 127618 - DNA, 75 bp, synthetic construct
  source 1..75: mol_type = other DNA
ttccgtcagccctgctcaacgagtccgccacgctgttccgccggaagtattacattaacggcagtcatgcagctt

SEQ ID NO: 127619 - DNA, 75 bp, synthetic construct
  source 1..75: mol_type = other DNA
accggacattaaccaagagatctacggcctgcccggctatctttctgccattccgtccgccctgctcaatgagtc

SEQ ID NO: 127620 - DNA, 75 bp, synthetic construct
  source 1..75: mol_type = other DNA
tacggcctgccaggttatctttctgccatcccgtcagccctgctcaacgagtccgccacactgttccgccgtaag

SEQ ID NO: 127621 - DNA, 75 bp, synthetic construct
  source 1..75: mol_type = other DNA
cgggatgacatgatggctgcccaccgcgtgccgcctcagatgatggggattatgcctagcaatgttggggggttt

SEQ ID NO: 127622 - DNA, 75 bp, synthetic construct
  source 1..75: mol_type = other DNA
gaaccgattcggtgaagttatcgcccttgagcctgccctggcaaaatacacccgacgtggattagacctggatac

SEQ ID NO: 127623 - DNA, 75 bp, synthetic construct
  source 1..75: mol_type = other DNA
aaggacgggcttcagattatcccgttgtcagaggtcgcagcgaaggatgagtttttgaatatcaagaacgtgagc

SEQ ID NO: 127624 - DNA, 75 bp, synthetic construct
  source 1..75: mol_type = other DNA
cccgctgttatcccgtcaggacttcacccggttcgcactcgactatctggtgtttggcaatgcgtttatcgaaga

SEQ ID NO: 127625 - DNA, 75 bp, synthetic construct
  source 1..75: mol_type = other DNA
tatctggtctttgcgaatggttatcttgagaagcgcatgagtgttacaggtcagcttttaaaactggaaacatcg

SEQ ID NO: 127626 - DNA, 75 bp, synthetic construct
  source 1..75: mol_type = other DNA
atgagcaagaaaaaagggaaaacacagcaacctgcggcaaaaaaaatgaccgccagcgccccgaaaatggaggca

SEQ ID NO: 127627 - DNA, 75 bp, synthetic construct
  source 1..75: mol_type = other DNA
ctggtggagcaggctaatagcgtaaacgaatgccttgatgctaattatccgtcctccactgcaacattgattcag

SEQ ID NO: 127628 - DNA, 75 bp, synthetic construct
  source 1..75: mol_type = other DNA
cgcaacctgcggcaaaaacaatgaccgccagcgccccgaaaatggaagcattcacctttggtgagccggtgccgg

SEQ ID NO: 127629 - DNA, 75 bp, synthetic construct
  source 1..75: mol_type = other DNA
ctctatctgctggcgcttatggggctcgggcagggggataagtacatctcaagccagacagctccgagtggtgca

SEQ ID NO: 127630 - DNA, 75 bp, synthetic construct
  source 1..75: mol_type = other DNA
ctaaatctgttttatcccgatcacgataatttctggctggggttgattcccggcattccggcggtgctggcgttt

SEQ ID NO: 127631 - DNA, 75 bp, synthetic construct
  source 1..75: mol_type = other DNA
tgccagtaatactgcttactggttgttcttcttcccctaccatctcgccaggtggtgtcaatacgccaccacctg

SEQ ID NO: 127632 - DNA, 75 bp, synthetic construct
  source 1..75: mol_type = other DNA
gccggtttttcgatgacattttctttcctctggtgacaagctatatggcgaggattttacatggctgtgcttcgt

SEQ ID NO: 127633 - DNA, 75 bp, synthetic construct
  source 1..75: mol_type = other DNA
atggcatacagtgaatatctgaatgaccctctcgatgaacactatcagattgagccgggggagtgggtagaagag

SEQ ID NO: 127634 - DNA, 75 bp, synthetic construct
  source 1..75: mol_type = other DNA
gccggatattaatcaagaaatctacggcctgcccggctatctttctgtcattccgtcagccctgctcaacgagtc

SEQ ID NO: 127635 - DNA, 75 bp, synthetic construct
  source 1..75: mol_type = other DNA
tttgaggtcgctcttaaatcttcggcaacttccccaagtggtggtgtggttgttgaggcaccaataactttctca

SEQ ID NO: 127636 - DNA, 75 bp, synthetic construct
  source 1..75: mol_type = other DNA
aattgtggctttttttggcgtttatttcattcgaaagaatatagccgttatcatcatataactaaaacagttaat

SEQ ID NO: 127637 - DNA, 75 bp, synthetic construct
  source 1..75: mol_type = other DNA
gaacaccccagcataaggctgccatcaggcgtattgtgaattcgatgcctgaaaacaatggcgggcgtgaatctt

SEQ ID NO: 127638 - DNA, 75 bp, synthetic construct
  source 1..75: mol_type = other DNA
tacaatctaatgaaacttgtgaacaggacaccccagcataaagctgccatcaggcgtattgtgaattcgatgcct

SEQ ID NO: 127639 - DNA, 75 bp, synthetic construct
  source 1..75: mol_type = other DNA
aaaccgattcggtgaagttatcgctcttgagcctgcgctggcaaaatacacccgacgcggattagacctggatac

SEQ ID NO: 127640 - DNA, 75 bp, synthetic construct
  source 1..75: mol_type = other DNA
ccgcaacgatatcgaaatgcttcgcgaaaacatggttaagtcgaaaggccgcaataactttaaaaacctgtttct

SEQ ID NO: 127641 - DNA, 75 bp, synthetic construct
  source 1..75: mol_type = other DNA
ggtttcgatatcgaccttggtaatgcgatttgcgcggagatgaaagtgcaatgctcctgggtacagaacagcttc

SEQ ID NO: 127642 - DNA, 75 bp, synthetic construct
  source 1..75: mol_type = other DNA
ttggtgagccggtgccggtacggcctgccggaatatctcagcgcccttaattctgcctggctgaatgagtcggcc

SEQ ID NO: 127643 - DNA, 75 bp, synthetic construct
  source 1..75: mol_type = other DNA
cggtggtgcgattcaggccaacggatctgtatgctcaggaaatgggttgaatgggttctggtcatttaataacag

SEQ ID NO: 127644 - DNA, 75 bp, synthetic construct
  source 1..75: mol_type = other DNA
atgggaaagagtaagaagaaccgagctgcggcgacgaaacagatccagcttaaaagtcaaactacagccgaagca

SEQ ID NO: 127645 - DNA, 75 bp, synthetic construct
  source 1..75: mol_type = other DNA
acatgaatcatgagacgtttattgtacagcgcgaaatccccgttgaggactactgggattgctgcaagacggcgt

SEQ ID NO: 127646 - DNA, 75 bp, synthetic construct
  source 1..75: mol_type = other DNA
gcaaccggtgctggactatgtcagtaaggcattcccttatcttatcctgacgttaccggaagggattggtttacc

SEQ ID NO: 127647 - DNA, 75 bp, synthetic construct
  source 1..75: mol_type = other DNA
aaactgggtaactccgaagcgctggtggtaaagaactcttatgacctttgtcaaatattaagcccaaaaagacct

SEQ ID NO: 127648 - DNA, 75 bp, synthetic construct
  source 1..75: mol_type = other DNA
tgtgtcaggaaatgttgctgcaaactatatagataacggtggcggggtaattatagatacggaaggagaggtgat

SEQ ID NO: 127649 - DNA, 75 bp, synthetic construct
  source 1..75: mol_type = other DNA
taaatacagtaaggatgttttcagactttacagttcccaccatgtacagaacgcgcatgaatctacagttgattc

SEQ ID NO: 127650 - DNA, 75 bp, synthetic construct
  source 1..75: mol_type = other DNA
gcaaccggtgctggactatgtcagcaaggcattcccttatcttatcctgacgttaccggaaggcattgatgtgcc

SEQ ID NO: 127651 - DNA, 75 bp, synthetic construct
  source 1..75: mol_type = other DNA
agtacgacgctggcgttgttgctgtactgtgcagcgttatcctctcctcaaacatttaaaacgctcggcgaacaa

SEQ ID NO: 127652 - DNA, 75 bp, synthetic construct
  source 1..75: mol_type = other DNA
ttgcttggcccgttggcctggcttttagtcgctctgttgagtacgacgctggcgttgttgctgtataccgctgcg

SEQ ID NO: 127653 - DNA, 75 bp, synthetic construct
  source 1..75: mol_type = other DNA
gcacaagtttttgtccgaaatgagttaactcctttacaggaacggttcaaagaactaaacaactggttagaaatg

SEQ ID NO: 127654 - DNA, 75 bp, synthetic construct
  source 1..75: mol_type = other DNA
ttctggaccgccgcgaactgctggactatgtggaatgtgtacagatggatcgttggtacgagccgcctgtgagtt

SEQ ID NO: 127655 - DNA, 75 bp, synthetic construct
  source 1..75: mol_type = other DNA
ccgtggaagatggcatagccgttcgccagttactgtttactttgttggcaaccgcattgatcgtcccctatttca

SEQ ID NO: 127656 - DNA, 75 bp, synthetic construct
  source 1..75: mol_type = other DNA
catgtggtattacaccttgtggttaactatcgcgttctttaaacgccggcgttgtgttcctaaacactatattat

SEQ ID NO: 127657 - DNA, 75 bp, synthetic construct
  source 1..75: mol_type = other DNA
aaggatgggcttcagatcatcccgttgtcagaggtcgcagcaaaggatgagtttctaaacatcaagaacgtgagc

SEQ ID NO: 127658 - DNA, 75 bp, synthetic construct
  source 1..75: mol_type = other DNA
ctgcgtcgacgccccagattcagcataaaagccagacttcagccgaaacattcagctttggcgatcccgttcctg

SEQ ID NO: 127659 - DNA, 75 bp, synthetic construct
  source 1..75: mol_type = other DNA
tgtttgttagaaatgaattaatcccattgcaaagaaggattcaagaacttaacgaatggcttaacatagaagtta

SEQ ID NO: 127660 - DNA, 75 bp, synthetic construct
  source 1..75: mol_type = other DNA
ctccccaaatgataggaatgatgcccaacaacacaggaggatttggagatgtaacaaaagcagcacaagtctttg

SEQ ID NO: 127661 - DNA, 75 bp, synthetic construct
  source 1..75: mol_type = other DNA
tttgaggtcgctcttaaatcttcgacaacttccccaaaaggtggtgtagttgttgaggcaccattaactttctca

SEQ ID NO: 127662 - DNA, 75 bp, synthetic construct
  source 1..75: mol_type = other DNA
gaaaacatggtgaagtcgaaaggccgcaacaactttaaaaatctgtttctctatgccccgcaggggaaagccgac

SEQ ID NO: 127663 - DNA, 75 bp, synthetic construct
  source 1..75: mol_type = other DNA
gccgtcgggagtgagaacgggggcgacggtgacgcattcgtcagggaggaacgcgaagcaatggacgttgtgtta

SEQ ID NO: 127664 - DNA, 75 bp, synthetic construct
  source 1..75: mol_type = other DNA
atgtactgcactgttaaagaaattatccgcgatgtactggatacagatgtgccggacagtgaatgcgtttttgtt

SEQ ID NO: 127665 - DNA, 75 bp, synthetic construct
  source 1..75: mol_type = other DNA
cgttgcagtctaataaaagccgcctggtggcagagcatttcgactggtgtcataccatcgaccgtttgcgcattg

SEQ ID NO: 127666 - DNA, 75 bp, synthetic construct
  source 1..75: mol_type = other DNA
acgataatacaccgcaagcagctaaagagccggattatctggatatcccggcattcctgcgtaagcaagctgatt

SEQ ID NO: 127667 - DNA, 75 bp, synthetic construct
  source 1..75: mol_type = other DNA
actgctgaaagtcttgggccgcggtatctccctgctggatgcatttggcgcagcgaacgatgtactgaaaggtgc

SEQ ID NO: 127668 - DNA, 75 bp, synthetic construct
  source 1..75: mol_type = other DNA
gaaaaagtgatggtgatggctggtagtgaaatttatcgcctccatgctgtcgggagcgagaacgggggcgacggt

SEQ ID NO: 127669 - DNA, 75 bp, synthetic construct
  source 1..75: mol_type = other DNA
ggcggcgaactgagcgccaccagcgcgccgggggctggaagctgtttttgtttacgcttgccgttacgtgttgcc

SEQ ID NO: 127670 - DNA, 75 bp, synthetic construct
  source 1..75: mol_type = other DNA
atctgccggatatcgacggcattacccttgcccggcaactggcacagcaatatccgtcgctggttttgattggct

SEQ ID NO: 127671 - DNA, 75 bp, synthetic construct
  source 1..75: mol_type = other DNA
agaaaagcgcgccagccgtcaggtgacagtcccggcggtgatgctggaaaaagtgatggcgctggcaggcagtga

SEQ ID NO: 127672 - DNA, 75 bp, synthetic construct
  source 1..75: mol_type = other DNA
cgaagctgaaacctggcaggaggcggtaaaaatcggcgttgacctgctggtggcggcaaatgtggtagagccacg

SEQ ID NO: 127673 - DNA, 75 bp, synthetic construct
  source 1..75: mol_type = other DNA
gccggacagtgaatgcgtttttgccgtggtgctgacccgtggggatgtgcgccacatagcccaggactggaacct

SEQ ID NO: 127674 - DNA, 75 bp, synthetic construct
  source 1..75: mol_type = other DNA
cgatattaatctggcgaaatatctggctgaaatgttgccaatgacctgttttgttggtgaggactggcagcaagg

SEQ ID NO: 127675 - DNA, 75 bp, synthetic construct
  source 1..75: mol_type = other DNA
taattttggcttgtgggtacacattattatgtgttttaaaactcagatttaaacaagtgccagtgattattaatg

SEQ ID NO: 127676 - DNA, 75 bp, synthetic construct
  source 1..75: mol_type = other DNA
tacgcgtttattagttaataatcaaactaatgacatgttatcatggaaaggatattttatgcttaggaatctttt

SEQ ID NO: 127677 - DNA, 75 bp, synthetic construct
  source 1..75: mol_type = other DNA
tggctaatgaactggccaaaaaactcaaaacccctgaagacctcagccagtttgatcggctgctgaaaaagctca

SEQ ID NO: 127678 - DNA, 75 bp, synthetic construct
  source 1..75: mol_type = other DNA
gttcttaccttttaaaggtggagcagttcaatcgttatcagacgcgtatacagattattcagtgctgttattgat

SEQ ID NO: 127679 - DNA, 75 bp, synthetic construct
  source 1..75: mol_type = other DNA
aagcaatggacgttgtgttacaggggcaggcggtggaggccgtctgtcagcccgcgcgcccccccctggcaggct

SEQ ID NO: 127680 - DNA, 75 bp, synthetic construct
  source 1..75: mol_type = other DNA
gccggacagtgaatgcgtttttgccgtggtgctgacccgtggggatgtgcgtcacatagcccaggactggagtct

SEQ ID NO: 127681 - DNA, 75 bp, synthetic construct
  source 1..75: mol_type = other DNA
ctgattcaaattaatattagtgatgaaaacagtaagtccgggattcaactggcagaactggacgagctggcagct

SEQ ID NO: 127682 - DNA, 75 bp, synthetic construct
  source 1..75: mol_type = other DNA
cctgttatgatctaaagtctgtatttaccctaaggcccaagcgtgaaactgtcattaatttttttaattctaaaa

SEQ ID NO: 127683 - DNA, 75 bp, synthetic construct
  source 1..75: mol_type = other DNA
gcttggaaaacaatgcgccgaatgggagcgaaaagcattaagtaactttgaagagtgtgctgctatggctgaacg

SEQ ID NO: 127684 - DNA, 75 bp, synthetic construct
  source 1..75: mol_type = other DNA
tggaaaacaatgcgccgaatgggagcgaaaagcatcaagcaactttgaagagtgtgctgcgatggctgaacgtat

SEQ ID NO: 127685 - DNA, 75 bp, synthetic construct
  source 1..75: mol_type = other DNA
cgctgaccgggcatgaaaatgaggtggtatcagcgcagccggataccgtgactgatacggctgctctggtcacgg

SEQ ID NO: 127686 - DNA, 75 bp, synthetic construct
  source 1..75: mol_type = other DNA
gacacccctctcagccaggaaaatgtgctgaccgggcatgaaaatgaggtggtatcagcacagacggataccgtg

SEQ ID NO: 127687 - DNA, 75 bp, synthetic construct
  source 1..75: mol_type = other DNA
ccaacggcgaaagaaacgccgtatgagccaatgccggaaaatgttgaggagatcgtagcgcaggcgaaaggcgcg

SEQ ID NO: 127688 - DNA, 75 bp, synthetic construct
  source 1..75: mol_type = other DNA
ttaaatcgtggggaacagatcaacgcgctgtggattgtggtggcgtcggtctgtatctatctgatcgcttatcgt

SEQ ID NO: 127689 - DNA, 75 bp, synthetic construct
  source 1..75: mol_type = other DNA
gcgaaagaaacgccgtatgagccaatgccggaaaatgtcgaggagatcgtggcgcaggcaaaaggcgcgcactaa

SEQ ID NO: 127690 - DNA, 75 bp, synthetic construct
  source 1..75: mol_type = other DNA
gctccggcagggacggcggatgtggtcgcttctgccgcgcaggtggtgagtagctggggctttgcgattaccccg

SEQ ID NO: 127691 - DNA, 75 bp, synthetic construct
  source 1..75: mol_type = other DNA
gcagcagccattatctgccccccttccacacgaagaaattacacgcagtgttgccgctctggaagcatggttgca

SEQ ID NO: 127692 - DNA, 75 bp, synthetic construct
  source 1..75: mol_type = other DNA
tcaggcgaataacgctgcgacctctgccggagccactcaagccgggatttatgatttgatcgaacgtcatcaaca

SEQ ID NO: 127693 - DNA, 75 bp, synthetic construct
  source 1..75: mol_type = other DNA
cacgcgatagagacgttgcaaaatagcgaaccgtttgctgccgcactggtggattttgatctgcccgatatcgac

SEQ ID NO: 127694 - DNA, 75 bp, synthetic construct
  source 1..75: mol_type = other DNA
aaagccagtgcacgcgggcaatacagcctgttattgctgggaatagtttctctttgcgcactgattctgatcctc

SEQ ID NO: 127695 - DNA, 75 bp, synthetic construct
  source 1..75: mol_type = other DNA
ggtcactgccgttggaaatgccacgcaggctttagagacgctgcaaaatagtgaatcgtttgctgccgcgctggt

SEQ ID NO: 127696 - DNA, 75 bp, synthetic construct
  source 1..75: mol_type = other DNA
cgcttaacgcccagcgtgatgatttgcgggcaattaccgattctggcgaatcattgctgaccatccttaacgata

SEQ ID NO: 127697 - DNA, 75 bp, synthetic construct
  source 1..75: mol_type = other DNA
gacatgaaaatgaggtggtatcagcgcagccggataccgtgactgatacggctgctctggtcacggttgtggcac

SEQ ID NO: 127698 - DNA, 75 bp, synthetic construct
  source 1..75: mol_type = other DNA
cgggataagtctgcccacccggaaaatgcgctgaccggacatgaaaatgaggtgatatcagcgcagccggagacc

SEQ ID NO: 127699 - DNA, 75 bp, synthetic construct
  source 1..75: mol_type = other DNA
tgacacggatgacgcagccggtcaggactcgtctgtcagcccggaaaatgcgctgaccggacatgaaaatgaggt

SEQ ID NO: 127700 - DNA, 75 bp, synthetic construct
  source 1..75: mol_type = other DNA
ggcgaataatgcggcaacctccgccggagcgacccaggccgggatttacgatttgatcgaacaacatcagcgtca

SEQ ID NO: 127701 - DNA, 75 bp, synthetic construct
  source 1..75: mol_type = other DNA
tgtatcagcgcagccggataccgtgactgatacggctgatctggtcacggttgtggcactggtgacgctgcatac

SEQ ID NO: 127702 - DNA, 75 bp, synthetic construct
  source 1..75: mol_type = other DNA
caagatattcatggcaagaaatagccgaccgattcggggtggaacattcaacagtatcccgtatctggtctggta

SEQ ID NO: 127703 - DNA, 75 bp, synthetic construct
  source 1..75: mol_type = other DNA
gcgatgctgaacgtcatcaggctttgatgcaacgttatcaacaatttaactcgctatatagcaacgatcttaact

SEQ ID NO: 127704 - DNA, 75 bp, synthetic construct
  source 1..75: mol_type = other DNA
accacataacgatcctgatgccagagggatgttctgggggctgacccattccagccagcgggcactgatgggcta

SEQ ID NO: 127705 - DNA, 75 bp, synthetic construct
  source 1..75: mol_type = other DNA
agcaagtcgctacggaagttttttatccaaattattatgaggagttggctgttcttaatgaagaaagtagctcgc

SEQ ID NO: 127706 - DNA, 75 bp, synthetic construct
  source 1..75: mol_type = other DNA
gcgacggaatacctgatgtcaacgctacgggaaaaatgcggtcagcactggcaggcgattaaagcgattggcctt

SEQ ID NO: 127707 - DNA, 75 bp, synthetic construct
  source 1..75: mol_type = other DNA
tcgtccggcgattttatggaacgacacccgcagtgcgcaggagtgtgcggagctggaagagatcgcaccagagtt

SEQ ID NO: 127708 - DNA, 75 bp, synthetic construct
  source 1..75: mol_type = other DNA
gcatgaaacaaaccagcagaaagacggcactattgaacgtaagacgcagttccctgaggatgcatcacaatgggt

SEQ ID NO: 127709 - DNA, 75 bp, synthetic construct
  source 1..75: mol_type = other DNA
ttttgcagaatttaataacataagtttgattcagctttcggtaagggttttaactttatgctgtatcacgaatag

SEQ ID NO: 127710 - DNA, 75 bp, synthetic construct
  source 1..75: mol_type = other DNA
acttatgtctttagatataaaaatgatctgttaagtattgctgcttgtcacttttcactaccttttgattttctt

SEQ ID NO: 127711 - DNA, 75 bp, synthetic construct
  source 1..75: mol_type = other DNA
atttatttattcctcaaactattgacgcgtgttttgaacataaaggggaaggcattgtcccggggataaaagaag

SEQ ID NO: 127712 - DNA, 75 bp, synthetic construct
  source 1..75: mol_type = other DNA
aatgaaataaaactatttgctgaggtgcataatcacactagattcagcatcaatatctatggtccattttctcaa

SEQ ID NO: 127713 - DNA, 75 bp, synthetic construct
  source 1..75: mol_type = other DNA
ggctgtgaagggatgcaaaactttctcaatgcgcagcagaactacccggtactgcgcggggtgcagaccaacttg

SEQ ID NO: 127714 - DNA, 75 bp, synthetic construct
  source 1..75: mol_type = other DNA
taagcgggctgcaaaaccgcatccagcaactgacgccgattctggaaacgctgccgcaaagtgatgaacttccgc

SEQ ID NO: 127715 - DNA, 75 bp, synthetic construct
  source 1..75: mol_type = other DNA
ggtttttgagcagcacaaatcggcccgcacagagctggagaagctgcaagcgcaggccagcggcgtcgcgttgct

SEQ ID NO: 127716 - DNA, 75 bp, synthetic construct
  source 1..75: mol_type = other DNA
gaaccgggcgttaatcaggcccggctattaacgctggaaaaagaagtgaaaaagctcggcgaagaaggtgcggcg

SEQ ID NO: 127717 - DNA, 75 bp, synthetic construct
  source 1..75: mol_type = other DNA
tgcggtacgcgatacccgtaccctttccggtggcgagagtttcctcgtcagtctggcgctggcactggcgctttc

SEQ ID NO: 127718 - DNA, 75 bp, synthetic construct
  source 1..75: mol_type = other DNA
cccgcacagcgaagaaactgtggcgctggaaaactggcggcaggttcatgaacaatgtctcgcattacacagcca

SEQ ID NO: 127719 - DNA, 75 bp, synthetic construct
  source 1..75: mol_type = other DNA
caggcgcagtttgacaccgcgctacaggccagcgtctttgacgatcaacaggcgttccttgcagcactgatggat

SEQ ID NO: 127720 - DNA, 75 bp, synthetic construct
  source 1..75: mol_type = other DNA
ttcttaccatattatccacagcagataatcattgtctttcgccctcaaagataagcagagaactccagtttacca

SEQ ID NO: 127721 - DNA, 75 bp, synthetic construct
  source 1..75: mol_type = other DNA
gctatgaagcaacaacgttgagtggtcaacctggcttgtctgctgcggagcaagccatctatttgtttaatcaag

SEQ ID NO: 127722 - DNA, 75 bp, synthetic construct
  source 1..75: mol_type = other DNA
aacgctttcatgctcagcggcggggttaggcgtacagggacacgcagcactactctggtgccactggttgaggca

SEQ ID NO: 127723 - DNA, 75 bp, synthetic construct
  source 1..75: mol_type = other DNA
gccctggaaaaatgaaccgttaatgcggccaattaactcaaactatgctcgttattgcgccaagcataattttaa

SEQ ID NO: 127724 - DNA, 75 bp, synthetic construct
  source 1..75: mol_type = other DNA
gggctggcgggggtggtcatgctgatgctggcctgcggcgtctgtatgacgggccggcgcaccacgcgcacggga

SEQ ID NO: 127725 - DNA, 75 bp, synthetic construct
  source 1..75: mol_type = other DNA
gacccatgcagagtgtgaactgtttgaagacattaataaaaaattactgacgcatattgctgatgtgtgtcccta

SEQ ID NO: 127726 - DNA, 75 bp, synthetic construct
  source 1..75: mol_type = other DNA
agttttctgcgctggatgtactggttaaagccgatttattaacagtaaaagataccctggttgatgacgttattg

SEQ ID NO: 127727 - DNA, 75 bp, synthetic construct
  source 1..75: mol_type = other DNA
gtttattgacagtaaaagataccctggttgatgaaactattggattttctaaaacaggtaaaaaagtgcctgggc

SEQ ID NO: 127728 - DNA, 75 bp, synthetic construct
  source 1..75: mol_type = other DNA
gggaagagattgttactactggcgttggttttggcgtggcgatcccgcacaccaaatcacagtggatccgtcatt

SEQ ID NO: 127729 - DNA, 75 bp, synthetic construct
  source 1..75: mol_type = other DNA
atcttcatgatgacgcccggcgaagtggttagctggcgtgagcgggcggcacttcgcagcgggaatgcagacaat

SEQ ID NO: 127730 - DNA, 75 bp, synthetic construct
  source 1..75: mol_type = other DNA
gaattacacattcagtcccaccagtatcgctgaatgggcgaaacgcgatgatgttcgggctgcatttttaggact

SEQ ID NO: 127731 - DNA, 75 bp, synthetic construct
  source 1..75: mol_type = other DNA
cattcgcgatatggctgcagctaccggaatcatgccgcgcacgctatcaatcgtatgtgcgcagtctggtcaggc

SEQ ID NO: 127732 - DNA, 75 bp, synthetic construct
  source 1..75: mol_type = other DNA
gctgaaatattgccaataacctgttttgttggtgaggactggcagcaagatttccagcctcttgacggtgggcct

SEQ ID NO: 127733 - DNA, 75 bp, synthetic construct
  source 1..75: mol_type = other DNA
tgggaacaagacttttacgattattgtccggggaaatgacagtaattccttcgatacaccggaggataaccgccc

SEQ ID NO: 127734 - DNA, 75 bp, synthetic construct
  source 1..75: mol_type = other DNA
tatggctgtagaatttcataaacttgttaatggtgataatggtgatgcggctaacgttatcaaacaaatacgttt

SEQ ID NO: 127735 - DNA, 75 bp, synthetic construct
  source 1..75: mol_type = other DNA
tatttacccggaatttgctggcctgttccgcactcaactgcgggccattttgcgcgccgccagtttcggcaacgc

SEQ ID NO: 127736 - DNA, 75 bp, synthetic construct
  source 1..75: mol_type = other DNA
atgggtttttttgaacaggatttgcgtggtcgcgtgaaaggtaatgtccacgtagaccctaaaacaggtaaacga

SEQ ID NO: 127737 - DNA, 75 bp, synthetic construct
  source 1..75: mol_type = other DNA
tccattatctgaatgaaatgtgtcaatccacagaaaccgctgtcaatgacgcattttgtcggacgttaacacgag

SEQ ID NO: 127738 - DNA, 75 bp, synthetic construct
  source 1..75: mol_type = other DNA
ccagacttcaatacccagcgttggagccgagatatcccgcagctcccccaggatttcttcgccaaactgacccca

SEQ ID NO: 127739 - DNA, 75 bp, synthetic construct
  source 1..75: mol_type = other DNA
tcatttggcaggctccgtttatcaaacccgaccgcgaagatgattataaagtggcctgggcattctttgcacaag

SEQ ID NO: 127740 - DNA, 75 bp, synthetic construct
  source 1..75: mol_type = other DNA
attcctgctatattcccggccggtgttgcccatatcgatccatgtttcagcatcgcatttaatgaagtagaaact

SEQ ID NO: 127741 - DNA, 75 bp, synthetic construct
  source 1..75: mol_type = other DNA
actgtgtttgtcgcatgatggaactggagaagtgggtggtattaaagatgacgaaaccgactcatggaacgaatc

SEQ ID NO: 127742 - DNA, 75 bp, synthetic construct
  source 1..75: mol_type = other DNA
atacgtattattcaatccgagacaaaaggcattattatactgcttagtattatcattaaattctgtaaatgatgt

SEQ ID NO: 127743 - DNA, 75 bp, synthetic construct
  source 1..75: mol_type = other DNA
aactctgcccgacgactatttgccgcgtaccaattatattccggcatgtgatgcacaggaatatgcaaagcgcat

SEQ ID NO: 127744 - DNA, 75 bp, synthetic construct
  source 1..75: mol_type = other DNA
cttgatattgaagggctaacagaaattgctgtcaaccgtcctggtgaaatctggacggaaattaatggtgactgg

SEQ ID NO: 127745 - DNA, 75 bp, synthetic construct
  source 1..75: mol_type = other DNA
atagatggatttattacccgttgctacgagaacccacagtgcgcccagttcccctatacatttatgttacgtaaa

SEQ ID NO: 127746 - DNA, 75 bp, synthetic construct
  source 1..75: mol_type = other DNA
ctctggcgggaagaacgaacaggcgacggaagcctgatcacggttgtgtgctttgagcacatagaagactttgtg

SEQ ID NO: 127747 - DNA, 75 bp, synthetic construct
  source 1..75: mol_type = other DNA
tttatgatgaggaaggaacgccaagtattgaagcccgtttgccagctttacatgcaagacaattgattggcgttt

SEQ ID NO: 127748 - DNA, 75 bp, synthetic construct
  source 1..75: mol_type = other DNA
aaagataaacgtcttcatgccgttcttcgcatggctgatggacgtcagacaagcgtcaccactggtagccagctt

SEQ ID NO: 127749 - DNA, 75 bp, synthetic construct
  source 1..75: mol_type = other DNA
caaaacgtctacagcaactggaaccaaatgcaggcaccgaagcccgcatctggattgccatagaatcactcaaat

SEQ ID NO: 127750 - DNA, 75 bp, synthetic construct
  source 1..75: mol_type = other DNA
gggcgttgattcaggggctgaaacacgatctgctggcggatgataccgcgctacgtgcactcatcccacaacggc

SEQ ID NO: 127751 - DNA, 75 bp, synthetic construct
  source 1..75: mol_type = other DNA
taaagccgcaatcgctcatggagtttattaatttcatggttgagttatacagctatgtacttccttcattggctg

SEQ ID NO: 127752 - DNA, 75 bp, synthetic construct
  source 1..75: mol_type = other DNA
atggcaattaagcattttcctgtcgttcgcctcacctccagagaccgcgaatacgaggtcgacgaacgactgatt

SEQ ID NO: 127753 - DNA, 75 bp, synthetic construct
  source 1..75: mol_type = other DNA
tggaatggttggtgggtagcttatcgcaaagtaccttcttttattgtcaccctggcgggcatgttggcatttcgc

SEQ ID NO: 127754 - DNA, 75 bp, synthetic construct
  source 1..75: mol_type = other DNA
agcgtgccgattccgtgctggcaggtttgaaagccgctggcgacgcgcagtgggtattggtgcatgacgccgctc

SEQ ID NO: 127755 - DNA, 75 bp, synthetic construct
  source 1..75: mol_type = other DNA
ttatcgcagtggctttaatcgccgttttattcctttttaaaagactctcagcaatatgggagggaagaaaacaat

SEQ ID NO: 127756 - DNA, 75 bp, synthetic construct
  source 1..75: mol_type = other DNA
tattaatttcatggttgagttatacagctatgtacttccttcgctggctgttatcgcagtggctttaatcgccgt

SEQ ID NO: 127757 - DNA, 75 bp, synthetic construct
  source 1..75: mol_type = other DNA
aagtttacaggcaagtatcagaatataatcaacagcactattcaggtttttctactctcattcgcagtacatttg

SEQ ID NO: 127758 - DNA, 75 bp, synthetic construct
  source 1..75: mol_type = other DNA
aaaaggatgcacatcacatctatctcactgacggcacttacttctgcgccacgaatgtggtgcaggtgaacctta

SEQ ID NO: 127759 - DNA, 75 bp, synthetic construct
  source 1..75: mol_type = other DNA
aatgtgatgaactgactcagctaatagctgtacaagagtctaccattgcgtcacaaagcgacttaatggctgctc

SEQ ID NO: 127760 - DNA, 75 bp, synthetic construct
  source 1..75: mol_type = other DNA
ggcgatttgtgacgtctggttaggctggcctttgccacttaccatcattgtgacgctggttctgggactgcttct

SEQ ID NO: 127761 - DNA, 75 bp, synthetic construct
  source 1..75: mol_type = other DNA
aatggtgttcgtcataatttctgctgaaatcgacctttccgtcggctcaatgatggggctgttaggtggcgtcgc

SEQ ID NO: 127762 - DNA, 75 bp, synthetic construct
  source 1..75: mol_type = other DNA
tttgctttctggttagttgacacactgcggccaagaaatattgttgagctgggaactcattatggaagttcttat

SEQ ID NO: 127763 - DNA, 75 bp, synthetic construct
  source 1..75: mol_type = other DNA
aataccgctcgagaatcgttgaacctattaaaggtctgttgcctgatgaagttgttaacagtatcagcgagcagc

SEQ ID NO: 127764 - DNA, 75 bp, synthetic construct
  source 1..75: mol_type = other DNA
tcattcaatcggtagcgacttgtctgttttacagcaggttaaaatgcgtggccgaaacaaaactcatgagcgtgg

SEQ ID NO: 127765 - DNA, 75 bp, synthetic construct
  source 1..75: mol_type = other DNA
tcctggctgagcgacttgagggcgggcgctacatcgatatcgatatcaaccgggagaaagcttcccggtacggga

SEQ ID NO: 127766 - DNA, 75 bp, synthetic construct
  source 1..75: mol_type = other DNA
accacaccggtgctggaagcggcaaacctgcaggctgaccttgaaagagcagggatccatccgtggggctggatt

SEQ ID NO: 127767 - DNA, 75 bp, synthetic construct
  source 1..75: mol_type = other DNA
atctcacgacctctgatcctgctgcacacctgagtacaacgctgaacggcagcctgaataacctgcaggtcagca

SEQ ID NO: 127768 - DNA, 75 bp, synthetic construct
  source 1..75: mol_type = other DNA
ctggcagacatgggatttgacgtgcatctcacgacctctgatcctgctgcacacctgagtacaacgctgaacggc

SEQ ID NO: 127769 - DNA, 75 bp, synthetic construct
  source 1..75: mol_type = other DNA
tatcgttcattcctatttttaccctggaagggcaggaagggcgtctgtttggtccgctggcctttacaaaaacgt

SEQ ID NO: 127770 - DNA, 75 bp, synthetic construct
  source 1..75: mol_type = other DNA
atcgcctttatcgtcatgcacttccaggggctgaatgccaacattatgtcgctgggagggattgcaatagccgtc

SEQ ID NO: 127771 - DNA, 75 bp, synthetic construct
  source 1..75: mol_type = other DNA
atggcggaaattggtatttttgtgggcaccatgtacggaaattcactgttagtggcggaagaagcggaagcaatt

SEQ ID NO: 127772 - DNA, 75 bp, synthetic construct
  source 1..75: mol_type = other DNA
gtcagatgtgcaggtcattatcaaaaccagctatcccggccaggccccgcagattgtagaaaaccaggtcaccta

SEQ ID NO: 127773 - DNA, 75 bp, synthetic construct
  source 1..75: mol_type = other DNA
cgcctgtcgatgccttgcctgacctgtcagatgtgcaggtcattatcaaaaccagctatcccggccaggccccgc

SEQ ID NO: 127774 - DNA, 75 bp, synthetic construct
  source 1..75: mol_type = other DNA
tgcggctttatccattttcactgttatctggccactgagtcaggtgggcggcgagtttttaccgaagattaacga

SEQ ID NO: 127775 - DNA, 75 bp, synthetic construct
  source 1..75: mol_type = other DNA
agaatttctgctgggtaaagtgctggacctgcccgctgagccgtttatgacgaaactttttgccgataaatccat

SEQ ID NO: 127776 - DNA, 75 bp, synthetic construct
  source 1..75: mol_type = other DNA
aatgaaacatatagagctcagcagcaagcctggaaagaagagaaggaggccttaatccgggaacaaaccttgctg

SEQ ID NO: 127777 - DNA, 75 bp, synthetic construct
  source 1..75: mol_type = other DNA
gttttgcccgcaggccacgctggcaggctggctgtctgagtatccgcatctggtgatattacgcacgttgtccaa

SEQ ID NO: 127778 - DNA, 75 bp, synthetic construct
  source 1..75: mol_type = other DNA
actcattattgaacgtacacgcgcgggtcttgctgctgcccgtgctcaggggcgtcatggcggcagacctcagaa

SEQ ID NO: 127779 - DNA, 75 bp, synthetic construct
  source 1..75: mol_type = other DNA
acattgatacgtcaacccccatggggcgcttcttttttcacataatgggtgcgctggcagaaatggagcgtgaat

SEQ ID NO: 127780 - DNA, 75 bp, synthetic construct
  source 1..75: mol_type = other DNA
tggcttcagcaagagccaggggaagaaaagggggacggccttacaaaatgacacctgtgaaattacgttttgcaa

SEQ ID NO: 127781 - DNA, 75 bp, synthetic construct
  source 1..75: mol_type = other DNA
atggcaacattaactgcaaagaatcttgcaaaagcctataaaggccgtcgcgtggtagaagacgtcagcctgacc

SEQ ID NO: 127782 - DNA, 75 bp, synthetic construct
  source 1..75: mol_type = other DNA
gaaacatgcagttgggtgaagctctcgggatcaacggaacgccagggttcattatcatgaacatgcaaaaacccg

SEQ ID NO: 127783 - DNA, 75 bp, synthetic construct
  source 1..75: mol_type = other DNA
atgactaaattaaattatttaaaacccgtggtgtctgttttaatttctgcggtgattgcagcggctggctctgta

SEQ ID NO: 127784 - DNA, 75 bp, synthetic construct
  source 1..75: mol_type = other DNA
acagtgccgaccctggaaaactggcaactggacttacagggtatttccgacaagctggacggggtaaaagtggtc

SEQ ID NO: 127785 - DNA, 75 bp, synthetic construct
  source 1..75: mol_type = other DNA
atgacaaaacgccagagcaaaaaccgtaagcgcattattcgtcttgtggaactctggcctgagtcattcaaccgg

SEQ ID NO: 127786 - DNA, 75 bp, synthetic construct
  source 1..75: mol_type = other DNA
attaaacgcatcattgagcatttacgcgacagcggcctgggtgtacttatcaccgaccacaacgtgcgtgaaacg

SEQ ID NO: 127787 - DNA, 75 bp, synthetic construct
  source 1..75: mol_type = other DNA
ggtcgcccgctgcaacctactttggcctttccttcctcgatgcagaacactgcaccgcaaccagaaacaccagcg

SEQ ID NO: 127788 - DNA, 75 bp, synthetic construct
  source 1..75: mol_type = other DNA
gatctgggcatcgacggcgacacgcccgccgacaccgtcgccacgctggtcggccagatgaaacagtaccgccgg

SEQ ID NO: 127789 - DNA, 75 bp, synthetic construct
  source 1..75: mol_type = other DNA
gcgtgataaacagagcggtgaaatgaaggagcagaccgagtggcaccgcgtggtgattttcggaaaactggcgga

SEQ ID NO: 127790 - DNA, 75 bp, synthetic construct
  source 1..75: mol_type = other DNA
gtacaaccggtctgggaaagcagtaccggtagcgtttttcggacgcgattcaaaatggtttcgccgaaacggatt

SEQ ID NO: 127791 - DNA, 75 bp, synthetic construct
  source 1..75: mol_type = other DNA
cgaaattcagcgccggcgcgaaatggagctgagcgaaccatcctggtcagtatctcacccctcaaataccaacga

SEQ ID NO: 127792 - DNA, 75 bp, synthetic construct
  source 1..75: mol_type = other DNA
agcggcagacacgcattcatccacatattcgagccgctcgaggacggacagacccgcggggacaatattttttac

SEQ ID NO: 127793 - DNA, 75 bp, synthetic construct
  source 1..75: mol_type = other DNA
tggcgcagcgtaaagctgcagctgtggaagctgaaacgattgttgctcaggaaacgagcgagtttatgtcctggt

SEQ ID NO: 127794 - DNA, 75 bp, synthetic construct
  source 1..75: mol_type = other DNA
agctggatgataacttccatcaaattctgacgcagattgccgactgtcagcttgcgtgggacaccattgaaaacc

SEQ ID NO: 127795 - DNA, 75 bp, synthetic construct
  source 1..75: mol_type = other DNA
aatgaagatgaaccgggagcatacgattccattgtctgatggagccctcgctattcttgcaacgatgaagtctct

SEQ ID NO: 127796 - DNA, 75 bp, synthetic construct
  source 1..75: mol_type = other DNA
atggcgtcacgcggtattaataaggtgatactgattggacatcttgggcaggatccagagattcgttatcttccc

SEQ ID NO: 127797 - DNA, 75 bp, synthetic construct
  source 1..75: mol_type = other DNA
gcatggccaggatcgttattctaccgaagtggtggtcaacgtgaacggtagcatgcagatgctgggtagtcgtca

SEQ ID NO: 127798 - DNA, 75 bp, synthetic construct
  source 1..75: mol_type = other DNA
gtgccagtgctgtgtctgtcgcttttgcggcttgtacgctggcgcggcagatctttgaatcgctctctacggtga

SEQ ID NO: 127799 - DNA, 75 bp, synthetic construct
  source 1..75: mol_type = other DNA
ggtgatgccatcgggaaaagttttgacgacgccgttgcccggttcagttttccggcctggatgttacagcttctg

SEQ ID NO: 127800 - DNA, 75 bp, synthetic construct
  source 1..75: mol_type = other DNA
acattgccatgcatcagtttttactgaatgaaggtgcagatccctcgcgttttctgtttgttctcagccatgccg

SEQ ID NO: 127801 - DNA, 75 bp, synthetic construct
  source 1..75: mol_type = other DNA
atcgcgtgtttcctgctgaagaatggaatgccacagaaaaatgcccgtcccgtcagcagtcgctctcactggcga

SEQ ID NO: 127802 - DNA, 75 bp, synthetic construct
  source 1..75: mol_type = other DNA
atcgcgtgtttcctgctgaagaatggaacgacacagaaaaatgcccgtcccgtcagcaggaactctcactggcga

SEQ ID NO: 127803 - DNA, 75 bp, synthetic construct
  source 1..75: mol_type = other DNA
ctgttacagccagggtggcaaccctgttcccgtcatcatttccggtactccccgttgctgcgcctgtcggctgga

SEQ ID NO: 127804 - DNA, 75 bp, synthetic construct
  source 1..75: mol_type = other DNA
tccggtctggatgttacagcttctgcgtaaagcccggaaccgcattatccgcctgctggaaacactgtgggatca

SEQ ID NO: 127805 - DNA, 75 bp, synthetic construct
  source 1..75: mol_type = other DNA
atgtcattcagccattcttccctctcctctcaagtaaaatcaaatctgacgtttcttcctgaagaaattcgccag

SEQ ID NO: 127806 - DNA, 75 bp, synthetic construct
  source 1..75: mol_type = other DNA
atgtcagcgatacaggggattgaaggtgttatcagccagttacagaccacggcgatgagtgcgcgtgcgcaggaa

SEQ ID NO: 127807 - DNA, 75 bp, synthetic construct
  source 1..75: mol_type = other DNA
ctgtttgtgattttgcgtttactgcttttgtcgccatgttgtgtaccccttacaaaaaacaaatgcagtatgcag

SEQ ID NO: 127808 - DNA, 75 bp, synthetic construct
  source 1..75: mol_type = other DNA
atgtcattcagccattcttccctctcctctcaagtgaaatcagatctgacgtttcttcctgaagaaattcgccag

SEQ ID NO: 127809 - DNA, 75 bp, synthetic construct
  source 1..75: mol_type = other DNA
atgtcattcagccattcttccctctcctctcaagtcaaatcacatctgacgtttcttcctgaagaaattcgccag

SEQ ID NO: 127810 - DNA, 75 bp, synthetic construct
  source 1..75: mol_type = other DNA
atgtcattcagccattcttccctctcctctcaagttaaatcatatctgacgtttcttcctgaagaaattcgccag

SEQ ID NO: 127811 - DNA, 75 bp, synthetic construct
  source 1..75: mol_type = other DNA
actgtaaaaatcagtttcccggcagtcagccagttacagacccggctcgcggtaaaaacaaatctgagtgcgctt

SEQ ID NO: 127812 - DNA, 75 bp, synthetic construct
  source 1..75: mol_type = other DNA
actgctttttgataaacggaaagcgctgaaaagaattgaggagctggagggcgaacaaatcaaaaccgcccgcag

SEQ ID NO: 127813 - DNA, 75 bp, synthetic construct
  source 1..75: mol_type = other DNA
aattctccccaaccgtaatcgtcccatgacctcagtaccgacattgatccgccacgttcccggaaaaacggaacc

SEQ ID NO: 127814 - DNA, 75 bp, synthetic construct
  source 1..75: mol_type = other DNA
accgtgaggctgaagcacagtttcggcccgaactggaaaaaatcgtcagggggattgaaacaggttttcgtggta

SEQ ID NO: 127815 - DNA, 75 bp, synthetic construct
  source 1..75: mol_type = other DNA
acagctacgtaacacactcattcagagctctgaagatcataaacgcgatcagcaggcacaggagcagcttacgga

SEQ ID NO: 127816 - DNA, 75 bp, synthetic construct
  source 1..75: mol_type = other DNA
acgatgaaggcgggcaaatcaaccaccatcaacgccattgtggggcaggaaattctgcccaaccgtaaccgcccc

SEQ ID NO: 127817 - DNA, 75 bp, synthetic construct
  source 1..75: mol_type = other DNA
ctgaatgcctatttcagaaccggtaaacgcaaagaacagcaaatgctggaagaagaaggcgcagaacaacgcata

SEQ ID NO: 127818 - DNA, 75 bp, synthetic construct
  source 1..75: mol_type = other DNA
gctcatcacgtcaggcatacctggctaaccgtgcgcttcatgagttacgaaaaaacggtgcgcttccggttgatg

SEQ ID NO: 127819 - DNA, 75 bp, synthetic construct
  source 1..75: mol_type = other DNA
acgcgctggtacctgcaaacttacgcggatgtggcgcagggctctatcaatccattacttcattacatactgcac

SEQ ID NO: 127820 - DNA, 75 bp, synthetic construct
  source 1..75: mol_type = other DNA
atgcacgaaaagaacatcgccctgctttgtgatgaagccgaccgacttttgcaactgaatatcaatctgctccgg

SEQ ID NO: 127821 - DNA, 75 bp, synthetic construct
  source 1..75: mol_type = other DNA
gctacagcaaagcattcagtcactgcaggcgcatatcaccagcctgctggcggatatccgggaaatcgtgtcacg

SEQ ID NO: 127822 - DNA, 75 bp, synthetic construct
  source 1..75: mol_type = other DNA
cctgtttgtgctggtcaataaatttgatgagaaagaccgcaatggtgatggtgcagatactgtacgccagaaggt

SEQ ID NO: 127823 - DNA, 75 bp, synthetic construct
  source 1..75: mol_type = other DNA
taccggaacagcccgcaggccctgaggcagatgccgatcctgacaccgatgaagcagcaaatcaccctgggtgat

SEQ ID NO: 127824 - DNA, 75 bp, synthetic construct
  source 1..75: mol_type = other DNA
tgcgtgatgttgcgaaggtccagattggaccggaaatgcgccggggcattgccgaactgaacggcgaaggcgaag

SEQ ID NO: 127825 - DNA, 75 bp, synthetic construct
  source 1..75: mol_type = other DNA
gctggatttatatcgatgcccgcgatcgtgacatggtgtcggtggttcacgatttgcaaaaagcgatagctgaaa

SEQ ID NO: 127826 - DNA, 75 bp, synthetic construct
  source 1..75: mol_type = other DNA
tgcccttgtcgatcgcagcggaaaacacgacctttcagaactgcgttctctgcaggactggttcctgaaatttga

SEQ ID NO: 127827 - DNA, 75 bp, synthetic construct
  source 1..75: mol_type = other DNA
gaagtggcttctgtatttggcaagaccggtaaagcacagaccgcaacggattccgcgccgctcgaaatggtggaa

SEQ ID NO: 127828 - DNA, 75 bp, synthetic construct
  source 1..75: mol_type = other DNA
gcttgaggagtgggatcatcagcatccgggtgagcagattgacaacaccacccgctggaaggtgattaccgatgc

SEQ ID NO: 127829 - DNA, 75 bp, synthetic construct
  source 1..75: mol_type = other DNA
gtgtttcagcattgaagggactgctggatacccgttgtgaggcattatcgctcccggtaacgaacatcctgtaca

SEQ ID NO: 127830 - DNA, 75 bp, synthetic construct
  source 1..75: mol_type = other DNA
gcgtgctcaacaagaacttcctcagatcgaggctgtgaagaaccagcatgcaaggcgcatagcgttagtacccct

SEQ ID NO: 127831 - DNA, 75 bp, synthetic construct
  source 1..75: mol_type = other DNA
agcctcaaaaatctgcaggtcagccgaatcaaccctcaagatgaaaccgaacgctatcgtcagcatgttctggag

SEQ ID NO: 127832 - DNA, 75 bp, synthetic construct
  source 1..75: mol_type = other DNA
tgctgacggttctctggccgctcaataaagttggcggggaatttttaccgcagatcaatgaaggcgacttgttgt

SEQ ID NO: 127833 - DNA, 75 bp, synthetic construct
  source 1..75: mol_type = other DNA
gcgtgatccgtgaggcgggtaaacgttttgtggtgatggataccgcaccaaccggtcacacgctgttactgctgg

SEQ ID NO: 127834 - DNA, 75 bp, synthetic construct
  source 1..75: mol_type = other DNA
atgaaattcttacagaacatcccgccttatctgttttttaccggtaagggaggcgtaggaaaaacctccatttcc

SEQ ID NO: 127835 - DNA, 75 bp, synthetic construct
  source 1..75: mol_type = other DNA
atgtatagtattcttagtcgcgacattgtccattgcctgattgcaccaggcacaccgttgtcggaaaaagaagtt

SEQ ID NO: 127836 - DNA, 75 bp, synthetic construct
  source 1..75: mol_type = other DNA
aaaacaaaaaatatttcactcgacaggagtatttatattgcgcccgttacgtgggcttcgactgtaaatcagaaa

SEQ ID NO: 127837 - DNA, 75 bp, synthetic construct
  source 1..75: mol_type = other DNA
aagttggagtcattaccaggggttcaatctgctaatgatttatggaagcgcgttttcgacatacttggtgtacca

SEQ ID NO: 127838 - DNA, 75 bp, synthetic construct
  source 1..75: mol_type = other DNA
tatggtggctgacacttttagttgttgcaagcaacaaaacgacgaaaccccgcactgttggagcagtaacggggc

SEQ ID NO: 127839 - DNA, 75 bp, synthetic construct
  source 1..75: mol_type = other DNA
ccttgcgccgctggcggcgtttgatctcgccttcaagtgctgaaacgataaattgtcccgtgctttcgccagctt

SEQ ID NO: 127840 - DNA, 75 bp, synthetic construct
  source 1..75: mol_type = other DNA
tcagatttggttcgttccagggtttgcaacgagagctttttcctgtgctctttaaggaatttctcaagagcaaac

SEQ ID NO: 127841 - DNA, 75 bp, synthetic construct
  source 1..75: mol_type = other DNA
ccggtaaggcagagaccgcaacggattccgcgccactcgaaatggtggaaaccaccattcagctgaaacctgagg

SEQ ID NO: 127842 - DNA, 75 bp, synthetic construct
  source 1..75: mol_type = other DNA
aggtgacctgctttatatgccgtcaacgttgccaggtgtctctccggcagaagcagcggcgctcctgcagaccac

SEQ ID NO: 127843 - DNA, 75 bp, synthetic construct
  source 1..75: mol_type = other DNA
cgggtgtgggctggatttttgaatatgcgctggtcgatcgcagcggaaaacacgatctttctgaattgcgttccc

SEQ ID NO: 127844 - DNA, 75 bp, synthetic construct
  source 1..75: mol_type = other DNA
gaaattattgaaccagtatggctgaaagaagccgtgttaacaatgttaggaaaatacctcactgctgagaatgtt

SEQ ID NO: 127845 - DNA, 75 bp, synthetic construct
  source 1..75: mol_type = other DNA
atgaaacgaattgcgtttgttttttctactgtgcctcatggtaccgctgccgggcgggaaggtttagatgcttta

SEQ ID NO: 127846 - DNA, 75 bp, synthetic construct
  source 1..75: mol_type = other DNA
tggagccaggaaaaacgtaacgaagaagcgaaaaaactgctggctgaagcgggttataccgcagacaaaccgttg

SEQ ID NO: 127847 - DNA, 75 bp, synthetic construct
  source 1..75: mol_type = other DNA
agtggagtggctgacggataatggttcatgctaccgggctaatgaaacacgacagtttgcccggatgttgggcct

SEQ ID NO: 127848 - DNA, 75 bp, synthetic construct
  source 1..75: mol_type = other DNA
gccagcagcggtaacagtgttctggcggtcacgcagcaactgtctatcagtttaggcgttgctgtaagtgcggcc

SEQ ID NO: 127849 - DNA, 75 bp, synthetic construct
  source 1..75: mol_type = other DNA
agtggagtggctgacggataatggttcatgctaccgggctaatgaaacacgccagtttgcccggatgttgggact

SEQ ID NO: 127850 - DNA, 75 bp, synthetic construct
  source 1..75: mol_type = other DNA
agtggagtggctgacggataatggttcatgctaccgggctaatgaaacacgtcagtttgcccggatgctgggact

SEQ ID NO: 127851 - DNA, 75 bp, synthetic construct
  source 1..75: mol_type = other DNA
agtggagtggctgacggataatggttcatgctaccgggctaatgaaacacgtcagtttgcccggatgatgggcct

SEQ ID NO: 127852 - DNA, 75 bp, synthetic construct
  source 1..75: mol_type = other DNA
ccaacgccagcaggatttactggaagcggctattgctcatgcccgggaggtattcatccatgatcggaatgcgtt

SEQ ID NO: 127853 - DNA, 75 bp, synthetic construct
  source 1..75: mol_type = other DNA
ctttgcaatcaccagcaatggcgatatggatgctgatcttgccgttgtttatattagggatggctatgtcgacgc

SEQ ID NO: 127854 - DNA, 75 bp, synthetic construct
  source 1..75: mol_type = other DNA
tattagtggaggatcttttatttctgctacaggatattctaattctgactccagccctcttaggttgagcacaac

SEQ ID NO: 127855 - DNA, 75 bp, synthetic construct
  source 1..75: mol_type = other DNA
gataacggagagagactgcgtgtcacgttcgcgctggactgctgtgatcgtgaggcactgcactgggcggtcact

SEQ ID NO: 127856 - DNA, 75 bp, synthetic construct
  source 1..75: mol_type = other DNA
atcctggtttaatcggcgtcaaagaaggatgtagcgtggctgtgctgtggctgattttccagtttccaatgctgg

SEQ ID NO: 127857 - DNA, 75 bp, synthetic construct
  source 1..75: mol_type = other DNA
acacggcagtttgcccggatgttggggcttgaaccgaagaacacggcggtgcggagtccggagagtaacggcata

SEQ ID NO: 127858 - DNA, 75 bp, synthetic construct
  source 1..75: mol_type = other DNA
ttcgagcattataacgaatggcatccgcatagtgcgctgggttaccgctcgccacgggaatatctgcggcagcgg

SEQ ID NO: 127859 - DNA, 75 bp, synthetic construct
  source 1..75: mol_type = other DNA
gggcggtcactacgggcggcttcaacagtgaaacagtacaggacgtcatgctgggagcggtggaacgccgcttcg

SEQ ID NO: 127860 - DNA, 75 bp, synthetic construct
  source 1..75: mol_type = other DNA
ggctgacggataatggttcatgctaccgggctaatgaaacacgccagttcgcccggatgttgggacttgaaccga

SEQ ID NO: 127861 - DNA, 75 bp, synthetic construct
  source 1..75: mol_type = other DNA
tggccgtgaaagaaagcaatcagcgatggtgctctgacgggttcgagttctgctgtgataacggagagagactgc

SEQ ID NO: 127862 - DNA, 75 bp, synthetic construct
  source 1..75: mol_type = other DNA
gaaacacgccagttcgcccggatgttgggacttgaaccgaagaacacggcggtgcggagtccggagagtaacgga

SEQ ID NO: 127863 - DNA, 75 bp, synthetic construct
  source 1..75: mol_type = other DNA
gtgataacagatgtctggaaatacaggggcaaatcccccacctgaacgccaataattctaacaaatactcgcaac

SEQ ID NO: 127864 - DNA, 75 bp, synthetic construct
  source 1..75: mol_type = other DNA
atggacgaacagtggggctatgtcggggctaaatcgcgccagttcgcccggatgttgggacttgaaccgaagaac

SEQ ID NO: 127865 - DNA, 75 bp, synthetic construct
  source 1..75: mol_type = other DNA
gagccgatgactggaaggacggccgccgcagccgtcacacggatgatacggatgtgcttcgccgtatacaccatg

SEQ ID NO: 127866 - DNA, 75 bp, synthetic construct
  source 1..75: mol_type = other DNA
ggcagagtggctgtgaaagaaagtaatcagcgatggtgctctgacgggttcgagttccgctgtgataacggagaa

SEQ ID NO: 127867 - DNA, 75 bp, synthetic construct
  source 1..75: mol_type = other DNA
catgctgggagcggtggaacgccgcttcggcaacgatcttccgtcgtctccagtggagtggctgacggataatgg

SEQ ID NO: 127868 - DNA, 75 bp, synthetic construct
  source 1..75: mol_type = other DNA
tttggactctccaccatagaagccgccagccttatatctgctgcatttatatcgcgatggtttggagggcttttt

SEQ ID NO: 127869 - DNA, 75 bp, synthetic construct
  source 1..75: mol_type = other DNA
agcacaaattgcaccaggtacggaactaaaagccgtggatggtatcgaaacgcctgattgggatgccgtgcgttt

SEQ ID NO: 127870 - DNA, 75 bp, synthetic construct
  source 1..75: mol_type = other DNA
atctgtcggccaacgagcggcgattattgccgcaggtccggttgcaaacttcatttttgctatctttgcctactg

SEQ ID NO: 127871 - DNA, 75 bp, synthetic construct
  source 1..75: mol_type = other DNA
gcagctggaagttgtataggtggttttatgggggactggcttggaacccgaaaagcatatgttatatcacttctt

SEQ ID NO: 127872 - DNA, 75 bp, synthetic construct
  source 1..75: mol_type = other DNA
gtgcgaagttggctgagttaccagaagttgaacctatccctactggttcctggctcaaaaaaaaaatgaagaaat

SEQ ID NO: 127873 - DNA, 75 bp, synthetic construct
  source 1..75: mol_type = other DNA
tgatgaatttttattgcccttgtcgcctgatgtaaatctggttgatttcttcgtatcacactttaatgacgaaag

SEQ ID NO: 127874 - DNA, 75 bp, synthetic construct
  source 1..75: mol_type = other DNA
atcccgtggaccgtaccattcaggtcagcggtgatgcctccggtcgctacggtctgcaacgggggcagcgtgttc

SEQ ID NO: 127875 - DNA, 75 bp, synthetic construct
  source 1..75: mol_type = other DNA
gcgcgattacaccaacgtggagaaagcgctgatgttctggcgcaagtctcttattcctgtaagggtcacgatgga

SEQ ID NO: 127876 - DNA, 75 bp, synthetic construct
  source 1..75: mol_type = other DNA
aggcgcggatgcgaggttaaaaaagcccttagcctcgactaccgtcactggataatctccgtcaggctcccttac

SEQ ID NO: 127877 - DNA, 75 bp, synthetic construct
  source 1..75: mol_type = other DNA
ttcctttgccagatgagtataaagttgtacgccagtatgggccgttcaacgctatcgtcgaagccacggacaaaa

SEQ ID NO: 127878 - DNA, 75 bp, synthetic construct
  source 1..75: mol_type = other DNA
taccggctgaagtctggccgcgagactacgaacatgctgaaaacatacttatgttctggcggaagaacaacattc

SEQ ID NO: 127879 - DNA, 75 bp, synthetic construct
  source 1..75: mol_type = other DNA
cagcggagatgcctccggtcgctatggcctgcaacgaggtcagcgtgttcgcctgcgctgccacctgatacaggg

SEQ ID NO: 127880 - DNA, 75 bp, synthetic construct
  source 1..75: mol_type = other DNA
tcaacggccaatatgcgttacggatagaacatttgattaacccaatcttgaattctctgaacgaggaacagccca

SEQ ID NO: 127881 - DNA, 75 bp, synthetic construct
  source 1..75: mol_type = other DNA
gtggggccggtggaacaataatttcaataatgaccccgacacagaatagttatccagtcactatcggcgcaggtg

SEQ ID NO: 127882 - DNA, 75 bp, synthetic construct
  source 1..75: mol_type = other DNA
accctgactaatgttggacgggatattctggctaaaacaagcaaacaggaggttattcattatcttggtttggga

SEQ ID NO: 127883 - DNA, 75 bp, synthetic construct
  source 1..75: mol_type = other DNA
ttcagcaacaccgcatgatggtaaggctgaaagttttgccagcctgatgaacatgcttgacccgacggcgatcgc

SEQ ID NO: 127884 - DNA, 75 bp, synthetic construct
  source 1..75: mol_type = other DNA
cccggagatggggagtaagcttagtcagccgttgtctccgggtgtcgcgtgcgcagttgcacgtcattctcagac

SEQ ID NO: 127885 - DNA, 75 bp, synthetic construct
  source 1..75: mol_type = other DNA
gaagttgagtacgtgcgttcggaaatgcaggtgaaatttaccaatataaccacctcgccgaacgacatcgtggtt

SEQ ID NO: 127886 - DNA, 75 bp, synthetic construct
  source 1..75: mol_type = other DNA
tatcaatgggctaaaattagttgtaatcatgtccggccttgtcggtagcgcatggtatataggtaaggttgtacc

SEQ ID NO: 127887 - DNA, 75 bp, synthetic construct
  source 1..75: mol_type = other DNA
aggtctttaggtaaaggcgttggcaaactcgcacaggcaggaatgggtaaattgcgtggcggtgtgaaagctggc

SEQ ID NO: 127888 - DNA, 75 bp, synthetic construct
  source 1..75: mol_type = other DNA
atggcattaattcttttttacgcagggggtacagcatttgttatctatgccgccgcaacaatgcttattgctaaa

SEQ ID NO: 127889 - DNA, 75 bp, synthetic construct
  source 1..75: mol_type = other DNA
tatctgatactcctgagccagggacagattcttactcaggaaaacctatcaatcagtacatgaaacttttcaaaa

SEQ ID NO: 127890 - DNA, 75 bp, synthetic construct
  source 1..75: mol_type = other DNA
cgatcttctgaaggggcgaatacctataacgagccaggccgggcttattatgccggagttaccgcatcattctga

SEQ ID NO: 127891 - DNA, 75 bp, synthetic construct
  source 1..75: mol_type = other DNA
tccatttcatcgtccaacaaaatgggtgcagtacaaacctgtatcaatccagtgaaggctatctgctctactcga

SEQ ID NO: 127892 - DNA, 75 bp, synthetic construct
  source 1..75: mol_type = other DNA
atgagacatatatcaccggaagaacttgttgcgcttcatgatgcgaatataagccgctacggcggcctgccggga

SEQ ID NO: 127893 - DNA, 75 bp, synthetic construct
  source 1..75: mol_type = other DNA
cggcatatgacctggcgaatggtaaggcggcggggagccataaacatgcctggggcgatattaccggggtaccgg

SEQ ID NO: 127894 - DNA, 75 bp, synthetic construct
  source 1..75: mol_type = other DNA
ccgacagcaggtaaaccatcactttttgttcaagggattgttgctgtgaactctggacaaaatgtaaccgtcaca

SEQ ID NO: 127895 - DNA, 75 bp, synthetic construct
  source 1..75: mol_type = other DNA
actgtaggcgctgcgactggtgaaatcgccgtatcttcagtcgcagaaaagctacgtgaactatatggttccaag

SEQ ID NO: 127896 - DNA, 75 bp, synthetic construct
  source 1..75: mol_type = other DNA
gcagtgggggctgcaactggtgaaatccccgtatcttcagtagcgaaaaaactacgtgaactatatggttccaat

SEQ ID NO: 127897 - DNA, 75 bp, synthetic construct
  source 1..75: mol_type = other DNA
gcgggaggtgggggaggggctggtttaggatcaacttgggtaaaccacgttgcccgcaatggcggtcgtggcttg

SEQ ID NO: 127898 - DNA, 75 bp, synthetic construct
  source 1..75: mol_type = other DNA
aataacgcgaccaatagcaacagtacgacggaggcggcgacaccgagcgcggtgaaggcggcaatggataaggca

SEQ ID NO: 127899 - DNA, 75 bp, synthetic construct
  source 1..75: mol_type = other DNA
atcaacaatcacggaatcatcctgatgcgacgctgacgcagaaaggttttacgctgctgagtaatgcgaccaata

SEQ ID NO: 127900 - DNA, 75 bp, synthetic construct
  source 1..75: mol_type = other DNA
ggaagacattcgtgttatgaaacataatggtattatctggccaatagctttagtgtataaaaatatatccaaact

SEQ ID NO: 127901 - DNA, 75 bp, synthetic construct
  source 1..75: mol_type = other DNA
atgcactaaccgctgattctataggtgactctcgttatgactacgttaataccgatactgtaggtgatcactctc

SEQ ID NO: 127902 - DNA, 75 bp, synthetic construct
  source 1..75: mol_type = other DNA
acagagacaacacaaaaaagctttgatggtggagactcttcgttttctaatctaactgcaaaaggtggccatgga

SEQ ID NO: 127903 - DNA, 75 bp, synthetic construct
  source 1..75: mol_type = other DNA
cagtacgacggaggcggcgacaccgagcgcggtgaaggcggcatatgacctggcgaatagtaaggctgcgggaaa

SEQ ID NO: 127904 - DNA, 75 bp, synthetic construct
  source 1..75: mol_type = other DNA
tcgtcggcccggctaactacttttcacatcccggaagtctcaatcatctgcatgattttttcacgactgaacagc

SEQ ID NO: 127905 - DNA, 75 bp, synthetic construct
  source 1..75: mol_type = other DNA
ctctccgtctggtataacgatgccggacaggcgctgcattatgagattttcgacgacgccaattttatggtgctg

SEQ ID NO: 127906 - DNA, 75 bp, synthetic construct
  source 1..75: mol_type = other DNA
gcaaaccgagaagtttctccacggcaccaaagtcgcctacggaattctggtgcaaagcgccttgctgggtcagga

SEQ ID NO: 127907 - DNA, 75 bp, synthetic construct
  source 1..75: mol_type = other DNA
cgtcgagtttttcgactaccagtgccatttctgtatgaaggtagcgccggtcgttgaatccgtgttgagccagag

SEQ ID NO: 127908 - DNA, 75 bp, synthetic construct
  source 1..75: mol_type = other DNA
atgcctcacaatcctatccgcgtcgtcgttggccctgctaactacttttctcatcccggcagtctcaatcacctg

SEQ ID NO: 127909 - DNA, 75 bp, synthetic construct
  source 1..75: mol_type = other DNA
tcgtggtcattgcagcgaaagcgatgtacaacaactggcggctgagtccggtgacgatcgcagcgtggtgattgg

SEQ ID NO: 127910 - DNA, 75 bp, synthetic construct
  source 1..75: mol_type = other DNA
gcggtgggggccgcaactggtgaaatccccgtatcttcagtagcggaaaaactacgtgaattatttggtcccaat

SEQ ID NO: 127911 - DNA, 75 bp, synthetic construct
  source 1..75: mol_type = other DNA
cttccgtcgtctccagtggagtggctgacggataatggttcatgctaccgggctaatgaaacacgccagttcgcc

SEQ ID NO: 127912 - DNA, 75 bp, synthetic construct
  source 1..75: mol_type = other DNA
atctgcggcagcgggcttgtaatgggttaagtgataacagatgtctggaaatatgggggcaaatccagtttttat

SEQ ID NO: 127913 - DNA, 75 bp, synthetic construct
  source 1..75: mol_type = other DNA
atgcctcacaatcctatccgcgtggtcgtcggcccggctaactacttttcacatccaggaagtttcaatcacctg

SEQ ID NO: 127914 - DNA, 75 bp, synthetic construct
  source 1..75: mol_type = other DNA
aaattcgcggcgagatcctcacgcagccgtatccgactgcattccgggtacgtagcgcgctggatatggagcaga

SEQ ID NO: 127915 - DNA, 75 bp, synthetic construct
  source 1..75: mol_type = other DNA
ggggctgcgactggcgagatatctgtatcttctgtcgccgccacgttacgtagattgtatggttctgcggagtag

SEQ ID NO: 127916 - DNA, 75 bp, synthetic construct
  source 1..75: mol_type = other DNA
aaagcgcgatggtgctgcgcgacggtgcgaagtttgaagcacaggcgggcgatccaaagcaggcgctggaaacct

SEQ ID NO: 127917 - DNA, 75 bp, synthetic construct
  source 1..75: mol_type = other DNA
gtgataacaggtgtctggaaatatgtaagcgtaaactgaccgccgtatgtagccatcagacgagaattggtaact

SEQ ID NO: 127918 - DNA, 75 bp, synthetic construct
  source 1..75: mol_type = other DNA
gggcggcgtggtgctgtcgacgtgtaaccgcacggaactttatcttagcgttgaagagcaggataacctgcaaga

SEQ ID NO: 127919 - DNA, 75 bp, synthetic construct
  source 1..75: mol_type = other DNA
atgccgcgctgaaagccaataatcctgaccgggcagaacggctgttccagcaggcgcgtaatgtcgataacaccg

SEQ ID NO: 127920 - DNA, 75 bp, synthetic construct
  source 1..75: mol_type = other DNA
aaccagaacaatcgccgcgtcacaatcggcctgaacaacatgatctggcattacgacaaagacctgagtggctac

SEQ ID NO: 127921 - DNA, 75 bp, synthetic construct
  source 1..75: mol_type = other DNA
ataccgggaaaaaatggggcggcgtgcgtgccgacggcgtggggctaagcctgagctacgataaaggtgaagcaa

SEQ ID NO: 127922 - DNA, 75 bp, synthetic construct
  source 1..75: mol_type = other DNA
ccagaaatcattctctgtggcgaaacgcgtccgtactgaaacggatattggcgccagcgccgtttctgttgcgtt

SEQ ID NO: 127923 - DNA, 75 bp, synthetic construct
  source 1..75: mol_type = other DNA
cgcagttgaagcggaaactatcgtcgctcaggaaaccagcgaatttatggcgtggctgcgcgcacaaagcgccag

SEQ ID NO: 127924 - DNA, 75 bp, synthetic construct
  source 1..75: mol_type = other DNA
tcgcaaccaaccaatgctgctggtggatattgccgttccgcgcgatgttgagccggaagttggcaaactggcgaa

SEQ ID NO: 127925 - DNA, 75 bp, synthetic construct
  source 1..75: mol_type = other DNA
aacgggatgacctgcaagaggcgctcattcgctggttgtgtgattaccataatctcaacgaagacgatctgcgta

SEQ ID NO: 127926 - DNA, 75 bp, synthetic construct
  source 1..75: mol_type = other DNA
tgccgtggaggcggagactatcgtcgcccaggaggccagcgaatttatggcgtggttgcgttcacaaagcgccag

SEQ ID NO: 127927 - DNA, 75 bp, synthetic construct
  source 1..75: mol_type = other DNA
gacgatctgcaaagcattatttcgcataacctggcgcagcgtaaagctgcagcagttgaggcggaaactatcgtc

SEQ ID NO: 127928 - DNA, 75 bp, synthetic construct
  source 1..75: mol_type = other DNA
taatgaatggcatccgcatagtacgctggattatcgctctccacgcgaatatctacggccgcaggcctgtaatgg

SEQ ID NO: 127929 - DNA, 75 bp, synthetic construct
  source 1..75: mol_type = other DNA
agaaccttgcagaggcgttcgagcattataacgaatggcatccgcatagtgcgctgggttatcgctcgccacggg

SEQ ID NO: 127930 - DNA, 75 bp, synthetic construct
  source 1..75: mol_type = other DNA
gctgtgaccgtgagccactgtactgggcggtcactacgggcggcttcgacagtgaaacagtacaggacgtcatgc

SEQ ID NO: 127931 - DNA, 75 bp, synthetic construct
  source 1..75: mol_type = other DNA
aaaactgctggagcatatccgtaaccggggggatcaaacccctgttctggtgatttctgctacggaaaatatggc

SEQ ID NO: 127932 - DNA, 75 bp, synthetic construct
  source 1..75: mol_type = other DNA
tcgagttccgctgtgataacggtgaaaaactgcgtgtcacgttcgcgctggactgctgcgatcgtgaagcactgc

SEQ ID NO: 127933 - DNA, 75 bp, synthetic construct
  source 1..75: mol_type = other DNA
gtgatgctgaggtcggtggaaaagcgcttcggcgacaggctaccggaaacaccagtgcagtggctgacggataac

SEQ ID NO: 127934 - DNA, 75 bp, synthetic construct
  source 1..75: mol_type = other DNA
ccttcggacaaggaatagccccggtaagccgtattctgggcgtgtcacgtgcgcagttaacattacggatgaagg

SEQ ID NO: 127935 - DNA, 75 bp, synthetic construct
  source 1..75: mol_type = other DNA
agttaaccggtaaaaatgtcgaagataactggcgcgtgcgctggatgacgggctattactataaggtcattaacc

SEQ ID NO: 127936 - DNA, 75 bp, synthetic construct
  source 1..75: mol_type = other DNA
aagaggcagaagcggaagcgatgctgcgccagcaaccgccttcctcgcgtattgacctcacgctggctgactggg

SEQ ID NO: 127937 - DNA, 75 bp, synthetic construct
  source 1..75: mol_type = other DNA
tcaggacgtcatgctgggagcggtggaacgccgcttcggcaacgagcttccggcgtctccagtagagtggctgac

SEQ ID NO: 127938 - DNA, 75 bp, synthetic construct
  source 1..75: mol_type = other DNA
agcgaccagcgctggtgttccgatggctttgagttcggttgtgatgatggcgcaaaactgcgtgtcacgttcgca

SEQ ID NO: 127939 - DNA, 75 bp, synthetic construct
  source 1..75: mol_type = other DNA
agagccaaatcccttattttttacggcattaacggccccatttatcacgcctgctaccagctcttatctggattt

SEQ ID NO: 127940 - DNA, 75 bp, synthetic construct
  source 1..75: mol_type = other DNA
ggcggcggtagcggggttacctcgcgatctggcgcggcaatttatcgcgcagcatgaaccgtttacacgtgaatg

SEQ ID NO: 127941 - DNA, 75 bp, synthetic construct
  source 1..75: mol_type = other DNA
acgctattcagcgaaagctcccttcagcacgatgcgataaaggcaaaagaatttatcgccacactggtgagtatc

SEQ ID NO: 127942 - DNA, 75 bp, synthetic construct
  source 1..75: mol_type = other DNA
agacaaatcgggctggacgcggttaattaaactggcgaccgacaccattgcggaaggtgagctggataaagtcgt

SEQ ID NO: 127943 - DNA, 75 bp, synthetic construct
  source 1..75: mol_type = other DNA
agaatgttaaagagttttgatatagaacaacattctgaaatacgtcaaattagttcagagcagaataaaaaagat

SEQ ID NO: 127944 - DNA, 75 bp, synthetic construct
  source 1..75: mol_type = other DNA
gaaaaggatgtgtctcgcgttcaacaactcgcggtgcagtattcgcggcaggccctgcaaccgattattgacgac

SEQ ID NO: 127945 - DNA, 75 bp, synthetic construct
  source 1..75: mol_type = other DNA
gttactgggcggatgcgttgctggggtcacgcctgcacgagctgaagcgggaaaaagacgtttcccgtgttcacc

SEQ ID NO: 127946 - DNA, 75 bp, synthetic construct
  source 1..75: mol_type = other DNA
gcaaatgctaattggtaaaacccctaaaaccctggctgatctgttctttatcgaacagaaacgtatagagagaaa

SEQ ID NO: 127947 - DNA, 75 bp, synthetic construct
  source 1..75: mol_type = other DNA
gaagcagagcgtttgcgccttgcgaaagcagaagaaaaagcccgtaaagaagcggaagcagcagaaaaggctttt

SEQ ID NO: 127948 - DNA, 75 bp, synthetic construct
  source 1..75: mol_type = other DNA
gagaagaagctggctgaggctaaagctgaactggcgaaggccgaaagcgatgtacagagtaagcaagcgattgtt

SEQ ID NO: 127949 - DNA, 75 bp, synthetic construct
  source 1..75: mol_type = other DNA
gatctggcgcggcagttcatcgcccggcacgaaccgttcacccgtgaatggtatgccggttctgcgggttatctc

SEQ ID NO: 127950 - DNA, 75 bp, synthetic construct
  source 1..75: mol_type = other DNA
atcgaactggcaacgaaaaccatcgccgaaggtgaactcgacaaagtggttcttgctcgggcgactgacctgcat

SEQ ID NO: 127951 - DNA, 75 bp, synthetic construct
  source 1..75: mol_type = other DNA
aagcccttgcctgggttacatttaaccaccacgcgagaacaacactggccggacaaaacgggctggacgcaatta

SEQ ID NO: 127952 - DNA, 75 bp, synthetic construct
  source 1..75: mol_type = other DNA
tggtcacaaactgggtgaattcgcaccgactcgtacttatcgcggccacgctgctgataaaaaagcgaagaagaa

SEQ ID NO: 127953 - DNA, 75 bp, synthetic construct
  source 1..75: mol_type = other DNA
atgttcatttagcatttctgcaaatgagaagagtagtgttgttgattttgatttaagaatctttgatgacggtag

SEQ ID NO: 127954 - DNA, 75 bp, synthetic construct
  source 1..75: mol_type = other DNA
aaaaaagccgagaaagcaactaaagttgtcgagctagacatagatatatcacttcaagagtcaactatttcagaa

SEQ ID NO: 127955 - DNA, 75 bp, synthetic construct
  source 1..75: mol_type = other DNA
tggctatcagagattgctaactttcgcggtcatgctgctggttacagggctgctcttgaggcagcaccacaactg

SEQ ID NO: 127956 - DNA, 75 bp, synthetic construct
  source 1..75: mol_type = other DNA
ctcttagcatgtacgcggttgatgctgttgccgctattgcagaggtgagaggctggaatgcctgccgcgccgcca

SEQ ID NO: 127957 - DNA, 75 bp, synthetic construct
  source 1..75: mol_type = other DNA
taatgcatctggcatgaatgccgcatatgactatgaccaaatccgggaaattaattacacattacaaaacactga

SEQ ID NO: 127958 - DNA, 75 bp, synthetic construct
  source 1..75: mol_type = other DNA
cgttcttcagcctggcaatgcagtatggcctttcgcacgctctggtggattatccccgggtggacgccgaaaagg

SEQ ID NO: 127959 - DNA, 75 bp, synthetic construct
  source 1..75: mol_type = other DNA
tccgcagcgatggaagcgaacgtggtaaaaaatgcttatggctataccgataataaggggaattttgtcgatcag

SEQ ID NO: 127960 - DNA, 75 bp, synthetic construct
  source 1..75: mol_type = other DNA
cggagttctgctctctggtttcaatgagctgaagttttatggtgatgtggagtttaatatagatgccgccagtaa

SEQ ID NO: 127961 - DNA, 75 bp, synthetic construct
  source 1..75: mol_type = other DNA
gcaaaagaggaacacgccaccgccctgaaactgaatctgatcatctccacaccagaaagccgtaaggaggccaaa

SEQ ID NO: 127962 - DNA, 75 bp, synthetic construct
  source 1..75: mol_type = other DNA
tcaaactgaacatgccagtgtcattcccggaaaccgggcagccagcgaaaccgtcgcgcagctgcttcacaaatc

SEQ ID NO: 127963 - DNA, 75 bp, synthetic construct
  source 1..75: mol_type = other DNA
aaaaatggagaagttaaattaataaaaggttttgtttccgcatataaaagaatgtattgggataaacctgcatcg

SEQ ID NO: 127964 - DNA, 75 bp, synthetic construct
  source 1..75: mol_type = other DNA
gcttaatggtggtcctgaagcgctcagggatataatgttaagaatggtttcaggttcaggtaacacacaatcaca

SEQ ID NO: 127965 - DNA, 75 bp, synthetic construct
  source 1..75: mol_type = other DNA
gttaaaggtaagccctggtacgataactgctatttctacaatttcgatgaaattccatttcgtggcaaagaaggg

SEQ ID NO: 127966 - DNA, 75 bp, synthetic construct
  source 1..75: mol_type = other DNA
caacagccagctactcagcaatcagcaggaggtagctacacgtcaaaatcaggcattcaatttacggtggaatga

SEQ ID NO: 127967 - DNA, 75 bp, synthetic construct
  source 1..75: mol_type = other DNA
cgatcgtgcgagaaacggtgaaaacatcgtgtctgagattaaatcactctatgcaaagcgggatgctcttcgtga

SEQ ID NO: 127968 - DNA, 75 bp, synthetic construct
  source 1..75: mol_type = other DNA
ttatgccagtcggttcccacagacagctgaaggcgatgctcaattactgcaaggttgttatgactacatggatgc

SEQ ID NO: 127969 - DNA, 75 bp, synthetic construct
  source 1..75: mol_type = other DNA
cgatcatcaccaacaaagtgcataaatggttacctggcgaaaccatcaatagcaacaccgaaaaactagtgagag

SEQ ID NO: 127970 - DNA, 75 bp, synthetic construct
  source 1..75: mol_type = other DNA
acgaatctctggtatacggcgtgttcccaaaccaggacggtacgttcaccgcgatgacgtataccaaaagcaaaa

SEQ ID NO: 127971 - DNA, 75 bp, synthetic construct
  source 1..75: mol_type = other DNA
gctatgacgtataccaaaagcaaaacgtttaaaaccgaatctggcgcacgtcgctggctggaaagaaactcaggt

SEQ ID NO: 127972 - DNA, 75 bp, synthetic construct
  source 1..75: mol_type = other DNA
ccccaaccaggatggaacgttcaccgccatgacttataccaaaagcaagacattcaaaactgaaacgggcgcacg

SEQ ID NO: 127973 - DNA, 75 bp, synthetic construct
  source 1..75: mol_type = other DNA
gcagcgcctgcaacatcgtctgcatcagcacaaaactatgccatgaagaaggatatcgacgcgatcgcaaatgca

SEQ ID NO: 127974 - DNA, 75 bp, synthetic construct
  source 1..75: mol_type = other DNA
acgaatctctggtatacagcgtgtttcccaaccaggacggcacattcaccgcgatgacgtataccaaaagcaaaa

SEQ ID NO: 127975 - DNA, 75 bp, synthetic construct
  source 1..75: mol_type = other DNA
gcgaatctctggtatgtggcgtgttccccaaccaggacggtacgtttaccgcgatgacgtataccagaagcaaaa

SEQ ID NO: 127976 - DNA, 75 bp, synthetic construct
  source 1..75: mol_type = other DNA
ccagtgggatatcagcgtctggtcgacgagttaaccatgctggtaaagcggttagcttggcaactgaagaaagcg

SEQ ID NO: 127977 - DNA, 75 bp, synthetic construct
  source 1..75: mol_type = other DNA
tgaagcacagagactgtgcataccgggcacaatcgaccatgacatcatccgcacatataagatggatattgctgt

SEQ ID NO: 127978 - DNA, 75 bp, synthetic construct
  source 1..75: mol_type = other DNA
tgctgacaatcaggcagtggcgcgaaacatacgtacctggtagcaacgttgtactgccagcagaagaagcggaag

SEQ ID NO: 127979 - DNA, 75 bp, synthetic construct
  source 1..75: mol_type = other DNA
aacgtgatgagattgcccgccaacaggctgaaaccgcgcatttgttagcaatggcggaggcagcagaggctgaga

SEQ ID NO: 127980 - DNA, 75 bp, synthetic construct
  source 1..75: mol_type = other DNA
gccttattaaagaattgccagtaaatactattcttgactattcatacgttcctgtaccaacaaatgtatatactg

SEQ ID NO: 127981 - DNA, 75 bp, synthetic construct
  source 1..75: mol_type = other DNA
tcaggactttctttagaacattattcatataacaatcacataatcccttatgtggaaaaacacataaataaaaaa

SEQ ID NO: 127982 - DNA, 75 bp, synthetic construct
  source 1..75: mol_type = other DNA
ataaatcattacatgcatcactcttacctctttccaaaaagatatcgatgggtaaagaaagtatcagtatgaaat

SEQ ID NO: 127983 - DNA, 75 bp, synthetic construct
  source 1..75: mol_type = other DNA
acctgtattgatgaagtgtattccgccaccgaaggccggatcggcaataaaaaagtgattctggccgggaccaat

SEQ ID NO: 127984 - DNA, 75 bp, synthetic construct
  source 1..75: mol_type = other DNA
gcgatttggggagtttcacttgctctgctgagaaggatggcgaaatccgatccgatgttgcgccaggtctatctt

SEQ ID NO: 127985 - DNA, 75 bp, synthetic construct
  source 1..75: mol_type = other DNA
taagatggatattgctgttctggaaattgcactgcaattgctggcagcagcgccagttggtaaattttatgaata

SEQ ID NO: 127986 - DNA, 75 bp, synthetic construct
  source 1..75: mol_type = other DNA
gaaagccgacggcattcttaaaattgataaatatatagcaatgcctggtcaagatataacattgcatttggacag

SEQ ID NO: 127987 - DNA, 75 bp, synthetic construct
  source 1..75: mol_type = other DNA
atgactgttaaggaactgatactgataactatagtattaccttttttcattactgcctgtactgataagtattct

SEQ ID NO: 127988 - DNA, 75 bp, synthetic construct
  source 1..75: mol_type = other DNA
tatcaccaccgactatttgcaacagtgccctatcaggatctccccttgtggaggggacttacgatcgcggcggtc

SEQ ID NO: 127989 - DNA, 75 bp, synthetic construct
  source 1..75: mol_type = other DNA
agtttatcaccaccgactatttgcaacagtgccgaggaaatcgggttcgtggtgaaagaaacggtccccatgcca

SEQ ID NO: 127990 - DNA, 75 bp, synthetic construct
  source 1..75: mol_type = other DNA
gtgcacccggactatctgactgagatactcgacggggtaaggcggatcgacgatcagcggcactgttgcaaatag

SEQ ID NO: 127991 - DNA, 75 bp, synthetic construct
  source 1..75: mol_type = other DNA
aggcggaggctggcagctctggcagtcggaaaccggcgaaggtctgcgggcagattaccgcaccgccaaaggcac

SEQ ID NO: 127992 - DNA, 75 bp, synthetic construct
  source 1..75: mol_type = other DNA
cttcgcgatgaacaccccgcctgctggccttggcatcaccatgcctaacctgcatgaaatgggtggcgagaacgc

SEQ ID NO: 127993 - DNA, 75 bp, synthetic construct
  source 1..75: mol_type = other DNA
atgacgctcgtgcacccggactatctgactgagatactcgacggggtaaggcggatcgacgatcagctgctgcac

SEQ ID NO: 127994 - DNA, 75 bp, synthetic construct
  source 1..75: mol_type = other DNA
agtgaagccaatatcgatcgtttctgtgagttaacacagtcctgtcaacgacggatgaaaagtgatccacttata

SEQ ID NO: 127995 - DNA, 75 bp, synthetic construct
  source 1..75: mol_type = other DNA
gaatatttagaaactttcggtgtaccgctaattggctatcagaccaaagcgctgcctgcgtttttctgccgcacc

SEQ ID NO: 127996 - DNA, 75 bp, synthetic construct
  source 1..75: mol_type = other DNA
ttgggaagaaatgacctgcttattcgcaccttccctaatgtcaccgttgtttgtgccggggcgaaatctattctc

SEQ ID NO: 127997 - DNA, 75 bp, synthetic construct
  source 1..75: mol_type = other DNA
tgggggataaaaccggcagcggtggctatggcaccaccaacgatatcgcggtgatctggccaaaagatcgtgcgc

SEQ ID NO: 127998 - DNA, 75 bp, synthetic construct
  source 1..75: mol_type = other DNA
tctgcggaatctgacgctgggtaaagcattgggcgacagccaacgggcgcagctggtgacatggatgaaaggcaa

SEQ ID NO: 127999 - DNA, 75 bp, synthetic construct
  source 1..75: mol_type = other DNA
agggtcttttatatcgttccctcacgctgcccaacgccaaatacaaactcaccgcgcaaacattacagtggttgg

SEQ ID NO: 128000 - DNA, 75 bp, synthetic construct
  source 1..75: mol_type = other DNA
aggctatttcactagttggagtagatatctatgagaaattgattaagggatataccgaaaaacagtggggacgta

SEQ ID NO: 128001 - DNA, 75 bp, synthetic construct
  source 1..75: mol_type = other DNA
gacccgtcagggccagctcactgctttagggacagaatttaccgtccgccagcaggataatttcacgcagcttga

SEQ ID NO: 128002 - DNA, 75 bp, synthetic construct
  source 1..75: mol_type = other DNA
ttgcacgcgccaacgattgttgcggaattgcacgatggagaaatcaaaagttatcaactgactgctgaagatttt

SEQ ID NO: 128003 - DNA, 75 bp, synthetic construct
  source 1..75: mol_type = other DNA
tgcgcgatatggtctacaacctgccagtgttaacgccgccacgctgggtacgttcacgcaccacgcccatcgcgc

SEQ ID NO: 128004 - DNA, 75 bp, synthetic construct
  source 1..75: mol_type = other DNA
cgtctaacttttgacaataattatttctctgatcggtatcaaggtattccagttggaggatataccagattagtt

SEQ ID NO: 128005 - DNA, 75 bp, synthetic construct
  source 1..75: mol_type = other DNA
agagaatatccatcagaatgtaaggaaacaaacgagccttattatccaatcaatgatgataaaaatatggaattg

SEQ ID NO: 128006 - DNA, 75 bp, synthetic construct
  source 1..75: mol_type = other DNA
cgagcaaaaaatcgctgactttctgcgggccagagtgagcgagctgaaatccgtctcttcacggcagatggcgaa

SEQ ID NO: 128007 - DNA, 75 bp, synthetic construct
  source 1..75: mol_type = other DNA
acagctcggcattagccagtcgagcatagtgaaatttgcccaaaaactcggcgcgcaaggatttactgaattgcg

SEQ ID NO: 128008 - DNA, 75 bp, synthetic construct
  source 1..75: mol_type = other DNA
cctgggtgggtcggcgctggtggggcgcgatctttcattcaaactgatgaaaattggttatcgtgtggcctgtga

SEQ ID NO: 128009 - DNA, 75 bp, synthetic construct
  source 1..75: mol_type = other DNA
acttttgacaataattatttttctgatctttatcaggggatacctattggtggttataccaagatggtggaaaaa

SEQ ID NO: 128010 - DNA, 75 bp, synthetic construct
  source 1..75: mol_type = other DNA
cggcactgcacctgcacagttcgattaccagtgatgattcgctggaagtgattgcgcgcaaactgaatcgcgaaa

SEQ ID NO: 128011 - DNA, 75 bp, synthetic construct
  source 1..75: mol_type = other DNA
atgttgtacctgacgaaaatacgcaatgcggaaagtgaatttaccgggaacgagcaaaaaattgctgactttctg

SEQ ID NO: 128012 - DNA, 75 bp, synthetic construct
  source 1..75: mol_type = other DNA
agaaatcgacctgaatatcccagctcagcgtgtcgtccgggttctggacagaatagtggcaaaccgcggataccc

SEQ ID NO: 128013 - DNA, 75 bp, synthetic construct
  source 1..75: mol_type = other DNA
gttctggcagcacggcggcgtgatgagcgtcttcaggctgctgatgaacggctgtcccgccaggaacgagcaatg

SEQ ID NO: 128014 - DNA, 75 bp, synthetic construct
  source 1..75: mol_type = other DNA
ggcagcattactataactgggaacgccatcatagcgctcacaacggtaaaactccgatggcgcgctacttcgaac

SEQ ID NO: 128015 - DNA, 75 bp, synthetic construct
  source 1..75: mol_type = other DNA
ttttcgtcgtaaaggcaagcagcgtctgccggtacgtaatccatcgccgcttgctacacctgaagcgttaaacca

SEQ ID NO: 128016 - DNA, 75 bp, synthetic construct
  source 1..75: mol_type = other DNA
tggtcactcatctgataacgacgttcgggcttagtatccgtcaggcctgtcggagcctgaacctgagtagaacgg

SEQ ID NO: 128017 - DNA, 75 bp, synthetic construct
  source 1..75: mol_type = other DNA
taacagcgagcggcctcatgaatccctgaataacctgacgccggaagagtaccggctgatggcagaaaaaccgga

SEQ ID NO: 128018 - DNA, 75 bp, synthetic construct
  source 1..75: mol_type = other DNA
atgcgtggtacaccgccattgcttaatcttggcttgctgaatatcaagcactggcaaagccagagcgagcaggac

SEQ ID NO: 128019 - DNA, 75 bp, synthetic construct
  source 1..75: mol_type = other DNA
tacacatctgttgatgattgcactcgctacagagttctgaggctctattcccgtcgcacgactacaaacacactg

SEQ ID NO: 128020 - DNA, 75 bp, synthetic construct
  source 1..75: mol_type = other DNA
aaaagacagacaaagctgagttttacgctaccgtagatatcgctactgataacttggaggagcgactggcagaat

SEQ ID NO: 128021 - DNA, 75 bp, synthetic construct
  source 1..75: mol_type = other DNA
ggcagcattactataactgggaacgccctcatagcgctcacaacggtaaaactccgatggagcgctacttcgaac

SEQ ID NO: 128022 - DNA, 75 bp, synthetic construct
  source 1..75: mol_type = other DNA
ccggtgatcgggttcagatggatacctgtaaaattggccccggcttaaatcagtacacatctgctgatgattgca

SEQ ID NO: 128023 - DNA, 75 bp, synthetic construct
  source 1..75: mol_type = other DNA
gagaagctggaaaatcagatgcgtcatgccggcgctaaacttctgcgggctgaaaatacatccaccaaatctgtt

SEQ ID NO: 128024 - DNA, 75 bp, synthetic construct
  source 1..75: mol_type = other DNA
attaactcagccggaatggtttggctggagccaggaaaaacgtaacgaagaagctaaaaaactgctggccgaagc

SEQ ID NO: 128025 - DNA, 75 bp, synthetic construct
  source 1..75: mol_type = other DNA
tgacttataacaacatgccgatcgagctgttccagaaactgaaaaaagagatcccggacgaagttcacgtcgacc

SEQ ID NO: 128026 - DNA, 75 bp, synthetic construct
  source 1..75: mol_type = other DNA
tcaggagatttggctttgtctggcggcatttacccaggccaatctggatgcgtatttcagagaatggatctctta

SEQ ID NO: 128027 - DNA, 75 bp, synthetic construct
  source 1..75: mol_type = other DNA
aaagtatttgccaccggtggtattggcggtgtgcatcgcggcgcggaacataccttcgatatttctgccgattta

SEQ ID NO: 128028 - DNA, 75 bp, synthetic construct
  source 1..75: mol_type = other DNA
aattgaattactgggtcgtgaagggcataacgtgaccaaagttagtcgtcgcgatttaccttttgttgttgccgc

SEQ ID NO: 128029 - DNA, 75 bp, synthetic construct
  source 1..75: mol_type = other DNA
atgtctgaattaaaaatttcccctgaattattacaaatttccccggaagtgcaggacgctttaaaaaacaaaaaa

SEQ ID NO: 128030 - DNA, 75 bp, synthetic construct
  source 1..75: mol_type = other DNA
gcacgcaaagcattatggttgggtcggatggtgagttgtacggcgcatccgactcgcgcttggtggatgatttaa

SEQ ID NO: 128031 - DNA, 75 bp, synthetic construct
  source 1..75: mol_type = other DNA
actggctgaatgggcagagaaacatgcaataaaactggagtttatccagccgggtaagccgacgcagaacgcttt

SEQ ID NO: 128032 - DNA, 75 bp, synthetic construct
  source 1..75: mol_type = other DNA
gtacttgacaggatcgcggcaaaccgcggttatccggtcatgctacgcatggataatggtccggaatttatctct

SEQ ID NO: 128033 - DNA, 75 bp, synthetic construct
  source 1..75: mol_type = other DNA
gacccatttttacctgtctctttctcgcaacttggcgggcatccaacctggattcaggacgcggaatatcctctc

SEQ ID NO: 128034 - DNA, 75 bp, synthetic construct
  source 1..75: mol_type = other DNA
tgcctggctgccggatgatgtatcggaatggcgtcgactccctgtaaacagcatgagacagggaaaccttaggtc

SEQ ID NO: 128035 - DNA, 75 bp, synthetic construct
  source 1..75: mol_type = other DNA
tcaccaaccgcggaaattcgatgcgttaatcgactggactccctgccccgttcccaccgatgccctgtatcaaca

SEQ ID NO: 128036 - DNA, 75 bp, synthetic construct
  source 1..75: mol_type = other DNA
gctgtgcgatgttccgaaacagcaaccgccgggtcaccttccgcccacagcacgggcaacaggttttagttcgcg

SEQ ID NO: 128037 - DNA, 75 bp, synthetic construct
  source 1..75: mol_type = other DNA
gtactcgtcctggtcaacatcaccgtcaggcggtattggatcagtttgctaaaatcgttccaaccgtactgaaag

SEQ ID NO: 128038 - DNA, 75 bp, synthetic construct
  source 1..75: mol_type = other DNA
tgtctggtactgaagcactggttactacgctggggatattttcagccaataaaggggtaatacctgcgtttacgc

SEQ ID NO: 128039 - DNA, 75 bp, synthetic construct
  source 1..75: mol_type = other DNA
tgcgttgtggggagtggcgcttcctgagccggaatttacacctgctgaacttgccgccttccgggactactgggt

SEQ ID NO: 128040 - DNA, 75 bp, synthetic construct
  source 1..75: mol_type = other DNA
ttgcagacagccgaacctgaatacctggacggcctgagcgaaccgatcgggaaattttcgatgactactgtctgg

SEQ ID NO: 128041 - DNA, 75 bp, synthetic construct
  source 1..75: mol_type = other DNA
tttgaggcacaggtcggaaaatattgcgtgtatctgaaacgggactggcgcgacgagtactgtgttggcgacatt

SEQ ID NO: 128042 - DNA, 75 bp, synthetic construct
  source 1..75: mol_type = other DNA
cacccagatgaactcgaaagccgatgatgaggtccgtaaagagcttaatgccattgctgacgtatcagccggccg

SEQ ID NO: 128043 - DNA, 75 bp, synthetic construct
  source 1..75: mol_type = other DNA
cacccagatgaactcgaaagccgatgaagatgtccgtaaagagcttaatgccattgctgacgtatcagccggccg

SEQ ID NO: 128044 - DNA, 75 bp, synthetic construct
  source 1..75: mol_type = other DNA
cacccagatgaactccaaagccgatgatgacgtccgtaaagagcttaatgccattgctgacgtatcagccggccg

SEQ ID NO: 128045 - DNA, 75 bp, synthetic construct
  source 1..75: mol_type = other DNA
tgtccggtacacagcaggtttccactacgctggtacactttgccgctgatgccggagttattcccgagcttaccc

SEQ ID NO: 128046 - DNA, 75 bp, synthetic construct
  source 1..75: mol_type = other DNA
cccgtccgcaatttattaatcacactgcaggaaaaactcgccaccccggcagggcagcaagtcgcacagtccctg

SEQ ID NO: 128047 - DNA, 75 bp, synthetic construct
  source 1..75: mol_type = other DNA
tgttatcaatatcagtaagcgtaaactgaccgccgtatgtagccatcagacgagaattggtaacttagacgccca

SEQ ID NO: 128048 - DNA, 75 bp, synthetic construct
  source 1..75: mol_type = other DNA
atccagttgttgtggaacgtgagactgacgagcttatagaaaaagctattgctttcaagcacgcgtatcgtcagc

SEQ ID NO: 128049 - DNA, 75 bp, synthetic construct
  source 1..75: mol_type = other DNA
aacccaaagatctaacccccacacataacgcactcgagagtgctccgaccagtgagtcgaatggcgtgccgttgc

SEQ ID NO: 128050 - DNA, 75 bp, synthetic construct
  source 1..75: mol_type = other DNA
ccaattatatatttattctcaagtggtttttcttccagtttatttttaagtttgagtaatctaaacatcacacta

SEQ ID NO: 128051 - DNA, 75 bp, synthetic construct
  source 1..75: mol_type = other DNA
ttgtactggtacaaccgatttatctataacaaaactgagagtatcagcgggctgcatcagcacgactattatgaa

SEQ ID NO: 128052 - DNA, 75 bp, synthetic construct
  source 1..75: mol_type = other DNA
gaacagcattatttgccgttgttgccttattgctttgttgcttcacaggtttaccgaactaataatacttttctt

SEQ ID NO: 128053 - DNA, 75 bp, synthetic construct
  source 1..75: mol_type = other DNA
ttttatgtcattaaccgtttacgtcattaccgcgaagaacaggtgattgatggatgtaccgcagtggctgaaaag

SEQ ID NO: 128054 - DNA, 75 bp, synthetic construct
  source 1..75: mol_type = other DNA
cggagaatgccagacaggatgcagttgccactgcagaggacagaaaggccactgcggaagacgtgaaaagcacgg

SEQ ID NO: 128055 - DNA, 75 bp, synthetic construct
  source 1..75: mol_type = other DNA
atttcccgtctgactaacgagcgatgggctgatgtggaaccatccttgcgggagtttttttgcgataacggcgat

SEQ ID NO: 128056 - DNA, 75 bp, synthetic construct
  source 1..75: mol_type = other DNA
ggatgttcagagcattcattaccggggtcatattgcgccctgtccggggtgccggatgcacatgtctctggcgca

SEQ ID NO: 128057 - DNA, 75 bp, synthetic construct
  source 1..75: mol_type = other DNA
cctggtgttcacttattgcatggtttatatttttgttctttgtgctttcaattaatatttttccagtcagtgcct

SEQ ID NO: 128058 - DNA, 75 bp, synthetic construct
  source 1..75: mol_type = other DNA
agcggaggggaaagtgtttactcagattcagtgggagcagaaattcgcccgtcacgtaaatcacgtcagggcgca

SEQ ID NO: 128059 - DNA, 75 bp, synthetic construct
  source 1..75: mol_type = other DNA
tgatgagggaaaagtgttcacgcaggttcagtgggagcagaaattcgcccgtcacgtaaatcacgtcagggcgca

SEQ ID NO: 128060 - DNA, 75 bp, synthetic construct
  source 1..75: mol_type = other DNA
ggtcctccatctggaacatattcagcccgtccgcaatttattaatcacactgcaacaaaaactcgccaccccggc

SEQ ID NO: 128061 - DNA, 75 bp, synthetic construct
  source 1..75: mol_type = other DNA
gtcgacaggatggtgtctggggtacgctttgtcgatgggcaaacaccagtgactggggctggaaagagtacagtg

SEQ ID NO: 128062 - DNA, 75 bp, synthetic construct
  source 1..75: mol_type = other DNA
acggccctgtatgccacagaaaagatcgccggacgcatcaatgcccgactggaggatgagggcttcactgtaaaa

SEQ ID NO: 128063 - DNA, 75 bp, synthetic construct
  source 1..75: mol_type = other DNA
ttgccggacagcttcatgctgcgctcgatcgcattagcgatacgcaaaccaccgcccgcacacaggcagaaaaat

SEQ ID NO: 128064 - DNA, 75 bp, synthetic construct
  source 1..75: mol_type = other DNA
caaaaagcgtcggtttcgatgcaaatggggattcaggtgcgtaataagctggtggcagcgtaccaggaagtgatg

SEQ ID NO: 128065 - DNA, 75 bp, synthetic construct
  source 1..75: mol_type = other DNA
atgtcagcgatacaggggattgaagggggtatcagccagttacaggctacggcgatgagtgcgcgtgcgcaggat

SEQ ID NO: 128066 - DNA, 75 bp, synthetic construct
  source 1..75: mol_type = other DNA
agaatggccatggaggagatcgatactaaaacccgggaattactgacgggggtctgcacctcactggaagaggag

SEQ ID NO: 128067 - DNA, 75 bp, synthetic construct
  source 1..75: mol_type = other DNA
caatgcccgcctggaggatgagggctttaccgtaaaaatcagttttccggcagtcagccagttacagacccggct

SEQ ID NO: 128068 - DNA, 75 bp, synthetic construct
  source 1..75: mol_type = other DNA
cccgacagccccgaaataaaattcagtgatcgcagggaagcccttgaactgatgacgcaaatcgaatcgaccgtg

SEQ ID NO: 128069 - DNA, 75 bp, synthetic construct
  source 1..75: mol_type = other DNA
agtaaaaacaaatctgagtgcgcttatggaagaaagaacggagacagtcccccgtcgccgccgtcagagtggaat

SEQ ID NO: 128070 - DNA, 75 bp, synthetic construct
  source 1..75: mol_type = other DNA
ctgcccgcctcccgcgtttatcccggatcctcacgtcaggcgtacctggctaaccgtgcgcttcatgagttacgg

SEQ ID NO: 128071 - DNA, 75 bp, synthetic construct
  source 1..75: mol_type = other DNA
agaaactgccggtgatcgacgtggagttcagccatctggtggggatggatgaatgccagggaacactcacactgc

SEQ ID NO: 128072 - DNA, 75 bp, synthetic construct
  source 1..75: mol_type = other DNA
cacccagatgaactctaaagccgatgaagaagtccgtaaagagcttaatgccattgctgacgtatcagccggccg

SEQ ID NO: 128073 - DNA, 75 bp, synthetic construct
  source 1..75: mol_type = other DNA
cacccagatgaactcaaaagccgatgaggatgtccgtaaagagcttaatgccattgctgacgtatcagccggccg

SEQ ID NO: 128074 - DNA, 75 bp, synthetic construct
  source 1..75: mol_type = other DNA
cacccagatgaactcaaaagccgatgatgaagtccgtaaagagcttaatgccattgctgacgtatcagccggccg

SEQ ID NO: 128075 - DNA, 75 bp, synthetic construct
  source 1..75: mol_type = other DNA
cacccagatgaactctaaagccgatgaggaggtccgtaaagagcttaatgccattgctgacgtatcagccggccg

SEQ ID NO: 128076 - DNA, 75 bp, synthetic construct
  source 1..75: mol_type = other DNA
cacccagatgaactctaaagccgatgacgacgtccgtaaagagcttaatgccattgctgacgtatcagccggccg

SEQ ID NO: 128077 - DNA, 75 bp, synthetic construct
  source 1..75: mol_type = other DNA
cacccagatgaactctaaagccgatgatgatgtccgtaaagagcttaatgccattgctgacgtatcagccggccg

SEQ ID NO: 128078 - DNA, 75 bp, synthetic construct
  source 1..75: mol_type = other DNA
gagggtgatgggtggtttattggctccattcatgacacggaagacggtccggtttgtatctggttgcggaattgt

SEQ ID NO: 128079 - DNA, 75 bp, synthetic construct
  source 1..75: mol_type = other DNA
ggcaagggacggagtgcgacatgagcataattaaggaaatgccggtggagcgtgatgaatatggttgctggacgc

SEQ ID NO: 128080 - DNA, 75 bp, synthetic construct
  source 1..75: mol_type = other DNA
atgaataaacaagtaattatttctgactggatcaacaaccctaacagcctgttaagcactgatactggctaccta

SEQ ID NO: 128081 - DNA, 75 bp, synthetic construct
  source 1..75: mol_type = other DNA
caggcgcatatcaccagcctgcttgaggatatccgggaaatagcagactgtcaggagcaggtgaccgctgatgtc

SEQ ID NO: 128082 - DNA, 75 bp, synthetic construct
  source 1..75: mol_type = other DNA
ggaagaaaacagcgcagccccgggagagaaacgcattcgctttctttcacgatattttcggaacggaaatcagca

SEQ ID NO: 128083 - DNA, 75 bp, synthetic construct
  source 1..75: mol_type = other DNA
gagggtgaaggctggtttgttggctctattcatgacactgaagatggtccagtttgtatctggctgcgggagaag

SEQ ID NO: 128084 - DNA, 75 bp, synthetic construct
  source 1..75: mol_type = other DNA
gattccaaagtggtgtattgaccgtatcccttctgatgcgcaaattataggtgaaacggaactacattatcttgt

SEQ ID NO: 128085 - DNA, 75 bp, synthetic construct
  source 1..75: mol_type = other DNA
ataccttaatagcattgggttattatgtttgggcaaataagattgaatgtgtagattttgaggttccgcaaaaca

SEQ ID NO: 128086 - DNA, 75 bp, synthetic construct
  source 1..75: mol_type = other DNA
atagtttagaggcattgggttatcatgtctgggccggaaaggttgaatgtgtagattatggtgttccgcaaaata

SEQ ID NO: 128087 - DNA, 75 bp, synthetic construct
  source 1..75: mol_type = other DNA
acgaatctctggcatgcggcgtgttccccaacctggacggcacgttcaccgctatgacgtataccaaaagcaaaa

SEQ ID NO: 128088 - DNA, 75 bp, synthetic construct
  source 1..75: mol_type = other DNA
aaggattccttcatggtgtattgaccgtgttcctgctgacgctcaattaattggtgagtctggttcttacactta

SEQ ID NO: 128089 - DNA, 75 bp, synthetic construct
  source 1..75: mol_type = other DNA
aagttattaagtctgtttgtgagaacttaaagcttcagactaaaccaaagctacgaattaaaaatcagcatcaag

SEQ ID NO: 128090 - DNA, 75 bp, synthetic construct
  source 1..75: mol_type = other DNA
acgaatctctggtgtgcggcgtgtttcccaaccaggacggcacgttcaccgcgatgacgtataccaaaagcaaaa

SEQ ID NO: 128091 - DNA, 75 bp, synthetic construct
  source 1..75: mol_type = other DNA
atgttagtcatggctaatcttgtttgcatcaacacaccgcacggtgttctcagcaaacagttccgctacccggcg

SEQ ID NO: 128092 - DNA, 75 bp, synthetic construct
  source 1..75: mol_type = other DNA
tattgacctgcgtccggaatccctgaagaaattcgaagagctggcgcaacaggcgcagcagagtgccggggccgc

SEQ ID NO: 128093 - DNA, 75 bp, synthetic construct
  source 1..75: mol_type = other DNA
ttgtgaagactttaaagtctgaagggtatttcgtttggtatgatactgtattttgtcctgattatggaatggccc

SEQ ID NO: 128094 - DNA, 75 bp, synthetic construct
  source 1..75: mol_type = other DNA
ctcgatcagatgattatcaatggaagacgctttttcgaaatggcggaacactaccagcaacaggtatcggcaatt

SEQ ID NO: 128095 - DNA, 75 bp, synthetic construct
  source 1..75: mol_type = other DNA
accttgatcagattggtcagttcccttatgtggaatctttgcgcatagctcaccattttgtagatgactataaca

SEQ ID NO: 128096 - DNA, 75 bp, synthetic construct
  source 1..75: mol_type = other DNA
cccggcgttaaggggaaatgaggtcagcatggatactatcgatcttagcaacaacgattctctggtgtgcggcgt

SEQ ID NO: 128097 - DNA, 75 bp, synthetic construct
  source 1..75: mol_type = other DNA
atggatactatcgagcttggcaacaacgaatctctggtatgtggagtgtttcccaatcaggacggcacgtttacc

SEQ ID NO: 128098 - DNA, 75 bp, synthetic construct
  source 1..75: mol_type = other DNA
tggtgactatcagataatcgttgaaagtatgcagcccgccggtgaaggcttgttgcaacagaagtatgaacagct

SEQ ID NO: 128099 - DNA, 75 bp, synthetic construct
  source 1..75: mol_type = other DNA
atgcaaaaaatcgacctcggcaataacgaatccctggtgtgcggcgtgtttccaaaccaagacggcgcgttcacc

SEQ ID NO: 128100 - DNA, 75 bp, synthetic construct
  source 1..75: mol_type = other DNA
atgtatacgctcaatcttggcaacaacgaatctctggtatgcggtgtgtttcccaaccaggacggtaccttcacc

SEQ ID NO: 128101 - DNA, 75 bp, synthetic construct
  source 1..75: mol_type = other DNA
gcgttaaggggaaatgaggtcagcatggatactatcgatcttggcaacaacgcatctctggtgtacggcgtgttt

SEQ ID NO: 128102 - DNA, 75 bp, synthetic construct
  source 1..75: mol_type = other DNA
tcccaaccaggacggcacgtttaccgcgatgacgtataccaaaagtaaaaagtttaaaaccgaagctggcgcgcg

SEQ ID NO: 128103 - DNA, 75 bp, synthetic construct
  source 1..75: mol_type = other DNA
atggatacgctcaatcttggcaacaacgaatctctggtatgcggcgtgttccctaaccaggacggcacgtttacc

SEQ ID NO: 128104 - DNA, 75 bp, synthetic construct
  source 1..75: mol_type = other DNA
acgtataccaaaagcaaaacgtttaaaaccgaatctggcgcgcgtcgctggctggaaagaaactcaggcgagtga

SEQ ID NO: 128105 - DNA, 75 bp, synthetic construct
  source 1..75: mol_type = other DNA
agctccggctggcacgccagcaaaccatgcttgaacgcctgcaaaaacggatgagctttgcgctggaaaatcagc

SEQ ID NO: 128106 - DNA, 75 bp, synthetic construct
  source 1..75: mol_type = other DNA
aacggttcgtcagctgcttgagcatgagatggggcaggtgtggatcagtggcgaaatctctaatttcacacaacc

SEQ ID NO: 128107 - DNA, 75 bp, synthetic construct
  source 1..75: mol_type = other DNA
acgaatctctggtgtgcggcgtgttcccaaaccaggacggtacgttcaccgcgatgacgtataccaaaagcacca

SEQ ID NO: 128108 - DNA, 75 bp, synthetic construct
  source 1..75: mol_type = other DNA
cctttggtgatgcgatgaacgatcgcgaaatgttaggcagcgtcggtagcggatttattatgggcaatgcgatgc

SEQ ID NO: 128109 - DNA, 75 bp, synthetic construct
  source 1..75: mol_type = other DNA
ttatggataccggctgtgaacatcctctgacgtatcgctttattcgtgaggttgtgaagttctggaacgtaccgc

SEQ ID NO: 128110 - DNA, 75 bp, synthetic construct
  source 1..75: mol_type = other DNA
atgcatcaagtcgtcagtttttcaggtggacgaacatcggcctatctcgtccatctgatggaggcacagcgaaaa

SEQ ID NO: 128111 - DNA, 75 bp, synthetic construct
  source 1..75: mol_type = other DNA
agcatgttgccggaggcagaacaacaacgcctgctgtttgaaggcggttatccggtgctggcaaaagtcgcaaaa

SEQ ID NO: 128112 - DNA, 75 bp, synthetic construct
  source 1..75: mol_type = other DNA
atctggccgggtagccgaatgcgcaccatggcttcaaccgcggcaggcagcaacagctgggtacaggtgaaaacg

SEQ ID NO: 128113 - DNA, 75 bp, synthetic construct
  source 1..75: mol_type = other DNA
gtaccagaaatgggatacccaggccagtatgcatatcttcaatgacaatggctggtttaccgggcaagagatccc

SEQ ID NO: 128114 - DNA, 75 bp, synthetic construct
  source 1..75: mol_type = other DNA
cacccttgagcgtctgcaaaagcggatgagctttgcgttggagaatcagcttaaacgcgccggtcagcaacagca

SEQ ID NO: 128115 - DNA, 75 bp, synthetic construct
  source 1..75: mol_type = other DNA
gaatcagcgtaacgaatgtgatgtgctgatcgtcgggcgcggcggcggttcgctggaagatttgtggagttttaa

SEQ ID NO: 128116 - DNA, 75 bp, synthetic construct
  source 1..75: mol_type = other DNA
cgttccggcatgagcgccacctggtgtgcgctgttgctgatggtgctggcgaatctttggtatatgccttgggag

SEQ ID NO: 128117 - DNA, 75 bp, synthetic construct
  source 1..75: mol_type = other DNA
acatactcatggatacgggatgtgaacacccgctgacgtaccggtttattcgggaggttgtgaagttctgggata

SEQ ID NO: 128118 - DNA, 75 bp, synthetic construct
  source 1..75: mol_type = other DNA
tgatactggttcgtgttccgaatcatgtgaaatctggggtgaccaattggagttgaaattcgaagaggtagtggc

SEQ ID NO: 128119 - DNA, 75 bp, synthetic construct
  source 1..75: mol_type = other DNA
cgataccggctcgtgttcagagtcatgtgaaatctggggtgatcaattggaattgaaattcgaagaggtggtggc

SEQ ID NO: 128120 - DNA, 75 bp, synthetic construct
  source 1..75: mol_type = other DNA
tggaggatgagggctttaccgtaaaaatcagttttccggcagtcagccagttacagacccggctcgcggtaaaaa

SEQ ID NO: 128121 - DNA, 75 bp, synthetic construct
  source 1..75: mol_type = other DNA
aggctgaagcacagttccggcctgagctggagaaaatcgtcagcgggattgaaacaggttttcgtggcacggccc

SEQ ID NO: 128122 - DNA, 75 bp, synthetic construct
  source 1..75: mol_type = other DNA
ggccgcctgtttgtgctggtcaataaatttgatgagaaagaccgcaatggcgatggggcagatgccgtacgccag

SEQ ID NO: 128123 - DNA, 75 bp, synthetic construct
  source 1..75: mol_type = other DNA
tcgcggctaacactcctgtggctgcgactgtcaggggaaccccgtttacgccctgcagcatgtcgggccagccct

SEQ ID NO: 128124 - DNA, 75 bp, synthetic construct
  source 1..75: mol_type = other DNA
actcaggtgagtgatatggatttcgacacaatcatggaaaaggcttacgaagaatacttcgaaggtcttgccgaa

SEQ ID NO: 128125 - DNA, 75 bp, synthetic construct
  source 1..75: mol_type = other DNA
tcagagcattcattaccggggtcatattgcgccctgtccgggggccggatgcacatgtctctggcgcaatgcccg

SEQ ID NO: 128126 - DNA, 75 bp, synthetic construct
  source 1..75: mol_type = other DNA
cagcattcgtctcgacagtgcccgcgaaattgctcgcgcgatggcagtgaagtggcaaaccggtttgaacggcgg

SEQ ID NO: 128127 - DNA, 75 bp, synthetic construct
  source 1..75: mol_type = other DNA
caatggcacttgcctgtgaatataccaacaaccctgaattattacaaatatccgctgaagtacaggatgctttaa

SEQ ID NO: 128128 - DNA, 75 bp, synthetic construct
  source 1..75: mol_type = other DNA
ctatggcttcggctgcggctggcagcaacagttgggtacaggtgaaaacgcaccgcaccattggcgatgccgtcg

SEQ ID NO: 128129 - DNA, 75 bp, synthetic construct
  source 1..75: mol_type = other DNA
ggagaaagttgaacaactgcgtaacacgctgattcagagctctgaagatcataaacgcgatcagcaggcgcagga

SEQ ID NO: 128130 - DNA, 75 bp, synthetic construct
  source 1..75: mol_type = other DNA
cgttgattctgcggccgcaaaactcatgcagaatgcagaaaatgtcagtgaatatctgtcattacgccatcaggg

SEQ ID NO: 128131 - DNA, 75 bp, synthetic construct
  source 1..75: mol_type = other DNA
tggggcgcgaaggacataacgttaccaaagtcagccgccgggatttaccttttgttattgctgcaggaaaacatg

SEQ ID NO: 128132 - DNA, 75 bp, synthetic construct
  source 1..75: mol_type = other DNA
ttcctcgcacctggcgtgtactctattttctgttgctgttggcgcaggtggttttactttgctggcaaccgtggc

SEQ ID NO: 128133 - DNA, 75 bp, synthetic construct
  source 1..75: mol_type = other DNA
aaacggtaaacagggccaggaacgccgtgcaaaagaatggcgataccttgtccggtgggcttacttttgaaaacg

SEQ ID NO: 128134 - DNA, 75 bp, synthetic construct
  source 1..75: mol_type = other DNA
cgcgactagtggttaccgacggcgatgacgcggaagatttgctcggtgtcgttcacgttatcgatcttctgcaac

SEQ ID NO: 128135 - DNA, 75 bp, synthetic construct
  source 1..75: mol_type = other DNA
aaccagcagatctttaatccgcaggaacggcggatgattgagcgggtacttaatcttaaccagcgtaccgtcagc

SEQ ID NO: 128136 - DNA, 75 bp, synthetic construct
  source 1..75: mol_type = other DNA
gaacggttattacccgcaccggtgaaaagcaggtgcaattgcatcaaaacgcgacaacgtgggtggctggcccaa

SEQ ID NO: 128137 - DNA, 75 bp, synthetic construct
  source 1..75: mol_type = other DNA
agcgacttatggcgacgtgatagaccagtattggatttcacaatttgttattcaccgtgagtcctacgactacaa

SEQ ID NO: 128138 - DNA, 75 bp, synthetic construct
  source 1..75: mol_type = other DNA
gtgacacagtgccaggtatcttctttgccaggtcaacgggcaccaggagagtcatcggtacctgtaatatgtaaa

SEQ ID NO: 128139 - DNA, 75 bp, synthetic construct
  source 1..75: mol_type = other DNA
acgttgcaggttgaaagtcatcgcgtgcagaaggtacagattattccgctgcgcaaggatggcgagatggagtac

SEQ ID NO: 128140 - DNA, 75 bp, synthetic construct
  source 1..75: mol_type = other DNA
ggtacgcgagttgttcaattgatggcgcgtggtggtcgttatgaaaaagccggacacgcaattaccggattaaga

SEQ ID NO: 128141 - DNA, 75 bp, synthetic construct
  source 1..75: mol_type = other DNA
cacgaagaccgtgataaagcactaaacgatgaagaccttaaattaaaaaataaagagctacaacagaaacttagc

SEQ ID NO: 128142 - DNA, 75 bp, synthetic construct
  source 1..75: mol_type = other DNA
cacacaacgcaaaggtgcgaagttctggggcgtggtgacacaaattgtggtactggacgccatcttctcactcga

SEQ ID NO: 128143 - DNA, 75 bp, synthetic construct
  source 1..75: mol_type = other DNA
gtattccaaaacctggcgaagaagttcaggtaggggattatttgcttaaaacgttgcaggtggaaagccatcgcg

SEQ ID NO: 128144 - DNA, 75 bp, synthetic construct
  source 1..75: mol_type = other DNA
gttcacgttatcgacctgctgcaacagtcgctgcgcggcgaaccgctcaatctgcgggtactgattcgccaaccg

SEQ ID NO: 128145 - DNA, 75 bp, synthetic construct
  source 1..75: mol_type = other DNA
gctataaagagacggaaaaaacgtcagcgatgacgacaactcactctacaaaatttcagccatcacaggcgattt

SEQ ID NO: 128146 - DNA, 75 bp, synthetic construct
  source 1..75: mol_type = other DNA
aaacttcagccatcacaggcgattttgtttaagatgagagaagatgcgccaccattaaacctcacagaagaaatc

SEQ ID NO: 128147 - DNA, 75 bp, synthetic construct
  source 1..75: mol_type = other DNA
tcagtccactgtttgcaatcagggtgttaatagcatcggttgtagtggtgtggttaatttgttttgcattatttt

SEQ ID NO: 128148 - DNA, 75 bp, synthetic construct
  source 1..75: mol_type = other DNA
tgtttaagatgagagaagatgcgccaccattaaacctcacagaagaaatcacgcctacttatccgacggtgatgc

SEQ ID NO: 128149 - DNA, 75 bp, synthetic construct
  source 1..75: mol_type = other DNA
taacacgctcaccatgaagcgtttcaccaatgggcgtggcttctggtgcctgggtggtaaagcggcaaaaaacta

SEQ ID NO: 128150 - DNA, 75 bp, synthetic construct
  source 1..75: mol_type = other DNA
aacaactcgtggcagaagagctggttgaaaaagttgtgaacgggcgggtgaaactccagtgggatgccagaaaac

SEQ ID NO: 128151 - DNA, 75 bp, synthetic construct
  source 1..75: mol_type = other DNA
gaagcgctggactgcctggtgtatgcctatgcggcattacgtgtgtccgtgcaacgctggcaacttgatctggct

SEQ ID NO: 128152 - DNA, 75 bp, synthetic construct
  source 1..75: mol_type = other DNA
tcaaaaaatatcgacggctatgctctcgatggtgagaccgatgacgaaagcggcgaactactgaaagagacagca

SEQ ID NO: 128153 - DNA, 75 bp, synthetic construct
  source 1..75: mol_type = other DNA
atatgtcgcgcgctgatgttgacctgttggccgctgatattgctaatttcattcgtggtgaacttgccaacatta

SEQ ID NO: 128154 - DNA, 75 bp, synthetic construct
  source 1..75: mol_type = other DNA
acccgcatccgtgggtttgaaaatatctgcaatgagctcggttatgtcggtgagttttacactttaaccgcaccg

SEQ ID NO: 128155 - DNA, 75 bp, synthetic construct
  source 1..75: mol_type = other DNA
atacgaatgcgcgggtatcaacagcaatgtatcaaccgctgtttttggaggtcattttgatacccagcttatgca

SEQ ID NO: 128156 - DNA, 75 bp, synthetic construct
  source 1..75: mol_type = other DNA
aaatattttccgcagcaccatcgcatgaggctaaagctcggaaaatccttaatcgtgttgcggcgatggctgaag

SEQ ID NO: 128157 - DNA, 75 bp, synthetic construct
  source 1..75: mol_type = other DNA
ctcggagttctgtcaataactgtacgggaagcgaaagcgatccaccgatactggatttaacaaaaccactgagtc

SEQ ID NO: 128158 - DNA, 75 bp, synthetic construct
  source 1..75: mol_type = other DNA
agagggcttacaatacattatagattgtgaacgcgttgaagcagtaagccatgaatttgatgacgattttgaact

SEQ ID NO: 128159 - DNA, 75 bp, synthetic construct
  source 1..75: mol_type = other DNA
atgatattacttattgcctcgctgggaggcattttttacgccatcgcatcacaactgtggcagcgtcagaccatc

SEQ ID NO: 128160 - DNA, 75 bp, synthetic construct
  source 1..75: mol_type = other DNA
tattgattttcgtacccagctcctgcccgacaaactcaccttgccactgctctggcttggcttgttatttaatgc

SEQ ID NO: 128161 - DNA, 75 bp, synthetic construct
  source 1..75: mol_type = other DNA
tctgtcgtcacgcatggttaatatggtcgcccgatataaccgtctcccggatatgtcgcgcgctgatgttgacct

SEQ ID NO: 128162 - DNA, 75 bp, synthetic construct
  source 1..75: mol_type = other DNA
gcgtgtgactaaaaaatattttggtgaggatgaaatcgcaccggcagtaatgcgcatgtttaatgaggtttggtg

SEQ ID NO: 128163 - DNA, 75 bp, synthetic construct
  source 1..75: mol_type = other DNA
ttacgtttaaacgcccggagctggttgagaagatcaataatctggttgccagtcactatcccggaatgttacccc

SEQ ID NO: 128164 - DNA, 75 bp, synthetic construct
  source 1..75: mol_type = other DNA
gccgtagcggtgaaaaataaattctccgttggcgacagcctggaactgatgacgccacagggcaatatcaacttt

SEQ ID NO: 128165 - DNA, 75 bp, synthetic construct
  source 1..75: mol_type = other DNA
cggtggtggaaatggggccggacgcactgattatgtccgatccggggctgattatgctggtgcgtggacacttcc

SEQ ID NO: 128166 - DNA, 75 bp, synthetic construct
  source 1..75: mol_type = other DNA
catcgcatgaggctaaagccaggaaaatccttaatcgtgttgctgcgatagctgaagcatcaaaaccaatatcag

SEQ ID NO: 128167 - DNA, 75 bp, synthetic construct
  source 1..75: mol_type = other DNA
atgctcacagaaaaacagttttttgaacttatcaaagcattacagtcatctaatttctcaaccacagagatttta

SEQ ID NO: 128168 - DNA, 75 bp, synthetic construct
  source 1..75: mol_type = other DNA
aactatataatgctgagccagaggattacgaagggcttcataaatatatgctctcactaggattcaggagaacga

SEQ ID NO: 128169 - DNA, 75 bp, synthetic construct
  source 1..75: mol_type = other DNA
cgccaaccgacaaagtgtttatgatcgaagaggcccagcgtccgggcgagtatatgaccgcgtttgaagatgagc

SEQ ID NO: 128170 - DNA, 75 bp, synthetic construct
  source 1..75: mol_type = other DNA
gctaccgtaacagcaaatggaacggcaccagcccgtcggacacgcagagctatctcaccggcctttgggcgcgca

SEQ ID NO: 128171 - DNA, 75 bp, synthetic construct
  source 1..75: mol_type = other DNA
cgcacgctttatgaaccgcgcgccgagtttaacctgtatggtgaggaaaccgtctgcatccgtggcgtgtacgat

SEQ ID NO: 128172 - DNA, 75 bp, synthetic construct
  source 1..75: mol_type = other DNA
aaaatatctgcaatgagctcggttatgtcggtgagttttataccctgactgcgccgtcaaaatatcacgccacaa

SEQ ID NO: 128173 - DNA, 75 bp, synthetic construct
  source 1..75: mol_type = other DNA
gatccggagaaaggcagcgcaaccggctacgtcgcgaaatacatctcgaaaaatatcgacggttacgctcttgat

SEQ ID NO: 128174 - DNA, 75 bp, synthetic construct
  source 1..75: mol_type = other DNA
aaactgcgtgacagactggcgtgaacagaagcgccggacgcgcgaatttctcaaaggtctggagcttgaagacga

SEQ ID NO: 128175 - DNA, 75 bp, synthetic construct
  source 1..75: mol_type = other DNA
aactggagacattaaatgcctggtatatgcatgctggtttcatcactcagcaattcaggataatgccaccagagt

SEQ ID NO: 128176 - DNA, 75 bp, synthetic construct
  source 1..75: mol_type = other DNA
tgaacggccagcgcgtgctgcaaagcgaagaagcaggcaaatggaaaaatgacaacgttgataaagcgggcagca

SEQ ID NO: 128177 - DNA, 75 bp, synthetic construct
  source 1..75: mol_type = other DNA
ttgagaaagaggaacggcgtggttattcgatgaaaacagtaaagttaaaactggaaaagctggagataaagagag

SEQ ID NO: 128178 - DNA, 75 bp, synthetic construct
  source 1..75: mol_type = other DNA
aaaatagccgatcgtgccagcaagttgtacgacaaaatgcgcttgtttgtcgatgatatgtccgcgattggtcaa

SEQ ID NO: 128179 - DNA, 75 bp, synthetic construct
  source 1..75: mol_type = other DNA
gatctggagctggactggattgactgggataacggcgcactgcgtattggcgcaatgtcacgcttacaatccctg

SEQ ID NO: 128180 - DNA, 75 bp, synthetic construct
  source 1..75: mol_type = other DNA
tgtactgaccccaaaaagttggacagttaaacacgaggcatataggtctgattccgatattcaattggagtcaga

SEQ ID NO: 128181 - DNA, 75 bp, synthetic construct
  source 1..75: mol_type = other DNA
acccgcagtttgtctttgtgtttgccgccgttcgtcgtgcagaccgtaaaccccgtatctgtatgctccgcaccg

SEQ ID NO: 128182 - DNA, 75 bp, synthetic construct
  source 1..75: mol_type = other DNA
atttatgatctggctgaggcgcagcagcttactgctgaggagcaggttgaaaaatgggtggacgggcgtaagaaa

SEQ ID NO: 128183 - DNA, 75 bp, synthetic construct
  source 1..75: mol_type = other DNA
tgacgctggtcgcctatgaacgctacttcaacgcggaagacgactacacacgcgaaagcgcattgcaggagcata

SEQ ID NO: 128184 - DNA, 75 bp, synthetic construct
  source 1..75: mol_type = other DNA
ctttcaaactggacgtttgtacagcacaattctattttgtgcgggtaagtaatgaggctggaggcgttgtggata

SEQ ID NO: 128185 - DNA, 75 bp, synthetic construct
  source 1..75: mol_type = other DNA
aacaccgggcggttataccatctggaataccggcgcggcctggcaggtgactaaagacgtcaaactgcgcgcagg

SEQ ID NO: 128186 - DNA, 75 bp, synthetic construct
  source 1..75: mol_type = other DNA
acaaattatcaaagcctattatcgggcaaaaccgtataccaaacagttggagttgcaaagcaaggttttgggcat

SEQ ID NO: 128187 - DNA, 75 bp, synthetic construct
  source 1..75: mol_type = other DNA
gtaaatcacgacgacagttcgaggaatatgtgcagaacgctcttctttcccaggggtgggcaccaaagaaagaag

SEQ ID NO: 128188 - DNA, 75 bp, synthetic construct
  source 1..75: mol_type = other DNA
aagcgttgcaaaacaatatcatgctggttagcccgaccacgctgctggtggcgctgcgcactatcgccaacctct

SEQ ID NO: 128189 - DNA, 75 bp, synthetic construct
  source 1..75: mol_type = other DNA
cctgcaagccgccaccttattggcctgaacattacccgggacattcccggctacctgttcgccggtggtgtggct

SEQ ID NO: 128190 - DNA, 75 bp, synthetic construct
  source 1..75: mol_type = other DNA
ttgctgatgccaaacctgcaagccgccaccttattggcctgaacattacccgggacattcccggctacctgttcg

SEQ ID NO: 128191 - DNA, 75 bp, synthetic construct
  source 1..75: mol_type = other DNA
gatcacgacgtattactggcgggatttccttgccagccattcagtctggcaggggtcagtaagaaaaattctctc

SEQ ID NO: 128192 - DNA, 75 bp, synthetic construct
  source 1..75: mol_type = other DNA
aaagatgtggtgatcgacgccaaaatgacgctggtcgcttatgaacgctacttcaacgcggaagacgactacacc

SEQ ID NO: 128193 - DNA, 75 bp, synthetic construct
  source 1..75: mol_type = other DNA
agcgtttaagcgagcagtttgaaaacctcgctaaccgtatttttgaacacagcaatcgccgggttgatgaacaaa

SEQ ID NO: 128194 - DNA, 75 bp, synthetic construct
  source 1..75: mol_type = other DNA
acccgcaatttgtttttgtgtttgccgccgttcgtcgtgcagaccgtaaaccccgtatttgtatgctccgcaccg

SEQ ID NO: 128195 - DNA, 75 bp, synthetic construct
  source 1..75: mol_type = other DNA
aattagctgaacgtgaagagatggtcgcggagttaagcgcggcaaaacaacaaattacccaaagtgagcactggc

SEQ ID NO: 128196 - DNA, 75 bp, synthetic construct
  source 1..75: mol_type = other DNA
cttgctgggacgcaaggattatcaacagcttccgggactacgaacgctggattacgtgctgatgtttattcctgt

SEQ ID NO: 128197 - DNA, 75 bp, synthetic construct
  source 1..75: mol_type = other DNA
attcgccagatgattaacagcgagcagcgtttgagcgagcaatttgaaaacctcgccaaccgtatttttgagcac

SEQ ID NO: 128198 - DNA, 75 bp, synthetic construct
  source 1..75: mol_type = other DNA
tttggcgatgagtccacgccttttggccttaaatgggagaaggacagccccgaaagcgttttctacctctgtgaa

SEQ ID NO: 128199 - DNA, 75 bp, synthetic construct
  source 1..75: mol_type = other DNA
catgcctgaaagacctttccccatggctgggtcgtaaacatcgtgacaatactctcacgctgaaacgcttttcat

SEQ ID NO: 128200 - DNA, 75 bp, synthetic construct
  source 1..75: mol_type = other DNA
atgatttcagacgcgcagaaggcagctaatgcagccggtgcgatagcaacagggcttttatctctcattattcct

SEQ ID NO: 128201 - DNA, 75 bp, synthetic construct
  source 1..75: mol_type = other DNA
ggcttaaatgggagaaggacagccctgaaagtgttttctacctctgtgaacatcatggctgcgtgatccatcagt

SEQ ID NO: 128202 - DNA, 75 bp, synthetic construct
  source 1..75: mol_type = other DNA
atcatcattatggggcgtcctgatgaggaagagacgctgttacgtgtggatgcggcgatcaacaaaaaataccgc

SEQ ID NO: 128203 - DNA, 75 bp, synthetic construct
  source 1..75: mol_type = other DNA
tccatcactttccatatctggacggcgtacagtccgttcaccacctgggtacagattgtctatgactggctggat

SEQ ID NO: 128204 - DNA, 75 bp, synthetic construct
  source 1..75: mol_type = other DNA
tgggatatgctgacccacccgcgctacggcatgggtaaacgtcttggtgcggcagatgtggataaatgggcgctg

SEQ ID NO: 128205 - DNA, 75 bp, synthetic construct
  source 1..75: mol_type = other DNA
tcctccggtgtgggtttctggtgtctggggggagcggcagcaaaaaactaccgtgaaaaatccgtggatgtggtc

SEQ ID NO: 128206 - DNA, 75 bp, synthetic construct
  source 1..75: mol_type = other DNA
agcgcatccagtacggatttggggacgaaaaccacatcatcgtttgattacggcactaaatccacgaataacact

SEQ ID NO: 128207 - DNA, 75 bp, synthetic construct
  source 1..75: mol_type = other DNA
cattatttattaccgggctgacggcgttcagcacctcgtctctggcggcgcaatctttacgtttcggttatgaaa

SEQ ID NO: 128208 - DNA, 75 bp, synthetic construct
  source 1..75: mol_type = other DNA
gagttccagcaggcactgatcacatctgcgcaagaagcgggtaactatcagcgcaaactggttgctgaagatcag

SEQ ID NO: 128209 - DNA, 75 bp, synthetic construct
  source 1..75: mol_type = other DNA
ttatgcactggcggcgctgcgtataagcatatcccgctggcagcttaaccttgattcacttcttgccagcctgct

SEQ ID NO: 128210 - DNA, 75 bp, synthetic construct
  source 1..75: mol_type = other DNA
tcggtggcgcggatatgccagttgtggtgtcaatgttgaattcctactccggctgggcagcagcagcggcgggct

SEQ ID NO: 128211 - DNA, 75 bp, synthetic construct
  source 1..75: mol_type = other DNA
attgtgtttgtccgtactgaaagcgtcggcctgcaagtgctggcgttgctgataatgaccgctattgcgctggtt

SEQ ID NO: 128212 - DNA, 75 bp, synthetic construct
  source 1..75: mol_type = other DNA
tttcatccagcataaacagcgtaactccctaatatggttgccaaccgacggtgacgctgaaaacttcatgaagtc

SEQ ID NO: 128213 - DNA, 75 bp, synthetic construct
  source 1..75: mol_type = other DNA
tgatcatcaccccaggttacggcatggcagtcgcgcaggcgcaatatccggtggcagaaatcaccgagaaactgc

SEQ ID NO: 128214 - DNA, 75 bp, synthetic construct
  source 1..75: mol_type = other DNA
ggaccggatacgggtaatgttggctggatcttgctggcgatggtcattggtggggcaattggtatccggctggcg

SEQ ID NO: 128215 - DNA, 75 bp, synthetic construct
  source 1..75: mol_type = other DNA
cgaaatcactgcggaagagacggcagaattgctgaaaaactcgcactcggtgatcatcaccccaggctacggcat

SEQ ID NO: 128216 - DNA, 75 bp, synthetic construct
  source 1..75: mol_type = other DNA
ggggcgataaatatagtaagcgtacagcgagggccgtattgacggggatgtgttattcagctggcagtgctatgc

SEQ ID NO: 128217 - DNA, 75 bp, synthetic construct
  source 1..75: mol_type = other DNA
gctgattggcggctgtaccggcagtggtaaaacacggttagtgcaacaacaacccaacggcgttgatctggaagg

SEQ ID NO: 128218 - DNA, 75 bp, synthetic construct
  source 1..75: mol_type = other DNA
gggcagcgtgcctgcaaaatccgcaaggtattctctgctgcgcccgtggcggtcagcgctcacatattgtgcaac

SEQ ID NO: 128219 - DNA, 75 bp, synthetic construct
  source 1..75: mol_type = other DNA
gtatcatcaacgaagtgaccggcggtaaacgttcactgctgcagggctatacggaagtggccggcaaagcggcaa

SEQ ID NO: 128220 - DNA, 75 bp, synthetic construct
  source 1..75: mol_type = other DNA
cttaccgcctgctgagttaccttatcagtacaattatcgccgggcagccgttgttaccggctgtgggggccgtca

SEQ ID NO: 128221 - DNA, 75 bp, synthetic construct
  source 1..75: mol_type = other DNA
atccgcaacagcgggcttatcaccggtgataatggtttaacgttaaacactgcctccctcagcaatccgggaaaa

SEQ ID NO: 128222 - DNA, 75 bp, synthetic construct
  source 1..75: mol_type = other DNA
tgacccaactgaaactcccggcgatggccaggagcctgatacggcagcaagaaacgcctcagacctacgacgaac

SEQ ID NO: 128223 - DNA, 75 bp, synthetic construct
  source 1..75: mol_type = other DNA
aaaaaatacaggttctaatcctggacgatctggggctggaacagttaagtaacgcccagtgtaatgaccttctgg

SEQ ID NO: 128224 - DNA, 75 bp, synthetic construct
  source 1..75: mol_type = other DNA
aaaaagagggtgtaacattgctttctatcaccgataagatgattaaagtttcacgcttgaaagaagacaaacgca

SEQ ID NO: 128225 - DNA, 75 bp, synthetic construct
  source 1..75: mol_type = other DNA
cctggtacgccgatccccacggcgcgtcctgcaaaatcctccgcgctacccacgaagtaatccactacatccgca

SEQ ID NO: 128226 - DNA, 75 bp, synthetic construct
  source 1..75: mol_type = other DNA
ttgtatgtaaattttctaaaattaccatcctcacaggaaaagctaaatctacctctgattgaagctccgctaaac

SEQ ID NO: 128227 - DNA, 75 bp, synthetic construct
  source 1..75: mol_type = other DNA
cggctactacataatccacaggaaaaacctactgataaccggtccgacaggatgcggtaagagctggatagccaa

SEQ ID NO: 128228 - DNA, 75 bp, synthetic construct
  source 1..75: mol_type = other DNA
acggatttatggccctgaagcatcatttcatcgataaagacgacaccctgaagcgtatgctgggaaaatcgtcat

SEQ ID NO: 128229 - DNA, 75 bp, synthetic construct
  source 1..75: mol_type = other DNA
ctcttcgccattggcatcagcggctatctcatctcgaccgccgatggcaaaccaatcagcgtttttggctggttt

SEQ ID NO: 128230 - DNA, 75 bp, synthetic construct
  source 1..75: mol_type = other DNA
agttgccattccggaagcggcagatgccgaagagctgaaggatggtgtacagaccgaagtcacggtacagtggcg

SEQ ID NO: 128231 - DNA, 75 bp, synthetic construct
  source 1..75: mol_type = other DNA
gtcgataaacgtggtgtaccagtaaataccattctggtgtctgcactggtaacggcgttgtgcgtactgattaac

SEQ ID NO: 128232 - DNA, 75 bp, synthetic construct
  source 1..75: mol_type = other DNA
cgaatgcgctgaacatcgtggtactgactgctgcgctctccgtgtacaacagctgcgtatattgcaacagccgta

SEQ ID NO: 128233 - DNA, 75 bp, synthetic construct
  source 1..75: mol_type = other DNA
ccaaagcgactaaccaggttatctaccgcatcctgattttctacattggctcattagccgtgctgctctcactga

SEQ ID NO: 128234 - DNA, 75 bp, synthetic construct
  source 1..75: mol_type = other DNA
cagcgtcaccaggcgaagggatctcactctcaaccatgcacgtctggagagcgacaagaatctcatgctgaccgc

SEQ ID NO: 128235 - DNA, 75 bp, synthetic construct
  source 1..75: mol_type = other DNA
aacacacagcggcttgataatcagcagaacggcacgctgtacagtgctgcagacctgacgctggatataccggac

SEQ ID NO: 128236 - DNA, 75 bp, synthetic construct
  source 1..75: mol_type = other DNA
caacggtatcacgctgaatgctgcaggcagactgaccaacaatggccagctgaccgccggcaacggcaccacggc

SEQ ID NO: 128237 - DNA, 75 bp, synthetic construct
  source 1..75: mol_type = other DNA
accacattaacatttggtgatttaaattattcgaagcaaacactgggggaacaactttcagggaatcaagtcttc

SEQ ID NO: 128238 - DNA, 75 bp, synthetic construct
  source 1..75: mol_type = other DNA
actcaggatggtccggtgcttgatgatattactgccggacaatcgggaaccttgtcagatgatgatcgtggcggt

SEQ ID NO: 128239 - DNA, 75 bp, synthetic construct
  source 1..75: mol_type = other DNA
acccacagcgggaaaagcagcgccccgtcgctcagcctcagtgcgccggtctcacggtttactggcgcgttgccg

SEQ ID NO: 128240 - DNA, 75 bp, synthetic construct
  source 1..75: mol_type = other DNA
tattgtagattcaatctgtcaatgcaacacccctttcaattatctctttcggtgttttgaacttcagtgtctttc

SEQ ID NO: 128241 - DNA, 75 bp, synthetic construct
  source 1..75: mol_type = other DNA
cgacgccatcctcaacggttcgctggataacgcagaaaccttcactctgccgatgtttaacctggcgatcccaac

SEQ ID NO: 128242 - DNA, 75 bp, synthetic construct
  source 1..75: mol_type = other DNA
aatctgggtgctgttgctgttgatactgggatcttcacgggtcgttcaccaaaagataaatatatcgttcgtgac

SEQ ID NO: 128243 - DNA, 75 bp, synthetic construct
  source 1..75: mol_type = other DNA
gtcgaaagaagcggaacccgaaatctacaacgctatccgtcgcgatgcgctgctggaaaacgtcaccgtgcgtga

SEQ ID NO: 128244 - DNA, 75 bp, synthetic construct
  source 1..75: mol_type = other DNA
gctgccgccggtttctcgcctgactgccgatcaaactcagtaccacttcctctctggcttcaccgccaaactggc

SEQ ID NO: 128245 - DNA, 75 bp, synthetic construct
  source 1..75: mol_type = other DNA
ctggaacggtactggcaaacgtatctccattaaagatacccgcgctattatcgacgccatcctcaacggttcgct

SEQ ID NO: 128246 - DNA, 75 bp, synthetic construct
  source 1..75: mol_type = other DNA
caccgacggtcatctggcctggctagtgccgttacttgaagaatattacgacccgatgtatcgctatcagcttga

SEQ ID NO: 128247 - DNA, 75 bp, synthetic construct
  source 1..75: mol_type = other DNA
atctctgcgagtcagccaaagccggagccgtgctgatcttctggcatgaactggccataaatggctatgcttcaa

SEQ ID NO: 128248 - DNA, 75 bp, synthetic construct
  source 1..75: mol_type = other DNA
tcagccatgaacaactgacccggtttgcggaacaacgcatctggaaatgcaatctggacagccagggcgtgactt

SEQ ID NO: 128249 - DNA, 75 bp, synthetic construct
  source 1..75: mol_type = other DNA
attaccgataaattaggagtcctgtatgctcctgatggtatcgctgtgcatgtagattgtaatgatgagataaaa

SEQ ID NO: 128250 - DNA, 75 bp, synthetic construct
  source 1..75: mol_type = other DNA
aggcgcaggattctttgatttctatgtatgcaaagaaaagaaatcatgcatggtttgatttcttcagaaatttag

SEQ ID NO: 128251 - DNA, 75 bp, synthetic construct
  source 1..75: mol_type = other DNA
aaccacaacttagccaggcgagttttgaaaacctgctggctgccgaaatgctaaaaaccgacgcccgtcaggagc

SEQ ID NO: 128252 - DNA, 75 bp, synthetic construct
  source 1..75: mol_type = other DNA
gaaaggcgtcgaaaccgccgataaagtgctgaaaggcgagaaagttcaggctaagtatccggttgatctgaaact

SEQ ID NO: 128253 - DNA, 75 bp, synthetic construct
  source 1..75: mol_type = other DNA
tattacaataacaaaaaaactatctccgttagaaccagtgacggattcaaatcctgaacatacattccaaattgt

SEQ ID NO: 128254 - DNA, 75 bp, synthetic construct
  source 1..75: mol_type = other DNA
gaagttgaagatgcctatcttgattcaagatatagtgtaacattagatgcagagcgattattacgttgggtagta

SEQ ID NO: 128255 - DNA, 75 bp, synthetic construct
  source 1..75: mol_type = other DNA
gctcacaaatttaacgttctcgccagccagccagcagacttcgaccgtaccaaaggtctgaacgtgatgcagaac

SEQ ID NO: 128256 - DNA, 75 bp, synthetic construct
  source 1..75: mol_type = other DNA
gctcacaagtttaacgttctcgctagccagccggcagacttcgatcgcaccaaaggtttgaacgtcatgcagaac

SEQ ID NO: 128257 - DNA, 75 bp, synthetic construct
  source 1..75: mol_type = other DNA
aatggcgctgggcgcgctgcgcgcactgcaaactgccggtaaatcggatgtgatggtcgtcggatttgacggtac

SEQ ID NO: 128258 - DNA, 75 bp, synthetic construct
  source 1..75: mol_type = other DNA
tgcgtttccagcgcaagataatgatcaacagaaatgtttatcttctcgtgtagtagagttggcagacaaatatag

SEQ ID NO: 128259 - DNA, 75 bp, synthetic construct
  source 1..75: mol_type = other DNA
tatatatcttgatgccgacatgattattaccgataaattaggagtcctgtatgctcctgatggtatcgctgtgca

SEQ ID NO: 128260 - DNA, 75 bp, synthetic construct
  source 1..75: mol_type = other DNA
agatggagactttacttatgagcagagaaaagaatttctcagccttgaaaatgaatatcaaaatataaagataat

SEQ ID NO: 128261 - DNA, 75 bp, synthetic construct
  source 1..75: mol_type = other DNA
tccgtgacctaggaaaaagtgaaggatttaccatcgagcaacacaataacattgctcgccaagaagggaatgttt

SEQ ID NO: 128262 - DNA, 75 bp, synthetic construct
  source 1..75: mol_type = other DNA
ggatttttctggtgaaaagctagcgttcaaatttttcaagctcgatagacagaacggagcaaatgaaacggcaac

SEQ ID NO: 128263 - DNA, 75 bp, synthetic construct
  source 1..75: mol_type = other DNA
ttgtattacaataaaaaaaatactatctccattagaaccagtctcggcttcaaatcctgaacatacttttcaaat

SEQ ID NO: 128264 - DNA, 75 bp, synthetic construct
  source 1..75: mol_type = other DNA
aactaatggttcttcactgaacattggtgaagatggtgaagttgctacagaccacctgactgtcgatagctacag

SEQ ID NO: 128265 - DNA, 75 bp, synthetic construct
  source 1..75: mol_type = other DNA
tggttgtctggagattcagggggccagtctactgtatccaggcgttgtagcagaagataatgcctggggtcgtac

SEQ ID NO: 128266 - DNA, 75 bp, synthetic construct
  source 1..75: mol_type = other DNA
tggtatgacggtgatgtattcactctgaatattgctaactccaccattgatgatgactatgaagcactttacttc

SEQ ID NO: 128267 - DNA, 75 bp, synthetic construct
  source 1..75: mol_type = other DNA
attgttacaaaacgcatagtctgaaagtcgtttccgaactagcaagacatgtttgtaaaaaaggatatcgtatca

SEQ ID NO: 128268 - DNA, 75 bp, synthetic construct
  source 1..75: mol_type = other DNA
ctggtttttgacgttgaccgcgagggggctgcgattgactggagcgaccggaacgctcccgcgccgaacatcacc

SEQ ID NO: 128269 - DNA, 75 bp, synthetic construct
  source 1..75: mol_type = other DNA
cccatacatcagaaattcaggctcgtagagggcgtaaaggcggcttggctaatacatctgaaaatcagtcaataa

SEQ ID NO: 128270 - DNA, 75 bp, synthetic construct
  source 1..75: mol_type = other DNA
ttggtgaagatggctacgttgataccgatcatctgactattaactcctacagtactgttgcgttgaccgaatcta

SEQ ID NO: 128271 - DNA, 75 bp, synthetic construct
  source 1..75: mol_type = other DNA
actcttgataacggaagcaagtgggttggtcaggcaatttataacgttgctgaaacgtcagcaatgtatgatgtt

SEQ ID NO: 128272 - DNA, 75 bp, synthetic construct
  source 1..75: mol_type = other DNA
gcgcggattaagcctcgacgttcgtcccggcgaagttcacgccattatggggccaaacggttcggggaaaagtac

SEQ ID NO: 128273 - DNA, 75 bp, synthetic construct
  source 1..75: mol_type = other DNA
atgaaaaccagtattatcaacggctcggaagtgtctagattatccgtggcgattcataccttgacagttaataat

SEQ ID NO: 128274 - DNA, 75 bp, synthetic construct
  source 1..75: mol_type = other DNA
attgctgacaataacggcaacgtagtgtctggtgtattcgatatccacagcagcgattacgtttacgttctgaac

SEQ ID NO: 128275 - DNA, 75 bp, synthetic construct
  source 1..75: mol_type = other DNA
tctgactccgtacttcaaactggcttacgtctacgacgactctaacaacgataacgatgtgaacggtgattccat

SEQ ID NO: 128276 - DNA, 75 bp, synthetic construct
  source 1..75: mol_type = other DNA
atgcgccatatcgtgagccatttcgccgctgagcgcatgaaacacgttaagcattatcagaaggaggttttatta

SEQ ID NO: 128277 - DNA, 75 bp, synthetic construct
  source 1..75: mol_type = other DNA
ctgatttctggcaaggctcaaaatcccgccagcagcttgctcatgattacatacgccatatcgtgagccatttcg

SEQ ID NO: 128278 - DNA, 75 bp, synthetic construct
  source 1..75: mol_type = other DNA
ggcaccaatatgcagctaaaaaacgtcgctgcggtaatggtgacggcgtcacttccgccgtttggacgccagggg

SEQ ID NO: 128279 - DNA, 75 bp, synthetic construct
  source 1..75: mol_type = other DNA
tggcatgacacgttgcctatggcactttgcgtggttgcggcaatcgcctgcgccctggcacctttcatgccgatc

SEQ ID NO: 128280 - DNA, 75 bp, synthetic construct
  source 1..75: mol_type = other DNA
gaaataatatttgggggtgtccggatattcctgctgaaacgccgtatgcgccgggagaacacattaagggagggc

SEQ ID NO: 128281 - DNA, 75 bp, synthetic construct
  source 1..75: mol_type = other DNA
gaattaatattcgggaatatcatgatattcctgctgaaacgtcgtatgtgccgggagaacaaattatgggagggc

SEQ ID NO: 128282 - DNA, 75 bp, synthetic construct
  source 1..75: mol_type = other DNA
gctacgccgatggatctgatgtccatactgcaatcaatgcaaagtgcgggatgtctgcgggcaaaactggaaatc

SEQ ID NO: 128283 - DNA, 75 bp, synthetic construct
  source 1..75: mol_type = other DNA
ttcttctgctgacggcgacagtggtacaggccgatcggatccgcgatctcaccagcgtacagggagtacggcaaa

SEQ ID NO: 128284 - DNA, 75 bp, synthetic construct
  source 1..75: mol_type = other DNA
ttacgaagttcagaagattattcattatgggcccgttttatttcctcaggatataaaatacacaatttagactct

SEQ ID NO: 128285 - DNA, 75 bp, synthetic construct
  source 1..75: mol_type = other DNA
ccgcttaagggcgttgacagtcaggtgtatgcgctggcgcagggcaatattctggttggcggcgcaggagcctcc

SEQ ID NO: 128286 - DNA, 75 bp, synthetic construct
  source 1..75: mol_type = other DNA
tgcgcgtactgttcaggtgcgcgtgccgagtggtaacagctcccaggtgcgtttccttgctgatattcagaatat

SEQ ID NO: 128287 - DNA, 75 bp, synthetic construct
  source 1..75: mol_type = other DNA
tggcggcacgttgttgatgacaccgcttaagggcgttgatagccaggtgtatgcgctggcgcagggcaacattct

SEQ ID NO: 128288 - DNA, 75 bp, synthetic construct
  source 1..75: mol_type = other DNA
taattcaacaatcgacgacaactacgaacactatacttacaacggtacgtacaacaacgctcctgatacacatgt

SEQ ID NO: 128289 - DNA, 75 bp, synthetic construct
  source 1..75: mol_type = other DNA
gtggcaacgaatccggtaacagcaacccgtacagcaaagtcagaagtaaggcgctcaaggctgacagctaatgag

SEQ ID NO: 128290 - DNA, 75 bp, synthetic construct
  source 1..75: mol_type = other DNA
gacatctcactggttgatacactacagaaatgcagggaggccagcagcagtgaaacaataatcgcatcaacctat

SEQ ID NO: 128291 - DNA, 75 bp, synthetic construct
  source 1..75: mol_type = other DNA
atgtctggaaatataggggcaaatccaaacactgtcagcactggtgtaaacagcagcgaagtatttaataacacc

SEQ ID NO: 128292 - DNA, 75 bp, synthetic construct
  source 1..75: mol_type = other DNA
acggatatgctgttggtactgaagcaactgcaactctgctcgatattgcagctaacagcctgtggccttcatcaa

SEQ ID NO: 128293 - DNA, 75 bp, synthetic construct
  source 1..75: mol_type = other DNA
gtcattaataacgctaccgttaacggcgtgatttctacctactatctggacgacggtatttctaccaataccaac

SEQ ID NO: 128294 - DNA, 75 bp, synthetic construct
  source 1..75: mol_type = other DNA
gattatgctgatgaccccaggaatggcgatttcggtatacctgatcccggtatggctgatcgtgttaggtatcgg

SEQ ID NO: 128295 - DNA, 75 bp, synthetic construct
  source 1..75: mol_type = other DNA
cgtcagctgggtgaaatggtggtcgaagaacctgtcgcaggctcctttagccactttgcttataaatactggggc

SEQ ID NO: 128296 - DNA, 75 bp, synthetic construct
  source 1..75: mol_type = other DNA
gctgataacccggagcaaagcattccaaaagcgactaaccaggttatctaccgcatcctgattttctatattggt

SEQ ID NO: 128297 - DNA, 75 bp, synthetic construct
  source 1..75: mol_type = other DNA
tatccgctgggtaactggatctgcctgctgtttatggcggcggtactggtgattatgctgatgaccccgggaatg

SEQ ID NO: 128298 - DNA, 75 bp, synthetic construct
  source 1..75: mol_type = other DNA
catcttcggcggctggctgctattcagtggcaacggcggcccgcaggcgagcgttagcaacctgtgggatcaggg

SEQ ID NO: 128299 - DNA, 75 bp, synthetic construct
  source 1..75: mol_type = other DNA
gaacgcgccaaaagcgctggcgtctgtcgataaacgcggcgtaccggttaacaccattctggtgtctgcgctggt

SEQ ID NO: 128300 - DNA, 75 bp, synthetic construct
  source 1..75: mol_type = other DNA
atgtcgcaaaaatcgcttacggccatcacattctgcgtgacggtaatcctcatcatctggatgctacacggttcg

SEQ ID NO: 128301 - DNA, 75 bp, synthetic construct
  source 1..75: mol_type = other DNA
atggctatcaaactcattgctatcgatagggatgccacccttctcctccccgacccccccattccccccgccgtt

SEQ ID NO: 128302 - DNA, 75 bp, synthetic construct
  source 1..75: mol_type = other DNA
atcccccttttccctcgggtgttgtactgatttttgagcggaatcgcgttagcatgggtcaggaactaatctacc

SEQ ID NO: 128303 - DNA, 75 bp, synthetic construct
  source 1..75: mol_type = other DNA
gaagattatgaagtgacgggcggcacggttgagttcaaaggcaaagatttgcttgcgctgtcgccggaagatcgc

SEQ ID NO: 128304 - DNA, 75 bp, synthetic construct
  source 1..75: mol_type = other DNA
tagagtatttagaatgcattttaattacccgataaaaaatagtgataaagttatcgatgttgtttattttggtcc

SEQ ID NO: 128305 - DNA, 75 bp, synthetic construct
  source 1..75: mol_type = other DNA
catcatctggatgttgcacggctcgctgtgtgaaatacggatgagcttctggggagcggagtttgcggcgttctt

SEQ ID NO: 128306 - DNA, 75 bp, synthetic construct
  source 1..75: mol_type = other DNA
taacgacaacactgcttctatcgaagctggtcagaacgaagttgataacaacggtgaccatgttgcagctgcaac

SEQ ID NO: 128307 - DNA, 75 bp, synthetic construct
  source 1..75: mol_type = other DNA
ccaggaaggtaacaccgttgttctgcatcagaccgagctgaccgactacgcgaacatggcgctgagcattccgtc

SEQ ID NO: 128308 - DNA, 75 bp, synthetic construct
  source 1..75: mol_type = other DNA
acactgtcagcactggtgtaaacagcagcgaagtgtttaataacaccatcactgttaaagattcaaccgtgacct

SEQ ID NO: 128309 - DNA, 75 bp, synthetic construct
  source 1..75: mol_type = other DNA
ttccaggtcaatggtcgtcctgacttaaacaaaatgcacacggccattgatatgggatcaaataacctgaataac

SEQ ID NO: 128310 - DNA, 75 bp, synthetic construct
  source 1..75: mol_type = other DNA
gaagatgaaagtacatttgttgggagaatatctatttccaaaaactcatcattatcaataaaaaataacttcaat

SEQ ID NO: 128311 - DNA, 75 bp, synthetic construct
  source 1..75: mol_type = other DNA
gggtattacgttgactcagggttatgagtgggaagatatcgacgacaacacggttagcactggtgttaacagcag

SEQ ID NO: 128312 - DNA, 75 bp, synthetic construct
  source 1..75: mol_type = other DNA
aaatttcatcactttctgctggtgcaaatattaataatattaagccagcaagctttgatttgataaatataccaa

SEQ ID NO: 128313 - DNA, 75 bp, synthetic construct
  source 1..75: mol_type = other DNA
aattaccaagcgataaatattgcgctttgcttgctgtaatgtgcgcaaagttaattggtgttgttgagcatcata

SEQ ID NO: 128314 - DNA, 75 bp, synthetic construct
  source 1..75: mol_type = other DNA
attacaccgaggaaccgttacatgccaacacgcaaaacaacaaagaacagcatcaggaattatctggctagcttt

SEQ ID NO: 128315 - DNA, 75 bp, synthetic construct
  source 1..75: mol_type = other DNA
gggaatattgagccaatggaaaacgagcaaccagatttcgagtttgacccgtatttagttacagaggaattttaa

SEQ ID NO: 128316 - DNA, 75 bp, synthetic construct
  source 1..75: mol_type = other DNA
tttaaaacgcatccggcagtgcgcccgcttatcaaaaacacggaatcactggagtatggtgcgcatctggtgcca

SEQ ID NO: 128317 - DNA, 75 bp, synthetic construct
  source 1..75: mol_type = other DNA
tcgtcctgctggcgaagcgatggcgttggggatcaaagaagtgctgtcgctggaaacatccgctattgaagaacg

SEQ ID NO: 128318 - DNA, 75 bp, synthetic construct
  source 1..75: mol_type = other DNA
aattaccaagcgataaatattgtgcattgcttgctgtaatgtgtgcaaagctaattggtattgttgaacatcata

SEQ ID NO: 128319 - DNA, 75 bp, synthetic construct
  source 1..75: mol_type = other DNA
ctgtagaagtgaaggccacccgaaatacaacaaaaaactattttatcttctaaagaatcttgatgaaattaactc

SEQ ID NO: 128320 - DNA, 75 bp, synthetic construct
  source 1..75: mol_type = other DNA
aaacattgaagcggtcattcgtagcattacgccacgggtaagacacatgccaacacgcaaagaaaaagagaacac

SEQ ID NO: 128321 - DNA, 75 bp, synthetic construct
  source 1..75: mol_type = other DNA
gacacccccaccagctacgaactaccagccttttccaaatccgaacgtaaaaacattgaagcggtcattcgtagc

SEQ ID NO: 128322 - DNA, 75 bp, synthetic construct
  source 1..75: mol_type = other DNA
ccgaacattctaaagacaacaagcactctgacgaggacgtaacgaagcatcagacctgcaataagtccaatacct

SEQ ID NO: 128323 - DNA, 75 bp, synthetic construct
  source 1..75: mol_type = other DNA
gattctgtagaagtgaaggccacccgaaatacaacaaaaaactattttatcttctaaagaatcttgacgaaatta

SEQ ID NO: 128324 - DNA, 75 bp, synthetic construct
  source 1..75: mol_type = other DNA
atgtcagtacgcaaaacaacaaagaacagcatcaaaaattatttggctaacttcgacagctacgagcaactacca

SEQ ID NO: 128325 - DNA, 75 bp, synthetic construct
  source 1..75: mol_type = other DNA
attcgtgccggaactgacccgcaggaccacgagaggcaaaaaagagagacagaggcccgaagacaagggaacacg

SEQ ID NO: 128326 - DNA, 75 bp, synthetic construct
  source 1..75: mol_type = other DNA
ccctctggttgacactctattttccctgtgggctaccgaggatgggaagcgcccacgcctggaagagctggcatt

SEQ ID NO: 128327 - DNA, 75 bp, synthetic construct
  source 1..75: mol_type = other DNA
caacgcattaacgaaataatgatttatgcggttaacactggcttgattgatgcaaacccagcatcaggtgttggc

SEQ ID NO: 128328 - DNA, 75 bp, synthetic construct
  source 1..75: mol_type = other DNA
tccgttcagctaagggcggtgggggaaaagttcatttccgctcatatgttgatatggatgagcaaattcaaggca

SEQ ID NO: 128329 - DNA, 75 bp, synthetic construct
  source 1..75: mol_type = other DNA
tggggcgaatttgtcgaggctgcggcgacgggcgtaaccctcgccagtggtaaaaggggtatccgagccgtgtag

SEQ ID NO: 128330 - DNA, 75 bp, synthetic construct
  source 1..75: mol_type = other DNA
gaggcaaaaacgagaggcagaggccagaagacaggggaatacgttcgaaaatgtggctgcggcatggtatcaggt

SEQ ID NO: 128331 - DNA, 75 bp, synthetic construct
  source 1..75: mol_type = other DNA
ttcactcgcaaacgcgccatgattagctttggtgcttaccctgctgtatctctctctgaggcacgtcaacttcgt

SEQ ID NO: 128332 - DNA, 75 bp, synthetic construct
  source 1..75: mol_type = other DNA
ttgcggcgtatgggattcgctggcgtgctggtgtctcatggattacgcgccatattcagcacagcagcgaacgag

SEQ ID NO: 128333 - DNA, 75 bp, synthetic construct
  source 1..75: mol_type = other DNA
gcacgaagggagcatgttttcccaagtcttaaaaatccagtgcaatcaatgagcagccagacagcaaacgcagca

SEQ ID NO: 128334 - DNA, 75 bp, synthetic construct
  source 1..75: mol_type = other DNA
ctcaccgctcgccgctttgttgagatactcacgcccatcaaggcacgtggcaatctggaaacgctaaagcgcgtt

SEQ ID NO: 128335 - DNA, 75 bp, synthetic construct
  source 1..75: mol_type = other DNA
gtttgggatcgcttgatgaagtctccctggctgatgccagaaaacgccgtagcgagtacaggacgttaattgcgg

SEQ ID NO: 128336 - DNA, 75 bp, synthetic construct
  source 1..75: mol_type = other DNA
gaacgaagttagacgggcatacaaccgaagcaactacctggaaaaacgtaaagtgttaatgtgctggtggggtga

SEQ ID NO: 128337 - DNA, 75 bp, synthetic construct
  source 1..75: mol_type = other DNA
attctcagtcaacaggcacactggcagtagaggttcaggcttttggggcccttgcgtgggcggaagacgatggtt

SEQ ID NO: 128338 - DNA, 75 bp, synthetic construct
  source 1..75: mol_type = other DNA
ctgaacgagcttttgagggcagtgagacatccggtgctggtattgttcctgttattcagctgaatggaagtgacg

SEQ ID NO: 128339 - DNA, 75 bp, synthetic construct
  source 1..75: mol_type = other DNA
ggccgggatactggacgattcgcagcgccgtctgcatgtatgtcatccggagcgactggcagcattactggcata

SEQ ID NO: 128340 - DNA, 75 bp, synthetic construct
  source 1..75: mol_type = other DNA
ctcaagtggaatagaaaaagagtatgccttgagcagtcatgaactgaacgggcgattaaggaaggtgcgaataag

SEQ ID NO: 128341 - DNA, 75 bp, synthetic construct
  source 1..75: mol_type = other DNA
gtccgcagaaagtatctggacacagctgaaacagggcgttccgggagtgtctgactcaccggtgattactgatga

SEQ ID NO: 128342 - DNA, 75 bp, synthetic construct
  source 1..75: mol_type = other DNA
attcggggggaccatcacgccttatgatgattcacttccgccctggctgtggaaaaccggcggatataccgggtt

SEQ ID NO: 128343 - DNA, 75 bp, synthetic construct
  source 1..75: mol_type = other DNA
aatcctaaaaaccgttggggtgttgttaaattaaccgataagcaatttgacgatataattaaacttggtgctgta

SEQ ID NO: 128344 - DNA, 75 bp, synthetic construct
  source 1..75: mol_type = other DNA
tcgatggtgtgttctggcgcacaccggatactccagagaacgatgcagccttccctcgccagacacatgccggga

SEQ ID NO: 128345 - DNA, 75 bp, synthetic construct
  source 1..75: mol_type = other DNA
aacgatgcagccttcccccgccagacacatgccgggaacccggcgctctacccgcaggtcaaaatggtctgccag

SEQ ID NO: 128346 - DNA, 75 bp, synthetic construct
  source 1..75: mol_type = other DNA
gttctaagcagcctctggtatctgacgcggtattttcccggctatgactggacgtggcgtgaagtggcagagttt

SEQ ID NO: 128347 - DNA, 75 bp, synthetic construct
  source 1..75: mol_type = other DNA
aggttctcgggttaccgtctatttcaacggtaactatcgaggatatgaatcagggtcaccagaccatattcacaa

SEQ ID NO: 128348 - DNA, 75 bp, synthetic construct
  source 1..75: mol_type = other DNA
aatctgtctttgccaaagagacccaatcgtgctattttaatagatcatgtggggctaaatggttcgcgtgcattc

SEQ ID NO: 128349 - DNA, 75 bp, synthetic construct
  source 1..75: mol_type = other DNA
tgcgaagtcttgatgagattagttcaagcacagtgacgagccatcttcaaagacaagcaaccagacttagctacg

SEQ ID NO: 128350 - DNA, 75 bp, synthetic construct
  source 1..75: mol_type = other DNA
cagcctttaccaaatccgaacgtaaaaacattgaagcggtcattcgtagcattacgccacgagacagatatatgc

SEQ ID NO: 128351 - DNA, 75 bp, synthetic construct
  source 1..75: mol_type = other DNA
gttatgcgaaaaaacatcaggcgcgcggtaacggcttcggttatggaatggtttatccgaacaatccgcaaagcg

SEQ ID NO: 128352 - DNA, 75 bp, synthetic construct
  source 1..75: mol_type = other DNA
gttggtaatatcagccttacgattagtgagccagactttgaatttgacgtatacgcacaagcagaggaattttaa

SEQ ID NO: 128353 - DNA, 75 bp, synthetic construct
  source 1..75: mol_type = other DNA
ttcgaagccttgatgagattaactcaagcacagtgacgagccatcttcaaagacaagcaaccagacttagccacg

SEQ ID NO: 128354 - DNA, 75 bp, synthetic construct
  source 1..75: mol_type = other DNA
aaacattgaagcggtcattcgtagcattacgccacgagacagatttataccagtacgcaaaacaacaaagaataa

SEQ ID NO: 128355 - DNA, 75 bp, synthetic construct
  source 1..75: mol_type = other DNA
ttgccgttggtaatattgagccaatggaaaacgagcaaccagactttgagtttgacccgtatattttggaggaat

SEQ ID NO: 128356 - DNA, 75 bp, synthetic construct
  source 1..75: mol_type = other DNA
aaagttaattggtattgtcgagcatcatattaccgttggtaatatcagtcttacaagcagtgagccagactttga

SEQ ID NO: 128357 - DNA, 75 bp, synthetic construct
  source 1..75: mol_type = other DNA
ctccgctatgtcaaggaggcctgctttaccgaggatgagctcaagagcctcgttcaagcagccgaaagcatcaag

SEQ ID NO: 128358 - DNA, 75 bp, synthetic construct
  source 1..75: mol_type = other DNA
gcgtatcgaaaaagaactcgctcgggcgggcgcacggttttgcctgcgatacccagggcacgctgttttttgatg

SEQ ID NO: 128359 - DNA, 75 bp, synthetic construct
  source 1..75: mol_type = other DNA
ttcttgaagaatccaagagacgcaacagacacaacggttacagctacacaaacaaccccaccagctacgaagtcc

SEQ ID NO: 128360 - DNA, 75 bp, synthetic construct
  source 1..75: mol_type = other DNA
aacacccccgccagctacgaactgccagcctttagcaaatccgaacgtagaaacattgaatcggtcattcgtagc

SEQ ID NO: 128361 - DNA, 75 bp, synthetic construct
  source 1..75: mol_type = other DNA
tgactaaactcaaaggggcgacatccacgattgagcgcgaccttactgaaaacgtgggaggccgcagaacatgcc

SEQ ID NO: 128362 - DNA, 75 bp, synthetic construct
  source 1..75: mol_type = other DNA
gaatagtgatgctccgaagtttgagcagaatccaaatcctagtttagatgaattattgaaggggaataacaatgg

SEQ ID NO: 128363 - DNA, 75 bp, synthetic construct
  source 1..75: mol_type = other DNA
acatctgaaccctataatctggtggttacataccaatctttcgttactctgctatccagagccagggcgaagaaa

SEQ ID NO: 128364 - DNA, 75 bp, synthetic construct
  source 1..75: mol_type = other DNA
cggaagatgcagatcatattgcttttattcgcgggcgtattggttttgaactgcctgtctggtttatcccgaaag

SEQ ID NO: 128365 - DNA, 75 bp, synthetic construct
  source 1..75: mol_type = other DNA
cccaccaccactcgctatgtctctgctatgagtgtggcaaaaggtgtggtgtcgctgacaggacaagagagcctc

SEQ ID NO: 128366 - DNA, 75 bp, synthetic construct
  source 1..75: mol_type = other DNA
aatgggctaagcgtcatcatgacaccgggttgggataacgcaaacggcgtcaccggctggacgcgcaactgcaat

SEQ ID NO: 128367 - DNA, 75 bp, synthetic construct
  source 1..75: mol_type = other DNA
gcctgcgtgacagaccgctaccgcaggatctggtggtgtttggtgaagtcgggctggcaggggagatccgcccgg

SEQ ID NO: 128368 - DNA, 75 bp, synthetic construct
  source 1..75: mol_type = other DNA
gcggcttatctgacgcgcttcgccaaaacgcgcggtgtggcgattgtcatggttgggcacgtaaccaaagatggc

SEQ ID NO: 128369 - DNA, 75 bp, synthetic construct
  source 1..75: mol_type = other DNA
atgttgttggtggtaaaggtattgaccttacgccactgactaacagcgttaatttcggttccgttctgaccggaa

SEQ ID NO: 128370 - DNA, 75 bp, synthetic construct
  source 1..75: mol_type = other DNA
aaggtgacaaagtgactctgttcggtacggatggttccgaaacggattatgactacgacgaattgcttgttgttg

SEQ ID NO: 128371 - DNA, 75 bp, synthetic construct
  source 1..75: mol_type = other DNA
ttcgcggtaaaaggaaaccaggggcggctaaataaagcctttgaggaaaaatttccgctgaaagaattaaataat

SEQ ID NO: 128372 - DNA, 75 bp, synthetic construct
  source 1..75: mol_type = other DNA
ttgtttgtaatgaatgcggggccgattatccgcgctggcaggggcagtgcagtgcctgtcatgcctggaacacca

SEQ ID NO: 128373 - DNA, 75 bp, synthetic construct
  source 1..75: mol_type = other DNA
ccggtggacaaaaagttcagaataaagcacatacaattattcatgctgaaaaatatcaagcctgggatgatcaaa

SEQ ID NO: 128374 - DNA, 75 bp, synthetic construct
  source 1..75: mol_type = other DNA
catcaggggaaaatagaagaagaaggggcgccggagcagttattcggtaacccgcaaagccctcgtctgcaacag

SEQ ID NO: 128375 - DNA, 75 bp, synthetic construct
  source 1..75: mol_type = other DNA
atgaaatacgttgtttccggtggcgcgactctcagcttttccgacggttctaaatttgagctgtctccgggcatc

SEQ ID NO: 128376 - DNA, 75 bp, synthetic construct
  source 1..75: mol_type = other DNA
agagccaaggtttgaaacctcaactggtatatggcatggagtaacccactggatgccgctaccagaaccgcctca

SEQ ID NO: 128377 - DNA, 75 bp, synthetic construct
  source 1..75: mol_type = other DNA
ggataatggttttggtttattaacccaccgggggttaatgcatctctctgatacgaatgcatttaaatacaaatt

SEQ ID NO: 128378 - DNA, 75 bp, synthetic construct
  source 1..75: mol_type = other DNA
ttgattacgcaccttgtattacaaactcatgtatgtaaaatacgcgcaccattcaaaaaaaggaagacaataaca

SEQ ID NO: 128379 - DNA, 75 bp, synthetic construct
  source 1..75: mol_type = other DNA
gccgcgttgccctttgttatcgatgttaccagcgacattattggtgagattaatcgccgtatcgttattccatga

SEQ ID NO: 128380 - DNA, 75 bp, synthetic construct
  source 1..75: mol_type = other DNA
gaaggtggtggatttattcccctgaaaattggcataaacaatgatatttcagcatttctggcagaacacccggag

SEQ ID NO: 128381 - DNA, 75 bp, synthetic construct
  source 1..75: mol_type = other DNA
atgagaagcaggtgccgacaggcgctttcttcgctggtgctattgctgttttcgacaagacctggaagggaccgg

SEQ ID NO: 128382 - DNA, 75 bp, synthetic construct
  source 1..75: mol_type = other DNA
ccaattctgatggggctggatcccaatctttccattttaatgtcggggatcggcacgttactgtttttctttatt

SEQ ID NO: 128383 - DNA, 75 bp, synthetic construct
  source 1..75: mol_type = other DNA
caataccgcactgcgaggcgattcatgcaaaaacgtcagccatttatctgttaagactcgcggataaaatcaatt

SEQ ID NO: 128384 - DNA, 75 bp, synthetic construct
  source 1..75: mol_type = other DNA
atatttcccggtgtgacgttatgtgttgaatggtcaggcgtatcaggaaaggcagaggaaacactatgcataaat

SEQ ID NO: 128385 - DNA, 75 bp, synthetic construct
  source 1..75: mol_type = other DNA
tcaccaaagcgatggcatccggcgtttctgcctgcctcgccacgccgtttaaaattcacggcgttaactactcca

SEQ ID NO: 128386 - DNA, 75 bp, synthetic construct
  source 1..75: mol_type = other DNA
aacgtaaaactggataccacttgcctcattgaccgcaaagttgtgcgctttatgagcgacgcatccatttatgca

SEQ ID NO: 128387 - DNA, 75 bp, synthetic construct
  source 1..75: mol_type = other DNA
agggcagtttgcgcgagtacttgagggaaagaatccactgactaattttgagttcaagttcattcgccctgcaca

SEQ ID NO: 128388 - DNA, 75 bp, synthetic construct
  source 1..75: mol_type = other DNA
ccaccattctgcgtgagtgctgggcgcgtaagcccggcagctggctggatgcggctggctgctaccaccatcccg

SEQ ID NO: 128389 - DNA, 75 bp, synthetic construct
  source 1..75: mol_type = other DNA
cgcaaacctataaggctatcgtgtcgcgccacctgggtacattgcagccgtctgtacagacactggcgtttaatc

SEQ ID NO: 128390 - DNA, 75 bp, synthetic construct
  source 1..75: mol_type = other DNA
tttgacgcgatgggcgcgctgtccactaaatacaacgataccccggaaaaagcttcccgtacttatgacgcgcat

SEQ ID NO: 128391 - DNA, 75 bp, synthetic construct
  source 1..75: mol_type = other DNA
cgctggaaacgcccattattgaagcgcgttttcatctggaaaacaacgaaggtgcagcgatactgttcagcgggg

SEQ ID NO: 128392 - DNA, 75 bp, synthetic construct
  source 1..75: mol_type = other DNA
ttattggtgcgggtatagcaggcaccgcttgtgctttacgctgcgcgcgggcaggtttgtccgttctgttactgg

SEQ ID NO: 128393 - DNA, 75 bp, synthetic construct
  source 1..75: mol_type = other DNA
atcgtgctgctgcaatgtcattaggccctaggaagaaggacgaggaatacagcccagagaaagtagtcctatcaa

SEQ ID NO: 128394 - DNA, 75 bp, synthetic construct
  source 1..75: mol_type = other DNA
cgcgcccgcttcgatccgtggctggttgccgaagccgaaaaagaaggtgtcgagtgtatccctggcgcgacggtg

SEQ ID NO: 128395 - DNA, 75 bp, synthetic construct
  source 1..75: mol_type = other DNA
acgctctctttggggattgtttgcccgctctcttcccttgcacaaaaccgcgttccggcaagcgagttgctggct

SEQ ID NO: 128396 - DNA, 75 bp, synthetic construct
  source 1..75: mol_type = other DNA
ttctggcgtcatttacgtcgtcatggcctgtggcatctggcgggcgatgttatcaggagtctgcgatgtctgtag

SEQ ID NO: 128397 - DNA, 75 bp, synthetic construct
  source 1..75: mol_type = other DNA
aggcagtagaactgctcatgtgccctacggcgacgttattgtctgatgttgaacccattgagaatctggtcaaga

SEQ ID NO: 128398 - DNA, 75 bp, synthetic construct
  source 1..75: mol_type = other DNA
gtgatgctgtcccgtaccaggagtttgcaaaactgatcggcaaaacaccggcagcagtaaggggaatgattgaaa

SEQ ID NO: 128399 - DNA, 75 bp, synthetic construct
  source 1..75: mol_type = other DNA
agagctgtaaggggcatgattgagaaagggaaattaccagttattgagattactgaccctcagtcagtatcgggg

SEQ ID NO: 128400 - DNA, 75 bp, synthetic construct
  source 1..75: mol_type = other DNA
gcaaggtactgcggctattaggtaaaggatggggcatcaaccagatagcttcattgcttaagaaaagcaataaaa

SEQ ID NO: 128401 - DNA, 75 bp, synthetic construct
  source 1..75: mol_type = other DNA
ggtgcaagagaacttaacttgccttctgtttatggagatgccgcagaatggaacacagccgaattaagaagagaa

SEQ ID NO: 128402 - DNA, 75 bp, synthetic construct
  source 1..75: mol_type = other DNA
ttccgtttgtgaacattattattcattgatctcacaatacagggaaattcattgggttttcatggtttcgcgtgc

SEQ ID NO: 128403 - DNA, 75 bp, synthetic construct
  source 1..75: mol_type = other DNA
cactcaataacctgacagacaaacgctaccgtacagcacatgaaactattcctgcagcaggttttaatgcagcta

SEQ ID NO: 128404 - DNA, 75 bp, synthetic construct
  source 1..75: mol_type = other DNA
caggctctgaccgttcataacaagactgacacccatgataagcaatacactcaggcggtcacattgcagagtcac

SEQ ID NO: 128405 - DNA, 75 bp, synthetic construct
  source 1..75: mol_type = other DNA
gcggctgatgctgcagattatgtcagggagactgaccggtcactgatgcaactggtcaccgcattatgggcaaca

SEQ ID NO: 128406 - DNA, 75 bp, synthetic construct
  source 1..75: mol_type = other DNA
attgatgatcctaacaatcccggcgaaaaaatgagtctggcaccgtttatagagcgagctgaaaaactctgttaa

SEQ ID NO: 128407 - DNA, 75 bp, synthetic construct
  source 1..75: mol_type = other DNA
ttccataattgaaaatgcagatgttgttgctactgatattgaagggttggggattttgttgtatgaagaagggaa

SEQ ID NO: 128408 - DNA, 75 bp, synthetic construct
  source 1..75: mol_type = other DNA
caatataaacatgctgacgaaatatgcccttgcggcagtcatagtgctgtgtttaacggtgctgggatttacgct

SEQ ID NO: 128409 - DNA, 75 bp, synthetic construct
  source 1..75: mol_type = other DNA
attgctggatgccgaagaagtgatgattctggtgctgggtagccagaaagcactggcgctgcaggccgcagttga

SEQ ID NO: 128410 - DNA, 75 bp, synthetic construct
  source 1..75: mol_type = other DNA
ccgtggtcggcattgtgccggaagagctatcgacatgggctggcgtagacactgaacgcctgacagtgacggctc

SEQ ID NO: 128411 - DNA, 75 bp, synthetic construct
  source 1..75: mol_type = other DNA
gcggaggaacagttcttaacgttgttcccggagcagaagcggattgtgaatttacgctctcaggtgacgatggcg

SEQ ID NO: 128412 - DNA, 75 bp, synthetic construct
  source 1..75: mol_type = other DNA
ttatgggcggtgtcggtaacgatggtcatatcgcatttaacgaacctgcttcttctctggcctctcgtacccgta

SEQ ID NO: 128413 - DNA, 75 bp, synthetic construct
  source 1..75: mol_type = other DNA
cttcttcgatcacgttgatattccagcagaaaacattaacctcctcaatggcaatgccccggacatcgacgctga

SEQ ID NO: 128414 - DNA, 75 bp, synthetic construct
  source 1..75: mol_type = other DNA
tgccgaaagagcatccggaaagctactacagcgttatgcaccgtaatttctttcgatcacgttgatattccagca

SEQ ID NO: 128415 - DNA, 75 bp, synthetic construct
  source 1..75: mol_type = other DNA
ctggtgcgattgaggatataacaacgttgtttgaatatctggccgagaatgcatctctttgggatgcaaggaatg

SEQ ID NO: 128416 - DNA, 75 bp, synthetic construct
  source 1..75: mol_type = other DNA
caaaccaccctgccgaacgtcagcgaaaatgaagaaacactgctgactggcgtcaatgaaaacgtgtatgaagat

SEQ ID NO: 128417 - DNA, 75 bp, synthetic construct
  source 1..75: mol_type = other DNA
ggattaccttcctgttctcggtgatgtccggcgtgatgtctcgctgcgacctggcaacaaacccgcgccgcattt

SEQ ID NO: 128418 - DNA, 75 bp, synthetic construct
  source 1..75: mol_type = other DNA
gtgagttccatccttgagatttttttcccgctttgcgcttccgacaccgtccgctggcagcgccgtacacccgat

SEQ ID NO: 128419 - DNA, 75 bp, synthetic construct
  source 1..75: mol_type = other DNA
gcgtgacgttatggagcgtcagcgaacaggtggcgcaaagccgcacccaggcggagaaacagttcttaacgctgt

SEQ ID NO: 128420 - DNA, 75 bp, synthetic construct
  source 1..75: mol_type = other DNA
tgacagagcgtctgatcactgcaaccgatcgtctggcagattaccccaggctgtatgaaacagatgaacgctatg

SEQ ID NO: 128421 - DNA, 75 bp, synthetic construct
  source 1..75: mol_type = other DNA
tgcgatagttgtcatggccgggcgcaaatgcagaaggttataggtcctcctgtgcgctggaatatggtctgcctg

SEQ ID NO: 128422 - DNA, 75 bp, synthetic construct
  source 1..75: mol_type = other DNA
aagcactctccggtttcgagcttgctcaaactggccaagtactggctggaaggctaaaaattcaggagcgagtaa

SEQ ID NO: 128423 - DNA, 75 bp, synthetic construct
  source 1..75: mol_type = other DNA
gtgcattccttaatgccgggagaacgcgttaatggtgcctgtagcacaggaaccgtagtcggcattgcaccggaa

SEQ ID NO: 128424 - DNA, 75 bp, synthetic construct
  source 1..75: mol_type = other DNA
taagcgattcacaaatcggtatatatacaactgacagtaatactctgaaggatggattgtgtagccaagcccaca

SEQ ID NO: 128425 - DNA, 75 bp, synthetic construct
  source 1..75: mol_type = other DNA
gatgaatcagcatggattttccccttcccgctccgcacgcgctatgcgtgggcaaagcgacaaagtcgtcgccat

SEQ ID NO: 128426 - DNA, 75 bp, synthetic construct
  source 1..75: mol_type = other DNA
gcaaaagtgattacgcctgaaactaccgcgttactgtgcgcaaccgacacgctggcacttggcgcaagtaaatac

SEQ ID NO: 128427 - DNA, 75 bp, synthetic construct
  source 1..75: mol_type = other DNA
gggaaacgcctgcagccgtattacgatcgcgccgaccggccgcgcatcgatgcctggcagaccgtggtgaacggc

SEQ ID NO: 128428 - DNA, 75 bp, synthetic construct
  source 1..75: mol_type = other DNA
tagcagtagaacttctcttcgctgcgggaaatgttcacgccgttgaagtagaagtaccgggattgttaactgacc

SEQ ID NO: 128429 - DNA, 75 bp, synthetic construct
  source 1..75: mol_type = other DNA
cacaccgtcacccaccgctttgctggcgaatgcttcgtcaggaacctgatctttagtgataaatgggaaagtgac

SEQ ID NO: 128430 - DNA, 75 bp, synthetic construct
  source 1..75: mol_type = other DNA
gtgagttccatgcttgagatttttttcccgctttgcgccaccgaccccatccgttggcagcgccgtaccgccgac

SEQ ID NO: 128431 - DNA, 75 bp, synthetic construct
  source 1..75: mol_type = other DNA
taaagaaaagccggtagaaggcagtccactgtttttactacaaatgtgcatggaacaattagtggcgattggaaa

SEQ ID NO: 128432 - DNA, 75 bp, synthetic construct
  source 1..75: mol_type = other DNA
taaagaaaagccggtagaaggcagtccactgtttttactacaaacgtgtacggaacaactcgtggtgaatggaaa

SEQ ID NO: 128433 - DNA, 75 bp, synthetic construct
  source 1..75: mol_type = other DNA
tcgattttttaaaacgttcgcagcagtttgttattcccatttatcaacggacttattcatggaccgggcaacaat

SEQ ID NO: 128434 - DNA, 75 bp, synthetic construct
  source 1..75: mol_type = other DNA
catcagaagttggaatgcagtggggacagggaaatatgaaacagggtatgccgtgggaggattatgttgggaaat

SEQ ID NO: 128435 - DNA, 75 bp, synthetic construct
  source 1..75: mol_type = other DNA
caaagcctatgttcagaagtggaatggacgggatctgacaaaaatagatgtaaacagccctgaatggactaagtt

SEQ ID NO: 128436 - DNA, 75 bp, synthetic construct
  source 1..75: mol_type = other DNA
ttgcatatagagataagggtaatgcatttactcatccaaatacttttaaagatgatgtgatttttgaagacgttt

SEQ ID NO: 128437 - DNA, 75 bp, synthetic construct
  source 1..75: mol_type = other DNA
gtggggatattaaatccgcagaaaatagcggtaaccaggttatctttacactttacgtaccgccagacactgggg

SEQ ID NO: 128438 - DNA, 75 bp, synthetic construct
  source 1..75: mol_type = other DNA
gtggaagagtttacgattgagcatattatgccgcagaacgaaaatttgtcggctaaatggcgtgaagagctggga

SEQ ID NO: 128439 - DNA, 75 bp, synthetic construct
  source 1..75: mol_type = other DNA
tccacatgacgcagccgatttcagacgatgcgttgcacttgttgcactttacattgatgagtttgaaaacgcgct

SEQ ID NO: 128440 - DNA, 75 bp, synthetic construct
  source 1..75: mol_type = other DNA
aaggatgatctaaatgatgcaacttttgagcattataaaaagtggaaaaccttctataaaagtgacctgagcttt

SEQ ID NO: 128441 - DNA, 75 bp, synthetic construct
  source 1..75: mol_type = other DNA
aacagcgccgccgcgttgctggaaaaaatcaaagctgaacgcgcagccagcgggggtaaaaaagcctcgcgtaaa

SEQ ID NO: 128442 - DNA, 75 bp, synthetic construct
  source 1..75: mol_type = other DNA
gggcggtgcagtagcggcaatgcagagtaataatgttgctgctggtgcagcaggcgcagcaacgggagagctggc

SEQ ID NO: 128443 - DNA, 75 bp, synthetic construct
  source 1..75: mol_type = other DNA
tgtgcagcttgccacgctcaaacagcgtgccaagaaggtcattcaggcctttgctgaccacaagaatccacgttc

SEQ ID NO: 128444 - DNA, 75 bp, synthetic construct
  source 1..75: mol_type = other DNA
tgttgaagcgaaatatatcctgacgccggtactgtggaagtacctctatcgttatgcgaaaaagcatcaggcgcg

SEQ ID NO: 128445 - DNA, 75 bp, synthetic construct
  source 1..75: mol_type = other DNA
cattattcattgctggcctggctgcattcagtacatcttcactggcggcacaatctttacgtttcggttatgaaa

SEQ ID NO: 128446 - DNA, 75 bp, synthetic construct
  source 1..75: mol_type = other DNA
caactttacggggctctcgcccgtcatcaacctgctcgacgtccctttcctgttccgcgataccgctcacgcgca

SEQ ID NO: 128447 - DNA, 75 bp, synthetic construct
  source 1..75: mol_type = other DNA
agtctataccgggctggaaacccgcactatcgacgctcaggaacacccgatcaacgtcgtctggtcagcaaaatt

SEQ ID NO: 128448 - DNA, 75 bp, synthetic construct
  source 1..75: mol_type = other DNA
acttggcgatctgcataccggtattttaaccggcggtacgctggaactggtgtggatggggctggccccgctggc

SEQ ID NO: 128449 - DNA, 75 bp, synthetic construct
  source 1..75: mol_type = other DNA
gaagcaagggccaaaacagctgaattacaggttcagaaactggctgaaacacaacaacaaaatcagctaacaact

SEQ ID NO: 128450 - DNA, 75 bp, synthetic construct
  source 1..75: mol_type = other DNA
gcgcaaatcctatcccgatgccgtttgctgaagtctataccgggctggaaacgcgcaccatcgatgcccaggagc

SEQ ID NO: 128451 - DNA, 75 bp, synthetic construct
  source 1..75: mol_type = other DNA
tattgcctattatcgtaatcatgctgttgggttattttagcggcagacgagaaactttttcagaagatcaagctc

SEQ ID NO: 128452 - DNA, 75 bp, synthetic construct
  source 1..75: mol_type = other DNA
aaaaccattttatgacacaccccttgttggctcatggcgagctatggcgtattcaccaggcggggtcggtgatat

SEQ ID NO: 128453 - DNA, 75 bp, synthetic construct
  source 1..75: mol_type = other DNA
atgtgtcgggcgattatttagatttttcgacccgtggagaaaacaatcagaaggttttttatagattacgcggag

SEQ ID NO: 128454 - DNA, 75 bp, synthetic construct
  source 1..75: mol_type = other DNA
ctcatttcacaaatcagtgaggcggccacgaatgaaaaacagcagaacatacaacacagcgaggagcagcagagc

SEQ ID NO: 128455 - DNA, 75 bp, synthetic construct
  source 1..75: mol_type = other DNA
ctcatttcacaaatcagtaaggcggccacgaatgaaaaacagcagaacatgcagcacagcgaggaacagcagagc

SEQ ID NO: 128456 - DNA, 75 bp, synthetic construct
  source 1..75: mol_type = other DNA
gacgtaccggcgttgcgcgaaatattgcaacgtacaggcatgttggacgggggaccgaaaattacgctacctggc

SEQ ID NO: 128457 - DNA, 75 bp, synthetic construct
  source 1..75: mol_type = other DNA
actggcattaccccttctggggccgtttatgttgccagacagcgctactgattaagcggattttttcgctttttt

SEQ ID NO: 128458 - DNA, 75 bp, synthetic construct
  source 1..75: mol_type = other DNA
agaacttttccataaaccggcagcattgtccttcatcatatttgcgacgatgtataacgcctacacacagcgata

SEQ ID NO: 128459 - DNA, 75 bp, synthetic construct
  source 1..75: mol_type = other DNA
gctcactcgtttccggatttttttatgctcattggacaggcccttgatttggtatcccgttacgattctctgcgt

SEQ ID NO: 128460 - DNA, 75 bp, synthetic construct
  source 1..75: mol_type = other DNA
ggcgcgcatgcagatactatggatggcgtcacaggtacgcgtttttctgtctgggctccaaacgcccgtcgggtc

SEQ ID NO: 128461 - DNA, 75 bp, synthetic construct
  source 1..75: mol_type = other DNA
gagattgccagccacggtcgtcagcattcactaagcctgacgctaccaccgctggccactatctggctggttcgg

SEQ ID NO: 128462 - DNA, 75 bp, synthetic construct
  source 1..75: mol_type = other DNA
ctgctgacgtcgatgacggacgccatgcgcttccccgggacgtataccggagctgatgcgcgatcttgcaagtat

SEQ ID NO: 128463 - DNA, 75 bp, synthetic construct
  source 1..75: mol_type = other DNA
caaagtaaccaaacttgagaagctcggcctgcgtatggatagctgctgtgaaatcacctttgacgatgtggaact

SEQ ID NO: 128464 - DNA, 75 bp, synthetic construct
  source 1..75: mol_type = other DNA
cgcactggtgcggcctgaccctgctggccatcgatggtgtgttctggcgcacaccggatacaccagagaacgatg

SEQ ID NO: 128465 - DNA, 75 bp, synthetic construct
  source 1..75: mol_type = other DNA
tacagtcatcgctgggaaatcgaactgggatacagggagataaaacagacgatgcaactgagcaggctgacgctg

SEQ ID NO: 128466 - DNA, 75 bp, synthetic construct
  source 1..75: mol_type = other DNA
atgaagagatcagaaaactgggtaaaggcgatcatctggtgaagctgaaaaccagcccgcaggcacgaaaaaagt

SEQ ID NO: 128467 - DNA, 75 bp, synthetic construct
  source 1..75: mol_type = other DNA
tttgaagttgtggatagcgcaatgcaggtgctgggcggtgtcgggattgcgggcaaccacgcatcagccgcttct

SEQ ID NO: 128468 - DNA, 75 bp, synthetic construct
  source 1..75: mol_type = other DNA
aagaagagttcgatcacgaacgtttcctggtggccctcaccaactacggtacggcgatgtgcgcttttgaagatg

SEQ ID NO: 128469 - DNA, 75 bp, synthetic construct
  source 1..75: mol_type = other DNA
cttatcgctatcacaaagcattgcacgagctggattttgacgcgtatggctttgaatggctggtggtggatgacc

SEQ ID NO: 128470 - DNA, 75 bp, synthetic construct
  source 1..75: mol_type = other DNA
gctggatgcacgacaccctggactacatgaagctcgacccggtttatcgtcaataccatcacgataaactcacct

SEQ ID NO: 128471 - DNA, 75 bp, synthetic construct
  source 1..75: mol_type = other DNA
gattgatgccaatggcaatctgcgtttgaagtctgatccttatgcctttgaagcacagatgcgtccggaaaccgc

SEQ ID NO: 128472 - DNA, 75 bp, synthetic construct
  source 1..75: mol_type = other DNA
agtctaccgacttcccgaacgtttctcgtcctcaggatattggcggcctgggcttctggtacaaatggaacctgg

SEQ ID NO: 128473 - DNA, 75 bp, synthetic construct
  source 1..75: mol_type = other DNA
aactatggacgtcgtgaagtcagcaatttcctcgtcggtaacgcgctgtactgggttgaacgttttggtattgat

SEQ ID NO: 128474 - DNA, 75 bp, synthetic construct
  source 1..75: mol_type = other DNA
taatggcggcgcagtacacagtgatgagatcgccagccacggtcgccagcattcattaagccttacgctaccgcc

SEQ ID NO: 128475 - DNA, 75 bp, synthetic construct
  source 1..75: mol_type = other DNA
gctaaatggatgggctttacccacctcgaactgctgcccattaacgagcatcccttcgatggcagttggggttat

SEQ ID NO: 128476 - DNA, 75 bp, synthetic construct
  source 1..75: mol_type = other DNA
cggtatcaatcagccaggcaaatggcgtgagatcctcaataccgactcgatgcattaccacggtagcaataccgg

SEQ ID NO: 128477 - DNA, 75 bp, synthetic construct
  source 1..75: mol_type = other DNA
gcgtaaccggtacgcgcttctcagtctgggcgcctaacgctcaacgcgtgtcagtggttgggcagttcaactact

SEQ ID NO: 128478 - DNA, 75 bp, synthetic construct
  source 1..75: mol_type = other DNA
acagcgatccgcgcgaaggctatcatcaggactggaacacgctgatctacaactatggtcgccgtgaagtcagta

SEQ ID NO: 128479 - DNA, 75 bp, synthetic construct
  source 1..75: mol_type = other DNA
aaaaagcgaaccagttggatgcgccaatctctatctatgaagttcatctgggttcctggcgccgtcacgctgaca

SEQ ID NO: 128480 - DNA, 75 bp, synthetic construct
  source 1..75: mol_type = other DNA
tcccttcgatggcagttggggttatcagccaaccggcctgtatgcaccgacccgccgttttggtactcgcgacga

SEQ ID NO: 128481 - DNA, 75 bp, synthetic construct
  source 1..75: mol_type = other DNA
atgatggtgacagcctccttcgcaagaagggagcctatccaagttactggcccgtttgctgatgaagcgacgaag

SEQ ID NO: 128482 - DNA, 75 bp, synthetic construct
  source 1..75: mol_type = other DNA
cgaaaacagcgcagctctggcataacgccacgccgcatccgcactggtgcggcctgaccctgctggccattgatg

SEQ ID NO: 128483 - DNA, 75 bp, synthetic construct
  source 1..75: mol_type = other DNA
attccggtgttggtggcctttccgttgattttatgccaacagccccctgtgactgacaggctgcctcgtcattcc

SEQ ID NO: 128484 - DNA, 75 bp, synthetic construct
  source 1..75: mol_type = other DNA
aacaatccccttatctccgggctgtagacattctgcgagcgcggcaggcaactggcttgttgcggcaaagccgta

SEQ ID NO: 128485 - DNA, 75 bp, synthetic construct
  source 1..75: mol_type = other DNA
gcccgttgcagtctggcaaatgttacttactcgtttgcttgagcagcactatggcctaatgctaagcgacacacc

SEQ ID NO: 128486 - DNA, 75 bp, synthetic construct
  source 1..75: mol_type = other DNA
cccgtttgctgatgaagcgacgaagatcattaactcaatgaagatgaacaaggcgaagccaacagctttgtctgc

SEQ ID NO: 128487 - DNA, 75 bp, synthetic construct
  source 1..75: mol_type = other DNA
ctgccagatggaactgaccagccatctgctgacggctgcagccttcggcacgatgaagaacagcgaaaatgagct

SEQ ID NO: 128488 - DNA, 75 bp, synthetic construct
  source 1..75: mol_type = other DNA
ggtggctcacgggaaaaatccggacttaatctgctgacgttgttgattgatattctggatctggttcagttgctg

SEQ ID NO: 128489 - DNA, 75 bp, synthetic construct
  source 1..75: mol_type = other DNA
acacatagctacccagaaatttatgctggggttgcattgacgattgctggggctggcggtaatgatgagcaggca

SEQ ID NO: 128490 - DNA, 75 bp, synthetic construct
  source 1..75: mol_type = other DNA
ctgtgggatttgcagaataaagcagaacggcagaatgacattctggtgaaataccgccacttatcagtaccgccg

SEQ ID NO: 128491 - DNA, 75 bp, synthetic construct
  source 1..75: mol_type = other DNA
ggaagtgggttatacctcgaacgaacctgttatgctatgcctgatgtctgcgattgaaaccggtgttatcttcct

SEQ ID NO: 128492 - DNA, 75 bp, synthetic construct
  source 1..75: mol_type = other DNA
gggccgcatggtgaccaacgattatattgttgatattgctaaccgcgatggtcaattgcagttgaacgtgacaga

SEQ ID NO: 128493 - DNA, 75 bp, synthetic construct
  source 1..75: mol_type = other DNA
aagaagggaaagggccttcccgagagtggtaaaggagaggccctggaaataccccacagccccgaaaaagagcca

SEQ ID NO: 128494 - DNA, 75 bp, synthetic construct
  source 1..75: mol_type = other DNA
ggtgagcactacttctttgttaatcatgatgaatttaaagaaatgattagcagagatgcgttcctcgagcacgca

SEQ ID NO: 128495 - DNA, 75 bp, synthetic construct
  source 1..75: mol_type = other DNA
tttctgcccccagtggtgcggggaaatccagcctgattcaggctttattgaaaactcaaccgttgtatgacaccc

SEQ ID NO: 128496 - DNA, 75 bp, synthetic construct
  source 1..75: mol_type = other DNA
gggcaatgcgtctgacagaaatgggcttcccgtgcatcggtctgccgggcaccatcgataacgatatcaaaggca

SEQ ID NO: 128497 - DNA, 75 bp, synthetic construct
  source 1..75: mol_type = other DNA
gttcagcttgaccgttacagtgtgtctgacatgatcaaccgtggtggtacattcctcggttctgcgcgcttccct

SEQ ID NO: 128498 - DNA, 75 bp, synthetic construct
  source 1..75: mol_type = other DNA
ccggtggctgtgaattcgttgtggttccggaagttgaattcagccgtgaagacctggtaaacgaaatcaaagcgg

SEQ ID NO: 128499 - DNA, 75 bp, synthetic construct
  source 1..75: mol_type = other DNA
tgccttgccgaatcaggtactgtaacgctacgcaagcgccgtcttcccctcgaaatgatggtctggtgtattgtt

SEQ ID NO: 128500 - DNA, 75 bp, synthetic construct
  source 1..75: mol_type = other DNA
tgcgggcggcgaagccatgcctgtcgcccgtgactatctggcaaatgctacttagtcgtctgctggaacagcatt

SEQ ID NO: 128501 - DNA, 75 bp, synthetic construct
  source 1..75: mol_type = other DNA
cgcaggcggcgacgctatgtctgtcgcccgtggcagtctggcaaatgctgcttgcacgcctgctggaacaacatt

SEQ ID NO: 128502 - DNA, 75 bp, synthetic construct
  source 1..75: mol_type = other DNA
ccgctgatgatgtcgctccgacgggtcagcaaatctggcaggaactgcaaagcggcaaatggggtgagatagccc

SEQ ID NO: 128503 - DNA, 75 bp, synthetic construct
  source 1..75: mol_type = other DNA
cccagtgccgttattcaggcccgccagcgcctgggaagtgaggctgtccgccgcgtgttcacgaaaacagcgcag

SEQ ID NO: 128504 - DNA, 75 bp, synthetic construct
  source 1..75: mol_type = other DNA
tacctcgcccccgaactcatctctcgttgccttgccgaatcaggtactgtaacgctacgcaagcgccgtcttccc

SEQ ID NO: 128505 - DNA, 75 bp, synthetic construct
  source 1..75: mol_type = other DNA
tcagctatgaacaactgacccggtttgcggaacaacgcatccggaaatgcaatctggacagccagggcgtgactt

SEQ ID NO: 128506 - DNA, 75 bp, synthetic construct
  source 1..75: mol_type = other DNA
tgcaaaaaaccgacaagctgattatgagcgtacctgaagtggcgcgggtatttggcaaaaccgggaaagcggaaa

SEQ ID NO: 128507 - DNA, 75 bp, synthetic construct
  source 1..75: mol_type = other DNA
cgatgaagcagcaaatcaccctggcagacgtggccgacgttaaagtctctaccggaccgtcgatgctgaaaaccg

SEQ ID NO: 128508 - DNA, 75 bp, synthetic construct
  source 1..75: mol_type = other DNA
ccgctcaataaagttggcggggaatttttaccgcagatcaatgaaggcgacttgttgtatatgccatcgacgctg

SEQ ID NO: 128509 - DNA, 75 bp, synthetic construct
  source 1..75: mol_type = other DNA
gataccttccagttttatctggagaaacagggatggacacttgtaaaccggagcgcaattagaaacatgactgtc

SEQ ID NO: 128510 - DNA, 75 bp, synthetic construct
  source 1..75: mol_type = other DNA
tttcgaccttaagcgcagctccactgtcaccagctttacgtgagcaagcaccgcaaggtccacgacgcgaacgct

SEQ ID NO: 128511 - DNA, 75 bp, synthetic construct
  source 1..75: mol_type = other DNA
ttccgccagaaagcagtaacccgctcaatcgttttttgattcgtatttaccatccgctgttgctgaaagtactgc

SEQ ID NO: 128512 - DNA, 75 bp, synthetic construct
  source 1..75: mol_type = other DNA
tctggaaggtgggcgctatatcaacgttgagattaaccgtgaaaaagccgcgcgttacggtatgacggtggcgga

SEQ ID NO: 128513 - DNA, 75 bp, synthetic construct
  source 1..75: mol_type = other DNA
tggcgggcggggtggtgatcctgcgctccggcaaaaacgcccgagaagtgatcgccgccgtgaaggacaaactgg

SEQ ID NO: 128514 - DNA, 75 bp, synthetic construct
  source 1..75: mol_type = other DNA
accgcacctttactgtcgctgtttattattccggcggcgtataagctgatgtggctgcaccgacatcgttcttag

SEQ ID NO: 128515 - DNA, 75 bp, synthetic construct
  source 1..75: mol_type = other DNA
tgaatgccaatattatgtcgttgggtggcattgcgattgccgtcggggcgatggtcgatgccgctatcgtcatga

SEQ ID NO: 128516 - DNA, 75 bp, synthetic construct
  source 1..75: mol_type = other DNA
aggtttccggcaacgtgctggcggatatcgacgcgatggcggaacaaatcgaagaagtggcgcgaacggtgcctg

SEQ ID NO: 128517 - DNA, 75 bp, synthetic construct
  source 1..75: mol_type = other DNA
catccgctgttgctgaaagtattgcactggccaaaaaccacactgctggtggcggcgctttcggtgctgacggta

SEQ ID NO: 128518 - DNA, 75 bp, synthetic construct
  source 1..75: mol_type = other DNA
aggcgtcggtggtacacacgttatgtacgtgctgcaccatgctgacaagccaaatctgtatcatggcttgccgga

SEQ ID NO: 128519 - DNA, 75 bp, synthetic construct
  source 1..75: mol_type = other DNA
gcggaattcttccgcaaaatgcataaagatgttctgaaaaaaatcgacaacttggaatgctcacagaaatttagc

SEQ ID NO: 128520 - DNA, 75 bp, synthetic construct
  source 1..75: mol_type = other DNA
agaataacgccccgtctcccgacaaaatgattcacggggacggacgcaccctagttatccgtctcgacgaacacg

SEQ ID NO: 128521 - DNA, 75 bp, synthetic construct
  source 1..75: mol_type = other DNA
ggtggttgggcaagaaccggcctgtgtgaagacctgcccgacgggcgcgattcacttcggtacgaaagagtcgat

SEQ ID NO: 128522 - DNA, 75 bp, synthetic construct
  source 1..75: mol_type = other DNA
tgaaagcgtgcccggcggaaggtgcaattattcagtatgccaacggtatcgtcgacttccagtccgagcagtgca

SEQ ID NO: 128523 - DNA, 75 bp, synthetic construct
  source 1..75: mol_type = other DNA
atctaaacgggtttcatcagatgttggcgttgtagaatttcaatctaataatagtagcgtacgctttaaaataat

SEQ ID NO: 128524 - DNA, 75 bp, synthetic construct
  source 1..75: mol_type = other DNA
gaaaccttccgcttttatctggagaaacagggatggacgcttgtgaacagggacgtaattaaaaatatgaccgtg

SEQ ID NO: 128525 - DNA, 75 bp, synthetic construct
  source 1..75: mol_type = other DNA
cctctggtggtgagttaattaaattcatcgcggaggctgccatcatggctactacccctaccatttatcaccctg

SEQ ID NO: 128526 - DNA, 75 bp, synthetic construct
  source 1..75: mol_type = other DNA
agcaacaaggctggactcttgtaaaccggagcgcaattaaaaatatgaccgtagagcagttgctttccttaaaat

SEQ ID NO: 128527 - DNA, 75 bp, synthetic construct
  source 1..75: mol_type = other DNA
ttccacaaacgacacgacaatgtgttacgtgccatcgcaaatattgaatgctcagataaatttactgccctcaat

SEQ ID NO: 128528 - DNA, 75 bp, synthetic construct
  source 1..75: mol_type = other DNA
cctccggtggtgagttaatcaaattcatcgcggaggctgccatcatggctactaccctttctcacccttgtgtaa

SEQ ID NO: 128529 - DNA, 75 bp, synthetic construct
  source 1..75: mol_type = other DNA
ccgtagaaaacggtcgcgctgtcactacgtctgttgcggttgcagagttcttccacaaacgacacgacaatgtgt

SEQ ID NO: 128530 - DNA, 75 bp, synthetic construct
  source 1..75: mol_type = other DNA
gccagctgggtgccaggtgcgaattgatgtaatggcaagcctcggtgactacactttggctgaaggtcaaaagtt

SEQ ID NO: 128531 - DNA, 75 bp, synthetic construct
  source 1..75: mol_type = other DNA
aaaaaatcgacgccattatttcatcgctctccattaccgataaacgccagcaggagatagccttctccgacaagc

SEQ ID NO: 128532 - DNA, 75 bp, synthetic construct
  source 1..75: mol_type = other DNA
tgaaaccactgaaaccactgaaaccactgaaaccactgaaacccggcatcctgccgacaaggaaaaagcacaatg

SEQ ID NO: 128533 - DNA, 75 bp, synthetic construct
  source 1..75: mol_type = other DNA
cttacagaaggattcatttccaccgcgacgcgtagagcaagtattctcgcggcagcggaagaccgtggctatgtc

SEQ ID NO: 128534 - DNA, 75 bp, synthetic construct
  source 1..75: mol_type = other DNA
tgatcgggatattacgttaccagccggggctgaattgcttgccaatgaccaaacacctttggcaattattaacag

SEQ ID NO: 128535 - DNA, 75 bp, synthetic construct
  source 1..75: mol_type = other DNA
ggtatgatgcctccagcaggctgtcaggttcgaatcgatgttatggctagccttggcgactatactttggctgaa

SEQ ID NO: 128536 - DNA, 75 bp, synthetic construct
  source 1..75: mol_type = other DNA
tgatgatatttgttaattttggtgttatagctgattgcgaaatacaagctaaagatcatgattgttttactattt

SEQ ID NO: 128537 - DNA, 75 bp, synthetic construct
  source 1..75: mol_type = other DNA
attcacaccaagcggggcgagactcttaattcgtgtcgggtcactacgccttaatgaaaatcatgccatcaaagg

SEQ ID NO: 128538 - DNA, 75 bp, synthetic construct
  source 1..75: mol_type = other DNA
aagaggaaatgaaaaattgtttgttgatgtttatgccagatttatagaaccattaattattaaaaacacagaaat

SEQ ID NO: 128539 - DNA, 75 bp, synthetic construct
  source 1..75: mol_type = other DNA
caatattgccaggatgtcaccgcagaaggcactgttgcaaatagtcggtggtgataaacttatcatccctttttg

SEQ ID NO: 128540 - DNA, 75 bp, synthetic construct
  source 1..75: mol_type = other DNA
taaaccagatggaaaacgttttttacatggttgacggcgataccgtaacaatcagcgtagatggtgaggaatacg

SEQ ID NO: 128541 - DNA, 75 bp, synthetic construct
  source 1..75: mol_type = other DNA
cagagccattcttcaaaacaacaagggaagacattaagcacggcgttgataacggcgtactgtttaaggttggcg

SEQ ID NO: 128542 - DNA, 75 bp, synthetic construct
  source 1..75: mol_type = other DNA
tggcacttccgtgaaggtatggcgctataaaaacgccgtgtattcacttactaaggcgctgttgattgaaggcta

SEQ ID NO: 128543 - DNA, 75 bp, synthetic construct
  source 1..75: mol_type = other DNA
ctgagcgactactttgccaaagcacgggatctggctgggataattccaccagcaggaaaaactccgccaacattt

SEQ ID NO: 128544 - DNA, 75 bp, synthetic construct
  source 1..75: mol_type = other DNA
agaaccggctggaaatatcgctcaatatgtggagtcactagagtttaaaactgattcgatcattaccggtggtag

SEQ ID NO: 128545 - DNA, 75 bp, synthetic construct
  source 1..75: mol_type = other DNA
aagcgatgacggtggcggtgattatcgccggtttgctgccgattctgtggggaacgggggctggttcagaggtga

SEQ ID NO: 128546 - DNA, 75 bp, synthetic construct
  source 1..75: mol_type = other DNA
gcatatcagaaggcgtgcataagcgtttgtggctcgctgttgccgcagtgttttctggtgcaggaatgattatat

SEQ ID NO: 128547 - DNA, 75 bp, synthetic construct
  source 1..75: mol_type = other DNA
cggtggccacaccgaccaccttcctggttaacgtcaatacgcttgaagcgctgccgcttttacagggcgcatcgg

SEQ ID NO: 128548 - DNA, 75 bp, synthetic construct
  source 1..75: mol_type = other DNA
gacactgacactggtgaaaccaccgaaaccaccgaaaccaccgaaaaacagcatcccgccgacaaggaaaaagaa

SEQ ID NO: 128549 - DNA, 75 bp, synthetic construct
  source 1..75: mol_type = other DNA
accccgccgccatgataacgacgaagacactgacactggtgaaaccaccgaaaccaccgaaaaacagcatcccgc

SEQ ID NO: 128550 - DNA, 75 bp, synthetic construct
  source 1..75: mol_type = other DNA
cgacagggatattacgctacccggaggggctgaattactgacaagtgaccagacaccaattgcaaccagcagtag

SEQ ID NO: 128551 - DNA, 75 bp, synthetic construct
  source 1..75: mol_type = other DNA
aatatgaaagatgctgtttactttaatgacttcatttatcttgacgtgaaatcttcaacgttcaacatttcttac

SEQ ID NO: 128552 - DNA, 75 bp, synthetic construct
  source 1..75: mol_type = other DNA
aatatgaaagatgcagtttactttaatgacttcatttatcttgacgtgaaatcttcaacgttcagtatttcttac

SEQ ID NO: 128553 - DNA, 75 bp, synthetic construct
  source 1..75: mol_type = other DNA
tgttgtaattcctgctggaggaactgtttctggcgtagaaactaaacagcatgaagctgttagcgttacatttga

SEQ ID NO: 128554 - DNA, 75 bp, synthetic construct
  source 1..75: mol_type = other DNA
gactcagaaccttggtagcggactggttatgacaggaattattgttcaggaaacaggaaaagcttctgccgataa

SEQ ID NO: 128555 - DNA, 75 bp, synthetic construct
  source 1..75: mol_type = other DNA
ggtcagatatcaccctctaactatagtaattttgactctagatatgcgctgaaaacatcttacgtttccagcgta

SEQ ID NO: 128556 - DNA, 75 bp, synthetic construct
  source 1..75: mol_type = other DNA
aaaccattctggattttaaaaatggacgtggttattactgctcacatcagtttgtttcaagcctttcaggaaatg

SEQ ID NO: 128557 - DNA, 75 bp, synthetic construct
  source 1..75: mol_type = other DNA
cttcacggattcaacgttacttgctgcaatgaccagagcagcaaaatttattgatgacccggacttaagaaaggc

SEQ ID NO: 128558 - DNA, 75 bp, synthetic construct
  source 1..75: mol_type = other DNA
gttatccaggctgtaaaacttccttccctgataaagacgggaaaccactaacggagaagcaaccagcgggaggag

SEQ ID NO: 128559 - DNA, 75 bp, synthetic construct
  source 1..75: mol_type = other DNA
gcaaaagggattagttcagctcagtagcgaaactaacagcgacagcgaaacaatggctgctacccctaaagcagt

SEQ ID NO: 128560 - DNA, 75 bp, synthetic construct
  source 1..75: mol_type = other DNA
cccggaaaccctcagtatcagctgtgaggtaacgttccggcacgggacgctccgcttcaatggcaatgtcagcga

SEQ ID NO: 128561 - DNA, 75 bp, synthetic construct
  source 1..75: mol_type = other DNA
taccgtcagcccggataacggttttacaaccagcattgaactcgaagtgaggataagtgatcttgaaatggaata

SEQ ID NO: 128562 - DNA, 75 bp, synthetic construct
  source 1..75: mol_type = other DNA
actaagaagcagaagaaagagcaggaagctaagcagggcgattacctggtggggacggatgaaaacgtgctggta

SEQ ID NO: 128563 - DNA, 75 bp, synthetic construct
  source 1..75: mol_type = other DNA
atttcctatcaagatatttgctgaggagggcttgaacgtaattgttccaactactgactataccgttggtcaagc

SEQ ID NO: 128564 - DNA, 75 bp, synthetic construct
  source 1..75: mol_type = other DNA
caagcaggcatctctgagctggttctgcgtgcaggaaatggaaatccaaaaggtattactggtgcattatggcga

SEQ ID NO: 128565 - DNA, 75 bp, synthetic construct
  source 1..75: mol_type = other DNA
gcatcatctgcttggttatatgtcaaagatgcgtcgcgttaacctggcaattaccgccggtagcacgcccaaagg

SEQ ID NO: 128566 - DNA, 75 bp, synthetic construct
  source 1..75: mol_type = other DNA
agagaaaaaacagaagtacaatgcaatttacgaagagttagcacgaaagaaaaacaaaaagcctcttaaaccagc

SEQ ID NO: 128567 - DNA, 75 bp, synthetic construct
  source 1..75: mol_type = other DNA
ctagacgagctacctgacagtgaaacagatgagcttttaaaaactcttgaggaaaaaaaacagaagtacaatgca

SEQ ID NO: 128568 - DNA, 75 bp, synthetic construct
  source 1..75: mol_type = other DNA
tgagggaattagcagcactcataggaacaacgccaacatatcttttgggcgaggatacagaaaatggtgcgcagg

SEQ ID NO: 128569 - DNA, 75 bp, synthetic construct
  source 1..75: mol_type = other DNA
cttgccatgcgtgaccatcttgtcaacggagattccagaagagcatcctgtgaacgacatggagttaatgcaggt

SEQ ID NO: 128570 - DNA, 75 bp, synthetic construct
  source 1..75: mol_type = other DNA
cttgttcttggaaaaagcaggaaggaggtttgtgctcaatatggcgtaagtgccggatatttaagtttatgtatt

SEQ ID NO: 128571 - DNA, 75 bp, synthetic construct
  source 1..75: mol_type = other DNA
ttgatgatccggctctcagaaaggcgctggaagcgaaagacgagggcagcagtgatcgtggcagtatcggaacgg

SEQ ID NO: 128572 - DNA, 75 bp, synthetic construct
  source 1..75: mol_type = other DNA
cgtggatgtacattaaaaggccgtgagaagggctatgacggtgttttaaatgtcggtcgggtacaaagtgccgtt

SEQ ID NO: 128573 - DNA, 75 bp, synthetic construct
  source 1..75: mol_type = other DNA
gacccggaggattatgacgaaaaatattccaggtggagtttcagtgatttaccgattaaatcggtatatcctcct

SEQ ID NO: 128574 - DNA, 75 bp, synthetic construct
  source 1..75: mol_type = other DNA
cggatatctccgctctgtgggctgaaaaacagtctcagatcaaagccggagagctaacggttgaggagtttatta

SEQ ID NO: 128575 - DNA, 75 bp, synthetic construct
  source 1..75: mol_type = other DNA
gacccggaggattatgacgaaaaatatcccaggtggagctttggtgatttaccgattaaatcggtttacccgcct

SEQ ID NO: 128576 - DNA, 75 bp, synthetic construct
  source 1..75: mol_type = other DNA
atggaagcaaaatccagatcagaaggttccatgtcccggctcgaagccccctgcccttcatgtagtaaagaaatt

SEQ ID NO: 128577 - DNA, 75 bp, synthetic construct
  source 1..75: mol_type = other DNA
atgccacagagtgatgccgacaaactcgtgctgtttaacctgatgccctggccgcgggaagaagtgatcaacacc

SEQ ID NO: 128578 - DNA, 75 bp, synthetic construct
  source 1..75: mol_type = other DNA
aatacagaaaaaaatgaggttttaaaagaattagctctctttttaccgggacagtcgcggacatttagctaccga

SEQ ID NO: 128579 - DNA, 75 bp, synthetic construct
  source 1..75: mol_type = other DNA
tcgcgtcctggtccctacaccttttaacaccgacagtgttctggccgatacccagtttggttcgctaacgcgccc

SEQ ID NO: 128580 - DNA, 75 bp, synthetic construct
  source 1..75: mol_type = other DNA
tgagcacagcggtgctcctgatcgtctgactatccgtgcccgtagcgctgatttccgtgaaaccctcaatacccg

SEQ ID NO: 128581 - DNA, 75 bp, synthetic construct
  source 1..75: mol_type = other DNA
tgaacacagcggtgcccctgaccggctgaccatccgggcgcgtagcgcagatttccgtgaaaccctcaatacacg

SEQ ID NO: 128582 - DNA, 75 bp, synthetic construct
  source 1..75: mol_type = other DNA
aaattcgcctgctgaccgcgattaccaaagagctgacgcgcctcggttccggcgtgaaaattgtggccgatgaat

SEQ ID NO: 128583 - DNA, 75 bp, synthetic construct
  source 1..75: mol_type = other DNA
gaagcggcagagtcgctggcgttgggttactggaaaacccaggggctggttattatgccacaggcgttgaagctg

SEQ ID NO: 128584 - DNA, 75 bp, synthetic construct
  source 1..75: mol_type = other DNA
gtgcacgtcatcgatctgttgcagcagtcgctacgcggtgagccgctggatctgcgcgtactgatccgccagccg

SEQ ID NO: 128585 - DNA, 75 bp, synthetic construct
  source 1..75: mol_type = other DNA
gccatatggagcgtaactctgtacgtgctgcttacattcataaggctcaacacttggatgagcgtaaaatgatgc

SEQ ID NO: 128586 - DNA, 75 bp, synthetic construct
  source 1..75: mol_type = other DNA
gatgccctggccgcgggaagaagtgatcaacaccactgtgcggctgcgcgctagccagtttaatttgcgggacga

SEQ ID NO: 128587 - DNA, 75 bp, synthetic construct
  source 1..75: mol_type = other DNA
tttcgaccttaagcgcagctccactgccaccggctttacgcgataaagcaccgcaaggcccacggcgcgaacgct

SEQ ID NO: 128588 - DNA, 75 bp, synthetic construct
  source 1..75: mol_type = other DNA
gcattaatacatccatcatcattaaacgttggccctgatatgtatcggatagttctggggaaagtttcgacctta

SEQ ID NO: 128589 - DNA, 75 bp, synthetic construct
  source 1..75: mol_type = other DNA
tgatgagtctgactctgacggacaatcggggctttgaagcagaccagcttgatctggagctggacgatgccgacg

SEQ ID NO: 128590 - DNA, 75 bp, synthetic construct
  source 1..75: mol_type = other DNA
taccgtcagccccgataacggttttacaaccagtattgaactcgaagtgaagattaatgatcttgaaatggaata

SEQ ID NO: 128591 - DNA, 75 bp, synthetic construct
  source 1..75: mol_type = other DNA
attttagggaaacgctgaatacccgccgcgaaaaatcgtggcacaagaccactgtcggggaagtggtgaaggaaa

SEQ ID NO: 128592 - DNA, 75 bp, synthetic construct
  source 1..75: mol_type = other DNA
cctggcggatcgcggagcttacacgggcgtcattgccagctggttgcatacccgtgaacccgcgaagaaagaaag

SEQ ID NO: 128593 - DNA, 75 bp, synthetic construct
  source 1..75: mol_type = other DNA
tgcggttattacgctggcgctgggctggaaagggcagccgcttttcccgaaaggggcattcacggtggacgagat

SEQ ID NO: 128594 - DNA, 75 bp, synthetic construct
  source 1..75: mol_type = other DNA
caccacggtgaagcgtaagcgcaggactaagaagcagaagaaagagctggaagcgaagcagggcgattacctggt

SEQ ID NO: 128595 - DNA, 75 bp, synthetic construct
  source 1..75: mol_type = other DNA
tgtgaagtgacgttccggcacggatcactccgtctgaatggtgccatcagcgaaaatatcctgaacctgctgata

SEQ ID NO: 128596 - DNA, 75 bp, synthetic construct
  source 1..75: mol_type = other DNA
atccagggagagatggttgatattgtggcgcatggcgagttgggcggcgacttttcattagtgcctgacagctac

SEQ ID NO: 128597 - DNA, 75 bp, synthetic construct
  source 1..75: mol_type = other DNA
ccgatagatgatgcggaatggaccattacgactctgacgcataccgtcagccccgataacggttttacaaccagt

SEQ ID NO: 128598 - DNA, 75 bp, synthetic construct
  source 1..75: mol_type = other DNA
aaacccgtggagcatatagaccagactaatgagagtgacggcagttttttgatgcggctggcgcgccagtacggt

SEQ ID NO: 128599 - DNA, 75 bp, synthetic construct
  source 1..75: mol_type = other DNA
actgtcggggaagtggtcaaggaaatagccgcgcgtcacaagctgaagatggcactgggtaatgacctgtcggat

SEQ ID NO: 128600 - DNA, 75 bp, synthetic construct
  source 1..75: mol_type = other DNA
atgcagtgggaacgcctgcaacgcggcgttgcatcattctcgctacaactggcggaagggcgggcagatctctac

SEQ ID NO: 128601 - DNA, 75 bp, synthetic construct
  source 1..75: mol_type = other DNA
gttattatgctggcacgatattggtaaatttgcccgctcctttcagcaactttatctgcacccggacctcaaggt

SEQ ID NO: 128602 - DNA, 75 bp, synthetic construct
  source 1..75: mol_type = other DNA
gaaaaggatgattacccatggctgacgcatgtcacgaaatccgatttgcattcgcaccgggtagcgacgcgcaaa

SEQ ID NO: 128603 - DNA, 75 bp, synthetic construct
  source 1..75: mol_type = other DNA
aaacccgacgtggcgagaaagagggcggcgacgactatcatctactttgctggcattcgctggatgtagccgcga

SEQ ID NO: 128604 - DNA, 75 bp, synthetic construct
  source 1..75: mol_type = other DNA
tcgccgcctttgcgcgtggtgcagagggccagcaagaagctccgttgctggaaaaagatgattatccctggctga

SEQ ID NO: 128605 - DNA, 75 bp, synthetic construct
  source 1..75: mol_type = other DNA
cggaaggatttgcccgcagcgagcaggagcaagtgggcaaatattactgcgatcgcgcaatggctaaaaagtttg

SEQ ID NO: 128606 - DNA, 75 bp, synthetic construct
  source 1..75: mol_type = other DNA
ctaccgggcatcatggtcgcccgcctgaccgtattgatgaactggataattttctgcctgaagacaaagctgccg

SEQ ID NO: 128607 - DNA, 75 bp, synthetic construct
  source 1..75: mol_type = other DNA
tgtattgaggttaaaacaaataaacctttgaacaacgtgatggatacactgaatgggggcaatgagtgcttactg

SEQ ID NO: 128608 - DNA, 75 bp, synthetic construct
  source 1..75: mol_type = other DNA
ggagaatgtattgaagttaaaacaaatgaacctttgaacaatgtgatggaaacactgaatggtggtgggcaatga

SEQ ID NO: 128609 - DNA, 75 bp, synthetic construct
  source 1..75: mol_type = other DNA
atgcatacctttatttttcttgtgctgatgaaaaatgttggcggtggcggaagctggaatgttacccccatgcca

SEQ ID NO: 128610 - DNA, 75 bp, synthetic construct
  source 1..75: mol_type = other DNA
gaaactggaagccggaacgcccaacgtcgcaggcgtcattgggttaagcgcggcgctggaatggctggcagatta

SEQ ID NO: 128611 - DNA, 75 bp, synthetic construct
  source 1..75: mol_type = other DNA
agccgcagtctggctacgctggcagaagaagcgctggcaaaacgcccgggctttcgttctttccgctgtcaggat

SEQ ID NO: 128612 - DNA, 75 bp, synthetic construct
  source 1..75: mol_type = other DNA
cctaaaggctggatggtctcaacttttcggctctgacgcgtctcaggaaaagattcttcagggaatgggggcgac

SEQ ID NO: 128613 - DNA, 75 bp, synthetic construct
  source 1..75: mol_type = other DNA
tctgctgacggactacgttgggatttttatcttcgctcaacactacactggcataacggcgatgcggtaaaagcc

SEQ ID NO: 128614 - DNA, 75 bp, synthetic construct
  source 1..75: mol_type = other DNA
tgtgctggagctggcacaactggcccctggcgaactgcgcacattgttacaaccgtttatgggcgggcaatggca

SEQ ID NO: 128615 - DNA, 75 bp, synthetic construct
  source 1..75: mol_type = other DNA
ggatggctggaatggcgggcacagtcaggacgcggaaaacgcgggcaactgcgttttctggtgacaccggaatcc

SEQ ID NO: 128616 - DNA, 75 bp, synthetic construct
  source 1..75: mol_type = other DNA
cgcacattaatggaccgctttaatgaatcactctggtccggtgatttagtcgggtcagaagaaccggatgaacaa

SEQ ID NO: 128617 - DNA, 75 bp, synthetic construct
  source 1..75: mol_type = other DNA
cgcagcccgccttcttattgaatcagtctacggtgaggacgtggtaatgccggaaggatttgcccgcagcgagca

SEQ ID NO: 128618 - DNA, 75 bp, synthetic construct
  source 1..75: mol_type = other DNA
cgggtcagaagaaccggatgaacaagcgttcagtcaaggatgtgcagcctggtttgccgacagtaacaagaaggc

SEQ ID NO: 128619 - DNA, 75 bp, synthetic construct
  source 1..75: mol_type = other DNA
gtaatgcattgctgcctggctggactattccgcaatgggaagtgcctgatgaggtcaaactaccggaaacattga

SEQ ID NO: 128620 - DNA, 75 bp, synthetic construct
  source 1..75: mol_type = other DNA
taaattatttattagcgtgaagcgtattgaagtcccccatccacagtgcctgaccttctttttacatcgccccga

SEQ ID NO: 128621 - DNA, 75 bp, synthetic construct
  source 1..75: mol_type = other DNA
cactggaaaccggaaagcagcaagatgtgctggagctggcgcaactggccccaggtgagctgcgcactctgttac

SEQ ID NO: 128622 - DNA, 75 bp, synthetic construct
  source 1..75: mol_type = other DNA
agtatcagcgtctgtggcaaccttctgccggaaggccgcaatccgtgacagtcagcgaactggctgagcgctgtt

SEQ ID NO: 128623 - DNA, 75 bp, synthetic construct
  source 1..75: mol_type = other DNA
tgggcgacaggctaattggcgaaacgccggaatataccctggagcagtggctgcgttgcgatccactctggtcat

SEQ ID NO: 128624 - DNA, 75 bp, synthetic construct
  source 1..75: mol_type = other DNA
ggatggctggagtggcaggggcagtcaggacgcggaaagcgcggacaattacgctttctggtcacgccggaatcg

SEQ ID NO: 128625 - DNA, 75 bp, synthetic construct
  source 1..75: mol_type = other DNA
aactggccggggctacgggtggaaaaactgtacgccgaatatttattgccggtgtgttcgccgctactgctgaca

SEQ ID NO: 128626 - DNA, 75 bp, synthetic construct
  source 1..75: mol_type = other DNA
atgtctaaacgattaccaccgctaaatgccttacgagtttttgatgccgcagcacgccatttaagtttcactcgc

SEQ ID NO: 128627 - DNA, 75 bp, synthetic construct
  source 1..75: mol_type = other DNA
aaaccctttgcgtttgccgaactgctcgcccgggtgagaacccttctgaggcggggaaacacgatgatcacggaa

SEQ ID NO: 128628 - DNA, 75 bp, synthetic construct
  source 1..75: mol_type = other DNA
aggcatgccgaacttgcagtaaatttatcaggctcaatggctctttttttaattaacacttggttaaaccttaaa

SEQ ID NO: 128629 - DNA, 75 bp, synthetic construct
  source 1..75: mol_type = other DNA
atcctgaaggggctattacagcatctagaacattgcttgagacggtttgtaaacacattcttgatgatttaagta

SEQ ID NO: 128630 - DNA, 75 bp, synthetic construct
  source 1..75: mol_type = other DNA
ttcgccaatggatcctggcgaaagccgctgctgaacaagaaaattccgctttcgttatgaacaataatttacgta

SEQ ID NO: 128631 - DNA, 75 bp, synthetic construct
  source 1..75: mol_type = other DNA
aattttccagtgccggatgcggcacaaaaggagccgcgcgtggcagatctcgatgattatacgcgcattgcaaat

SEQ ID NO: 128632 - DNA, 75 bp, synthetic construct
  source 1..75: mol_type = other DNA
gcgtgaactgaccccggcaattctggcggtactaccgctggaatatcgcggccacctggttgagcaggatagctt

SEQ ID NO: 128633 - DNA, 75 bp, synthetic construct
  source 1..75: mol_type = other DNA
agggcgacggcaccatcgatttccctgatgatgtcagccgtgcacgccagaagctgttccgcttcctcgataaca

SEQ ID NO: 128634 - DNA, 75 bp, synthetic construct
  source 1..75: mol_type = other DNA
cggcggggctgtcttcagtggcagatgccgtatggacggggaatcacctgaagatggtccgctttgccgtggaaa

SEQ ID NO: 128635 - DNA, 75 bp, synthetic construct
  source 1..75: mol_type = other DNA
acgtgtttgtatggtcaaatgacagggaacagtcagaacgagtgtaatgctgctgttaaggctttcaaatccatt

SEQ ID NO: 128636 - DNA, 75 bp, synthetic construct
  source 1..75: mol_type = other DNA
gcagcatcactaggaagcctttgctgcaagaaggcagatgaatgcagtggaagtatttgcctgccaaacgtagct

SEQ ID NO: 128637 - DNA, 75 bp, synthetic construct
  source 1..75: mol_type = other DNA
gtctttgatgatcgggtatatgtgtttacgccgaaaggtgatgttgttgatctgcctgcgggatcaacgccgctg

SEQ ID NO: 128638 - DNA, 75 bp, synthetic construct
  source 1..75: mol_type = other DNA
tacgagcagtcacgccagtcatttggcattaacgttcttggcacgttgattgttgaagttgaagcagaaaacggc

SEQ ID NO: 128639 - DNA, 75 bp, synthetic construct
  source 1..75: mol_type = other DNA
cggtgatcacctttaccaatactcccttcagtgaattcctgatgaccagcccggattgttcaacgatgcgtccgc

SEQ ID NO: 128640 - DNA, 75 bp, synthetic construct
  source 1..75: mol_type = other DNA
caaaataataataaagattatatcgataaactcgttatcccattccaagatctcaagaccagatttgatgcggca

SEQ ID NO: 128641 - DNA, 75 bp, synthetic construct
  source 1..75: mol_type = other DNA
ggtggttcgtgtgctggcgaatgatcgtagcgggttgttacgtgatatcacgaccattctcgccaacgagaaggt

SEQ ID NO: 128642 - DNA, 75 bp, synthetic construct
  source 1..75: mol_type = other DNA
ggcaaatccttgacgacgagctggaacatctggggatcagcctgaaagaagcagaaaaacacctgctgccgcgtt

SEQ ID NO: 128643 - DNA, 75 bp, synthetic construct
  source 1..75: mol_type = other DNA
cctggcaaatctcaggatagagccgcggtaaaagtcttgcagcaatttaaagacgatatcaccagcggaccaaat

SEQ ID NO: 128644 - DNA, 75 bp, synthetic construct
  source 1..75: mol_type = other DNA
ttcgagggctgttcgtggtgatatgtcgcctgaagcaaaggctgctgtcgactttgcatcggaaagaaatctgcc

SEQ ID NO: 128645 - DNA, 75 bp, synthetic construct
  source 1..75: mol_type = other DNA
gctgcctatccactaccatctacgaatgaaatagaccgatcccaatcagcaactcaaaatattcaacatacatca

SEQ ID NO: 128646 - DNA, 75 bp, synthetic construct
  source 1..75: mol_type = other DNA
tatgaacagtcccgtcagtcatttggcattaacgtccttggtacgttaattgttgaagtcgaagcggaaaatggc

SEQ ID NO: 128647 - DNA, 75 bp, synthetic construct
  source 1..75: mol_type = other DNA
ggtgcgcgtccggatctggcaaaagagatgggctttatcggtggcaaaatgccgacgcactgggggccacatgat

SEQ ID NO: 128648 - DNA, 75 bp, synthetic construct
  source 1..75: mol_type = other DNA
accaaactggcccacgcttgcgcgccctataacctgaaatggatcgaagagtgcctgccgccacagcagtatgaa

SEQ ID NO: 128649 - DNA, 75 bp, synthetic construct
  source 1..75: mol_type = other DNA
gacgactctggatcaagatgttgttattaacggtgataacaagattacagccgtaacaattgaaacgtcagattc

SEQ ID NO: 128650 - DNA, 75 bp, synthetic construct
  source 1..75: mol_type = other DNA
tctgcaaaacgggtctgtctggaatgttacgggatcctcaactgttgatgctctggcagtaaaagacagtacggt

SEQ ID NO: 128651 - DNA, 75 bp, synthetic construct
  source 1..75: mol_type = other DNA
ctgctggaaacggcacatagccgggtggcgtggctatctgacaccgctggcctgccggaaaaacacagaaatttt

SEQ ID NO: 128652 - DNA, 75 bp, synthetic construct
  source 1..75: mol_type = other DNA
cctttgctaacttcgtccgcggcattggttcggtggtggcaaactacgatgttgatcgccatgaagatgctgata

SEQ ID NO: 128653 - DNA, 75 bp, synthetic construct
  source 1..75: mol_type = other DNA
ctaaaagcaaagcgcgttctctggttatgtcttatgcagacgtatttcacagcttcagtaagcgaagatgatgat

SEQ ID NO: 128654 - DNA, 75 bp, synthetic construct
  source 1..75: mol_type = other DNA
cataaatgctcaaggtaataagagttccagcaacgcctccacggcaatttttgctcaaaagggtagcgtattgaa

SEQ ID NO: 128655 - DNA, 75 bp, synthetic construct
  source 1..75: mol_type = other DNA
tggtcgatctcgtcagccgcaaagtcacccgcagcggtacgcgcatcactctgaccagtaaagaatttactctgc

SEQ ID NO: 128656 - DNA, 75 bp, synthetic construct
  source 1..75: mol_type = other DNA
gcctcgcaggtgtgggacatgaatttcgacagcgacactaacgccattgatgtggcggtgaagcggctgcgcggc

SEQ ID NO: 128657 - DNA, 75 bp, synthetic construct
  source 1..75: mol_type = other DNA
aaaagaaaaccggcgaatacttaaccaaagggttaaccgaggccggttttgtggttgatttggccgataacgggc

SEQ ID NO: 128658 - DNA, 75 bp, synthetic construct
  source 1..75: mol_type = other DNA
gcactggcggcgcacagggcgttccggcatggggctgcgagtgcgcggcctgcgccagagcgcggcgctcgccgc

SEQ ID NO: 128659 - DNA, 75 bp, synthetic construct
  source 1..75: mol_type = other DNA
aagtggacctgctatccgacgagatcatgagtcatatagaagctggtaaggttgcaaccacagttgcggttaact

SEQ ID NO: 128660 - DNA, 75 bp, synthetic construct
  source 1..75: mol_type = other DNA
tgagcaatctcgtaagctgaagaagtcggaaaaaaacaccctgaaggatgaagttctccactctttgttgcctcg

SEQ ID NO: 128661 - DNA, 75 bp, synthetic construct
  source 1..75: mol_type = other DNA
gaatagtgttgacgatctcaaattagaaaatattagtgttgttatcaagtcatcctcaggacaggacgggacggg

SEQ ID NO: 128662 - DNA, 75 bp, synthetic construct
  source 1..75: mol_type = other DNA
ttttatttgtttttatttgtttgacagttgcatgtaaagagcaattgtatacaggattaacggaaaaagaagcca

SEQ ID NO: 128663 - DNA, 75 bp, synthetic construct
  source 1..75: mol_type = other DNA
ttctttcacaccaaaaaagaaaacccacactgaaccgaagaaagaaaaagtgaaagtaagacgtatttatgctgg

SEQ ID NO: 128664 - DNA, 75 bp, synthetic construct
  source 1..75: mol_type = other DNA
aatcgcagactggcgaccgctgggagagagtggttagcgatgtcacttctggtaaaccgttgaccatcaccctgc

SEQ ID NO: 128665 - DNA, 75 bp, synthetic construct
  source 1..75: mol_type = other DNA
agacaaagaattgcaactgaatattaagtcagggctgattaacgatgttaccaatggtaagcaattgaccatcac

SEQ ID NO: 128666 - DNA, 75 bp, synthetic construct
  source 1..75: mol_type = other DNA
tcatgcagataaaaaacttagttaagaatagtgtagacgacctcaaattagaaaatatcagtgttgttatcaagt

SEQ ID NO: 128667 - DNA, 75 bp, synthetic construct
  source 1..75: mol_type = other DNA
agcttgccacatggacagcaaccgccccgtcccgacggattacacggctactgcgtctgataacacaaccagaat

SEQ ID NO: 128668 - DNA, 75 bp, synthetic construct
  source 1..75: mol_type = other DNA
cagtgcagacttatcaggtgctgcctgctccgggcgcggccccggctgaaccgctgccgccgggggagccaacgc

SEQ ID NO: 128669 - DNA, 75 bp, synthetic construct
  source 1..75: mol_type = other DNA
aaccaaactttgccgggattgtcggcttaagcaataccgcgtttacactgcgtgtttcgttcaccacgctgccac

SEQ ID NO: 128670 - DNA, 75 bp, synthetic construct
  source 1..75: mol_type = other DNA
tgattttacttttacaccaagaaagaaaactcacactgattcaaagaaagaaaaagttaaagtcagacgtgttta

SEQ ID NO: 128671 - DNA, 75 bp, synthetic construct
  source 1..75: mol_type = other DNA
aaaccgccagctacagcgatcgtgcgcgactgttccgcgaaatggagagcgaagccgtacctgaaacgccgctcg

SEQ ID NO: 128672 - DNA, 75 bp, synthetic construct
  source 1..75: mol_type = other DNA
gtggtgaaagaggcgcaggtggatgcgtttcgatctcagtcggcaacgctgtgcctggtccagtcgattgttgta

SEQ ID NO: 128673 - DNA, 75 bp, synthetic construct
  source 1..75: mol_type = other DNA
tatttttaaatatgacttgtttttattgccttcaaaatgggaaggaatgccattagctatacttgaggcaatggc

SEQ ID NO: 128674 - DNA, 75 bp, synthetic construct
  source 1..75: mol_type = other DNA
tatgagcggcaaaaagcgatgctcacccagtcagagatcaaactgcttcacgcccaggtgaacccccattttttg

SEQ ID NO: 128675 - DNA, 75 bp, synthetic construct
  source 1..75: mol_type = other DNA
cctgcaaccaatagtggaaaacgctattaaacatggaacctcacaactgctggatacagggcgagtggcaattag

SEQ ID NO: 128676 - DNA, 75 bp, synthetic construct
  source 1..75: mol_type = other DNA
atataacattgccgataaagtaagttttttgggctggatagatgctgtagaagaacatttatataaatatgatct

SEQ ID NO: 128677 - DNA, 75 bp, synthetic construct
  source 1..75: mol_type = other DNA
ctctaaaacaggttttcttgggcgtgttgcagcaaaattagctggtacgaaaaaaatagtgcatacggttcacgg

SEQ ID NO: 128678 - DNA, 75 bp, synthetic construct
  source 1..75: mol_type = other DNA
ttacacgcaaatcctgaacttagaaataatctcgcacataaagcgtatcaggcactaatagaagatttcgaccta

SEQ ID NO: 128679 - DNA, 75 bp, synthetic construct
  source 1..75: mol_type = other DNA
gcggcttctggggctgagtaacaaaatcctgctggccgatgagattcacgcctgtgacgcttacatgtcttgcat

SEQ ID NO: 128680 - DNA, 75 bp, synthetic construct
  source 1..75: mol_type = other DNA
cttacatgtcgtgcattcttgaagggctgatcgagcggcaggcgcgtggcggaaacagcgttattttgctttctg

SEQ ID NO: 128681 - DNA, 75 bp, synthetic construct
  source 1..75: mol_type = other DNA
gactctccgggtgacgaatggtttggtagtgcgatgcgtaacagcgcatatgtctaccccgatcatgggcgaatc

SEQ ID NO: 128682 - DNA, 75 bp, synthetic construct
  source 1..75: mol_type = other DNA
ctcgccgacgaaattgaacatgtgaatgcttatctgcaaattgaaaaggcgcgcttccagtcgcggttgcaggtc

SEQ ID NO: 128683 - DNA, 75 bp, synthetic construct
  source 1..75: mol_type = other DNA
ctcgccgatgaaattgaacatgtaaatgcttatctgcaaattgaaaaagcgcgctttcagtcgcggttacaggtc

SEQ ID NO: 128684 - DNA, 75 bp, synthetic construct
  source 1..75: mol_type = other DNA
gctgcgccaatgatggtcaccaataccgtcggcgcggcgctgtttatgcgtatattgctcgataaacgcgcgatg

SEQ ID NO: 128685 - DNA, 75 bp, synthetic construct
  source 1..75: mol_type = other DNA
caccggataagatatcaatacaccgatgagtttacgtcgcgttctggaaactattatgcagatgaaattgctgaa

SEQ ID NO: 128686 - DNA, 75 bp, synthetic construct
  source 1..75: mol_type = other DNA
tgaagaacgcctcagcgaggcagtggacaccatcatgctggactacccgcctgagcttcgtcgcaacggcatcac

SEQ ID NO: 128687 - DNA, 75 bp, synthetic construct
  source 1..75: mol_type = other DNA
tctgcacaacagccaggccgatgttgacgagttcagcgagaagccgccgggtaacaccatgctgctcggcagtac

SEQ ID NO: 128688 - DNA, 75 bp, synthetic construct
  source 1..75: mol_type = other DNA
gggcgtgtagaaaaactggaaaaacgcaaaaaaagtattaaagaaaagaaagatgatattaacattcatgtgaag

SEQ ID NO: 128689 - DNA, 75 bp, synthetic construct
  source 1..75: mol_type = other DNA
tacgggtctttatcttaccccctttatatccagcctgagaatcgatatacatccacaatatattaccagatcatc

SEQ ID NO: 128690 - DNA, 75 bp, synthetic construct
  source 1..75: mol_type = other DNA
atgagcctgaccctcacgctcaccggcactggcggcgcacagggcgttccggcatggggctgcgggtgcgcggcc

SEQ ID NO: 128691 - DNA, 75 bp, synthetic construct
  source 1..75: mol_type = other DNA
accgcgccgattgcgaacaattggcggaactgcgctcccatgcgccagaacgcattgttgacgcggtatggggtg

SEQ ID NO: 128692 - DNA, 75 bp, synthetic construct
  source 1..75: mol_type = other DNA
gaacactatatcgaagagtttgtcggccatctgcgcgctgagatgaaagctgaaggcgttaaagctgaagtgtat

SEQ ID NO: 128693 - DNA, 75 bp, synthetic construct
  source 1..75: mol_type = other DNA
gttttcaaaattcgccctcgacatgctgaaggtcattcgaaagctcaacggcattttcttcccggccacgcagtc

SEQ ID NO: 128694 - DNA, 75 bp, synthetic construct
  source 1..75: mol_type = other DNA
tggtgattgattgcagccacccgccgcgcgaggatgcaccgcgtaatcactgtgatttaaataccgtgcttgcgc

SEQ ID NO: 128695 - DNA, 75 bp, synthetic construct
  source 1..75: mol_type = other DNA
gctggggcgtgggcgatcagatcccggtctacggcccgccggatgaacagggctgcgacgatctgtttaaacatc

SEQ ID NO: 128696 - DNA, 75 bp, synthetic construct
  source 1..75: mol_type = other DNA
tcaccagtaacagcctgagcattgtggcattcgatgattatggcgttgataaagagtataaattaaataaatcct

SEQ ID NO: 128697 - DNA, 75 bp, synthetic construct
  source 1..75: mol_type = other DNA
gaaacccctcttactcctgatggacctaaagccaattatacggaagagtgggttatcagaccagcggaagctgat

SEQ ID NO: 128698 - DNA, 75 bp, synthetic construct
  source 1..75: mol_type = other DNA
tcattttaaatgggatttagataatcctaataccaaatatgccattcttaccaatgcacttgcgaatgcagctgg

SEQ ID NO: 128699 - DNA, 75 bp, synthetic construct
  source 1..75: mol_type = other DNA
tgaagatgtggtcatcgatatcgaaagctctccacataataatccatcaaattatgttgatacggttgatataat

SEQ ID NO: 128700 - DNA, 75 bp, synthetic construct
  source 1..75: mol_type = other DNA
gaccgcaccgcggagttttaccgtcgacaccatccgtaaagccatgcgtagtctctacggccgtcgctggggacg

SEQ ID NO: 128701 - DNA, 75 bp, synthetic construct
  source 1..75: mol_type = other DNA
ttctgggggcagaaacacgccgggatcaaatactactgctgatattgctgagtctggggttgctctttgtctgtt

SEQ ID NO: 128702 - DNA, 75 bp, synthetic construct
  source 1..75: mol_type = other DNA
atgaacattcaaccgatcgtacaatccggaattaccacacaaaacaatcaacatcatcacacagaacaaacatcc

SEQ ID NO: 128703 - DNA, 75 bp, synthetic construct
  source 1..75: mol_type = other DNA
tatgtcgatatgcgcctggaggatatgaccggtgataccgatgctgcccgcctgttcagtactaccgaaattgtg

SEQ ID NO: 128704 - DNA, 75 bp, synthetic construct
  source 1..75: mol_type = other DNA
tgatagctacagtaccgttaatttaaccgaatctaccggttggaataattattctaatctgtataccaatactat

SEQ ID NO: 128705 - DNA, 75 bp, synthetic construct
  source 1..75: mol_type = other DNA
tagtatcacaattagcattggcttgcactctggctatcacctctcaggctaatgcagcgacctatgacacctgga

SEQ ID NO: 128706 - DNA, 75 bp, synthetic construct
  source 1..75: mol_type = other DNA
ccacctttcggtctcgtccggaaaaaatcctatggtaatgaggacgcacacgcttattgtgattggtttcgtcca

SEQ ID NO: 128707 - DNA, 75 bp, synthetic construct
  source 1..75: mol_type = other DNA
atgtttttgcaagccacttcttaattgactcaagactagttttgcccacaatgactgttgaagatataagcaaaa

SEQ ID NO: 128708 - DNA, 75 bp, synthetic construct
  source 1..75: mol_type = other DNA
ccatgcgagattcactgttgcgcatgaacttggtcatttagtcatgcatcgcaatcaaagtatctatgcacgtaa

SEQ ID NO: 128709 - DNA, 75 bp, synthetic construct
  source 1..75: mol_type = other DNA
acggtcagaagaaaacgacccgaccagacagggctgaggcattaaaacgagctcatgaagctgccgcgtatgatg

SEQ ID NO: 128710 - DNA, 75 bp, synthetic construct
  source 1..75: mol_type = other DNA
tgccggtaggcttgccgggtctggctgctgcctgttttattctcggcgtactgctgtacagcacggtagttcgtg

SEQ ID NO: 128711 - DNA, 75 bp, synthetic construct
  source 1..75: mol_type = other DNA
atgaaacaagcaaatcaagatagaggtacgctgctgctggcgttagttgctggcttatcgattaatggtactttc

SEQ ID NO: 128712 - DNA, 75 bp, synthetic construct
  source 1..75: mol_type = other DNA
gccattgcagcaaaatatcttcgaagtgatggagaaacttcgcgaaatttatcctcaacgaaagtttgtgatgag

SEQ ID NO: 128713 - DNA, 75 bp, synthetic construct
  source 1..75: mol_type = other DNA
aagcgcagcgtgaaagtctggccaccctgaaaggtgaatttattgatggcaaatatatgcgcgtgcatcgcacca

SEQ ID NO: 128714 - DNA, 75 bp, synthetic construct
  source 1..75: mol_type = other DNA
cagtattgatgaccctcgcccgagtattccgcatgacactgtggaagccagatttgcagaaaaacgtgaagcact

SEQ ID NO: 128715 - DNA, 75 bp, synthetic construct
  source 1..75: mol_type = other DNA
gcacaatgttatacccctgcgttaaagccagacactattttatggtgggctggtactactctaggactggctgat

SEQ ID NO: 128716 - DNA, 75 bp, synthetic construct
  source 1..75: mol_type = other DNA
cctaataaagaagatattgcccgtgcaacaggggctgatatacgagctatggaagaaggtatccctgttggacag

SEQ ID NO: 128717 - DNA, 75 bp, synthetic construct
  source 1..75: mol_type = other DNA
ctggggattttgctgtttgatgagttattggttcacttatggcgcaggctggtcgctttaaattttattgagaaa

SEQ ID NO: 128718 - DNA, 75 bp, synthetic construct
  source 1..75: mol_type = other DNA
atgcttaaaaccttccgtgttttttcccgtgccgttaatgcacgcggctataccgttggcatcacgcagaacgtg

SEQ ID NO: 128719 - DNA, 75 bp, synthetic construct
  source 1..75: mol_type = other DNA
gcttggtgctgtagggggatttgcagtatccagatttactagtacagatccaatgttaagtcctcatatcggtgc

SEQ ID NO: 128720 - DNA, 75 bp, synthetic construct
  source 1..75: mol_type = other DNA
aatgttacccaaatggcattagagatacctagttccgtttcaggcatctctggtaaatatggtgtccagctaaac

SEQ ID NO: 128721 - DNA, 75 bp, synthetic construct
  source 1..75: mol_type = other DNA
taagtggatcgtcggtgcagcagcaggcttcgctaaaggtgacatgaacgaccgttctggtcaggtagatcaaga

SEQ ID NO: 128722 - DNA, 75 bp, synthetic construct
  source 1..75: mol_type = other DNA
aatcacgcccccttctccctttttccttttcccgtacacagcgaattttgttgctgcgtgaacaggaagggaacc

SEQ ID NO: 128723 - DNA, 75 bp, synthetic construct
  source 1..75: mol_type = other DNA
agacctgctaaatttaaagtagtatattcgatagatggaggtcgcccgattgaaaaagtatttaacaatgcaccc

SEQ ID NO: 128724 - DNA, 75 bp, synthetic construct
  source 1..75: mol_type = other DNA
ctactgtaacttctggttcatggactgaagacgaacaatcagatcgtggtcatttcggcaattctgttgaaccaa

SEQ ID NO: 128725 - DNA, 75 bp, synthetic construct
  source 1..75: mol_type = other DNA
cactctggctatcacctctcaggctaatgcagctacttataacaccttcgggtatcacgatgacgcagccaccat

SEQ ID NO: 128726 - DNA, 75 bp, synthetic construct
  source 1..75: mol_type = other DNA
aacggtgaagttaacactgatcacctgatcattgataccttctctactgttaacttcggtgaagatactgcttca

SEQ ID NO: 128727 - DNA, 75 bp, synthetic construct
  source 1..75: mol_type = other DNA
cttttaatgtggctttccggcgagtatatgaccgcaaatggtcaatggggactaaacgtcctacaaaccgccgac

SEQ ID NO: 128728 - DNA, 75 bp, synthetic construct
  source 1..75: mol_type = other DNA
cccgatgggtattgtaatccgcgacttcgcatctccggaattctggaccgcagtcggttctgcaccggaaaattt

SEQ ID NO: 128729 - DNA, 75 bp, synthetic construct
  source 1..75: mol_type = other DNA
gagcggtcaggaaaggaaaagtaccgcctactgttttagctgaggttagggccaaaattaaagtgcttatcgggt

SEQ ID NO: 128730 - DNA, 75 bp, synthetic construct
  source 1..75: mol_type = other DNA
cggtattgaaaattaatattggtagctcctggcgtctgctcagtacggacaacgggcaaagctggaagctgatga

SEQ ID NO: 128731 - DNA, 75 bp, synthetic construct
  source 1..75: mol_type = other DNA
atgccggataacaggaatatcagtcatcatcaatccgcccggatatttccggaatgtgtcacgcctgttccggag

SEQ ID NO: 128732 - DNA, 75 bp, synthetic construct
  source 1..75: mol_type = other DNA
acagtatcgcaaacatgtttatgatcccgatgggtattgtaatccgcgacttcgctacaccggaattctggaccg

SEQ ID NO: 128733 - DNA, 75 bp, synthetic construct
  source 1..75: mol_type = other DNA
atcatgagcgcaatacgccatatggtgttgccggttatcaccctgtcggttgcgccaacaactgaagtgatccga

SEQ ID NO: 128734 - DNA, 75 bp, synthetic construct
  source 1..75: mol_type = other DNA
ctgatccactgggattttggcgtttccagcattaacggacaaccgatagccgaacagttaaaagaggtttttccg

SEQ ID NO: 128735 - DNA, 75 bp, synthetic construct
  source 1..75: mol_type = other DNA
tgcaccgactaccgaagtgatccgtctgatgcgtatcagcaccatcgaagtgtatgaccagaactatgtgaaagc

SEQ ID NO: 128736 - DNA, 75 bp, synthetic construct
  source 1..75: mol_type = other DNA
ctcagggtaataccgtaaacaatacttacactactgaatctcatacttgggataacaatatctcagttaccgatt

SEQ ID NO: 128737 - DNA, 75 bp, synthetic construct
  source 1..75: mol_type = other DNA
gatcagttcgatactgaagctttccgtaccgataaactggaactgaccagcggcaacatcgctgaccataacggt

SEQ ID NO: 128738 - DNA, 75 bp, synthetic construct
  source 1..75: mol_type = other DNA
catactgatgatggctcagggaaccggaatggtggtttcctttctggcaaaccggagtctggttgctgaagtaca

SEQ ID NO: 128739 - DNA, 75 bp, synthetic construct
  source 1..75: mol_type = other DNA
aacggaccatcgccaatgctcttggcactctcccctgcattgcctgctacatgcatggagtaatatctgaagagg

SEQ ID NO: 128740 - DNA, 75 bp, synthetic construct
  source 1..75: mol_type = other DNA
tacagatactggcaataccctgaacattaccaattcaaatgttcatggcatggtcacctcatatcaggttggtta

SEQ ID NO: 128741 - DNA, 75 bp, synthetic construct
  source 1..75: mol_type = other DNA
actcagttcagcttcaccaagaacttcagcgcctataccgatgctaactacctcggtggtggtgacgtagatcaa

SEQ ID NO: 128742 - DNA, 75 bp, synthetic construct
  source 1..75: mol_type = other DNA
ctaatccactgggattttggcgtttccagcattaacggtcagccgattgccgagcagttaaaagaggtcttcccg

SEQ ID NO: 128743 - DNA, 75 bp, synthetic construct
  source 1..75: mol_type = other DNA
tattgcccgtgatcaccctgtcggttgcgccaacaactgaagtgatccgcctgatgcgtatcagcactatcgaag

SEQ ID NO: 128744 - DNA, 75 bp, synthetic construct
  source 1..75: mol_type = other DNA
tccctgttcatgctgatggaaaaataggcggaaaagcagatttcatgcggcacaatgccgatgaaatggcgttgt

SEQ ID NO: 128745 - DNA, 75 bp, synthetic construct
  source 1..75: mol_type = other DNA
atcgttcagacattcagcggcctgcgccgcgtggttaaaacgtcctgtatcgacggctgtaccgtcgtatggcaa

SEQ ID NO: 128746 - DNA, 75 bp, synthetic construct
  source 1..75: mol_type = other DNA
ggattctgcggagctgataaataagttaacagcaacattaaccaatatgattgaggaactggaaccagatgaagc

SEQ ID NO: 128747 - DNA, 75 bp, synthetic construct
  source 1..75: mol_type = other DNA
ataaagagcagggtaaccaggttaacaacggccttgagttaaccgctgccgggaatgtgtggcaggggctgaata

SEQ ID NO: 128748 - DNA, 75 bp, synthetic construct
  source 1..75: mol_type = other DNA
tttaataaagacactatccagattgcggagacggataccacgccagtactgatatttgcccgcgcctgtgacatc

SEQ ID NO: 128749 - DNA, 75 bp, synthetic construct
  source 1..75: mol_type = other DNA
atggcggttaaaatcacgcctgaagagttcagtctgttaatccagagactgaacgcgagatggcgcgtcctggca

SEQ ID NO: 128750 - DNA, 75 bp, synthetic construct
  source 1..75: mol_type = other DNA
gcgagcctgaagaggcagaggccatcgcgccggggctgaccgggcaacactggctggagggcgaccacacggtgc

SEQ ID NO: 128751 - DNA, 75 bp, synthetic construct
  source 1..75: mol_type = other DNA
tatctggaaaaaccacgccgcaaaacggaagcgttaatctttggctctcacgacaactcaacgcttgagatgact

SEQ ID NO: 128752 - DNA, 75 bp, synthetic construct
  source 1..75: mol_type = other DNA
cgatgccttacgacgtattttgctgctactgatgcaatatgccgtgacctcaacgcaattgggaaaaatcaccct

SEQ ID NO: 128753 - DNA, 75 bp, synthetic construct
  source 1..75: mol_type = other DNA
agcaagggcggatagcctttatgaaaaacatcggcgatgcactgaaagaaccggccctggagcttgccgaacgtg

SEQ ID NO: 128754 - DNA, 75 bp, synthetic construct
  source 1..75: mol_type = other DNA
acagttgggcggaacgccagcgttaccagggcaacagttgaacgcctcgattattgctcagacgcggttaaaaaa

SEQ ID NO: 128755 - DNA, 75 bp, synthetic construct
  source 1..75: mol_type = other DNA
aagaggaagaagagcgattactggatgatgtctgcgtaatggtggatgttacttcggcagaaattcggaatattg

SEQ ID NO: 128756 - DNA, 75 bp, synthetic construct
  source 1..75: mol_type = other DNA
ctaaatctggtacccggcaagcagttatgtgaaacgctggaacatctgattcgtgagaaggtgatgctgccaact

SEQ ID NO: 128757 - DNA, 75 bp, synthetic construct
  source 1..75: mol_type = other DNA
tatgctagtagatggctggaaaaatccaagtggaaatttgaacatgttgagcaaggaataaataccttatctgca

SEQ ID NO: 128758 - DNA, 75 bp, synthetic construct
  source 1..75: mol_type = other DNA
gctgttccgactggaacgtccgtttgcctatcttgatacggataacgtgtataaagagcagggtaaccaggttaa

SEQ ID NO: 128759 - DNA, 75 bp, synthetic construct
  source 1..75: mol_type = other DNA
cagggcggtaccgcaccgacggatgagagcgtaaaaaatgccggtcaaacgctaaacccgtatcgcagcaagcag

SEQ ID NO: 128760 - DNA, 75 bp, synthetic construct
  source 1..75: mol_type = other DNA
acgatcccaatgatcctttccgtagtctgtggctttatctcgccgagaagaagctcgatgagaagcaggctaaag

SEQ ID NO: 128761 - DNA, 75 bp, synthetic construct
  source 1..75: mol_type = other DNA
gtgttttcactcagctatgaacaactgacccggtttgcggaacaacgcatccggaaatgcaatctggacagccag

SEQ ID NO: 128762 - DNA, 75 bp, synthetic construct
  source 1..75: mol_type = other DNA
tatactggccggtcagagcctcggtggagtgacagcactgatggcagctatatatgcgtcgacaacatttggtac

SEQ ID NO: 128763 - DNA, 75 bp, synthetic construct
  source 1..75: mol_type = other DNA
tcttaagcagtatgatgtacctattattgtttttggcctaggtattcaatcgagttctcgagatataaataaagc

SEQ ID NO: 128764 - DNA, 75 bp, synthetic construct
  source 1..75: mol_type = other DNA
ttaacccaggctgagatcgctgagcgtatgggaaccaaagcaactgtcatcagcagaatggaaagtaatctggcg

SEQ ID NO: 128765 - DNA, 75 bp, synthetic construct
  source 1..75: mol_type = other DNA
atggcggttaaaatcacgcctgaagagttcagtctgttaatccggcgactgagcacgcaatggcgcgtcatggcg

SEQ ID NO: 128766 - DNA, 75 bp, synthetic construct
  source 1..75: mol_type = other DNA
aaatattatgatggcattctgtatctgacgaccagggggacattaagtactcaacccggtagttcattgcacaga

SEQ ID NO: 128767 - DNA, 75 bp, synthetic construct
  source 1..75: mol_type = other DNA
ttgatgtagtgcaggagacagaccttcgcaatcagggaaagtttttccccgaagtgcatgaagatgcctttgact

SEQ ID NO: 128768 - DNA, 75 bp, synthetic construct
  source 1..75: mol_type = other DNA
aaatgtaccactcagccgcaccttcgtgaaagcgcttaagcaccagctaaacaagaatgcggattatcgtcttga

SEQ ID NO: 128769 - DNA, 75 bp, synthetic construct
  source 1..75: mol_type = other DNA
gagcctcttatcgtcggttatattccggccagtgcagaagagctggcgcatacaggcattgacgatattgatatg

SEQ ID NO: 128770 - DNA, 75 bp, synthetic construct
  source 1..75: mol_type = other DNA
tgtttctatggttacggatgctgctggcatactggttactgatgcaatggcgctacttgatggattgaggaaaga

SEQ ID NO: 128771 - DNA, 75 bp, synthetic construct
  source 1..75: mol_type = other DNA
ccccgggaggccaggtcgttaatcgaacaggctgaaaaacggcagaaggatgcgcaaaacgcagacaagaaggcc

SEQ ID NO: 128772 - DNA, 75 bp, synthetic construct
  source 1..75: mol_type = other DNA
cacgtatgactcgcctggcaccggtagtcgtagatgttccagacgatgtcctggttctgcgcgttattggcccgc

SEQ ID NO: 128773 - DNA, 75 bp, synthetic construct
  source 1..75: mol_type = other DNA
ggagttccagccactgcgcaccatggctcgttctggtattcaaccgatccctggacgcctggcattcttcccgaa

SEQ ID NO: 128774 - DNA, 75 bp, synthetic construct
  source 1..75: mol_type = other DNA
cttaccgtgacggctatgaactttatcagcgtgcccgctctgcagaaaaaacactgcagattgtgaaaggggtat

SEQ ID NO: 128775 - DNA, 75 bp, synthetic construct
  source 1..75: mol_type = other DNA
ttatttactgactttcctgtttgccattatcggcggtattaccgaatgggtactcaaccgccgccgctctcacgc

SEQ ID NO: 128776 - DNA, 75 bp, synthetic construct
  source 1..75: mol_type = other DNA
ttgctgtcggggatctttttgattctgatggggctggcacgctttgggcgcctgattgagtatattccggtttcc

SEQ ID NO: 128777 - DNA, 75 bp, synthetic construct
  source 1..75: mol_type = other DNA
tgtcactctgagtgataacagcagacgtattgatgtggatatcaaccttgataaccaggctgacgatcatcgcct

SEQ ID NO: 128778 - DNA, 75 bp, synthetic construct
  source 1..75: mol_type = other DNA
cgttactctgaagatcacgcgcagatcaaagagtgggcaccgttagtgatggaagggcgcgatccgcaacagaaa

SEQ ID NO: 128779 - DNA, 75 bp, synthetic construct
  source 1..75: mol_type = other DNA
aagcgtgatgccgataaaggtggtgtactgcgtctgggtactgaagtcgtcagtgaccagcaagggaccattgcc

SEQ ID NO: 128780 - DNA, 75 bp, synthetic construct
  source 1..75: mol_type = other DNA
tacggtttatataccgcagctgttgcggggattgtcattgctctgacgggagggtcacgctttagcgtttccggt

SEQ ID NO: 128781 - DNA, 75 bp, synthetic construct
  source 1..75: mol_type = other DNA
aatgcgcaacgggcaacttagcgagctgacaggcgaagagcgcgatgctgcttcgcgtgatgccgttgcccggac

SEQ ID NO: 128782 - DNA, 75 bp, synthetic construct
  source 1..75: mol_type = other DNA
tgcaatttacttccaataaaaaaggccagaaacgaccttgctcatggttctgaatcatttagaaacaaaggcaga

SEQ ID NO: 128783 - DNA, 75 bp, synthetic construct
  source 1..75: mol_type = other DNA
gcaaccagcgcgttcttctctcaccgcgatcccgcaatggtggaatggctgactggccgcaaacttgatgtttaa

SEQ ID NO: 128784 - DNA, 75 bp, synthetic construct
  source 1..75: mol_type = other DNA
gcaataataatgagaaagagacgacggatagcgtcagtatcaacttcaatagttcaaaaatagagatctcctcag

SEQ ID NO: 128785 - DNA, 75 bp, synthetic construct
  source 1..75: mol_type = other DNA
aacgatatcgtcgattcacgccgtgcagagatgttacagcaggctaacgcactagatgaacgagaaagcttttcc

SEQ ID NO: 128786 - DNA, 75 bp, synthetic construct
  source 1..75: mol_type = other DNA
cgacccgcttttcactcctaccggggagcattacccgcttctttttactgttgatcattgtgttactggtgacga

SEQ ID NO: 128787 - DNA, 75 bp, synthetic construct
  source 1..75: mol_type = other DNA
acaaaaaacaagttcaagcagataaaaaccccctattttcgggaaatgttgacgcacagaaaattagggatgttg

SEQ ID NO: 128788 - DNA, 75 bp, synthetic construct
  source 1..75: mol_type = other DNA
attgaaagattccttgatgccataagaacagatattctctttgccaagaatgttattctaattgaaggtgatgct

SEQ ID NO: 128789 - DNA, 75 bp, synthetic construct
  source 1..75: mol_type = other DNA
catcgattgaagaggttaagaggctttctgagggcatattattatcaataactaatgctgttggtactacttact

SEQ ID NO: 128790 - DNA, 75 bp, synthetic construct
  source 1..75: mol_type = other DNA
ccgcaaccagcgccttcttctctcaccgcgacccggcgatggtggaatggctgacgggccgcaaacttgatgttt

SEQ ID NO: 128791 - DNA, 75 bp, synthetic construct
  source 1..75: mol_type = other DNA
gggccaaagcccagttcgaacgctctctgaatcgactgcaacttgattacgttgacctgtatttgattcaccagc

SEQ ID NO: 128792 - DNA, 75 bp, synthetic construct
  source 1..75: mol_type = other DNA
ttacctcgaagaaatcctagaaaatatacaaaaatatcttgatgatcgcttatacatacgatcatcaagtttaca

SEQ ID NO: 128793 - DNA, 75 bp, synthetic construct
  source 1..75: mol_type = other DNA
cggacacgctggggctgtcttccaccggcgggtgggactggcagtcgcatattaatcaggcgtccttccgcggtg

SEQ ID NO: 128794 - DNA, 75 bp, synthetic construct
  source 1..75: mol_type = other DNA
gcgtgcggacgagctggtacaggcggtctctcccgtccatccggcgttcatgccgctttccttcacagcgagaaa

SEQ ID NO: 128795 - DNA, 75 bp, synthetic construct
  source 1..75: mol_type = other DNA
ctttgaggatatagtaaaaaataacaacatagttaacatccgtattttgatgcgtattttggacacagttacgcc

SEQ ID NO: 128796 - DNA, 75 bp, synthetic construct
  source 1..75: mol_type = other DNA
aactcagccgcgaagaagtggtgcgcctgagcgaaaacatggcgcggctttccggcgtcaaaaccagcatggcgc

SEQ ID NO: 128797 - DNA, 75 bp, synthetic construct
  source 1..75: mol_type = other DNA
cggtgacatcggtgaccagtatgaccagcacggtgtcatccctgtattcgccggacagctacgggcgttactgca

SEQ ID NO: 128798 - DNA, 75 bp, synthetic construct
  source 1..75: mol_type = other DNA
gtacatgaatatccgtaccgggatacggtgtgggtggaagacctgggacgcagcgcccggaagttcacgctgcgt

SEQ ID NO: 128799 - DNA, 75 bp, synthetic construct
  source 1..75: mol_type = other DNA
cgcagaattaaacatgccggtatttatgcactgtcgcgatgcccatgagcggtttatgacattgctggagccgtg

SEQ ID NO: 128800 - DNA, 75 bp, synthetic construct
  source 1..75: mol_type = other DNA
cagaagtggtggcgattggtgagtgtggcctcgactttaaccgcaacttttctacaccagaagagcaggaatgtg

SEQ ID NO: 128801 - DNA, 75 bp, synthetic construct
  source 1..75: mol_type = other DNA
atgtttgatatcggcgttaatttgaccagttcgcaatttgcgaaagaccgtgatgatgttgtagcacgcgctttt

SEQ ID NO: 128802 - DNA, 75 bp, synthetic construct
  source 1..75: mol_type = other DNA
tggaagctaccccggcgcaccgtaccgccgaagtcgattcgactaggacgatggtcgagcgtgtcgaggcgcagt

SEQ ID NO: 128803 - DNA, 75 bp, synthetic construct
  source 1..75: mol_type = other DNA
tcttcccaagaaaatttcgctcactgatcctcagtcccgttggacagcagcgccaggtggcccggccttttttgc

SEQ ID NO: 128804 - DNA, 75 bp, synthetic construct
  source 1..75: mol_type = other DNA
tggagctgcgggaacttttgccgttgattccggcggaaaaattgctgatcgaaactgatgcgccgtatctgctcc

SEQ ID NO: 128805 - DNA, 75 bp, synthetic construct
  source 1..75: mol_type = other DNA
atgataaatgggatggtgagaaatgggtgacagacactgaggcacaacacagtgccgcagtagacgcggcagaag

SEQ ID NO: 128806 - DNA, 75 bp, synthetic construct
  source 1..75: mol_type = other DNA
aagagagagttagtgtggaagctgacaacccttttgatcttttacttcctgctgcaatggccaaagtggccgaag

SEQ ID NO: 128807 - DNA, 75 bp, synthetic construct
  source 1..75: mol_type = other DNA
aaaaattcaactcatttgttaatttttaaaatttatttttatttggataatcaaatatttactccgtatttgcat

SEQ ID NO: 128808 - DNA, 75 bp, synthetic construct
  source 1..75: mol_type = other DNA
agctgacgcaggcagaaaccacccgacttaacgctgtgctggattacattgacgcggtgacggcaacagatacca

SEQ ID NO: 128809 - DNA, 75 bp, synthetic construct
  source 1..75: mol_type = other DNA
acgtctgaatatacgggctggtctgatgaatatattaatactggcgtaagtatgcccgcctgttccactggtatt

SEQ ID NO: 128810 - DNA, 75 bp, synthetic construct
  source 1..75: mol_type = other DNA
gaccctggcgaaaacattccgggaagagtggcagtatttacaggtaagggatggcgccatgaagaagaccatcgc

SEQ ID NO: 128811 - DNA, 75 bp, synthetic construct
  source 1..75: mol_type = other DNA
gaaaggcaccgaagccctgctgcgccgctcgatttacgcggtaatgccaaaacgtcaggcgcagcaactggaagc

SEQ ID NO: 128812 - DNA, 75 bp, synthetic construct
  source 1..75: mol_type = other DNA
cgatggaagactgggcggtggcgctgaaaggcaccgaagccctgctgcgccgctcgatttacgcggtaatgccaa

SEQ ID NO: 128813 - DNA, 75 bp, synthetic construct
  source 1..75: mol_type = other DNA
aacggcgcgtcgcgatcgatgttgcagggcattctcaacaaagcgctaggcaccgagatcgccagcagcgtgatc

SEQ ID NO: 128814 - DNA, 75 bp, synthetic construct
  source 1..75: mol_type = other DNA
tgttgtcgggatgcctgtgccggatgcgaccggcgaacgtctggaaattctctgtcgactgggaggtgaaaaatg

SEQ ID NO: 128815 - DNA, 75 bp, synthetic construct
  source 1..75: mol_type = other DNA
cattcaaaggccggcattttcagcgtgacatcattctgtgggccgtacgctggtactgcaaatacggcatcagtt

SEQ ID NO: 128816 - DNA, 75 bp, synthetic construct
  source 1..75: mol_type = other DNA
tatcacatgtaaccacagcgtgccgccttacatgccactggcgcggcatcagaataatacaagcaacatttaatg

SEQ ID NO: 128817 - DNA, 75 bp, synthetic construct
  source 1..75: mol_type = other DNA
aacatcgaacttctttcatttgagtataagaaagccacaccgaaaaaaaatgaggttcaggagcacaaaccatct

SEQ ID NO: 128818 - DNA, 75 bp, synthetic construct
  source 1..75: mol_type = other DNA
acaagatccagataccgctgattgggttgccagaatgtccggcactattctcgtcgatgacgagagtcgaaaagc

SEQ ID NO: 128819 - DNA, 75 bp, synthetic construct
  source 1..75: mol_type = other DNA
cgctggattatattgacctgaataaaggcatttttattggcatggacagggagaacgaaccaatgtatctcctat

SEQ ID NO: 128820 - DNA, 75 bp, synthetic construct
  source 1..75: mol_type = other DNA
atggcaagctttgttgcaatcgctggcgcacgatctcgaacagggtattgctttctccaatgctttattgccctg

SEQ ID NO: 128821 - DNA, 75 bp, synthetic construct
  source 1..75: mol_type = other DNA
catgttagacaacctcgcccgtcatcatcgggataacaccatggcgctggcggataaccttgcagccttgctcga

SEQ ID NO: 128822 - DNA, 75 bp, synthetic construct
  source 1..75: mol_type = other DNA
agtcctgtcatattatccctgctcgcaggtcttacattaccttttatattccaccttccccgcgaggaaagaaat

SEQ ID NO: 128823 - DNA, 75 bp, synthetic construct
  source 1..75: mol_type = other DNA
atcaaagcattaactggtgtataccacgccgatcgcggcaccatctggctggaaggccaggctatctcaccgaaa

SEQ ID NO: 128824 - DNA, 75 bp, synthetic construct
  source 1..75: mol_type = other DNA
ctaatcaaagcattaactggtgtataccacgccgatcgcggcaccatctggctggaaggccaggttatctcaccg

SEQ ID NO: 128825 - DNA, 75 bp, synthetic construct
  source 1..75: mol_type = other DNA
gaatgccgatgaaaatcacgatttcttttccggttcaggctcttcatatgtgatgggaaaagcggtcgaaacaga

SEQ ID NO: 128826 - DNA, 75 bp, synthetic construct
  source 1..75: mol_type = other DNA
gcggctgctgttatgttatcggctctatgcgaaacagcaagattattacctcgcagcgtatgctgctggttcgcc

SEQ ID NO: 128827 - DNA, 75 bp, synthetic construct
  source 1..75: mol_type = other DNA
gtcgttatcggaccctttcagtggttgtataagatcagacccagcagtgataatacggtactggcttggtcagta

SEQ ID NO: 128828 - DNA, 75 bp, synthetic construct
  source 1..75: mol_type = other DNA
gctggcggtgctggcttttgtgcaacagaaacaactggtgctggcattattagcggggctgacgatgccgttttt

SEQ ID NO: 128829 - DNA, 75 bp, synthetic construct
  source 1..75: mol_type = other DNA
taaataaggctggtgaatttgatccggaaaaatggatcgcaagtctgggaattaccagccagaagtcgtgtgagt

SEQ ID NO: 128830 - DNA, 75 bp, synthetic construct
  source 1..75: mol_type = other DNA
atcaaactggcagagcgtattgctcatctgcgcgaagtaaaagacgcgccggaagatgaacgcgtactggcggca

SEQ ID NO: 128831 - DNA, 75 bp, synthetic construct
  source 1..75: mol_type = other DNA
tttacctatcagttgcagatgggggaccagattgaaattatcactcagaaacagccaaaccctagtcgtgactgg

SEQ ID NO: 128832 - DNA, 75 bp, synthetic construct
  source 1..75: mol_type = other DNA
atcccggcgcaacgagccagcccatctgccccatattttgcaacgtattgcgcactggcgtggagaagatgccgc

SEQ ID NO: 128833 - DNA, 75 bp, synthetic construct
  source 1..75: mol_type = other DNA
atgctctacgtcatattggggtcgtctcagaaaacggaatctatggtcactcccgtttttgcaacaccgattttg

SEQ ID NO: 128834 - DNA, 75 bp, synthetic construct
  source 1..75: mol_type = other DNA
caatggaaattaaagtgggtaatccattgcgtaagctggttctgattaagctggctgataatgccagcgatcagg

SEQ ID NO: 128835 - DNA, 75 bp, synthetic construct
  source 1..75: mol_type = other DNA
acgcaacaacgactttctccacctaaaataactccgcccccgagagtcagcgtgccagagacagtaaaaacagca

SEQ ID NO: 128836 - DNA, 75 bp, synthetic construct
  source 1..75: mol_type = other DNA
cgctcccggaggtgggcgaactaccggcctcccgatctcgggattcagtgagcaggactacggttcaacgaactt

SEQ ID NO: 128837 - DNA, 75 bp, synthetic construct
  source 1..75: mol_type = other DNA
tggcagactttagtggcgaatggggctggctgctggtgttgttcggcattatgctgacgatagccaataagttgc

SEQ ID NO: 128838 - DNA, 75 bp, synthetic construct
  source 1..75: mol_type = other DNA
ttacgccgaaaggtgatgtcgttgatttgcctgtgggatcaacgccgctggactttgcttaccacatccacagcg

SEQ ID NO: 128839 - DNA, 75 bp, synthetic construct
  source 1..75: mol_type = other DNA
tgaatcagccatggagcaggtatttgagttatatcggactgcgcaaaaacctttatacgcacaggcttctcgcat

SEQ ID NO: 128840 - DNA, 75 bp, synthetic construct
  source 1..75: mol_type = other DNA
tttctcccggttaatcattacaggcaagcctggtagcacccctgtaacactatcgccgacggcccgtaaccggac

SEQ ID NO: 128841 - DNA, 75 bp, synthetic construct
  source 1..75: mol_type = other DNA
atgtcgatgctgcgtttgtggtggataccgtatggcgaaacggcggatcagggggcatatgttcactatccggtg

SEQ ID NO: 128842 - DNA, 75 bp, synthetic construct
  source 1..75: mol_type = other DNA
aagcgtatccggagcagtcgatggcggttgcggcgacacacgacctgcctacactgcgtggctactgggagagcg

SEQ ID NO: 128843 - DNA, 75 bp, synthetic construct
  source 1..75: mol_type = other DNA
taccgtatggcgagacggcagatcagggcgcgtatgtacactatccggtggatgatctgctctcgattctggcac

SEQ ID NO: 128844 - DNA, 75 bp, synthetic construct
  source 1..75: mol_type = other DNA
cagcctgagttcacagataaaacactctccaggaaaaccggggcggttcatttaagtctgaccgatcgccagctt

SEQ ID NO: 128845 - DNA, 75 bp, synthetic construct
  source 1..75: mol_type = other DNA
tgctaagggggcaaatcagtgtgcgcggcgggggagtaaattaccggatttactcgatgaatatatcagagcaac

SEQ ID NO: 128846 - DNA, 75 bp, synthetic construct
  source 1..75: mol_type = other DNA
attttaattattctctcggtagtattagcagcatcgtcattacaggcctccggcggactgactctattagtccgg

SEQ ID NO: 128847 - DNA, 75 bp, synthetic construct
  source 1..75: mol_type = other DNA
gcttacagccagtttgccgcctgctgggagataagccagggctatgaaatgccgattggcttgtatcgtgatctg

SEQ ID NO: 128848 - DNA, 75 bp, synthetic construct
  source 1..75: mol_type = other DNA
gcacgcagatcgatacgctgtggcgggatgtgcgctggtcaatccgtgatatccaggacgaaagccggggcctgg

SEQ ID NO: 128849 - DNA, 75 bp, synthetic construct
  source 1..75: mol_type = other DNA
aggaaaactgatcgacaccggattttgtatttttgccctcagtaaactggcaatggcgttatccagtacgcttga

SEQ ID NO: 128850 - DNA, 75 bp, synthetic construct
  source 1..75: mol_type = other DNA
cgcaacgcttgagtcgatgtttgccgatgatggcgtgaacaagttgctgaaggatttggacagacggcgcagagc

SEQ ID NO: 128851 - DNA, 75 bp, synthetic construct
  source 1..75: mol_type = other DNA
agcggcgaatatagctggctgctgaccaccgaagaaggaacgcagtacaaaggccatgtaacggggggcaaagcg

SEQ ID NO: 128852 - DNA, 75 bp, synthetic construct
  source 1..75: mol_type = other DNA
ggcgacgcaaactttccgcaacgcttgaaaagatgtttgccgatgatggcgtgaacaagttgctgaaggatttgg

SEQ ID NO: 128853 - DNA, 75 bp, synthetic construct
  source 1..75: mol_type = other DNA
cttgggcatctatcatagaaaaagtcctctctaattttgggagtgctactaaaaagattgctgaattaaaaaaac

SEQ ID NO: 128854 - DNA, 75 bp, synthetic construct
  source 1..75: mol_type = other DNA
tgatattcacgtgatgctagtggatcacaaagagtttaaagtgcaaagcgttgagcgtggcattatcgttgatac

SEQ ID NO: 128855 - DNA, 75 bp, synthetic construct
  source 1..75: mol_type = other DNA
tccatccgctataccagagtcgctatgcaatggacgcggaggaaacgccaaatcgtccaaccctattcgccgtac

SEQ ID NO: 128856 - DNA, 75 bp, synthetic construct
  source 1..75: mol_type = other DNA
ctcaaaaagtatttatgcatatggcaggtttgttttatgaaatgaaaatgaatacgcttaaggaagtccgacccg

SEQ ID NO: 128857 - DNA, 75 bp, synthetic construct
  source 1..75: mol_type = other DNA
cttcggttttcctgaagatgccgtgacgtttatcggcgcatcaatcggttttatgggcgcagagaaaagcacgcg

SEQ ID NO: 128858 - DNA, 75 bp, synthetic construct
  source 1..75: mol_type = other DNA
atcacagagcaggttattgcgtggctctttgaccacctgccaacggtgtatgcagtaggcgcggcggtcagcatt

SEQ ID NO: 128859 - DNA, 75 bp, synthetic construct
  source 1..75: mol_type = other DNA
taaatggcagcatggttgggtaccgatgcgccaaagcagcacagcaggatatcgcctgcctgtgccgaggacagg

SEQ ID NO: 128860 - DNA, 75 bp, synthetic construct
  source 1..75: mol_type = other DNA
gtgcctgcagccagtcttccggtgcaatacgaaaatacgcctccggctctgcggagatattcacgcagggctggt

SEQ ID NO: 128861 - DNA, 75 bp, synthetic construct
  source 1..75: mol_type = other DNA
ggtgatcgcaggggatttatcgatcttctggttatttctcccgatggtcagcgttgcgcagttgaggtggataac

SEQ ID NO: 128862 - DNA, 75 bp, synthetic construct
  source 1..75: mol_type = other DNA
tgaaaatccggcatctcaattcccgccagatggtaagcgtcccggaacagcgtgtaacagtccgtcaccccgtgc

SEQ ID NO: 128863 - DNA, 75 bp, synthetic construct
  source 1..75: mol_type = other DNA
gtgcagcagctcgccgtcaccacagtaaatggcggcatgattggccaccgatgcgccaaagcagcacagcaggat

SEQ ID NO: 128864 - DNA, 75 bp, synthetic construct
  source 1..75: mol_type = other DNA
accattgcatgaagctgtccaaaaaaattcatagagaaaaaaccattcagccaacagtaaatctcaatgatagtg

SEQ ID NO: 128865 - DNA, 75 bp, synthetic construct
  source 1..75: mol_type = other DNA
gttgcagactcactacaaatggataagttcgttttagggggaatgtcgatgggcggatatatatcattacgattt

SEQ ID NO: 128866 - DNA, 75 bp, synthetic construct
  source 1..75: mol_type = other DNA
ctgattcttcatggttccagcgatacaggaataccaccggaaagagcgacgagtatgcacaaaatgctcgggtat

SEQ ID NO: 128867 - DNA, 75 bp, synthetic construct
  source 1..75: mol_type = other DNA
gattaaacattactcctccgttgaatccatacagcagcatatccccttagtccgggatgcggagttcagagcatt

SEQ ID NO: 128868 - DNA, 75 bp, synthetic construct
  source 1..75: mol_type = other DNA
accattgtatgaaactgtctaaaaaaacccatagagaaaaaactatacacccaacagtaaatctcaatggtagtg

SEQ ID NO: 128869 - DNA, 75 bp, synthetic construct
  source 1..75: mol_type = other DNA
cgcgttatcgcgagtcaggattttggctttgctttagatattttcttctgtcgaatgatggcaaacaatgtcagt

SEQ ID NO: 128870 - DNA, 75 bp, synthetic construct
  source 1..75: mol_type = other DNA
tatgcccgcctgttccactggtattgaccctggcgaaaacattccggggaaagtggcagtatttacgggtaaggg

SEQ ID NO: 128871 - DNA, 75 bp, synthetic construct
  source 1..75: mol_type = other DNA
ccaggggacaccgtaccagaaatgtaccgtaccgatgagtacaacattaagcagtggcagttgcgtaaccctgat

SEQ ID NO: 128872 - DNA, 75 bp, synthetic construct
  source 1..75: mol_type = other DNA
accgtaccgatgagtacaacattaagcagtggcagttgcgtaacctgcccgcacctgacgccggaacccactgga

SEQ ID NO: 128873 - DNA, 75 bp, synthetic construct
  source 1..75: mol_type = other DNA
agtttattttaggggggatgtcgatgggagggtatatatcattacgatttgccctgtcacatccagagcgtttgt

SEQ ID NO: 128874 - DNA, 75 bp, synthetic construct
  source 1..75: mol_type = other DNA
tccatcagtctgattcaactgaaattgcaggccgggcggaagctgacgcaggcagaaacaacccgacttaacgcc

SEQ ID NO: 128875 - DNA, 75 bp, synthetic construct
  source 1..75: mol_type = other DNA
tacattgacgcggtgacggcaacagataccagcaccgcgccggatatcatctggcctgaactgccggaggcgtag

SEQ ID NO: 128876 - DNA, 75 bp, synthetic construct
  source 1..75: mol_type = other DNA
catgatggttatcgctggcacacaagagcatggtgtcataaacgtggtgaatatagggactttttattgtcgcga

SEQ ID NO: 128877 - DNA, 75 bp, synthetic construct
  source 1..75: mol_type = other DNA
tggacactgatgtcgtaagtcaaatattacgagctatacgtgaaaatgaggctgttcatgttatttatcaatcca

SEQ ID NO: 128878 - DNA, 75 bp, synthetic construct
  source 1..75: mol_type = other DNA
acgattcagttttctattgatgattttatcaaaaatataaaaagaaaagttaaatcccgaggttccaggcctcct

SEQ ID NO: 128879 - DNA, 75 bp, synthetic construct
  source 1..75: mol_type = other DNA
gctacccaacacgctatcaagagatagccgcaaaacttgagcaggagcttcgtcaacactaccgctgcggcgact

SEQ ID NO: 128880 - DNA, 75 bp, synthetic construct
  source 1..75: mol_type = other DNA
tacaggagatggatgatccgctgacgggcgaaacccgcaccgtgcaactgggcagcgaccgccgcctccgcacga

SEQ ID NO: 128881 - DNA, 75 bp, synthetic construct
  source 1..75: mol_type = other DNA
taaaccgtgagcaggaactggcgcgccagctggcgacaaaacaggcccgatttgacagcgccgtaaatcccacct

SEQ ID NO: 128882 - DNA, 75 bp, synthetic construct
  source 1..75: mol_type = other DNA
tctgattcgattgtagaagggccgcaggaacgctaccagctgaattggcctggtaagcgcgaggcactgctcact

SEQ ID NO: 128883 - DNA, 75 bp, synthetic construct
  source 1..75: mol_type = other DNA
tatgtattcactgccaacaggagaaagatttacaaaaacccgtttatacgggatataatcgcagaggttcaaaag

SEQ ID NO: 128884 - DNA, 75 bp, synthetic construct
  source 1..75: mol_type = other DNA
atggcatccggttgggctaacgatgacgccgtcaacgaacagatcaacagtacaattgaagatgcgattgcccgc

SEQ ID NO: 128885 - DNA, 75 bp, synthetic construct
  source 1..75: mol_type = other DNA
gactaacaaaccatgcaaaatgccttctacaggatggcgctatccagaatcaacgttaattgaaagaatagctga

SEQ ID NO: 128886 - DNA, 75 bp, synthetic construct
  source 1..75: mol_type = other DNA
aaaagaagatggtgccgtctttatctcgatcaatgatgctgaatttgagaacttaaaaagcatagccagtgaagt

SEQ ID NO: 128887 - DNA, 75 bp, synthetic construct
  source 1..75: mol_type = other DNA
acgactttatttacgaggatgactttgccgaagatgcagacgaatacttgcgtcgttcaaatcaagtggatgaag

SEQ ID NO: 128888 - DNA, 75 bp, synthetic construct
  source 1..75: mol_type = other DNA
tgtggcgcgcgtggttgcctcgatgcaagatcctaacccgcaggtagctgggcgagggctatatcgtctgcaaca

SEQ ID NO: 128889 - DNA, 75 bp, synthetic construct
  source 1..75: mol_type = other DNA
agccatcatggtcgtacgccaccgtgttgtgatgcattaattgctgcgggcgtggcgcgcgtggttgctgcaatg

SEQ ID NO: 128890 - DNA, 75 bp, synthetic construct
  source 1..75: mol_type = other DNA
gacgcgattcgcatcacccgtgagatcatgcatcaaccggcgctggatcaataccgtggccgcgaaatcagtcct

SEQ ID NO: 128891 - DNA, 75 bp, synthetic construct
  source 1..75: mol_type = other DNA
aaacgctgggatctgtcaccgcaaaatgtggtagcgattggcgacagcggtaacgatgcggagatgctgaaaatg

SEQ ID NO: 128892 - DNA, 75 bp, synthetic construct
  source 1..75: mol_type = other DNA
aaatggcgcgctggtctacgaacatggcaagcagttgttccacggcgaactgaccccgcatgaatctcgaattgt

SEQ ID NO: 128893 - DNA, 75 bp, synthetic construct
  source 1..75: mol_type = other DNA
acgttttaccacgcatcccaatccgaatgtcgggtgcgtcattgtcaaagatggcgaaattgtcggtgaaggtta

SEQ ID NO: 128894 - DNA, 75 bp, synthetic construct
  source 1..75: mol_type = other DNA
tattattgcagcaaaaggtctgacggatgcagctcagcaggttgttgccgcagtggagggaaataatgtccattt

SEQ ID NO: 128895 - DNA, 75 bp, synthetic construct
  source 1..75: mol_type = other DNA
tggcgaccattttccttgagcgcgaccttgctcttatcgaaattaacccgttggttattaccaaacagggcgatc

SEQ ID NO: 128896 - DNA, 75 bp, synthetic construct
  source 1..75: mol_type = other DNA
tatgagtgcctggatgggcatggcggactggtcgattctggcaccaccgatgatgcagggcttcttctccatcgg

SEQ ID NO: 128897 - DNA, 75 bp, synthetic construct
  source 1..75: mol_type = other DNA
aagaaccggtttccctctaccctgccctgcagtggtggaaccagccgaaaatcggtgcggagtggctgtttggcg

SEQ ID NO: 128898 - DNA, 75 bp, synthetic construct
  source 1..75: mol_type = other DNA
ggcgggctacccgcgcacggacgatctcaacggttatcagcaggaaggtttcggcccgatggatcgcaccgtcac

SEQ ID NO: 128899 - DNA, 75 bp, synthetic construct
  source 1..75: mol_type = other DNA
aaaaagtggcggaagaaactccgcacctgatccacaaagttgcgcttgatccgctgactggcccgatgccgtatc

SEQ ID NO: 128900 - DNA, 75 bp, synthetic construct
  source 1..75: mol_type = other DNA
tggggctggcataacagcgagcctgttggttgcaaaaatcagaatataagtcaaataaaaaagaatattcaggaa

SEQ ID NO: 128901 - DNA, 75 bp, synthetic construct
  source 1..75: mol_type = other DNA
atgacgacaccaaccagacggataagtttctatctgaagcccgccgtcgtcaagagcgaacgggaggcgtgcagt

SEQ ID NO: 128902 - DNA, 75 bp, synthetic construct
  source 1..75: mol_type = other DNA
gacaccccagccaccgatgctttcctggctgaagtacgtgcgcagggcgtggatatggctcgtaacgcgatgatt

SEQ ID NO: 128903 - DNA, 75 bp, synthetic construct
  source 1..75: mol_type = other DNA
tgcaccctcaaccattcggagctgagatgatgaaggctcttgatgcgtatgagaagcatcaggatgaagtgccag

SEQ ID NO: 128904 - DNA, 75 bp, synthetic construct
  source 1..75: mol_type = other DNA
gcctaatatcgacaccccagcaaccgacgctttcctggctgaagtacgtgcggaggcacgcaacgaggggattaa

SEQ ID NO: 128905 - DNA, 75 bp, synthetic construct
  source 1..75: mol_type = other DNA
cctgcagtggtggaaccaaccgaaaatcggtgcggagtggctgtttggcggcactggcgttggtgccagcaacca

SEQ ID NO: 128906 - DNA, 75 bp, synthetic construct
  source 1..75: mol_type = other DNA
cgcagattatcaccggcaatttgaacgccacgacgattatgattggcgagaaaatggcggatatgattcgcggga

SEQ ID NO: 128907 - DNA, 75 bp, synthetic construct
  source 1..75: mol_type = other DNA
atgagcgtaaaagttatcgtcacagatatggacggtacttttcttaacgacgtcaaaacgtacaaccaaccacgt

SEQ ID NO: 128908 - DNA, 75 bp, synthetic construct
  source 1..75: mol_type = other DNA
ggttggccgaatggccggaagaaggagctgcgccagccaagaataatattcagagtaaatatgccagcgcacctg

SEQ ID NO: 128909 - DNA, 75 bp, synthetic construct
  source 1..75: mol_type = other DNA
ggatggccgaatggccagaggacaacctccccttcaataccgttagcatcaaggaaacataccaggctaatcagc

SEQ ID NO: 128910 - DNA, 75 bp, synthetic construct
  source 1..75: mol_type = other DNA
tcgcagccgtgaggaatttgcgtggccgaatattcagtaccatttcctgccagtggcgattaactataacggctc

SEQ ID NO: 128911 - DNA, 75 bp, synthetic construct
  source 1..75: mol_type = other DNA
accattaataccctcaaagatcgagaccggaatcggtggcgaaacctgtcggatatttattgcgcttaccttatc

SEQ ID NO: 128912 - DNA, 75 bp, synthetic construct
  source 1..75: mol_type = other DNA
aggtgtctggtttttcgtggggaattaatcgggtatggggatttgttccgcatgcgttatagcgaaattaaactg

SEQ ID NO: 128913 - DNA, 75 bp, synthetic construct
  source 1..75: mol_type = other DNA
tgcccgcgcctttaccgtcgccaaagtgacccgccttgatatcctggaagatatcaggagcgccctgcagcaggc

SEQ ID NO: 128914 - DNA, 75 bp, synthetic construct
  source 1..75: mol_type = other DNA
gataaatccctgctggcacgccgtcgggaaatcttcagcgcgatggggattcacttcgaactcaattgtgaagtg

SEQ ID NO: 128915 - DNA, 75 bp, synthetic construct
  source 1..75: mol_type = other DNA
gccaacaccattttcatccccgaattacggttatcaaacatcaacagcaacgtagtgcagtgacctgtcaccatt

SEQ ID NO: 128916 - DNA, 75 bp, synthetic construct
  source 1..75: mol_type = other DNA
agatgtctggtttttcgcggagaattagtgggatacggcgatttgtttcgtatgcgctatagcgaaattaagcga

SEQ ID NO: 128917 - DNA, 75 bp, synthetic construct
  source 1..75: mol_type = other DNA
ctggcgctgaaagtggaagacggcttgcaccacacggcaattatgcactcgcagaacgtctcacgactcaacctt

SEQ ID NO: 128918 - DNA, 75 bp, synthetic construct
  source 1..75: mol_type = other DNA
acttgtccccgctacaccacgaatgcaaagaaacgctattttccagactgttgatgaagcggtctgcgcagcaca

SEQ ID NO: 128919 - DNA, 75 bp, synthetic construct
  source 1..75: mol_type = other DNA
gcgcttcatttgattacaacctgccgtgtatcgctgaaaaaagcctgattgtcgtagcatcagtggcagagtatt

SEQ ID NO: 128920 - DNA, 75 bp, synthetic construct
  source 1..75: mol_type = other DNA
ggaagccctggcctacgggcaccagggtgagcgcgtgatgttctccccgcccggacacgtatcaaaagagggatt

SEQ ID NO: 128921 - DNA, 75 bp, synthetic construct
  source 1..75: mol_type = other DNA
caaagaaacgcaattttccagactgttgatgaagcggtctgcgctgcacatctggcttttttgcgctttcaacag

SEQ ID NO: 128922 - DNA, 75 bp, synthetic construct
  source 1..75: mol_type = other DNA
ggctttacgacctttaccattgcaacaccgaccggagaagggacaacgtcagcacggacttttgcccgctcacga

SEQ ID NO: 128923 - DNA, 75 bp, synthetic construct
  source 1..75: mol_type = other DNA
gccaccgtttgttaaacgtgttgatgtaatgactgcgctggaaatggaagccgccgtgaatgcttctgtacagca

SEQ ID NO: 128924 - DNA, 75 bp, synthetic construct
  source 1..75: mol_type = other DNA
cggccgtgaaggcttctgtacaacagcaaaatatatttatcggttgcgctgccgttgcggattatcgcgcagcta

SEQ ID NO: 128925 - DNA, 75 bp, synthetic construct
  source 1..75: mol_type = other DNA
acaataaaaatggttaaaaaccccgatatcgtcgccggtgttgccgcattaaaagaccataggccttatgttgtt

SEQ ID NO: 128926 - DNA, 75 bp, synthetic construct
  source 1..75: mol_type = other DNA
atggatttcgacacaatcatggaaaaggcttacgaagaatacttcgaaggccttgccgaaggcgaagaagctcac

SEQ ID NO: 128927 - DNA, 75 bp, synthetic construct
  source 1..75: mol_type = other DNA
gcgcggtagcagaagtgggtgttaacgtcccggttgtcgtacgtctggaaggtaacaacgccgaactcggcgcga

SEQ ID NO: 128928 - DNA, 75 bp, synthetic construct
  source 1..75: mol_type = other DNA
cctggcaatgggcaccatggacatcgttaaactgcacggcggtgaaccggctaacttcctggacgttggcggcgg

SEQ ID NO: 128929 - DNA, 75 bp, synthetic construct
  source 1..75: mol_type = other DNA
ccgatcaggcacaacgggaagcctcgcgctgccttaagtgcggcgagcacagcgtttgtgaatggacctgcccgc

SEQ ID NO: 128930 - DNA, 75 bp, synthetic construct
  source 1..75: mol_type = other DNA
atcaggcgttggcgaaaggttggcgtcctgacttaagccatgtcaccaaagtggacaagcgagtggcgattatcg

SEQ ID NO: 128931 - DNA, 75 bp, synthetic construct
  source 1..75: mol_type = other DNA
gataaatcactgctggcgcgtcgtcgtgaaatcttcagcgatatgggaattcacttcaggcttaattgcgaaatt

SEQ ID NO: 128932 - DNA, 75 bp, synthetic construct
  source 1..75: mol_type = other DNA
cgtgatgaagctaacatgcctggctcgaagaaggaggtgaaaaacgcccgcgaagagggggcaaacttcgaattt

SEQ ID NO: 128933 - DNA, 75 bp, synthetic construct
  source 1..75: mol_type = other DNA
agcaaaagtgtattggctgtaaatcctgcgtggttgcttgtccatttggtacgatgcaaatcgtcctgacacccg

SEQ ID NO: 128934 - DNA, 75 bp, synthetic construct
  source 1..75: mol_type = other DNA
ggccgcattgtggcggacgttgaaagccagtaccgttaccagacgacgaacccgaaaatcttcgccggtggcgac

SEQ ID NO: 128935 - DNA, 75 bp, synthetic construct
  source 1..75: mol_type = other DNA
atggaaggttcaagaatgaaataccgcatcgctttagctgtttctctttttgctcttagtgtcagtagttatgcc

SEQ ID NO: 128936 - DNA, 75 bp, synthetic construct
  source 1..75: mol_type = other DNA
tgagtgaagtccgggccaactgttcagatagccagctgcgcgccgatcatcagaagaaaatcgctaagcagaaag

SEQ ID NO: 128937 - DNA, 75 bp, synthetic construct
  source 1..75: mol_type = other DNA
cagctttctactccatgcactgacagcatcataaacagcattgcagcaggcattttaaccaaagaggggtcagca

SEQ ID NO: 128938 - DNA, 75 bp, synthetic construct
  source 1..75: mol_type = other DNA
ctggatgcggttgacggcatcaccgtgccggccgtgaatgaccaggacggcaacggcaagccggatgaccaggat

SEQ ID NO: 128939 - DNA, 75 bp, synthetic construct
  source 1..75: mol_type = other DNA
agcaggtgcgctacgccacagctcgttcagtctttaaatgggatggtactgacaccgtcaaagtcggcagcgatg

SEQ ID NO: 128940 - DNA, 75 bp, synthetic construct
  source 1..75: mol_type = other DNA
tttagcccaggcaaaacaaaaaggcgatgccgataagatagctaaacgagaaaggaaactggcggaagcgcagga

SEQ ID NO: 128941 - DNA, 75 bp, synthetic construct
  source 1..75: mol_type = other DNA
agccaggaagagttagcggacagattagtcccaaccctgggccttgatgatccgcaggcgttgagttttgatttt

SEQ ID NO: 128942 - DNA, 75 bp, synthetic construct
  source 1..75: mol_type = other DNA
caactgcaagaatacacatcaataggactattgcgtacttattacgcgcatcaggccaaatctaaacagtaccgg

SEQ ID NO: 128943 - DNA, 75 bp, synthetic construct
  source 1..75: mol_type = other DNA
acactggacgccggaacagcaaactgcaattgaccattttagcgccatgtcttttgacgaacgtcttgctaagag

SEQ ID NO: 128944 - DNA, 75 bp, synthetic construct
  source 1..75: mol_type = other DNA
ggagtgtgcatacacgcttgaacatcatgatcacgcagtagccttcgccgctgagcttcgcaaaggaggcaacca

SEQ ID NO: 128945 - DNA, 75 bp, synthetic construct
  source 1..75: mol_type = other DNA
accgatgctttcctggctgaagtccgggcgcagggcgtggagatgtttgcggagtgtgcatacacgcttgaacat

SEQ ID NO: 128946 - DNA, 75 bp, synthetic construct
  source 1..75: mol_type = other DNA
tgataactgccatatgggcaaacaaaatcaaccagcgccgcgatcctgaagtcacgatcatcatccactctccgg

SEQ ID NO: 128947 - DNA, 75 bp, synthetic construct
  source 1..75: mol_type = other DNA
atggtcgatacagcccaggaacccagactttctcgactcttttctaaccgggtcattgcacgttatccggcgttt

SEQ ID NO: 128948 - DNA, 75 bp, synthetic construct
  source 1..75: mol_type = other DNA
ctgactcacgccccatgcgcacctggcacgctggaaacgctgtctcgtttttccattctttcgcgtctgaaagag

SEQ ID NO: 128949 - DNA, 75 bp, synthetic construct
  source 1..75: mol_type = other DNA
atcgcttgctgagcgactgaaatcattaatgcagctcgtaccgatttatgtattgagcgccaacggtgagcgtag

SEQ ID NO: 128950 - DNA, 75 bp, synthetic construct
  source 1..75: mol_type = other DNA
tattaagcgccaacagtgagcgtagtccggtcaacgatcatccgttctgtctgttcaatccgcaggaagatgccc

SEQ ID NO: 128951 - DNA, 75 bp, synthetic construct
  source 1..75: mol_type = other DNA
accgattaaagtgctgcatccgctgttaaccgccactcaggaaggtaactacaacgggacggaaggtatctccgc

SEQ ID NO: 128952 - DNA, 75 bp, synthetic construct
  source 1..75: mol_type = other DNA
atgccattgaaattaagaaagccgtgcagtattcgtaaactcgaacactacgcgcagaatgacccggacgcctac

SEQ ID NO: 128953 - DNA, 75 bp, synthetic construct
  source 1..75: mol_type = other DNA
aatgatagtaacgtcattcagggaggaatgttgaaaatcacaggtaattcagactctaaggttgacttggatgga

SEQ ID NO: 128954 - DNA, 75 bp, synthetic construct
  source 1..75: mol_type = other DNA
agaactgttattaccatcaagttcatatgatcatggtagtggcggtattatatcgtctaccaccataactatggg

SEQ ID NO: 128955 - DNA, 75 bp, synthetic construct
  source 1..75: mol_type = other DNA
ataattgcatctgaccttgtgaaaagtggagttgatgctatagagggaggcacacttaaaatcattgggtcatct

SEQ ID NO: 128956 - DNA, 75 bp, synthetic construct
  source 1..75: mol_type = other DNA
catttatcaaaaagagtgtaataaatggtttttcttcgcgcttaaaggattcttatgatagtattaacatggagt

SEQ ID NO: 128957 - DNA, 75 bp, synthetic construct
  source 1..75: mol_type = other DNA
agtcggcggttcaggaaaagtacatggtgaacatcacgatcatgaagctcatcatcatgatgatcacgctcatta

SEQ ID NO: 128958 - DNA, 75 bp, synthetic construct
  source 1..75: mol_type = other DNA
gacccggtacgcgcgaaattcgcctatgtgtttacagaagacggaaagcttaatcaaatagatgtcctgaaaggg

SEQ ID NO: 128959 - DNA, 75 bp, synthetic construct
  source 1..75: mol_type = other DNA
cccgcgtcttgaaactgccctgcgcaccacccgacgctggtcgctggcagattttcattctctgtttgttaatca

SEQ ID NO: 128960 - DNA, 75 bp, synthetic construct
  source 1..75: mol_type = other DNA
ctttacgaacagggacatggtgaattgctgcaaaccgcggcaaaccgctggcagcgtacagatgtatggcctgcc

SEQ ID NO: 128961 - DNA, 75 bp, synthetic construct
  source 1..75: mol_type = other DNA
aatcccgccccttacgtgataacgcggcggaatttcttcaggtggtcgcagaaaatcgcgggctaagccaggaag

SEQ ID NO: 128962 - DNA, 75 bp, synthetic construct
  source 1..75: mol_type = other DNA
ggaaaatgacagctactcacgctatcgtcgggaaaagagtatctggaacctgtatttattggcgcagttgccgcg

SEQ ID NO: 128963 - DNA, 75 bp, synthetic construct
  source 1..75: mol_type = other DNA
actgggccttgatgatccgcaggcgcttatcttcgattttggtacacggcagtttagcgttcgtttcgatgaaaa

SEQ ID NO: 128964 - DNA, 75 bp, synthetic construct
  source 1..75: mol_type = other DNA
ggaacatacggctactgcacttatccctcttgtcttcaccaaatccagcgataatagcgaagctgcattacttgc

SEQ ID NO: 128965 - DNA, 75 bp, synthetic construct
  source 1..75: mol_type = other DNA
cgccacagagtctgcccgttatttcagcacgggatcttttacggaacgcatggaacgaaaaagtggtcgagttgt

SEQ ID NO: 128966 - DNA, 75 bp, synthetic construct
  source 1..75: mol_type = other DNA
caaatgaaccgcgtcgtttactcaacgcctttcgtgtggccgcagagggggaattctgcaatgcacaagatgagc

SEQ ID NO: 128967 - DNA, 75 bp, synthetic construct
  source 1..75: mol_type = other DNA
ctttacgaacagggacatggcgaattactacaaactgtagctaatcgttggcagcgtacagatgtatggcctgcc

SEQ ID NO: 128968 - DNA, 75 bp, synthetic construct
  source 1..75: mol_type = other DNA
caccgtggcgtggcagaaaaaagacttccataactcacttttcgctacctgaacttacgcttgtaccgcaagcgt

SEQ ID NO: 128969 - DNA, 75 bp, synthetic construct
  source 1..75: mol_type = other DNA
tgcccataaagaagattgcggtagcctgctggtacaaattaaccatccgcaagttattcgcatcttgctgttagt

SEQ ID NO: 128970 - DNA, 75 bp, synthetic construct
  source 1..75: mol_type = other DNA
gctggtccttaagttttcacccggttttaaccactacagtgctgatagcaaagcgctaatgagcttccgttctct

SEQ ID NO: 128971 - DNA, 75 bp, synthetic construct
  source 1..75: mol_type = other DNA
attgcacgccagtttattgcgcggtgttatgagagtgatcctctggtagtgacattgcagtatcaggacgaggat

SEQ ID NO: 128972 - DNA, 75 bp, synthetic construct
  source 1..75: mol_type = other DNA
ttcactggagtggcagtccgccatcacgcaggccatcaacttgatcggcgaacacaaaccctcaatcccggcccg

SEQ ID NO: 128973 - DNA, 75 bp, synthetic construct
  source 1..75: mol_type = other DNA
gaatttgcacagctttttgccgattacgaaattatgccgccttttcgccagttggcgcggcgcacggtgctgctc

SEQ ID NO: 128974 - DNA, 75 bp, synthetic construct
  source 1..75: mol_type = other DNA
ttacattggccggaacatacggctactgcacttatccctcttgtcttcaccaaatccagcgataatagcgaagct

SEQ ID NO: 128975 - DNA, 75 bp, synthetic construct
  source 1..75: mol_type = other DNA
gataacagcagtctgcctgaaatcctcgtttcaccaccgtggcgtggcaggaaaaagacttccatacctcacttt

SEQ ID NO: 128976 - DNA, 75 bp, synthetic construct
  source 1..75: mol_type = other DNA
atgccgtggttaagtactcaagccagggcagtgctgaatagttatttatcggcaccgccaaaaccggttattgat

SEQ ID NO: 128977 - DNA, 75 bp, synthetic construct
  source 1..75: mol_type = other DNA
cggcagtttaccgttcgcttcgatgaaaacctcaacccggttatctttgatcagcaaaacgttcgccagaaaagc

SEQ ID NO: 128978 - DNA, 75 bp, synthetic construct
  source 1..75: mol_type = other DNA
ttctggctgcgtatcaatgagaaaaagcatctgttcgcgggtgaggactattttctcagtatcctcggattggat

SEQ ID NO: 128979 - DNA, 75 bp, synthetic construct
  source 1..75: mol_type = other DNA
cacctgacgagtcaaccagtaacagcctgactcgctgggaaggtaaatccgctaccgttgggcaacttatgggaa

SEQ ID NO: 128980 - DNA, 75 bp, synthetic construct
  source 1..75: mol_type = other DNA
acgaacatgggcatggcgaattgctacaaactgtagccaatcgttggcagcgtacagatctatggcctgccctgg

SEQ ID NO: 128981 - DNA, 75 bp, synthetic construct
  source 1..75: mol_type = other DNA
aaaactcgaacgatactggggcctggacgtatttagcgatcgcgaagccagctacatgtcacaagaaaaccgctt

SEQ ID NO: 128982 - DNA, 75 bp, synthetic construct
  source 1..75: mol_type = other DNA
gacgctctggaaattatcggcgaaatgctgcgctttacccaggggggacgtttttatagcgggctggaacaactg

SEQ ID NO: 128983 - DNA, 75 bp, synthetic construct
  source 1..75: mol_type = other DNA
aatgcgatacagcgcgttttagagggtatttacaaaacagtcgttgccttgaggaaattttgatcaagattgaac

SEQ ID NO: 128984 - DNA, 75 bp, synthetic construct
  source 1..75: mol_type = other DNA
ggtcccagcgatctggcggcagcattaggccatctcggtaatgccttacacccggaagtacaaaacgccattcag

SEQ ID NO: 128985 - DNA, 75 bp, synthetic construct
  source 1..75: mol_type = other DNA
agaaggtattcgcggcgtctccgtttctcaccgcgccaatatgtttggcaccgtaccggactatttcgcccggtc

SEQ ID NO: 128986 - DNA, 75 bp, synthetic construct
  source 1..75: mol_type = other DNA
cctgaagcaccagatgtccttcgacaatggtatgcgttggaacaacgcgctgcgttatgacgtgcataatctcga

SEQ ID NO: 128987 - DNA, 75 bp, synthetic construct
  source 1..75: mol_type = other DNA
cagcatgctggcggacgccgcgccgaagatgggcaacggtctggcgtttaacgtggtggcgaaaggcgacccgcg

SEQ ID NO: 128988 - DNA, 75 bp, synthetic construct
  source 1..75: mol_type = other DNA
cgcttccagggaagcaatgctaacgccacgttatataacaccggtgaaatgacgctggatgccgcacttggcgcg

SEQ ID NO: 128989 - DNA, 75 bp, synthetic construct
  source 1..75: mol_type = other DNA
gaataccggagtgagttcggtggcttttttcctgtacaggttcgcttcacgccatcacacggcaacttccatatc

SEQ ID NO: 128990 - DNA, 75 bp, synthetic construct
  source 1..75: mol_type = other DNA
ctttcgacctataaaaaagactccgcgctgatgcgctttaacgattcgaaaagtttgtcaccgtggccggtaagt

SEQ ID NO: 128991 - DNA, 75 bp, synthetic construct
  source 1..75: mol_type = other DNA
caaaccggacgacctatcgagcataatctggtatccgtgacggtgattgcaccgacggcgctggaagccgacgcc

SEQ ID NO: 128992 - DNA, 75 bp, synthetic construct
  source 1..75: mol_type = other DNA
cccggatgtacaaaaagcaattcagcacatttttaaccgtgccagcgcgcacggcaaacccagcggcatcctcgc

SEQ ID NO: 128993 - DNA, 75 bp, synthetic construct
  source 1..75: mol_type = other DNA
ggcattgatagcgtgtctcgatactgacggatattcctgcgccagtatcatcagcacgctggaacaggagggcgc

SEQ ID NO: 128994 - DNA, 75 bp, synthetic construct
  source 1..75: mol_type = other DNA
atgcgaaacgtgattactcccgacgttctgaacaccatgatcccgcaggaatttgaagactggcgtgaggcgggt

SEQ ID NO: 128995 - DNA, 75 bp, synthetic construct
  source 1..75: mol_type = other DNA
tatccgcctgccagatgcgctggcgttcttcggcggcacccgcttcgtgcccattatctcctcactgatgatggg

SEQ ID NO: 128996 - DNA, 75 bp, synthetic construct
  source 1..75: mol_type = other DNA
cgatcccgctagggctggcgcgcgagaacaaaggcgtagcggcgttcgctggtttcgtgggttatgcggtaatga

SEQ ID NO: 128997 - DNA, 75 bp, synthetic construct
  source 1..75: mol_type = other DNA
caataaaggcattctgccaaccacggacgccgcggttctgaaagccaataacatccagagcattcttgggatcca

SEQ ID NO: 128998 - DNA, 75 bp, synthetic construct
  source 1..75: mol_type = other DNA
cattgaatgccgcaaacgaaatcaccgttgctgcttttcttgcgcaacaaatccgctttacggatatcgccgcgt

SEQ ID NO: 128999 - DNA, 75 bp, synthetic construct
  source 1..75: mol_type = other DNA
cgaccggctcgattggttgcagcacgctggacgtggtgcgccataatcccgaacacttccgcgtagttgcgctgg

SEQ ID NO: 129000 - DNA, 75 bp, synthetic construct
  source 1..75: mol_type = other DNA
gtcatgtctgtgctcggcgtcaccatcggtaataccgacggcaatatcatcgacttcgtggtgttcggtattttg

SEQ ID NO: 129001 - DNA, 75 bp, synthetic construct
  source 1..75: mol_type = other DNA
ggtgaaaatgcaatcggcattcagatcgacggtaataatgcgacatttgttaacgttggtgatattaccgcgacc

SEQ ID NO: 129002 - DNA, 75 bp, synthetic construct
  source 1..75: mol_type = other DNA
gtgacgatatcactatcaataacaacggcgagacggaagttgacggcggtaccgcagtaatcatcaatggcgata

SEQ ID NO: 129003 - DNA, 75 bp, synthetic construct
  source 1..75: mol_type = other DNA
gaaggctcggttgtcggtatactcaccggcgacaatatcaccattaacaataatggcgagacggaagttgatggc

SEQ ID NO: 129004 - DNA, 75 bp, synthetic construct
  source 1..75: mol_type = other DNA
attcagtgtgttgggaacacaaggccatatcgttaacaacggtacggtggtgattgccgacggcgtgaccggttc

SEQ ID NO: 129005 - DNA, 75 bp, synthetic construct
  source 1..75: mol_type = other DNA
ataacagcggtattgcgtcggcgcgcgttaacgctcagggcgatgctgtattcaataaccttgcaggcggcgagg

SEQ ID NO: 129006 - DNA, 75 bp, synthetic construct
  source 1..75: mol_type = other DNA
cggagctggagattggcgctgacgcaacgtttgatatgagcgatgtggattctttcacttattattatcgcgtag

SEQ ID NO: 129007 - DNA, 75 bp, synthetic construct
  source 1..75: mol_type = other DNA
attgatgcgctctcaccgcaaggtgaagtgtcaccacaagccaataacgatctgctttccgcaggcatggaactg

SEQ ID NO: 129008 - DNA, 75 bp, synthetic construct
  source 1..75: mol_type = other DNA
atcggcgctcggcacaaacgcggtgtccgatctcgggcaaaaacttggcgtggataccagtacagcttccagttt

SEQ ID NO: 129009 - DNA, 75 bp, synthetic construct
  source 1..75: mol_type = other DNA
cggtttaggtgccattctctcaacctggttgagtaatcaacagggcaaccaaccagttagcggcgagcaactgga

SEQ ID NO: 129010 - DNA, 75 bp, synthetic construct
  source 1..75: mol_type = other DNA
tccgatctcgggcaaaaactgggtgtagataccagtacggcttccagcttgctggcagagcaactgccaaagatt

SEQ ID NO: 129011 - DNA, 75 bp, synthetic construct
  source 1..75: mol_type = other DNA
ttccgccaagcaaatggggagcacgcaatgcgcgttgcatcccccttttccctcgggtgttgtactgatttttga

SEQ ID NO: 129012 - DNA, 75 bp, synthetic construct
  source 1..75: mol_type = other DNA
gtgcctttctgaaaggcgatgcggggaaatatcaggcgattttaagttgggttgaggagcagggcggcattcagg

SEQ ID NO: 129013 - DNA, 75 bp, synthetic construct
  source 1..75: mol_type = other DNA
aaacctgaagaagaaagtgacctgggaagacggaaaaagcgaacgcgtgctttataccccagaaatcgctgagaa

SEQ ID NO: 129014 - DNA, 75 bp, synthetic construct
  source 1..75: mol_type = other DNA
tagagatggcgcgcagcctgcctgccggatcgttggcgatgattgtcggcggtcactcgcaagatccggtctgca

SEQ ID NO: 129015 - DNA, 75 bp, synthetic construct
  source 1..75: mol_type = other DNA
tggcggcagaaaataaaaaacaggtcgattacgtgccgggtacgccatgcaaaccggatcaacaaaatggcatct

SEQ ID NO: 129016 - DNA, 75 bp, synthetic construct
  source 1..75: mol_type = other DNA
aggtcaaggccttgctacgcattaaatctgattcaaccctaacggagatggttaacaaaggcgggttccccaaag

SEQ ID NO: 129017 - DNA, 75 bp, synthetic construct
  source 1..75: mol_type = other DNA
ttcgtgactccatcgacgcgggtaacatcagttataaaaacgtgctgaaagtgcagccgttcggcaatgtggtgg

SEQ ID NO: 129018 - DNA, 75 bp, synthetic construct
  source 1..75: mol_type = other DNA
tttgccgtgatgaacggcggcgggattcgcgactccattgatgcgggcgatatcagctataaaagtgtgctgaaa

SEQ ID NO: 129019 - DNA, 75 bp, synthetic construct
  source 1..75: mol_type = other DNA
ttctggaaaataccagcggtggcatcatcaataacttagtaaaacttgacaagggtgccgtcattaaaaatgccg

SEQ ID NO: 129020 - DNA, 75 bp, synthetic construct
  source 1..75: mol_type = other DNA
cgggttacaccaacaacgaactgtttaccagcctgaacgtcggcacgactgctgaactgaacagtgctctgaaac

SEQ ID NO: 129021 - DNA, 75 bp, synthetic construct
  source 1..75: mol_type = other DNA
gccagcatgaacggcgtggagattaacacgggctttaccgctggtacggcagacaccactgtgagttttgataac

SEQ ID NO: 129022 - DNA, 75 bp, synthetic construct
  source 1..75: mol_type = other DNA
ctttcgacctataaaaaagattccgcgctgatgcgatttaacgactcgcaaagtttatcgccgtggccggtaagt

SEQ ID NO: 129023 - DNA, 75 bp, synthetic construct
  source 1..75: mol_type = other DNA
agcacctgactgtcatcaatcagtatcatcagcagtacctgcaaaaagatcttccggatttatatgtcgatctct

SEQ ID NO: 129024 - DNA, 75 bp, synthetic construct
  source 1..75: mol_type = other DNA
tacggtttatatcgacgacagcgtcaccggttccggcctgattaagcaagctggtacggcgatggaaggcgatgg

SEQ ID NO: 129025 - DNA, 75 bp, synthetic construct
  source 1..75: mol_type = other DNA
ttgtaaactttggctgcatgtatgaacttgtagttaattggttgaatggacgtaaaacgatctttagccctttca

SEQ ID NO: 129026 - DNA, 75 bp, synthetic construct
  source 1..75: mol_type = other DNA
gattccgaacagcaaaccaatttacgttgggagcagatcggttttattacctttataattgtgataatgtgggca

SEQ ID NO: 129027 - DNA, 75 bp, synthetic construct
  source 1..75: mol_type = other DNA
atggggctttttgatgaagttgtcggcgcctttctgaaaggcgatgcggggaaatatcaggctattttgagttgg

SEQ ID NO: 129028 - DNA, 75 bp, synthetic construct
  source 1..75: mol_type = other DNA
gggcaccatgaccgtcaccgatccggagtccatcggtatccagattgacggcgaccaggccatcgtcaataacga

SEQ ID NO: 129029 - DNA, 75 bp, synthetic construct
  source 1..75: mol_type = other DNA
tgccgatggggttacgggttctggactgatcaagcagggcgacagcatcaatgttgaaggtatgaacggtaacaa

SEQ ID NO: 129030 - DNA, 75 bp, synthetic construct
  source 1..75: mol_type = other DNA
tggtaaatcattctgggtcgcatacatcattaataattatctaggcgcaggtccgcgttctaataatctgatcca

SEQ ID NO: 129031 - DNA, 75 bp, synthetic construct
  source 1..75: mol_type = other DNA
agcaatttcaggaagcactgtcacgccagtggcagcgttatggtttaacttctgcggctgagatgacccctcgcc

SEQ ID NO: 129032 - DNA, 75 bp, synthetic construct
  source 1..75: mol_type = other DNA
cgacccggtgaaatggcggaagaaagataaagtgctggacgccgtactgaaggagctggaaagcggtaaatacag

SEQ ID NO: 129033 - DNA, 75 bp, synthetic construct
  source 1..75: mol_type = other DNA
gcgtaagaaagacaagcagctcgatgcagtattgaaagagctggaaagcggtaaatacagcgacggcgataaaca

SEQ ID NO: 129034 - DNA, 75 bp, synthetic construct
  source 1..75: mol_type = other DNA
ccattcgctaaaccggtggccaatcagcgacatgttaactacatctcaatggagtttttgattggacgcctgacg

SEQ ID NO: 129035 - DNA, 75 bp, synthetic construct
  source 1..75: mol_type = other DNA
attacgaagttattcagctgaacgatacccacccaactatcgcgattccagaactgctgcgcgtgctgatcgatg

SEQ ID NO: 129036 - DNA, 75 bp, synthetic construct
  source 1..75: mol_type = other DNA
gtcaagcgtgggatctccccgttgtcggctatcgtaatggcgtggcgcagccgctgcgtctgtggcaggcgacgc

SEQ ID NO: 129037 - DNA, 75 bp, synthetic construct
  source 1..75: mol_type = other DNA
gtggaatcaggcaaagttgccgttcgcacccgccgtggtaaagacctgggaagcatggacgtaaatgaagtgatc

SEQ ID NO: 129038 - DNA, 75 bp, synthetic construct
  source 1..75: mol_type = other DNA
agttaaaggtcccttcatgatggaccgcgtcctatgggaaaaaaccggtcactgggacaactataaagatgcgat

SEQ ID NO: 129039 - DNA, 75 bp, synthetic construct
  source 1..75: mol_type = other DNA
cagtctgaatacgttaacgaattgacgcaaaaactatcaaatgcgggcattcgtgttaaagcagacttgagaaat

SEQ ID NO: 129040 - DNA, 75 bp, synthetic construct
  source 1..75: mol_type = other DNA
aaagatttgttcccggaataccaccagttgtggccgaacaaattccataacgtcactaatggtattactccgcgt

SEQ ID NO: 129041 - DNA, 75 bp, synthetic construct
  source 1..75: mol_type = other DNA
cggatgactggcatcgtggtaactatccgtggttccgccacaatgaagcactggatgtgcaggttggaattggcg

SEQ ID NO: 129042 - DNA, 75 bp, synthetic construct
  source 1..75: mol_type = other DNA
accgcgaccaggaggcctggactcgcgcggcgatcctcaataccgcccgctgcggtatgtttagctcggatcgct

SEQ ID NO: 129043 - DNA, 75 bp, synthetic construct
  source 1..75: mol_type = other DNA
tacgaaaaaacctatacggctgaactttcgtccattccaggcacccccatcgaggctggccccttcgatacagtg

SEQ ID NO: 129044 - DNA, 75 bp, synthetic construct
  source 1..75: mol_type = other DNA
aaatgctgtgctggctctggacggggagacgaaaaaagtctgtgggcttggcggtgatgaccgtctgttgctgaa

SEQ ID NO: 129045 - DNA, 75 bp, synthetic construct
  source 1..75: mol_type = other DNA
agctttcgcagccggatctgtccgcaaagtacgatgaaatcctgtttgatgaagcccaggacgccagtccggtga

SEQ ID NO: 129046 - DNA, 75 bp, synthetic construct
  source 1..75: mol_type = other DNA
taccgcagaaagcccctcgattactaattgctattgtcgacgccgatgatagctgggttacctgcgaacaactga

SEQ ID NO: 129047 - DNA, 75 bp, synthetic construct
  source 1..75: mol_type = other DNA
ttgattggtaatggtctgaagctacgtatactggatgaaaacgcctcgccttatacattcaataaatatgcttaa

SEQ ID NO: 129048 - DNA, 75 bp, synthetic construct
  source 1..75: mol_type = other DNA
cgaaaaaacctatacggctgaattatcgtccacacctggcactcccatcgcggcgggtcccttcgatacagtggt

SEQ ID NO: 129049 - DNA, 75 bp, synthetic construct
  source 1..75: mol_type = other DNA
tgacccgacatgaatcgcggattgtgattggcgagttgctaaaagataagcaactcaattttgtcgcctgcggtc

SEQ ID NO: 129050 - DNA, 75 bp, synthetic construct
  source 1..75: mol_type = other DNA
tgactggcttaaccggtttaccggagaggatgagagccgggtggcgacagcctgggaggatattcagtaccttcg

SEQ ID NO: 129051 - DNA, 75 bp, synthetic construct
  source 1..75: mol_type = other DNA
gcggggatactgaaaccggtcagaccgctgtcttttccgccgttaccggaactgacttcatacggtgcaaccggg

SEQ ID NO: 129052 - DNA, 75 bp, synthetic construct
  source 1..75: mol_type = other DNA
cagatgctgtatgtgcgccggatgctgccttccgagtacgagcgtctacagggatttcccgagaactggactcta

SEQ ID NO: 129053 - DNA, 75 bp, synthetic construct
  source 1..75: mol_type = other DNA
gggattagtctggcggttgcaggcataatcctactgctggcgcgcattgtagacggtattgatgcgccagtgtgg

SEQ ID NO: 129054 - DNA, 75 bp, synthetic construct
  source 1..75: mol_type = other DNA
ttatcaacaacagcataggcatgctggcggcaggcaacactgtggtgttcagtccacatccgcgctcgcgcaaag

SEQ ID NO: 129055 - DNA, 75 bp, synthetic construct
  source 1..75: mol_type = other DNA
ttatggaaagtgaagcccggcgttttattgcgttggtggatgagttttacgaacgccacgtcaagctggtggtga

SEQ ID NO: 129056 - DNA, 75 bp, synthetic construct
  source 1..75: mol_type = other DNA
aataacgctggtagcgacgtcaaatattccgccggacgaactttatcgaaatggcctgcaacgtgcgcgtttttt

SEQ ID NO: 129057 - DNA, 75 bp, synthetic construct
  source 1..75: mol_type = other DNA
aatacctgaaggccctcagtgagggcagccatcaacccgatgacgtacaaaaagaggccgtcagtcggctggaga

SEQ ID NO: 129058 - DNA, 75 bp, synthetic construct
  source 1..75: mol_type = other DNA
aacttaacgccacccatcatcgcccggtgtctgaaggcaaggtacgcggcgtctgccagccgctgcatcttgggc

SEQ ID NO: 129059 - DNA, 75 bp, synthetic construct
  source 1..75: mol_type = other DNA
aaccagtacggcctgaacccatggaccaaagagatttacgcattcccagataaaggcgggattgtcccggtcgtc

SEQ ID NO: 129060 - DNA, 75 bp, synthetic construct
  source 1..75: mol_type = other DNA
tttggcgagctgaaagaagaaacctgccgcactatcatcgacattatggagatgtatcatgcgttgcatgtgtcc

SEQ ID NO: 129061 - DNA, 75 bp, synthetic construct
  source 1..75: mol_type = other DNA
tggcatctatgacaaggatgaagccgagcgtattgtcgaaaataccgcatatactacagaacgtcagccggaacg

SEQ ID NO: 129062 - DNA, 75 bp, synthetic construct
  source 1..75: mol_type = other DNA
ggatatgcgcgaaccacaatgcgtggacgatgtgttgtctgtcgatgcctgtgcgcgtgacgtcgccagaaaaga

SEQ ID NO: 129063 - DNA, 75 bp, synthetic construct
  source 1..75: mol_type = other DNA
tccggctatcgacgccattaaacagcattgtgatgtgatgaacgtcgatgctggcgttgattatcggctgcgcac

SEQ ID NO: 129064 - DNA, 75 bp, synthetic construct
  source 1..75: mol_type = other DNA
gccaaccagtacggacttaatccgtggacgaaagagatttacgccttccctgataagcagaacggcattgttccg

SEQ ID NO: 129065 - DNA, 75 bp, synthetic construct
  source 1..75: mol_type = other DNA
aatgaatcttgtacatgccggatttaccgcaacgaccggaatcatccgatctgcgttaccgactggatggatgaa

SEQ ID NO: 129066 - DNA, 75 bp, synthetic construct
  source 1..75: mol_type = other DNA
agatactgaacctaagcctcctattaatgtattgctagagaatgtcttagatcaaaagtttaaggagtatttaac

SEQ ID NO: 129067 - DNA, 75 bp, synthetic construct
  source 1..75: mol_type = other DNA
tgatgccttatccgcattagtctctccgttgcaagctcatgcgcagcgggttgccatcgcttcaaccggaattat

SEQ ID NO: 129068 - DNA, 75 bp, synthetic construct
  source 1..75: mol_type = other DNA
tatttacgggactgcgtgggcggataaaaaagctctcaacgcttacctgcaacgcctggaagaagccgctaagcg

SEQ ID NO: 129069 - DNA, 75 bp, synthetic construct
  source 1..75: mol_type = other DNA
ctcgacctgtaccatatgcaggaagaagcgccgggtatggtattctggcacaacgacggctggaccatcttccgt

SEQ ID NO: 129070 - DNA, 75 bp, synthetic construct
  source 1..75: mol_type = other DNA
gacggacagtgtgtggtgggcacggaacttaacgccacacatcatcgcccggtgtctgagggaaaggtacgcggc

SEQ ID NO: 129071 - DNA, 75 bp, synthetic construct
  source 1..75: mol_type = other DNA
aaggatccaggcgatactttcagcaatttcataagccactggctcttccctgcccccatcattcagccgattcgt

SEQ ID NO: 129072 - DNA, 75 bp, synthetic construct
  source 1..75: mol_type = other DNA
gcccactcgaacgaatctgaatgggtgactttccgtaataataaaaacaacgaagcctttctcgaccgtgtttat

SEQ ID NO: 129073 - DNA, 75 bp, synthetic construct
  source 1..75: mol_type = other DNA
aactggcggatggtggggcattatcgttattttgttaaataagagatcgccccacatgaagaaaaaattcagatc

SEQ ID NO: 129074 - DNA, 75 bp, synthetic construct
  source 1..75: mol_type = other DNA
gtctcctggcgattagataacgggctggcacatattggggtggtttcagatggcttcgcccgcgacggtacgccg

SEQ ID NO: 129075 - DNA, 75 bp, synthetic construct
  source 1..75: mol_type = other DNA
cagtgactatcaagcgggcgatattgtctcctggcgattagataacgggctggcacatattggggtggtttcaga

SEQ ID NO: 129076 - DNA, 75 bp, synthetic construct
  source 1..75: mol_type = other DNA
agttaaagcgcccggacagcaacatcgatcaccgtcgggtgcctaatctggaaacctggtttagccgccacgata

SEQ ID NO: 129077 - DNA, 75 bp, synthetic construct
  source 1..75: mol_type = other DNA
tttgccgagtacccgcaaaaatggcagttaaagcgcccggacagcaacatcgatcaccgtcgtatagcgcggcga

SEQ ID NO: 129078 - DNA, 75 bp, synthetic construct
  source 1..75: mol_type = other DNA
ctccttaaaatcccccgccgttccaccaaccgtggtacaaatccaggccaacaccaaccttgccatcgcagacgg

SEQ ID NO: 129079 - DNA, 75 bp, synthetic construct
  source 1..75: mol_type = other DNA
ggcataaacaaagagatggtaaaatttgctaagtcacccatcacagcgaatcttacgatagatcaacaatttgat

SEQ ID NO: 129080 - DNA, 75 bp, synthetic construct
  source 1..75: mol_type = other DNA
ggttatctaacatacatatccccaaaaaacgaagagatattttcttagaatatttaaaaatacgccaactcccag

SEQ ID NO: 129081 - DNA, 75 bp, synthetic construct
  source 1..75: mol_type = other DNA
aagataaacagtatagccacagaaaatgatattgtcgaacttccagatgcgtgggggctttatcataatgaaaca

SEQ ID NO: 129082 - DNA, 75 bp, synthetic construct
  source 1..75: mol_type = other DNA
tttgccgagtacccgcaaaaatggcagttaaagcgcccggacagcaacatcgatcaccgtcgggtgcctaatctg

SEQ ID NO: 129083 - DNA, 75 bp, synthetic construct
  source 1..75: mol_type = other DNA
aacagcaagctaaagcgatcagggaatggctaaacgctcataacaaaagcctgatagctgacgttacgttaatga

SEQ ID NO: 129084 - DNA, 75 bp, synthetic construct
  source 1..75: mol_type = other DNA
tttagcctcaataaaaatgatgcacttaaaggacctaatggggaaaaaaaccaaaaaataaaatattctcataat

SEQ ID NO: 129085 - DNA, 75 bp, synthetic construct
  source 1..75: mol_type = other DNA
tactattttgcttcggtggtgaaaaattatccgaagtcaccgaaggctgctgatgcgatgtttaaagttggcgtc

SEQ ID NO: 129086 - DNA, 75 bp, synthetic construct
  source 1..75: mol_type = other DNA
agcgactgtaacaacgacgccaacggctgatgcaggaactgcaaacgctggcgcggcagtgaaaagcggcgatcc

SEQ ID NO: 129087 - DNA, 75 bp, synthetic construct
  source 1..75: mol_type = other DNA
actgtacgcgcatccaatgatgatgaattaaatcaaaaaataagtgaggcgacatcccgttatctatgtctataa

SEQ ID NO: 129088 - DNA, 75 bp, synthetic construct
  source 1..75: mol_type = other DNA
gaacgccacaacatgattaatcgcctgctgcaactgaaccatcgaccagatgaagaacgctcacgtttgaatcga

SEQ ID NO: 129089 - DNA, 75 bp, synthetic construct
  source 1..75: mol_type = other DNA
cgttctgatgaacagcgcaagatgaaggaacagcaggctgctgaagaactgcgtgagaaacaagcggctgaacag

SEQ ID NO: 129090 - DNA, 75 bp, synthetic construct
  source 1..75: mol_type = other DNA
gctgatgctggtactgcgaatgctggcgcgccggtgaaaagcggcgatgcaaacactgattacaatgcagctatt

SEQ ID NO: 129091 - DNA, 75 bp, synthetic construct
  source 1..75: mol_type = other DNA
acggtcgctgcgcgaatcaacgaatatgccgcgcttggcatcgacagttttgtgctttcgggctatccgcatctg

SEQ ID NO: 129092 - DNA, 75 bp, synthetic construct
  source 1..75: mol_type = other DNA
aatttatgatgaaagacattgataaatatctggatgatatcactctgaacgccatcacagtggatagcaaaacta

SEQ ID NO: 129093 - DNA, 75 bp, synthetic construct
  source 1..75: mol_type = other DNA
gtcattgcctctaaccatcaaagctaccggcataccgggcttaagccaggcgaaaccgtggtctataaccagcag

SEQ ID NO: 129094 - DNA, 75 bp, synthetic construct
  source 1..75: mol_type = other DNA
gtgttagccgctacattaaaggcactaaaggtaaaaaagatctcatttctgtggctgttgaaccaagcgactctc

SEQ ID NO: 129095 - DNA, 75 bp, synthetic construct
  source 1..75: mol_type = other DNA
tcagaaacgccagcctgacggtggccgatcgccatttactctatgatgacggcctggttgattctttacctccgc

SEQ ID NO: 129096 - DNA, 75 bp, synthetic construct
  source 1..75: mol_type = other DNA
tgccatcaatcccaacaaacaaggcgtggtgattgatgtcctgatcgagcggcgttttaccgatctggtgaaaaa

SEQ ID NO: 129097 - DNA, 75 bp, synthetic construct
  source 1..75: mol_type = other DNA
ctggtttgaaaccattagcgactgcaaaatcgttctatgagctcaagcatgagttcaatatgacgggggagcaaa

SEQ ID NO: 129098 - DNA, 75 bp, synthetic construct
  source 1..75: mol_type = other DNA
gactccaggctcagttggaaatgaaaaaaaatgctgcagttgtttctgatattgaacaggttattgctaataaac

SEQ ID NO: 129099 - DNA, 75 bp, synthetic construct
  source 1..75: mol_type = other DNA
gaaaaaatggccgggatggggggtaaagctgatgtggtgatcatgatggtgactggccagacgcatgaaaccttt

SEQ ID NO: 129100 - DNA, 75 bp, synthetic construct
  source 1..75: mol_type = other DNA
accagagccgtattgaagcattaattcagcagttaaaagcggcgggcagcgtgctgatttccgcaccgcgtatcg

SEQ ID NO: 129101 - DNA, 75 bp, synthetic construct
  source 1..75: mol_type = other DNA
gcgctcccttcgccgatcctcatgccagagcggtgatttgcgggctgggtatggagtgcgatcaggataatttac

SEQ ID NO: 129102 - DNA, 75 bp, synthetic construct
  source 1..75: mol_type = other DNA
taccttcgaaactatagggatgcttaccccgcctcgttgttatcctcgtgacagacgtggctaccagatatggtt

SEQ ID NO: 129103 - DNA, 75 bp, synthetic construct
  source 1..75: mol_type = other DNA
ggggttgccggtggccattccgctgtctgtgccaaccagcagggtggcattatctgcggcggctgtcagccaggc

SEQ ID NO: 129104 - DNA, 75 bp, synthetic construct
  source 1..75: mol_type = other DNA
ggttaatgctgttcgctatcttgctgaacgcctggccggaacaggggggaatgcggacatggtgattatgatggt

SEQ ID NO: 129105 - DNA, 75 bp, synthetic construct
  source 1..75: mol_type = other DNA
caccggacagacgcaggaaaactttatggccagcctgaataacctggtcgggattttccccgccccggcattcac

SEQ ID NO: 129106 - DNA, 75 bp, synthetic construct
  source 1..75: mol_type = other DNA
atgtggcgtgaagcacgtctggccttcacggattcagttgctgcgctgaactgttcgatcgtccctgcgcatccg

SEQ ID NO: 129107 - DNA, 75 bp, synthetic construct
  source 1..75: mol_type = other DNA
tgattttgattttaggggtagcggtactggtatctggattcattaaggtactatatgtaggctttttcgtgtttt

SEQ ID NO: 129108 - DNA, 75 bp, synthetic construct
  source 1..75: mol_type = other DNA
tttagtctccaggattcccggggcggttcaaagcgtgggttctctgcaaaaaacttacgccaaatgaggcttttt

SEQ ID NO: 129109 - DNA, 75 bp, synthetic construct
  source 1..75: mol_type = other DNA
aaggcaattaccttacgcgagggcgatcagaccatttctcttaatggattaaaagcggcgttgttgtttattgat

SEQ ID NO: 129110 - DNA, 75 bp, synthetic construct
  source 1..75: mol_type = other DNA
atggcctcacaacaagccttgcaggatcgcatcttaaaggaaatcatcgaccgcattccgcaacgagaagtttct

SEQ ID NO: 129111 - DNA, 75 bp, synthetic construct
  source 1..75: mol_type = other DNA
aagctggaagagatctcctctggcactttgttggttgccggaatgcacctgaccgatcctcacgtaaacgagtgc

SEQ ID NO: 129112 - DNA, 75 bp, synthetic construct
  source 1..75: mol_type = other DNA
tagggatagcggtactggcttatatagtgaagggattcacttttctataccaatcaattatttataaaaaatcta

SEQ ID NO: 129113 - DNA, 75 bp, synthetic construct
  source 1..75: mol_type = other DNA
gatcattattggcatggtgtggagtattcgctttaaaacaatttcgccacacaaccatcgcaagatattacgttt

SEQ ID NO: 129114 - DNA, 75 bp, synthetic construct
  source 1..75: mol_type = other DNA
attcgttttatgccgctggacagtgaaaacggacaggtaccggaacgtctggatttcgaactggcctgttgctaa

SEQ ID NO: 129115 - DNA, 75 bp, synthetic construct
  source 1..75: mol_type = other DNA
acttaccatggtgttagatttaattcgccagtcggcaccgtttcgcaaacaaaccagtctgaacggtttctatca

SEQ ID NO: 129116 - DNA, 75 bp, synthetic construct
  source 1..75: mol_type = other DNA
gacggtcagcgttttcgcctggtgcgttacgccgcagaacccacctgcgataactggcatgggccagacgcctgg

SEQ ID NO: 129117 - DNA, 75 bp, synthetic construct
  source 1..75: mol_type = other DNA
taaaaagccgctggcctcgcgcccggtacggttgcgtttgccgttcaacaacggtcaggagaccaatgaactgga

SEQ ID NO: 129118 - DNA, 75 bp, synthetic construct
  source 1..75: mol_type = other DNA
gtccactggtgatggtcggttattctttgagccatattgacggtgtagtcagatttggctcactttatgaatatg

SEQ ID NO: 129119 - DNA, 75 bp, synthetic construct
  source 1..75: mol_type = other DNA
caatgtcaccacgattattatggggagcagtactgcacacactgccagaccgggcgattcagtgaggagggggta

SEQ ID NO: 129120 - DNA, 75 bp, synthetic construct
  source 1..75: mol_type = other DNA
cgcttgatttatcgtctgcagcaattcgttccggatgccttacccgtggtccgtaaagccagctggcactgcaga

SEQ ID NO: 129121 - DNA, 75 bp, synthetic construct
  source 1..75: mol_type = other DNA
cgcttgatttatcgtctgcagcaattcgttccggatgccttacccgtggtacgtaaagccagctggcactgcagc

SEQ ID NO: 129122 - DNA, 75 bp, synthetic construct
  source 1..75: mol_type = other DNA
caatgtcaccacgattattatggggagcggtactgcacacactgccagaccgggcggttcagtgaggaggcggta

SEQ ID NO: 129123 - DNA, 75 bp, synthetic construct
  source 1..75: mol_type = other DNA
caatgtcaccacgattattatggggagccgtactgcacacactgccagaccgggcgtttcagtgaggaggtggta

SEQ ID NO: 129124 - DNA, 75 bp, synthetic construct
  source 1..75: mol_type = other DNA
caatgtcaccacgattattatggggagctgtactgcacacactgccagaccgggcgcttcagtgaggaggtggta

SEQ ID NO: 129125 - DNA, 75 bp, synthetic construct
  source 1..75: mol_type = other DNA
ggaaaaatgccagaaggctggtatcagatccccgtgacaaaggaaaccctgcaggcccctgccggaatgtccgca

SEQ ID NO: 129126 - DNA, 75 bp, synthetic construct
  source 1..75: mol_type = other DNA
tgccattgataaaaatggtctttcagaaaatgtagagtcaattttttatataaatgtaatggctataccttcaga

SEQ ID NO: 129127 - DNA, 75 bp, synthetic construct
  source 1..75: mol_type = other DNA
ttgcattattgttaactgcgtgcgccgcaaatccacctagccaagttcagttgcactcggctgattatggggtgt

SEQ ID NO: 129128 - DNA, 75 bp, synthetic construct
  source 1..75: mol_type = other DNA
tgtttttttctgtagtattgtctcctgtatgttcctcaaaatcagagggtttgtcactttctcaaacaagggtag

SEQ ID NO: 129129 - DNA, 75 bp, synthetic construct
  source 1..75: mol_type = other DNA
gccgggaacccgtgccgtgatgttcagccagcctgccagccagttactggcaggtgcgcgcatggatgtgtatgt

SEQ ID NO: 129130 - DNA, 75 bp, synthetic construct
  source 1..75: mol_type = other DNA
tcgacggtaacggtcgcctgaccggagctcgtactgcgcagacagcgccttacgatcgctatacctgccatatgt

SEQ ID NO: 129131 - DNA, 75 bp, synthetic construct
  source 1..75: mol_type = other DNA
ggaactcgagagcgaggggagattccggcagggcgtgcacggtttatccccgctggcgcggggaactcgcgggta

SEQ ID NO: 129132 - DNA, 75 bp, synthetic construct
  source 1..75: mol_type = other DNA
tgtcgagcattacattcagggcgatccggatctggcaaaactgccggtgctttcagctgctgcaccgtttaaagt

SEQ ID NO: 129133 - DNA, 75 bp, synthetic construct
  source 1..75: mol_type = other DNA
tgcccttatgtcagaccggaacgcagggaggtacgcttgattaagcgtctgcagcaattcgtaccggatgcctta

SEQ ID NO: 129134 - DNA, 75 bp, synthetic construct
  source 1..75: mol_type = other DNA
caatgccgccacgattattatggggaacgctattgtacacactgtcatacagggcacttcagtgaggaggtggta

SEQ ID NO: 129135 - DNA, 75 bp, synthetic construct
  source 1..75: mol_type = other DNA
gcgtaaagcccgctggcactgcagacaatgccgccacgattattatggggaacgctattgtacacactgtcatac

SEQ ID NO: 129136 - DNA, 75 bp, synthetic construct
  source 1..75: mol_type = other DNA
cgctatcttaagccaagatataacgctgataacatgtatgactatttaagtctcaccagccctgcaatggttcag

SEQ ID NO: 129137 - DNA, 75 bp, synthetic construct
  source 1..75: mol_type = other DNA
atgtacgcaaaatcctttgtcgctcttgatcgcaacggacgtctgacgggcgcccgtactgcacaggccgcacct

SEQ ID NO: 129138 - DNA, 75 bp, synthetic construct
  source 1..75: mol_type = other DNA
atgtacgcaaaatcctttctcgctcttgatcgcaacggacgtctgacgggcgcccgtactggacaggccgcacct

SEQ ID NO: 129139 - DNA, 75 bp, synthetic construct
  source 1..75: mol_type = other DNA
cgatcatctgggcgtggtcgatctgcaactcaataatgacagcgggaaatggcaggtcacacaggcgaaagcaga

SEQ ID NO: 129140 - DNA, 75 bp, synthetic construct
  source 1..75: mol_type = other DNA
caactcagtaatgacagcggtaaatggcaggtgacgcaggcgaaagcggaagcacgaccgatttacgacatcgcc

SEQ ID NO: 129141 - DNA, 75 bp, synthetic construct
  source 1..75: mol_type = other DNA
acaccgaagtggtcgataaagacggaaaaaaacagacgctgaagattggctatattggcgtcgtaccgccgcaaa

SEQ ID NO: 129142 - DNA, 75 bp, synthetic construct
  source 1..75: mol_type = other DNA
tgcgggttgaagaggacgattatgacagccgtttcctgcgctgcgtggagctggtgcgggagatgatgggggagc

SEQ ID NO: 129143 - DNA, 75 bp, synthetic construct
  source 1..75: mol_type = other DNA
gaaggggatccagccggacttgatctacacctcggaagaagccgacgcgccgcagtatatggaacatctggggat

SEQ ID NO: 129144 - DNA, 75 bp, synthetic construct
  source 1..75: mol_type = other DNA
cggtaaatccaccctggtaaacaaacttgccaatatcttcaataccaccagtgcgtgggaatatggtcgcgatta

SEQ ID NO: 129145 - DNA, 75 bp, synthetic construct
  source 1..75: mol_type = other DNA
caacgaagagggcatggagccatatccgcacggctgggatgtgtggagcaacggcatcaaaaagtttatggccga

SEQ ID NO: 129146 - DNA, 75 bp, synthetic construct
  source 1..75: mol_type = other DNA
acggcatcaaaaagtttatggccgaaaagggcattcagccggatctgatctacacctcggaagaagccgacgcgc

SEQ ID NO: 129147 - DNA, 75 bp, synthetic construct
  source 1..75: mol_type = other DNA
gttccagaacttgctggtggagatgctggaagagaacaatatcgaatttgtgcgggttgaagaggaagattacga

SEQ ID NO: 129148 - DNA, 75 bp, synthetic construct
  source 1..75: mol_type = other DNA
ttgcggtcatcggcggcggcaataccgcggttgaagaggcgctgtatctgtctaacatcgcttcggaagtgcatc

SEQ ID NO: 129149 - DNA, 75 bp, synthetic construct
  source 1..75: mol_type = other DNA
taaaccggttctttggggggaaactctctaccgggaagagtatgaaatacattactcatcgcaccgtcaggcgtg

SEQ ID NO: 129150 - DNA, 75 bp, synthetic construct
  source 1..75: mol_type = other DNA
aatgggtgaaacagaacatctgggctgaatactggaagaaggtcacggatatgaccaacgttctgctgatcatgc

SEQ ID NO: 129151 - DNA, 75 bp, synthetic construct
  source 1..75: mol_type = other DNA
gccaaccgtgccggatcgtctgcgctggttattgcagacctttaagtatcaaaaaaatatccgcattcatgcttt

SEQ ID NO: 129152 - DNA, 75 bp, synthetic construct
  source 1..75: mol_type = other DNA
tgtcttttcacaccttggcggtgatgagatcgcattgcagtattccgactacgataaaatcgcgctgggacacgc

SEQ ID NO: 129153 - DNA, 75 bp, synthetic construct
  source 1..75: mol_type = other DNA
ctttgcagcaaccagagaagagcaaaagaatcacagagcagataacacctggcgcaataccgctgtgattaccga

SEQ ID NO: 129154 - DNA, 75 bp, synthetic construct
  source 1..75: mol_type = other DNA
cttccggtgatgggattagctttcctcctggaacaatcgtaactttcgattcatcgctagaggctgtttctggtg

SEQ ID NO: 129155 - DNA, 75 bp, synthetic construct
  source 1..75: mol_type = other DNA
ggacaactgccagaaggctggtatcagatccccgtgacaaaggaaaccctgcaggcccctgccggaatgtccgca

SEQ ID NO: 129156 - DNA, 75 bp, synthetic construct
  source 1..75: mol_type = other DNA
atgagaaaaaataagacagtaataatatccgcctgcctgcttttttccggcagcgtgatggcaggaaacggcaca

SEQ ID NO: 129157 - DNA, 75 bp, synthetic construct
  source 1..75: mol_type = other DNA
tatgctcactacacctgccacttgtgtggcagtgcactcagataccatccgcaatacgaaactgaacttccctgg

SEQ ID NO: 129158 - DNA, 75 bp, synthetic construct
  source 1..75: mol_type = other DNA
tttgaacacaccgacgaagagctgactgaacacgctcagcagtgtccttacgtcaggcctgatcgcagggaagtg

SEQ ID NO: 129159 - DNA, 75 bp, synthetic construct
  source 1..75: mol_type = other DNA
cttacacaggctgaggaagaggctacccgacagaaagtggcgtttatccgtcagcttaaagagcaggcatccgtc

SEQ ID NO: 129160 - DNA, 75 bp, synthetic construct
  source 1..75: mol_type = other DNA
ccgtgccgtgatgttcagccagcctgccagccagttactggcaggtgcgcgcatggatgtgtatgtcatccgtga

SEQ ID NO: 129161 - DNA, 75 bp, synthetic construct
  source 1..75: mol_type = other DNA
tttcttatttttgcgaaggttataaaatccttttttcaaccatggtaccttatatgaacgccatggtagagttag

SEQ ID NO: 129162 - DNA, 75 bp, synthetic construct
  source 1..75: mol_type = other DNA
ggcggttgtcctaagcatcgtattactaaagtaaacaatgagactgtttcttatttttgcgaaggttataaaatc

SEQ ID NO: 129163 - DNA, 75 bp, synthetic construct
  source 1..75: mol_type = other DNA
tcgccgtgaacagtctggatggtgcgctgaccaataatgagcagactgcgtccggtggtgtggtggtggccaccg

SEQ ID NO: 129164 - DNA, 75 bp, synthetic construct
  source 1..75: mol_type = other DNA
ggcagccgggaacccgtgccgtgatgttcagccagcctgccagccagttactggccggtgcccgtatggacgtct

SEQ ID NO: 129165 - DNA, 75 bp, synthetic construct
  source 1..75: mol_type = other DNA
ggtgctgaagcacatactattttttactcccatgggaaaatagactccgctgatgctcaggtgaatgcgggctat

SEQ ID NO: 129166 - DNA, 75 bp, synthetic construct
  source 1..75: mol_type = other DNA
atctcgacgtactgcgcgacaaagcgccggtgggcaacaaagttgccatcatcggttgtggcgggattggttttg

SEQ ID NO: 129167 - DNA, 75 bp, synthetic construct
  source 1..75: mol_type = other DNA
tgctctcgcgcggcgtgaaaatgatcccaggcgtaagttatcagaagatcgacgatgacgggctgcatgtggtga

SEQ ID NO: 129168 - DNA, 75 bp, synthetic construct
  source 1..75: mol_type = other DNA
ggggcggcgattaccacaaccggatgcggtttgccgttgaagtggtgagtgcggtacgcgaacgcgttggcaacg

SEQ ID NO: 129169 - DNA, 75 bp, synthetic construct
  source 1..75: mol_type = other DNA
cccaggcgtaagttatcagaagatcgatgatgacggactgcatgtggtgatcaacggtgaaacgcaggtattcgc

SEQ ID NO: 129170 - DNA, 75 bp, synthetic construct
  source 1..75: mol_type = other DNA
atcgatcatccgaaagtactgagttacctcgatgtactgcgcgacaaagcgccagtgggcaacaaagtcgccatc

SEQ ID NO: 129171 - DNA, 75 bp, synthetic construct
  source 1..75: mol_type = other DNA
cgatggcgcgaccgtttcttgctgatgcggaactgctgtcaaaagcgcaatcagggcgagccgatgagatcaaca

SEQ ID NO: 129172 - DNA, 75 bp, synthetic construct
  source 1..75: mol_type = other DNA
cgctggatttaggcttcaccacgttaaaaaaccgagtactgatgggttcaatgcacacgggactggaggaatacc

SEQ ID NO: 129173 - DNA, 75 bp, synthetic construct
  source 1..75: mol_type = other DNA
acttcattattatctaccggttgtcgatgctcgacctggtcgaaggcggcggcacttttgccgaaacggtagaac

SEQ ID NO: 129174 - DNA, 75 bp, synthetic construct
  source 1..75: mol_type = other DNA
ctcagttatctgtgcggacacttcccgccgggtaactggctggtggtgttttttaacctgctggtctgtgtgctg

SEQ ID NO: 129175 - DNA, 75 bp, synthetic construct
  source 1..75: mol_type = other DNA
gcagtgcgcgaacgcgtcggcaatgacttcattattatctaccgtctgtcgatgctcgacctggtagaaggcggc

SEQ ID NO: 129176 - DNA, 75 bp, synthetic construct
  source 1..75: mol_type = other DNA
cgcgaccattatcaacaccggcattggctggcatgaagcgcgtattccgaccatcgccacgcccgtgccgcgcgg

SEQ ID NO: 129177 - DNA, 75 bp, synthetic construct
  source 1..75: mol_type = other DNA
cgctggatttaggttttacctcgttaaaaaaccgcgtgttgatgggttcaatgcacaccgggctggaggaatacc

SEQ ID NO: 129178 - DNA, 75 bp, synthetic construct
  source 1..75: mol_type = other DNA
atcgcgacgaaatcaccaaagaaggttttcagagcaaccacgcaggcggcattcttggtggcatcagcagcgggc

SEQ ID NO: 129179 - DNA, 75 bp, synthetic construct
  source 1..75: mol_type = other DNA
gttttccgtccaggccatgccgattacacctacgaacaaaaatacggactgcgcgattatcgcggcggtggacgt

SEQ ID NO: 129180 - DNA, 75 bp, synthetic construct
  source 1..75: mol_type = other DNA
gcggttggttgcgtaaagcggcgttgggacgcgcgttggtgagcaatccgcgcgtgttactgctcgacgaaccga

SEQ ID NO: 129181 - DNA, 75 bp, synthetic construct
  source 1..75: mol_type = other DNA
gaaaccgacctccagcattaccgtgccggggcgcactattaaccgctttggcgaagaagttgagatgatcaccaa

SEQ ID NO: 129182 - DNA, 75 bp, synthetic construct
  source 1..75: mol_type = other DNA
gcgcgattatcgcggcggtggacgttcttccgcccgcgaaaccgccatgcgcgtagcggcaggggcgattgccaa

SEQ ID NO: 129183 - DNA, 75 bp, synthetic construct
  source 1..75: mol_type = other DNA
gatgcgcgcgctgaaaaaagagggcgactctattggcgcgaaagtcaccgtggtggccagtggcgtccctgccgg

SEQ ID NO: 129184 - DNA, 75 bp, synthetic construct
  source 1..75: mol_type = other DNA
gctggaaaaagaagaagccctgcgtgtggaagaattacaaaatgccgagtttgatcgcaaactggcgcaagaaga

SEQ ID NO: 129185 - DNA, 75 bp, synthetic construct
  source 1..75: mol_type = other DNA
cgatgacaccggtacgtgcgctttctggcggggagcgtaaccgcttgctgctggcacgtttgtttcttaagccaa

SEQ ID NO: 129186 - DNA, 75 bp, synthetic construct
  source 1..75: mol_type = other DNA
tggtgggccgcaacggcgcaggcaaatcgacgttaatgaaaatcctcaaccgtgaacaagggctggatgacggtc

SEQ ID NO: 129187 - DNA, 75 bp, synthetic construct
  source 1..75: mol_type = other DNA
atcgaagataacgaacgtgtttgtctggtggggcgtaacggcgcaggcaaatcgacgttaatgaagatcctcaac

SEQ ID NO: 129188 - DNA, 75 bp, synthetic construct
  source 1..75: mol_type = other DNA
catggctgtcgttcaacgacgcgccgcttctcgataacgcagaactgcatatcgaagataacgaacgtgtttgtc

SEQ ID NO: 129189 - DNA, 75 bp, synthetic construct
  source 1..75: mol_type = other DNA
cgatgacgccagtacgtgcgctttccggcggggagcgcaaccgtctgctgttggcgcgtctgttcctcaagccaa

SEQ ID NO: 129190 - DNA, 75 bp, synthetic construct
  source 1..75: mol_type = other DNA
aagtcggtaaaggcagcctatgaccttgctaacgggaaatatactgctcaggacgctacgacagcacaaaaagga

SEQ ID NO: 129191 - DNA, 75 bp, synthetic construct
  source 1..75: mol_type = other DNA
gaaacgcgtcaacttgcgccagcacaacgacgatatcctcaccccacttatcgcggcgggtgtaacgctgcttcc

SEQ ID NO: 129192 - DNA, 75 bp, synthetic construct
  source 1..75: mol_type = other DNA
aacgacgctatcctcgaaccacttatcgcggcgggtgtaacactgctgccgaatacttccggagcgaaaactgcg

SEQ ID NO: 129193 - DNA, 75 bp, synthetic construct
  source 1..75: mol_type = other DNA
tgcgccgcgctgcgggaggttaacaagtgccgggatattctccgggatattaccgccaccagagaacagcagcgg

SEQ ID NO: 129194 - DNA, 75 bp, synthetic construct
  source 1..75: mol_type = other DNA
gagcgagtctgcgccgcgctacgggagctgaacaagtgccgggatattctccgggatattaccgccaccagagaa

SEQ ID NO: 129195 - DNA, 75 bp, synthetic construct
  source 1..75: mol_type = other DNA
agctgataacaaggggtcgatgtggtggctgacgagtgaggcaactgaaatggccacaaaaaccactgcggagat

SEQ ID NO: 129196 - DNA, 75 bp, synthetic construct
  source 1..75: mol_type = other DNA
agagttcacactgcaggagtttcttaccacttgtcggaaagatcgcagtgcttatgccaacgcggctgagcggct

SEQ ID NO: 129197 - DNA, 75 bp, synthetic construct
  source 1..75: mol_type = other DNA
accagcggggatcagcaatccgaaagatttccgtaacgagattgtcaacttcgtgctgcgcgccagagcaaataa

SEQ ID NO: 129198 - DNA, 75 bp, synthetic construct
  source 1..75: mol_type = other DNA
gcacgctggaaacactgtcacgtttttccattctttcgcgcctgaaagagccagaaaactccagcatttattcaa

SEQ ID NO: 129199 - DNA, 75 bp, synthetic construct
  source 1..75: mol_type = other DNA
gcgaagggcaaattcgccagtcggaacagtatctcggcgcggattatttcccggtgaaaaccaccctcatcaagg

SEQ ID NO: 129200 - DNA, 75 bp, synthetic construct
  source 1..75: mol_type = other DNA
aactcctgctggatgccggggccgaatataacggctatgcggctgatctaacccgtacctggtcggcaaaaagcg

SEQ ID NO: 129201 - DNA, 75 bp, synthetic construct
  source 1..75: mol_type = other DNA
cgccagtcggaacagtatctcggcgcggattatttcccggtgaaaaccactctcatcaaggcggcaaaacaatga

SEQ ID NO: 129202 - DNA, 75 bp, synthetic construct
  source 1..75: mol_type = other DNA
ggatggtgttattctgggcgcggtgtattcagacgtcgataaaccaccgttcagtgataaaaacgtccggggcac

SEQ ID NO: 129203 - DNA, 75 bp, synthetic construct
  source 1..75: mol_type = other DNA
cctgagtgcgataacctgcgcactaactggcttaacgtgctgcagcgcaacacccaggataacaaggattactgg

SEQ ID NO: 129204 - DNA, 75 bp, synthetic construct
  source 1..75: mol_type = other DNA
tgttggccacttcaggtaaggtaagcgttgttacatctgctgcggtgacaacaatgtccggtcaacctgtacctt

SEQ ID NO: 129205 - DNA, 75 bp, synthetic construct
  source 1..75: mol_type = other DNA
cgcgaccatccatggcaatatcgagattaaagggaatgtccatgccacgggcagtatgttgtctgatggcgaaaa

SEQ ID NO: 129206 - DNA, 75 bp, synthetic construct
  source 1..75: mol_type = other DNA
tgccagtattcaggggaatgtggaagttaacggtaatgtccactcaaccggcagcatgttatcggatggccctaa

SEQ ID NO: 129207 - DNA, 75 bp, synthetic construct
  source 1..75: mol_type = other DNA
cgtgtatgcggatggggctgaattcagctataaccgggaaacacacacgctgattgtccggggcggtattgacca

SEQ ID NO: 129208 - DNA, 75 bp, synthetic construct
  source 1..75: mol_type = other DNA
aaaacggaaagtgtggcggtcacagtgcagtcacagccgtcgttcaccagaaaacatccggatggtctgatttta

SEQ ID NO: 129209 - DNA, 75 bp, synthetic construct
  source 1..75: mol_type = other DNA
gtggcggtcacagtgcagtcacagccgtcgttcaccagaaagcatccggatggtctgattttaccatcgctgcat

SEQ ID NO: 129210 - DNA, 75 bp, synthetic construct
  source 1..75: mol_type = other DNA
aaccagtgtcaccggtaccgaaagtgacagcgcaaatgctgactgaggcgattgaacaacatggcccacaaacgg

SEQ ID NO: 129211 - DNA, 75 bp, synthetic construct
  source 1..75: mol_type = other DNA
caggtacagacatctataataagagtttgaaagatgttaatcagattctggatgattctggattacagatgaaaa

SEQ ID NO: 129212 - DNA, 75 bp, synthetic construct
  source 1..75: mol_type = other DNA
catttaccgggatctgactgttccggcatcgatgagcaatttgccggagaagcagcagataagcgtaccggggat

SEQ ID NO: 129213 - DNA, 75 bp, synthetic construct
  source 1..75: mol_type = other DNA
agaaactgtggcggacattgtgcagtcgttgccatcgttcaccgaaacgcaagcggatgacctggttttaccatc

SEQ ID NO: 129214 - DNA, 75 bp, synthetic construct
  source 1..75: mol_type = other DNA
atgcagcactggtctacaaaattttttgcatttcagaaagtaatgacgcccgcgagtgtgcagctccgggcgccg

SEQ ID NO: 129215 - DNA, 75 bp, synthetic construct
  source 1..75: mol_type = other DNA
gtgcgctggacaaactgatcgtcaaaccgaacgccgtgaatggcgaactttcggaagatgatattcagctatttc

SEQ ID NO: 129216 - DNA, 75 bp, synthetic construct
  source 1..75: mol_type = other DNA
tttggcattctggtgatgacgtttattatcaacgcctgggtgaattatcggcatgataagcagcggggagaatga

SEQ ID NO: 129217 - DNA, 75 bp, synthetic construct
  source 1..75: mol_type = other DNA
aatgaagctcaatgtatgcttagaagattttgtctctctggtgagcgatttagagctatcagatgccaagatgtg

SEQ ID NO: 129218 - DNA, 75 bp, synthetic construct
  source 1..75: mol_type = other DNA
tctgaaagaacatttcattattttgaagcaagagaataaacttgatgaactggatgaggatagatttgggtacca

SEQ ID NO: 129219 - DNA, 75 bp, synthetic construct
  source 1..75: mol_type = other DNA
gcgtggcgctaagagagccggtgaccaccgaagaactggcctcattcattgcctactggcaggcggaaggtaaag

SEQ ID NO: 129220 - DNA, 75 bp, synthetic construct
  source 1..75: mol_type = other DNA
caaaatcttttgcgtttcagaaagtagtgacgcccgcgagtgtgcagctccgggcgccgtggcgtgtcgtgactg

SEQ ID NO: 129221 - DNA, 75 bp, synthetic construct
  source 1..75: mol_type = other DNA
agatcgggagttactcaaagcagattcgttcggcaatcgaagacgggatagtggagccacatgagcagacagcaa

SEQ ID NO: 129222 - DNA, 75 bp, synthetic construct
  source 1..75: mol_type = other DNA
cccgacagaccttgagcttatcagcaccaaagctgctgcgctggatgaaatgcttgaggaggtggcaacgcgggg

SEQ ID NO: 129223 - DNA, 75 bp, synthetic construct
  source 1..75: mol_type = other DNA
cgctggtgcgctggctacgcggtcatttgcgcatgaccgacaccatcgacaacgagcatttctttgtgcgtaaga

SEQ ID NO: 129224 - DNA, 75 bp, synthetic construct
  source 1..75: mol_type = other DNA
ggcctggtcgctggtctgggtgacgctgtcgttactgtttaacgccgctttctggtggtatctggtgcaaactga

SEQ ID NO: 129225 - DNA, 75 bp, synthetic construct
  source 1..75: mol_type = other DNA
acttctaccatattccgatcgccgtctcgctgggcgtggtgtttggcattctggtgatgacgtttattatcaacg

SEQ ID NO: 129226 - DNA, 75 bp, synthetic construct
  source 1..75: mol_type = other DNA
tcgcatcattcggaatatttaacggtgcggatgtcggaaaaaccatagacaatggtttatatttgctgattattt

SEQ ID NO: 129227 - DNA, 75 bp, synthetic construct
  source 1..75: mol_type = other DNA
ttggatgccagtaaatacgtcacttcaaccatgctgtttgtctatattgtgatcattattggcatggtgtggagt

SEQ ID NO: 129228 - DNA, 75 bp, synthetic construct
  source 1..75: mol_type = other DNA
gcacagcaaacggggatgaccattattgaagagcctgaacgcggtattcacccaaaagccattggggaacttgtg

SEQ ID NO: 129229 - DNA, 75 bp, synthetic construct
  source 1..75: mol_type = other DNA
caaattgcgacccagttttatgagcggacactactgtcacatgacaaatcagccatgctgcaacaacacgctcct

SEQ ID NO: 129230 - DNA, 75 bp, synthetic construct
  source 1..75: mol_type = other DNA
gacgatacccgtgaccgtgcgttgtttgaagacagcgccatgtcgcagcagcccacggtgccggatcgtctgcgc

SEQ ID NO: 129231 - DNA, 75 bp, synthetic construct
  source 1..75: mol_type = other DNA
ccagaaatttatggcagtttaagaatttttatatttgttttcaacgaattgaaattgtgcagacactgtctgcac

SEQ ID NO: 129232 - DNA, 75 bp, synthetic construct
  source 1..75: mol_type = other DNA
tggcccggagcaacggcaaggattatggctctatcacgttatcgaaccggatcgctgggctgctatgtgcgcacg

SEQ ID NO: 129233 - DNA, 75 bp, synthetic construct
  source 1..75: mol_type = other DNA
gaggacaacacccagttcatcctgtcttcagaggatggtgggcgattggtggtggttcagcttttgaataattag

SEQ ID NO: 129234 - DNA, 75 bp, synthetic construct
  source 1..75: mol_type = other DNA
ccagcctgaacccgctcacccaggcacttaccatggtgctggatttaattcgccagtcggcccccttccgtaaac

SEQ ID NO: 129235 - DNA, 75 bp, synthetic construct
  source 1..75: mol_type = other DNA
gccgaatatttctgcaagcagcacaaaaacgttattcaaaaaatccagacgcttgagtgctctgttgaattcact

SEQ ID NO: 129236 - DNA, 75 bp, synthetic construct
  source 1..75: mol_type = other DNA
taagctttataccgggatcaccacggatgtcgaacgccgctatcagcagcaccaaagcggcaaaggggcgaaagc

SEQ ID NO: 129237 - DNA, 75 bp, synthetic construct
  source 1..75: mol_type = other DNA
acgcgccttcgcgggatgataatcgtgaaaaattcccccctgtacagagcatgatttatacccgccgacgtgcag

SEQ ID NO: 129238 - DNA, 75 bp, synthetic construct
  source 1..75: mol_type = other DNA
atcaaatctggacaagccagctttatccaatgcttaaggctgttgaatctccgctggccagcaaactgtacgacc

SEQ ID NO: 129239 - DNA, 75 bp, synthetic construct
  source 1..75: mol_type = other DNA
gagtacgcttttaccgacgacgaaatacttggaccctttggtgaactgcattgcgtgggggggggggggcccccc

SEQ ID NO: 129240 - DNA, 75 bp, synthetic construct
  source 1..75: mol_type = other DNA
actgcccctctacctgcttcggccgataaagccgacgataatactccagacgttgtagatataacggcacgcttt

SEQ ID NO: 129241 - DNA, 75 bp, synthetic construct
  source 1..75: mol_type = other DNA
gtccgaacattatcaggtcatgcgtaccgatcagcgtcgctatttcggtcacccggatctggtgatgtttatcca

SEQ ID NO: 129242 - DNA, 75 bp, synthetic construct
  source 1..75: mol_type = other DNA
agatgggcgacattccgctggaaatcaaagactggtcgcaggtcgagcaaaatccgttcttctgcccggacccgg

SEQ ID NO: 129243 - DNA, 75 bp, synthetic construct
  source 1..75: mol_type = other DNA
gccgcgagccggatcaggtcaaaattctctccggtgtttttgaaggtgttactactggcaccagcattggcttgt

SEQ ID NO: 129244 - DNA, 75 bp, synthetic construct
  source 1..75: mol_type = other DNA
cggcttcggtggacgacagccgtgaaaaattcacccctgcgcagaacatgattttttcgcgtaaaagtgcagaac

SEQ ID NO: 129245 - DNA, 75 bp, synthetic construct
  source 1..75: mol_type = other DNA
cggcacagcactggcggccgcactggcaccggagctgatgggctacagtgagctgacggccattgcccgaaactg

SEQ ID NO: 129246 - DNA, 75 bp, synthetic construct
  source 1..75: mol_type = other DNA
attctcggcggtatcagcagcgggcagcaaatcattgctcatatggcgctgaaaccgacctccagcattaccgtg

SEQ ID NO: 129247 - DNA, 75 bp, synthetic construct
  source 1..75: mol_type = other DNA
caatatcgtgaaaccttcgcatcacgtgaactcatgctgatctggcctaactacattgcctataaccaggtgtcc

SEQ ID NO: 129248 - DNA, 75 bp, synthetic construct
  source 1..75: mol_type = other DNA
cgccgatgatgaaccaatgctgcgtccgactttccttgaccacgagcacgacgttcagacttttgaagagtgtga

SEQ ID NO: 129249 - DNA, 75 bp, synthetic construct
  source 1..75: mol_type = other DNA
ccgtcgtaaagatgaacgcttttatggcctcggagataaagccggcgacctgcaacgcaacggtaaacgttacga

SEQ ID NO: 129250 - DNA, 75 bp, synthetic construct
  source 1..75: mol_type = other DNA
gctgaactgctggcgctggaagaaaagctggcgcgtccgggaagcgatgtcgctctggacgatcaactctatcag

SEQ ID NO: 129251 - DNA, 75 bp, synthetic construct
  source 1..75: mol_type = other DNA
atggctgaactgacattcactctgatacacggtctgcgtaccggcaaaggcactaccgacgaaatgcttcacaag

SEQ ID NO: 129252 - DNA, 75 bp, synthetic construct
  source 1..75: mol_type = other DNA
ctacacccctgttccaccgctggaaaatctcagcctggtacaggagttcaccgacgaatatttcgctacgttttc

SEQ ID NO: 129253 - DNA, 75 bp, synthetic construct
  source 1..75: mol_type = other DNA
aagtcagtgaggtttgctggctgacgccggaagaaattaccgcacgttgcgatgagttcacaccagactcgctga

SEQ ID NO: 129254 - DNA, 75 bp, synthetic construct
  source 1..75: mol_type = other DNA
tacgagaggaaaacaatcgtctttatgaaattaataacaaggcaaacagaggatggcgtggtttcatcctaagat

SEQ ID NO: 129255 - DNA, 75 bp, synthetic construct
  source 1..75: mol_type = other DNA
atgatcacaggaaatggaataaacactgtaactgtcaatggaaaagtgaaacacatcacagaactggattatata

SEQ ID NO: 129256 - DNA, 75 bp, synthetic construct
  source 1..75: mol_type = other DNA
gcgatggcgtggcacactatcagagccgtcgtaaagatgaacgcttttatggcctcggagataaagccggcgacc

SEQ ID NO: 129257 - DNA, 75 bp, synthetic construct
  source 1..75: mol_type = other DNA
cattgaaagtgataattcctcagggagaaagtcgtcaactactgattaacggcattgaggcttatgaatggaata

SEQ ID NO: 129258 - DNA, 75 bp, synthetic construct
  source 1..75: mol_type = other DNA
aaaatatgttccgggttctattaaaaaggaaaggggttttgtcgctggaccgaacctggagtattgctccggaac

SEQ ID NO: 129259 - DNA, 75 bp, synthetic construct
  source 1..75: mol_type = other DNA
tattcccgtgataacaagcgtattgatatcgcggcgaatattggcaccgctctggaagcaccaggcgcgtttgcc

SEQ ID NO: 129260 - DNA, 75 bp, synthetic construct
  source 1..75: mol_type = other DNA
ctgcagaccagcggtccgcattgggtgggggctgccagctatcttggtgaagaaatcacgatctatccgtatatc

SEQ ID NO: 129261 - DNA, 75 bp, synthetic construct
  source 1..75: mol_type = other DNA
gcaactggccggaagagacaaagcgacaggtgattcgtgatgcatggctgatacaccgacacaaaggaaccatca

SEQ ID NO: 129262 - DNA, 75 bp, synthetic construct
  source 1..75: mol_type = other DNA
tgtggtcgccggatacctgcccggtgcatctgctgccttatctcgcctgggcgttttccgttgaccgctgggatc

SEQ ID NO: 129263 - DNA, 75 bp, synthetic construct
  source 1..75: mol_type = other DNA
cactatggataggtatcaaaatatctgaattcaacgatcttgatacagcaaaagccatcgccgcgttaaagattt

SEQ ID NO: 129264 - DNA, 75 bp, synthetic construct
  source 1..75: mol_type = other DNA
agaaatgagtatactcttgctaggaaaaaaacaatatgtaaaaaactgaaatgcaaactacctgaactaaataaa

SEQ ID NO: 129265 - DNA, 75 bp, synthetic construct
  source 1..75: mol_type = other DNA
agttgctagctttacaaacctacatgtaccttctttatgctcgtgataatagaaatgagtatactcttgctagga

SEQ ID NO: 129266 - DNA, 75 bp, synthetic construct
  source 1..75: mol_type = other DNA
atcgtcggtgaaaacgggcctgaaattatcaacggcccggcaaatgtgaccagccggaaaaatacagctgcactg

SEQ ID NO: 129267 - DNA, 75 bp, synthetic construct
  source 1..75: mol_type = other DNA
agcaacctgcgacggtgaatgcagacgggaaagtgatgatgccatcgggtggttttccttcatggggatatggct

SEQ ID NO: 129268 - DNA, 75 bp, synthetic construct
  source 1..75: mol_type = other DNA
agcaacctgcgacggtgaatgcagacggtaaagtgatgataccatcgggtggttttccctcatggggatatggct

SEQ ID NO: 129269 - DNA, 75 bp, synthetic construct
  source 1..75: mol_type = other DNA
tgcgcgatcgcatcgcaggagctggagccactaccacggctgcagggctggcaatgggcgcgccagtgatggcgg

SEQ ID NO: 129270 - DNA, 75 bp, synthetic construct
  source 1..75: mol_type = other DNA
tgcgcgatcgtattgcaggtgccggagccactaccacggctgcagggctggcaatggggacgccagtgatggcgg

SEQ ID NO: 129271 - DNA, 75 bp, synthetic construct
  source 1..75: mol_type = other DNA
gggcctcggcaccctggctgtggtgttggctgcagtgctggggccgctggcagtgatccgtctgggattctctgt

SEQ ID NO: 129272 - DNA, 75 bp, synthetic construct
  source 1..75: mol_type = other DNA
ggaccggaaggctggtcgccgctgtttaacggtgcagcaacgcaggctaatgctgacgcggtggtgaaggtgatg

SEQ ID NO: 129273 - DNA, 75 bp, synthetic construct
  source 1..75: mol_type = other DNA
agctcgcggactacatcaacacctgtatgttcgacccgactacgcagttctactatgacgtgcgcattgaagata

SEQ ID NO: 129274 - DNA, 75 bp, synthetic construct
  source 1..75: mol_type = other DNA
attaactaacccggatgcgacgccggagcagacgcgcgtcgcggtgaaagccatcgaaacgctcaacggtaactg

SEQ ID NO: 129275 - DNA, 75 bp, synthetic construct
  source 1..75: mol_type = other DNA
gtctggatatcgcagaccaggatggcattggtccggatgaagaagcgcagctcaagaaaattgctcaggcgctgc

SEQ ID NO: 129276 - DNA, 75 bp, synthetic construct
  source 1..75: mol_type = other DNA
tatggtggtgtttcatttgtcattttatttatttttaaagataaattaaaattcaaggccgttttcagcaaaaat

SEQ ID NO: 129277 - DNA, 75 bp, synthetic construct
  source 1..75: mol_type = other DNA
gagctaatgcacaggctttacgtgagctggctgatgtatccgggaccaatgatgcagtagatgttctgtgtctgt

SEQ ID NO: 129278 - DNA, 75 bp, synthetic construct
  source 1..75: mol_type = other DNA
aattacaacccgctgaccggcgcacagcaaggcgcaccgaatttctcctggagcgccgcgcatttgtatatgttg

SEQ ID NO: 129279 - DNA, 75 bp, synthetic construct
  source 1..75: mol_type = other DNA
tgacgcaaaagaaattgcggtgctggaaaaaaccattgcagcacttccggcttttgcgccgttctcgggtgagat

SEQ ID NO: 129280 - DNA, 75 bp, synthetic construct
  source 1..75: mol_type = other DNA
cgttatgaagcatccccgcgttctgccaatgctgaagccctccgtcagctggctgacgtggcagggacaacagag

SEQ ID NO: 129281 - DNA, 75 bp, synthetic construct
  source 1..75: mol_type = other DNA
tctggtttggtctgaaagggatggagcgttacggttatcgcgatgatgccctgaaactggcggatacgttcttcc

SEQ ID NO: 129282 - DNA, 75 bp, synthetic construct
  source 1..75: mol_type = other DNA
aaccgccgacggtccgattcaggagaattacaaccctctgactggcgcgcagcaaggggctccaaatttctcctg

SEQ ID NO: 129283 - DNA, 75 bp, synthetic construct
  source 1..75: mol_type = other DNA
ccgcgatattctggcgcgtccggcgttttatctcaccgcctcgcagcaacgctgggaagagtatctgaagaaagg

SEQ ID NO: 129284 - DNA, 75 bp, synthetic construct
  source 1..75: mol_type = other DNA
cgacaaataaattgcctgatttacgcggtgaatttattcgtggctgggatgatgggcgcgggattgactctggtc

SEQ ID NO: 129285 - DNA, 75 bp, synthetic construct
  source 1..75: mol_type = other DNA
atatcgcggcagcagacccgcatacccagtacgcaccgaaagccagcccgacattcaccggcacaccaacagcgc

SEQ ID NO: 129286 - DNA, 75 bp, synthetic construct
  source 1..75: mol_type = other DNA
ttcttctggccttcagctgcgatgcctaataccgtcatagatgaatgggcagatatggtgtttctgaaattcaac

SEQ ID NO: 129287 - DNA, 75 bp, synthetic construct
  source 1..75: mol_type = other DNA
atgcgctgaactacctggacgataacgctatgtcaaagggtggggacattatcaacgtcctgcagcgtatggggg

SEQ ID NO: 129288 - DNA, 75 bp, synthetic construct
  source 1..75: mol_type = other DNA
acggcaaccgtacaaaacagttttatgacatgcaggatgccattaaggctgccagtgagcaactgccgatggaga

SEQ ID NO: 129289 - DNA, 75 bp, synthetic construct
  source 1..75: mol_type = other DNA
aggtgattctgaacgcggttgacaagctcacccgcccatttcgatccgcgcaggccagctcaaaagagctggctg

SEQ ID NO: 129290 - DNA, 75 bp, synthetic construct
  source 1..75: mol_type = other DNA
ggtgattggcggtggatcgctgatgggcggtcgctttaacctgctgctttcggtagttggggcgctgattattca

SEQ ID NO: 129291 - DNA, 75 bp, synthetic construct
  source 1..75: mol_type = other DNA
gatgccaataacgccgggttatggctggagctggacgccattcttgcggtggtgattggcggcggatcgctgatg

SEQ ID NO: 129292 - DNA, 75 bp, synthetic construct
  source 1..75: mol_type = other DNA
aaaggcactgcatctcgccactcaggcgattcagtgtggcgaggctgatattgttattgccggtggtcaggaaaa

SEQ ID NO: 129293 - DNA, 75 bp, synthetic construct
  source 1..75: mol_type = other DNA
cactcgcagcaccactattcgcatttatatgctctccaccggactggcaacgctggcggggattgtcttctcgat

SEQ ID NO: 129294 - DNA, 75 bp, synthetic construct
  source 1..75: mol_type = other DNA
cggtggtgggggcgctgattattcagggaatgaataccgggattttgctctcgggctttccgccggagatgaatc

SEQ ID NO: 129295 - DNA, 75 bp, synthetic construct
  source 1..75: mol_type = other DNA
actggcgattggcatgacgctggttatcgccactggtgggattgatctctccgtaggggcggtgatggctatcgc

SEQ ID NO: 129296 - DNA, 75 bp, synthetic construct
  source 1..75: mol_type = other DNA
caggtgtgccggttgcactgttgcggtctggattatccggtttacgtgcggttgctgtgatgtttatgaatccac

SEQ ID NO: 129297 - DNA, 75 bp, synthetic construct
  source 1..75: mol_type = other DNA
ccgataggtcttgtggttactgcactggcgggcgtggcgctggttgtctggaaatactggcaacccatcaccgca

SEQ ID NO: 129298 - DNA, 75 bp, synthetic construct
  source 1..75: mol_type = other DNA
gccagcagagcttccaccgttgcaccccttggcacttcccgcgaaaggaggagaagcaattgtgagtcgcgcagc

SEQ ID NO: 129299 - DNA, 75 bp, synthetic construct
  source 1..75: mol_type = other DNA
agcaacctgcgacggtgaatgcagacggaaaagtgatgattccatcgggtggttttccctcatggggatatggct

SEQ ID NO: 129300 - DNA, 75 bp, synthetic construct
  source 1..75: mol_type = other DNA
ccggaactgcagcgtcagttaaaactgacagcgggcaatgatgcgcttggctccatgcagaaagaatccgacatt

SEQ ID NO: 129301 - DNA, 75 bp, synthetic construct
  source 1..75: mol_type = other DNA
gaggcaccgacgcagatcatcatccagacgcagcaaggacaaagtgcgcaggatattgcgcgggaggtggcccgc

SEQ ID NO: 129302 - DNA, 75 bp, synthetic construct
  source 1..75: mol_type = other DNA
gcaacggcctttgaattgcctgcagatgaactggcggaagggttaggaaaaatagcgcagctgtataaagtgcct

SEQ ID NO: 129303 - DNA, 75 bp, synthetic construct
  source 1..75: mol_type = other DNA
tgaagtggcacgccagcttgacgagcgggaacgcagggccagggcaaaagcgcgcagcaatttcagcgatcaggg

SEQ ID NO: 129304 - DNA, 75 bp, synthetic construct
  source 1..75: mol_type = other DNA
gacagagtgcgcaggatattgcccgtgaagtggcacgccagcttgacgagcgggaacgcagggccagggcaaaag

SEQ ID NO: 129305 - DNA, 75 bp, synthetic construct
  source 1..75: mol_type = other DNA
aatgcctgggaaggtatcaaatatctgttcttcaactacaccctgccggggttgattgccaaaaactgggacgcc

SEQ ID NO: 129306 - DNA, 75 bp, synthetic construct
  source 1..75: mol_type = other DNA
ctggctggcacattgctaaaagtggttgcagctattgctgcagttgcggcggcgatgggaacaatgatgctggca

SEQ ID NO: 129307 - DNA, 75 bp, synthetic construct
  source 1..75: mol_type = other DNA
gtctggttaacaaagaggccgccagcgccaggctgccaaatcagacgcctgccacattgggcggtaacggcagcg

SEQ ID NO: 129308 - DNA, 75 bp, synthetic construct
  source 1..75: mol_type = other DNA
acagctggggatggaaagccacttcgcccgtctgcgtctgctggacccgaaccgtttccacgattttgcgcagtt

SEQ ID NO: 129309 - DNA, 75 bp, synthetic construct
  source 1..75: mol_type = other DNA
tctgggatgcatgtgccgcgtatggagtcaaaggtgcaaagctgatgatcatggcgcgtctggctgattattcga

SEQ ID NO: 129310 - DNA, 75 bp, synthetic construct
  source 1..75: mol_type = other DNA
cgggataaggtcgcagaactaaaacagcagcgcagactttcagtactacgtgacccgtcaaaatctgaaccttca

SEQ ID NO: 129311 - DNA, 75 bp, synthetic construct
  source 1..75: mol_type = other DNA
ctgctggtggtcgatgaagcgcatcacctggtgtggagcgaagatgcgccgagccgcgaatatcaggccattgaa

SEQ ID NO: 129312 - DNA, 75 bp, synthetic construct
  source 1..75: mol_type = other DNA
aaactttacagcatcagtggctggtagaaatgctgcgccgtttcaacctgcgctttgccctgtttgatgatgagc

SEQ ID NO: 129313 - DNA, 75 bp, synthetic construct
  source 1..75: mol_type = other DNA
agaccgaaggctttgacgatctgatcaaaaactgccgcgagcaacatgaagcgctgaaagcacagctggaacagg

SEQ ID NO: 129314 - DNA, 75 bp, synthetic construct
  source 1..75: mol_type = other DNA
tacgccagaattcaccagaaaacaaccggtatcagtacctgggattacgggtacggatacagtggtcgcgaatcg

SEQ ID NO: 129315 - DNA, 75 bp, synthetic construct
  source 1..75: mol_type = other DNA
tatgatttttatccgcaattcagtattccggttcgtacagaactggagttttatgctcgtggaaatgctgacacg

SEQ ID NO: 129316 - DNA, 75 bp, synthetic construct
  source 1..75: mol_type = other DNA
tggtcgcaaatcgttgtcacgttcaggatctgctgacaacttcgcatggagccttggcgcgggtgtccgctatga

SEQ ID NO: 129317 - DNA, 75 bp, synthetic construct
  source 1..75: mol_type = other DNA
tcccggaggtgggcgaactaccggcctcccgatctcgggattcagtgagcaggactacggttcaacgaacttcaa

SEQ ID NO: 129318 - DNA, 75 bp, synthetic construct
  source 1..75: mol_type = other DNA
aaatctgaaccgtcagaatctgtatgttcaggcgtgtttgacccttcagattctggcaaaaatacgcgtttgacc

SEQ ID NO: 129319 - DNA, 75 bp, synthetic construct
  source 1..75: mol_type = other DNA
tgttgaaaccatatgtcgacagcttggattgggagaaagtacagtcagaacggcaatctccgaactggaggctga

SEQ ID NO: 129320 - DNA, 75 bp, synthetic construct
  source 1..75: mol_type = other DNA
tggggcgataaatataagtcagaagttgatgttaaaagtcatgacatcctgcttggtgtgacttataacttctga

SEQ ID NO: 129321 - DNA, 75 bp, synthetic construct
  source 1..75: mol_type = other DNA
ttcccgctcgtttcatgactcgtattgggaaaaaggtactatttaaattaacccgtgctgacgggggaaaaattc

SEQ ID NO: 129322 - DNA, 75 bp, synthetic construct
  source 1..75: mol_type = other DNA
cgatgggaaaatgggggtcattaagtgtaggaggtgtcagggatgaatacaggggagggcgaccttcgcaagact

SEQ ID NO: 129323 - DNA, 75 bp, synthetic construct
  source 1..75: mol_type = other DNA
cgttccggctccgccgataacttcgcatggggccttggggccggcgtccgctatgatgtaaccacggatatcgca

SEQ ID NO: 129324 - DNA, 75 bp, synthetic construct
  source 1..75: mol_type = other DNA
ttatggccgcggtaacgctgaatcaaaatatcgtctgagttattgggaaagtgtcggtggtgccgagtttgatga

SEQ ID NO: 129325 - DNA, 75 bp, synthetic construct
  source 1..75: mol_type = other DNA
tggtgggcgcagcctgtgtatttgcagcaaatgcaggtgctgaggaaggtaaaagcggtttttatctgaccggta

SEQ ID NO: 129326 - DNA, 75 bp, synthetic construct
  source 1..75: mol_type = other DNA
acagtgcatttacgccatgggtgtctgccggaattggttacgccagaattcatcaggaatcaacaggtagcggta

SEQ ID NO: 129327 - DNA, 75 bp, synthetic construct
  source 1..75: mol_type = other DNA
aaaccttgcaacatcagtggctggtagaaatgctgcgccgcttcaacctgcgttttgcgctgtttgatgacgagc

SEQ ID NO: 129328 - DNA, 75 bp, synthetic construct
  source 1..75: mol_type = other DNA
acgtgaccgcgctgccgcctggtttgctgaagaagacaccggtgcgcaggtactgctgtgctcggaaatcggttc

SEQ ID NO: 129329 - DNA, 75 bp, synthetic construct
  source 1..75: mol_type = other DNA
gaggttcgccaaaatggctttattattcatactgttagtgttgctccaggtgcttttgccctttatgatattccg

SEQ ID NO: 129330 - DNA, 75 bp, synthetic construct
  source 1..75: mol_type = other DNA
ggcaaatcagagttactcatataaggatcttgactatccccggtataacacgaaatggagtggtggaagtaataa

SEQ ID NO: 129331 - DNA, 75 bp, synthetic construct
  source 1..75: mol_type = other DNA
aggctttaatatgcattttatactatgcttatctgagtaaaattaaggtgaaaacttcagttttattcttaattt

SEQ ID NO: 129332 - DNA, 75 bp, synthetic construct
  source 1..75: mol_type = other DNA
gattgcgggaattttggtgaagtgctggaagccacctggaatgatggtgaagatggactggcacggttatatgtc

SEQ ID NO: 129333 - DNA, 75 bp, synthetic construct
  source 1..75: mol_type = other DNA
gctctggtgaacgccgaactggggtggggaatttacgagaaattcgacaccatgcagctacccaactttatccag

SEQ ID NO: 129334 - DNA, 75 bp, synthetic construct
  source 1..75: mol_type = other DNA
gtctttgggaaccctatagttatgagccatggacttcagaaattgaaatttttcataacccaaacgcggaaaacc

SEQ ID NO: 129335 - DNA, 75 bp, synthetic construct
  source 1..75: mol_type = other DNA
gtggctggattatctggatgcactggaaatggtcgatatttccagtgctccagatattgaatggcctacgcctcc

SEQ ID NO: 129336 - DNA, 75 bp, synthetic construct
  source 1..75: mol_type = other DNA
aaagcccggataaacctgcgcaacagttgttactgcttttccacggtgtcggggataacccggtggcaatggggg

SEQ ID NO: 129337 - DNA, 75 bp, synthetic construct
  source 1..75: mol_type = other DNA
gatctgggtaataaaaacacccgtacaccggggcgtactattaaagataaagccgggaaatttaatttcctgtaa

SEQ ID NO: 129338 - DNA, 75 bp, synthetic construct
  source 1..75: mol_type = other DNA
aagagttacttactggataccagatccccaaaagtaattatattgttacgcaaccggggagatcggctgtcaccg

SEQ ID NO: 129339 - DNA, 75 bp, synthetic construct
  source 1..75: mol_type = other DNA
atgaagcatccccacgttctgccaattccgaagtcctccgtcagctggctgatgatgccgttaatgtgctgtgcc

SEQ ID NO: 129340 - DNA, 75 bp, synthetic construct
  source 1..75: mol_type = other DNA
gctcaatatgaagcctcaccgcgccgtgctaatgcccaggctttacgtgagctggcggatgtggccgggactgat

SEQ ID NO: 129341 - DNA, 75 bp, synthetic construct
  source 1..75: mol_type = other DNA
tcgcgtccctttgcctccgggtacacgcaggcgcgcaccgctttgggatgttgaaggtagacaaccaagtaacat

SEQ ID NO: 129342 - DNA, 75 bp, synthetic construct
  source 1..75: mol_type = other DNA
atgaacgtgggcgatgtgcaacgtctgtcagtcgcggtcgtggtgaattacaaaaccttgccagatggcaaaccg

SEQ ID NO: 129343 - DNA, 75 bp, synthetic construct
  source 1..75: mol_type = other DNA
ttaaggggatatcgccattaaaggaatcaagaaccattccagatcctctttcgcgggaggaatttatccgcctta

SEQ ID NO: 129344 - DNA, 75 bp, synthetic construct
  source 1..75: mol_type = other DNA
gactgattgcggtggatccacacggttacattaccgccatcaaccgtaacgcaagaaagatgctggggctgagtt

SEQ ID NO: 129345 - DNA, 75 bp, synthetic construct
  source 1..75: mol_type = other DNA
ggcgcgctggagaaaggggagagctacttcattaccgggaaagggtcaatggggatggcgatgcgcgccaaaacg

SEQ ID NO: 129346 - DNA, 75 bp, synthetic construct
  source 1..75: mol_type = other DNA
tggggctaaaaatgatcatcgtccccggtagccagctttcgcaactgccgccaggactggatagcaccgagtttg

SEQ ID NO: 129347 - DNA, 75 bp, synthetic construct
  source 1..75: mol_type = other DNA
agtggttgccactggtcaatgccgcgacgcataacaaccccgaattacatgttttaagccacgcctggtttaagg

SEQ ID NO: 129348 - DNA, 75 bp, synthetic construct
  source 1..75: mol_type = other DNA
gtgttctcaatatttgtcattgcagccctggcgcaatattttacggccagttttgaggactatttaacgcttcat

SEQ ID NO: 129349 - DNA, 75 bp, synthetic construct
  source 1..75: mol_type = other DNA
atgaaaaacgccaggatgtggtgacaaattttaacggcctgagcgtcattgctaatcgggaggctattcgttctg

SEQ ID NO: 129350 - DNA, 75 bp, synthetic construct
  source 1..75: mol_type = other DNA
atgaagaacttattcaacaggcagaatcagaaaggcaattattgcttaatcaggccaacgaatacatgaacagta

SEQ ID NO: 129351 - DNA, 75 bp, synthetic construct
  source 1..75: mol_type = other DNA
gtggctggattacctggacgcactggaaatggtcgatacttccggtacgccagatattgaatggcctacgcctcc

SEQ ID NO: 129352 - DNA, 75 bp, synthetic construct
  source 1..75: mol_type = other DNA
atcagtccaacgaatatataaataccaagcaatggcctggtaaagcggctattggtcgtctgaaaggtgaggaac

SEQ ID NO: 129353 - DNA, 75 bp, synthetic construct
  source 1..75: mol_type = other DNA
tgccgatcgccaggtggcggggctgctttttggtaaagtgcagcgcgcccgggaactggggctaaaaatgatcat

SEQ ID NO: 129354 - DNA, 75 bp, synthetic construct
  source 1..75: mol_type = other DNA
gcaggcttcttcggtgcgctaattgccgggattattggcggcatcgtcgtgcattacctgaaaaaaataccggtg

SEQ ID NO: 129355 - DNA, 75 bp, synthetic construct
  source 1..75: mol_type = other DNA
gtttgtgtgaacgtgctgaaaagtctggcgcgtaaaaatgggtcttcgactgatgaaaaagaagacgacctggat

SEQ ID NO: 129356 - DNA, 75 bp, synthetic construct
  source 1..75: mol_type = other DNA
gtggctgcacggcaccgggtgcagtttttgatgcctgagtccgatgcggtcacaatgctgaaaaacagacatgca

SEQ ID NO: 129357 - DNA, 75 bp, synthetic construct
  source 1..75: mol_type = other DNA
ttgttgtttatttttatagcattacagcgtggattaacggtgctgtgggagaatcgtcagagttcgccagtgaca

SEQ ID NO: 129358 - DNA, 75 bp, synthetic construct
  source 1..75: mol_type = other DNA
gatggtgaccatcaacccagaaattaacatgggtgtactggcgggtatcattaccggtctggttggtggcgcagc

SEQ ID NO: 129359 - DNA, 75 bp, synthetic construct
  source 1..75: mol_type = other DNA
cgacaccggaaaagcatattcggaaacctcaaccgtcgatatcgttaccggtgcggacgtgctggagtactacgc

SEQ ID NO: 129360 - DNA, 75 bp, synthetic construct
  source 1..75: mol_type = other DNA
tgtcgttaatcagggatggatcaccttgcaagaagcggggatcaatctggatcgtaatactctggcagccacgct

SEQ ID NO: 129361 - DNA, 75 bp, synthetic construct
  source 1..75: mol_type = other DNA
gacctctatctgcaggatcgcaagctggcgggtattctcgttgaactgacgggcaaaaccggcgatgcggcacaa

SEQ ID NO: 129362 - DNA, 75 bp, synthetic construct
  source 1..75: mol_type = other DNA
atcgggcttgatggcgcagatattggcaaaatcgccgtgcatccggcgcatgtctatgtcgcggtgcgtcaggct

SEQ ID NO: 129363 - DNA, 75 bp, synthetic construct
  source 1..75: mol_type = other DNA
tatgtcgcggtgcgtcaggctgttgctcataaagcatggaaacagctacagggcgggaagattaaaggaaaaacg

SEQ ID NO: 129364 - DNA, 75 bp, synthetic construct
  source 1..75: mol_type = other DNA
agcggcaaaacggcggcttttggcctcggcttgttacagcaaattgatgcgtcgctatttcaaacccaggcttta

SEQ ID NO: 129365 - DNA, 75 bp, synthetic construct
  source 1..75: mol_type = other DNA
ttgatgtacaacctgccggccgccagccagaacgtctggatgctgctggtgatgggcgttatcttcttcgttatc

SEQ ID NO: 129366 - DNA, 75 bp, synthetic construct
  source 1..75: mol_type = other DNA
ctgttgctgcgattcggtcagccagatttacttaacgttgcgtttattgcccaggcgggcggtgcgatttttgat

SEQ ID NO: 129367 - DNA, 75 bp, synthetic construct
  source 1..75: mol_type = other DNA
ttttgcctcccgcccaactcacgaaccttaatgagttgggttatttaaccatgacgccggtgcaggccgccgcgc

SEQ ID NO: 129368 - DNA, 75 bp, synthetic construct
  source 1..75: mol_type = other DNA
ttggcggctatgctttggtttgttgctgccccggtggtgtcgtatttcctctgtgcattagtggtattgttagta

SEQ ID NO: 129369 - DNA, 75 bp, synthetic construct
  source 1..75: mol_type = other DNA
attggcaccattacttcgctgattaacgatattgcgtttcagaccaatatcctcgctctgaatgcagcggtggaa

SEQ ID NO: 129370 - DNA, 75 bp, synthetic construct
  source 1..75: mol_type = other DNA
gatgccagtgctgataaggtgcaatccggttcgcagcaggtacacgccgccggacggacgatggaagatattgtg

SEQ ID NO: 129371 - DNA, 75 bp, synthetic construct
  source 1..75: mol_type = other DNA
tcacagctgctgattattccggtatttgcgattggtggcgcaaacgtctgggtgctcggtttgttactgttcttc

SEQ ID NO: 129372 - DNA, 75 bp, synthetic construct
  source 1..75: mol_type = other DNA
gtgacggacagaacggtcaggacctggattggggaggcggttgccgccgctgctgctgacggtgtgacgttctct

SEQ ID NO: 129373 - DNA, 75 bp, synthetic construct
  source 1..75: mol_type = other DNA
tggcatccacgcggcgtttcattatttgaaaaagaattacatttcaggttgcgttatgacagtcccaacagggtg

SEQ ID NO: 129374 - DNA, 75 bp, synthetic construct
  source 1..75: mol_type = other DNA
gattgccgcgacgaaatgactatcgtgcgcgaagagatcttcggcccggtgatgtcgctcctcacgtatgagtct

SEQ ID NO: 129375 - DNA, 75 bp, synthetic construct
  source 1..75: mol_type = other DNA
tcatttaccggcggtgtcgccagcggcaaaaaagtgatggctaactcggcggcctcttctctgaaagaagtgacc

SEQ ID NO: 129376 - DNA, 75 bp, synthetic construct
  source 1..75: mol_type = other DNA
gcatggaactacccgatccagattgccctgtggaaatccgccccggcgctggcggcaggcaacgcgatgattttc

SEQ ID NO: 129377 - DNA, 75 bp, synthetic construct
  source 1..75: mol_type = other DNA
cgaaggtgtttgcactggatgtggctgcacggcaccgggtgcagttttcgatgcctgagtccgatgcggtgtcta

SEQ ID NO: 129378 - DNA, 75 bp, synthetic construct
  source 1..75: mol_type = other DNA
ttctgcaaagcctgatgggacataagtccatcagttcaacggaagtctacacgaaggtttttgcgctggatgtgg

SEQ ID NO: 129379 - DNA, 75 bp, synthetic construct
  source 1..75: mol_type = other DNA
tctgttccggtcacaccacatacgttccgccattcctatgcgatgcacatgctgtatgccggtataccgctgaaa

SEQ ID NO: 129380 - DNA, 75 bp, synthetic construct
  source 1..75: mol_type = other DNA
ggatggaaaacccgaatatcacattatcccgtcagtgtttgatagcgaaattttatgcggtatatccaggaactt

SEQ ID NO: 129381 - DNA, 75 bp, synthetic construct
  source 1..75: mol_type = other DNA
gtgatcaacatgccagggccataaagcgactttcatcaaattattgtggcgctgcgggacgtgagtgggtgcgct

SEQ ID NO: 129382 - DNA, 75 bp, synthetic construct
  source 1..75: mol_type = other DNA
ctggtcggactggcagcaccccttaattctcttgtgggcggaagttgttttggtatccaccttttcgcgcagtcg

SEQ ID NO: 129383 - DNA, 75 bp, synthetic construct
  source 1..75: mol_type = other DNA
agtggcgcgacaatgttgcctcactgatgcgcggtaatcactcaatgatgcttggggttctggtcgggcttgccg

SEQ ID NO: 129384 - DNA, 75 bp, synthetic construct
  source 1..75: mol_type = other DNA
gcgtaactatctggatattgagcgcaaaaacatttctgacgggctggttattgagctgcctgtaaagaaaaaatc

SEQ ID NO: 129385 - DNA, 75 bp, synthetic construct
  source 1..75: mol_type = other DNA
cgcgcttttgatgactggttgcaggattttggtctggataacagggaaaaatatcaggttatcagtcgcgcccgt

SEQ ID NO: 129386 - DNA, 75 bp, synthetic construct
  source 1..75: mol_type = other DNA
taaggtttatgaggcgtatatctatccgggggttaatcacggattccataatgattccacgccccgttatgacaa

SEQ ID NO: 129387 - DNA, 75 bp, synthetic construct
  source 1..75: mol_type = other DNA
ttttatccaggtacgctgcctttcccattgctgcatgttgatactggctggaaattccgcgagatgtatgagttc

SEQ ID NO: 129388 - DNA, 75 bp, synthetic construct
  source 1..75: mol_type = other DNA
ggagcgcgacggtatgttgatgatgattgatgacaatcgcattgatctgcaacctggcgaggtgattaaaaaacg

SEQ ID NO: 129389 - DNA, 75 bp, synthetic construct
  source 1..75: mol_type = other DNA
gcgggggagatagagccaatccagatcaatgctatcgctgaaaagctggcgctggctggcgtacaggatgcgaaa

SEQ ID NO: 129390 - DNA, 75 bp, synthetic construct
  source 1..75: mol_type = other DNA
ctgaaaaaactgctgaaaagttttttacacttatccagtcacagcctagtattaaaaacttagttgatgtgcggt

SEQ ID NO: 129391 - DNA, 75 bp, synthetic construct
  source 1..75: mol_type = other DNA
tcaccctggtacagccaaaatcagaggagggaggactcctcaacgttgtgataaccgacgaaaaaagtgtcgagc

SEQ ID NO: 129392 - DNA, 75 bp, synthetic construct
  source 1..75: mol_type = other DNA
ctggtgggatcggctgatcatgcgcatttgcgatgtgctgtttgccttcccgggtattttactggcgatcgctgt

SEQ ID NO: 129393 - DNA, 75 bp, synthetic construct
  source 1..75: mol_type = other DNA
tgtgctgtttgccttcccgggtattttactggcgatcgctgttgttgcggtgttgggaagcggcatcgctaacgt

SEQ ID NO: 129394 - DNA, 75 bp, synthetic construct
  source 1..75: mol_type = other DNA
gattatcgccgtcgctatcttttccattccggcgtttgcccgattggtgcgcggcaacacactagtgttgaaaca

SEQ ID NO: 129395 - DNA, 75 bp, synthetic construct
  source 1..75: mol_type = other DNA
tgattggttcggcgttgatggcccatgacgatttgaacgccgccgtgcgtcgggtgttgctgggtgagaataaag

SEQ ID NO: 129396 - DNA, 75 bp, synthetic construct
  source 1..75: mol_type = other DNA
gttctcagcgtgaagaactggccgctttaaagtctgcgtatcagggagctgatacatctgccagagctttggcct

SEQ ID NO: 129397 - DNA, 75 bp, synthetic construct
  source 1..75: mol_type = other DNA
gccctggctatttttttgaccgtactggcgttcaatttgctgggggatggtttacgcgatgcgctggatccgaaa

SEQ ID NO: 129398 - DNA, 75 bp, synthetic construct
  source 1..75: mol_type = other DNA
ctgccgggctttcggctatggcggaagtctcggagtttgccggaacgcggcttattcgcccgttgctcgcccgca

SEQ ID NO: 129399 - DNA, 75 bp, synthetic construct
  source 1..75: mol_type = other DNA
cacggtttaagtgccaatgccgatgcctgggttacgcattgcgaaaacgtctgccaacagtggcaggtgccgctg

SEQ ID NO: 129400 - DNA, 75 bp, synthetic construct
  source 1..75: mol_type = other DNA
cggagagttacggcgagcaggttcaccgtgtgggggaaagattcgccgtactggaggccgcgcttgtgctttccg

SEQ ID NO: 129401 - DNA, 75 bp, synthetic construct
  source 1..75: mol_type = other DNA
cctgccgtggtgtttgatgacagtgaggtggtttacggcaccactgatgtggtggtggccgggaaactccgtact

SEQ ID NO: 129402 - DNA, 75 bp, synthetic construct
  source 1..75: mol_type = other DNA
tcctgatactaccggtggctgcatctgccggtacaacaatttataccgattcgcaccagcgccccatgaacccgc

SEQ ID NO: 129403 - DNA, 75 bp, synthetic construct
  source 1..75: mol_type = other DNA
cacggtttaagcgccaatgctgatgcctgggtgaaacattgtgaaaacatctgccaacagtggcaggtgccgctg

SEQ ID NO: 129404 - DNA, 75 bp, synthetic construct
  source 1..75: mol_type = other DNA
tgatgacacctggctgattaactcgcctgaggccgtagcacaggctgtgaaaacgcgattcgaattgtggtatgg

SEQ ID NO: 129405 - DNA, 75 bp, synthetic construct
  source 1..75: mol_type = other DNA
cgccagcgggctggtggagcgcgtgaaagcgagcacgatgggcgatcgggaagctgaactggcaacgctcgaatt

SEQ ID NO: 129406 - DNA, 75 bp, synthetic construct
  source 1..75: mol_type = other DNA
aaggcgagcacgatgggcgatcgggaagcggaactggcgacgctcgagttcttaaaacagtgggtgccagcagga

SEQ ID NO: 129407 - DNA, 75 bp, synthetic construct
  source 1..75: mol_type = other DNA
tggtgaaggttggaccgtgcaagccgaccacgacggcaatgcctgggtgcccgatcatagttggggcggttttga

SEQ ID NO: 129408 - DNA, 75 bp, synthetic construct
  source 1..75: mol_type = other DNA
aatacatggcatgggatatgactctcggttggatcgtctggcagcaacgagctggtatccatttttcaacaatgt

SEQ ID NO: 129409 - DNA, 75 bp, synthetic construct
  source 1..75: mol_type = other DNA
gctggtatccattttttcaacaatgtcacaacaagaggtgaaataatagagccatacagcctcacactcgatgag

SEQ ID NO: 129410 - DNA, 75 bp, synthetic construct
  source 1..75: mol_type = other DNA
gtttgtttataaaggtgtaagagtccgggaaaatcttggggttcctgacacagcaaaaaacagacgcattgcagg

SEQ ID NO: 129411 - DNA, 75 bp, synthetic construct
  source 1..75: mol_type = other DNA
tagcactgaacaaatatatctgcgaatacctggcagataatccgtttaaggggatctcgccattaaaggaatcaa

SEQ ID NO: 129412 - DNA, 75 bp, synthetic construct
  source 1..75: mol_type = other DNA
acaggtagctttgttaaatacacagttaagcgagtttgccccaaccatgccccataacgaatcaatgaaaaatta

SEQ ID NO: 129413 - DNA, 75 bp, synthetic construct
  source 1..75: mol_type = other DNA
aatttaccgttcccaagactcaggcgggaacaaacagggtaatacaccttatcgaacctgcaattgaagctctga

SEQ ID NO: 129414 - DNA, 75 bp, synthetic construct
  source 1..75: mol_type = other DNA
aggaattgctgaccggttatcagcttccgaaaactcagtatgtagtgactgagccagggcgttctgcagtgacgg

SEQ ID NO: 129415 - DNA, 75 bp, synthetic construct
  source 1..75: mol_type = other DNA
ttaaggggatctcaccattaaaggagtcgagaaccatcccggatccactttcgcgggaggagtttatccgcctta

SEQ ID NO: 129416 - DNA, 75 bp, synthetic construct
  source 1..75: mol_type = other DNA
cctgttccgtggccctcagccacaccgccaacaggatggctgaaatgtaacggtgcagcattttcttctgaaatg

SEQ ID NO: 129417 - DNA, 75 bp, synthetic construct
  source 1..75: mol_type = other DNA
cctgttccgtggccctcagccacacccccaacggggtggctgaaatgtaacggtgcagcattttcttctgaaatg

SEQ ID NO: 129418 - DNA, 75 bp, synthetic construct
  source 1..75: mol_type = other DNA
cctgttccgtggccctcagccacacctccaactggctggctgaaatgtaacggtgcagcattttcttctgaaatg

SEQ ID NO: 129419 - DNA, 75 bp, synthetic construct
  source 1..75: mol_type = other DNA
cgttacgaacacctattggttgctttcgcggagcgttggcgggtcattccgctgtggagcttggcagcctggttg

SEQ ID NO: 129420 - DNA, 75 bp, synthetic construct
  source 1..75: mol_type = other DNA
gtaattcttggtcaggtgttgactgcaggggcagggcagaatccggcaaggcaatcggctattaaaggtggtctg

SEQ ID NO: 129421 - DNA, 75 bp, synthetic construct
  source 1..75: mol_type = other DNA
aaagctggccaaagaccagaacggcgctgatattcctgacccggcgctctttgtcaaaaaccttggtttgggaga

SEQ ID NO: 129422 - DNA, 75 bp, synthetic construct
  source 1..75: mol_type = other DNA
agagttcctgccaggtctgcgcgcgctgtgcgacgaatttggcgcattgctgatcatcgatgaagtgatgaccgg

SEQ ID NO: 129423 - DNA, 75 bp, synthetic construct
  source 1..75: mol_type = other DNA
agacgaagtggtgtcacgggcaccggtgcgcaggggaaaactgcgccgcaatgtggtggtcctttcccggcgttc

SEQ ID NO: 129424 - DNA, 75 bp, synthetic construct
  source 1..75: mol_type = other DNA
gtacagaacttaagcggcaactttcgttatagcgttaccgccacacctgccggacatcatgacgaaagcaaagcc

SEQ ID NO: 129425 - DNA, 75 bp, synthetic construct
  source 1..75: mol_type = other DNA
agagttcctgccgggtctgcgcgcactgtgcgacgaatttggcgcattgctgatcatcgatgaagtgatgaccgg

SEQ ID NO: 129426 - DNA, 75 bp, synthetic construct
  source 1..75: mol_type = other DNA
ttaccgacgccgagtccgtgacgtgctatcaggatgtgatggcctgtgacgtcgagcgttttaagcgtttcttcc

SEQ ID NO: 129427 - DNA, 75 bp, synthetic construct
  source 1..75: mol_type = other DNA
agagttcctgccaggtctgcgtgcgctgtgtgacgaatttggcgcgttgctgatcatcgatgaagtgatgaccgg

SEQ ID NO: 129428 - DNA, 75 bp, synthetic construct
  source 1..75: mol_type = other DNA
atggtagccaaattgaaatcgctctcgaccagggggaagtgaaagcgggtgaatttgctgaacctatctgcgagc

SEQ ID NO: 129429 - DNA, 75 bp, synthetic construct
  source 1..75: mol_type = other DNA
gaatttgctgaacctatctgtgagctggaactggaactgcttagcggcgacacgcgcgcggtgctgaaactggcg

SEQ ID NO: 129430 - DNA, 75 bp, synthetic construct
  source 1..75: mol_type = other DNA
aacgccggataactggctgcgtgggcacgacatgggcctgcgtattcgtggcgaaaacggtcgctatgagatgac

SEQ ID NO: 129431 - DNA, 75 bp, synthetic construct
  source 1..75: mol_type = other DNA
gaagtctggccgaacggcgaattgcctgccgatctcgcttcccgcgtgcagccgctgtttagcaccgatttttat

SEQ ID NO: 129432 - DNA, 75 bp, synthetic construct
  source 1..75: mol_type = other DNA
attgactcaatactgttgctggcgggttactacgatcctctcgtcgcgcaagcctggctggagaactggcagggg

SEQ ID NO: 129433 - DNA, 75 bp, synthetic construct
  source 1..75: mol_type = other DNA
aaccaactggtatcgcaaaccggattacgccagggcagtctgagcaaagcggcgcgtggctatcatctggcgcag

SEQ ID NO: 129434 - DNA, 75 bp, synthetic construct
  source 1..75: mol_type = other DNA
caaataagttcacttgacgatattaaacttagtcaacaagaacacaatcagtcatttgaaaaacttgagcaagaa

SEQ ID NO: 129435 - DNA, 75 bp, synthetic construct
  source 1..75: mol_type = other DNA
aagaagaagcgagagatattgctgttgtcgaagtaaatcaatatgtagaaagttcaaaatttgaaaaagaaataa

SEQ ID NO: 129436 - DNA, 75 bp, synthetic construct
  source 1..75: mol_type = other DNA
tcatctttgctctctggctgcgtaaaaacatcccggaagcggaagactggaaagagaaacatgcaggtaaagcac

SEQ ID NO: 129437 - DNA, 75 bp, synthetic construct
  source 1..75: mol_type = other DNA
gacctgaagtgtatatacgagcaaagtacaaaataataaaaggatactttgagttaacattcagggaggaatata

SEQ ID NO: 129438 - DNA, 75 bp, synthetic construct
  source 1..75: mol_type = other DNA
ggctttaccaagcaggggacgcatcaggcgatggatgatatccgtgaatcggtggcggagttggcttactaccgc

SEQ ID NO: 129439 - DNA, 75 bp, synthetic construct
  source 1..75: mol_type = other DNA
gaagatgaattaaaagaaaaaaagcaaactattaaacctttcattcagtttattaattctttgaatcttccagaa

SEQ ID NO: 129440 - DNA, 75 bp, synthetic construct
  source 1..75: mol_type = other DNA
actgcggcgccactacagtatgtcggcgtgttccgtaaccacgacctcaccgatgtgctagcaaaagcgaatacc

SEQ ID NO: 129441 - DNA, 75 bp, synthetic construct
  source 1..75: mol_type = other DNA
actgttaaacggtcaatcgcttggcaacgttctgctggcggggggcttaggcgcagataactgcgtggaagcggc

SEQ ID NO: 129442 - DNA, 75 bp, synthetic construct
  source 1..75: mol_type = other DNA
agcccgcaaacagcaacaaccgctgaccagtttccagaatgaggtgcagccgagctcgcgacatttttatgatgc

SEQ ID NO: 129443 - DNA, 75 bp, synthetic construct
  source 1..75: mol_type = other DNA
tccttttactgtccgccctgtgcagccttcagcagtcgtttttttgtcagtcaggcagtggacaaaatcctgcca

SEQ ID NO: 129444 - DNA, 75 bp, synthetic construct
  source 1..75: mol_type = other DNA
cgtctttctgaaacgtttgctgtgatgaatgcgccaggaattaaagatgcttatgtcaatgggcaaaaatatcgc

SEQ ID NO: 129445 - DNA, 75 bp, synthetic construct
  source 1..75: mol_type = other DNA
aatgaaataccgccatcggttaatgtggcaattgataagcaacaagggctttcatgcacaatcaccttcggtaaa

SEQ ID NO: 129446 - DNA, 75 bp, synthetic construct
  source 1..75: mol_type = other DNA
gcaaacgttgccatctggaaagcattgagcgttggagaaaccctgcccgcgcgcgattttcagcacgttgataaa

SEQ ID NO: 129447 - DNA, 75 bp, synthetic construct
  source 1..75: mol_type = other DNA
atgcaaaccgttttagcgaaaatcgtcgcagacaaggcgatttgggtagaaacccgcaaacagcagcaaccgctg

SEQ ID NO: 129448 - DNA, 75 bp, synthetic construct
  source 1..75: mol_type = other DNA
gctggagaactcccatcgccacaatagatggcagctatagccattctaaaaacgcctggcaaagtggtggaagta

SEQ ID NO: 129449 - DNA, 75 bp, synthetic construct
  source 1..75: mol_type = other DNA
gccagttttcagaatgaaattcagccgagcacgcgacatttttatgatgcgctacagggtgcacgtaccgcattt

SEQ ID NO: 129450 - DNA, 75 bp, synthetic construct
  source 1..75: mol_type = other DNA
cgacgaacaatattgccagcttgccgccgtcgcccacagtctggcgatgggcgtgctgaccgaagtcagtaatga

SEQ ID NO: 129451 - DNA, 75 bp, synthetic construct
  source 1..75: mol_type = other DNA
gcgtgttccgcaatcacgatattgccgatgtggtggacaaagctaaggtgttatcgctggcggcagtgcaactgc

SEQ ID NO: 129452 - DNA, 75 bp, synthetic construct
  source 1..75: mol_type = other DNA
tgatgcaggtgacagcagtgtgagttacaaggatgagtggggcgataaatataaatcagaagttgatgttaaaag

SEQ ID NO: 129453 - DNA, 75 bp, synthetic construct
  source 1..75: mol_type = other DNA
gaagcgaacaaaacgcgggccaaaaaaatacggaattatgttgccggcgcaacatcaaaacgagctccctatatt

SEQ ID NO: 129454 - DNA, 75 bp, synthetic construct
  source 1..75: mol_type = other DNA
aaagcgccacccaagtatcaatttgaagaaaatggcgaaactaaatactggtctggtcgtggacgtgcgccgaaa

SEQ ID NO: 129455 - DNA, 75 bp, synthetic construct
  source 1..75: mol_type = other DNA
atgagcgaactgactaaagaagatgaatacggcattatcagccgtactatgatgaatattcgttcattgcgtgtt

SEQ ID NO: 129456 - DNA, 75 bp, synthetic construct
  source 1..75: mol_type = other DNA
ggtacggttatcgactttaagcaatcctgggcaacaccgctacgtcgtactcttcagcccgtgagcgggccacag

SEQ ID NO: 129457 - DNA, 75 bp, synthetic construct
  source 1..75: mol_type = other DNA
agcgtagataacttggtctgcttttttgaatggcttccaaatacctctggctttacagcaaacggattcaattta

SEQ ID NO: 129458 - DNA, 75 bp, synthetic construct
  source 1..75: mol_type = other DNA
atatgcctgccgtcacgtttaatcccggcccgggcgattttgttgcattcgtcaacaataatacaattactgctt

SEQ ID NO: 129459 - DNA, 75 bp, synthetic construct
  source 1..75: mol_type = other DNA
ttgtctccgcaaaagtgggcactgaaaataataagctactcggtaatacgctcaccggtaatgatgccgcaaagg

SEQ ID NO: 129460 - DNA, 75 bp, synthetic construct
  source 1..75: mol_type = other DNA
atttccaggcaacattaaagcaggatgggagtaaccagattaccccaggggaatttaaagcgaccagtactttcc

SEQ ID NO: 129461 - DNA, 75 bp, synthetic construct
  source 1..75: mol_type = other DNA
acattcgcaaaaagttattctcgaaccgaataacagcagttcagtttacaaagactatgaatctgaaactgacag

SEQ ID NO: 129462 - DNA, 75 bp, synthetic construct
  source 1..75: mol_type = other DNA
ggcggagtaagaaaggctaaataccgctttaaggatgaaaatggcgagatcagagaatggtctggtaatggcaag

SEQ ID NO: 129463 - DNA, 75 bp, synthetic construct
  source 1..75: mol_type = other DNA
agatgcctgacagatatcaggcaaaccatccgccgtggagcgtggctgttcggacatacggcaaggccactgacc

SEQ ID NO: 129464 - DNA, 75 bp, synthetic construct
  source 1..75: mol_type = other DNA
catgcaaagccttaccatcgaattttataccgatggcacatttgacccggttcaaaatcagcaggttacattatt

SEQ ID NO: 129465 - DNA, 75 bp, synthetic construct
  source 1..75: mol_type = other DNA
cacttcaaaactgcgttcgtgtgactaatattgagacaaaattagtttcaacaaaggttggtactgaaaacgggc

SEQ ID NO: 129466 - DNA, 75 bp, synthetic construct
  source 1..75: mol_type = other DNA
caccggaactggtacatactctgtgggaagacttgcgtaaaacactcccagagatcggagcagttccggctattc

SEQ ID NO: 129467 - DNA, 75 bp, synthetic construct
  source 1..75: mol_type = other DNA
tttacgacgtgcaggtgatgggcagctaccgtggaccatcttacttcaccgtgcgtaaagagacccgactgcacg

SEQ ID NO: 129468 - DNA, 75 bp, synthetic construct
  source 1..75: mol_type = other DNA
aaactcagtcgttgatgatgacagcaacgcccttgctccagctctggctgaagagagtaaccgaacggtacaaga

SEQ ID NO: 129469 - DNA, 75 bp, synthetic construct
  source 1..75: mol_type = other DNA
cggatcaagatacaggtataacataccctccatttccaggccacgctacaacaggatggaactataccaatagaa

SEQ ID NO: 129470 - DNA, 75 bp, synthetic construct
  source 1..75: mol_type = other DNA
cgtaaatactgggctgtaggtggtatttatcagacccttacaattgaattctatacagatacaaactttgatcca

SEQ ID NO: 129471 - DNA, 75 bp, synthetic construct
  source 1..75: mol_type = other DNA
tatgccgattgctaatgggttctccctgaagggcatccctgccatcgctggggatatcaaacttccatggcaaat

SEQ ID NO: 129472 - DNA, 75 bp, synthetic construct
  source 1..75: mol_type = other DNA
ccctgttgttttctttaattgctccgattaaagcggtctatgctgaagcgattatgatttcaggaaagctacagg

SEQ ID NO: 129473 - DNA, 75 bp, synthetic construct
  source 1..75: mol_type = other DNA
gggcaaaaatgaccaacaagtttacgtcgaaagagtcttatagcgacgttctgacggttgtaacgtacaaacagc

SEQ ID NO: 129474 - DNA, 75 bp, synthetic construct
  source 1..75: mol_type = other DNA
agtcaataacttagtcaccagccacatcagtgaagtatttaccaataacgttaatgtttacgtaaatttacttac

SEQ ID NO: 129475 - DNA, 75 bp, synthetic construct
  source 1..75: mol_type = other DNA
gtccggtctgccccctccttatggtgccaacctgtttgccggtggctatgaaaccgagcgcagtgacggtctgac

SEQ ID NO: 129476 - DNA, 75 bp, synthetic construct
  source 1..75: mol_type = other DNA
ccttctggaacgtctctaaagaagctcggtcattcaagatcggagataaagatatctacgttgctccgcagacga

SEQ ID NO: 129477 - DNA, 75 bp, synthetic construct
  source 1..75: mol_type = other DNA
atgcaaactcacacaagaaatattgggccgtaggtggagtttggcactcgctcacagtggaattttataccgaca

SEQ ID NO: 129478 - DNA, 75 bp, synthetic construct
  source 1..75: mol_type = other DNA
aatggggatgttactgtcaaattcaggtatgcaacaagcacaaataacttagttttttataaacctacccaactc

SEQ ID NO: 129479 - DNA, 75 bp, synthetic construct
  source 1..75: mol_type = other DNA
ttctttttttggtgctatcctgttcttgctttacagcgattggcaatcctacaagttttcttgttggtaacaatg

SEQ ID NO: 129480 - DNA, 75 bp, synthetic construct
  source 1..75: mol_type = other DNA
aaagtaacaggaaatggtcgcagaacaccgccgaccgtctgcttgccagcctgaacaatcacatctttccggtca

SEQ ID NO: 129481 - DNA, 75 bp, synthetic construct
  source 1..75: mol_type = other DNA
agtggtacttcaagcggcacgccaatgagtattaaacataaaatggttgattccggtaaaagttatggtggacat

SEQ ID NO: 129482 - DNA, 75 bp, synthetic construct
  source 1..75: mol_type = other DNA
tttgacctggataatatgacgttatccaacccaacgtgttttactgctgcacttactggcccatcggtaagtggt

SEQ ID NO: 129483 - DNA, 75 bp, synthetic construct
  source 1..75: mol_type = other DNA
ctggcagcgatgggggccgatccggcctggctgacgctggcattaaccttaccggacgtcgacgaagcgtggctt

SEQ ID NO: 129484 - DNA, 75 bp, synthetic construct
  source 1..75: mol_type = other DNA
tcctgtacaaaaccaaaaggttcaattgttacgtactagcgactatctttatgcttttcatgctgaaggcgctgg

SEQ ID NO: 129485 - DNA, 75 bp, synthetic construct
  source 1..75: mol_type = other DNA
cactattgcgagctggtttccagcccagagcagatcccacaagtgctggcgattgccatgcgcaaagcggtgctt

SEQ ID NO: 129486 - DNA, 75 bp, synthetic construct
  source 1..75: mol_type = other DNA
cgtatgaaagcgagattgattcatcaggggggatttaccccggaaaaggtcaaggcacaacacagccccttgaat

SEQ ID NO: 129487 - DNA, 75 bp, synthetic construct
  source 1..75: mol_type = other DNA
gctggcgattttgcaaaaccgtttgcaggttgccgatgctaaagatgcggactacttgatcaaacgtcatctccg

SEQ ID NO: 129488 - DNA, 75 bp, synthetic construct
  source 1..75: mol_type = other DNA
ggcgatcagcactgatacgctggtggcgggcaaccatttcctccctgatatcgatcctgctgatctggcttataa

SEQ ID NO: 129489 - DNA, 75 bp, synthetic construct
  source 1..75: mol_type = other DNA
ctgtataacgcggtagtgaccgcagctgataaagcctccgccaaccgtggcgtgctggtagtgatgaacgacacc

SEQ ID NO: 129490 - DNA, 75 bp, synthetic construct
  source 1..75: mol_type = other DNA
acggtatcgttagcgccggcgtgggtaacggcaatctgtataaaaccgtgtttgatactctggcgactgcggcga

SEQ ID NO: 129491 - DNA, 75 bp, synthetic construct
  source 1..75: mol_type = other DNA
gtgaatatcggctctcaggacatgaacgataatgtctggctgacactggtgaaaaaaattaacactgactgcgat

SEQ ID NO: 129492 - DNA, 75 bp, synthetic construct
  source 1..75: mol_type = other DNA
gggtttaggcagcgatctctatcgcgccgggcaatccgtagaacgcaccgcgcagcaggcagcagcatttgttaa

SEQ ID NO: 129493 - DNA, 75 bp, synthetic construct
  source 1..75: mol_type = other DNA
gttacgcccaatatccatagtgaagtgatccgccgtgcggtgggctacggcatgaccgtttgccccggctgcgcg

SEQ ID NO: 129494 - DNA, 75 bp, synthetic construct
  source 1..75: mol_type = other DNA
gcgactggatggccgctttactccaaaattttttagaataggtggcgttgttcaagactttactgttgaatttta

SEQ ID NO: 129495 - DNA, 75 bp, synthetic construct
  source 1..75: mol_type = other DNA
acggtaccgacacgatggaagaaactgcttacttcctggacctgacggtgaaatgagacaaaccggtggtgatgg

SEQ ID NO: 129496 - DNA, 75 bp, synthetic construct
  source 1..75: mol_type = other DNA
gaagcatgccgagaatcttatgcaccgccttatacaattggtaaaaataagtttatcccggtgatgctgccaact

SEQ ID NO: 129497 - DNA, 75 bp, synthetic construct
  source 1..75: mol_type = other DNA
atgaactgatcttccccggcgaccataacccgtataagccaatgtgtgaaataacgaatccctcactctggcaaa

SEQ ID NO: 129498 - DNA, 75 bp, synthetic construct
  source 1..75: mol_type = other DNA
ccattgccggtggtggtgactccgcaaccaaatctaactacacagcgggtaaagttggcgtagaaaatctggtca

SEQ ID NO: 129499 - DNA, 75 bp, synthetic construct
  source 1..75: mol_type = other DNA
acggtaccgacacgatggaagaaacggcttacttccttgacctgacggtgaaatgagacaaaccggtggtgatgg

SEQ ID NO: 129500 - DNA, 75 bp, synthetic construct
  source 1..75: mol_type = other DNA
acggtaccgacacgatggaagaaaccgcttacttcctcgacctgacggtgaaatgtgacaaaccggtggtgatgg

SEQ ID NO: 129501 - DNA, 75 bp, synthetic construct
  source 1..75: mol_type = other DNA
aaaatacggaaggcgaatactcgtctctgggcggtcgactgaatgaaggaacggaacatgaggttgtcatccagg

SEQ ID NO: 129502 - DNA, 75 bp, synthetic construct
  source 1..75: mol_type = other DNA
tacatccatcacggcaaaatgatgccggacgactggcatgaacaactcagcggtttcgacgctatctactttggt

SEQ ID NO: 129503 - DNA, 75 bp, synthetic construct
  source 1..75: mol_type = other DNA
cgcttaaaaactcattctaaaactcaaaagaaaagcgccgatttagtatcaaataagttgcgtatcggcgttttt

SEQ ID NO: 129504 - DNA, 75 bp, synthetic construct
  source 1..75: mol_type = other DNA
tcggagcaggcgctgtgctgggcgttatctggcggtgaagattacgagttatgtttcaccgtgccggagcttaac

SEQ ID NO: 129505 - DNA, 75 bp, synthetic construct
  source 1..75: mol_type = other DNA
gacaaatgaacaaaacagtggaaattttggtggggccacatccggaacagtatgtctgggttttaaaattgttaa

SEQ ID NO: 129506 - DNA, 75 bp, synthetic construct
  source 1..75: mol_type = other DNA
attcggccaccaatggatgcttgcattgccagcgcggacaataaaatgattgcccgacaaatgaacaaaacagtg

SEQ ID NO: 129507 - DNA, 75 bp, synthetic construct
  source 1..75: mol_type = other DNA
gtgcttcatcagctgcttttgctttggggagctaggctatcagagcttcgcctggcaaccgccagcgaattcaac

SEQ ID NO: 129508 - DNA, 75 bp, synthetic construct
  source 1..75: mol_type = other DNA
ttatgacactggtgtgctttgtgcgccaacggcttttggtaagacagttaccgcagcggcagtgattgccagacg

SEQ ID NO: 129509 - DNA, 75 bp, synthetic construct
  source 1..75: mol_type = other DNA
ccaaaaggaggatttggtaatcttatcgcgttacctctgcaaaaaagaccgcgtgcatcggggggaagtgttttt

SEQ ID NO: 129510 - DNA, 75 bp, synthetic construct
  source 1..75: mol_type = other DNA
gaaaggcaatgccaccacgcccaggttgccgacgcgatttgcaaaattattttgcgttaaggtcaaaccagttta

SEQ ID NO: 129511 - DNA, 75 bp, synthetic construct
  source 1..75: mol_type = other DNA
ctttcacctgtgaagccgatactctcggcagttgtgggtatgtctacatcgttattatcccactcaacgttaaac

SEQ ID NO: 129512 - DNA, 75 bp, synthetic construct
  source 1..75: mol_type = other DNA
gggcgcaacatatggtgattgggcgcgccctgttctcttcatctgactatcgcgcgaccttagctcaattcgcca

SEQ ID NO: 129513 - DNA, 75 bp, synthetic construct
  source 1..75: mol_type = other DNA
tactgatagtgtcaatcttaacgttatatataagtcgacgtttttacacggggtattcgaatgcaaaaaatactt

SEQ ID NO: 129514 - DNA, 75 bp, synthetic construct
  source 1..75: mol_type = other DNA
tgctttttgtttcatgtactaatttattagtattgcccttaaatgcaatgcttgatggaacacaaaggcaacaat

SEQ ID NO: 129515 - DNA, 75 bp, synthetic construct
  source 1..75: mol_type = other DNA
gttgactgggtgctcagagaggcctgctgtgctgccattctgggtaaagccgacaatccaccagcatccggcaat

SEQ ID NO: 129516 - DNA, 75 bp, synthetic construct
  source 1..75: mol_type = other DNA
gtacggcaatgtgctggcaagcggcgtcggcgtgggtacgctgaccctgttacaaagcgacagcctcgacagtta

SEQ ID NO: 129517 - DNA, 75 bp, synthetic construct
  source 1..75: mol_type = other DNA
gggtcagcgacattcgcgatatcagcgaacagttgctgcatatcacctggccggaactaaaaccgcgcaataatc

SEQ ID NO: 129518 - DNA, 75 bp, synthetic construct
  source 1..75: mol_type = other DNA
atttgcaggcaatatccgtcacctgatggcagaacagcatcaggggctgggggcggcgatcatcagcaatatgga

SEQ ID NO: 129519 - DNA, 75 bp, synthetic construct
  source 1..75: mol_type = other DNA
cctgtcgtcgttctcagtaacaacgatggctgcgttattgcccggagtgctgattatgtggaattgcaagtaaca

SEQ ID NO: 129520 - DNA, 75 bp, synthetic construct
  source 1..75: mol_type = other DNA
gaagggctttgttttattcgtgacggcgaacctgttacgttagactggaaaggatatgaccattttgccacgcca

SEQ ID NO: 129521 - DNA, 75 bp, synthetic construct
  source 1..75: mol_type = other DNA
tctctggcggtgaagattacgagttgtgtttcacggtgccggaactgaaccgtggcgcgctggatgtggctctcg

SEQ ID NO: 129522 - DNA, 75 bp, synthetic construct
  source 1..75: mol_type = other DNA
gtcagtatgctctggcctcattacctgcgtactatcccgtccctgtcggtggtggcactgactccccggttatcc

SEQ ID NO: 129523 - DNA, 75 bp, synthetic construct
  source 1..75: mol_type = other DNA
agcgggttgcgcgttatctgcgccaacaggggatcggacgcggtcaagtggttgggattatcgctgagcatagcg

SEQ ID NO: 129524 - DNA, 75 bp, synthetic construct
  source 1..75: mol_type = other DNA
gagtctggaggcgctgcgtagcgctttcactccgcaccaactgacagcgatgaaaaatgggctgttggatttagt

SEQ ID NO: 129525 - DNA, 75 bp, synthetic construct
  source 1..75: mol_type = other DNA
tccgccacaatcactggaagaaatgtgggacattcctgggctgcaagagcgtctgaaaaacgatttcgatctcga

SEQ ID NO: 129526 - DNA, 75 bp, synthetic construct
  source 1..75: mol_type = other DNA
cctgaacgcattaaccggtaagggcgtgcacgttgttaccgtcaacgattacctggcgcagcgtgacgccgaaaa

SEQ ID NO: 129527 - DNA, 75 bp, synthetic construct
  source 1..75: mol_type = other DNA
agctgctggtgaaagaaggcatcatggatgaaggggagtcgctgtactctccggctaatattatgctgatgcacc

SEQ ID NO: 129528 - DNA, 75 bp, synthetic construct
  source 1..75: mol_type = other DNA
tgaagccaggaaaaaatacggtaaaagcgttgaagaacgctatgggtacacattcacacaaacgatgtacgcggc

SEQ ID NO: 129529 - DNA, 75 bp, synthetic construct
  source 1..75: mol_type = other DNA
gttgtgcaaagcgcgaccaccacccgctcatttacgcgcgaaaatctgctcaaaaaatatgatgcaattataaag

SEQ ID NO: 129530 - DNA, 75 bp, synthetic construct
  source 1..75: mol_type = other DNA
ttgaaaaaatcaaagccgactggcaggtgcgtcacgacgcagtactggcggcaggtggtctgcatatcatcggca

SEQ ID NO: 129531 - DNA, 75 bp, synthetic construct
  source 1..75: mol_type = other DNA
aaagtaggacgtaacgatccttgcccgtgcggttctggtaaaaaatacaagcagtgccatggtcgcctgcaataa

SEQ ID NO: 129532 - DNA, 75 bp, synthetic construct
  source 1..75: mol_type = other DNA
tcgacgttcagttactcggcggtatggttcttaacgaacgctgcatcgccgaaatgcgtaccggtgaaggtaaaa

SEQ ID NO: 129533 - DNA, 75 bp, synthetic construct
  source 1..75: mol_type = other DNA
tattagtcgcaatcattatcattggtcttcagggttactggcttcaccagaaaaaaaccaaatatattgcaacga

SEQ ID NO: 129534 - DNA, 75 bp, synthetic construct
  source 1..75: mol_type = other DNA
ccggtgctggtggggactatctcgatcgagaaatcggagctggtgtcaaatgaattgaccaaagcgggtatcaaa

SEQ ID NO: 129535 - DNA, 75 bp, synthetic construct
  source 1..75: mol_type = other DNA
gtgggatattccggggctgcaggaacgtctgaagaacgatttcgacctcgatttgccaattgccgagtggctgga

SEQ ID NO: 129536 - DNA, 75 bp, synthetic construct
  source 1..75: mol_type = other DNA
attgaaaaaattaaagccgactggcaggtacgtcacgatgcggtactggaagcaggtggcctgcatatcatcggt

SEQ ID NO: 129537 - DNA, 75 bp, synthetic construct
  source 1..75: mol_type = other DNA
tggtgatgagccaggcggcgcgccagaccttatccctcgaaacggatttttccctgcgcgaagtgcaggcattag

SEQ ID NO: 129538 - DNA, 75 bp, synthetic construct
  source 1..75: mol_type = other DNA
ttgatgatgtgataaatcagacggttaaccgtgtactcgatcaattcgccataacgcttcctgaagatctctttg

SEQ ID NO: 129539 - DNA, 75 bp, synthetic construct
  source 1..75: mol_type = other DNA
ccattgcacttaggccatctgcgtttaatgactcaggcggcagaaatcggtgcggtgattatgcctcccgttccg

SEQ ID NO: 129540 - DNA, 75 bp, synthetic construct
  source 1..75: mol_type = other DNA
tcaacgaaacggaacgtggtgctggtggctttggtagcacatcggaagaccactttgaaatcaagcgcacaccgc

SEQ ID NO: 129541 - DNA, 75 bp, synthetic construct
  source 1..75: mol_type = other DNA
catacgcgcctggctaactgcgtaggaattatcgactccgattatcgcggtgaaatcatggcaaaactgattaca

SEQ ID NO: 129542 - DNA, 75 bp, synthetic construct
  source 1..75: mol_type = other DNA
tgccattcgccatacagcggtccgcccgaaggaaagcccacataatctggaggtactgacccgttcccgttttac

SEQ ID NO: 129543 - DNA, 75 bp, synthetic construct
  source 1..75: mol_type = other DNA
ggagcgcatgtctggatatttttttcctcacgagtttcggcccacgaagctcgccgtctggggactgctgttatt

SEQ ID NO: 129544 - DNA, 75 bp, synthetic construct
  source 1..75: mol_type = other DNA
aaaacccctatcagaatagggactactatgcagttgcattaaaggccaggcttcaaactcatctggaagagaggt

SEQ ID NO: 129545 - DNA, 75 bp, synthetic construct
  source 1..75: mol_type = other DNA
taaaccgcttccgtgcggacttctcggcgaatttgacctttatcgggttcgtgacctggaaaagcagcagccaag

SEQ ID NO: 129546 - DNA, 75 bp, synthetic construct
  source 1..75: mol_type = other DNA
atgaaacgactcattgtaggcatcagcggtgccagcggcgcgatttatggcgtgcgtttattacaggttctgcgc

SEQ ID NO: 129547 - DNA, 75 bp, synthetic construct
  source 1..75: mol_type = other DNA
ctgatcagtgggcttttcttgtatcggtgaccccgatgaatgtgcaggatattgaaccgacgatattacgggcta

SEQ ID NO: 129548 - DNA, 75 bp, synthetic construct
  source 1..75: mol_type = other DNA
tcgcgttacctctgcaaaaaagagcgcgtgcatcggggggaagcgtttttgttgatattaatttccagccttatt

SEQ ID NO: 129549 - DNA, 75 bp, synthetic construct
  source 1..75: mol_type = other DNA
gtctggattatccggtttacgtcctgttgctgtgatgtttatgaatcctctggcggtactgcgcggtggactggc

SEQ ID NO: 129550 - DNA, 75 bp, synthetic construct
  source 1..75: mol_type = other DNA
ctgacaggcacactgatgaaagtagcggctattgtggctgcggttaccgtaggcctcggcaccttagcggtggcg

SEQ ID NO: 129551 - DNA, 75 bp, synthetic construct
  source 1..75: mol_type = other DNA
gtcgcaaaccctgacgacagctgggaagaccagaaacgtgaccttttggcctttgccagtacggcagcaaaggcg

SEQ ID NO: 129552 - DNA, 75 bp, synthetic construct
  source 1..75: mol_type = other DNA
acgaaggatgcgatgggaactatccagcgtgtgctggagaaggtgaacgcactgccgcaggataaacgtctgtct

SEQ ID NO: 129553 - DNA, 75 bp, synthetic construct
  source 1..75: mol_type = other DNA
gccagccgctgatggatattctgtacacggtgaaaagcatcacgggggcgttgcgttgctgggtggaagctaacc

SEQ ID NO: 129554 - DNA, 75 bp, synthetic construct
  source 1..75: mol_type = other DNA
ggaaaacggtgctgtggacttcgccgcactggttgaaggtggtgcgcgcatgaatgtggcaaaccctgacgacag

SEQ ID NO: 129555 - DNA, 75 bp, synthetic construct
  source 1..75: mol_type = other DNA
tttctcgctggtgtggtggaaggattcaaagtggcggcaggtcccgtcagtgcagcattcgaaccgcttaagccc

SEQ ID NO: 129556 - DNA, 75 bp, synthetic construct
  source 1..75: mol_type = other DNA
agacgcagctaggacaaagtgcgcaggatattgcgcgggaggtggcacgccagcttgatgaacgtgaacgcaggc

SEQ ID NO: 129557 - DNA, 75 bp, synthetic construct
  source 1..75: mol_type = other DNA
acctctgccgaactgcagagcgcagcggcaatggggcgacgattcggggaggcactggcggaagggctgaatatg

SEQ ID NO: 129558 - DNA, 75 bp, synthetic construct
  source 1..75: mol_type = other DNA
ctggcatccggtccgctggcgatgctgcgcgttgccctgtatgccatatcgggtctgttaggtgctctgctcagt

SEQ ID NO: 129559 - DNA, 75 bp, synthetic construct
  source 1..75: mol_type = other DNA
gttatgcatccgctggactccctgaaatccggtgtttcctggttgctggataaactcggcattgtcagtaaagag

SEQ ID NO: 129560 - DNA, 75 bp, synthetic construct
  source 1..75: mol_type = other DNA
cagtaacgcgaaccagcagcgcgttgtcctggttggctggcgcaccacttgcactgctgcgacgcgggcttgctt

SEQ ID NO: 129561 - DNA, 75 bp, synthetic construct
  source 1..75: mol_type = other DNA
agtttggtgatgacgcggcgaaactggcaaacaaccttccggaactgcagcgccagctaaaactgactgcgggca

SEQ ID NO: 129562 - DNA, 75 bp, synthetic construct
  source 1..75: mol_type = other DNA
ccgctgtggtggctgcggttaccgtaggcctcggaaccttagcggtggcactggctgcagtgctggggccgctgg

SEQ ID NO: 129563 - DNA, 75 bp, synthetic construct
  source 1..75: mol_type = other DNA
cggctgttgtggctgcggttaccgtaggcctcggcaccttagcggtggcgttggctgcagtgctggggccgctgg

SEQ ID NO: 129564 - DNA, 75 bp, synthetic construct
  source 1..75: mol_type = other DNA
tgaaaagcgtcacgggagcgtcgcgccgctgggtggaagctaacccggaactgacaggcacactgatgaaagtag

SEQ ID NO: 129565 - DNA, 75 bp, synthetic construct
  source 1..75: mol_type = other DNA
tgaaatgcaggatgccatcaaggctgccagcgaacagttgccgatggaaaacggtgctgtggacttcgccgcact

SEQ ID NO: 129566 - DNA, 75 bp, synthetic construct
  source 1..75: mol_type = other DNA
tggcggtactgcacggtggactggcagccgcaggcgcggtgctgcgagtgcttgcatccggtccactggcgatgc

SEQ ID NO: 129567 - DNA, 75 bp, synthetic construct
  source 1..75: mol_type = other DNA
gtcccatcagtgcagcgttcgaaccgcttaagcctgtgttccagtggattggtgacaaagtgcaggcgctgtggg

SEQ ID NO: 129568 - DNA, 75 bp, synthetic construct
  source 1..75: mol_type = other DNA
cactgtgccgcccgctcaacggattgaggcactgacgcagatcatcatccagacgcagccaggacaaagtgcgca

SEQ ID NO: 129569 - DNA, 75 bp, synthetic construct
  source 1..75: mol_type = other DNA
aggcggcgaagcgatgatgagtcgtgcagccactgtgccgcccgttcaccggattgaggcaccgacgcagatcat

SEQ ID NO: 129570 - DNA, 75 bp, synthetic construct
  source 1..75: mol_type = other DNA
tcagcgcaggatgaatgcggcgcgtgccagttatgcccgttcactggaggtgcgtgatcgtattgcaggcgccgg

SEQ ID NO: 129571 - DNA, 75 bp, synthetic construct
  source 1..75: mol_type = other DNA
taaagcggcggcactgggttccacctttctgacactgggtgctgcgccagaggttgcagccagtgcagcaaacgc

SEQ ID NO: 129572 - DNA, 75 bp, synthetic construct
  source 1..75: mol_type = other DNA
gtcaaaaccggagcgcagaacaccttcagcagcctgggcgaaacgctgcgccagtgcagcgttcgaaccgcttaa

SEQ ID NO: 129573 - DNA, 75 bp, synthetic construct
  source 1..75: mol_type = other DNA
agcattgccaaaggatgacgatggatgcacgggcagcaacgccgtgtttggtgtgatcactcacattatcaacga

SEQ ID NO: 129574 - DNA, 75 bp, synthetic construct
  source 1..75: mol_type = other DNA
gttctctgcttgtgtgcgctatggagggtgaatatcgcataaagagataccgaaagtatccgcgccagcacctgg

SEQ ID NO: 129575 - DNA, 75 bp, synthetic construct
  source 1..75: mol_type = other DNA
gttgtcgacgcatcgctaacaccgtgtgacggatcactgcttgtttgcactgacgaaggtgagttcaggattaag

SEQ ID NO: 129576 - DNA, 75 bp, synthetic construct
  source 1..75: mol_type = other DNA
ggaaattaacatgggtgtactggcgggtatcattaccggtctggtcggtggtgcagcctataaccgttggtccga

SEQ ID NO: 129577 - DNA, 75 bp, synthetic construct
  source 1..75: mol_type = other DNA
tcttttacactcatgaccgccctctcctctggcgttttctcaatgtcacgctaaccgataccgattcggggcgcg

SEQ ID NO: 129578 - DNA, 75 bp, synthetic construct
  source 1..75: mol_type = other DNA
agcattgccaaaggatgatgatggatgcacgggcagcaatgccgtgtttggtgtgatcactcacattatcaacga

SEQ ID NO: 129579 - DNA, 75 bp, synthetic construct
  source 1..75: mol_type = other DNA
aggacgatctgcgtaacgccacgagctacgtctccaagcagaatcccggcttcttcacagcttattacgccgaat

SEQ ID NO: 129580 - DNA, 75 bp, synthetic construct
  source 1..75: mol_type = other DNA
acaaggttattcttatcgacaacacagatgagtctaatttaaaaatacctgattctgagtttgagtcgtatggag

SEQ ID NO: 129581 - DNA, 75 bp, synthetic construct
  source 1..75: mol_type = other DNA
tcttcttcaaagttaaaaaaaatcaagctgttagcgactgcaataaaagatggtgttgtaggtaaaatgggaaaa

SEQ ID NO: 129582 - DNA, 75 bp, synthetic construct
  source 1..75: mol_type = other DNA
ctgatagtcatcatcgtgagggaatattgcagggtgcattgctggtggtcgattcctcactgactcctgttgatg

SEQ ID NO: 129583 - DNA, 75 bp, synthetic construct
  source 1..75: mol_type = other DNA
aggatttaagcaccgggaagaaagaggcgttaccagtagatgacgatggttacacgggcagtaatgctgtttttg

SEQ ID NO: 129584 - DNA, 75 bp, synthetic construct
  source 1..75: mol_type = other DNA
ctggactatattgatgcagttaatgcattggatttcaacacaataacagataaagcctctttcaatgcgatcgcc

SEQ ID NO: 129585 - DNA, 75 bp, synthetic construct
  source 1..75: mol_type = other DNA
tgatctgctggcgcccgttaagtcgacctctgccgaactacagatcgcagcggcaatggggcgacgattcgggga

SEQ ID NO: 129586 - DNA, 75 bp, synthetic construct
  source 1..75: mol_type = other DNA
gcgatggtgaaagcgtttggcgataaagcactgattggagcaggcactgtgctgaagctggagcaggttgatcaa

SEQ ID NO: 129587 - DNA, 75 bp, synthetic construct
  source 1..75: mol_type = other DNA
attttatttttattaaacagcatatttactgcatttttcagtggatgaacgaaacatctctcgttaacaacggca

SEQ ID NO: 129588 - DNA, 75 bp, synthetic construct
  source 1..75: mol_type = other DNA
gtatgacagcggcggctatatcccgcgtgggcagtttggcatcgtcggtgaaaacggaccggaaattgttaacgg

SEQ ID NO: 129589 - DNA, 75 bp, synthetic construct
  source 1..75: mol_type = other DNA
cgccagctaaaactgacagcgggcaatgatgcgctcggctccatgcagaaagaatccgacatcaacaaggactca

SEQ ID NO: 129590 - DNA, 75 bp, synthetic construct
  source 1..75: mol_type = other DNA
gttatgcatccgctggactccctgaaatccggtgtttcctggttactggagaaacttggcattgtcagtaaagag

SEQ ID NO: 129591 - DNA, 75 bp, synthetic construct
  source 1..75: mol_type = other DNA
gcggggatgttcatgtccggcttcttcccgatcatgatgttcggtctgccaggtgcggcgctggcgatgtacttc

SEQ ID NO: 129592 - DNA, 75 bp, synthetic construct
  source 1..75: mol_type = other DNA
tgatcccaaccggtctgcatcaggtgatgaacaccatcgcctggttccagattggtgaattcaccaacgcggcgg

SEQ ID NO: 129593 - DNA, 75 bp, synthetic construct
  source 1..75: mol_type = other DNA
cggcaaacgctttgtgccgatcgccaccggcttcttctgcctggtgctggcggccatttttggttacgtctggcc

SEQ ID NO: 129594 - DNA, 75 bp, synthetic construct
  source 1..75: mol_type = other DNA
ctgtcaggaaatgatgctgatgttgctcaaaaggtcagtctttttctgacgatgaacgaagagccccccgaaaaa

SEQ ID NO: 129595 - DNA, 75 bp, synthetic construct
  source 1..75: mol_type = other DNA
tgatgtataacctgccggccgccagccagaacgtctggatgctgctggtgatgggcgttatcttcttcgctatct

SEQ ID NO: 129596 - DNA, 75 bp, synthetic construct
  source 1..75: mol_type = other DNA
aactatattgctgcggttggcggcactgacaacctgaaagcaattgacgcctgtatcacccgtctgcgccttaca

SEQ ID NO: 129597 - DNA, 75 bp, synthetic construct
  source 1..75: mol_type = other DNA
gaccagtacgtcaacctgcgcccggttcgtctctttcctggcgttccctgcccgctggcgggaaaacagcctggc

SEQ ID NO: 129598 - DNA, 75 bp, synthetic construct
  source 1..75: mol_type = other DNA
aaacggcggaactgaaagcggcagagatgtgtgaaatcatcgcaatgaaaggcagtccggttaaatacatcacaa

SEQ ID NO: 129599 - DNA, 75 bp, synthetic construct
  source 1..75: mol_type = other DNA
atcagttcgcacggatgtatctgtctggcaccgtcgctataaatccagaaaaacagcggaactgaaagcggcaga

SEQ ID NO: 129600 - DNA, 75 bp, synthetic construct
  source 1..75: mol_type = other DNA
tttgcccttatacgcttggcgttgatacctctaaatcgctggggcatacccgcgaatcaggctattttgcacccg

SEQ ID NO: 129601 - DNA, 75 bp, synthetic construct
  source 1..75: mol_type = other DNA
gcagttttgcgcactgagcgccacggccagcgtgggcgcgattgctggggaagcagtatcaacagagcacatgac

SEQ ID NO: 129602 - DNA, 75 bp, synthetic construct
  source 1..75: mol_type = other DNA
tgaaagccgtattcactctgcgcctgttctggccgctgcggtggatctggccacaaccaacgccaccggcctgat

SEQ ID NO: 129603 - DNA, 75 bp, synthetic construct
  source 1..75: mol_type = other DNA
atgatttctaaggacaagattattgagcttgaagaaaagataaatcgagcctctaagtgggaagaggaaaagaaa

SEQ ID NO: 129604 - DNA, 75 bp, synthetic construct
  source 1..75: mol_type = other DNA
cgccagttagccccgcagttaccggatatgcagcaaacgttattggataagcactacctgcgtaagcatggtgcg

SEQ ID NO: 129605 - DNA, 75 bp, synthetic construct
  source 1..75: mol_type = other DNA
atgttagaagatctcaaacgccaggtattagaagccaacctggcgctgccaaaacataacctggtcacgctcaca

SEQ ID NO: 129606 - DNA, 75 bp, synthetic construct
  source 1..75: mol_type = other DNA
atcaggcattcccgtccattggcggcattgtgcacacacactcgcgccacgccaccatctgggcgcaggcgggcc

SEQ ID NO: 129607 - DNA, 75 bp, synthetic construct
  source 1..75: mol_type = other DNA
accttccggcgtcgattacagcatcatgaccgctgacgatatggtcgtggttagcatcgaaaccggtgaagtggt

SEQ ID NO: 129608 - DNA, 75 bp, synthetic construct
  source 1..75: mol_type = other DNA
tacccgccgacggtatcggtccggaagtcatctctgctggggttgaagtgctgcatgcgctgacacgccacaatc

SEQ ID NO: 129609 - DNA, 75 bp, synthetic construct
  source 1..75: mol_type = other DNA
agatatggcgctggtcggcgatatcaaatcaaccctgcgggcattgctgccactggtggaagaaaaaaccgatcg

SEQ ID NO: 129610 - DNA, 75 bp, synthetic construct
  source 1..75: mol_type = other DNA
ccgttttgtcggagaagaggtgactctggttctccgtatggcggtacaaaaccgtcgtaaatggcagggcgttat

SEQ ID NO: 129611 - DNA, 75 bp, synthetic construct
  source 1..75: mol_type = other DNA
acaagcagcctgataccttcgaagactctgtagagttgatcggcacaatacttaaattggtacgtgatgaagagc

SEQ ID NO: 129612 - DNA, 75 bp, synthetic construct
  source 1..75: mol_type = other DNA
gaagtcgccgcttttgccgcgggtgctgaagctcaactttcgggggaactggctgtctgcgcgggatcgtgtggc

SEQ ID NO: 129613 - DNA, 75 bp, synthetic construct
  source 1..75: mol_type = other DNA
tatctgaaaatgaacggcaagcgtcgcctgttaggttcgtttaaccacggttcgatggctaacgccatgccgcag

SEQ ID NO: 129614 - DNA, 75 bp, synthetic construct
  source 1..75: mol_type = other DNA
ggaagattaccgcgacgcccgcaaagggctggacgatttagctaaaccgagcgagaaagccattcacccgcaata

SEQ ID NO: 129615 - DNA, 75 bp, synthetic construct
  source 1..75: mol_type = other DNA
aacgggcaattcgcgatgccaaaattaatattagccaattagaccaggttgttcttgtgggtggcactacacgta

SEQ ID NO: 129616 - DNA, 75 bp, synthetic construct
  source 1..75: mol_type = other DNA
tggataagcaattgctcccgtcatttcagttatctactcgagaagcaggatcctgatcaacttgctgattttcgg

SEQ ID NO: 129617 - DNA, 75 bp, synthetic construct
  source 1..75: mol_type = other DNA
tcactgaagcggtgattagtgttcccgcatattttggtgatatgcaacgtaaagcaacaaaagccgctgcgacaa

SEQ ID NO: 129618 - DNA, 75 bp, synthetic construct
  source 1..75: mol_type = other DNA
actcattggattgatacaggctttccaccgttaaacaaagctatttctggtcgttacgatggcggcttcccatgt

SEQ ID NO: 129619 - DNA, 75 bp, synthetic construct
  source 1..75: mol_type = other DNA
gctttaatgagcatatgtttgcgcaactggcttcaataattggctcaaaattgttctacgacgaagtcgtggcta

SEQ ID NO: 129620 - DNA, 75 bp, synthetic construct
  source 1..75: mol_type = other DNA
ctcaagctggtgcgcgacgaagagcttattccggaaacagcccctatctgcatcgtagccgactctctggcgtcg

SEQ ID NO: 129621 - DNA, 75 bp, synthetic construct
  source 1..75: mol_type = other DNA
ctttctgctcagtggttgctggtcaaaaccggagcacagaacaccttcagcagcctgggggaaacgctgcgccag

SEQ ID NO: 129622 - DNA, 75 bp, synthetic construct
  source 1..75: mol_type = other DNA
tgcgccggttgcactgttgcgatctggattatccggtttacgtactgttgctgtgatgtttatgaatcctctggc

SEQ ID NO: 129623 - DNA, 75 bp, synthetic construct
  source 1..75: mol_type = other DNA
ccactggcactgctgcgacgcgggtttgcttcatcgggcaaggccgcaggtttacttactgcgccgttgtcgtct

SEQ ID NO: 129624 - DNA, 75 bp, synthetic construct
  source 1..75: mol_type = other DNA
gcgatcacccggtgatgaactggatgatgtccaacgtaaccgtcaaacctgaccggaacgagaacattttcccga

SEQ ID NO: 129625 - DNA, 75 bp, synthetic construct
  source 1..75: mol_type = other DNA
cgccattattgatgagctgcatgctcataaaacccgtgacgtgtgggacgttctggaaacggcaaccggtgcccg

SEQ ID NO: 129626 - DNA, 75 bp, synthetic construct
  source 1..75: mol_type = other DNA
gtatacggtggccgcttccatcacagcgatcacccggtgatgaactggatgatgtctaacgtaaccgtcaaaccg

SEQ ID NO: 129627 - DNA, 75 bp, synthetic construct
  source 1..75: mol_type = other DNA
gatggtgcgtgaattatccattgccaccatgcagagcaagagtttctttgaagggatggatctgctgaaactcaa

SEQ ID NO: 129628 - DNA, 75 bp, synthetic construct
  source 1..75: mol_type = other DNA
cttgcatctggtccgctggcgatgctgcgcgttgccctgtatgccatatctggtctgttaggtgctctgcttagt

SEQ ID NO: 129629 - DNA, 75 bp, synthetic construct
  source 1..75: mol_type = other DNA
ctgacgggcacattgatgaaagtagccgctattgtggctgcggttaccgtaggcctcggcaccttggctgtagcg

SEQ ID NO: 129630 - DNA, 75 bp, synthetic construct
  source 1..75: mol_type = other DNA
gtgttccagtggattggcgacaaagtgcaggcgctgtggggctggtttactgacctgctgacgcctgttaagtcg

SEQ ID NO: 129631 - DNA, 75 bp, synthetic construct
  source 1..75: mol_type = other DNA
gggcaacgcagcgggtttacttactgctccgttgtcgtctttgcgtcgcacggcatcactgacgggaaatgtcct

SEQ ID NO: 129632 - DNA, 75 bp, synthetic construct
  source 1..75: mol_type = other DNA
cgactatttgcaacagtgcctgaaacatcacgttataaccaggaactttcgaaacaggaggcgcggctgaagcga

SEQ ID NO: 129633 - DNA, 75 bp, synthetic construct
  source 1..75: mol_type = other DNA
aataatgctgcggaaagagcgcttcgtgcagtctgtctcggaaagaaaaactttatgttctttggcagcgatcac

SEQ ID NO: 129634 - DNA, 75 bp, synthetic construct
  source 1..75: mol_type = other DNA
tcagtgcagaaatgcgagcgccaattttcgcaaaagaaagcttggcgcttaagttttcaacagaattaataacac

SEQ ID NO: 129635 - DNA, 75 bp, synthetic construct
  source 1..75: mol_type = other DNA
gtcaataaggcactgcggggtgatgggttacgacacgaaaaaggatatctgcggtcacggcttccgggcaatggc

SEQ ID NO: 129636 - DNA, 75 bp, synthetic construct
  source 1..75: mol_type = other DNA
atcattgagcttgaagaaaagataaatcgagcctctaagtgggaagaggaaaagaaaaactatgagatgtatact

SEQ ID NO: 129637 - DNA, 75 bp, synthetic construct
  source 1..75: mol_type = other DNA
tgtcatggcctgaaattaccgttataaaaacagacaatatcattgtctttcaggtagttatatgtcccgttcagc

SEQ ID NO: 129638 - DNA, 75 bp, synthetic construct
  source 1..75: mol_type = other DNA
attgtcgggatctgcacagccattttcgttgccagcgtattgtggttaagttcgttagccgccagtcgtataatc

SEQ ID NO: 129639 - DNA, 75 bp, synthetic construct
  source 1..75: mol_type = other DNA
caccaaacagttaatgggctttggtgaaacccgcgacgaaccgttcgtcagcatggaaggcaaacgcgtggtggt

SEQ ID NO: 129640 - DNA, 75 bp, synthetic construct
  source 1..75: mol_type = other DNA
atgatctgaagtacggcgaagagcgggggatttatttcagtgaaccccgtgcacagcacatcctgaatttctaca

SEQ ID NO: 129641 - DNA, 75 bp, synthetic construct
  source 1..75: mol_type = other DNA
aattctggcttccggaaggacggctggaacgatgctcgcggcagcaggcagaactttaccggaagtgggcggaga

SEQ ID NO: 129642 - DNA, 75 bp, synthetic construct
  source 1..75: mol_type = other DNA
ttatgggcaaaggacgcagtagaacgccagatgagtcatcaggagcgcaataccgtgcgcatggcttatattcat

SEQ ID NO: 129643 - DNA, 75 bp, synthetic construct
  source 1..75: mol_type = other DNA
atgaaggaaacggaatcactggtctatgccgggcgtttccaccacagcaatcatccggtcatgaactggatgatg

SEQ ID NO: 129644 - DNA, 75 bp, synthetic construct
  source 1..75: mol_type = other DNA
acgcgcgggaagaaggcgtagagttcaaattcaacgtccagccactggggattgaagtgaacggtaacggtaaag

SEQ ID NO: 129645 - DNA, 75 bp, synthetic construct
  source 1..75: mol_type = other DNA
cgtcaggcctgatcgcagggaagtgcaactggttaaacgtttacggcaattcgtaccggatgccttacccgtagt

SEQ ID NO: 129646 - DNA, 75 bp, synthetic construct
  source 1..75: mol_type = other DNA
tggatgtggctgcacggcaccgggtgcagtttttgatgcctgagtccgatgctgtcacaatgctgaaaaacaggc

SEQ ID NO: 129647 - DNA, 75 bp, synthetic construct
  source 1..75: mol_type = other DNA
accgggttgtggaaaacctgcccgacgtttccccgtggagtgaacactgatatgcagcacctgccggcaccgatc

SEQ ID NO: 129648 - DNA, 75 bp, synthetic construct
  source 1..75: mol_type = other DNA
gccaaaggtgagcgcatcatcattaactatcccagcccagacctactgcctgatgcagagtggttggaggaaatt

SEQ ID NO: 129649 - DNA, 75 bp, synthetic construct
  source 1..75: mol_type = other DNA
ggatttttcgctcgcgcctccgtatccgtttgtgcagcttgcgaccctgaaacaacggaccgaaaaagcagccag

SEQ ID NO: 129650 - DNA, 75 bp, synthetic construct
  source 1..75: mol_type = other DNA
accgtcaggacctggattggggaagcggttgccgccgctgctgctgacggtgtgacgttctctgttcttgtcaca

SEQ ID NO: 129651 - DNA, 75 bp, synthetic construct
  source 1..75: mol_type = other DNA
ccctgctccattacgtcccggatctgcgccgcaagatgctgctggccacactgtggaacaccggagcacgcatta

SEQ ID NO: 129652 - DNA, 75 bp, synthetic construct
  source 1..75: mol_type = other DNA
ggatttttcgctcacgcctccgtatccgtttgtgcagctggccactctgaagcagcggacagaaaaagccgccag

SEQ ID NO: 129653 - DNA, 75 bp, synthetic construct
  source 1..75: mol_type = other DNA
gcggacattaccgcgatcaaacgtctttccgatatgggcttcaaagtaaccgttactggtggcctggcgctggaa

SEQ ID NO: 129654 - DNA, 75 bp, synthetic construct
  source 1..75: mol_type = other DNA
cgcctatgaaaccactcgtctgattgctgaagaagtcgatattatcgaagtgggcaccattctgtgtatggggga

SEQ ID NO: 129655 - DNA, 75 bp, synthetic construct
  source 1..75: mol_type = other DNA
taatcattaactaccccagcccggatctgctgcctgacgcagagtggttggaggaaattgatttctctcagtggg

SEQ ID NO: 129656 - DNA, 75 bp, synthetic construct
  source 1..75: mol_type = other DNA
tgacgcagagtggttggaggaaattgatttctctcagtgggacgtggtgctggcagatgtacgctggcacgacgg

SEQ ID NO: 129657 - DNA, 75 bp, synthetic construct
  source 1..75: mol_type = other DNA
cgtggaagggttaccgacggagagcggtaaatacgtggcgagaaattatacggaagttggtggcgggccagcggc

SEQ ID NO: 129658 - DNA, 75 bp, synthetic construct
  source 1..75: mol_type = other DNA
tcttcggctcctggtacgtcaaccaacagcagacgatggtggccacactgaaaaactacatggaacagcgtaata

SEQ ID NO: 129659 - DNA, 75 bp, synthetic construct
  source 1..75: mol_type = other DNA
atgtcaggctccgttatacacagccagtctgcagtcatggtaccggcagtgtattctgccggacagcctgcatcg

SEQ ID NO: 129660 - DNA, 75 bp, synthetic construct
  source 1..75: mol_type = other DNA
tcgacagaggtgtacacgaaggtgtttgcgctggatgtggctgcacggcaccgggtgcagttttcgatgcctgag

SEQ ID NO: 129661 - DNA, 75 bp, synthetic construct
  source 1..75: mol_type = other DNA
agaaagcgcggatctgggaagtgacggacagaacggtcaggacctggattggggaggcggttgccgccgctgccg

SEQ ID NO: 129662 - DNA, 75 bp, synthetic construct
  source 1..75: mol_type = other DNA
gaggcactggcgctgactcggagtgatttttcgctcacgcctccgtatccgtttgtgcagctggccactctgaag

SEQ ID NO: 129663 - DNA, 75 bp, synthetic construct
  source 1..75: mol_type = other DNA
atgtcaggttccgttatacacagccagtctgcagccatggtaccggcagtgtattctgccgaacagcctgcatcg

SEQ ID NO: 129664 - DNA, 75 bp, synthetic construct
  source 1..75: mol_type = other DNA
cggccaggacggcaggtcgtgcccccgcaggcagtcaggtccatcgtctggttcccctttccgatcaccactacg

SEQ ID NO: 129665 - DNA, 75 bp, synthetic construct
  source 1..75: mol_type = other DNA
atgaagcactggcgctgacgcggggggatttttctctcgcacctccctatccgtttgtgcagcttgcgaccctga

SEQ ID NO: 129666 - DNA, 75 bp, synthetic construct
  source 1..75: mol_type = other DNA
gtgtgacgttctctgttccggtcacaccacatacgttccgccattcctatgcgatgcacatgctgtatgccggta

SEQ ID NO: 129667 - DNA, 75 bp, synthetic construct
  source 1..75: mol_type = other DNA
acggctgcggccgatggagtgacgttctccgtgccggtgaccccgcacacattccgccattcctacgcgatgcac

SEQ ID NO: 129668 - DNA, 75 bp, synthetic construct
  source 1..75: mol_type = other DNA
cagctctggcactccgccagatgtcgatggttcatgatgaactgccgaaatatctgctggctcccgaggtgagtg

SEQ ID NO: 129669 - DNA, 75 bp, synthetic construct
  source 1..75: mol_type = other DNA
gatgggacacaagtcagtcagttcgacagaggtgtacacgaaggtgtttgcactggacgtagcggcgcgacatcg

SEQ ID NO: 129670 - DNA, 75 bp, synthetic construct
  source 1..75: mol_type = other DNA
ctggacccgtattctgatctgaattatcagtgtgtggaggacagttttgacctgaatgtccgggctgattacctg

SEQ ID NO: 129671 - DNA, 75 bp, synthetic construct
  source 1..75: mol_type = other DNA
aaaaacgtcgtggtcatgcgccgggcagccgcgcagcgggcggtaacaccacgtcaggcagcaaaggccagaacg

SEQ ID NO: 129672 - DNA, 75 bp, synthetic construct
  source 1..75: mol_type = other DNA
gctttcaccgcaggcggagttggaattactggaaacggatgagcgtctggatgcgctgctggaacgtctggaagc

SEQ ID NO: 129673 - DNA, 75 bp, synthetic construct
  source 1..75: mol_type = other DNA
acagttcccgctgccggaggggatgaatctgcccctgaccctgcgccattatcaccatcacacagaacatcgtcg

SEQ ID NO: 129674 - DNA, 75 bp, synthetic construct
  source 1..75: mol_type = other DNA
aacgcactcgcttaaaagaagatgccatcatcggcctgatcttctcctccttttttggcctggggctgtttatgg

SEQ ID NO: 129675 - DNA, 75 bp, synthetic construct
  source 1..75: mol_type = other DNA
tccctcgaagaaaaaaagccgggctgacattctggaaatggaaaatctggtgaaaatcatccgtgcctcttttca

SEQ ID NO: 129676 - DNA, 75 bp, synthetic construct
  source 1..75: mol_type = other DNA
tgctggcagacgccaaaattgccgatgcgggcaaaattctttctcgtatgtgcttcgaagccaacgctgactggg

SEQ ID NO: 129677 - DNA, 75 bp, synthetic construct
  source 1..75: mol_type = other DNA
cagcattcgtgatgccgcttctccggtggaggccgcacgtcagttcaaacgttccatcgctgaactgtggggcta

SEQ ID NO: 129678 - DNA, 75 bp, synthetic construct
  source 1..75: mol_type = other DNA
tttccgatatgggcttcaaagtgaccgtcactggtggcctggcgctggaagatctgccgctgttcaaaggcattc

SEQ ID NO: 129679 - DNA, 75 bp, synthetic construct
  source 1..75: mol_type = other DNA
tctctcgatcatcgtgctttttttcaaatggaaagatcttatggtgacctttttcgacgagaatcacgcccgtgc

SEQ ID NO: 129680 - DNA, 75 bp, synthetic construct
  source 1..75: mol_type = other DNA
gtcccgggtgttgcgggggcatatatgctggggcttccgttttctctgggagccttcttttccggcggactggct

SEQ ID NO: 129681 - DNA, 75 bp, synthetic construct
  source 1..75: mol_type = other DNA
cagcatccgtgatgcagcctctccggttgaagccgcgcgtcagttcaaacgttccatcgccgaactgtggggcta

SEQ ID NO: 129682 - DNA, 75 bp, synthetic construct
  source 1..75: mol_type = other DNA
gccgccttatccgtttgtgcaactggccaccctgaaacagcgcacggagaaagcagccagaacggcaggccgtgc

SEQ ID NO: 129683 - DNA, 75 bp, synthetic construct
  source 1..75: mol_type = other DNA
aatggcgcaggcgcagcactggcaatggcgaatgctttgcgtgatgcaggcattgaagcgagccagattggctac

SEQ ID NO: 129684 - DNA, 75 bp, synthetic construct
  source 1..75: mol_type = other DNA
catttattagccaagaaaagcaaacacaactgcctttgactatcgattatcaggcagcactggcgctgcgccaga

SEQ ID NO: 129685 - DNA, 75 bp, synthetic construct
  source 1..75: mol_type = other DNA
aaagcgctttatccgcacaaaatcgtgctggcagacgccaaaatcgccgatgccggaaaaatcctttctcgtatg

SEQ ID NO: 129686 - DNA, 75 bp, synthetic construct
  source 1..75: mol_type = other DNA
aggcgtgcgtgcggttcgcgatcttaaagcactctacccgcataaaattgtgctggcagacgccaaaattgccga

SEQ ID NO: 129687 - DNA, 75 bp, synthetic construct
  source 1..75: mol_type = other DNA
ctgaatgaagcggttgaaatcgctgcggtcgacggcgtgatgttctccgtgccggtgacaccgcatacgttccgt

SEQ ID NO: 129688 - DNA, 75 bp, synthetic construct
  source 1..75: mol_type = other DNA
ttgatgcgttctgttcctcgcttactccctaaaacagtgctctcaatgctttatagtatttcaaggactaagaat

SEQ ID NO: 129689 - DNA, 75 bp, synthetic construct
  source 1..75: mol_type = other DNA
gtttgtgcaactggccacgctgaagcaacgtgccgagaaggctgccagaacagcaggacgtctgcccgccggcag

SEQ ID NO: 129690 - DNA, 75 bp, synthetic construct
  source 1..75: mol_type = other DNA
ctgcgacatgctccagcttctcttttctgaatacccgtctcagggcggaacgctggatgcaggctgtgcgccagg

SEQ ID NO: 129691 - DNA, 75 bp, synthetic construct
  source 1..75: mol_type = other DNA
gtttgtacagctggccacgctgaagcaacgtgccgagaaggctgccagaacagcaggacgtctgcccgccggcag

SEQ ID NO: 129692 - DNA, 75 bp, synthetic construct
  source 1..75: mol_type = other DNA
tctgggagatcacagaccgtaccgtccgcacctggcttagcgaggcggtggaggccgcagcagccgacggggtga

SEQ ID NO: 129693 - DNA, 75 bp, synthetic construct
  source 1..75: mol_type = other DNA
gcgtttctttttctgccgcgcagctgccggtggccatcgactaccctgccgcactggccctgcgccagatggctc

SEQ ID NO: 129694 - DNA, 75 bp, synthetic construct
  source 1..75: mol_type = other DNA
ccggctcttgggaaattactgcagaaggggagcaacggagctttgccggttaatcaaggtggtaccggcgcaacg

SEQ ID NO: 129695 - DNA, 75 bp, synthetic construct
  source 1..75: mol_type = other DNA
gatcacttggcggcagcggcgggacaaacaacaactctgctacttctgtgactacgcagagccccacctttggaa

SEQ ID NO: 129696 - DNA, 75 bp, synthetic construct
  source 1..75: mol_type = other DNA
gcacgtccacggcttggaaatttggacatcggctagcggcagcatcccaactagtacaactgtaccatcgcagaa

SEQ ID NO: 129697 - DNA, 75 bp, synthetic construct
  source 1..75: mol_type = other DNA
gagaagaaagggaattgaatatataaaaagcgaatggaagctttttatgctcaagaaaaaacttggatttcagtc

SEQ ID NO: 129698 - DNA, 75 bp, synthetic construct
  source 1..75: mol_type = other DNA
acgcgatgctcgccgttctctggtgcgcgatcacgtctgcttttttgctggtcgtatccgcatggaggtggcaca

SEQ ID NO: 129699 - DNA, 75 bp, synthetic construct
  source 1..75: mol_type = other DNA
tcctgcaatatggtcgtgggcgtgtgtctcctacgcttgcgagtcagatactacgggtagaatttaatatacctt

SEQ ID NO: 129700 - DNA, 75 bp, synthetic construct
  source 1..75: mol_type = other DNA
actggcgtttggtgcaggtgcattacgcgcggcagtagcgtcttatgtgcagtctccgcgctattaccgtgcgtt

SEQ ID NO: 129701 - DNA, 75 bp, synthetic construct
  source 1..75: mol_type = other DNA
agcgaacctcactttgtgatggaagactggcataacttcggcgccgactatgacaccacattaatggcctggtat

SEQ ID NO: 129702 - DNA, 75 bp, synthetic construct
  source 1..75: mol_type = other DNA
caaggacacattacgcatcgctgccgcgcgtctcttcaatctacaaagtaaaaaacgtgcctggatagtcggtaa

SEQ ID NO: 129703 - DNA, 75 bp, synthetic construct
  source 1..75: mol_type = other DNA
caaggagtatgacgagaatattggtgcgtgggagacgttcgccacaacctcagccaaccagaacattaccgttac

SEQ ID NO: 129704 - DNA, 75 bp, synthetic construct
  source 1..75: mol_type = other DNA
ggtttgggagaaggtgctccagctattggcgttccgttcttctggccgtccgccgcaatgccaaattctgtcatc

SEQ ID NO: 129705 - DNA, 75 bp, synthetic construct
  source 1..75: mol_type = other DNA
agtgggaagcgaaaatcctggaactggctggcttcctggattcttatattccggaaccagagcgtgcgattgaca

SEQ ID NO: 129706 - DNA, 75 bp, synthetic construct
  source 1..75: mol_type = other DNA
ctacttccgtactactgacgtgactggtaccatcgaactgccggaaggcgttgagatggtaatgccgggcgacaa

SEQ ID NO: 129707 - DNA, 75 bp, synthetic construct
  source 1..75: mol_type = other DNA
ccgcacatcaagttcgaatctgaagtgtacattctgtccaaagatgaaggcggtcgtcatactccgttcttcaaa

SEQ ID NO: 129708 - DNA, 75 bp, synthetic construct
  source 1..75: mol_type = other DNA
caaaaccgcacgttaacgtaggtactatcggccacgttgaccaaggtaaaaccacgctgaccgctgcaatcacga

SEQ ID NO: 129709 - DNA, 75 bp, synthetic construct
  source 1..75: mol_type = other DNA
caaaaccgcacgttaacgtcggtactatcggccacgttgaccaaggtaaaacaaccctgaccgctgcaatcacca

SEQ ID NO: 129710 - DNA, 75 bp, synthetic construct
  source 1..75: mol_type = other DNA
caaaaccgcacgttaacgtcggtactatcggccacgttgaccaaggtaaaacaacactgaccgctgcaatcacaa

SEQ ID NO: 129711 - DNA, 75 bp, synthetic construct
  source 1..75: mol_type = other DNA
caaaaccgcacgttaacgtaggtactatcggccacgttgaccaaggtaaaacaaccctgaccgctgcaatcacaa

SEQ ID NO: 129712 - DNA, 75 bp, synthetic construct
  source 1..75: mol_type = other DNA
tatcggccacgttgaccatggtaaaaccacactgaccgctgcaatcactaccgtactggctaaaacctacggcgg

SEQ ID NO: 129713 - DNA, 75 bp, synthetic construct
  source 1..75: mol_type = other DNA
caaaaccgcacgttaacgtgggtactatcggccacgttgaccaaggtaaaacaaccctgaccgctgcaatcacga

SEQ ID NO: 129714 - DNA, 75 bp, synthetic construct
  source 1..75: mol_type = other DNA
caaaaccgcacgttaacgtcggtactatcggccacgttgaccaaggtaaaacaacgctgaccgctgcaatcacga

SEQ ID NO: 129715 - DNA, 75 bp, synthetic construct
  source 1..75: mol_type = other DNA
ctgcactgtcggcattccgaatcaataaactgctggcgcgttttcaggctgccaggctcccggttcacaacattt

SEQ ID NO: 129716 - DNA, 75 bp, synthetic construct
  source 1..75: mol_type = other DNA
ctgcgtcttggcctggcactggcggaagatgaaattgactatctgcaggatgctttcacgaagcttggtcgtaac

SEQ ID NO: 129717 - DNA, 75 bp, synthetic construct
  source 1..75: mol_type = other DNA
agcgaccgaagaactgcatctttctctgcacgatcgtcattttgataatcagccgatcgatctgccgctggacgt

SEQ ID NO: 129718 - DNA, 75 bp, synthetic construct
  source 1..75: mol_type = other DNA
gcggtctttctaacgcgatgccggaactggtgagcgacggcgggcgcggcggtaaatttgaactgcgcgatattc

SEQ ID NO: 129719 - DNA, 75 bp, synthetic construct
  source 1..75: mol_type = other DNA
cacgacgttggcgcaggcggtctttctaacgccatgccggaactggtgagcgacggcgggcgcggcggtaaattt

SEQ ID NO: 129720 - DNA, 75 bp, synthetic construct
  source 1..75: mol_type = other DNA
ctggtgtaacgaatcccaggaacgctacgtgctggctgttgccgccgatcagttgccgttgtttgacgaactgtg

SEQ ID NO: 129721 - DNA, 75 bp, synthetic construct
  source 1..75: mol_type = other DNA
gcagatcattttcaaataattttaaacttcaaatggttaaactggctttgcaaccaggagcctctgttgcccgta

SEQ ID NO: 129722 - DNA, 75 bp, synthetic construct
  source 1..75: mol_type = other DNA
ccggttaccccacatactttccgccattcctacgcgatgcatatgctgtatgctggtattccgctgaaggtgctg

SEQ ID NO: 129723 - DNA, 75 bp, synthetic construct
  source 1..75: mol_type = other DNA
tgtttgcgctggatgtggctgcacggcaccgggtgcagttttcgatgcctgagtccgatgcggtgtctatgctca

SEQ ID NO: 129724 - DNA, 75 bp, synthetic construct
  source 1..75: mol_type = other DNA
aggcggtttccggtgaccgttttgtgattaccgccaacgggcagactgtatttagcgaaagccgcaccacgttgc

SEQ ID NO: 129725 - DNA, 75 bp, synthetic construct
  source 1..75: mol_type = other DNA
caggaacaacaggacgcagaaacgcggctggtggcgctgaatgagaagcgcaaacgccagcgccgggcagcaaag

SEQ ID NO: 129726 - DNA, 75 bp, synthetic construct
  source 1..75: mol_type = other DNA
ggaacacgatatcaatgataacctccagttcaaatggctcaggctctggcagaacgaagggcgtatatcgcggcg

SEQ ID NO: 129727 - DNA, 75 bp, synthetic construct
  source 1..75: mol_type = other DNA
gagttgtggcctgaattattcagccgggaagcaccgaagccgcttaaggtggggatattcgacgacctgatgcag

SEQ ID NO: 129728 - DNA, 75 bp, synthetic construct
  source 1..75: mol_type = other DNA
atgacaacgctgaccattaaccgaaaaccgaaaggcatttacggcacgcagtcagaaacgacgcaggcggcacag

SEQ ID NO: 129729 - DNA, 75 bp, synthetic construct
  source 1..75: mol_type = other DNA
aacgctggcggaaatggcctttgctggtcattgtggcattgacgcagatatcgccactctgggtgacgatcgtct

SEQ ID NO: 129730 - DNA, 75 bp, synthetic construct
  source 1..75: mol_type = other DNA
cagttaccgaaagatgaagtgggctttattgccatgcatctggtcagtgcccaaatgagcgggaatatggaggat

SEQ ID NO: 129731 - DNA, 75 bp, synthetic construct
  source 1..75: mol_type = other DNA
cgataggaatttaaatcccaaaaagattaaaaaaacacccaaaaacggatgtttattcaacactgcctgcgtgcc

SEQ ID NO: 129732 - DNA, 75 bp, synthetic construct
  source 1..75: mol_type = other DNA
tatcaacgtaaaatctcacccgcagagattatgtttttagccataaatatagagcgcgtgcgcaaagaacactga

SEQ ID NO: 129733 - DNA, 75 bp, synthetic construct
  source 1..75: mol_type = other DNA
cgcggtgaaacgcgtgctgcatctgccgaccgtggcggagaaaactttcctggtgaccatcggtgaccgcagcgt

SEQ ID NO: 129734 - DNA, 75 bp, synthetic construct
  source 1..75: mol_type = other DNA
gtaacacctccgatcgctttgaagcgcgtttcagcctggttgaagtgacccaaagcccgtcactgctattgcagg

SEQ ID NO: 129735 - DNA, 75 bp, synthetic construct
  source 1..75: mol_type = other DNA
aactcgcatgttgaaatggcggcagctttccaccgtgcaggcttcgatgctatcgacgtgcatatgagcgacctg

SEQ ID NO: 129736 - DNA, 75 bp, synthetic construct
  source 1..75: mol_type = other DNA
tgtcagcaactcctggcatccggaaaactggggcgaggatgggccgtggatgcgtattttccgcaatgcgcgtaa

SEQ ID NO: 129737 - DNA, 75 bp, synthetic construct
  source 1..75: mol_type = other DNA
acgcacatcttccacgcgggcaaatgcagaaatcaccagcgacagcggcgacgtcatttcgcgctcttcgttacc

SEQ ID NO: 129738 - DNA, 75 bp, synthetic construct
  source 1..75: mol_type = other DNA
tagaaagctgtggcgtgatggtgtgacgcacatcttccacgcgggcaaatgcagaaatcaccagcgacagcggcg

SEQ ID NO: 129739 - DNA, 75 bp, synthetic construct
  source 1..75: mol_type = other DNA
ttgcgaccggaaaccgtggaacatcaggctacaatgccgcgatgaatgtgcgtattgccagcagaacgcatatca

SEQ ID NO: 129740 - DNA, 75 bp, synthetic construct
  source 1..75: mol_type = other DNA
gggctaggcccggtgacaacggcacaccctgatctggtgaacgctggcggacagccatgcggtgttttgcctgga

SEQ ID NO: 129741 - DNA, 75 bp, synthetic construct
  source 1..75: mol_type = other DNA
tattgatgcctgcgtgctcggcggtttgcaggtagacgaagaagccaacctcgcgaactgggtagtgcctgggaa

SEQ ID NO: 129742 - DNA, 75 bp, synthetic construct
  source 1..75: mol_type = other DNA
ggtttgggagaaggctctgcattacctgttggtgtcccctgttcccgtggccttcagctacgccgccaacaggct

SEQ ID NO: 129743 - DNA, 75 bp, synthetic construct
  source 1..75: mol_type = other DNA
ttattgtgttgttgcatcgtacgataatgcacggtcaggtgtgtcaacaatggttagttttgcagcattgcctgt

SEQ ID NO: 129744 - DNA, 75 bp, synthetic construct
  source 1..75: mol_type = other DNA
ggggccgtaaatgtgttgcgaaaatcgaggcaggggttttctgtttcacaggttggaagtatgccagtcgcatac

SEQ ID NO: 129745 - DNA, 75 bp, synthetic construct
  source 1..75: mol_type = other DNA
gtccggcacttaccggaacgccaacagcacctactgcggcacagtcggtcaacaatacacagattgccaccacgg

SEQ ID NO: 129746 - DNA, 75 bp, synthetic construct
  source 1..75: mol_type = other DNA
aaagtccgacgtttaccgggatacccaaagcgccaacgccagcagcagggaataacaccacgcagattgcgacca

SEQ ID NO: 129747 - DNA, 75 bp, synthetic construct
  source 1..75: mol_type = other DNA
atttcatggggggagctatgggtagctctggctcaataaaagcgggtgcacttgttaattcttacaccaattacg

SEQ ID NO: 129748 - DNA, 75 bp, synthetic construct
  source 1..75: mol_type = other DNA
cgggaggatacattttgcagtggggatctgcgaatgcaggtaactcagcatcaacgggaatatctaatacgttcc

SEQ ID NO: 129749 - DNA, 75 bp, synthetic construct
  source 1..75: mol_type = other DNA
gatgggtttactgctgtaacttgtttgacatcaggaaccagcagtgattcaaaagtttcaggcgctgtatttatt

SEQ ID NO: 129750 - DNA, 75 bp, synthetic construct
  source 1..75: mol_type = other DNA
ggcaaaacaccttgccgcacaggacccacattcacagtatgcacccaaagaaagtccgacgtttaccggaacccc

SEQ ID NO: 129751 - DNA, 75 bp, synthetic construct
  source 1..75: mol_type = other DNA
caatgcctggctgtagatgccaacgcccgcgtcgataacccgatggctgacctgcaactggtgagcgacgatctc

SEQ ID NO: 129752 - DNA, 75 bp, synthetic construct
  source 1..75: mol_type = other DNA
ccgtgaaaaactgcgtcatatcttcctgcttggcggctgtgacggcgcacgcggcgagcgtcactacttcaccga

SEQ ID NO: 129753 - DNA, 75 bp, synthetic construct
  source 1..75: mol_type = other DNA
tgccctgcgcgaggcgctgaaagcacaatgcctggctgtagatgccaacgcgcgcgtcgataacccgatggctga

SEQ ID NO: 129754 - DNA, 75 bp, synthetic construct
  source 1..75: mol_type = other DNA
cggcttgggggctacaggtgcccttgctgctggcaacacattgatagatataataagaagcattaacggccgaca

SEQ ID NO: 129755 - DNA, 75 bp, synthetic construct
  source 1..75: mol_type = other DNA
ggcggttcattccctgtcattaataatgatatccgttagtgtagtcttatgcatttcaatgtactgcaatatttg

SEQ ID NO: 129756 - DNA, 75 bp, synthetic construct
  source 1..75: mol_type = other DNA
gtcgcctgaaaatggagcatctgagttatcgcgttgaaagcctgctggaacaggcagtgaagtggcacactgaat

SEQ ID NO: 129757 - DNA, 75 bp, synthetic construct
  source 1..75: mol_type = other DNA
aaataacgtatttacttgcaataaactgtgcacatgctaacagtgaaaatcaatatcatttttataaaacattga

SEQ ID NO: 129758 - DNA, 75 bp, synthetic construct
  source 1..75: mol_type = other DNA
tgccacgacaatgctgaatgcgctggcaggtaaacaaccgctggacaatacgctgactaatttgagtggaaagga

SEQ ID NO: 129759 - DNA, 75 bp, synthetic construct
  source 1..75: mol_type = other DNA
aagccatcacgttgaaaatcgacccatctgtggttctggcaacccgtaaatacgtggatgataaagtcctggaat

SEQ ID NO: 129760 - DNA, 75 bp, synthetic construct
  source 1..75: mol_type = other DNA
tgtcgctggtgctctcctggtttgaacagaaagcgattgtcattctgctgacgctgctttctctgggcgtgaaaa

SEQ ID NO: 129761 - DNA, 75 bp, synthetic construct
  source 1..75: mol_type = other DNA
gcggtgctgaacgaaaaattcggtctgcgttctatcaccactgttgaagaagatatgaagcaactgttgagcgcg

SEQ ID NO: 129762 - DNA, 75 bp, synthetic construct
  source 1..75: mol_type = other DNA
gtttggcgatatcgaaggtctgccgcgtctggtggatgccggtcaatgtaacgatgcttactcagcgataattct

SEQ ID NO: 129763 - DNA, 75 bp, synthetic construct
  source 1..75: mol_type = other DNA
ggtggcgggtggtttaagttgccgagtggatatgttattcaggctttcgaggcatcttttgattctaacgggcta

SEQ ID NO: 129764 - DNA, 75 bp, synthetic construct
  source 1..75: mol_type = other DNA
gggcaaacctgtattgattgccataaagggatcgcacacaagctacccgatatgcgcgaagtcgagccaggtttt

SEQ ID NO: 129765 - DNA, 75 bp, synthetic construct
  source 1..75: mol_type = other DNA
taactcgcaggagtgccgtaactgtcacaacttcgagatatggatacaaccgcccagaaatcggttgccgcgaag

SEQ ID NO: 129766 - DNA, 75 bp, synthetic construct
  source 1..75: mol_type = other DNA
gactaaaatcccgattctgattatttacggcgataacataccggataagcctgtagccatgcccgcgcaggacag

SEQ ID NO: 129767 - DNA, 75 bp, synthetic construct
  source 1..75: mol_type = other DNA
ttccaatggagcagtttatggctctgaccaaaattccgattctgattatttacggcgataacataccggataaac

SEQ ID NO: 129768 - DNA, 75 bp, synthetic construct
  source 1..75: mol_type = other DNA
ccgcctttgtacaggctgctattcttgccctgattggtggtgcaccggcaacgctggatacgctgaaagaaattg

SEQ ID NO: 129769 - DNA, 75 bp, synthetic construct
  source 1..75: mol_type = other DNA
ttggaaaatacaagtatatttgctttatgttatggtctcttaaattctctcgaagctgccatagcgtatctttaa

SEQ ID NO: 129770 - DNA, 75 bp, synthetic construct
  source 1..75: mol_type = other DNA
aattgccgctttgcatgatcaccataagtctcttgcagtaactttgcagtttattggccgttttactcgtgtcaa

SEQ ID NO: 129771 - DNA, 75 bp, synthetic construct
  source 1..75: mol_type = other DNA
tttcagtactaccattaacaatgcgctggcactcaaagcgccgctgtcgagtccggcactcaccggaacgccaac

SEQ ID NO: 129772 - DNA, 75 bp, synthetic construct
  source 1..75: mol_type = other DNA
atgggaaattctgaccgtaagcctggtctgattaagcgcctgtggaaatggtggcgtactcccagccgtctggcg

SEQ ID NO: 129773 - DNA, 75 bp, synthetic construct
  source 1..75: mol_type = other DNA
ttgtcggcggcatcgtcttctggggcggctttaacaccgggatggaaaaagccaataccgaagagttctgcatta

SEQ ID NO: 129774 - DNA, 75 bp, synthetic construct
  source 1..75: mol_type = other DNA
atgggaaattctgaccgtaagcctggcctgattaagcgcctgtggaaatggtggcgtacccccagccgtctggcg

SEQ ID NO: 129775 - DNA, 75 bp, synthetic construct
  source 1..75: mol_type = other DNA
aagctatcacgctgaaaatcgacccgtcagtggtactggcgacccgtaaatacgtggatgataaagtcctggaat

SEQ ID NO: 129776 - DNA, 75 bp, synthetic construct
  source 1..75: mol_type = other DNA
atccacgcctctaccagcaagggagtgatgcgttcctcacttgataatgagatcggaagagcgtcgtgtagggaa

SEQ ID NO: 129777 - DNA, 75 bp, synthetic construct
  source 1..75: mol_type = other DNA
tctgtttcaggtactggatatcaaaaattaccatctggttttattcttcagtggggctcaatcggcgcaccaggc

SEQ ID NO: 129778 - DNA, 75 bp, synthetic construct
  source 1..75: mol_type = other DNA
ccgcaactggctgaaggcagcgggcgcacccagaccgtgcgcatggtgctgattaccagcagcacggacaatatc

SEQ ID NO: 129779 - DNA, 75 bp, synthetic construct
  source 1..75: mol_type = other DNA
gctattacgctgaaaatcgacccgtcggtggtactggcgacccgtaaatacgtggatgatgaagtcctggaatta

SEQ ID NO: 129780 - DNA, 75 bp, synthetic construct
  source 1..75: mol_type = other DNA
ctgtcaggtaagcagccactggatgagacgctgactcatttgagtggaaaggatgttgctggtcttctcgcatac

SEQ ID NO: 129781 - DNA, 75 bp, synthetic construct
  source 1..75: mol_type = other DNA
gcagaccgggtttagtctctatggctggagtggaaacggtacggcaaacaatattgacagctacacctatcttgc

SEQ ID NO: 129782 - DNA, 75 bp, synthetic construct
  source 1..75: mol_type = other DNA
ggatgttgccggccttctcgcataccttggtttgggagaaacgataaatagagcctccagagctatgcagaaatc

SEQ ID NO: 129783 - DNA, 75 bp, synthetic construct
  source 1..75: mol_type = other DNA
agacgctgactcatttgagtgggaaggatgttgccggtcttcttgcataccttggtttgggagaaggtgctccag

SEQ ID NO: 129784 - DNA, 75 bp, synthetic construct
  source 1..75: mol_type = other DNA
tgctggcgtatttgctgcagacgttgataccggaactttaaccattaaggggaatattgcagagtctccgtgtaa

SEQ ID NO: 129785 - DNA, 75 bp, synthetic construct
  source 1..75: mol_type = other DNA
ctgtcttttcttcttttttcatgagtgctgaggtatttgctgctgatgttgataccgggactttaaccattaaag

SEQ ID NO: 129786 - DNA, 75 bp, synthetic construct
  source 1..75: mol_type = other DNA
ttcgtggctgggatgacggacgtggagtggataacggaaggggattattgacgcttcaggacggtgcgattgtca

SEQ ID NO: 129787 - DNA, 75 bp, synthetic construct
  source 1..75: mol_type = other DNA
ctcgcatcatatcggccgtatcggttactgggcggagcagtgtgcagcggcggggtttgtctctatccactttgt

SEQ ID NO: 129788 - DNA, 75 bp, synthetic construct
  source 1..75: mol_type = other DNA
tcttggaaatgcgctgggagcagctgctggtggtgcggtaatttccgctgggctgggatacagttttgtgccggt

SEQ ID NO: 129789 - DNA, 75 bp, synthetic construct
  source 1..75: mol_type = other DNA
gcgcgccagctcaggcggctaaacagaaagcggctccggcagcaggcccttgcatcagcggctggcgtgaaagaa

SEQ ID NO: 129790 - DNA, 75 bp, synthetic construct
  source 1..75: mol_type = other DNA
cggggtttgtctctatccactttgttagcgtggtcggtattccaatggtcgcgccgttccacggtcgcgacagcc

SEQ ID NO: 129791 - DNA, 75 bp, synthetic construct
  source 1..75: mol_type = other DNA
gggattgaaaaagcacgtcaccacggcattgctgccgtggcgctgcgtaactcacatcatatcgggcgcattggt

SEQ ID NO: 129792 - DNA, 75 bp, synthetic construct
  source 1..75: mol_type = other DNA
cgttgcctggcataaaggcgtccccgtgccgccaggctgcctgattgatgttaacggtgtgccgacgacgaatcc

SEQ ID NO: 129793 - DNA, 75 bp, synthetic construct
  source 1..75: mol_type = other DNA
gtcgcccgcacttcgatgctggtcgtttcgccaaagagtttggtgatgatggccatcgcgaaggctggtgcctgt

SEQ ID NO: 129794 - DNA, 75 bp, synthetic construct
  source 1..75: mol_type = other DNA
ggccaccgcgaaggctggtgcctgtaccacctcggctgtaaagggccagaaacttacggcaactgctcaacgctg

SEQ ID NO: 129795 - DNA, 75 bp, synthetic construct
  source 1..75: mol_type = other DNA
ctgcaagaagttctgccaggcaaaactgtaatcaacattcctggctgcccgccgaacccgcacaacttcctcgcg

SEQ ID NO: 129796 - DNA, 75 bp, synthetic construct
  source 1..75: mol_type = other DNA
gtgcgccagctcaggcggctaaacagcaagcggctccggcagcaggcccatgcatcagcggctggcgtgaaagaa

SEQ ID NO: 129797 - DNA, 75 bp, synthetic construct
  source 1..75: mol_type = other DNA
gtgcgccagctcaggcggctaaacagaaagcggctccggcagcaggcccctgcatcagcggctggcgtgaaagaa

SEQ ID NO: 129798 - DNA, 75 bp, synthetic construct
  source 1..75: mol_type = other DNA
gagcgccagctcaggcggctaaacagcaagcggctccggcagcaggcccttgcatcagcggctggcgtgaaagaa

SEQ ID NO: 129799 - DNA, 75 bp, synthetic construct
  source 1..75: mol_type = other DNA
tgctggtgttcattttcgccccggtacatggcttactggcgaaccgccgatcggtttctcagtcaaaaggaccgc

SEQ ID NO: 129800 - DNA, 75 bp, synthetic construct
  source 1..75: mol_type = other DNA
ggtttggttaagcaatggtataaaaatggaaatcttgcaaaatcacaaaactataaacatgacatactcgatggt

SEQ ID NO: 129801 - DNA, 75 bp, synthetic construct
  source 1..75: mol_type = other DNA
cttcctgatgctggtgtctggttcaaaaaagcagctgcacaaggtaattttgccgcacatttctatctgggaagg

SEQ ID NO: 129802 - DNA, 75 bp, synthetic construct
  source 1..75: mol_type = other DNA
aggcgtgcgtgcggttcgtgacctgaaagcgctgtacccgcacaaaatcgtactggctgacgccaaaattgccga

SEQ ID NO: 129803 - DNA, 75 bp, synthetic construct
  source 1..75: mol_type = other DNA
cagtatccgtgatgccgcttctccggttgaagctgcgcgtcagttcaaacgttccattgccgaactgtggggcta

SEQ ID NO: 129804 - DNA, 75 bp, synthetic construct
  source 1..75: mol_type = other DNA
tataaattacataaaaagtgaaattcaattatataatattaaaaaaagattaaaaattgtaagtggtatcaaagg

SEQ ID NO: 129805 - DNA, 75 bp, synthetic construct
  source 1..75: mol_type = other DNA
gccgccgatatcctaacgcccgttcgtcgcaatcagcgatcctcgttgatcagcatggcgaacggattatcgtta

SEQ ID NO: 129806 - DNA, 75 bp, synthetic construct
  source 1..75: mol_type = other DNA
ctttttgaaagaaatattaatataacattaaaaataacaaagtttacagatgatgcaccttatgaatacattgaa

SEQ ID NO: 129807 - DNA, 75 bp, synthetic construct
  source 1..75: mol_type = other DNA
ggcagggcatgattcacatggtattggcatgatcccaagctatgtgcgctcctggagtcaggggcatctgcaaat

SEQ ID NO: 129808 - DNA, 75 bp, synthetic construct
  source 1..75: mol_type = other DNA
gtaaactaaccaaagaaacccagtacgtcaatggtatcaggcagggcgtggaaaaagagtttaacgatcgcacgg

SEQ ID NO: 129809 - DNA, 75 bp, synthetic construct
  source 1..75: mol_type = other DNA
cttggcgtggaggttgatttcatcggtcgcgtcggcgatgacagttgtggaaataccttacttgcagaacttgag

SEQ ID NO: 129810 - DNA, 75 bp, synthetic construct
  source 1..75: mol_type = other DNA
gatcacgccgtgttctcaacaccagggctgaaacgcatgactggcctgcagtcacctgaagaaggtttgttccag

SEQ ID NO: 129811 - DNA, 75 bp, synthetic construct
  source 1..75: mol_type = other DNA
acgcttttttgccttgctgattaatttgtggactgacgataaagacaatttgtggaccaatatcgtcgaacgcca

SEQ ID NO: 129812 - DNA, 75 bp, synthetic construct
  source 1..75: mol_type = other DNA
cctggtctggcaatgccccatgcgccctattcttcgattattggtatcccactggtggaacccgttatacgtcgg

SEQ ID NO: 129813 - DNA, 75 bp, synthetic construct
  source 1..75: mol_type = other DNA
ttgatcgcatgaccagccgcgaactgaaggccgccctgcgtgaagcgcgcgaaaccaacgcagctcagcaacagg

SEQ ID NO: 129814 - DNA, 75 bp, synthetic construct
  source 1..75: mol_type = other DNA
acaaccgagcgctattgctggtaaaaggcggctgtgcggtaaattgccgctattgcttccgccgccacttcccgt

SEQ ID NO: 129815 - DNA, 75 bp, synthetic construct
  source 1..75: mol_type = other DNA
agttgctgacactggtgtcgggatatctggtgccgaaactggcgcgcgagattggcggtgaacccagcaaaacgc

SEQ ID NO: 129816 - DNA, 75 bp, synthetic construct
  source 1..75: mol_type = other DNA
gttgctgcgcatccggaactggacgagatgattttctccggcggcgatccgctgatggcgaaagatcacgagctg

SEQ ID NO: 129817 - DNA, 75 bp, synthetic construct
  source 1..75: mol_type = other DNA
cgtcctccgggtcggaggtcatcattggtacgttgcagatcgatattggcggccagaagcattatctgtgtgagg

SEQ ID NO: 129818 - DNA, 75 bp, synthetic construct
  source 1..75: mol_type = other DNA
ggcaaccatgttgactgtgaaaacccgttgaactggatcaagctgacccagcaagcgattaaaggtggcaaagtc

SEQ ID NO: 129819 - DNA, 75 bp, synthetic construct
  source 1..75: mol_type = other DNA
cttaaaatttcaactcaacagggggttgagctgattaaggtgcacgaagataatattgaaccgttcagatatagg

SEQ ID NO: 129820 - DNA, 75 bp, synthetic construct
  source 1..75: mol_type = other DNA
attattggtatcccactggtggaacccgttatacgtcggacattggggattattcgccgcaaagatgccgtgctt

SEQ ID NO: 129821 - DNA, 75 bp, synthetic construct
  source 1..75: mol_type = other DNA
gcactgaactgaatgtcgaggtaccgctgtcggatgatctcaatgtcagtctaaacgccatgacacagcatcgca

SEQ ID NO: 129822 - DNA, 75 bp, synthetic construct
  source 1..75: mol_type = other DNA
tgtccagcgcctttgagaccctgtgcgcatactgtgctgaaaatatgattgatacccccagagactttatggccg

SEQ ID NO: 129823 - DNA, 75 bp, synthetic construct
  source 1..75: mol_type = other DNA
gctaagggatataaaaagagcgagttgggggagattcctgaagattgggtagtcacaagcattggacaatttact

SEQ ID NO: 129824 - DNA, 75 bp, synthetic construct
  source 1..75: mol_type = other DNA
cagttaataatattggagatttattctccattaccgcaggaggagatttaagacagtctgaattctctaatattc

SEQ ID NO: 129825 - DNA, 75 bp, synthetic construct
  source 1..75: mol_type = other DNA
accctgcaacagcgtctggacaaaacccgtcagcttaaacaggggatgatgcaggagttgttaaccgggaaaacc

SEQ ID NO: 129826 - DNA, 75 bp, synthetic construct
  source 1..75: mol_type = other DNA
ggcttccataaaggcatccatcagcttgccaacgtcgaaaatcagacgccacgctcacaaaaaccggacgtgaat

SEQ ID NO: 129827 - DNA, 75 bp, synthetic construct
  source 1..75: mol_type = other DNA
cgtcaccaaagcgccgccataccggtattgcagcggcacgacgagcagcaaagagacgcaggagagcaaagcgat

SEQ ID NO: 129828 - DNA, 75 bp, synthetic construct
  source 1..75: mol_type = other DNA
atgcgtgtggcatgtatcggcttgttaccgtacccgactcgtttttgggcttctgcgctaattgcgaagccgcat

SEQ ID NO: 129829 - DNA, 75 bp, synthetic construct
  source 1..75: mol_type = other DNA
gcaaaagaacaacagcattatctcacgaagaaataattgaatttgcaaaaaaaagaagtcctctcaaccatatga

SEQ ID NO: 129830 - DNA, 75 bp, synthetic construct
  source 1..75: mol_type = other DNA
gcgtgaacgataacgcacaaacgctggcaaacctgagtaatgcgttgttcgatgccggcgtgatgccgtattacc

SEQ ID NO: 129831 - DNA, 75 bp, synthetic construct
  source 1..75: mol_type = other DNA
tctggtgccaaaactggcgcgcgaaattggtggcgaacccagcaagactccgctggatctccagctacgccagca

SEQ ID NO: 129832 - DNA, 75 bp, synthetic construct
  source 1..75: mol_type = other DNA
atataagcgctggatgacatccggtcatccccaaaaaggggacatagctttcacaatggaagcccctctggggaa

SEQ ID NO: 129833 - DNA, 75 bp, synthetic construct
  source 1..75: mol_type = other DNA
caaaaatgcgcagggctcagcattcggtgcatttatgtcagtattccgaactgatatatatggatttacatttca

SEQ ID NO: 129834 - DNA, 75 bp, synthetic construct
  source 1..75: mol_type = other DNA
ttgtaataatgaattgatcgcaagaatggatactgacgatatttgtgctaaggatagattcaaattgcaactgca

SEQ ID NO: 129835 - DNA, 75 bp, synthetic construct
  source 1..75: mol_type = other DNA
atgggcaaaaccgaccgcagcgccaacccttcgccgggcaacaaaaaaggcggactcgcgaacgtggtaaagaaa

SEQ ID NO: 129836 - DNA, 75 bp, synthetic construct
  source 1..75: mol_type = other DNA
cgaagaaactattgaagaggtgggctggaagttgttccactttattctcgacgtcgccagcgggaagaagaaaac

SEQ ID NO: 129837 - DNA, 75 bp, synthetic construct
  source 1..75: mol_type = other DNA
gtaaaaccgcaattgctgaagtgctgtcgcccggtcaacacccgactaaacgcggattaatttacgccgcgacgc

SEQ ID NO: 129838 - DNA, 75 bp, synthetic construct
  source 1..75: mol_type = other DNA
atgggcaaaaccgaccgcagcgccaacccttcgccgggcaacaaaaagggcggactcgcaaacgtggtaaagaaa

SEQ ID NO: 129839 - DNA, 75 bp, synthetic construct
  source 1..75: mol_type = other DNA
atgggcaaaaccgaccgcagcgccaacccttcgccgggcaacaaaaacggcggcctcgcgaacgtggtaaagaaa

SEQ ID NO: 129840 - DNA, 75 bp, synthetic construct
  source 1..75: mol_type = other DNA
atgggcaaaaccgaccgcagcgccaacccttcgccgggcaacaaaaatggcggactcgctaacgtggtaaagaaa

SEQ ID NO: 129841 - DNA, 75 bp, synthetic construct
  source 1..75: mol_type = other DNA
tcttgagcagcgaaggttgatgctacaatggtgggcagattttcttgatgctaaccgggatgggatggtcaggcc

SEQ ID NO: 129842 - DNA, 75 bp, synthetic construct
  source 1..75: mol_type = other DNA
ctacgtcatgccgtccagcaaaagcttatgcgtcataatccggcctatgatatggaaggcgctgtccagaaacca

SEQ ID NO: 129843 - DNA, 75 bp, synthetic construct
  source 1..75: mol_type = other DNA
ttggttatcttgaagttgccatgcgcattcaacaatacattacggcaatcctgcgtcatgccgtccagcaaaagc

SEQ ID NO: 129844 - DNA, 75 bp, synthetic construct
  source 1..75: mol_type = other DNA
atccgtcagcttacctatgaagaaggtaatgaggcggggttaatttttacgggctgttatgactcgttcaagccc

SEQ ID NO: 129845 - DNA, 75 bp, synthetic construct
  source 1..75: mol_type = other DNA
tggatgttatgactcattcaaacccatgagtgaaaacaccatcaacaaggcgctgcgtaagatgggctatgacac

SEQ ID NO: 129846 - DNA, 75 bp, synthetic construct
  source 1..75: mol_type = other DNA
gatcaagcaatacatcactgccatcctgcgtcacgccgtccagcaaaaacttatgcgccataatcctgcttacga

SEQ ID NO: 129847 - DNA, 75 bp, synthetic construct
  source 1..75: mol_type = other DNA
gaaacggtgtagatcttatatactgttctgaacctattcccactaaagatttccctttagagtcttctgttatac

SEQ ID NO: 129848 - DNA, 75 bp, synthetic construct
  source 1..75: mol_type = other DNA
ttccgaacctatacccactaaagatttccctttagagtcctctgttatactgaatataaaaagatctagtgctgc

SEQ ID NO: 129849 - DNA, 75 bp, synthetic construct
  source 1..75: mol_type = other DNA
agatctctatagatttgataatcttgataaatttctacaaattattactcgcatgaaagtgagggaactatatgc

SEQ ID NO: 129850 - DNA, 75 bp, synthetic construct
  source 1..75: mol_type = other DNA
agccgctggcttatggctttatgacacaggatgacctgatgaaacgatttttaagtgtggcgacagattttgcgc

SEQ ID NO: 129851 - DNA, 75 bp, synthetic construct
  source 1..75: mol_type = other DNA
tgccgcgaattattgagaagatggaagcctacggagcaccggcgtcgatcaccagtttcgtggtgccgaccggtt

SEQ ID NO: 129852 - DNA, 75 bp, synthetic construct
  source 1..75: mol_type = other DNA
ttgttggcaaagaatcagaactctttcgttttactgttaaacacagcctgatcttcacctgtattgtgggagtca

SEQ ID NO: 129853 - DNA, 75 bp, synthetic construct
  source 1..75: mol_type = other DNA
gctgaaaaaccaacctctgataacgaaataatatcagtcgataaaaaactatttaaagagcttcttcagcttgtc

SEQ ID NO: 129854 - DNA, 75 bp, synthetic construct
  source 1..75: mol_type = other DNA
gtacgccgtacggcctgatggcggtacccgtcattaaaatggcgacccgcaccgggctggcgaaccactggtttg

SEQ ID NO: 129855 - DNA, 75 bp, synthetic construct
  source 1..75: mol_type = other DNA
atgggcaaaaccgaccgcagcgccaacccttcgccgggcaacaaaaagggcgggctcgcgaacgtggtaaagaaa

SEQ ID NO: 129856 - DNA, 75 bp, synthetic construct
  source 1..75: mol_type = other DNA
tgaattcacaaaatatttcacctcttgatttttatatcataccaaagattgaaaacgaatatagtaaaatgtgta

SEQ ID NO: 129857 - DNA, 75 bp, synthetic construct
  source 1..75: mol_type = other DNA
atgaacacggaaggtaataacggtaacaaacccctcggtctatggaacgtcgtttccatcggcattggggcaatg

SEQ ID NO: 129858 - DNA, 75 bp, synthetic construct
  source 1..75: mol_type = other DNA
cgggaatcgatccgttccacattggcgcaatggcgggacgtcagttaccgttcctgtcggttcttgtaccgttct

SEQ ID NO: 129859 - DNA, 75 bp, synthetic construct
  source 1..75: mol_type = other DNA
gccttgatatggtgggtgaaccctgcccttatccggcagtcgcaacccttgaggcgatgccgcagttaaaaaaag

SEQ ID NO: 129860 - DNA, 75 bp, synthetic construct
  source 1..75: mol_type = other DNA
actctctcgcgctggtcgcttctctgctgctggctggccacgtgcaggcaacggaactgctgaacagttcttatg

SEQ ID NO: 129861 - DNA, 75 bp, synthetic construct
  source 1..75: mol_type = other DNA
cgggtcatcaaaacaggcgctggcaattttgcagggcttaaaagcagacgttgtcacttataaccaggtgaccga

SEQ ID NO: 129862 - DNA, 75 bp, synthetic construct
  source 1..75: mol_type = other DNA
attccggtgataaccccgcgccgtctgcgtcggaggatgccctgcatatccgtttccctgacggggcggtgattg

SEQ ID NO: 129863 - DNA, 75 bp, synthetic construct
  source 1..75: mol_type = other DNA
tgccgcgcccgctgcactttggtacacagggtgaagggatggtcggtgtgcgcccggaagcgatcgcggcgaaga

SEQ ID NO: 129864 - DNA, 75 bp, synthetic construct
  source 1..75: mol_type = other DNA
ccacacaacgccacctcctgtcagcacaacatgtggtatcttattcggctgcttatgacactatatgttgtgtca

SEQ ID NO: 129865 - DNA, 75 bp, synthetic construct
  source 1..75: mol_type = other DNA
tatgtcgctgggtgaaaacgttggctacgggctgaagatgcttggtgtgtcgcgtagcgaagtgaaacagcgggt

SEQ ID NO: 129866 - DNA, 75 bp, synthetic construct
  source 1..75: mol_type = other DNA
tatattcagtcgattcgaggtgtcacgaacggtgcaatagtgatccacacccaacgcctgaaatcagatccaggg

SEQ ID NO: 129867 - DNA, 75 bp, synthetic construct
  source 1..75: mol_type = other DNA
ctcctgagggggcagtcaggctcgttaccggttcgcagcaggccagcattgagatagcactggatcgtgttccgg

SEQ ID NO: 129868 - DNA, 75 bp, synthetic construct
  source 1..75: mol_type = other DNA
gtgcgtaagggcaacccgaggaatatccacgactggaacgacctggtgcgctccgatgtgaagctaatttttccg

SEQ ID NO: 129869 - DNA, 75 bp, synthetic construct
  source 1..75: mol_type = other DNA
ctcctggccggaagtgatgaaaacccacttcaccagcggcggcgagttagacaagctgttagcggcggggcgtaa

SEQ ID NO: 129870 - DNA, 75 bp, synthetic construct
  source 1..75: mol_type = other DNA
ctggttgccgggctggaaaaaccgagcgaagggcaaatttttatagatggcgaagatgtcacgcatcgttccatt

SEQ ID NO: 129871 - DNA, 75 bp, synthetic construct
  source 1..75: mol_type = other DNA
tgtttcgctgggagtagcgcaaccggatgcctataaagataaagcgcgtaaggctgcgatagataacgcgattca

SEQ ID NO: 129872 - DNA, 75 bp, synthetic construct
  source 1..75: mol_type = other DNA
ggctgcaattcagtttgatgatcaggtcgatgtcgtcttccagttagaacctgttgatcaacaaccagcaaaaac

SEQ ID NO: 129873 - DNA, 75 bp, synthetic construct
  source 1..75: mol_type = other DNA
tttaatcgcaaattggggccggtttacagtgtgcgctaccatgtttcaaactatcaaccaagcccaatggtacgg

SEQ ID NO: 129874 - DNA, 75 bp, synthetic construct
  source 1..75: mol_type = other DNA
atccgacaactgacttatgaagaaggccatgatgatggattaatcttcactggctgttatgactcgtttaaaccc

SEQ ID NO: 129875 - DNA, 75 bp, synthetic construct
  source 1..75: mol_type = other DNA
aaaatgcaaaaccccttaagaaggaatacaagctgaccgatggctttggcatgttccttcgcgttacccccaaag

SEQ ID NO: 129876 - DNA, 75 bp, synthetic construct
  source 1..75: mol_type = other DNA
atgtcactgactgatattaaagcaaaaaatgcaaaaccccttgagaaggaatacaagctgactgatggctttggt

SEQ ID NO: 129877 - DNA, 75 bp, synthetic construct
  source 1..75: mol_type = other DNA
tatcagggagctaaactctctcgttaactatatcgatagcaatcaagaaatggcagaagaaatctatgctactgt

SEQ ID NO: 129878 - DNA, 75 bp, synthetic construct
  source 1..75: mol_type = other DNA
cctgtactgtgacgattgacggcgtgtcggtcaatgtggccgggacgttcaaatattccgtgggtgacattgagc

SEQ ID NO: 129879 - DNA, 75 bp, synthetic construct
  source 1..75: mol_type = other DNA
gtgaaaagtgcgcgccttgtgctggctgtcatcctgttgtttctggtagtgatggtggatttcaccggacgactg

SEQ ID NO: 129880 - DNA, 75 bp, synthetic construct
  source 1..75: mol_type = other DNA
aggcagcgatagataacgcgattcatcaggcgcaggagctggcaaatggctttaatcgcaaactgggaccggtgt

SEQ ID NO: 129881 - DNA, 75 bp, synthetic construct
  source 1..75: mol_type = other DNA
tgatgacactggaagaacagcttgttgtcatagtagacaaatacatatcaaaacgatatcagccacacgataaaa

SEQ ID NO: 129882 - DNA, 75 bp, synthetic construct
  source 1..75: mol_type = other DNA
ttttgtaggatatcatttaaaatatttctaccctaaaaggatttattccaattccaatcgtaatattgataacat

SEQ ID NO: 129883 - DNA, 75 bp, synthetic construct
  source 1..75: mol_type = other DNA
atgacgttaagttataaaaattttgacaaaggcttttttaattcccgttttcaaatgcaaatgacatttgataac

SEQ ID NO: 129884 - DNA, 75 bp, synthetic construct
  source 1..75: mol_type = other DNA
atatccgggtggcaacctggtatatctgggcccgtctgcggcaggatggtgaaaaaggactggctgacggtctgg

SEQ ID NO: 129885 - DNA, 75 bp, synthetic construct
  source 1..75: mol_type = other DNA
gggcagcgcgcaacataaggactgatggcaatgggaacaggctactttctggtcaggggggacaaaaccacctgt

SEQ ID NO: 129886 - DNA, 75 bp, synthetic construct
  source 1..75: mol_type = other DNA
atgatacgtaagtcagctacaggtgtcattgttgcgttagccgttatctggggtggtggcacatggtacacaggt

SEQ ID NO: 129887 - DNA, 75 bp, synthetic construct
  source 1..75: mol_type = other DNA
atgaacaaagtaacggcgaaaagttttaccattaattctctggcgcgattagaagaaaagaaatttccggttggt

SEQ ID NO: 129888 - DNA, 75 bp, synthetic construct
  source 1..75: mol_type = other DNA
ttgaaaaacacatgttctactaattggaagcatcacccgaaatttaatcagattaacattatcaatcacggggaa

SEQ ID NO: 129889 - DNA, 75 bp, synthetic construct
  source 1..75: mol_type = other DNA
aatatgttccgcgctggccctgcgggcattcgtactacacaggcattctcgcaggattgccgctgggatacgctg

SEQ ID NO: 129890 - DNA, 75 bp, synthetic construct
  source 1..75: mol_type = other DNA
gtggtgatccgttatgaaggcccgaaaggcggccctggcatgcaggaaatgctctacccaaccagcttcctgaaa

SEQ ID NO: 129891 - DNA, 75 bp, synthetic construct
  source 1..75: mol_type = other DNA
cgccatgacgctcgatatcgcgatgggcggctctaccaacaccgtacttcacctgctggcggcggcgcaggaagc

SEQ ID NO: 129892 - DNA, 75 bp, synthetic construct
  source 1..75: mol_type = other DNA
tggagcgcctgccggggctggaaaatctggcatggaacgacggcacaccgttcgccgacgaggtgacgcgcaact

SEQ ID NO: 129893 - DNA, 75 bp, synthetic construct
  source 1..75: mol_type = other DNA
cgaccaggcgaaagtgctggcccgttatctgaacgaacagccgcagggctggctttcggcacaccggctgatgaa

SEQ ID NO: 129894 - DNA, 75 bp, synthetic construct
  source 1..75: mol_type = other DNA
gacgatcgcgccaatggctgtatccgctcgctggaacacgcctacagcaaagacggcggcctggcggtgctctac

SEQ ID NO: 129895 - DNA, 75 bp, synthetic construct
  source 1..75: mol_type = other DNA
ccataattaattcaatgagacaacttgcagcaaacgctttaggaataagtactggtatttcgccctcaagcatag

SEQ ID NO: 129896 - DNA, 75 bp, synthetic construct
  source 1..75: mol_type = other DNA
ttagttcggctgcttctatctggtctcctatggtttccactattatgatcactattgcaataatagttttagtgg

SEQ ID NO: 129897 - DNA, 75 bp, synthetic construct
  source 1..75: mol_type = other DNA
aggtctgggtttacaggtattcacgatgattttaatcgtgggtataggtcaatctttcatcgaccagtattacca

SEQ ID NO: 129898 - DNA, 75 bp, synthetic construct
  source 1..75: mol_type = other DNA
ttttatctccaacgcttcttttttctctaaatgcctatgcaaatcagataaatagtagcggactgcttgataact

SEQ ID NO: 129899 - DNA, 75 bp, synthetic construct
  source 1..75: mol_type = other DNA
caacagaccgttggtggggaaatagcgaatcaaatacgtaaacacacagccgatcgtcagagtaaccacgaacag

SEQ ID NO: 129900 - DNA, 75 bp, synthetic construct
  source 1..75: mol_type = other DNA
tcatcattctcacgagctggccgcatggcttctcacatggcgagcgggctgtctaacggagcttcggagtatcag

SEQ ID NO: 129901 - DNA, 75 bp, synthetic construct
  source 1..75: mol_type = other DNA
aaagaccctggtgtagcgtgggtacagcagctgcggtaggtatttttatcggcgtactgttaagcatgcgcaaat

SEQ ID NO: 129902 - DNA, 75 bp, synthetic construct
  source 1..75: mol_type = other DNA
gtcgccatcggcaaccagcatggggtttatacgtcagagccacaattgaactttgaggtcgtcaaacgcgtacgc

SEQ ID NO: 129903 - DNA, 75 bp, synthetic construct
  source 1..75: mol_type = other DNA
agcggcgataatagttcattgtctaacctgaatattgaaggaaaagtcgaagatatcactctgaacttatcgccg

SEQ ID NO: 129904 - DNA, 75 bp, synthetic construct
  source 1..75: mol_type = other DNA
agcactgacacaggttctgttgacgaacagaaacaacaaggcagtgatgaatatgaacagttcaaaaacaaacag

SEQ ID NO: 129905 - DNA, 75 bp, synthetic construct
  source 1..75: mol_type = other DNA
atgccgcagccgtggtgctggcacataatcacccgtccggtgaagtcacacccagcaaggcagaccggcttatca

SEQ ID NO: 129906 - DNA, 75 bp, synthetic construct
  source 1..75: mol_type = other DNA
atagagcgtgaggcattttctaccgatttcgaggatggggtcacatttggttataacgacgcaattagtgaatgc

SEQ ID NO: 129907 - DNA, 75 bp, synthetic construct
  source 1..75: mol_type = other DNA
gatgcaatgtgctgatgcccttgctcaggcagaagaagcattcagcgctgaagaaaaagcgttctggcttgccaa

SEQ ID NO: 129908 - DNA, 75 bp, synthetic construct
  source 1..75: mol_type = other DNA
gtcatgggccacgatgtcaaacagctaccttgaagctattggaagtgaagaacgtatcgatcaccgttctctcag

SEQ ID NO: 129909 - DNA, 75 bp, synthetic construct
  source 1..75: mol_type = other DNA
gatcgcaaaaagaaagaaatgtgcggatgggactattagaaaaaaaatacaagcagcgatgggagtattggaggg

SEQ ID NO: 129910 - DNA, 75 bp, synthetic construct
  source 1..75: mol_type = other DNA
catgcccgtacacgtattacagatgatcgcattggagaaacatatgatttcagccacagaacagatctacatggt

SEQ ID NO: 129911 - DNA, 75 bp, synthetic construct
  source 1..75: mol_type = other DNA
gtcatgggccaccatgtcaaacagctaccttgaagccgcaggcagtgaagaacgtattgatcaccgttctctcag

SEQ ID NO: 129912 - DNA, 75 bp, synthetic construct
  source 1..75: mol_type = other DNA
actgccagaagaactttgttgataaaggaatgattgctgatatcgcattccatgacttggacagtaagaatccac

SEQ ID NO: 129913 - DNA, 75 bp, synthetic construct
  source 1..75: mol_type = other DNA
tggcgagctggagctgggctctgaagtctataagaaagatgacgtcagcttctatctcgacagtatggtcagcat

SEQ ID NO: 129914 - DNA, 75 bp, synthetic construct
  source 1..75: mol_type = other DNA
cgatagtgggctggcactggtacaacgaacctcagaaacaggatgaggaggaaatacctccaccggccactgttc

SEQ ID NO: 129915 - DNA, 75 bp, synthetic construct
  source 1..75: mol_type = other DNA
acggaggagcggctgaataccgccattctctacccgacagtggagaattttacggcctacatgaagatgcagaac

SEQ ID NO: 129916 - DNA, 75 bp, synthetic construct
  source 1..75: mol_type = other DNA
gatcgcaaaaagaaataaatgtgcggatgggactattagaaaaaaaatacaagcagtgatgggaatattggaggg

SEQ ID NO: 129917 - DNA, 75 bp, synthetic construct
  source 1..75: mol_type = other DNA
ttacaacggcacggtccggaaccagctggcggcagaccaggcgcagcagcgacaggccattgcgaaactggctga

SEQ ID NO: 129918 - DNA, 75 bp, synthetic construct
  source 1..75: mol_type = other DNA
aagtgtccgtccactgtcatatggctttatttctcaggacgacctggcgaaacagttcctgaatgtatctgagga

SEQ ID NO: 129919 - DNA, 75 bp, synthetic construct
  source 1..75: mol_type = other DNA
ggtttgggttgcacattgacgattctattgccaatacccgtgcgataggcgcggtaatgggcggcttactcggcg

SEQ ID NO: 129920 - DNA, 75 bp, synthetic construct
  source 1..75: mol_type = other DNA
acgtattgctgaaaactatgtctttgatgaggtattaggccgtcatgtttcacgtaatgaatatgaacaacgtgc

SEQ ID NO: 129921 - DNA, 75 bp, synthetic construct
  source 1..75: mol_type = other DNA
aaaagtcagtaaggttgtggctggtattccgccatcaatcagtatttctaattctggtacaaatattattctgaa

SEQ ID NO: 129922 - DNA, 75 bp, synthetic construct
  source 1..75: mol_type = other DNA
cgccatgacgctggatatcgcgatgggcggctctaccaacaccgttctccacctgctggcggcggcgcaggaagc

SEQ ID NO: 129923 - DNA, 75 bp, synthetic construct
  source 1..75: mol_type = other DNA
gttcaccgtgctggtggtgttatcggtattctcggcgagctggatcgtgcggggttactgaaccgtgatgtgaaa

SEQ ID NO: 129924 - DNA, 75 bp, synthetic construct
  source 1..75: mol_type = other DNA
gtctctgactcccagagcgatcaggttgagcgttcagcctgcccaacttgcggctcctgctccgggatgttcacc

SEQ ID NO: 129925 - DNA, 75 bp, synthetic construct
  source 1..75: mol_type = other DNA
aacgctttacaacgcttttgatcggtttcttcaaagagaaatttatatgggctaagaagaaacctgatcctaccg

SEQ ID NO: 129926 - DNA, 75 bp, synthetic construct
  source 1..75: mol_type = other DNA
ttctggttctggaacaaatactatcctgaaaatatcctcctctcaaaaccaaaacaggacatccagaagcgcccc

SEQ ID NO: 129927 - DNA, 75 bp, synthetic construct
  source 1..75: mol_type = other DNA
gcatcagcgagctgccgcaccgcgcagcgcatggcgaagtgcgtgccgcgtacattatgggcgaagatccgctac

SEQ ID NO: 129928 - DNA, 75 bp, synthetic construct
  source 1..75: mol_type = other DNA
caggtaagaaaccatcagtcagtatttctggttctggaacaaatactatcctgaaaatatcctcctctcaaaacc

SEQ ID NO: 129929 - DNA, 75 bp, synthetic construct
  source 1..75: mol_type = other DNA
aaatacatccactcaattgaaaaccccatctcttcaaaacaccagagcgatgaaccgcgctcctatgaagagtag

SEQ ID NO: 129930 - DNA, 75 bp, synthetic construct
  source 1..75: mol_type = other DNA
acgctcacgtcatgttaaccctgaaaaccatcgggcccgaaggcttcggtaaaaaagacagaacttggaatgata

SEQ ID NO: 129931 - DNA, 75 bp, synthetic construct
  source 1..75: mol_type = other DNA
actacactgaccgctgcaatcactaccgtactggctaaaacctacggcggtgctgctcgtgcattcgaccagatc

SEQ ID NO: 129932 - DNA, 75 bp, synthetic construct
  source 1..75: mol_type = other DNA
acaacgctgaccgctgcaatcacgaccgtactggctaaaacctacggcggtgctgctcgtgcattcgaccagatc

SEQ ID NO: 129933 - DNA, 75 bp, synthetic construct
  source 1..75: mol_type = other DNA
acaaccctgaccgctgcaatcaccaccgtactggctaaaacctacggcggtgctgctcgtgcattcgaccagatc

SEQ ID NO: 129934 - DNA, 75 bp, synthetic construct
  source 1..75: mol_type = other DNA
tataccggagtgaagagaaagcagtaaccggctcatttaaaccgtctggtctgtttcctccggctctacaaaaat

SEQ ID NO: 129935 - DNA, 75 bp, synthetic construct
  source 1..75: mol_type = other DNA
acgacactgaccgctgcaatcacgaccgtactggctaaaacctacggcggtgctgctcgtgcattcgaccagatc

SEQ ID NO: 129936 - DNA, 75 bp, synthetic construct
  source 1..75: mol_type = other DNA
accacactgaccgctgcaatcaccaccgtactggctaaaacctacggcggtgctgctcgtgcattcgaccagatc

SEQ ID NO: 129937 - DNA, 75 bp, synthetic construct
  source 1..75: mol_type = other DNA
caaaaccgcacgttaacgtcggtactatcggccacgttgaccagggtaaaaccactctgaccgctgcaatcacta

SEQ ID NO: 129938 - DNA, 75 bp, synthetic construct
  source 1..75: mol_type = other DNA
acaacactgaccgctgcaatcacaaccgtactggctaaaacctacggcggtgctgctcgtgcattcgaccagatc

SEQ ID NO: 129939 - DNA, 75 bp, synthetic construct
  source 1..75: mol_type = other DNA
tatcggccacgttgaccaaggtaaaacgaccctgaccgctgcaatcacgaccgtactggctaaaacctacggcgg

SEQ ID NO: 129940 - DNA, 75 bp, synthetic construct
  source 1..75: mol_type = other DNA
tatcggccacgttgaccaaggtaaaacaacgctgaccgctgcaatcacaaccgtactggctaaaacctacggcgg

SEQ ID NO: 129941 - DNA, 75 bp, synthetic construct
  source 1..75: mol_type = other DNA
acccaggaagatgtgctgtcgctcatttccggtggtttcgactccggcgtttccagttatatgttgatgcgtcgc

SEQ ID NO: 129942 - DNA, 75 bp, synthetic construct
  source 1..75: mol_type = other DNA
acctggctactgtggtgtgagcgcggggtaatgagccgcctgcaggcgctctatctacgcgaacagggctttaag

SEQ ID NO: 129943 - DNA, 75 bp, synthetic construct
  source 1..75: mol_type = other DNA
gaaggtattggcggtttcccgatcggcacccaggaagatgtgttgtcgctcatttccggtggtttcgactccggt

SEQ ID NO: 129944 - DNA, 75 bp, synthetic construct
  source 1..75: mol_type = other DNA
aacatattgaatccgcacgcgtgaagctgactaacccggatgtgactgtccatctggaagtggaagacgatcgtc

SEQ ID NO: 129945 - DNA, 75 bp, synthetic construct
  source 1..75: mol_type = other DNA
gctgaccaatccggatgtgactgtccatctggaagtggaagacgatcgcctcctgctaattaaaggccgctacga

SEQ ID NO: 129946 - DNA, 75 bp, synthetic construct
  source 1..75: mol_type = other DNA
tatgtggttgaagcccaggctccgaagcagttgcagctcaaccgcttcctgccaccgacgccggtacgtatgctg

SEQ ID NO: 129947 - DNA, 75 bp, synthetic construct
  source 1..75: mol_type = other DNA
gtcagagaataaaaaggctcgaaactgaaaacgaagctttgatagcattaaataacagatatttagagcagttta

SEQ ID NO: 129948 - DNA, 75 bp, synthetic construct
  source 1..75: mol_type = other DNA
agacgtattctccatctccggtcgtggtaccgttgttaccggtcgtgtagaacgcggtatcatcaaagttggtga

SEQ ID NO: 129949 - DNA, 75 bp, synthetic construct
  source 1..75: mol_type = other DNA
agaccttcgatattgacagtatggaaccaggagagccagctcgcgtgattagcagaggtgacgttgtaattcttg

SEQ ID NO: 129950 - DNA, 75 bp, synthetic construct
  source 1..75: mol_type = other DNA
ggaaggcgtagagatggtaatgccgggcgacaacatcaaaatggttgttaccctgatccacccgatcgcgatgga

SEQ ID NO: 129951 - DNA, 75 bp, synthetic construct
  source 1..75: mol_type = other DNA
cggtagcaacgcgagtgcaaatcatgcaaacagtattgcgatgggtagtggttcccagaccacccgtggtgcgca

SEQ ID NO: 129952 - DNA, 75 bp, synthetic construct
  source 1..75: mol_type = other DNA
atggcacgatttcagcctccagtaaggatgcggttaacggttcccaactgaaagctaccaatgacgatgtcgaag

SEQ ID NO: 129953 - DNA, 66 bp, synthetic construct
  source 1..66: mol_type = other DNA
cgtttcgcaatccgtgaaggcggccgtaccgttggcgcgggcgttgtagcaaaagttctgagctaa

SEQ ID NO: 129954 - DNA, 75 bp, synthetic construct
  source 1..75: mol_type = other DNA
cagaactctgtcggtgaattctcagtcggtagtgcggatggtcaacgtcagatcactaacgtcgcagcaggttcg

SEQ ID NO: 129955 - DNA, 75 bp, synthetic construct
  source 1..75: mol_type = other DNA
ccatgacggtaaagccagcatcatcactaatgtcgctaatggcagtattagtgaggacagtaccgatgcagtgaa

SEQ ID NO: 129956 - DNA, 75 bp, synthetic construct
  source 1..75: mol_type = other DNA
atagctgaaggccaatatagctctgccatcgggtcaaaaacccatgcgattggtggtgcatcaatggcctttggg

SEQ ID NO: 129957 - DNA, 75 bp, synthetic construct
  source 1..75: mol_type = other DNA
accacgatacagaacgacaggagccgtatccagacggtatatcagccggggagcttcacgccgctcatccgggtc

SEQ ID NO: 129958 - DNA, 75 bp, synthetic construct
  source 1..75: mol_type = other DNA
ttacacttaactcatacggtgaaatggactgaatctctcgatacatattctgaatatgccaaccccggtagcttt

SEQ ID NO: 129959 - DNA, 75 bp, synthetic construct
  source 1..75: mol_type = other DNA
ggatctcgccgttcgtgacgttcatttcctgctggaaggtggacaaatgccatgcaaaacgggggcaaccaatga

SEQ ID NO: 129960 - DNA, 75 bp, synthetic construct
  source 1..75: mol_type = other DNA
tacattccggaaccagagcgtgcgattgacaagccgttcctgctgccgatcgaagacgtattctccatctccggt

SEQ ID NO: 129961 - DNA, 75 bp, synthetic construct
  source 1..75: mol_type = other DNA
cttagccttaacgacctggtgttgccgatctttgttgaagaagaaattgacgactataaagccgttgaagctatg

SEQ ID NO: 129962 - DNA, 75 bp, synthetic construct
  source 1..75: mol_type = other DNA
tacggctacagcgccacgggcaggctggagagcgtgcgtaccctcgcaccggacctggacatccgcatcccgtat

SEQ ID NO: 129963 - DNA, 75 bp, synthetic construct
  source 1..75: mol_type = other DNA
gatcgaagacgtattctccatctccggtcgtggtaccgttgttactggtcgtgtagaacgcggtatcatcaaagt

SEQ ID NO: 129964 - DNA, 75 bp, synthetic construct
  source 1..75: mol_type = other DNA
gtgaatactgacggtgtgtttaccggtccaacctacaaaatcggtgaaacaaattattataacgtctgcgatgca

SEQ ID NO: 129965 - DNA, 75 bp, synthetic construct
  source 1..75: mol_type = other DNA
ccattaacggtagccagctttatgacttaagcagcaatatcgccacctacttcggcggcaatgcttctgtgaata

SEQ ID NO: 129966 - DNA, 75 bp, synthetic construct
  source 1..75: mol_type = other DNA
tcatcaacgtagctgatggttcagaagcccatgacgccgttacggttcgtcagttgcagaacgctattggagcgg

SEQ ID NO: 129967 - DNA, 75 bp, synthetic construct
  source 1..75: mol_type = other DNA
tgaagatgcgctgaaatgggataaggacaatggtgtcttcacggctgctcatggcaacaacgccgccagcaaaat

SEQ ID NO: 129968 - DNA, 75 bp, synthetic construct
  source 1..75: mol_type = other DNA
gggtacagggtctgtggcaaccgaagaaaatacgatctctgtaggttcctctactaatcaacgtcgtatcaccaa

SEQ ID NO: 129969 - DNA, 75 bp, synthetic construct
  source 1..75: mol_type = other DNA
acaacgtcggtgacgccctggatgcgcttgatgataacgccctgctgtgggatgagactgccaatggcggtgctg

SEQ ID NO: 129970 - DNA, 75 bp, synthetic construct
  source 1..75: mol_type = other DNA
ccaatattgccactaacaccaccaacatctctaatctgactgagacggtgactaatcttggtgaggatgcgctga

SEQ ID NO: 129971 - DNA, 75 bp, synthetic construct
  source 1..75: mol_type = other DNA
ccgcaaactgctggacgaaggccgtgctggtggtcaggtactggctaagccgggcaccatcaagccgcacaccaa

SEQ ID NO: 129972 - DNA, 75 bp, synthetic construct
  source 1..75: mol_type = other DNA
cattgtttttaaacactatcctttaatgaaagtaatatccgcccagcaggcgataagtgctctcaaatatatggt

SEQ ID NO: 129973 - DNA, 75 bp, synthetic construct
  source 1..75: mol_type = other DNA
tgatggtcttgctactgttggcggtgctggcagctctgcatggagtttgcttgataaacaatgggaagtaacaca

SEQ ID NO: 129974 - DNA, 75 bp, synthetic construct
  source 1..75: mol_type = other DNA
tatctcttatgagaaaaggccttctccatcgctcaggtgtgacttacagcgcgtcaggtagagagaaatttgtta

SEQ ID NO: 129975 - DNA, 75 bp, synthetic construct
  source 1..75: mol_type = other DNA
cttccagatcactggatgtattacgcaatgcttttgtgtatcagttatgttctgaacagggtgatggagtttata

SEQ ID NO: 129976 - DNA, 75 bp, synthetic construct
  source 1..75: mol_type = other DNA
cactccgatcgttcgtggttctgccctgaaagcgctggaaggcgacgcagagtgggaagcgaaaatcctggaact

SEQ ID NO: 129977 - DNA, 75 bp, synthetic construct
  source 1..75: mol_type = other DNA
gtacggcatttgatgaccaggggaataccaccactaacccgaagacgcgcgggctgctggctgatagaggaatac

SEQ ID NO: 129978 - DNA, 75 bp, synthetic construct
  source 1..75: mol_type = other DNA
tccgctgctcctcgcactggaagacaccaccaccattaacttcagccacagtacagcatttgatgaccaggggaa

SEQ ID NO: 129979 - DNA, 75 bp, synthetic construct
  source 1..75: mol_type = other DNA
gagtgggaagcgaaaatcctggaactggctggcttcctggattcctacattccggaaccagagcgtgcgattgac

SEQ ID NO: 129980 - DNA, 75 bp, synthetic construct
  source 1..75: mol_type = other DNA
gtgtccgcaaaacttgcgcaaagtatttctggtgcaggcattgatgcagctattcagggtgctgccgctatgggg

SEQ ID NO: 129981 - DNA, 75 bp, synthetic construct
  source 1..75: mol_type = other DNA
ataggtgggagtattttagctgccagcaaggcagcaggaacggcaaaagatattggcaccggagcttatgaaggg

SEQ ID NO: 129982 - DNA, 75 bp, synthetic construct
  source 1..75: mol_type = other DNA
ttactgttctcggcgcagcagtcatctggggcggagtaacagtatttaaacggttcttggacaaccgtaaagata

SEQ ID NO: 129983 - DNA, 75 bp, synthetic construct
  source 1..75: mol_type = other DNA
tatgttgatatggataaagttatgtttgaaatgagatatgtgcatactaaagcattactttttagtatgagttaa

SEQ ID NO: 129984 - DNA, 75 bp, synthetic construct
  source 1..75: mol_type = other DNA
aagaatatctggaaaagcgctttgataaacatatggaagaggcaggtaaaagagaaagactgatttatgttgata

SEQ ID NO: 129985 - DNA, 75 bp, synthetic construct
  source 1..75: mol_type = other DNA
ctgtatgttcctgaagtttcctggcagtggcagccccgcgctgtgcggatgagtacaccagacgccgtgcaggcc

SEQ ID NO: 129986 - DNA, 75 bp, synthetic construct
  source 1..75: mol_type = other DNA
atgagtttaagatactacataaaaaacattttgtttggcctatattgcacacttatatatatataccttataaca

SEQ ID NO: 129987 - DNA, 75 bp, synthetic construct
  source 1..75: mol_type = other DNA
cctgttcaggaaaagcatcagtggaagaaaacacatttaatgctttctacaaaattgttgaaaaaaccgttatcg

SEQ ID NO: 129988 - DNA, 75 bp, synthetic construct
  source 1..75: mol_type = other DNA
tgaattacgaggggtccgaacaaatagactggttagatactgtttcccagcttattgattactcaatgtccgacc

SEQ ID NO: 129989 - DNA, 75 bp, synthetic construct
  source 1..75: mol_type = other DNA
gatggtaaaagtatcctgaaaggctaccgcgcagtgagaacggtggaagtcacgctccgtcagttagacaaactg

SEQ ID NO: 129990 - DNA, 75 bp, synthetic construct
  source 1..75: mol_type = other DNA
caagcgacagttgaagaagatgggatcaaaatattcgcacttcaatatatagcttttcatcagacagagcattat

SEQ ID NO: 129991 - DNA, 75 bp, synthetic construct
  source 1..75: mol_type = other DNA
agtaacgcttttcccgttcagacagtaataatgaacgatccaactcttattgataaatttgtaggagagggcaat

SEQ ID NO: 129992 - DNA, 75 bp, synthetic construct
  source 1..75: mol_type = other DNA
gcgcaacccctgattattccgccgggccactggcaggagggaatggctgtgggcgtgacggaattcagcggcacg

SEQ ID NO: 129993 - DNA, 75 bp, synthetic construct
  source 1..75: mol_type = other DNA
cggagaggtgacgccgggggccgaaaaacaggtgaaactccagttatggcaggtgaacggctatgaatggacccc

SEQ ID NO: 129994 - DNA, 75 bp, synthetic construct
  source 1..75: mol_type = other DNA
gtgacatccctgagtgatgtttgggttaatttccccggtgctgaggaaccggtaaaacgctggcagggaagcctg

SEQ ID NO: 129995 - DNA, 75 bp, synthetic construct
  source 1..75: mol_type = other DNA
aaaggctaccgtccgcagttctattccgtactactgacgtgactggtaccatcgaactgccggaaggcgtagaga

SEQ ID NO: 129996 - DNA, 75 bp, synthetic construct
  source 1..75: mol_type = other DNA
actgacgtgactggtaccatcgaactgccggaaggcgtagagatggtaatgccgggcgacaacatcaaaatggtt

SEQ ID NO: 129997 - DNA, 75 bp, synthetic construct
  source 1..75: mol_type = other DNA
ctgaaagcgctggaaggcgacgcagagtgggaagcgaaaatcctggaactggctggcttcctgggatttcctaca

SEQ ID NO: 129998 - DNA, 75 bp, synthetic construct
  source 1..75: mol_type = other DNA
gacaacatcaaaatggttgttaccctgatccacccgatcgcgatggacgacggtctgcgttttcgcaatccgtga

SEQ ID NO: 129999 - DNA, 75 bp, synthetic construct
  source 1..75: mol_type = other DNA
gtgggaagcgaaaatcctggaactggctggcttcctggattcttatattccggaaccagagcgtgcgattgacaa

SEQ ID NO: 130000 - DNA, 75 bp, synthetic construct
  source 1..75: mol_type = other DNA
tatcggccacgttgaccacggtaaaacaacgctgaccgctgcaatcaccaccgtactggctaaaacctacggcgg

SEQ ID NO: 130001 - DNA, 75 bp, synthetic construct
  source 1..75: mol_type = other DNA
atcgaactgccggaaggcgtagagatggtaatgccgggcgacaacatcaaaatggttgttaccctgatccacccg

SEQ ID NO: 130002 - DNA, 75 bp, synthetic construct
  source 1..75: mol_type = other DNA
ctgaaagcgctggaaggcgacgcggagtgggaagcgaaaatcctggaactggctggcttcctggattcttacatt

SEQ ID NO: 130003 - DNA, 75 bp, synthetic construct
  source 1..75: mol_type = other DNA
gatggacggccaggtacaggcgattcgtcaggcgctggacgctgcgggctttaaagatacggcgattatgtcgta

SEQ ID NO: 130004 - DNA, 75 bp, synthetic construct
  source 1..75: mol_type = other DNA
atgacagacttaatccaacgccctcgtcgcctgcgcaaatctcctgcgctgcgcgctatatttgaagagacaaca

SEQ ID NO: 130005 - DNA, 75 bp, synthetic construct
  source 1..75: mol_type = other DNA
gcgatcacggtgtcgataacgacgcaaccctggtgaatttaggtaaacaagccgtcgttgccgctgctgcaggtg

SEQ ID NO: 130006 - DNA, 75 bp, synthetic construct
  source 1..75: mol_type = other DNA
tcgaactgccggaaggcgtagagatggtaatgccgggcgacaacatcaaaatggttgttaccctgatccacccga

SEQ ID NO: 130007 - DNA, 75 bp, synthetic construct
  source 1..75: mol_type = other DNA
caaaaccgcacgttaacgtcggtactatcggccacgttgaccagggtaaaacaacactgaccgctgcaatcacga

SEQ ID NO: 130008 - DNA, 75 bp, synthetic construct
  source 1..75: mol_type = other DNA
caaaaccgcacgttaacgtcggtactatcggccacgttgaccaaggtaaaacgacactgaccgctgcaatcacga

SEQ ID NO: 130009 - DNA, 75 bp, synthetic construct
  source 1..75: mol_type = other DNA
agctatcagatgaacccaatgaaccgtcgcgaggcgattcgtgagtcactgctggatgaagcccagggcgcagac

SEQ ID NO: 130010 - DNA, 75 bp, synthetic construct
  source 1..75: mol_type = other DNA
gaacaggtgatccctgaaaacgagggtggttggtggatacgtgaagtgggcctgtttgatgagtccggggcattg

SEQ ID NO: 130011 - DNA, 75 bp, synthetic construct
  source 1..75: mol_type = other DNA
catggtgataatggtggtactgacagcaaaatcaccaacgttgcggatggtgccgtttcagcctccagtaaagat

SEQ ID NO: 130012 - DNA, 75 bp, synthetic construct
  source 1..75: mol_type = other DNA
atttaccggtcctcaatataatattggtggtaagaattacaccaatgttggcgcagctcttaccgctctggacaa

SEQ ID NO: 130013 - DNA, 75 bp, synthetic construct
  source 1..75: mol_type = other DNA
tcgcgctgggtgcatcttcgtattcacttggccaatactcgatggccctgggtcgctattccaaggcgctgggca

SEQ ID NO: 130014 - DNA, 75 bp, synthetic construct
  source 1..75: mol_type = other DNA
ccgctcatggtagctcaactgccagcgtaatcaccgatgtggcggatggcgcagtttcagattccagtaaagacg

SEQ ID NO: 130015 - DNA, 75 bp, synthetic construct
  source 1..75: mol_type = other DNA
accctgtcgggcacgctttaccctgaaatcaccggcgggcgtctgtcactgatggccatcgaactgatggccgat

SEQ ID NO: 130016 - DNA, 75 bp, synthetic construct
  source 1..75: mol_type = other DNA
atggactatacagcctggcaatgggtgcaggaagtgctacttcgaacgataacgccatcgcgattgggaacaaaa

SEQ ID NO: 130017 - DNA, 75 bp, synthetic construct
  source 1..75: mol_type = other DNA
gataattccgtctctgtgggtaacacaacagatcagcgaaaaattgtcaatatggcagcaggtgatatcagcact

SEQ ID NO: 130018 - DNA, 75 bp, synthetic construct
  source 1..75: mol_type = other DNA
atgttttcgtcgtttggggcattggcgaatgccgggaatgacaacggtcagggtgttgattacggtagtggatca

SEQ ID NO: 130019 - DNA, 75 bp, synthetic construct
  source 1..75: mol_type = other DNA
cgaccaacaccgatggcgcagacgccaacgcgcaggataaagacagtgttgcgattggttctggctccattgctg

SEQ ID NO: 130020 - DNA, 75 bp, synthetic construct
  source 1..75: mol_type = other DNA
cggataccgatgcggtcaacgtgggtcagttgaaagtaacggacgcgcaggtttcccagaatacccagagcatta

SEQ ID NO: 130021 - DNA, 75 bp, synthetic construct
  source 1..75: mol_type = other DNA
gccaacgcccagggtaaagatagcgttgctattggttctggttccattgctgccgctgacaacagcgtcgcactg

SEQ ID NO: 130022 - DNA, 75 bp, synthetic construct
  source 1..75: mol_type = other DNA
caatgctgacggcagcatcagtgcgccgacttacactatcgcaaacgcagattacgataatgtcggtgatgccct

SEQ ID NO: 130023 - DNA, 75 bp, synthetic construct
  source 1..75: mol_type = other DNA
aacaaagcggctggcgcattcagcgccgcgcacggtaccgaagctaccagcaagatcaccaacttactggctggc

SEQ ID NO: 130024 - DNA, 75 bp, synthetic construct
  source 1..75: mol_type = other DNA
accattgcaaataccgattacaataacgtcggtgaagccctggatgcgctcgataataacgctctgctgtgggat

SEQ ID NO: 130025 - DNA, 75 bp, synthetic construct
  source 1..75: mol_type = other DNA
acggttcccagttaaacgcaaccaatattctggttacgcaaaatagccaaatgattaaccagcttgctggtaaca

SEQ ID NO: 130026 - DNA, 75 bp, synthetic construct
  source 1..75: mol_type = other DNA
aacgacgcagtgaactatgcgcagttgaagcaaagtgtacaggaaacgaagcaatacaccgatcagcgcatggtt

SEQ ID NO: 130027 - DNA, 75 bp, synthetic construct
  source 1..75: mol_type = other DNA
ggccaccaacacagccaatatcgccactaacaccacggatattgcaaccaacactgccaatatcgccgataacac

SEQ ID NO: 130028 - DNA, 75 bp, synthetic construct
  source 1..75: mol_type = other DNA
agaatatctctaacctgaataatcaggtaacgaatctggacactcgcgtcaccaatatcgaaaacggtatcggcg

SEQ ID NO: 130029 - DNA, 75 bp, synthetic construct
  source 1..75: mol_type = other DNA
atggcaccggcatgatttacggcatgtatgtcatcagcaaggtgagtgaaacagggagtattttctttgcagacg

SEQ ID NO: 130030 - DNA, 75 bp, synthetic construct
  source 1..75: mol_type = other DNA
cgaccaacaccgccaatattaatactctcaatacgtcgatcgatacccttgagcaggatgcaatactctggaacg

SEQ ID NO: 130031 - DNA, 75 bp, synthetic construct
  source 1..75: mol_type = other DNA
ccgaagaaaatacgatctctgtaggttcctctactaatcaacgtcgtatcaccaacgtagctgcaggtaaaaatg

SEQ ID NO: 130032 - DNA, 75 bp, synthetic construct
  source 1..75: mol_type = other DNA
caccagtgcaatttttactccaggagcatacgcaggactctctctcgacggcggtgacattctcgaatcgactcc

SEQ ID NO: 130033 - DNA, 75 bp, synthetic construct
  source 1..75: mol_type = other DNA
ttcaacgatgccagcgcagcaggtattggctctaccgctgtgggttataactctgttgccgaaggcgatagcagc

SEQ ID NO: 130034 - DNA, 75 bp, synthetic construct
  source 1..75: mol_type = other DNA
aatcactggccgcgctttatggcgatatcggtaaacaggcggaatcgctcatcggtaaggctggcagtatggcga

SEQ ID NO: 130035 - DNA, 75 bp, synthetic construct
  source 1..75: mol_type = other DNA
caggaggcgtgtcgtatcgagtttcatctcgattttgagtttaccaataagttgattgaactcgcctttggtcgc

SEQ ID NO: 130036 - DNA, 75 bp, synthetic construct
  source 1..75: mol_type = other DNA
atgaccgctgcggtagatgtctctaaggctgggatcagcaaaacgtttactacccgcaaccagttgaccagtaac

SEQ ID NO: 130037 - DNA, 75 bp, synthetic construct
  source 1..75: mol_type = other DNA
catcgaggaaaacggtgcgggtattaactatgtacgtaccaacgacagcggcttagcgttcaacgatgccagcgc

SEQ ID NO: 130038 - DNA, 75 bp, synthetic construct
  source 1..75: mol_type = other DNA
tctcagctgaaagcgaccaaggacgatgtggcggcaaacaccaccaacatcactaacctgacgagcgaagtggct

SEQ ID NO: 130039 - DNA, 75 bp, synthetic construct
  source 1..75: mol_type = other DNA
tatcaccaacgttgctgccggtgttaatgccaccgatgcggttaacgtttcgcagctgaagtcttctgaggcagg

SEQ ID NO: 130040 - DNA, 75 bp, synthetic construct
  source 1..75: mol_type = other DNA
gcgtgtttaaagagctggcgactaatatggtgcaggctttcactgtgcgagcaaaagaggtttatagtgccaggt

SEQ ID NO: 130041 - DNA, 75 bp, synthetic construct
  source 1..75: mol_type = other DNA
aacgtcggtgatgctctggcagccattaacacatcatttagcacatcactcggcgacgccctactttgggatgca

SEQ ID NO: 130042 - DNA, 75 bp, synthetic construct
  source 1..75: mol_type = other DNA
gcttccggcgaaagcagtgtcgcaattggtcagaatagcagcagcagcgttgatactggtatcgcgctgggtagc

SEQ ID NO: 130043 - DNA, 75 bp, synthetic construct
  source 1..75: mol_type = other DNA
ccatcaatggtgggcaactctacggtgtgagcaactctgttgttgatgccctgggcggtggcgccgcagtaaatg

SEQ ID NO: 130044 - DNA, 75 bp, synthetic construct
  source 1..75: mol_type = other DNA
gtcactaatctggatactcgcgtgaccaatatcgaaaatggcattggcgatatcgtaaccaccggtagtactaag

SEQ ID NO: 130045 - DNA, 75 bp, synthetic construct
  source 1..75: mol_type = other DNA
acgcgcagggtaaagacagtgttgcgattggttctggttccattgctgccgctgataacagcgtcgcgctgggca

SEQ ID NO: 130046 - DNA, 75 bp, synthetic construct
  source 1..75: mol_type = other DNA
aaggcgatagcagcgtggccatcggtcagggcagctacagcggcgttgatacgggtatcgctctgggtagcagct

SEQ ID NO: 130047 - DNA, 75 bp, synthetic construct
  source 1..75: mol_type = other DNA
tgttaaaggttctcgtaacaccagcgtatcggaagaaggtgttgtgattggttatgacaccacggatggcaaact

SEQ ID NO: 130048 - DNA, 75 bp, synthetic construct
  source 1..75: mol_type = other DNA
tagataacaccgccagtaagattactaacgtcgcaaatggtgcaatctctgccaccagcagcgacgcgattaacg

SEQ ID NO: 130049 - DNA, 75 bp, synthetic construct
  source 1..75: mol_type = other DNA
cggtgatgctctggcagccattaacacatcatttagcacatcactcggcgatgccctactttgggatgcaaccgc

SEQ ID NO: 130050 - DNA, 75 bp, synthetic construct
  source 1..75: mol_type = other DNA
aataccatctctgtgggttcttctaccaaccagcgccgtatcaccaacgttgctgccggtgttaatgccaccgat

SEQ ID NO: 130051 - DNA, 75 bp, synthetic construct
  source 1..75: mol_type = other DNA
gcagtcggtgaagactcgctggcaatgggtgcgaaaaccatcgttaatggtaatgcgggtattggtatcggcctg

SEQ ID NO: 130052 - DNA, 75 bp, synthetic construct
  source 1..75: mol_type = other DNA
gatggtaaatatcgtcaaatcatcaacgtagccgatggttccgaagcccatgacgccgttacggttcgccagttg

SEQ ID NO: 130053 - DNA, 75 bp, synthetic construct
  source 1..75: mol_type = other DNA
cactgacgccgttaacggctcccagctcaaaaccaccaacgataacgtgccgaccaacaccaccaacatcgccac

SEQ ID NO: 130054 - DNA, 75 bp, synthetic construct
  source 1..75: mol_type = other DNA
cactgacgccgttaacggctctcagctcaaaaccaccaacgagaacgtggcgaccaacaccaccaacatcgccac

SEQ ID NO: 130055 - DNA, 75 bp, synthetic construct
  source 1..75: mol_type = other DNA
ggttctatagactacagcaacatcactctcggtggtggtaatggcggtacgactcgcatcagcaacgtctccgct

SEQ ID NO: 130056 - DNA, 75 bp, synthetic construct
  source 1..75: mol_type = other DNA
agcgatacaggtgtattaaccgggccaacctatagtattggcggcactgactacactaacgtcggtgatgctctg

SEQ ID NO: 130057 - DNA, 75 bp, synthetic construct
  source 1..75: mol_type = other DNA
ggctcacaactttatggcgtagcggattcatttacgtcatatcttggtggtggtgctgatatcagcgatacgggt

SEQ ID NO: 130058 - DNA, 75 bp, synthetic construct
  source 1..75: mol_type = other DNA
cactgacgccgttaacggctcgcagctcaaaaccaccaacgagaacgtgtcgaccaacaccaccaacatcgccac

SEQ ID NO: 130059 - DNA, 75 bp, synthetic construct
  source 1..75: mol_type = other DNA
cgcgaaagcagtgcgcagatgagcgtgaagcgtatggcaagcctgattgagtacacaacttcctgggctgtggag

SEQ ID NO: 130060 - DNA, 75 bp, synthetic construct
  source 1..75: mol_type = other DNA
tgaccagaacgcaaaatttcacgcgatgctggcggatatcgcacgtcaggttcaatggtgcggaaaatggttaaa

SEQ ID NO: 130061 - DNA, 75 bp, synthetic construct
  source 1..75: mol_type = other DNA
ggaaattggaccgtcattggacacagcaatcacatcaatggagccgtaaaagtcacgcagaaactactgaagaaa

SEQ ID NO: 130062 - DNA, 75 bp, synthetic construct
  source 1..75: mol_type = other DNA
agctccatggaagctgcgaacgcatttgccgaagagttcatgaacgattacaaccgtcgtttcgcaaaagcacct

SEQ ID NO: 130063 - DNA, 75 bp, synthetic construct
  source 1..75: mol_type = other DNA
aatcaacattggatcactgaaaccacagatgccagtgaaaaatttttagatcttttggttgaactaagaaatttt

SEQ ID NO: 130064 - DNA, 75 bp, synthetic construct
  source 1..75: mol_type = other DNA
aatcaacattggatcactgaaaccgcagatgccagtgaaagacttttagatcttttggtggaactaagaaatttt

SEQ ID NO: 130065 - DNA, 75 bp, synthetic construct
  source 1..75: mol_type = other DNA
aagaacaacagcatttggttcacacgacacgacgcgttaacgttaagtgatgattattatgactttttgctacgg

SEQ ID NO: 130066 - DNA, 75 bp, synthetic construct
  source 1..75: mol_type = other DNA
cattgaaaccgtggatcaactgttccatgactggtatcgaaccgatctgagtcgacgactaaagcaccccaagat

SEQ ID NO: 130067 - DNA, 75 bp, synthetic construct
  source 1..75: mol_type = other DNA
gaagcgatttatgacagatatgattatcttgaagagagatctgaggctctaaaaagtatctccgtgagtctagct

SEQ ID NO: 130068 - DNA, 75 bp, synthetic construct
  source 1..75: mol_type = other DNA
atgaagcaaacaatcttcctccgaactaagcaacaacagcaagccgcaataaatgccatcctctcaactcctctc

SEQ ID NO: 130069 - DNA, 75 bp, synthetic construct
  source 1..75: mol_type = other DNA
gcgtaggacgaatggctagtctcatagagtacacgatggcttgggcagcagggcagaacgtcagattcactgaca

SEQ ID NO: 130070 - DNA, 75 bp, synthetic construct
  source 1..75: mol_type = other DNA
agtctactggggtttcctgattcgactggcgtatctggctaaaaccagaactaaggacgtccacagcggttaccg

SEQ ID NO: 130071 - DNA, 75 bp, synthetic construct
  source 1..75: mol_type = other DNA
atgggcgcgaatactatcgttaatggtaatgcgggcattggtatcggcctgaacactctggttctgtctgatgcg

SEQ ID NO: 130072 - DNA, 75 bp, synthetic construct
  source 1..75: mol_type = other DNA
aatacccagagcattactaacctgaacaatcaggtcactaatctggatactcgcgttactaatatcgaaaacggt

SEQ ID NO: 130073 - DNA, 75 bp, synthetic construct
  source 1..75: mol_type = other DNA
acaccattgcaaatgccgagtacaacaacgtcggtgacgccctggatgcgctcgacgataacgctctgctgtggg

SEQ ID NO: 130074 - DNA, 75 bp, synthetic construct
  source 1..75: mol_type = other DNA
ggacagcaacggacgttttctggtgttgccgaaggggatgaaagccgaaacgaactggacgaaggacaacggcaa

SEQ ID NO: 130075 - DNA, 75 bp, synthetic construct
  source 1..75: mol_type = other DNA
aatcaccaacttactggcaggcactgtatcctctgacagcactgacgccattaatggctcacaactttatggctt

SEQ ID NO: 130076 - DNA, 75 bp, synthetic construct
  source 1..75: mol_type = other DNA
ttcagcgccgcgcacggtaccgaagccaccagcaaaatcaccaacttactggcaggcactgtatcctctgacagc

SEQ ID NO: 130077 - DNA, 75 bp, synthetic construct
  source 1..75: mol_type = other DNA
ctcaaccacggtaccggcgtccgtgtactggtgagctgatacaaatagatggctgtgatcacgactggtttgaag

SEQ ID NO: 130078 - DNA, 75 bp, synthetic construct
  source 1..75: mol_type = other DNA
tatcgtgaagatggtccgattggcatgaccagccgccgtcgtggtaaatccagtaacaaccagttgcctcaggga

SEQ ID NO: 130079 - DNA, 75 bp, synthetic construct
  source 1..75: mol_type = other DNA
atgacggctctcgcagcggagtttttcacattggatgaagttaaccgactcaaaatcattcaggatgtcatcgac

SEQ ID NO: 130080 - DNA, 75 bp, synthetic construct
  source 1..75: mol_type = other DNA
tcattactaatgttgcagacggtgcaatttcctctaccagcagcgacgctattaacggctcacagctctatgaca

SEQ ID NO: 130081 - DNA, 75 bp, synthetic construct
  source 1..75: mol_type = other DNA
gtggtgctcaaactggctacgccgcctacaacatggacgcaccgcagaactctgtgggtgagttctctgtcggca

SEQ ID NO: 130082 - DNA, 75 bp, synthetic construct
  source 1..75: mol_type = other DNA
cgcaagctggcgcaatcgccattggacaaggtaacaccgctgatggtattgacgcaattgcactgggtaatggta

SEQ ID NO: 130083 - DNA, 75 bp, synthetic construct
  source 1..75: mol_type = other DNA
accagcgtctgattaaaaacaaaaccgcacaggccgttttgcagcggtgtaccaccagaatcacactgaaaggag

SEQ ID NO: 130084 - DNA, 75 bp, synthetic construct
  source 1..75: mol_type = other DNA
ccagaccatgcagcgtgaatcagattatcgctggccgtcaaattcccgtatcggtaaacgggatgcctatcagtt

SEQ ID NO: 130085 - DNA, 75 bp, synthetic construct
  source 1..75: mol_type = other DNA
tggcgctggcaatccacggtcaggttgatccggtgaccggcgtgtcgcaaaccatgccgcaagcgccgtggacaa

SEQ ID NO: 130086 - DNA, 75 bp, synthetic construct
  source 1..75: mol_type = other DNA
gccggcaggtgaagatattgagtatgatccggtgtatagcgaaatacgggaagcaagacaaaatgatccggacta

SEQ ID NO: 130087 - DNA, 75 bp, synthetic construct
  source 1..75: mol_type = other DNA
gctatcagcgaacatacaacatccgtgaaacagcaactggatacgctgagcaccaccgtgagcacgcagctcagc

SEQ ID NO: 130088 - DNA, 75 bp, synthetic construct
  source 1..75: mol_type = other DNA
ataactttaattggtctgacgaggcggaaaatgttatcagcatgttttatgatgctgatatcatggtatatgttg

SEQ ID NO: 130089 - DNA, 75 bp, synthetic construct
  source 1..75: mol_type = other DNA
aattggttttgggaaaaaagaagagtttaaggaaattttggcaattttaagaaggcagaaccctgataggataag

SEQ ID NO: 130090 - DNA, 75 bp, synthetic construct
  source 1..75: mol_type = other DNA
tcatcaccggcggcgatatcgtgctgaatgccggcaatgagccaatgacctgcaataaccgctacagcattgggc

SEQ ID NO: 130091 - DNA, 75 bp, synthetic construct
  source 1..75: mol_type = other DNA
tgctgattcagggcggtgactttgttctgaataccggtaatgaacctgaattatgtaataaccgaaaaagtatcg

SEQ ID NO: 130092 - DNA, 75 bp, synthetic construct
  source 1..75: mol_type = other DNA
aaatcacaaccggacaatactcagcttgatcccgaaaaactaaccaccgcgcaattgattgcggcctggctgagt

SEQ ID NO: 130093 - DNA, 75 bp, synthetic construct
  source 1..75: mol_type = other DNA
gcgtgatcaacgttgattacggcattggctcgtcgttcgtgattaacgagcaaatttatcgcggcagtttgtatg

SEQ ID NO: 130094 - DNA, 75 bp, synthetic construct
  source 1..75: mol_type = other DNA
gcagttaatcctgcctggcaaagtggagaaccgtggatcaccagctgggttgaccgcagtgccaatgccattggt

SEQ ID NO: 130095 - DNA, 75 bp, synthetic construct
  source 1..75: mol_type = other DNA
catagaggataacccggaggttaagttttatcgtcataaaaattatgtgcatttattttatccaagtgaggccgg

SEQ ID NO: 130096 - DNA, 75 bp, synthetic construct
  source 1..75: mol_type = other DNA
actgctgcgcattgccggcgccagcacattattctttcttgtctgcgaatactccattttttctggcacgggagg

SEQ ID NO: 130097 - DNA, 75 bp, synthetic construct
  source 1..75: mol_type = other DNA
cggctctggctccacgagacacgtttcggatggctggggtggcgggtgtgcctctacggtgcgctggcatgggga

SEQ ID NO: 130098 - DNA, 75 bp, synthetic construct
  source 1..75: mol_type = other DNA
aagagttaaaggtcagagcttttggttctgattatgtctttcctaaccgcagatccagtaagaatctacatatgg

SEQ ID NO: 130099 - DNA, 75 bp, synthetic construct
  source 1..75: mol_type = other DNA
ccactcggtgcaatagacggaatgcgtatcgggtcgacaatgtgggggccagcggcacagatgatttgctggggg

SEQ ID NO: 130100 - DNA, 75 bp, synthetic construct
  source 1..75: mol_type = other DNA
ccgtcaaaaactgggcgctgactgcggtgccggagtcggcaattgtaaattcaacattctcaaatgcgtcatgct

SEQ ID NO: 130101 - DNA, 75 bp, synthetic construct
  source 1..75: mol_type = other DNA
agtgaacctcgtagggctgactggagaaaagtaagaaaattatgtgaggttactttacgcaataagagtaaagat

SEQ ID NO: 130102 - DNA, 75 bp, synthetic construct
  source 1..75: mol_type = other DNA
ctatgtcagaatggcttgaggaactacttaaagataatgactctatggaacaaataaaccgtgtcttaaaaggat

SEQ ID NO: 130103 - DNA, 75 bp, synthetic construct
  source 1..75: mol_type = other DNA
tgactatgtcagaatggcttgaagaattacttaaagataatgattctatggaacaaattaatcggattttaaaag

SEQ ID NO: 130104 - DNA, 75 bp, synthetic construct
  source 1..75: mol_type = other DNA
atttgtctggtcagtgccctgtttgcgttactttgcgagtacagcatttttttcggaccgggggttgaactgtga

SEQ ID NO: 130105 - DNA, 75 bp, synthetic construct
  source 1..75: mol_type = other DNA
aactgagttactgagccgttttttaccgcaagacgtacaggataacaatacagtttcatcgttatcaattgaccc

SEQ ID NO: 130106 - DNA, 75 bp, synthetic construct
  source 1..75: mol_type = other DNA
cagcagcacaattttcagttgaactagagaatatggagacaaagaaagtgtttccggaggaacaaaaggaatttg

SEQ ID NO: 130107 - DNA, 75 bp, synthetic construct
  source 1..75: mol_type = other DNA
ggacagagtgtggtaaatgtacaaccgggaagtctgccacagaaactaaaagccaggctctcttctttattactg

SEQ ID NO: 130108 - DNA, 75 bp, synthetic construct
  source 1..75: mol_type = other DNA
ggacaaagtgtgacggatgtacagccgggaagtctgccacaggggctgaagaaccgtctgtctgccttattactg

SEQ ID NO: 130109 - DNA, 75 bp, synthetic construct
  source 1..75: mol_type = other DNA
aatcagaattttggcaatggcatgagtgctgcagataatggtcaggtcatctctcagggggtactggctgacggt

SEQ ID NO: 130110 - DNA, 75 bp, synthetic construct
  source 1..75: mol_type = other DNA
accggtgataacaagctcctggtactgtgtctggtgcagtgctcattacagtggggataaatactgtgcttcatg

SEQ ID NO: 130111 - DNA, 75 bp, synthetic construct
  source 1..75: mol_type = other DNA
acaacggtaaacggtgcagtctggtctgccagaccgatagatatattacagaacatcctggtcgaggtactggca

SEQ ID NO: 130112 - DNA, 75 bp, synthetic construct
  source 1..75: mol_type = other DNA
cagagcgtgacggatgtacagtcaggaacgttgccacagtggcttaaaacccgcctttccacattacttctgatg

SEQ ID NO: 130113 - DNA, 75 bp, synthetic construct
  source 1..75: mol_type = other DNA
caggaacgctgccacaggggctgaaagcccgactctcttctctgttactgatgaatcagaattttggcaatggca

SEQ ID NO: 130114 - DNA, 75 bp, synthetic construct
  source 1..75: mol_type = other DNA
gaactgcggttgccggcggagggtacacctgcagcatggcaggcagggctgaatgtgacggtcacggtacagtga

SEQ ID NO: 130115 - DNA, 75 bp, synthetic construct
  source 1..75: mol_type = other DNA
tcgcgcctctgtcccggtgcgtgacccggagacgggaaacgtgtcgggacagctttctttcaccctgaatcaggg

SEQ ID NO: 130116 - DNA, 75 bp, synthetic construct
  source 1..75: mol_type = other DNA
caaattttgagcttcgattaccagcggaaaacaccccggctcgatgggaagctagtttaaatgtgacagtgactg

SEQ ID NO: 130117 - DNA, 75 bp, synthetic construct
  source 1..75: mol_type = other DNA
ccgcctttccacattacttctgatgaaccagggttttggcaatggcatgaatgcggcggataacggacaggttat

SEQ ID NO: 130118 - DNA, 75 bp, synthetic construct
  source 1..75: mol_type = other DNA
cagagtgtgaccgatgtgcagtcagaaacattgcctcagtggctaaaaacccgcctttccacactacttctgatg

SEQ ID NO: 130119 - DNA, 75 bp, synthetic construct
  source 1..75: mol_type = other DNA
catgagtcgtgatttcttcaaatggatggctgatcaagatacgagtaaggagtattggaaagcgccaggaagtgg

SEQ ID NO: 130120 - DNA, 75 bp, synthetic construct
  source 1..75: mol_type = other DNA
ggatcatatggtcggaacacagctacgcaaggcttgagcgatctggatatgatttttcagctaccatattccgag

SEQ ID NO: 130121 - DNA, 75 bp, synthetic construct
  source 1..75: mol_type = other DNA
gcatgaaatggcgaccccaaaacgcgaatggtcggctaagcaaaaatggcgggagatttatggatcaacatttcc

SEQ ID NO: 130122 - DNA, 75 bp, synthetic construct
  source 1..75: mol_type = other DNA
atggcatgtcaagatttaatgatagtgattatcattaacatgatgaagggggagttataccgttcggaaagcctg

SEQ ID NO: 130123 - DNA, 75 bp, synthetic construct
  source 1..75: mol_type = other DNA
tggtgaataccggagggaacaaaaggcaggtccccgcaaaacgtcaaaaccgcggctcccaaaactcaacgggtg

SEQ ID NO: 130124 - DNA, 75 bp, synthetic construct
  source 1..75: mol_type = other DNA
tcatcagtctgtcagctcgtgttgtccgtgaatgtgatgaattcagctatgaacttggccttgatgaaaaactgg

SEQ ID NO: 130125 - DNA, 75 bp, synthetic construct
  source 1..75: mol_type = other DNA
tacgggaagtacagcacaacacatcgatttattacggaacagggcaatggagccttgaaattacatctatttacc

SEQ ID NO: 130126 - DNA, 75 bp, synthetic construct
  source 1..75: mol_type = other DNA
tgaatataaaaacacacgttcaaaactggaagcattaatcgtctggatcattaaccaaagtgctattcctgttat

SEQ ID NO: 130127 - DNA, 75 bp, synthetic construct
  source 1..75: mol_type = other DNA
tggtttgaacacgaccagcgctcagtggcgcaacatgtactgatgagctgtgcccatctggatccggaagtcaac

SEQ ID NO: 130128 - DNA, 75 bp, synthetic construct
  source 1..75: mol_type = other DNA
acacaaaatatctgcttttgttgcaaagaagaatgggacgccagaacgtccattagtgtaccttttagttgaatg

SEQ ID NO: 130129 - DNA, 75 bp, synthetic construct
  source 1..75: mol_type = other DNA
agagaaagggtttgcaggacatcccgcatttagtctgaaaagtgaagaacatacgaacaacgtgcttgacccgtt

SEQ ID NO: 130130 - DNA, 75 bp, synthetic construct
  source 1..75: mol_type = other DNA
tgctgctgatttacctagtggatctggtggacgccacggcgctaccgtcgctggcagaacagtttcatgttcagg

SEQ ID NO: 130131 - DNA, 75 bp, synthetic construct
  source 1..75: mol_type = other DNA
gcgtaaagccagctggcactgcaggcaatgtcagcacgattattatggagaacgctattgtacacactgccatac

SEQ ID NO: 130132 - DNA, 75 bp, synthetic construct
  source 1..75: mol_type = other DNA
gcagtacgacactgaacttccctggtttgaacacactgacgacaggctgacagagcacggtcaacagtgccctta

SEQ ID NO: 130133 - DNA, 75 bp, synthetic construct
  source 1..75: mol_type = other DNA
tacgatcgctacagctgccacctttgcggcagtgcactcagataccacccgcagtacgacactgagcgtccctgg

SEQ ID NO: 130134 - DNA, 75 bp, synthetic construct
  source 1..75: mol_type = other DNA
ctttggtcagttgaagcaatccatcactctgccaccgcatctcgataccggaagcagcaacttcgcactgcacac

SEQ ID NO: 130135 - DNA, 75 bp, synthetic construct
  source 1..75: mol_type = other DNA
ctgtatctgaacaaccagcaccagttaatttcctttgaaatcattcactcagggacaattaattcctgcgaaatc

SEQ ID NO: 130136 - DNA, 75 bp, synthetic construct
  source 1..75: mol_type = other DNA
caatgtcaccacgattattatggggagcagtactgcacacactgtcatacagggcgcttcagtgaggagatggtt

SEQ ID NO: 130137 - DNA, 75 bp, synthetic construct
  source 1..75: mol_type = other DNA
cgcccgtactgcacaggccgcaccttatgctcactacacctgccacttgtgtggcagtgcactcagataccatcc

SEQ ID NO: 130138 - DNA, 75 bp, synthetic construct
  source 1..75: mol_type = other DNA
caatgtcaccacgattattatggggaacgctattgtacacactgtcatacagggcgtttcagtgaggaagtcgtg

SEQ ID NO: 130139 - DNA, 75 bp, synthetic construct
  source 1..75: mol_type = other DNA
ctgttgattaaacgtctgcagcaattcgtaccggatgccttacctgtggtgcgtaaagcccgctggtactgcaga

SEQ ID NO: 130140 - DNA, 75 bp, synthetic construct
  source 1..75: mol_type = other DNA
atgtacgcaaaatcttttctcgcacttaatggcaacggacgtctgactggtgcccgtaccgcacagactgcacct

SEQ ID NO: 130141 - DNA, 75 bp, synthetic construct
  source 1..75: mol_type = other DNA
atgtacgcaaaatcctttattgcattcgatggcaatggacatctgaccggtgcccgtactgcacagactgcgcca

SEQ ID NO: 130142 - DNA, 75 bp, synthetic construct
  source 1..75: mol_type = other DNA
agaatacgacacggagcgcccatggtttgaacatatcagccacaacatgacggaaaatggacagcaacactgccc

SEQ ID NO: 130143 - DNA, 75 bp, synthetic construct
  source 1..75: mol_type = other DNA
aatcaccagcaatccgtcgcactgtatcgcctggtagataccactctcatcagcgaagaaaagacattgccattt

SEQ ID NO: 130144 - DNA, 75 bp, synthetic construct
  source 1..75: mol_type = other DNA
gcacatgtcgcgcagatgtacaacctgccgctgattgtcgatgccgccgccgaagaggatttacgtgcctgggtg

SEQ ID NO: 130145 - DNA, 75 bp, synthetic construct
  source 1..75: mol_type = other DNA
atcggagtctaccaaagccgcaataaacactcttattcgcatggggttcacatggaacggtggagcctactggca

SEQ ID NO: 130146 - DNA, 75 bp, synthetic construct
  source 1..75: mol_type = other DNA
aaatttggtggtggaatgagcgcagtggataacgggcaggttatcagtcaggggattcttgcggatggcagagtc

SEQ ID NO: 130147 - DNA, 75 bp, synthetic construct
  source 1..75: mol_type = other DNA
tattgtcggtgtttattttgttttattctgttagtgcattctcaaatatccttgatggcggagagataagatttc

SEQ ID NO: 130148 - DNA, 75 bp, synthetic construct
  source 1..75: mol_type = other DNA
ctgtgtgaatacgctaaccactctgcgcccttcaccactggcgaagggaaacccgcagcacactaatctggtcga

SEQ ID NO: 130149 - DNA, 75 bp, synthetic construct
  source 1..75: mol_type = other DNA
gatgaaggcacctgatgaaacggccttctttcgtgattgcaatcgcctgagctggtggtatgcagataacgcttg

SEQ ID NO: 130150 - DNA, 75 bp, synthetic construct
  source 1..75: mol_type = other DNA
tatcgtcagcaacctggttaccattattcagcaacagctgatttaccgtggtctggaaaaacgtggcctgcatag

SEQ ID NO: 130151 - DNA, 75 bp, synthetic construct
  source 1..75: mol_type = other DNA
tttgcactgtggatccacgacctgtctgcacaggacccgtactacatcctgccgatcctgatgggcgtaacgatg

SEQ ID NO: 130152 - DNA, 75 bp, synthetic construct
  source 1..75: mol_type = other DNA
tggtcgcactgctgcatgagcatctggatgccctcggccatatccagttgctgggcttcaaccatgtgctgatca

SEQ ID NO: 130153 - DNA, 75 bp, synthetic construct
  source 1..75: mol_type = other DNA
atgaccgccgcgcattctggaacacccgtttacggtttaaccgtgggcgtggggctaaataaagatcagcccata

SEQ ID NO: 130154 - DNA, 75 bp, synthetic construct
  source 1..75: mol_type = other DNA
ccaaataatgtacgagagctggccagtgcagcggaactatttaccgtaggagtattaccgctgacagaaacagca

SEQ ID NO: 130155 - DNA, 75 bp, synthetic construct
  source 1..75: mol_type = other DNA
cgctgaaatgggatgacgccgctggcgtattcaccgccaaacacggcaccgaagccaccagcaaaatcaccaacg

SEQ ID NO: 130156 - DNA, 75 bp, synthetic construct
  source 1..75: mol_type = other DNA
ctgaaaacagtattgcgattggtggccaaaccagtgtaacaggtgctaactccgttgccctgggcacaggttctg

SEQ ID NO: 130157 - DNA, 75 bp, synthetic construct
  source 1..75: mol_type = other DNA
atcggtctatagcgatcggaagcggaagtaacgcaaccggaggctattctatagcgatggggatagccgctcacg

SEQ ID NO: 130158 - DNA, 75 bp, synthetic construct
  source 1..75: mol_type = other DNA
ctacatcgaagataacggtgcgggtattaactatgtacgtaccaacgacagcggcttagcgttcaacgatgccag

SEQ ID NO: 130159 - DNA, 75 bp, synthetic construct
  source 1..75: mol_type = other DNA
taaatatcgtcaaatcatcaacgtcgcggatggttctgaagcccatgacgctgttactgttcgccagttgcaaaa

SEQ ID NO: 130160 - DNA, 75 bp, synthetic construct
  source 1..75: mol_type = other DNA
ggctggcaaggtatcttctgacagcaccgatgccattaacggatcacaactttatggcgtagcggattcatttac

SEQ ID NO: 130161 - DNA, 75 bp, synthetic construct
  source 1..75: mol_type = other DNA
tcgcatttggcagacaatcacttgccagtgcagcaaacgctattgcgataggtgctgagagtaaagccgctgaaa

SEQ ID NO: 130162 - DNA, 75 bp, synthetic construct
  source 1..75: mol_type = other DNA
cgccaaatcatcaacgtagccgatggttccgaagcccatgacgccgttacggttcgccagttgcagaacgctatt

SEQ ID NO: 130163 - DNA, 75 bp, synthetic construct
  source 1..75: mol_type = other DNA
tggcgacatcgtaaccaccggtagcaccaagtacttcaagactaacaccgatggcgtagatgccaatgcccaggg

SEQ ID NO: 130164 - DNA, 75 bp, synthetic construct
  source 1..75: mol_type = other DNA
gctacgacaccaaagctgatggttccgttgattacagtaacatcaccctcggtggtggcaatggcggtacaacgc

SEQ ID NO: 130165 - DNA, 75 bp, synthetic construct
  source 1..75: mol_type = other DNA
aaaatattaccctcgccgcactcaataaatttaccggcggtattagccagcttgatgacgcggcagagcaaaaat

SEQ ID NO: 130166 - DNA, 75 bp, synthetic construct
  source 1..75: mol_type = other DNA
gtattctggaatccatccagcaactcaaagttaaaacatcctcccccgaccttgctattggacgtttaagcggtg

SEQ ID NO: 130167 - DNA, 75 bp, synthetic construct
  source 1..75: mol_type = other DNA
ttctcagactacccgtggtgcgcagaccaactacactgcctacaacatggacgcaccgcagaactctgtgggtga

SEQ ID NO: 130168 - DNA, 75 bp, synthetic construct
  source 1..75: mol_type = other DNA
agccccgacctatactatcggttcgaaaacgtacaacaacgtaggtgatgcccttaacgcgattaactcatcatt

SEQ ID NO: 130169 - DNA, 75 bp, synthetic construct
  source 1..75: mol_type = other DNA
ggtgacgactccctgctgtggaacaaagcggctggcgcgttcagcgccgcgcacggtaccgaagctaccagcaag

SEQ ID NO: 130170 - DNA, 75 bp, synthetic construct
  source 1..75: mol_type = other DNA
gactattttggcggtaacgcctcggttgatgaaaacggtgtatttactggcccgtcctacaccatcggtagcaac

SEQ ID NO: 130171 - DNA, 75 bp, synthetic construct
  source 1..75: mol_type = other DNA
aatgggtgccgcaagcgaagccaatggattatatagtttggcattaggcgcaagcagcgtagctaacgcggacaa

SEQ ID NO: 130172 - DNA, 75 bp, synthetic construct
  source 1..75: mol_type = other DNA
cagttgaaagtgacggacgcacaggtttcccagaacacccagagcattactaacctgaatactcaggtaacgaat

SEQ ID NO: 130173 - DNA, 75 bp, synthetic construct
  source 1..75: mol_type = other DNA
atgatcctgataatgttataaactctgacgggacgcttaaagctcccacatattatctacaaagtggccagtaca

SEQ ID NO: 130174 - DNA, 75 bp, synthetic construct
  source 1..75: mol_type = other DNA
tttaaagcgcaaaattgtcaatatgggtaatggtgacatcaataatgtcagctccgatgccatcaatggatcaca

SEQ ID NO: 130175 - DNA, 75 bp, synthetic construct
  source 1..75: mol_type = other DNA
accagcgtcgtatcaccaacgttgctgccggtgttaatgccaccgatgcggttaacgtttcacaactgaagtctt

SEQ ID NO: 130176 - DNA, 75 bp, synthetic construct
  source 1..75: mol_type = other DNA
caacgtttctgctggcgtgaataacaacgacgcggtgaactatgcgcagttgaagcaaagtgtgcaggaaacgaa

SEQ ID NO: 130177 - DNA, 75 bp, synthetic construct
  source 1..75: mol_type = other DNA
tccactgagggtggtgttcgttacagtacgaatgaagacggtacgattaactacagtacgttaaacctgggtgat

SEQ ID NO: 130178 - DNA, 75 bp, synthetic construct
  source 1..75: mol_type = other DNA
ggacgattctctgctatgggatggcactgcattcagtgccaaacacggcaccagcaccaccaacaaaatcaccaa

SEQ ID NO: 130179 - DNA, 75 bp, synthetic construct
  source 1..75: mol_type = other DNA
ctgactggcatgtcctggtcgctctggcagcatgtgcgctggcctatggtggtgcggtcgtcgccaatatctaca

SEQ ID NO: 130180 - DNA, 75 bp, synthetic construct
  source 1..75: mol_type = other DNA
tgaaagctaacggtttaatggaagcttctaccatagcggcgattttgctcggttccgtagccggtggtgtgctgg

SEQ ID NO: 130181 - DNA, 75 bp, synthetic construct
  source 1..75: mol_type = other DNA
cagcacttgtttttctgacttcggcatgtgttcatgcctcgtctccggcatttattgttgaccgccttccactga

SEQ ID NO: 130182 - DNA, 75 bp, synthetic construct
  source 1..75: mol_type = other DNA
atcatagtggtatgccatactgggcacaggggagtaccacagaaatgcgtcccaaaaatattgcattcaactaca

SEQ ID NO: 130183 - DNA, 75 bp, synthetic construct
  source 1..75: mol_type = other DNA
agggcatcacagcggtatgccttactgggcccagggaagcacaacggaaatgcgccccaaaaacattgcctttaa

SEQ ID NO: 130184 - DNA, 75 bp, synthetic construct
  source 1..75: mol_type = other DNA
atcccggtcgtgcccattggcattggcttcggtgcgctgtttgcgctggcaataacggcgctgtggatctggcag

SEQ ID NO: 130185 - DNA, 75 bp, synthetic construct
  source 1..75: mol_type = other DNA
acttcatcgtgcaccgtcttatctggcctcagtgctttcgggagcgacagggcgttcatcgcaggcgtcttcaga

SEQ ID NO: 130186 - DNA, 75 bp, synthetic construct
  source 1..75: mol_type = other DNA
tggcctgcttagaggtgttttccttgggaggaccatctgatgacgatgatgcagctaatactgcatactatgcaa

SEQ ID NO: 130187 - DNA, 75 bp, synthetic construct
  source 1..75: mol_type = other DNA
caggacgcgtgccgtattgagtttcatctcgactttgagtttaccaataagttgattgaactcgcctttggtcgt

SEQ ID NO: 130188 - DNA, 75 bp, synthetic construct
  source 1..75: mol_type = other DNA
tatatttacgaggtacagacagggagttctgaaggttcagggctggcgctggcagcaaaactgttatcagggcgt

SEQ ID NO: 130189 - DNA, 75 bp, synthetic construct
  source 1..75: mol_type = other DNA
aaaaaatggtttcatgggtatatacgccacttcatcgtgcaccgtcttatctggcctcagtgctttcgggagcga

SEQ ID NO: 130190 - DNA, 75 bp, synthetic construct
  source 1..75: mol_type = other DNA
cctgaacgtcaatcagcagttaagtaactttgtcaaaacggatacgggcgtgaatgattcgccaacgttgctcaa

SEQ ID NO: 130191 - DNA, 75 bp, synthetic construct
  source 1..75: mol_type = other DNA
gtattggcggcactgactacactaacgtcggggatgctctggccgcaattaacacttcatttagtgattctctcg

SEQ ID NO: 130192 - DNA, 75 bp, synthetic construct
  source 1..75: mol_type = other DNA
ccttaaggacgattccctgctgtggaacaaagcggctggcgcattcagcgccgcgcacggcaccgaagccaccag

SEQ ID NO: 130193 - DNA, 75 bp, synthetic construct
  source 1..75: mol_type = other DNA
taatggttctcagactacccgtggtgcgcagaccaactacactgcctacaacatggatgcaccgcagaactctgt

SEQ ID NO: 130194 - DNA, 75 bp, synthetic construct
  source 1..75: mol_type = other DNA
atcaccaatatcctggacggtacagtcactgcaaccagttctgatgccattaacggtagccaactttatgactta

SEQ ID NO: 130195 - DNA, 75 bp, synthetic construct
  source 1..75: mol_type = other DNA
cgggtggtgattattcgatcgcgcaaggggataaatccaatgctgctggtctgaatgccattgcagtgggaagaa

SEQ ID NO: 130196 - DNA, 75 bp, synthetic construct
  source 1..75: mol_type = other DNA
ttataactcttttgccgaaggcgatagcagcgtggccatgggtcagggcagctacagcgacgttgatacgggtat

SEQ ID NO: 130197 - DNA, 75 bp, synthetic construct
  source 1..75: mol_type = other DNA
gccaacgcgcagggtaaagatagtgttgcgattggttctggttccattgctgccgctgacaacagcgtcgcgctg

SEQ ID NO: 130198 - DNA, 75 bp, synthetic construct
  source 1..75: mol_type = other DNA
ttactaacctgaacaatcaggtgacgaatctggatactcgcgttaccaatatcgaaaacggcattggcgatatcg

SEQ ID NO: 130199 - DNA, 75 bp, synthetic construct
  source 1..75: mol_type = other DNA
aacgatgccagcgcttcaggtattggcgctacggctgtgggttataacgctgtcgcctcaggcgaaagcagcgta

SEQ ID NO: 130200 - DNA, 75 bp, synthetic construct
  source 1..75: mol_type = other DNA
agttgcaaaacgccattggtgcagtagcaaccacaccaaccaaatactatcacgccaactcaacggctgaagact

SEQ ID NO: 130201 - DNA, 75 bp, synthetic construct
  source 1..75: mol_type = other DNA
ctatcggcgcaggatcgaccacagatgcaagcaatacagtttcagttggcaacagcacaacaaaacgcaaaattg

SEQ ID NO: 130202 - DNA, 75 bp, synthetic construct
  source 1..75: mol_type = other DNA
ggaatccggcgacaggcagttacaccgttgccagcgaaacggcgaagagccgtggtaaaaaaagcgggcgcagta

SEQ ID NO: 130203 - DNA, 75 bp, synthetic construct
  source 1..75: mol_type = other DNA
ggggagcaacggacgttttctggttttgcccgaggggatgaaagccgaaacgaactggacgatggaaaacgggaa

SEQ ID NO: 130204 - DNA, 75 bp, synthetic construct
  source 1..75: mol_type = other DNA
tatctctgcaaaagatgaatttgccaacatcaaaaacatcagcgcacaggacattctcaacgcacaccgctttcc

SEQ ID NO: 130205 - DNA, 75 bp, synthetic construct
  source 1..75: mol_type = other DNA
ccgcagcagcatatctacgggctgccagactatatcggtggcgtacactcggcattgcttaacagtgaagccgtg

SEQ ID NO: 130206 - DNA, 75 bp, synthetic construct
  source 1..75: mol_type = other DNA
atgagccgccgtgcgctctactcttacggtctgttactgccgcacaacgcgcaaggcaatgtgggtaatggcctt

SEQ ID NO: 130207 - DNA, 75 bp, synthetic construct
  source 1..75: mol_type = other DNA
acgccgcccattgaccgggaagcgctggcaaaattgcccgacatcgcaacgtaccacggcgcatgtctgggggcg

SEQ ID NO: 130208 - DNA, 75 bp, synthetic construct
  source 1..75: mol_type = other DNA
atccgcaacaggcgatttatggtctgccggattatatcagcggtatccattctgccctgcttaacggtgaggcaa

SEQ ID NO: 130209 - DNA, 75 bp, synthetic construct
  source 1..75: mol_type = other DNA
cgctgtatctgcgctgccgaaaagacggggcgtttgctgttttgcaggaagggccagcacttatctatgaaccgg

SEQ ID NO: 130210 - DNA, 75 bp, synthetic construct
  source 1..75: mol_type = other DNA
ggtaaataccatgctggttttatctttaacccgacagagttcaccatcaacctgatgccaacatccaatgctggc

SEQ ID NO: 130211 - DNA, 75 bp, synthetic construct
  source 1..75: mol_type = other DNA
atgtcggtctggaaatgtccggtgcgccgccagcgtttcgtaccatgctcgacaccatgaaccacggtggccgta

SEQ ID NO: 130212 - DNA, 75 bp, synthetic construct
  source 1..75: mol_type = other DNA
cgtttgatctggtgggcgaggatgtgctggtctctggtgcaggcccgattggtattatggcggcggcggtggcga

SEQ ID NO: 130213 - DNA, 75 bp, synthetic construct
  source 1..75: mol_type = other DNA
atgagccgccgtgcgctctactcttacggtctgttactgccgcacaacgcgcaaggcaacgtgggcaacggcctc

SEQ ID NO: 130214 - DNA, 75 bp, synthetic construct
  source 1..75: mol_type = other DNA
atgagcaagaaacgcagaaacaaaacgtcacgcgtgacgaaaaaatcattcacgcccgcacgtggcagcacaatc

SEQ ID NO: 130215 - DNA, 75 bp, synthetic construct
  source 1..75: mol_type = other DNA
ccctggcggtcataccggaataccaagggatgggcgtgggaggacggttgatacgcactggcatcgagcacctga

SEQ ID NO: 130216 - DNA, 75 bp, synthetic construct
  source 1..75: mol_type = other DNA
tacgggtgatgggttatgacactaaggttgaagtttgcggccacggcttccgtacaatggcctgtagttcgttaa

SEQ ID NO: 130217 - DNA, 75 bp, synthetic construct
  source 1..75: mol_type = other DNA
tttgctcgctggtcagagatcgattttgaaacatcaatgtggaccatcccgcctgagcgagaaccgattcccggc

SEQ ID NO: 130218 - DNA, 75 bp, synthetic construct
  source 1..75: mol_type = other DNA
cggcgctggagttaaagcgcatccctgagttgcttgagaaaatagacggctataccggcaggccgctaacccgct

SEQ ID NO: 130219 - DNA, 75 bp, synthetic construct
  source 1..75: mol_type = other DNA
gcgctttgaagatgatggctatttttgcactattgaagtcaccgcaacttcaacagtgacgctggatactctcac

SEQ ID NO: 130220 - DNA, 75 bp, synthetic construct
  source 1..75: mol_type = other DNA
attatcaccgaatgtttcttcggctatgaaatccaggcggcggcgaccattggccgacgtttcaccatccaccac

SEQ ID NO: 130221 - DNA, 75 bp, synthetic construct
  source 1..75: mol_type = other DNA
ttaacgtggcgctgggttttgtgctgcgaacggtggttgtcaaatttattctgttttttggcctgtactttgtcg

SEQ ID NO: 130222 - DNA, 75 bp, synthetic construct
  source 1..75: mol_type = other DNA
tgaagatatcttcaaatgtggacagacgctcaaaaaaactaaacagaaatatggccattatggattaggggtaga

SEQ ID NO: 130223 - DNA, 75 bp, synthetic construct
  source 1..75: mol_type = other DNA
acacgccgccatggcggcagcggtgaccaatctgctgatattcggggatatgggtctgcttaaagtgcgcaatgg

SEQ ID NO: 130224 - DNA, 75 bp, synthetic construct
  source 1..75: mol_type = other DNA
tgtgcaggcggcactggaagatctcgtttatccgccaggtgaagtggtgtttgtggccatttatgacccgcaaca

SEQ ID NO: 130225 - DNA, 75 bp, synthetic construct
  source 1..75: mol_type = other DNA
tgatgtcgttcgtaagagtggcgcattggatatcctggtggtaaatgcaggtattggcgtctttggcgatgccct

SEQ ID NO: 130226 - DNA, 75 bp, synthetic construct
  source 1..75: mol_type = other DNA
tgattgccgacagcatccgcatcacacatcgccatgccgacacagaagacaccgtgctggaaattcagcggctgg

SEQ ID NO: 130227 - DNA, 75 bp, synthetic construct
  source 1..75: mol_type = other DNA
tgatagctgacagcgttcgcatcacacaccgccatgccaacacagaagacaccgtactggaaattcagcggctgg

SEQ ID NO: 130228 - DNA, 75 bp, synthetic construct
  source 1..75: mol_type = other DNA
ctgatagccaacacagaaatcgttgatgcagccagtaacaattttgtgagtatttcagcagacagtatcagcagc

SEQ ID NO: 130229 - DNA, 75 bp, synthetic construct
  source 1..75: mol_type = other DNA
tggccagccaggaccggaagcgcattcgtgagtacattgcggagcagaacctgatggccgccattgaactggacg

SEQ ID NO: 130230 - DNA, 75 bp, synthetic construct
  source 1..75: mol_type = other DNA
tggcactcgccgaagaagctgtaaccattgtcgacgggcgagtgccggtattgattggcgtcggttccccttcca

SEQ ID NO: 130231 - DNA, 75 bp, synthetic construct
  source 1..75: mol_type = other DNA
atggtaaagaactcaccgcgccaattagcgcccatcagcgggtaggggaaattgaactttacgaccgtgataaac

SEQ ID NO: 130232 - DNA, 75 bp, synthetic construct
  source 1..75: mol_type = other DNA
gcggcgttttacgattattgcattgaagttactcgcaggaattttgtgaagatttttgaggagggtaaatctctt

SEQ ID NO: 130233 - DNA, 75 bp, synthetic construct
  source 1..75: mol_type = other DNA
atgatggagatattctggaccatgctggccagccaggacaggaagcgcattcgtgaatacattgcggagcagaac

SEQ ID NO: 130234 - DNA, 75 bp, synthetic construct
  source 1..75: mol_type = other DNA
accgttgggcaacttatgggaatgcgatacaaaggctgggagtcaggctatgaggacgcatttgtctatgacctg

SEQ ID NO: 130235 - DNA, 75 bp, synthetic construct
  source 1..75: mol_type = other DNA
ctggtccttaagttttcacccggttttaaccactacaatgttgatagcaaagcgctaatgagcttccgttctctt

SEQ ID NO: 130236 - DNA, 75 bp, synthetic construct
  source 1..75: mol_type = other DNA
ttatctgggtaccggtggtgaatttagccaaatgaatacagcccagcgcatggcactcgccgaagaagctgtaac

SEQ ID NO: 130237 - DNA, 75 bp, synthetic construct
  source 1..75: mol_type = other DNA
caccggtatccagcacgtttcatcgtgacggaacccttgataaaaaggcaatgcgcgaagttgccgacttcctga

SEQ ID NO: 130238 - DNA, 75 bp, synthetic construct
  source 1..75: mol_type = other DNA
ccaggggcggtagcgttgttttttatgagcatcataatgatatgattgtaataaattttatattcccagaacacg

SEQ ID NO: 130239 - DNA, 75 bp, synthetic construct
  source 1..75: mol_type = other DNA
cggaagagggcatctggatgaccgacgttcctgtaccggaactcgggcataacgatctgctgattaaaatccgta

SEQ ID NO: 130240 - DNA, 75 bp, synthetic construct
  source 1..75: mol_type = other DNA
cggttaaacccgccgtcgacggtgaacatcttacgctccgggtgagctggaaaggctctgacggacagccccgga

SEQ ID NO: 130241 - DNA, 75 bp, synthetic construct
  source 1..75: mol_type = other DNA
accatcagacggattgattttgatagccaaaacacccgttgtgttgccctgatcagcgccatgaacgaacacgga

SEQ ID NO: 130242 - DNA, 75 bp, synthetic construct
  source 1..75: mol_type = other DNA
ggtattatggcggcggcggtggcaaaacacgtcggcgcacgcaatgtggtgatcaccgacgttaacgaatatcgc

SEQ ID NO: 130243 - DNA, 75 bp, synthetic construct
  source 1..75: mol_type = other DNA
aaatccctgacaatatttccgacgacttagccgcaattttcgacccgttcggtaatgcggtacatacggcgctgt

SEQ ID NO: 130244 - DNA, 75 bp, synthetic construct
  source 1..75: mol_type = other DNA
atatgtcggtgaagtggtaggtattggtcaggaagtgaaaggcttcaagattggcgatcgcgtttctggcgaagg

SEQ ID NO: 130245 - DNA, 75 bp, synthetic construct
  source 1..75: mol_type = other DNA
tgcgtaataatgagtcctgtccaaagtgtggggctgaattggttattcgatccgggaaacatgggccgtttctcg

SEQ ID NO: 130246 - DNA, 75 bp, synthetic construct
  source 1..75: mol_type = other DNA
tgggcgcggacagcgcaaaaggtcgtgaagaagaggcaagaaaacttttgcgctgggggcagcaaaactttacta

SEQ ID NO: 130247 - DNA, 75 bp, synthetic construct
  source 1..75: mol_type = other DNA
ttatcgtctggttttgcggcggaaaacattcctttttcacctcagcctccagagattcatgccgggtcctgggta

SEQ ID NO: 130248 - DNA, 75 bp, synthetic construct
  source 1..75: mol_type = other DNA
gggattgtgtcgattggattgcatcatccggttgccaactgtctcgattatgcccaactgttaaaggaaaagtac

SEQ ID NO: 130249 - DNA, 75 bp, synthetic construct
  source 1..75: mol_type = other DNA
ctacgtccgtcctctgaaatcttcagcggatggacatatcgtcaaagttctggaggggcaggtttgccctgcatg

SEQ ID NO: 130250 - DNA, 75 bp, synthetic construct
  source 1..75: mol_type = other DNA
tggaggggcaagtttgccctgcatgtggcgcaaatctggtattacgccagggacgctttggtatgtttattggtt

SEQ ID NO: 130251 - DNA, 75 bp, synthetic construct
  source 1..75: mol_type = other DNA
tgcactggtagcatcatccccggctgcactggacacgctgaatgaattggcggcagcgctgggaaatgatccaaa

SEQ ID NO: 130252 - DNA, 75 bp, synthetic construct
  source 1..75: mol_type = other DNA
taaccaatgtcggggccgcgaagctggcgaacgctacggcattgggtgaacaggttgaaattactcagatggcgg

SEQ ID NO: 130253 - DNA, 75 bp, synthetic construct
  source 1..75: mol_type = other DNA
ctgccgaagagtacccaaaactggcaaaggcttacccaaagttaaaattaccggatttgcgcggtgagtttattc

SEQ ID NO: 130254 - DNA, 75 bp, synthetic construct
  source 1..75: mol_type = other DNA
ggggccaaataataatactgtcggcgcatttacctcttcaacattgacaccaaatctcgcatcaattgcgacagg

SEQ ID NO: 130255 - DNA, 75 bp, synthetic construct
  source 1..75: mol_type = other DNA
acaccttcaggcgcaggaatcctgtcggcttctgcaattacatcaaatcagttccgcggttttctaagcgatagc

SEQ ID NO: 130256 - DNA, 75 bp, synthetic construct
  source 1..75: mol_type = other DNA
agcgtcagcggtgaaggcggtgcatcgtactggggaggcggtggacgtgcaggcgctggcggtggcgttagaggc

SEQ ID NO: 130257 - DNA, 75 bp, synthetic construct
  source 1..75: mol_type = other DNA
tactacgtgtttccagctcagaaggcgttaccgtcggcccggtactgatgggcgtggcgaaaccggttcacgtat

SEQ ID NO: 130258 - DNA, 75 bp, synthetic construct
  source 1..75: mol_type = other DNA
gcctgtatgaacctgctggtggcgctgggactgcaaaaacacaacatcgttgtttgcgactcaaaaggtgttatt

SEQ ID NO: 130259 - DNA, 75 bp, synthetic construct
  source 1..75: mol_type = other DNA
cccgtcgtcgagcaaaatgcgtcaggcgctggaactggtcagggaacgtgcaccagaactgatgattgatggtga

SEQ ID NO: 130260 - DNA, 75 bp, synthetic construct
  source 1..75: mol_type = other DNA
cccgtcgtcgagcaaaatgcgtcaagcgctggaactggtcagagagcgtgcgccagaactgatgattgatggtga

SEQ ID NO: 130261 - DNA, 75 bp, synthetic construct
  source 1..75: mol_type = other DNA
ccggaatacatcattcctaaaccgttcgatccgcgtctgatcgtcaagatcgcgccagcggtggcaaaagcggca

SEQ ID NO: 130262 - DNA, 75 bp, synthetic construct
  source 1..75: mol_type = other DNA
ggcgtggcgaaaccggttcacgtgttaacgccgatcgcatcggtacgtcgtatcgtcaacatggtggcgctggcc

SEQ ID NO: 130263 - DNA, 75 bp, synthetic construct
  source 1..75: mol_type = other DNA
atgcgattcgccagaacaaatacagtagttcgtctggcaacaaaagactatgcgcaaccaaaagaccagacactg

SEQ ID NO: 130264 - DNA, 75 bp, synthetic construct
  source 1..75: mol_type = other DNA
cgctgaatatgctctatatcgacccgcagaacagcagccagattattgctgaacaggtgatccctgaaaatgagg

SEQ ID NO: 130265 - DNA, 75 bp, synthetic construct
  source 1..75: mol_type = other DNA
cctgtttgatgagtcaggggcattgattgccgtgggcaactgcccggaaagctataaaccgcaactggctgaagg

SEQ ID NO: 130266 - DNA, 75 bp, synthetic construct
  source 1..75: mol_type = other DNA
gcggttggtggatacgtgaagtgggcctgtttgatgagtcaggggcattgattgccgtgggaaactgcccggaaa

SEQ ID NO: 130267 - DNA, 75 bp, synthetic construct
  source 1..75: mol_type = other DNA
acagaacagcagccagattattgctgaacaggtgatccctgaaaacgagggcggttggtggatacgtgaagtggg

SEQ ID NO: 130268 - DNA, 75 bp, synthetic construct
  source 1..75: mol_type = other DNA
gaaaagtgcggctcaaagggatgttggctcaggggcaaatcagattccggatatgaatgacttcacatccagcct

SEQ ID NO: 130269 - DNA, 75 bp, synthetic construct
  source 1..75: mol_type = other DNA
cctgatttacgtggtgagtttattcgtggctgggatgacgggcgtggtattgatgctgtacgtgccttgctaagt

SEQ ID NO: 130270 - DNA, 75 bp, synthetic construct
  source 1..75: mol_type = other DNA
atatggagccaactactggatgttcagcccgatgtacagagcatctgatctgagtaataccagttttgcattcat

SEQ ID NO: 130271 - DNA, 75 bp, synthetic construct
  source 1..75: mol_type = other DNA
gtggttggtggatacgtgaagtgggcctgtttgatgagtccggggtattgattgccgtgggaaactgcccggaaa

SEQ ID NO: 130272 - DNA, 75 bp, synthetic construct
  source 1..75: mol_type = other DNA
cgcttaccaatttgagtggaaaggatgtagctggtcttctcacataccttggtttgggggaattggctctggctg

SEQ ID NO: 130273 - DNA, 75 bp, synthetic construct
  source 1..75: mol_type = other DNA
tatgtggatgacaaggtactggaactgaaggtgtacgtggatgacctgatggcaaaacatcttgccgcaccggac

SEQ ID NO: 130274 - DNA, 75 bp, synthetic construct
  source 1..75: mol_type = other DNA
caccgaaaattattcaatatgggaatcagtaggctcgtttaagggggcagtggtgcctttgaacccctcaacgaa

SEQ ID NO: 130275 - DNA, 75 bp, synthetic construct
  source 1..75: mol_type = other DNA
ggtttgggagaaggttcggcattacctgttggtgtacctgttccatggccttcagccactccgccgacaggctgg

SEQ ID NO: 130276 - DNA, 75 bp, synthetic construct
  source 1..75: mol_type = other DNA
ttacgccgacattatcgacgcaaacaatgagaattacattcagcatcccttttcctaaaaaagtggactgcgcca

SEQ ID NO: 130277 - DNA, 75 bp, synthetic construct
  source 1..75: mol_type = other DNA
aatggtgggttctgcacctgctgcactggatacattgaatgaactggcggcggcactggggaatgatccgaactt

SEQ ID NO: 130278 - DNA, 75 bp, synthetic construct
  source 1..75: mol_type = other DNA
tcgctttctttaatgctgcaaatgctggcgtacctgtggcagcagaaaaccgcccacgtaatatctcgtttaatc

SEQ ID NO: 130279 - DNA, 75 bp, synthetic construct
  source 1..75: mol_type = other DNA
gaacaggtgatccctgaaaatgagggcggttggtggatacgtgaagtgggcctgtttgatgaatccggggcattg

SEQ ID NO: 130280 - DNA, 75 bp, synthetic construct
  source 1..75: mol_type = other DNA
cgaaattattgagggttatggcgcttataactggacattcgacgcatctcgctcagttcgcacagcatctgaaac

SEQ ID NO: 130281 - DNA, 75 bp, synthetic construct
  source 1..75: mol_type = other DNA
gcgcagttgaaaaaacgtggctatgtcaacgcgggtatttacaatccgcaagggattggcggcacccatgtgatg

SEQ ID NO: 130282 - DNA, 75 bp, synthetic construct
  source 1..75: mol_type = other DNA
tgcacagcaatacgggaaaagtgagctacgttggtggaaacagtaaaggttcgtccttatttatcattctgttaa

SEQ ID NO: 130283 - DNA, 75 bp, synthetic construct
  source 1..75: mol_type = other DNA
gcgctttgaagatgacggctatttttgcaccattgaagtcactgcaacctcaacggtgacgctggatactctcac

SEQ ID NO: 130284 - DNA, 75 bp, synthetic construct
  source 1..75: mol_type = other DNA
ggagatgctattcgaaacattactggcggttttggtcagttgcgcgtaaacagcgaaataaatgcaattgttgat

SEQ ID NO: 130285 - DNA, 75 bp, synthetic construct
  source 1..75: mol_type = other DNA
gagaaaccacattgccgcacaggatcctcatacccagtatgcacagaaacataatccgacatttaccggagaacc

SEQ ID NO: 130286 - DNA, 75 bp, synthetic construct
  source 1..75: mol_type = other DNA
tcaacgcgggtatttacaatccgcaagggattggcggcacccatgtgatgtatgtacttcatcacgcgcataaac

SEQ ID NO: 130287 - DNA, 75 bp, synthetic construct
  source 1..75: mol_type = other DNA
acctcgaagacattaaagcgccagaatgtttctatattgaacagaaactgcgcgagcggatgaatattccggtat

SEQ ID NO: 130288 - DNA, 75 bp, synthetic construct
  source 1..75: mol_type = other DNA
atctggcgctggcctactcaccaggcgttgccgcaccttgtcttgaaatcgaaaaagacccgttaaaagcctaca

SEQ ID NO: 130289 - DNA, 75 bp, synthetic construct
  source 1..75: mol_type = other DNA
cctgatttacgaggtgaatttattcgtggctgggatgatgggcgcggtattgatacaggacgtgctttattgagc

SEQ ID NO: 130290 - DNA, 75 bp, synthetic construct
  source 1..75: mol_type = other DNA
atctggcgctggcttactcaccgggtgtcgccgcgccctgtcttgaaatcgaaaaagatccgttaaaagcttaca

SEQ ID NO: 130291 - DNA, 75 bp, synthetic construct
  source 1..75: mol_type = other DNA
gaagctgcccgcattagttacaacttactgcgcgtttccagctcggaaggtgtgactgtcggtccggtgctgatg

SEQ ID NO: 130292 - DNA, 75 bp, synthetic construct
  source 1..75: mol_type = other DNA
gggcgttgattttgagatcgtcaataacgaatccgatccgcgctttaaagagtactggaccgaatacttccagat

SEQ ID NO: 130293 - DNA, 75 bp, synthetic construct
  source 1..75: mol_type = other DNA
tgatgctggacgtgctttattgagcattcagactgggatgctggaaaaacatcgccatattgttgttgccaacga

SEQ ID NO: 130294 - DNA, 75 bp, synthetic construct
  source 1..75: mol_type = other DNA
cctgatttacgtggtgagttcattcgtggctgggatgatgaacgtggtgtggatagtgggcgaactctgctttca

SEQ ID NO: 130295 - DNA, 75 bp, synthetic construct
  source 1..75: mol_type = other DNA
cgctgactaatttgagtggaaaggatgttgctggtcttctcgcataccttggtttaggagaaggctctgcattac

SEQ ID NO: 130296 - DNA, 75 bp, synthetic construct
  source 1..75: mol_type = other DNA
ctgggatgatgggcgtggtattgatgctgggcgtgctttattgagccttcaggctggaatgctggaaaaacaccg

SEQ ID NO: 130297 - DNA, 75 bp, synthetic construct
  source 1..75: mol_type = other DNA
actggccacatacggtgacgggggaatagttaaaacggacgaacccggtcttaaggtgccttcctcactacgagc

SEQ ID NO: 130298 - DNA, 75 bp, synthetic construct
  source 1..75: mol_type = other DNA
catatacgcaaggccgggggcttgatgctgctgatgtcggagggactctgattccatcaccaacgctacatacac

SEQ ID NO: 130299 - DNA, 75 bp, synthetic construct
  source 1..75: mol_type = other DNA
agggactgaatgcaggctttatttcaaacaatggtgttctgctgatgaacatgctggctgagccggaagctgtca

SEQ ID NO: 130300 - DNA, 75 bp, synthetic construct
  source 1..75: mol_type = other DNA
ggccggtggcctgggggtcacacagatgctgggtggcctgggggcattatcgctcagtgcgaacgtgtcaaaggc

SEQ ID NO: 130301 - DNA, 75 bp, synthetic construct
  source 1..75: mol_type = other DNA
gaatggcagctcaacactctgcgcgaagaggcgtaccgcgacacacggtcgcaggatgcagcaggtgcacaattc

SEQ ID NO: 130302 - DNA, 75 bp, synthetic construct
  source 1..75: mol_type = other DNA
actaatagcatcggatacagccgccacggtggtactgcatttaatacgggagtatcagctacggcaacggatcgt

SEQ ID NO: 130303 - DNA, 75 bp, synthetic construct
  source 1..75: mol_type = other DNA
ggacatctcgggtatcgcttccactccttcgcgtattactgtgaaacagaacggatatacagtttattcaaaaat

SEQ ID NO: 130304 - DNA, 75 bp, synthetic construct
  source 1..75: mol_type = other DNA
tgggaatcccggggatatgcgccagatatctccgggattgcctccacgccttcccgtattaccgtgaaacagaac

SEQ ID NO: 130305 - DNA, 75 bp, synthetic construct
  source 1..75: mol_type = other DNA
ggtcatcccagaacggaagacccggcgtggggctgggtgaaagccctgtcgctcagcggcgtcgatctgatggca

SEQ ID NO: 130306 - DNA, 75 bp, synthetic construct
  source 1..75: mol_type = other DNA
acgtcaatctggcttccggccatcctctttggccacggactgctactggcattaacgccggttatcgcgcaatta

SEQ ID NO: 130307 - DNA, 75 bp, synthetic construct
  source 1..75: mol_type = other DNA
catgcgcgatattcgtaacgaaaaaggcaccgcgaagcccgatcctgcggttatgaaacgactgattcaactcgg

SEQ ID NO: 130308 - DNA, 75 bp, synthetic construct
  source 1..75: mol_type = other DNA
gagggccgtctggctccccgcgcctcctccgtggtggttgccctgctggatgccgtcgccggtggagtttgctga

SEQ ID NO: 130309 - DNA, 75 bp, synthetic construct
  source 1..75: mol_type = other DNA
gcctccctgtggggaaagctgcgcgattttctgatcgcccgcttcagtctggacgaagcagaaaaagtcctgccg

SEQ ID NO: 130310 - DNA, 75 bp, synthetic construct
  source 1..75: mol_type = other DNA
ccggtactcataccgatatgcacggcaaaaaactgccgttcacgccagacgatcttgccgcctgcgtgaaagcct

SEQ ID NO: 130311 - DNA, 75 bp, synthetic construct
  source 1..75: mol_type = other DNA
gcgtttgtggtgatgattgtgctgtcgcgccatccgctggtggtggaagtgaagcgtcagttttgtcgcagcgaa

SEQ ID NO: 130312 - DNA, 75 bp, synthetic construct
  source 1..75: mol_type = other DNA
cacctgtaagttatattagcaactcttcggcattgcgaatgagtcattatgagtggttttataagtttcagcggt

SEQ ID NO: 130313 - DNA, 75 bp, synthetic construct
  source 1..75: mol_type = other DNA
gggcaatatatcgttgatgttgccgtgaataaagagcgtacgggacgtactgacctgaatatcagcaaggaagac

SEQ ID NO: 130314 - DNA, 75 bp, synthetic construct
  source 1..75: mol_type = other DNA
tttgtggctgccgttttatctctcgctgccgacactggtgatcagttatgcgctgggcattgtactgaaagggca

SEQ ID NO: 130315 - DNA, 75 bp, synthetic construct
  source 1..75: mol_type = other DNA
acattagacaaaaatatggccatcatggggtcggggtagatcagaatcaacaatttgataatggtgttatggggc

SEQ ID NO: 130316 - DNA, 75 bp, synthetic construct
  source 1..75: mol_type = other DNA
gtatcagcacaccttggtttgaaactgggtctctcattgcctgattttagtacggcatatgtagaccgagcttta

SEQ ID NO: 130317 - DNA, 75 bp, synthetic construct
  source 1..75: mol_type = other DNA
gaactggtggtgaccgttgaggatgaaagtggtaacaaaaccgagcaggtttatccggtcaccacgctgccgacg

SEQ ID NO: 130318 - DNA, 75 bp, synthetic construct
  source 1..75: mol_type = other DNA
ttctgctaatgaatatgctgactgaaccagaaaagatccgcatagatatgggaaatggaatgcagtgtcattttt

SEQ ID NO: 130319 - DNA, 75 bp, synthetic construct
  source 1..75: mol_type = other DNA
tttgatgctgctatcaacctggggcgttgggtgctttccagcaacatgaacgtgtcgcatgaccgtgataaaacg

SEQ ID NO: 130320 - DNA, 75 bp, synthetic construct
  source 1..75: mol_type = other DNA
ggtgacctggtggtgatcgttgaagatgaaagtggaaacaagaccgaacaggtctatccggtgaccacgctgccg

SEQ ID NO: 130321 - DNA, 75 bp, synthetic construct
  source 1..75: mol_type = other DNA
ttctgctcatgaatatgctggcagaacctgaaactgtcagggttgatttgggtaatggaaaacaatgtcagtttt

SEQ ID NO: 130322 - DNA, 75 bp, synthetic construct
  source 1..75: mol_type = other DNA
cagtacgttgttgatgtactcgtcaacaatgaacgaaccgggcgtgcaaatcttgtcattacggaagaagatgaa

SEQ ID NO: 130323 - DNA, 75 bp, synthetic construct
  source 1..75: mol_type = other DNA
aggcgttgagttggcgtttgaaaccatggttgattccggcatcatcgaagagtctgcttactatgaatcactgca

SEQ ID NO: 130324 - DNA, 75 bp, synthetic construct
  source 1..75: mol_type = other DNA
atggctaactacttcaatacactgaacctgcgccagcaactggcacagctgggcaaatgtcgctttatgggccgc

SEQ ID NO: 130325 - DNA, 75 bp, synthetic construct
  source 1..75: mol_type = other DNA
tgagtacggtaactatctgttctcttacgcttgtgtgccgctgctgaaaccgtttatggcagagctgcaaccggg

SEQ ID NO: 130326 - DNA, 75 bp, synthetic construct
  source 1..75: mol_type = other DNA
ctctctccccgatcacccataaccagattcctgttattaccaccgaacttttggcgcagctttaccgcactgagc

SEQ ID NO: 130327 - DNA, 75 bp, synthetic construct
  source 1..75: mol_type = other DNA
ttggcgcagttgtacggtgctggagttaagaacattcaaaataactacgccagaaatgctgagcgctttattgaa

SEQ ID NO: 130328 - DNA, 75 bp, synthetic construct
  source 1..75: mol_type = other DNA
aatcggttcgctgctgatggctaaagcgcgagtggatatcagctttaaattcaacgtctttaagaccttcctgtt

SEQ ID NO: 130329 - DNA, 75 bp, synthetic construct
  source 1..75: mol_type = other DNA
cgaagagctgatcccgcaggcggatcttgtcgttaacctgacgccagacaaacagcactccgacgtagtgcgttc

SEQ ID NO: 130330 - DNA, 75 bp, synthetic construct
  source 1..75: mol_type = other DNA
tcaacatcgtagaagtgggtgagcagatccgtaaagacatcactgtggtgatggttgcaccgaaatgtccgggca

SEQ ID NO: 130331 - DNA, 75 bp, synthetic construct
  source 1..75: mol_type = other DNA
ctgaacgacgagttcaggaagctcgaagaatctgtaaacagggaactgacctcaaacgaatctttaatcaggaac

SEQ ID NO: 130332 - DNA, 75 bp, synthetic construct
  source 1..75: mol_type = other DNA
atctgcgccagcagctggcacaactgggcaaatgtcgctttatggggcgcgacgagttcgctgacggcgcgagct

SEQ ID NO: 130333 - DNA, 75 bp, synthetic construct
  source 1..75: mol_type = other DNA
ctggtggttaacctgacgccggacaagcagcactccgacgtagtgcgttctgttcagccgctgatgaaagatggc

SEQ ID NO: 130334 - DNA, 75 bp, synthetic construct
  source 1..75: mol_type = other DNA
atggttgcgccgaaatgcccaggcaccgaagtacgtgaagagtacaaacgtggattcggcgtaccgacgctgatt

SEQ ID NO: 130335 - DNA, 75 bp, synthetic construct
  source 1..75: mol_type = other DNA
tgagtaccaaaaatacaggtcctatggaactaaaacaaagtgctctaagatattgcttaattcattatctacaat

SEQ ID NO: 130336 - DNA, 75 bp, synthetic construct
  source 1..75: mol_type = other DNA
tcgccagagctttggtcaggtatccggtgcgtttattcgcctggtcaatgacgataaccagactgaagtcgctcg

SEQ ID NO: 130337 - DNA, 75 bp, synthetic construct
  source 1..75: mol_type = other DNA
ggagtttactgatggttcgttcattataaagaactggaggcctacagatacaaaaatacaatggtcgtctggagc

SEQ ID NO: 130338 - DNA, 75 bp, synthetic construct
  source 1..75: mol_type = other DNA
tggatgcgcaaaccgctgcgcggaccgggcttatggtgggtgtctgtatggcaaccctgacggccatattcacgg

SEQ ID NO: 130339 - DNA, 75 bp, synthetic construct
  source 1..75: mol_type = other DNA
cgggttacattatccgctccatggaaaacatcgatccggctctggcggacaaagccgtgggttatctgcgtgcgt

SEQ ID NO: 130340 - DNA, 75 bp, synthetic construct
  source 1..75: mol_type = other DNA
tggtgcctgatggcggtcctgccggatgcgcagaatcttctgatagttcagaaggtgcagatgatgaataaagag

SEQ ID NO: 130341 - DNA, 75 bp, synthetic construct
  source 1..75: mol_type = other DNA
atgactcaggaaaaattagatttagctgcagagcgtatctttacgttgcatcgcgcctacacggtaaaactgatg

SEQ ID NO: 130342 - DNA, 75 bp, synthetic construct
  source 1..75: mol_type = other DNA
ttggttgtccaacccgcgaaacattgcagcgtctggggctggaagatattgccgccgatctggcagcacacaatc

SEQ ID NO: 130343 - DNA, 75 bp, synthetic construct
  source 1..75: mol_type = other DNA
atcagagagaacggtaaaacattaggtcaaaacatcgctgatacaggtctctttatccgtgtaaaagacgtgcgt

SEQ ID NO: 130344 - DNA, 75 bp, synthetic construct
  source 1..75: mol_type = other DNA
gattaccctgtcgcgtattgtagttgggctaatttaagtttagaaaatgaaattaaatatcttaatgatgttacc

SEQ ID NO: 130345 - DNA, 75 bp, synthetic construct
  source 1..75: mol_type = other DNA
cttcctgtagctttttgtagctgggccagtttagatctggaatgcgaggtgaaatatataaatgatgtaacatct

SEQ ID NO: 130346 - DNA, 75 bp, synthetic construct
  source 1..75: mol_type = other DNA
tcatacctgctattcagacaaatcaatttgctctcttaataaaggatgagcttcctgtagctttttgtagttggg

SEQ ID NO: 130347 - DNA, 75 bp, synthetic construct
  source 1..75: mol_type = other DNA
atcctgcgggaatatgtcttacgttattttcaatgatcaggtcattaaaccgcgctttgaatgtaagactatcta

SEQ ID NO: 130348 - DNA, 75 bp, synthetic construct
  source 1..75: mol_type = other DNA
cagcggcgcgcgtgaaggttcatacagcttaccgtttgtccgtatgccgaccctcgaaaacccgatccagaccag

SEQ ID NO: 130349 - DNA, 75 bp, synthetic construct
  source 1..75: mol_type = other DNA
cggcggctgggcagatggtaacagcccgtcggatatcgaaaacagtaagctggtagtgctgtttggtaataaccc

SEQ ID NO: 130350 - DNA, 75 bp, synthetic construct
  source 1..75: mol_type = other DNA
ggatcactgaaacaccgattaaaagcgatcctggcttgttaaagagtgcaggggtgaacgggaacagaagatcat

SEQ ID NO: 130351 - DNA, 75 bp, synthetic construct
  source 1..75: mol_type = other DNA
tctggagcgcctgtacagttaactgtggtagtcgctgcccgctacgtatgcacgttgtggacggtgaaatcaaat

SEQ ID NO: 130352 - DNA, 75 bp, synthetic construct
  source 1..75: mol_type = other DNA
aattcgagcgtattagctgggaagaagcctacgacattatcgctactaatatgcagcgactgattaaagagtacg

SEQ ID NO: 130353 - DNA, 75 bp, synthetic construct
  source 1..75: mol_type = other DNA
ggaattaaatgggatgatgttgttgcactcattaaagctgtgggtggaacaataaaaaataacaacggctccaga

SEQ ID NO: 130354 - DNA, 75 bp, synthetic construct
  source 1..75: mol_type = other DNA
aatctgcggacgggtgaaatatccatgtcgcataaagtgtctgttggcggcggttctcaggtcaatggtgcgctg

SEQ ID NO: 130355 - DNA, 75 bp, synthetic construct
  source 1..75: mol_type = other DNA
tgaggattttcaacgaagcctttggtctgatttttcgtcgttcggaagagtgtctgtacctcattcctacccggg

SEQ ID NO: 130356 - DNA, 75 bp, synthetic construct
  source 1..75: mol_type = other DNA
tggtttggtaaaaacgacagcgatcggcggcctggcaatggccagcagcgcattaacattaccttttagtcggat

SEQ ID NO: 130357 - DNA, 75 bp, synthetic construct
  source 1..75: mol_type = other DNA
cgaaaatcacccgcaacctgactacggcctggtttgcgaagcgcgtagacgaacggcgggcgcgttgtatgaaac

SEQ ID NO: 130358 - DNA, 75 bp, synthetic construct
  source 1..75: mol_type = other DNA
taacgggttattgtgggataaaaccatgaatgttgacggcctgaaacgggtcatacttctggtgccgggtttaat

SEQ ID NO: 130359 - DNA, 75 bp, synthetic construct
  source 1..75: mol_type = other DNA
caggacggcgatctggatgtcagcggcggcggtcacggtattgatatcaccggcgacagcgcaacggtggataac

SEQ ID NO: 130360 - DNA, 75 bp, synthetic construct
  source 1..75: mol_type = other DNA
gtaatgacgtttatgaaaattatatggcactggcttttgacagtgtagacgatgtgaacgtgagacgttcggcag

SEQ ID NO: 130361 - DNA, 75 bp, synthetic construct
  source 1..75: mol_type = other DNA
aaacttttgagaacgttgttttaacaggcatcgaatacacagaagaggcaagcgaatctctggtatttgatttgg

SEQ ID NO: 130362 - DNA, 75 bp, synthetic construct
  source 1..75: mol_type = other DNA
accggtaagaccaatccggaatcgacctttgaaccagaagtcaaacgtcaggctgccatggcgagtatcagccag

SEQ ID NO: 130363 - DNA, 75 bp, synthetic construct
  source 1..75: mol_type = other DNA
acgcgagccgggctacccttagaaaagaaatctgcggcattggatccgctcatgagaagcaggtggtggcgcaaa

SEQ ID NO: 130364 - DNA, 75 bp, synthetic construct
  source 1..75: mol_type = other DNA
tatcaacgaccagacgggtgttatcaatatcaatgttggtactggtcaggcgttttataacgatggcacaggaac

SEQ ID NO: 130365 - DNA, 75 bp, synthetic construct
  source 1..75: mol_type = other DNA
cgcattggtgccgaacagatccaggtgaaagtgactgctaacgagacttcatggacttttaacagccatgacttc

SEQ ID NO: 130366 - DNA, 75 bp, synthetic construct
  source 1..75: mol_type = other DNA
aaccggaagttgatcagcagcactacgtgatggctgtcttgattcgtggtggtgtttttggtgagaaagcggaat

SEQ ID NO: 130367 - DNA, 75 bp, synthetic construct
  source 1..75: mol_type = other DNA
agagtagcgtcacagaactggcggcaacgattgaacaaggattaagcggaaaagagtgggtcatgcttacggttg

SEQ ID NO: 130368 - DNA, 75 bp, synthetic construct
  source 1..75: mol_type = other DNA
gatgtgaacgtaaaacgtcaagcagatgttactagctatcctgtagaaaatggtgctactgtgtctgatcacgtt

SEQ ID NO: 130369 - DNA, 75 bp, synthetic construct
  source 1..75: mol_type = other DNA
gaacaagatataaactctacaaaaaacgaaaatagcaaagctaataaaacaaaaggagagaatggatttgctatt

SEQ ID NO: 130370 - DNA, 75 bp, synthetic construct
  source 1..75: mol_type = other DNA
atggacttttaacagccatgacttctctttacgtcaatttgaccagggacaggcagcggtcacgcagctggcggc

SEQ ID NO: 130371 - DNA, 75 bp, synthetic construct
  source 1..75: mol_type = other DNA
ggtttctactctgcgtttatcgtggccgacaaagtgaccgtgcgtactcgcgcggcaggcgaaaaaccagaaaat

SEQ ID NO: 130372 - DNA, 75 bp, synthetic construct
  source 1..75: mol_type = other DNA
cgtgcgttccatcatcagcaaatactccgaccatatcgcgctgcaggtagagatcgaaaaacgcgaagagaaaga

SEQ ID NO: 130373 - DNA, 75 bp, synthetic construct
  source 1..75: mol_type = other DNA
ttcagtcagaagtgaagcagcttctgcatctgatgatccattctctctattccaataaagaaatcttcctgcgtg

SEQ ID NO: 130374 - DNA, 75 bp, synthetic construct
  source 1..75: mol_type = other DNA
ggcggacagcatcatcaactatctcaacaccaacctttcaacgctggtgctggcgcgtattctcggcgcgggcgt

SEQ ID NO: 130375 - DNA, 75 bp, synthetic construct
  source 1..75: mol_type = other DNA
tattccggcgattgttattggtgggcagatggcgggcgcaatcggcgtcacgctcggcttcctgctggtgcagat

SEQ ID NO: 130376 - DNA, 75 bp, synthetic construct
  source 1..75: mol_type = other DNA
gactccagcgatctgccgctgaacgtttcccgtgaaatcctccaggacagcacagtaacgcgtaacctgcgcaat

SEQ ID NO: 130377 - DNA, 75 bp, synthetic construct
  source 1..75: mol_type = other DNA
tgggttctgaccaggcgaaagacagccagctgatcggtcagtttggtgttggtttctactctgcgtttatcgtgg

SEQ ID NO: 130378 - DNA, 75 bp, synthetic construct
  source 1..75: mol_type = other DNA
tatggcgataaagaaaatatcgccctgggaacggaacaagagttctggatggtgctaccgaaagccgaaattcca

SEQ ID NO: 130379 - DNA, 75 bp, synthetic construct
  source 1..75: mol_type = other DNA
gcaactttgtgccgctggtatttggcgagaagtggaacagcatcatcccgatcctgcagttgctctgcgtggtgg

SEQ ID NO: 130380 - DNA, 75 bp, synthetic construct
  source 1..75: mol_type = other DNA
caccaaagacgatcgcggtactgaaatcaccctgcatctgcgtgaaggcgaagacgagttcctcgacgactggcg

SEQ ID NO: 130381 - DNA, 75 bp, synthetic construct
  source 1..75: mol_type = other DNA
ctaaagttgatgagtcgctggaaaaattggctgacgaagtcgatgaaagcacgaaagaagcagaaaaagcgctga

SEQ ID NO: 130382 - DNA, 75 bp, synthetic construct
  source 1..75: mol_type = other DNA
tgcggcaggcgaaaaaccagaaaacggcgtgttctgggaatcggcgggtgaaggtgaatacaccgttgccgacat

SEQ ID NO: 130383 - DNA, 75 bp, synthetic construct
  source 1..75: mol_type = other DNA
aataatgagttagatactctggagtggtatagcttcacagatcaactatacatatatctaatttggggggttgga

SEQ ID NO: 130384 - DNA, 75 bp, synthetic construct
  source 1..75: mol_type = other DNA
ggcctgctggatgtttatgccaatggtcagcacgtattccgttttcagaatggcgcgttacaaagtaaccaggca

SEQ ID NO: 130385 - DNA, 75 bp, synthetic construct
  source 1..75: mol_type = other DNA
atgcacaggattgatacgctgactgcggtaaaagataagtttggtccgggtaagaacggatttactgacggaaat

SEQ ID NO: 130386 - DNA, 75 bp, synthetic construct
  source 1..75: mol_type = other DNA
tctccctgacaatggcttcgactccggctctggcatttcaggcgaaagatacgactggttcagatctttcaggaa

SEQ ID NO: 130387 - DNA, 75 bp, synthetic construct
  source 1..75: mol_type = other DNA
tggcgcgtattctcggcgcgggcgtggcagggggatacaacctggcgtacaacgtggccgttgtgccaccgatga

SEQ ID NO: 130388 - DNA, 75 bp, synthetic construct
  source 1..75: mol_type = other DNA
tcagcgaaaagaaatcagtcacctggaacttaccacgttgtactggctgaacgtcgggctggggcttgtggtgtg

SEQ ID NO: 130389 - DNA, 75 bp, synthetic construct
  source 1..75: mol_type = other DNA
gattggttcgctactgatggcgaaagcgcgggtcgatatcagctttaaattcaacgtattcaaaacatttctgtt

SEQ ID NO: 130390 - DNA, 75 bp, synthetic construct
  source 1..75: mol_type = other DNA
atcgctaactttgcaacagtgcccttcaacttcaagacaacccaaatgtttagagacattaattttaaagtcttt

SEQ ID NO: 130391 - DNA, 75 bp, synthetic construct
  source 1..75: mol_type = other DNA
tttatggctgccgttttatctctcgctgccgacgctggtggtcagttatgcgctgggcattgtgctgaaagggca

SEQ ID NO: 130392 - DNA, 75 bp, synthetic construct
  source 1..75: mol_type = other DNA
gggatgcggtgctggatattggccgcccggactcctctgcagatatgctcgccaaagctgaaaaggcttttgatg

SEQ ID NO: 130393 - DNA, 75 bp, synthetic construct
  source 1..75: mol_type = other DNA
cagtttgatgccatcaaccagagtgtcgctcgttttgcgtctgcatccggtgtggaggtggacaaggttgcagag

SEQ ID NO: 130394 - DNA, 75 bp, synthetic construct
  source 1..75: mol_type = other DNA
cggcagcgccatgggtggtgctttcggtggtggcgcatccgcttcaacggggacggccattcaggctgcggcggc

SEQ ID NO: 130395 - DNA, 75 bp, synthetic construct
  source 1..75: mol_type = other DNA
ctggctgccgcgggttaatcttatcgccagccaaattcagcgtggctatggtggttgggtattgacgatgcgttg

SEQ ID NO: 130396 - DNA, 75 bp, synthetic construct
  source 1..75: mol_type = other DNA
gcgttattgataaaaggtcgtgcagcacgctggccgatgagtctgcttctgtggggatgcacttttggtcacaat

SEQ ID NO: 130397 - DNA, 75 bp, synthetic construct
  source 1..75: mol_type = other DNA
atggttgatgagtgtttcagccaaagacagaaaaaatgggcttgtgtgcaattcatcgccgaagtgtctctgatt

SEQ ID NO: 130398 - DNA, 75 bp, synthetic construct
  source 1..75: mol_type = other DNA
agctcgcgctcactctcattgcagacctagcaaacagcgaaaataacgaaaccgaagatgataatttttataagg

SEQ ID NO: 130399 - DNA, 75 bp, synthetic construct
  source 1..75: mol_type = other DNA
gctggcgcttgaaaccgagctccggacgctggagaagcacagcggtgcgaatgagaaaatcagccagcagcgccg

SEQ ID NO: 130400 - DNA, 75 bp, synthetic construct
  source 1..75: mol_type = other DNA
aacatggggacgctggaaacctgggcggataaaacagggaaggcgttcaaatcgatgtgggatgccattctggat

SEQ ID NO: 130401 - DNA, 75 bp, synthetic construct
  source 1..75: mol_type = other DNA
tggcgaggtttcacccgttcggtgctctccatgctgacagagatttttctgaagcaggccatggtggggattgtc

SEQ ID NO: 130402 - DNA, 75 bp, synthetic construct
  source 1..75: mol_type = other DNA
tgcgacggacagtttttcgcaggtcaggagtgcagccacgcagacctttgacggtattgcacagaatatggcggc

SEQ ID NO: 130403 - DNA, 75 bp, synthetic construct
  source 1..75: mol_type = other DNA
ttcttaatgccatgacagaagatggtaatatgaatgatattgtagttactgagtcgtacaaacccctctgggact

SEQ ID NO: 130404 - DNA, 75 bp, synthetic construct
  source 1..75: mol_type = other DNA
ctatgttcaggagccttgccggtgcggtcaccctgccgatggccgggctcacattactggccgccgcgacggggg

SEQ ID NO: 130405 - DNA, 75 bp, synthetic construct
  source 1..75: mol_type = other DNA
gggatgccatcctggatatcggtcgtcctgaatcctcagcggatatgctcgccagtgcgcagaaggcatttgatg

SEQ ID NO: 130406 - DNA, 75 bp, synthetic construct
  source 1..75: mol_type = other DNA
atgcggaaggtggttatgtcggcggtgccggaagtccggcgcagatgcggcgggcggaaggcattaattttaatc

SEQ ID NO: 130407 - DNA, 75 bp, synthetic construct
  source 1..75: mol_type = other DNA
gctggatggccgggcttcagtcgggctggagccagtgggctgagagtgcgatggacagtttttcgcaggtgaaaa

SEQ ID NO: 130408 - DNA, 75 bp, synthetic construct
  source 1..75: mol_type = other DNA
aacggctgaacgagctggcagaccaggcggagagatttgcacagcagcagcgggcaaaacaggctgccatcagtg

SEQ ID NO: 130409 - DNA, 75 bp, synthetic construct
  source 1..75: mol_type = other DNA
ttatccgaagtaagtgtaatggattttggttcaatggcgaacgatggtggtggccttctttttgacagttcagaa

SEQ ID NO: 130410 - DNA, 75 bp, synthetic construct
  source 1..75: mol_type = other DNA
ttaagggcccccggaaaatattttccacaactgaggatttggggaccatcataaaagaagtagacaacatcaatg

SEQ ID NO: 130411 - DNA, 75 bp, synthetic construct
  source 1..75: mol_type = other DNA
caacatcttaaaagttttgaatccactatttcttgacgacctgcgtgcacagctggacgaggctggtgacaatcc

SEQ ID NO: 130412 - DNA, 75 bp, synthetic construct
  source 1..75: mol_type = other DNA
caggtacggaagaggtgccgcgcttcagccgtatcgcgcgctcctacctgcttcacgttggcaatctggactgga

SEQ ID NO: 130413 - DNA, 75 bp, synthetic construct
  source 1..75: mol_type = other DNA
tttgttatcggcggatgacgcggtttcgctcggtttgagcaagcaggatgaagagacatttcttcggcgcatcta

SEQ ID NO: 130414 - DNA, 75 bp, synthetic construct
  source 1..75: mol_type = other DNA
gccacggacggcaaatactttgaagccgaggacctcaacagtggtcagactgtggcttgtgcctttaaagacttt

SEQ ID NO: 130415 - DNA, 75 bp, synthetic construct
  source 1..75: mol_type = other DNA
aaaagagattatgcaggcgaaacaaaaagtcttatcgggtcagttatcagatattcgcgactcggtaagcaagat

SEQ ID NO: 130416 - DNA, 75 bp, synthetic construct
  source 1..75: mol_type = other DNA
atttctcaaattgttcacccgttgatcctacaagtaccagaccgacctatttcggtgatactgatggctcagtcg

SEQ ID NO: 130417 - DNA, 75 bp, synthetic construct
  source 1..75: mol_type = other DNA
cagccatatttagttattaataaaggcgcagtgacgccatgtacgtttctgggtgaccaaaccggcgatcgattt

SEQ ID NO: 130418 - DNA, 75 bp, synthetic construct
  source 1..75: mol_type = other DNA
ccgcgcaaagcaaagagctggcaacgctacttactctggcagaaaggttgcgtgttcatgtgagcgcgatcaccc

SEQ ID NO: 130419 - DNA, 75 bp, synthetic construct
  source 1..75: mol_type = other DNA
gcgattcctgccttttttaccttctcatcagcaatgtctggcctggcgtgataacgaacagtggctgtgggcgac

SEQ ID NO: 130420 - DNA, 75 bp, synthetic construct
  source 1..75: mol_type = other DNA
atggcatttaagatctggcaaattggtttgcatttacaacagcaagaagcggtagcggttgctatcgtgcggggc

SEQ ID NO: 130421 - DNA, 75 bp, synthetic construct
  source 1..75: mol_type = other DNA
gttgaagcggtttattatgatacgccctggttgccgcgggttaatcttattgccagtcagatccagcggggttat

SEQ ID NO: 130422 - DNA, 75 bp, synthetic construct
  source 1..75: mol_type = other DNA
ctgaccgacaaggatgacagtattcttattatgacgccttcatatggcccgtttaaaaaggcgggtgaatacagt

SEQ ID NO: 130423 - DNA, 75 bp, synthetic construct
  source 1..75: mol_type = other DNA
cctcggcgagcgggaacaaacggcctggctggcaggttcgatggcccgcgaactggatatggatccagactcttt

SEQ ID NO: 130424 - DNA, 75 bp, synthetic construct
  source 1..75: mol_type = other DNA
tgactgccgcgcaaagcaaagagctggcaacgctgcttactctggcagaaaggttgcgtgttcatgttagcgcga

SEQ ID NO: 130425 - DNA, 75 bp, synthetic construct
  source 1..75: mol_type = other DNA
cccgtgaactggatatggatccggactccctgcgcttcgattacagcgaagactcactcagtcccgcctataacg

SEQ ID NO: 130426 - DNA, 75 bp, synthetic construct
  source 1..75: mol_type = other DNA
ggtagcggttgcgatcgtacggggcgcaaaagaatgctttttgcaacgctggtggcggttgccgctggagaacga

SEQ ID NO: 130427 - DNA, 75 bp, synthetic construct
  source 1..75: mol_type = other DNA
gtttgcatttacaacagcaagaagcggtagcggttgctatcgtgcggggcgcaaaagaatgcttattgcaacgct

SEQ ID NO: 130428 - DNA, 75 bp, synthetic construct
  source 1..75: mol_type = other DNA
ggatttgatccctgggaggccgtttctgttcgtcagccgccgctaccgccgccaggtggagactttgccatcgcg

SEQ ID NO: 130429 - DNA, 75 bp, synthetic construct
  source 1..75: mol_type = other DNA
gctgcttagcctggcagaaagattgcgtattcacgttagtgcgattaccccagacgcctgcgctttgcagcgatt

SEQ ID NO: 130430 - DNA, 75 bp, synthetic construct
  source 1..75: mol_type = other DNA
cgcctgaatgtggtggcgattgaagtaccatcgctgcggcaacggcgggaagatatccctctgctggctggccat

SEQ ID NO: 130431 - DNA, 75 bp, synthetic construct
  source 1..75: mol_type = other DNA
gagacggggtacaacgaaccagacgtgtttgcggtctgccgtttagtctcaggtttcccctataccgatcggcag

SEQ ID NO: 130432 - DNA, 75 bp, synthetic construct
  source 1..75: mol_type = other DNA
gggcaatactggcaacagcgtcaggcacctgcgtggttagcgtctctgcctacgctgaagccagaaacctcggta

SEQ ID NO: 130433 - DNA, 75 bp, synthetic construct
  source 1..75: mol_type = other DNA
tttctgcagcgctttgccgagcgtaatcgcaaggcggtaaaaggggcactgttgcaaatagtcggtggtgataaa

SEQ ID NO: 130434 - DNA, 75 bp, synthetic construct
  source 1..75: mol_type = other DNA
tgctagccagccagtttgggatggttgggaaaagcccggcgatgcaacacttactcagtgaaatagccctcgtcg

SEQ ID NO: 130435 - DNA, 75 bp, synthetic construct
  source 1..75: mol_type = other DNA
gccacaggcgatggatttgctgatccactacgactggccgggaaatattcgtgaactggaaaacgcggtggaacg

SEQ ID NO: 130436 - DNA, 75 bp, synthetic construct
  source 1..75: mol_type = other DNA
tcgtggaagctggatggccgggatgaagtccggctggggcgagtgggcggaaagtgcgacggacagtttttcgca

SEQ ID NO: 130437 - DNA, 75 bp, synthetic construct
  source 1..75: mol_type = other DNA
acgacggtatcaacggacaggccgggccgcagctgatgaaagcggtgtatgagatggcccgtaaaggtgcgcagg

SEQ ID NO: 130438 - DNA, 75 bp, synthetic construct
  source 1..75: mol_type = other DNA
cgggggatttacggggacggggggtaaatatgaacctgcggggattgttcatcgcggggagtttgtcttcacgaa

SEQ ID NO: 130439 - DNA, 75 bp, synthetic construct
  source 1..75: mol_type = other DNA
caccaacctggttagcatcgctttctacgctgaaacccgaaacgtcggtaaccgttaaatcgttgcttgattcac

SEQ ID NO: 130440 - DNA, 75 bp, synthetic construct
  source 1..75: mol_type = other DNA
tcgctgccgcccattcttgacgctgcgaccgcaggctctggcctgaagatgcaaatcgtcgacaaccaggacatg

SEQ ID NO: 130441 - DNA, 75 bp, synthetic construct
  source 1..75: mol_type = other DNA
caacaactgggacgggcggaacgactcgctgccgcccattcttgacgctgcgaccgcaggctctggcctgaagat

SEQ ID NO: 130442 - DNA, 75 bp, synthetic construct
  source 1..75: mol_type = other DNA
aatggctttgttagagcaaaaggcggcagatgttttagttttggcacaaaccggacaagtccatcgggcagcgga

SEQ ID NO: 130443 - DNA, 75 bp, synthetic construct
  source 1..75: mol_type = other DNA
tcctgagtcctcagcggatatgctcgccagtgcacagaaggcatttgatgaggcggataaaaaatggcagtggta

SEQ ID NO: 130444 - DNA, 75 bp, synthetic construct
  source 1..75: mol_type = other DNA
gccggtgctgtaacgttgccgatggtcgggatcacatcactggttgcagcaacaggtgcgctggcgtacgcctgg

SEQ ID NO: 130445 - DNA, 75 bp, synthetic construct
  source 1..75: mol_type = other DNA
tcaccctgccgatggtggggctcacttcgctggcagttgccaccggagcgctggcgtatgcctggtatcaggggg

SEQ ID NO: 130446 - DNA, 75 bp, synthetic construct
  source 1..75: mol_type = other DNA
gtaaacaactggaatcattcattaacgcaggcgatgcgtgtacttttgaaagagtcaaaagcagtgcgcaaagct

SEQ ID NO: 130447 - DNA, 75 bp, synthetic construct
  source 1..75: mol_type = other DNA
atgagtcaatcgatctgttcaacagggctacgctggctgtggctggtggtagtcgtgctgattatcgatctgggc

SEQ ID NO: 130448 - DNA, 75 bp, synthetic construct
  source 1..75: mol_type = other DNA
ggcggtggtgctgctgactggggaatatatttccgaacgcgagctgccgctggcgattgccagtacgccgatccc

SEQ ID NO: 130449 - DNA, 75 bp, synthetic construct
  source 1..75: mol_type = other DNA
gcggcacgctgtttctcgatgaaattggcgatatctcactgatgatgcaggttcgtctactgcgtgcgattcagg

SEQ ID NO: 130450 - DNA, 75 bp, synthetic construct
  source 1..75: mol_type = other DNA
tccagttcatggctgagtcgggaaattatctttggtgcgctgtatctggcgctattgggtttatccacattactg

SEQ ID NO: 130451 - DNA, 75 bp, synthetic construct
  source 1..75: mol_type = other DNA
cggatatgctcgccagtgcacagaaggcatttgatgaggcggataaaaaatggcagtggtaccagagccggagcc

SEQ ID NO: 130452 - DNA, 75 bp, synthetic construct
  source 1..75: mol_type = other DNA
ttagctggaaatcatgaaacgaattgcaatggtaactatatgcagaacttcacgcgtatgaaaccacttgatgag

SEQ ID NO: 130453 - DNA, 75 bp, synthetic construct
  source 1..75: mol_type = other DNA
agccatgctggcgcttgaaaccgagctcaggacgctggaaaaacacagcggtgtgaatgagaaaatcagccagca

SEQ ID NO: 130454 - DNA, 75 bp, synthetic construct
  source 1..75: mol_type = other DNA
cgaaggaggcaaccagccggattggtgtcgggaacctgtaccgcctgatgcggggctatgcggaaggggggtatg

SEQ ID NO: 130455 - DNA, 75 bp, synthetic construct
  source 1..75: mol_type = other DNA
gattccacgctttcagcgtttaataaaaccctggttctttccggtaatcagtcaggactgacggcagagcgcatg

SEQ ID NO: 130456 - DNA, 75 bp, synthetic construct
  source 1..75: mol_type = other DNA
cctgcagaggcgattgaacagagtctcagccgtcaggctgttgccgcgcagaaagcggggatatccatcgggcag

SEQ ID NO: 130457 - DNA, 75 bp, synthetic construct
  source 1..75: mol_type = other DNA
ataatccggatgcgctggcgaaggccacatctgcactgaagaacacctggtctgcggaggatcagcttcatggaa

SEQ ID NO: 130458 - DNA, 75 bp, synthetic construct
  source 1..75: mol_type = other DNA
tcaggcgaagcgtgagtctgaagagcagcgtcttcgtgacgtgtaccgcgataatccgcaggcgctggcacaggt

SEQ ID NO: 130459 - DNA, 75 bp, synthetic construct
  source 1..75: mol_type = other DNA
caacacgctgatggcgtcggcgaaaaaggactatgagtcgacgctgaaaaagccgtccggtgtgaaagtgtcagc

SEQ ID NO: 130460 - DNA, 75 bp, synthetic construct
  source 1..75: mol_type = other DNA
cgctggcgtatgcctggtatcagggcgaccggaccctgtctgagttcaataaaacgctgattctttccggtaatc

SEQ ID NO: 130461 - DNA, 75 bp, synthetic construct
  source 1..75: mol_type = other DNA
gcggagctgttggtggcggcgcatccgcatcaggcggtacagccattcaggcagctgcggcgaaattccattttg

SEQ ID NO: 130462 - DNA, 75 bp, synthetic construct
  source 1..75: mol_type = other DNA
agtccggctggagggagtggaaagagagtgccacggacagtatgtcgcaggttaaaagtgctgccacgcagacct

SEQ ID NO: 130463 - DNA, 75 bp, synthetic construct
  source 1..75: mol_type = other DNA
tcctgaatcctcagcggatatgctcgccagtgcgcagaaggcatttgatgaggcggataaaaaatggcagtggta

SEQ ID NO: 130464 - DNA, 75 bp, synthetic construct
  source 1..75: mol_type = other DNA
gattggaccacaggcgctgaaggctgtgtatgacatggcccgcaagggtgcccgtgatgaaattcaggcacagat

SEQ ID NO: 130465 - DNA, 75 bp, synthetic construct
  source 1..75: mol_type = other DNA
ctaccgatttcgaggatggggtcacatttggttataacgacgcaattagtgaatgcgaaggacggattcgcgctg

SEQ ID NO: 130466 - DNA, 75 bp, synthetic construct
  source 1..75: mol_type = other DNA
gcagcttcacccgttctgtgctgtccatgctgacagagatttttctgaagcaggcgatggtggggatagtcgggc

SEQ ID NO: 130467 - DNA, 75 bp, synthetic construct
  source 1..75: mol_type = other DNA
tgctggcgtacgcctggtaccagggtgataaagtcctgtctgaatttaataaaacgctggtcctttccggtaatc

SEQ ID NO: 130468 - DNA, 75 bp, synthetic construct
  source 1..75: mol_type = other DNA
cctgcggggattgttcatcgcggggagtttgtcttcacgaaggaggcgaccagccggattggtgtcggcaatctg

SEQ ID NO: 130469 - DNA, 75 bp, synthetic construct
  source 1..75: mol_type = other DNA
atttgggggataactatgcagggattagcaatggtagtcatgcctgacgatgctgttttccccggatattttgaa

SEQ ID NO: 130470 - DNA, 75 bp, synthetic construct
  source 1..75: mol_type = other DNA
aaacgtatcaacaggcatgcaccactgtttgcggatgaactgattgcccgggaactggctgaacgaccggattat

SEQ ID NO: 130471 - DNA, 75 bp, synthetic construct
  source 1..75: mol_type = other DNA
ttacgctcgattatctgaaaattgaccgtggatttatcaacgccatcggtacggaaacgatcacttcacccgtac

SEQ ID NO: 130472 - DNA, 75 bp, synthetic construct
  source 1..75: mol_type = other DNA
gcggtcactatcgagtttgtggcggataccggcgaagtccacatgatgacgaaggcctggagcagtgagccagct

SEQ ID NO: 130473 - DNA, 75 bp, synthetic construct
  source 1..75: mol_type = other DNA
atgagcggaaaacagtatcagggcacggccaccatccgtgtgaacggtcaggaatacgccacccttgagggggca

SEQ ID NO: 130474 - DNA, 75 bp, synthetic construct
  source 1..75: mol_type = other DNA
ttcgacgcgaaaaaccgcgaaatgtttcttttccgcaccattgatgaactggagcaagcagccgccagcggcggc

SEQ ID NO: 130475 - DNA, 75 bp, synthetic construct
  source 1..75: mol_type = other DNA
gcatgctcagaatggaatgcaaccgtcgtgaaaatgcagatattgacgctcaggaatcggttgaacgcatgatca

SEQ ID NO: 130476 - DNA, 75 bp, synthetic construct
  source 1..75: mol_type = other DNA
gccgctacaacgttgcgcccggaacccgggtattgctgctgagtgaacgccgctcgcagctgcatcttgatcctg

SEQ ID NO: 130477 - DNA, 75 bp, synthetic construct
  source 1..75: mol_type = other DNA
caccttttgagaatggtaatgacctggaaggattcctgatcgtcacggcagctgcggatgagggactgctggata

SEQ ID NO: 130478 - DNA, 75 bp, synthetic construct
  source 1..75: mol_type = other DNA
tattgatgacttcggcaccgggcacagcgcgcttatctatcttgagcgttttacgctcgattatctgaaaattga

SEQ ID NO: 130479 - DNA, 75 bp, synthetic construct
  source 1..75: mol_type = other DNA
gggatttgcccctaaacgcactggcgttaacggtctgaaaattagcgccagcgcctcgctgggcgcgcgtgaacg

SEQ ID NO: 130480 - DNA, 75 bp, synthetic construct
  source 1..75: mol_type = other DNA
aatccatataattttcggggtacttaaagcgggaactggcttcagctcccgcgttacagtgaatgcgggttttaa

SEQ ID NO: 130481 - DNA, 75 bp, synthetic construct
  source 1..75: mol_type = other DNA
ggatctgatgcaggcgcagcaggttcgtcgctggccgggtagcccactaccattagtggacgttgatgcactgga

SEQ ID NO: 130482 - DNA, 75 bp, synthetic construct
  source 1..75: mol_type = other DNA
ttcagtcaggaaacctgggaagaggcgcaaagtgtgctgcttgcctgggtaaataactggctggcaggcgattgc

SEQ ID NO: 130483 - DNA, 75 bp, synthetic construct
  source 1..75: mol_type = other DNA
gggggagatctccccactgccgggcttcagtcaggaaacctgggaagaggcgcaaagtgtgctgcttgcctgggt

SEQ ID NO: 130484 - DNA, 75 bp, synthetic construct
  source 1..75: mol_type = other DNA
aatccatcattgaagctgcttccattgtatccgatgaactgcgcgaaaaagcagatctggcaactcaaacatata

SEQ ID NO: 130485 - DNA, 75 bp, synthetic construct
  source 1..75: mol_type = other DNA
ggttctgcgcgacaggcggttaaaaacccgcgacgggctgtatgtttgcctgcgtgaaggcgagcgcgaagggtg

SEQ ID NO: 130486 - DNA, 75 bp, synthetic construct
  source 1..75: mol_type = other DNA
gcggcgaattaccgtgctgcaccgttatgtaatggcgatcccgacgatcttatcctcaaacttgctgatatgccg

SEQ ID NO: 130487 - DNA, 75 bp, synthetic construct
  source 1..75: mol_type = other DNA
ttgaaaccgagctcaggacgctggaaaaacacagcggtgtgaatgagaaaatcagccagcagcgccgggatttat

SEQ ID NO: 130488 - DNA, 75 bp, synthetic construct
  source 1..75: mol_type = other DNA
gcaaaaaaggattatgaatcgacgctgaaaaagccgtcaggtgtgaaggtgtctgccggtgagcgccaggaagac

SEQ ID NO: 130489 - DNA, 75 bp, synthetic construct
  source 1..75: mol_type = other DNA
atgagcggaaaacagtatcagggcacggccaccatccgtgtgaacggtcaggaatacgacacccttgagggggcc

SEQ ID NO: 130490 - DNA, 75 bp, synthetic construct
  source 1..75: mol_type = other DNA
ctattgcctgggatgaaagtctgcgtgaggcggattttgcctttgtggcagaagaaggggttcgggctgtggtta

SEQ ID NO: 130491 - DNA, 75 bp, synthetic construct
  source 1..75: mol_type = other DNA
cgatgtgggatgccattctggatatcggtcgtcctgagtcctcagcggatatgctcgccagtgcgcagaaggcat

SEQ ID NO: 130492 - DNA, 75 bp, synthetic construct
  source 1..75: mol_type = other DNA
cagagaagtattcgtcgtgggtgagttactatgaagggataacgttgaatccgctggcattgcgtaaacctgatg

SEQ ID NO: 130493 - DNA, 75 bp, synthetic construct
  source 1..75: mol_type = other DNA
attttgcttatctggtgcaaaggaactaaagagtatggcggcttctggcgagttacgttatcgctgctgttagaa

SEQ ID NO: 130494 - DNA, 75 bp, synthetic construct
  source 1..75: mol_type = other DNA
agttacaacccggatatctgtgtggcggaacaaaaagcctggatggaactgatcgccgaagtgcagggcgaaggg

SEQ ID NO: 130495 - DNA, 75 bp, synthetic construct
  source 1..75: mol_type = other DNA
tggcaaccgcaatggcgaccgcgcgtcaccgcgccagtaaggtgctggaaatcgcccgtgaccgccacgttgaac

SEQ ID NO: 130496 - DNA, 75 bp, synthetic construct
  source 1..75: mol_type = other DNA
cgaagacgtgaatcgcgtttttgcaggtctgcgtgcaacgtgggaatccgtgaaagcgactggtaatgccaaaca

SEQ ID NO: 130497 - DNA, 75 bp, synthetic construct
  source 1..75: mol_type = other DNA
ttcaagacgacgaagggcgcgatcagcttaaggcaatgccgaaagcaaaacgttcttctatgttccccgatccgt

SEQ ID NO: 130498 - DNA, 75 bp, synthetic construct
  source 1..75: mol_type = other DNA
tgtcttatctttccgcaccgctgtggtttatgttcctcgcgctttctaccgcattgcaggtagtgcacgcgctga

SEQ ID NO: 130499 - DNA, 75 bp, synthetic construct
  source 1..75: mol_type = other DNA
aataactgctatcccttacgtacaacgctttatctcatttggcggtgagcctttacctgtaccagaagatgtgat

SEQ ID NO: 130500 - DNA, 75 bp, synthetic construct
  source 1..75: mol_type = other DNA
aagccgacagcgttaacgtacaggcgctggatatggggcacattgtcgttgacattgatggtgttaatatcactg

SEQ ID NO: 130501 - DNA, 75 bp, synthetic construct
  source 1..75: mol_type = other DNA
cgaagacgtgagccgcgtttttgcaggtctgcgtgcgacgtgggagtcagtgaaagcgacaggtaatgccaaaca

SEQ ID NO: 130502 - DNA, 75 bp, synthetic construct
  source 1..75: mol_type = other DNA
cgaaggttcctttgccggttcaatcctgtcacatgacttcgtggaagcggcgttgatgcgccgtgcaggttgggg

SEQ ID NO: 130503 - DNA, 75 bp, synthetic construct
  source 1..75: mol_type = other DNA
cgttacattatcgttgctgctggaagtgctgttttccgtgctgctggctccggtacgcatgctgttccatacggt

SEQ ID NO: 130504 - DNA, 75 bp, synthetic construct
  source 1..75: mol_type = other DNA
tacgcagatctattctggtggtacgcaaattgttgataacacgagctcctcggatgttattgaagtttattccgg

SEQ ID NO: 130505 - DNA, 75 bp, synthetic construct
  source 1..75: mol_type = other DNA
gcgacaaacaaccacattgtgctacgtgaaaactggcaaggttacaggggtgtaccaggccagaattcacgtagc

SEQ ID NO: 130506 - DNA, 75 bp, synthetic construct
  source 1..75: mol_type = other DNA
atgaaatttgataaacccgcaggggaaaacacgatcgatcagctgaaggttgtcggtcgtccccatgaccgcatc

SEQ ID NO: 130507 - DNA, 75 bp, synthetic construct
  source 1..75: mol_type = other DNA
tttttttctctatttctgcgagtgcagttactgcaagacaatttcagagagagttagatttggcagacaaagcaa

SEQ ID NO: 130508 - DNA, 75 bp, synthetic construct
  source 1..75: mol_type = other DNA
gacgctggaaacctgggcggataaaacagggaaggcgttcaaatcgatgtgggatgccattctggatattggtcg

SEQ ID NO: 130509 - DNA, 75 bp, synthetic construct
  source 1..75: mol_type = other DNA
ggggaggctaattatgttgtgctggaaaataccggcgaactgacggttgaaccgccccgggaatcctggagacta

SEQ ID NO: 130510 - DNA, 75 bp, synthetic construct
  source 1..75: mol_type = other DNA
gatttacggggacggggggtaaatatgaacctgcggggattgttcatcgcggggagtttgtcttcacgaaggagg

SEQ ID NO: 130511 - DNA, 75 bp, synthetic construct
  source 1..75: mol_type = other DNA
cgcgaagcaggcggcaatcagcgcaaaagcccgcggactcaccgaccgtcaggcgcagcgggagtcggaagagca

SEQ ID NO: 130512 - DNA, 75 bp, synthetic construct
  source 1..75: mol_type = other DNA
ccatgagaaagagacgctggagtacaaacgccagctggctgagctgggcgacaaggttgaataccagaaacggct

SEQ ID NO: 130513 - DNA, 75 bp, synthetic construct
  source 1..75: mol_type = other DNA
tggcaacaaagcggcgatcaacaatttatcaggcttgccgatgacacctggcggcagctatcaataaaacaataa

SEQ ID NO: 130514 - DNA, 75 bp, synthetic construct
  source 1..75: mol_type = other DNA
gcgttttggctggcgaataacgctgttgccgttactggaactgtactggcagcaaagcgatccggcgcggcggac

SEQ ID NO: 130515 - DNA, 75 bp, synthetic construct
  source 1..75: mol_type = other DNA
acacagccggactgacagctgaccgcatgctggcactggcgcggaacggacaggcagcggggctaacgttcaacc

SEQ ID NO: 130516 - DNA, 75 bp, synthetic construct
  source 1..75: mol_type = other DNA
ttcgcttcagtgggtctacagcgtggtgaagcgtgtaagaaaagaagaaatcagccggttacaggggcagttatt

SEQ ID NO: 130517 - DNA, 75 bp, synthetic construct
  source 1..75: mol_type = other DNA
atcccatgcaatctcgcgcaggatgtttgcacgcactgctgaagatatggctcaggagctctacgacgatgccga

SEQ ID NO: 130518 - DNA, 75 bp, synthetic construct
  source 1..75: mol_type = other DNA
ggccaggcagagcgagctcaacaaggcgctgaaagaggggcggatcctccaggctgactacaacatcaacctggc

SEQ ID NO: 130519 - DNA, 75 bp, synthetic construct
  source 1..75: mol_type = other DNA
gctggatatggcgcagcagcaggcgggaattgccagggcgaacgaagagaatgcatcgcgcgaagcggctgcgga

SEQ ID NO: 130520 - DNA, 75 bp, synthetic construct
  source 1..75: mol_type = other DNA
gtggcaaaagccgaagccgcgttcaaaaaagctgatgaaatctggaacctgcgtaaaggtgaccgatatgtcaat

SEQ ID NO: 130521 - DNA, 75 bp, synthetic construct
  source 1..75: mol_type = other DNA
atgaaaggagtaacccgtcaaacggggattatcagcgatattgacgaaaccagtgttcgggtacgggtcactcta

SEQ ID NO: 130522 - DNA, 75 bp, synthetic construct
  source 1..75: mol_type = other DNA
gtaaggtggatgttaaagcgatgactgtaacggtagacgcaccgctcagtacctttaccggcaacgtcacggtga

SEQ ID NO: 130523 - DNA, 75 bp, synthetic construct
  source 1..75: mol_type = other DNA
tgaaaaaactcacctggcttggcgggatggcaggaagtggaggcatcggtaacgccgccacgataactggcaatg

SEQ ID NO: 130524 - DNA, 75 bp, synthetic construct
  source 1..75: mol_type = other DNA
cgacgctgttcaaagccgtcgagggcctgaaaaaacagcagggcctgaaggaccttttgggctttttgcacaagg

SEQ ID NO: 130525 - DNA, 75 bp, synthetic construct
  source 1..75: mol_type = other DNA
gagagtgattgactgttctgaaaacttcttgcaatttttaccgccgtcgatgccccagtacctgtatacactgcg

SEQ ID NO: 130526 - DNA, 75 bp, synthetic construct
  source 1..75: mol_type = other DNA
tggtattgtcggtgaagtcgatggtgatgaccccgcagtattcagaccaatacaaaaatacatcaatggcacatg

SEQ ID NO: 130527 - DNA, 75 bp, synthetic construct
  source 1..75: mol_type = other DNA
atgcagaaaggggtgatgtatgagaaagcagggcacgtaattaccgggcttggtattgtcggtgaagtcgatggt

SEQ ID NO: 130528 - DNA, 75 bp, synthetic construct
  source 1..75: mol_type = other DNA
acgggaaatacactgcacaggatgccaccacagcgcgaaaagggcttgttcagctcagtagcgccaccaacagtg

SEQ ID NO: 130529 - DNA, 75 bp, synthetic construct
  source 1..75: mol_type = other DNA
cagcccccgaaactgatgatactgaagtgctgtgaaaactatattatctggctacctgagctgtcgactaacctg

SEQ ID NO: 130530 - DNA, 75 bp, synthetic construct
  source 1..75: mol_type = other DNA
tatcggaacatccagtgctcttggcggtaactcgattgttttgggtgataatgacacgggctttaaacaaaatgg

SEQ ID NO: 130531 - DNA, 75 bp, synthetic construct
  source 1..75: mol_type = other DNA
gtctgattggtggtgccggatataatgttaactaccctatgcaggctggtatatctgaacttgttcttcgtgcgg

SEQ ID NO: 130532 - DNA, 75 bp, synthetic construct
  source 1..75: mol_type = other DNA
cggcgaacttccatttcgcgaccggaggatttacggggacgggcggcaaatatgagcctgcggggattgttcatc

SEQ ID NO: 130533 - DNA, 75 bp, synthetic construct
  source 1..75: mol_type = other DNA
ggcctggtggaccttttagactttttgcgcaaggaaggccagtttgacctggagggactcgaggagctggaggac

SEQ ID NO: 130534 - DNA, 75 bp, synthetic construct
  source 1..75: mol_type = other DNA
gaacctgccggtattgtccaccgcggggagtttgtcttcacgaaggaggcaaccagccggattggcgtcggcaac

SEQ ID NO: 130535 - DNA, 75 bp, synthetic construct
  source 1..75: mol_type = other DNA
tatacaatcctgatttacatgcattatgtgagcttccggacatttgttgtaagatcttccctaaagaaaataatg

SEQ ID NO: 130536 - DNA, 75 bp, synthetic construct
  source 1..75: mol_type = other DNA
ctgaaatgattatcgcacgtgaaatgggagaaatctttagctacatgcctggggaaatagacagttatatgaaat

SEQ ID NO: 130537 - DNA, 75 bp, synthetic construct
  source 1..75: mol_type = other DNA
gagtcggaagagcagcgccttcgtgacgtgtacggtgataatccggatgcgctggcgaaggccacatctgcactg

SEQ ID NO: 130538 - DNA, 75 bp, synthetic construct
  source 1..75: mol_type = other DNA
cgtaggttgggcaggaatgagtctggtaggcgatatgtttattatgatctgctggattattccttttttattttg

SEQ ID NO: 130539 - DNA, 75 bp, synthetic construct
  source 1..75: mol_type = other DNA
gaaccctggcatcttgactggcatatcgggttaatgagtattgtcgtgggcgataaacaacgtttcttgcctcaa

SEQ ID NO: 130540 - DNA, 75 bp, synthetic construct
  source 1..75: mol_type = other DNA
ttccaggacagcacgggggccccctggcctctggcggcaccgccgatgaatccgaatgagcatctctttcagatc

SEQ ID NO: 130541 - DNA, 75 bp, synthetic construct
  source 1..75: mol_type = other DNA
tggtgctggtggcggtgcaggtggcggaggcgcggtggctggtaatcaagctgatgttaatcgaaacaagcttta

SEQ ID NO: 130542 - DNA, 75 bp, synthetic construct
  source 1..75: mol_type = other DNA
tgttggggcggagctattccggtggtggttctggcgctggtggcggtgcgggaggtggaggcggtggtggttggt

SEQ ID NO: 130543 - DNA, 75 bp, synthetic construct
  source 1..75: mol_type = other DNA
ctgaccggttatctcactggcatggggtatatttttctgccaaagtttacccaaactgggcagcaacgttatgcc

SEQ ID NO: 130544 - DNA, 75 bp, synthetic construct
  source 1..75: mol_type = other DNA
cagctccatcagcaaaaggggatgataagtttatcaccaccgactatttgcaacagtgccccatcagggacaaag

SEQ ID NO: 130545 - DNA, 75 bp, synthetic construct
  source 1..75: mol_type = other DNA
aaaaaatcaaaggaatgggtgcagcgaaaaacggatcacagcaatatcgcttcgttaaaaatgatttttataact

SEQ ID NO: 130546 - DNA, 75 bp, synthetic construct
  source 1..75: mol_type = other DNA
atgtctaacgttaccatttctaaaaaatccatcatcgacgctgctgtagttatcgctaatgaattgcaagttgca

SEQ ID NO: 130547 - DNA, 75 bp, synthetic construct
  source 1..75: mol_type = other DNA
acaggaacgccggggacatccgcgcagggtacgcggggaagtgtgccggcctcccccatcagcggcaccgccccc

SEQ ID NO: 130548 - DNA, 75 bp, synthetic construct
  source 1..75: mol_type = other DNA
attgatgccattgacagtgtgcgccccaaagcggcactaatcgcatactgtcgtcgcaataaaatcccattggta

SEQ ID NO: 130549 - DNA, 75 bp, synthetic construct
  source 1..75: mol_type = other DNA
gatggtgaccgccacctttggttttgttgcggtttctcatgcgttgaagaagatgatggcgaaagctgcgcgtca

SEQ ID NO: 130550 - DNA, 75 bp, synthetic construct
  source 1..75: mol_type = other DNA
cgcaggcactactgacacgggtatgatcggtatgcaactcgatgccaacgccacggcggatgcggtaatcgaaaa

SEQ ID NO: 130551 - DNA, 75 bp, synthetic construct
  source 1..75: mol_type = other DNA
gcgagtttattcttgataacgacaagaatgctgtgcacatcaaccagtccggtacgctttataataccggtcaca

SEQ ID NO: 130552 - DNA, 75 bp, synthetic construct
  source 1..75: mol_type = other DNA
ttataatactgcggtgtttaacaacagcggtgacttcattctaaataacagcagaaatgctattcacttatatca

SEQ ID NO: 130553 - DNA, 75 bp, synthetic construct
  source 1..75: mol_type = other DNA
gcgaccgatgtcagcatcgacgccactaaggtcgatgttaaagcggcagcagtgacggtagatgcgcccatgagc

SEQ ID NO: 130554 - DNA, 75 bp, synthetic construct
  source 1..75: mol_type = other DNA
agatggagtagtgctgggcgcagtatattcaacggtagataccgcgccagtagcatcgcgcgataaaaggtatgt

SEQ ID NO: 130555 - DNA, 75 bp, synthetic construct
  source 1..75: mol_type = other DNA
cggtagccaggcgaccacggtattccgcgaagcgcgcgtgttaagcaaccgctttagtatgctggcagatgccgc

SEQ ID NO: 130556 - DNA, 75 bp, synthetic construct
  source 1..75: mol_type = other DNA
ctgagttgcggggcctataccagtttgttggggcggagctattccggtggtggtgctggtggcggtgcgggtggc

SEQ ID NO: 130557 - DNA, 75 bp, synthetic construct
  source 1..75: mol_type = other DNA
cgtttgaaatctataagacccgattttctctccagttgcctgatattgcgggtaatccatttagcgaaattgatc

SEQ ID NO: 130558 - DNA, 75 bp, synthetic construct
  source 1..75: mol_type = other DNA
gacattaaagagaacattcattttcaggcgagaaatcagcagattaagcatggattttatcgtgatttgcctcga

SEQ ID NO: 130559 - DNA, 75 bp, synthetic construct
  source 1..75: mol_type = other DNA
acttcccccttcagcaccaacggaagagatatcgcagaccgattttcagtcggttatgaaaaacttgcttaagcg

SEQ ID NO: 130560 - DNA, 75 bp, synthetic construct
  source 1..75: mol_type = other DNA
gtatcaccccatcactcacagcggctgttagcgccccggaaattgcccgtagtggcgttttgttctcattacaga

SEQ ID NO: 130561 - DNA, 75 bp, synthetic construct
  source 1..75: mol_type = other DNA
atgatggcagggatatatcgctgcattttgctgttgatagcagggctgtttgtatcatctctaagttatgcgaaa

SEQ ID NO: 130562 - DNA, 75 bp, synthetic construct
  source 1..75: mol_type = other DNA
gggatgccattctggatatcggtcgtccggaatcctcagcggatatgctcgccagtgcgcagagggcatttgatg

SEQ ID NO: 130563 - DNA, 75 bp, synthetic construct
  source 1..75: mol_type = other DNA
aaaacatgtttaagataatgggtgatcaatttgaacgtcatctttatgatgaaaaatatatgaatatggttatgg

SEQ ID NO: 130564 - DNA, 75 bp, synthetic construct
  source 1..75: mol_type = other DNA
tcccactatcagaggtagcagcaaaggatgagtttctgaacatcaagaacgtgagccgcgatgacatgatggcag

SEQ ID NO: 130565 - DNA, 75 bp, synthetic construct
  source 1..75: mol_type = other DNA
cagcgccaactttgccacagcattgctgttgatgctcggtggtgcgggcatcattggtagcgtcattttcggtaa

SEQ ID NO: 130566 - DNA, 75 bp, synthetic construct
  source 1..75: mol_type = other DNA
gctggcagtcgccgccttcatcttcaacaccaccgaatttgtccctgttggcctgctctctgacattgcgcaaag

SEQ ID NO: 130567 - DNA, 75 bp, synthetic construct
  source 1..75: mol_type = other DNA
taccagtatggaaaccgcatttgctgaactcagcaaggacgccacgaagctgccgggcaacaatccggccggtgg

SEQ ID NO: 130568 - DNA, 75 bp, synthetic construct
  source 1..75: mol_type = other DNA
gtacaccgtgccggggccgtttgatgcgatcttctgtcgtaacgtcatgatctacttcgatcaaactacccagca

SEQ ID NO: 130569 - DNA, 75 bp, synthetic construct
  source 1..75: mol_type = other DNA
ttgtggggcagtatttcggctggcgaacaaccttcttcgcgattggtatcggggcgcttatcacccttttgtgcc

SEQ ID NO: 130570 - DNA, 75 bp, synthetic construct
  source 1..75: mol_type = other DNA
ttattgggagcgtgattttcggcaagctgggtaatcaatacgcttccccactggtcagcgcggcaattgcgctac

SEQ ID NO: 130571 - DNA, 75 bp, synthetic construct
  source 1..75: mol_type = other DNA
aacgagcgcaggcattaagccttatcgccaccggcacagctctggcaatggtattaggtttacccatcggacgta

SEQ ID NO: 130572 - DNA, 75 bp, synthetic construct
  source 1..75: mol_type = other DNA
tttacaaaaaaggcttgaggaggtaaacacatgggtaagtgatgaaatagttcgctttaaagattatgttttata

SEQ ID NO: 130573 - DNA, 75 bp, synthetic construct
  source 1..75: mol_type = other DNA
ctactggtttgtgcaatacggcatgaccacgcagccgtatcagtttacgaaaggcagcatctttcatctgatgga

SEQ ID NO: 130574 - DNA, 75 bp, synthetic construct
  source 1..75: mol_type = other DNA
ctgcggcgacgaaacagatccagcttaaaagccagactacagccgaagtattcagcttcggcgatcccgttcctg

SEQ ID NO: 130575 - DNA, 75 bp, synthetic construct
  source 1..75: mol_type = other DNA
ggggatgtggagaaggcaagtcgggtatttgttcgtaatgaattaatacctttgcaaaaacgtttcgaagaatta

SEQ ID NO: 130576 - DNA, 75 bp, synthetic construct
  source 1..75: mol_type = other DNA
taaaagccagactacagccgaagcattcagcttcggcgatcccgttcctgttctggatcgccgagaactgctgga

SEQ ID NO: 130577 - DNA, 75 bp, synthetic construct
  source 1..75: mol_type = other DNA
tctttgtacgtaatgagttaacgcctctacaacaaagaattaaagaactaaacgaatggataggcgaccatgtca

SEQ ID NO: 130578 - DNA, 75 bp, synthetic construct
  source 1..75: mol_type = other DNA
ttgagcagcagcagggcgcgaagcaggcggcaatcagtgcccaggcgcggggcctcaccgaccgtcaggcgcagc

SEQ ID NO: 130579 - DNA, 75 bp, synthetic construct
  source 1..75: mol_type = other DNA
attgcaaaggaaaatactcgatctcaatgattggcttggatcagacataattaattttgatgagtacataatcta

SEQ ID NO: 130580 - DNA, 75 bp, synthetic construct
  source 1..75: mol_type = other DNA
gtttttgaatatcaagaacgtgagccgggatgacatgttggcagcgcaccgcgtaccgccgcagatgatggggat

SEQ ID NO: 130581 - DNA, 75 bp, synthetic construct
  source 1..75: mol_type = other DNA
tactggaccgccgcgaactgctggactatgtggaatgtgtacagacagatcgctggtatgagccgcctgtgagtt

SEQ ID NO: 130582 - DNA, 75 bp, synthetic construct
  source 1..75: mol_type = other DNA
ctgtatcgtctgatgcgcgggtatgcggaaggtggttatgtgggcggtgccggaagtccggcgcagatgcggcgg

SEQ ID NO: 130583 - DNA, 75 bp, synthetic construct
  source 1..75: mol_type = other DNA
atgccacaacgaatgtttttaacgatgttaattgtcgtctgtgtgacgatactgtgttttgtctggatggtgagg

SEQ ID NO: 130584 - DNA, 75 bp, synthetic construct
  source 1..75: mol_type = other DNA
ggtggtggtgcatctgcttcctcggggacggccattgaggctgcggcggcgaacttccatttcgcgaccggagga

SEQ ID NO: 130585 - DNA, 75 bp, synthetic construct
  source 1..75: mol_type = other DNA
tccggaatcttctgcggacatgctcgccagtgcgcagaaggcatttgatgaagcggataaaaaatggcagtggta

SEQ ID NO: 130586 - DNA, 75 bp, synthetic construct
  source 1..75: mol_type = other DNA
gaatgccggtgtgcgtggtggtgagcagtttgatgccatcaaccagagtgtggcgcgttttgcttctgtatccgg

SEQ ID NO: 130587 - DNA, 75 bp, synthetic construct
  source 1..75: mol_type = other DNA
cggtttatgacgtagcccgtaaggcggcaatggatgttgtgaccgggcagatgcgtgatggtggtctgttctccg

SEQ ID NO: 130588 - DNA, 75 bp, synthetic construct
  source 1..75: mol_type = other DNA
atgtgcagagcttaggcgtgatttatatcaatcataactttgccactgaaagtgaagcacgtcaggcattaaacg

SEQ ID NO: 130589 - DNA, 75 bp, synthetic construct
  source 1..75: mol_type = other DNA
tggctgtgcttttgctaagtgcaaatacatgggcagccattgaaattaataaccaccaggccagaaatatggacg

SEQ ID NO: 130590 - DNA, 75 bp, synthetic construct
  source 1..75: mol_type = other DNA
aaagacctgggcggctgaagacctgcttcgcgggaactggatggcaggcctcaggtccggctggagtgagtggga

SEQ ID NO: 130591 - DNA, 75 bp, synthetic construct
  source 1..75: mol_type = other DNA
tatcagaggttgcggcgaaagatgagtttctgaacatcaagaacgtgagccgcgatgacatgatggcagcgcacc

SEQ ID NO: 130592 - DNA, 75 bp, synthetic construct
  source 1..75: mol_type = other DNA
tcaccgattgctgttaagcgtgacattctcagcagtacctacattccgcaccgcctgctcagccagcaggctttt

SEQ ID NO: 130593 - DNA, 75 bp, synthetic construct
  source 1..75: mol_type = other DNA
atggccgctggtatgaaccaccgatcagcccttacgggctggcgcgcatgttcgacgttgccgcctatcaccagt

SEQ ID NO: 130594 - DNA, 75 bp, synthetic construct
  source 1..75: mol_type = other DNA
ggatgccattttcgactctgtttcggttgccactacttatcgcgaaaaactggcggagcagggaattattttctg

SEQ ID NO: 130595 - DNA, 75 bp, synthetic construct
  source 1..75: mol_type = other DNA
ggtggtggaagtcatcatccataaaaacgccgaggtgaaatattccacggtgcaaaactggttccctggcgataa

SEQ ID NO: 130596 - DNA, 75 bp, synthetic construct
  source 1..75: mol_type = other DNA
caaagacgtgttctcggaactgccgctgaagcacaaaaactcctcgccatcagccttgagcatagcgtcggataa

SEQ ID NO: 130597 - DNA, 75 bp, synthetic construct
  source 1..75: mol_type = other DNA
cggcgaactttcattttgcgaccggcggatttacgggcacgggcggcaaatatgagcctgcggggatagttcacc

SEQ ID NO: 130598 - DNA, 75 bp, synthetic construct
  source 1..75: mol_type = other DNA
acttccatttcgcgaccgggggatttacgggaaccggtggcaaatatgagccagcggggattgtccaccgcgggg

SEQ ID NO: 130599 - DNA, 75 bp, synthetic construct
  source 1..75: mol_type = other DNA
gcagaaccaggaagatgtgaacaacctccgcaacgcaatgaaaagcgccaaaggtccgggcaacttccgcaacct

SEQ ID NO: 130600 - DNA, 75 bp, synthetic construct
  source 1..75: mol_type = other DNA
tcgcaaactccgggctgaatattaaggataacggccatctcactgtccagagcggacttctgagtgacagcagta

SEQ ID NO: 130601 - DNA, 75 bp, synthetic construct
  source 1..75: mol_type = other DNA
ccggcggttatgtcggtggcaccggaagtccggcgcaaatgcggcgttcagagggtatcagatttgagcagaaca

SEQ ID NO: 130602 - DNA, 75 bp, synthetic construct
  source 1..75: mol_type = other DNA
ataatacccacacacaagattttggggtgactgaatggttactggcagcgaaatccattggcttaaaagcaaaat

SEQ ID NO: 130603 - DNA, 75 bp, synthetic construct
  source 1..75: mol_type = other DNA
attgaggcagccagacttgcaggtgcccatgattttattagagaactaaaagaagggtacaatactattgttgga

SEQ ID NO: 130604 - DNA, 75 bp, synthetic construct
  source 1..75: mol_type = other DNA
tgtttatatcacccttattacgtcgacgtcttgatgataagtttctcaggaatgcagaaaatcaagcttttcttg

SEQ ID NO: 130605 - DNA, 75 bp, synthetic construct
  source 1..75: mol_type = other DNA
atggaaaaattaaatagcatggagcgttttctaatactctttgaacgcttcattaaaaagctcgaagaatctgga

SEQ ID NO: 130606 - DNA, 75 bp, synthetic construct
  source 1..75: mol_type = other DNA
gataatatagagttagctaacagagatgtcgttttatcttttatgcttacctcttattactgcttcataaacaat

SEQ ID NO: 130607 - DNA, 75 bp, synthetic construct
  source 1..75: mol_type = other DNA
cagccgacaaaaaagcagcagaaaaagcggctgctgaaaaggcagcagctgataagaaagcagcggcagaaaaag

SEQ ID NO: 130608 - DNA, 75 bp, synthetic construct
  source 1..75: mol_type = other DNA
atggaaagaaaacagaaaatatcattatttaattatatttactcattaatggatacaagaggtaaacttttattc

SEQ ID NO: 130609 - DNA, 75 bp, synthetic construct
  source 1..75: mol_type = other DNA
tgttgcaattaatacactacctcgaaccggaatgaatgcccagcttcaggcggtaggtctgggttacggcgtcag

SEQ ID NO: 130610 - DNA, 75 bp, synthetic construct
  source 1..75: mol_type = other DNA
ccttgttatgttatatggtcattgtttatatcacccttattacgtcgacgtcttgatgataaatttctcaggaat

SEQ ID NO: 130611 - DNA, 75 bp, synthetic construct
  source 1..75: mol_type = other DNA
atgttttttaaaacgtcaaatcccgcagcactgctggcgtgggaccagtttatggcggactgtctgaaactacgc

SEQ ID NO: 130612 - DNA, 75 bp, synthetic construct
  source 1..75: mol_type = other DNA
tgaaaacaaagatcgttaccacttatcaggggttgccgatctgccagttaaccaaaaatatctactcaaacgatg

SEQ ID NO: 130613 - DNA, 75 bp, synthetic construct
  source 1..75: mol_type = other DNA
ccagcaggactgccagaaagttaaggatgaggcaaaacgccttgaggccgtgctgaatgttgcgtgccggtcggt

SEQ ID NO: 130614 - DNA, 75 bp, synthetic construct
  source 1..75: mol_type = other DNA
atatcgaggttgaggctgtcacaaaaatgctggcctgcggcacgcggatactgggcgtgaaggaatacaactgcg

SEQ ID NO: 130615 - DNA, 75 bp, synthetic construct
  source 1..75: mol_type = other DNA
ccagaatacgacattggagaacgtgcctttacttacaatctgggggaagtggacgcgctcaaagtagagactgaa

SEQ ID NO: 130616 - DNA, 75 bp, synthetic construct
  source 1..75: mol_type = other DNA
gtgcctgcccgtcctgcggaaaaaaggccacagacctgtggatagcgacacagctgaatcgtcttcctgactgcg

SEQ ID NO: 130617 - DNA, 75 bp, synthetic construct
  source 1..75: mol_type = other DNA
taacctgcggggggctgaataagcacggtcagtggaaaaagctgagcttcctgaaagacgcaatgcgttcgcggt

SEQ ID NO: 130618 - DNA, 75 bp, synthetic construct
  source 1..75: mol_type = other DNA
tggcatccgcatgtacatgtgtcagtaacctgcggggggctgaataagcacggtcagtggaaaaagctgagcttc

SEQ ID NO: 130619 - DNA, 75 bp, synthetic construct
  source 1..75: mol_type = other DNA
ccaaccagtgctggacgtccttcctggatgcgggcggtctgcgcgatatcgaggttgaggctgtcaccaaaatgc

SEQ ID NO: 130620 - DNA, 75 bp, synthetic construct
  source 1..75: mol_type = other DNA
atgggacgtcgcagcagcattgattctctcccgacagaagtacgccgctggctggagcgtgccctgacggagaat

SEQ ID NO: 130621 - DNA, 75 bp, synthetic construct
  source 1..75: mol_type = other DNA
aatgaccattatcagcgaatcgggtactcagaccacgcagacacctgatgcctttttaaccagctatcaacgaca

SEQ ID NO: 130622 - DNA, 75 bp, synthetic construct
  source 1..75: mol_type = other DNA
cattaaaaagctcgaagagtctggattgtctgagtcagacatattagaaaagtcttaccttttctgtgtaggttt

SEQ ID NO: 130623 - DNA, 75 bp, synthetic construct
  source 1..75: mol_type = other DNA
caccggaagctgcagatttgattgttgatggcgcagttgtcaccgtctcctcctccagtggaatggggtgtccgg

SEQ ID NO: 130624 - DNA, 75 bp, synthetic construct
  source 1..75: mol_type = other DNA
atgaatgctctggaaaaacaggcgaagtccggcgacacccgcctgagcctggaaaccctgaagatggtgcgggaa

SEQ ID NO: 130625 - DNA, 75 bp, synthetic construct
  source 1..75: mol_type = other DNA
gttctgccgggatgatggcactgattcagaccgagatgctggatgttctgatgcgtctgcaggaaatcggggaaa

SEQ ID NO: 130626 - DNA, 75 bp, synthetic construct
  source 1..75: mol_type = other DNA
taaaagccaaacttcagccgaagcattcagcttcggtgatcccgttcctgttctggaccgccgtgaactgctgga

SEQ ID NO: 130627 - DNA, 75 bp, synthetic construct
  source 1..75: mol_type = other DNA
aaggccctggcaacttccgtaatctgtttatgtactcgcccaacggcaaaaaggacggacttcagatcattcctc

SEQ ID NO: 130628 - DNA, 75 bp, synthetic construct
  source 1..75: mol_type = other DNA
cccgacgagggttagacctggagacctactggtttgtgcaatacggcatgactacgcagccgtatcagttcacga

SEQ ID NO: 130629 - DNA, 75 bp, synthetic construct
  source 1..75: mol_type = other DNA
ggggatgtggagaaggcgagtaatgtttttgtaagaaatgaactaacatcattgcaaaaaagatttgaagaattg

SEQ ID NO: 130630 - DNA, 75 bp, synthetic construct
  source 1..75: mol_type = other DNA
tgctgctgtttttttctggtctgaagataaaggtccggcatgctatcaggtcagcgatgaacaggccagaacgtt

SEQ ID NO: 130631 - DNA, 75 bp, synthetic construct
  source 1..75: mol_type = other DNA
actacagaaaaggctacaggagcttaacgactggcttggtgaagaagtgatccgcttcgagccttacaccatgtg

SEQ ID NO: 130632 - DNA, 75 bp, synthetic construct
  source 1..75: mol_type = other DNA
gcgtgccgcctcagatgatgggaattatgcctagcaatgttggcgggtttggtgatgtggagaaggccagtaagg

SEQ ID NO: 130633 - DNA, 75 bp, synthetic construct
  source 1..75: mol_type = other DNA
ttccgtcagcactgctcaacgagtccgccacgctgttccgacgcaaatattatattaatggcagccatgcaggat

SEQ ID NO: 130634 - DNA, 75 bp, synthetic construct
  source 1..75: mol_type = other DNA
tttttgtccgcaacgaactgatgcccctgcagaaacagctacaagaacttaactattggctaggcgaagaagcaa

SEQ ID NO: 130635 - DNA, 75 bp, synthetic construct
  source 1..75: mol_type = other DNA
aatgagtggctatgtgacgaggttatcaagtttgacccctacaaacttgatattgaagataacaatcactctgct

SEQ ID NO: 130636 - DNA, 75 bp, synthetic construct
  source 1..75: mol_type = other DNA
ggcctgcccggttatctttcagccattccgtccgccctgctcaatgagtccgccacgctgttccgtcgaaagtat

SEQ ID NO: 130637 - DNA, 75 bp, synthetic construct
  source 1..75: mol_type = other DNA
tatttgttaggaatgaattaaccccccttcagaagcgatttagtgagttaaacgaatggattaatgaaaaaataa

SEQ ID NO: 130638 - DNA, 75 bp, synthetic construct
  source 1..75: mol_type = other DNA
tcagatccagcttctgaatgccgatggtaccacaccgatattactcggtactgattctgctggtcaggcggtaac

SEQ ID NO: 130639 - DNA, 75 bp, synthetic construct
  source 1..75: mol_type = other DNA
ataggggagtcggccttgacttgggggctatcgaggacaattccatcaataggccaagaccctatctataccatt

SEQ ID NO: 130640 - DNA, 75 bp, synthetic construct
  source 1..75: mol_type = other DNA
cgcggcgactgcggcatcgcggcaggacattgaggcgcaggaggcgcaggcgaaggcggaacaggaagaagcgca

SEQ ID NO: 130641 - DNA, 75 bp, synthetic construct
  source 1..75: mol_type = other DNA
actaccggtcatcaccctgatacgtattctggtctgcctgttactgatgagcaccattgcagcactgtgtgcctc

SEQ ID NO: 130642 - DNA, 75 bp, synthetic construct
  source 1..75: mol_type = other DNA
ctaccaactgtctccacaaaatcattaaattcacccgggaaggtagcaggccttactcctttcacaatttcactg

SEQ ID NO: 130643 - DNA, 75 bp, synthetic construct
  source 1..75: mol_type = other DNA
agtccagattcagcttctgaatgctgatggtaccacacagatactacttggtaatgattctgctaatcagggagt

SEQ ID NO: 130644 - DNA, 75 bp, synthetic construct
  source 1..75: mol_type = other DNA
cgccgccgtgcatcacagttccccgattgcagtaaagtgcaacattctgaccagtacctacatccctcacccgct

SEQ ID NO: 130645 - DNA, 75 bp, synthetic construct
  source 1..75: mol_type = other DNA
ccttcaagaacgaatgaaagaattaaataatcgactgggacaaatagttatcaactttatcccctatgaattgtt

SEQ ID NO: 130646 - DNA, 75 bp, synthetic construct
  source 1..75: mol_type = other DNA
tgtcagaagtcgcggcgaaggatgagtttctgaatatcaaaaatgtcagccgcgatgacatgatggcagcgcatc

SEQ ID NO: 130647 - DNA, 75 bp, synthetic construct
  source 1..75: mol_type = other DNA
atgggtgagctttaacccgaagaacatactcgacgatacctatcagcgattcgttgtaaatcctcccgatgatat

SEQ ID NO: 130648 - DNA, 75 bp, synthetic construct
  source 1..75: mol_type = other DNA
tgagtttctgaatatcaagaacgtgagccgggacgacatgatggcggcacaccgtgtgccgccgcaaatgatggg

SEQ ID NO: 130649 - DNA, 75 bp, synthetic construct
  source 1..75: mol_type = other DNA
gcagaaccaggaagatgtgaacaatctccgtaacgcgatgaaaagcgccaaaggtccgggtaacttccgcaatct

SEQ ID NO: 130650 - DNA, 75 bp, synthetic construct
  source 1..75: mol_type = other DNA
gatggcccgcaagggggcacaggatgaactccggctgcagttgcgtgatggcggtatgttatcagggagcggtgg

SEQ ID NO: 130651 - DNA, 75 bp, synthetic construct
  source 1..75: mol_type = other DNA
ggcccgcaagggtgcccgtgatgaaatccaggcacagatgcgcgatggtggtctgttctccggaggtggacgatg

SEQ ID NO: 130652 - DNA, 75 bp, synthetic construct
  source 1..75: mol_type = other DNA
ttcagggcgcatggaatgaccgggaaaatgcccgtctggggctggcagcggccacgctgcagtcagatatggaaa

SEQ ID NO: 130653 - DNA, 75 bp, synthetic construct
  source 1..75: mol_type = other DNA
ccgagctccggacgctggaaaaacacagcggtgcgaatgggaaaatcagccagcagcgtcgcgatttatggaaag

SEQ ID NO: 130654 - DNA, 75 bp, synthetic construct
  source 1..75: mol_type = other DNA
gctgatggcggcggcgaaaaaggattatgaatcgacgctgaaaaagccgaagtcgtcaggagtcaaagtgtcagc

SEQ ID NO: 130655 - DNA, 75 bp, synthetic construct
  source 1..75: mol_type = other DNA
gaccggaggatttacggggacgggcggcaaatatgagcctgcggggatagttcaccgcggggagtttgttttcac

SEQ ID NO: 130656 - DNA, 75 bp, synthetic construct
  source 1..75: mol_type = other DNA
ttatgacgtagcccgtaaggcggcaatggatgttgtgaccgggcagatgcgcgatggtggtctgttctccggagg

SEQ ID NO: 130657 - DNA, 75 bp, synthetic construct
  source 1..75: mol_type = other DNA
ggggctgttggtggcggcgcatccgcatcaggcggtacagccattcaggcagctgcggcgaaattccattttgca

SEQ ID NO: 130658 - DNA, 75 bp, synthetic construct
  source 1..75: mol_type = other DNA
gaaaaagccgaagtcgtcaggcgttaaagtgtcagccggtgagcgtcaggaagaccaggcgcatgccgctctgct

SEQ ID NO: 130659 - DNA, 75 bp, synthetic construct
  source 1..75: mol_type = other DNA
gaaaaagccgaagtcgtcaggcgtaaaagtgtcagccggtgagcgtcaggaagaccaggcgcatgccgcactgct

SEQ ID NO: 130660 - DNA, 75 bp, synthetic construct
  source 1..75: mol_type = other DNA
gaaaaagccgaagtcgtcaggcgtaaaagtgtcagccggtgagcgtcaggaagaccagacgcatgccgcgctgct

SEQ ID NO: 130661 - DNA, 75 bp, synthetic construct
  source 1..75: mol_type = other DNA
cagttatctgagcaggaaaaatccctgctggcgcataaagacgagacgctggagtacaaacgccagctggctgag

SEQ ID NO: 130662 - DNA, 75 bp, synthetic construct
  source 1..75: mol_type = other DNA
gccagaaaaaccgccagtactgttgaacaggggctgagccgacaggcgctggcggcacaaaaagccgggatatca

SEQ ID NO: 130663 - DNA, 75 bp, synthetic construct
  source 1..75: mol_type = other DNA
tggcagcggcaacgctgcagtcggatatggaaaaagccggtgaactggcggcaagggacagggctgagcgtgagt

SEQ ID NO: 130664 - DNA, 75 bp, synthetic construct
  source 1..75: mol_type = other DNA
actatctcgccgctgatcaggtgcctgctttcgtactgccacaacatccttccggtgttatgacgctttcggcgg

SEQ ID NO: 130665 - DNA, 75 bp, synthetic construct
  source 1..75: mol_type = other DNA
ttctaccgtggtctgaacgtcagcgaagcttctgtactggttacgcgcgcttccgatcacaatccgctactcgtt

SEQ ID NO: 130666 - DNA, 75 bp, synthetic construct
  source 1..75: mol_type = other DNA
atagtcgggagtatcggcagcgccattggcggtgctttcggtggtggtgcgtctgcctccacggggacggccatt

SEQ ID NO: 130667 - DNA, 75 bp, synthetic construct
  source 1..75: mol_type = other DNA
ggaaatctctaccggctgatgcgcggctatgccaccggcggttatgtcggtggcaccggaagtccggcgcaaatg

SEQ ID NO: 130668 - DNA, 75 bp, synthetic construct
  source 1..75: mol_type = other DNA
cactgacccgacgtcggggctgattgcgatggcgaagctgttccataacgtgacggcagagcagattgcgtatgt

SEQ ID NO: 130669 - DNA, 75 bp, synthetic construct
  source 1..75: mol_type = other DNA
ctgctggcgcttgaaaccgagctccggacgctggagaagcacagcggagcgaatgagaaaatcagccagcagcgc

SEQ ID NO: 130670 - DNA, 75 bp, synthetic construct
  source 1..75: mol_type = other DNA
tggtggggcgtctgcctccacggggacggccattgaggctgcggcggcgaacttccattttgcgaccggcggatt

SEQ ID NO: 130671 - DNA, 75 bp, synthetic construct
  source 1..75: mol_type = other DNA
tccagtgtattgctgcccgttacgtgaacgagaacccattttgcgtctggcgaagtcggcactggtgacggtcta

SEQ ID NO: 130672 - DNA, 75 bp, synthetic construct
  source 1..75: mol_type = other DNA
ggcggtgctttcggtggtggtgcatctgcttcctcggggacggccattgaggctgcggcggcgaacttccatttc

SEQ ID NO: 130673 - DNA, 75 bp, synthetic construct
  source 1..75: mol_type = other DNA
accttgataaacgtgcgcataaatatctcggtatggttcgccaggcgtcacgaaaatatggtgtcgatgagtcat

SEQ ID NO: 130674 - DNA, 75 bp, synthetic construct
  source 1..75: mol_type = other DNA
ggaatctttaccgtctgatgcgcggctatgcggaaggtggttatgtgggtggtgccggaagtccggcgcagatgc

SEQ ID NO: 130675 - DNA, 75 bp, synthetic construct
  source 1..75: mol_type = other DNA
gtgggcggtgccggaagtccggcgcagatgcggcgggcggaaggcattaattttaatcagaacaatcacgtggtg

SEQ ID NO: 130676 - DNA, 75 bp, synthetic construct
  source 1..75: mol_type = other DNA
ggtatttctgctggtctggtgacgctggccgtgctgttacgtcgcttctacccgcaggcgggcggtgcagacagt

SEQ ID NO: 130677 - DNA, 75 bp, synthetic construct
  source 1..75: mol_type = other DNA
gggcggcaaatatgagcctgcgggaattgttcatcgcggggagtttgttttcacgaaagaggcaaccagccggat

SEQ ID NO: 130678 - DNA, 75 bp, synthetic construct
  source 1..75: mol_type = other DNA
gacggacagtttttcgcaggttaaaagtgtggccacgcagacctttgacggtattgcacagaatatggcggcgat

SEQ ID NO: 130679 - DNA, 75 bp, synthetic construct
  source 1..75: mol_type = other DNA
tgtggggccagcctggtcggcgtgttgatgctgcgctttttcattctctacgccgggcagttaacggtggcgtaa

SEQ ID NO: 130680 - DNA, 75 bp, synthetic construct
  source 1..75: mol_type = other DNA
catttagccagcaggcggtagcggcgatggaaaaagaactcagtaaactccagcttgctgacagttatcagttac

SEQ ID NO: 130681 - DNA, 75 bp, synthetic construct
  source 1..75: mol_type = other DNA
cgtgacgctggaattaagcggttgcccgatagatgccaacggtttttgcccaatggataagtttgatagcgtatt

SEQ ID NO: 130682 - DNA, 75 bp, synthetic construct
  source 1..75: mol_type = other DNA
ggaaagtattgtcgaagctgaaaaacggctaccaggatagcctgtttacctcaccggaagtggcgcgcaatgttg

SEQ ID NO: 130683 - DNA, 75 bp, synthetic construct
  source 1..75: mol_type = other DNA
ggcggtgtatgacatggcccgtaagggggcgcaggatgagattcaggcgcagatgcgtgatggcggcgtattttc

SEQ ID NO: 130684 - DNA, 75 bp, synthetic construct
  source 1..75: mol_type = other DNA
gcagcaaacggcgttgcaggcgtcgtacaaagcgtttactgatatgcaaggattatcgctttttcagctcaataa

SEQ ID NO: 130685 - DNA, 75 bp, synthetic construct
  source 1..75: mol_type = other DNA
gactgcgccgtttagtgaggctaacggtgattatgtcggcggaacagaaagtattaagcaacaggtcgatgcttc

SEQ ID NO: 130686 - DNA, 75 bp, synthetic construct
  source 1..75: mol_type = other DNA
tgatgaaagcggtgtatgagatggcccgtaaaggtgcgcaggatgagctccggctgcagttgcgtgatggcggtc

SEQ ID NO: 130687 - DNA, 75 bp, synthetic construct
  source 1..75: mol_type = other DNA
agaaattggcgtgccgttgcaggcggatatgttcagcaacggcggtacggacggcggagcggtgcatttaaccgg

SEQ ID NO: 130688 - DNA, 75 bp, synthetic construct
  source 1..75: mol_type = other DNA
cgtcgctaccgcgcagttctttattaccggcgcattccctggatgtgatattcctgttcatcaccaggaaaaaat

SEQ ID NO: 130689 - DNA, 75 bp, synthetic construct
  source 1..75: mol_type = other DNA
aaagccaatcgcgacctgatgaaaatcgagtatgtgtaccagagtgcagaacagttacgtaatgctgacgcgtta

SEQ ID NO: 130690 - DNA, 75 bp, synthetic construct
  source 1..75: mol_type = other DNA
aaagatcgggccgagtctgaggcatcacggctgaaatataccgaagaggcgcagaaggcttacgaacggctgcag

SEQ ID NO: 130691 - DNA, 75 bp, synthetic construct
  source 1..75: mol_type = other DNA
atgagatggcccgtaaaggtgcgcaggatgagctccggctgcagttgcgtgatggcggtctgttatcggggagcg

SEQ ID NO: 130692 - DNA, 75 bp, synthetic construct
  source 1..75: mol_type = other DNA
ttcagaacgacggtacgaatggtctgccaggtccacagatgatgaaggcggtgtatgacatggcccgcaagggtg

SEQ ID NO: 130693 - DNA, 75 bp, synthetic construct
  source 1..75: mol_type = other DNA
gatggcccgtaaaggtgcgcaggatgagattcaggcgcagatgcgtgatggcggcgtattttccggaggcaggcg

SEQ ID NO: 130694 - DNA, 75 bp, synthetic construct
  source 1..75: mol_type = other DNA
agtcaccctgccaatggtcggggtcacctcgctggcggtggcaaccagtgcgctggtgtatgcctggtatcaggg

SEQ ID NO: 130695 - DNA, 75 bp, synthetic construct
  source 1..75: mol_type = other DNA
gcgacggacagtttttcgcaggttaaaagcgtggccacgcagacctttgacggtattgcacagaatatggcagcg

SEQ ID NO: 130696 - DNA, 75 bp, synthetic construct
  source 1..75: mol_type = other DNA
gtgaactggccgccagggaccgggccgaacgggacgcatcacagctgaagtataccggagaggcgcagaaggctt

SEQ ID NO: 130697 - DNA, 75 bp, synthetic construct
  source 1..75: mol_type = other DNA
catttcgcgaccggaggatttacgggaaccggtggcaaatacgaacctgccggtattgtccaccgcggggagttt

SEQ ID NO: 130698 - DNA, 75 bp, synthetic construct
  source 1..75: mol_type = other DNA
ttacgggaaccggcggcaaatacgaacctgccgggatagtccaccgcggggagtttgtcttcacgaaagaggcaa

SEQ ID NO: 130699 - DNA, 75 bp, synthetic construct
  source 1..75: mol_type = other DNA
tgctttcggtggtggtgcgtctgcctccacggggacggccattcaggctgcggcggcgaacttccatttcgcgac

SEQ ID NO: 130700 - DNA, 75 bp, synthetic construct
  source 1..75: mol_type = other DNA
gaaaaagccgaagtcgtcaggcgtgaaagtgtcagccggtgagcgtcaggaagaccaggcgcatgccgcgctgct

SEQ ID NO: 130701 - DNA, 75 bp, synthetic construct
  source 1..75: mol_type = other DNA
gaaaaagccgaagtcgtcaggcgtcaaagtgtcagccggtgagcgtcaggaagaccaggcgcatgccgccctgct

SEQ ID NO: 130702 - DNA, 75 bp, synthetic construct
  source 1..75: mol_type = other DNA
gaaaaagccgaagtcgtcaggcgtcaaagtgtcagccggtgagcgtcaggaagaccagccgcatgccgcgctgct

SEQ ID NO: 130703 - DNA, 75 bp, synthetic construct
  source 1..75: mol_type = other DNA
gcatgggaggacagagcgaatgcgcaacttgggctttcagccgccacgttgcaggccgatcttgaaaaggccaga

SEQ ID NO: 130704 - DNA, 75 bp, synthetic construct
  source 1..75: mol_type = other DNA
aatcaggctgtgcggtttgaacagcagcagagtgcgaagcaggctgcaatcagcgcaaaagcccgggggctgacg

SEQ ID NO: 130705 - DNA, 75 bp, synthetic construct
  source 1..75: mol_type = other DNA
ccgaactgcctgcggaagtgtggttggtggccagctccagcgaagaggtcggcttacgcggcgggcaaaccgcta

SEQ ID NO: 130706 - DNA, 75 bp, synthetic construct
  source 1..75: mol_type = other DNA
aaaaagaagtgcgatttgatgggctgggatcggtgctgatccgcctcaatgaatcgacaggtccgaaggtgatga

SEQ ID NO: 130707 - DNA, 75 bp, synthetic construct
  source 1..75: mol_type = other DNA
cgacattttgcaaatgcagcaacttttatctgcacttattcaacgtattacgcgtgagaccgttgttcaactgac

SEQ ID NO: 130708 - DNA, 75 bp, synthetic construct
  source 1..75: mol_type = other DNA
cgacattttgcagatgcagcagcttttatctgcccttattcaacgtcttacgcgtgagacggttgttcaactgac

SEQ ID NO: 130709 - DNA, 75 bp, synthetic construct
  source 1..75: mol_type = other DNA
ggtggccagttccagcgaagaggtggggttacgcggcgggcaaactgccacccgcgcggtgtcgccggacgtcgc

SEQ ID NO: 130710 - DNA, 75 bp, synthetic construct
  source 1..75: mol_type = other DNA
gcgccgcatcgattgccgattgccgtgacattttgcagatgcagcagcttttatctgcccttattcaacgtctta

SEQ ID NO: 130711 - DNA, 75 bp, synthetic construct
  source 1..75: mol_type = other DNA
cgccaatctgaaggattttgaggcacaattagcctcaaccgaaacgcaggttggtaacgagctcgcgccgctcaa

SEQ ID NO: 130712 - DNA, 75 bp, synthetic construct
  source 1..75: mol_type = other DNA
ggaggttttactacctgacggcgcttcagaacatgattattcactgcgtccatcagatgtaaaacgcttacagaa

SEQ ID NO: 130713 - DNA, 75 bp, synthetic construct
  source 1..75: mol_type = other DNA
caattagttgcaaccgataaacaggttggtaatgagctcgcgccgctcaagggaaaaggttatttcgtttttcat

SEQ ID NO: 130714 - DNA, 75 bp, synthetic construct
  source 1..75: mol_type = other DNA
atgaaatgttataatatcacacttctcatattcattacgattattggtcgcattatgttacataaaaaaacgctt

SEQ ID NO: 130715 - DNA, 75 bp, synthetic construct
  source 1..75: mol_type = other DNA
aagtgacgaagatcaccatcacggcgatttcaacatgcatctttggctttccccagagatagcgcgggctacagc

SEQ ID NO: 130716 - DNA, 75 bp, synthetic construct
  source 1..75: mol_type = other DNA
tcactccgcgtggtggatgaccgtgactctaccgaaacaccggcaacttatgccagccctcaccagttgctgtaa

SEQ ID NO: 130717 - DNA, 75 bp, synthetic construct
  source 1..75: mol_type = other DNA
tgctggtcgtgacgggcgttgccgtgccaatacattcctgcgccagactatcggtgggagtgtattgccacgtct

SEQ ID NO: 130718 - DNA, 75 bp, synthetic construct
  source 1..75: mol_type = other DNA
ccggtgagttttacaccatcaccgcgccatcacgattccatgcggtacacagcaaaggaggctttgtttcacaat

SEQ ID NO: 130719 - DNA, 75 bp, synthetic construct
  source 1..75: mol_type = other DNA
gggctgttaacccagaggattacgaatggcgttcccagtacctgcatgagatacccgactggttagccgggtatt

SEQ ID NO: 130720 - DNA, 75 bp, synthetic construct
  source 1..75: mol_type = other DNA
tttttctggcggcaacgccgccccttggagttctgtcaataactgtacggagggtggaacccgcagacggttaaa

SEQ ID NO: 130721 - DNA, 75 bp, synthetic construct
  source 1..75: mol_type = other DNA
gtgaagtggcagaaggtcgcgaagttggccgaagcgccagcggaggcgggtttttctggcggcaacgccgcccct

SEQ ID NO: 130722 - DNA, 75 bp, synthetic construct
  source 1..75: mol_type = other DNA
gtgatctggttgttcgtctggcttatgaaattacagagcagggcaatgaatatgcagaggacgtgcagcgcgttc

SEQ ID NO: 130723 - DNA, 75 bp, synthetic construct
  source 1..75: mol_type = other DNA
attattgctaacttaacgccgatgtgtaatgaatgtcagcagaataaaagttctgattattttgatgaggatggt

SEQ ID NO: 130724 - DNA, 75 bp, synthetic construct
  source 1..75: mol_type = other DNA
ttttctatagagggatattgaataatgccgacctacttaattatctagatcatggaaacttgcctgattttacat

SEQ ID NO: 130725 - DNA, 75 bp, synthetic construct
  source 1..75: mol_type = other DNA
gaattaaacctttgttgcatcagtgtgtgaaggttctggataaacctggtatcacgccagatggtttaacgttag

SEQ ID NO: 130726 - DNA, 75 bp, synthetic construct
  source 1..75: mol_type = other DNA
aaaaaactggctggccagatatctggctggatctcccagtcactttatgacttcaccgatcagtttgtgggcagc

SEQ ID NO: 130727 - DNA, 75 bp, synthetic construct
  source 1..75: mol_type = other DNA
gccaatacattcctgcgcaaaactatcggcgggaatgtattgccacgtctgcgcaaagtggctgcacgttacaag

SEQ ID NO: 130728 - DNA, 75 bp, synthetic construct
  source 1..75: mol_type = other DNA
ctggtaaaccgtacccacgtccttttccgaaagaaccggattgtcttacggattcttcgaatgaggataaatccg

SEQ ID NO: 130729 - DNA, 75 bp, synthetic construct
  source 1..75: mol_type = other DNA
ccgtcagccacgcgttgtgtttcctgtcagtcagtttttgaagcaaaaacaaacattaccggagaacggcatgag

SEQ ID NO: 130730 - DNA, 75 bp, synthetic construct
  source 1..75: mol_type = other DNA
aggaacaacaggctgaattactggagcggcagattaacgcggcaagggtaaaacattgcggtgcttctgcgctgg

SEQ ID NO: 130731 - DNA, 75 bp, synthetic construct
  source 1..75: mol_type = other DNA
aggctattatcttcagttaccgcccccgcccgaagatttgcttaagcagcatctttccgttatgggacacaatat

SEQ ID NO: 130732 - DNA, 75 bp, synthetic construct
  source 1..75: mol_type = other DNA
ctcgcgccgataagcggccggggatgagttccacgcaactgcgccagcaactacagggacgttatcaggaactgt

SEQ ID NO: 130733 - DNA, 75 bp, synthetic construct
  source 1..75: mol_type = other DNA
gtgccgatagccgctttgaacttattcagaaaaacgttggctatttctttaaagatattgaacgttcggccctga

SEQ ID NO: 130734 - DNA, 75 bp, synthetic construct
  source 1..75: mol_type = other DNA
agacgagttcacagacacacatcaaaaagttgagttggcaaaaaccttagcatcatactctcctacgttttcatt

SEQ ID NO: 130735 - DNA, 75 bp, synthetic construct
  source 1..75: mol_type = other DNA
gacgttcgcatcagctacgtgtgcatatgctggcgctgggtcatccgattctcggcgatcgtttttatgcttcac

SEQ ID NO: 130736 - DNA, 75 bp, synthetic construct
  source 1..75: mol_type = other DNA
tgctgctgtttatgcacccccaggacgtggacgccgtgcgcgatatcctttgctatcacgcccgcattgcagatt

SEQ ID NO: 130737 - DNA, 75 bp, synthetic construct
  source 1..75: mol_type = other DNA
ggctggtttttctggcggcaacgccgccccttggagttctgtcaataactgtacggagggaggaacccggagacg

SEQ ID NO: 130738 - DNA, 75 bp, synthetic construct
  source 1..75: mol_type = other DNA
aaactggtgaatgccgatattgagaaagtcaaacaggcattaactgagcaaggctattatcttcagttaccgccc

SEQ ID NO: 130739 - DNA, 75 bp, synthetic construct
  source 1..75: mol_type = other DNA
tccgccgtagctatctcgacaaaacgcatcagttttatgagaaacacggcggcaaaaccattattctcgcccgtt

SEQ ID NO: 130740 - DNA, 75 bp, synthetic construct
  source 1..75: mol_type = other DNA
ttttgattctgttctgcgaaacggggctggtggtaacgccattcctgcctggtgattcgctgctgtttgttgctg

SEQ ID NO: 130741 - DNA, 75 bp, synthetic construct
  source 1..75: mol_type = other DNA
cgcaacccgcctacgttaatgggatcatcgaaaatacccttaactgggggccttattatttgatagccccgggcg

SEQ ID NO: 130742 - DNA, 75 bp, synthetic construct
  source 1..75: mol_type = other DNA
gatactgatatttcggtgataaagacctcgtcatcaaagggggccccgtcagaagcgaaaaaagttccggtatgg

SEQ ID NO: 130743 - DNA, 75 bp, synthetic construct
  source 1..75: mol_type = other DNA
gcgtgcgctggcggcggccaccctgtcaaacctgatgagtgcgactatcgctggttttttcattgggctggcata

SEQ ID NO: 130744 - DNA, 75 bp, synthetic construct
  source 1..75: mol_type = other DNA
taactcgcgcctatggtgagtcatcgcaactaggcaacctgtttaccgatgcaatgcttgtcgctgctccgactg

SEQ ID NO: 130745 - DNA, 75 bp, synthetic construct
  source 1..75: mol_type = other DNA
aattcacgggcgatggtttcaatatactggcgcggaacgccggtaatttgctcgccccaggcaggggtacggtag

SEQ ID NO: 130746 - DNA, 75 bp, synthetic construct
  source 1..75: mol_type = other DNA
cgcatattggcgtggatgtgccgtgcgcggatgcgttcttcccggcgccaatgatgcgttctttagggttcgtac

SEQ ID NO: 130747 - DNA, 75 bp, synthetic construct
  source 1..75: mol_type = other DNA
tatctgcaaacgggtggcactctggatgctaaaaccgtggcgattatttctttcgcgttgtgcggtttcgctaac

SEQ ID NO: 130748 - DNA, 75 bp, synthetic construct
  source 1..75: mol_type = other DNA
ccagggcgttgggtcgcagaaaaagtcgcttttggcgtccataaagtgatggcgtacagcgacgcgggtagcgca

SEQ ID NO: 130749 - DNA, 75 bp, synthetic construct
  source 1..75: mol_type = other DNA
aatgtagatcctgccgcccatacccataaagtgaaaagctttgagttgaaaacactttatgcggatgaatggaaa

SEQ ID NO: 130750 - DNA, 75 bp, synthetic construct
  source 1..75: mol_type = other DNA
actggcaggaagtctgattggtcagaagctggcaattaacgaatttgttgcttatctcaatctttcaccctattt

SEQ ID NO: 130751 - DNA, 75 bp, synthetic construct
  source 1..75: mol_type = other DNA
cgacgttgttctctaaccacattcctgattatcgtaacttgatgaccagttatgacacgttaacgaagcagaaat

SEQ ID NO: 130752 - DNA, 75 bp, synthetic construct
  source 1..75: mol_type = other DNA
cggtattatcggcggcgttggcggctggtttggttttgaatatgcctcgctggagtctattttaggttacctgct

SEQ ID NO: 130753 - DNA, 75 bp, synthetic construct
  source 1..75: mol_type = other DNA
attcagatcccccggactttacctgaggcgttgcgatttgcggcaaaactggctgaacagaaagcagtgctggaa

SEQ ID NO: 130754 - DNA, 75 bp, synthetic construct
  source 1..75: mol_type = other DNA
gcgtggtatctgaagagcaacgcgtattccggcgctgtcagttcattttatcactgacactgatacctgctttat

SEQ ID NO: 130755 - DNA, 75 bp, synthetic construct
  source 1..75: mol_type = other DNA
cattctctatggggcggactcctgttctttttttttgttgcaggtagttatgcattcctggcttttcctcatttt

SEQ ID NO: 130756 - DNA, 75 bp, synthetic construct
  source 1..75: mol_type = other DNA
gatcgaatggctcaaggagtcatggctgctggcctcagcccagatgcagcacagcgaactgcgcagcggcgtcct

SEQ ID NO: 130757 - DNA, 75 bp, synthetic construct
  source 1..75: mol_type = other DNA
atccgtacagggcttatgcatgggacggagagaaaagcgtttacgtcgggtgctatccaaccgtgggtgaggctg

SEQ ID NO: 130758 - DNA, 75 bp, synthetic construct
  source 1..75: mol_type = other DNA
caaaaagtagtaagcaggagtatttgtttcagctcaggaagtgctcaaagctttctactcttgataaaattattc

SEQ ID NO: 130759 - DNA, 75 bp, synthetic construct
  source 1..75: mol_type = other DNA
aatgaagaagaaaaacaacgtctcactgctcgcctgaacgatcttcgccagcaactgaccgaaaccgcgccaccg

SEQ ID NO: 130760 - DNA, 75 bp, synthetic construct
  source 1..75: mol_type = other DNA
gacatatgtctactattagagtcataggtggtaacctgcatgggcgaaatgtgttattactggatgatgttaaga

SEQ ID NO: 130761 - DNA, 75 bp, synthetic construct
  source 1..75: mol_type = other DNA
gttttggtagcttgatgagcgatatgtcacatggtatcgattcattgactgatatctcttacagggtacgaggtt

SEQ ID NO: 130762 - DNA, 75 bp, synthetic construct
  source 1..75: mol_type = other DNA
cggtgacgtgggggggctcgctgtggcactgcaacagtatgaccggtgataaacccggagaagctcattcatcag

SEQ ID NO: 130763 - DNA, 75 bp, synthetic construct
  source 1..75: mol_type = other DNA
tttgatgtcaccacgctgctgagaatggacagtgagcggcgcatgaaaacgctgggggatgcggtgaaaaatacg

SEQ ID NO: 130764 - DNA, 75 bp, synthetic construct
  source 1..75: mol_type = other DNA
aggtcgtcgccgcggcagctacggcggcgcggtaggttatttcaccgcgcatggcgatctcgacacctgcattgt

SEQ ID NO: 130765 - DNA, 75 bp, synthetic construct
  source 1..75: mol_type = other DNA
tacattgcctaaatactattccactgccgaacagtataagaacggtatttcacaggtaggtgccgtcgccagttg

SEQ ID NO: 130766 - DNA, 75 bp, synthetic construct
  source 1..75: mol_type = other DNA
cggtaccgatcttttatagcccctatttgcagttgccggtgggtgacaaacgtcgctctggtttcttgatcccga

SEQ ID NO: 130767 - DNA, 75 bp, synthetic construct
  source 1..75: mol_type = other DNA
tcttgccgggagtttgattggacagaaactggcaataaatgaatttgtcgcttacctcaatttctcaccttatct

SEQ ID NO: 130768 - DNA, 75 bp, synthetic construct
  source 1..75: mol_type = other DNA
tgaataccgtcgggatgaagaccgtctggtacagctgaactaccgttacgccagcccggaatatattcaggctac

SEQ ID NO: 130769 - DNA, 75 bp, synthetic construct
  source 1..75: mol_type = other DNA
ctggcaccgggctttacccaaacgctggaaccgcgcgtgcagtatttgtacgtgccgtatcgcgatcagagcgat

SEQ ID NO: 130770 - DNA, 75 bp, synthetic construct
  source 1..75: mol_type = other DNA
gcagttagacgtcaactactaccataacgatctcggtccgtttgatacccgcatctatggtcaggctgtgcattt

SEQ ID NO: 130771 - DNA, 75 bp, synthetic construct
  source 1..75: mol_type = other DNA
cgccggaaatcgcccagcttggtttacgcgcgctggcggcgacactttctaacctgatgagcgctaccattgccg

SEQ ID NO: 130772 - DNA, 75 bp, synthetic construct
  source 1..75: mol_type = other DNA
catcatacactaaatcagtaagttggcagcatcacctaactatggatgtcatgagaagtgttctgggaatggtgg

SEQ ID NO: 130773 - DNA, 75 bp, synthetic construct
  source 1..75: mol_type = other DNA
aagctttacatatcagcaagattgagtcatttgttgctgtcaccaccattttcctcgggcaaaacgaaattccgg

SEQ ID NO: 130774 - DNA, 75 bp, synthetic construct
  source 1..75: mol_type = other DNA
cgccggaaatcgcccaacttggtttacgcgcgctggcggcggcgacactttctaacctgatgagtgccaccattg

SEQ ID NO: 130775 - DNA, 75 bp, synthetic construct
  source 1..75: mol_type = other DNA
acgggcgctggcggcggcgacgctctccaacctgatgagtgcgaccattgccgggttctttattggtttcgcttg

SEQ ID NO: 130776 - DNA, 75 bp, synthetic construct
  source 1..75: mol_type = other DNA
ttttctgcggttgcgccgcaccgtgcgccggaaatcgcccaacttggtttacgggcgctggcggcggcgacgctc

SEQ ID NO: 130777 - DNA, 75 bp, synthetic construct
  source 1..75: mol_type = other DNA
actctgctgggcgataccggcgtcgctgttaacccggaagatccgcgttacaaagatctgattggcaaatatgtc

SEQ ID NO: 130778 - DNA, 75 bp, synthetic construct
  source 1..75: mol_type = other DNA
tggataccatgatccgctatcagcgcatgcagggcaaaaaccccctgtggcaggtcggtactgaccacgccggga

SEQ ID NO: 130779 - DNA, 75 bp, synthetic construct
  source 1..75: mol_type = other DNA
aaaccgcagacggtaaagattatctggtcgtcgcgaccacccgcccggaaactctgctgggcgataccggcgtcg

SEQ ID NO: 130780 - DNA, 75 bp, synthetic construct
  source 1..75: mol_type = other DNA
gtgattgtgttgctggtggtctacgccaaaaaagtggactgggaagaggtctggaaggtcatccgcgactacaat

SEQ ID NO: 130781 - DNA, 75 bp, synthetic construct
  source 1..75: mol_type = other DNA
gcagcggcgaaacactttatcgcgcaaggcaatggcggcaagattatcaatatcgcgtcaatgctctccttccag

SEQ ID NO: 130782 - DNA, 75 bp, synthetic construct
  source 1..75: mol_type = other DNA
ctttcatcgacaaaatctgggaatggaaagcggaatccggcggcacgattacccgtcagatgcgccgtctcggca

SEQ ID NO: 130783 - DNA, 75 bp, synthetic construct
  source 1..75: mol_type = other DNA
tataactacgactcgtctctgctgcaatctgactactccggcctgttccgggaccggacttacggcggtcttgac

SEQ ID NO: 130784 - DNA, 75 bp, synthetic construct
  source 1..75: mol_type = other DNA
ggctacgcaacgcaaaaattcagcgttggctatgcggtgcaaaacttcaatgccaccgtttcaaccaagcagttc

SEQ ID NO: 130785 - DNA, 75 bp, synthetic construct
  source 1..75: mol_type = other DNA
gctctctaataactggggcagcatcaataccgaagcgaagttgctggcaacccattatcagcaaaccaatcttga

SEQ ID NO: 130786 - DNA, 75 bp, synthetic construct
  source 1..75: mol_type = other DNA
tctccacgctcggctggccggaaaacaccgacgcactgcgccagttccacccaaccagcgtgatggtatctggtt

SEQ ID NO: 130787 - DNA, 75 bp, synthetic construct
  source 1..75: mol_type = other DNA
aaagagcgtgagaagctggaaggctacgcagaagcgaaagcgaagctgattgaacagcaggctgttatcgccgcg

SEQ ID NO: 130788 - DNA, 75 bp, synthetic construct
  source 1..75: mol_type = other DNA
gtctgtataaagaagacctgatttaccgtggcaagcgcctggtaaactgggacccgaaactgcgcaccgctatct

SEQ ID NO: 130789 - DNA, 75 bp, synthetic construct
  source 1..75: mol_type = other DNA
catcctctggcagttaagtatctgacaaaccttgctcactatcgctcttttgtcgattttacatatagatacgac

SEQ ID NO: 130790 - DNA, 75 bp, synthetic construct
  source 1..75: mol_type = other DNA
agtatttttgatgtaggcttatcaagagctgttattcgagaaatagcgttatttcgagatgatcaagaagaaaaa

SEQ ID NO: 130791 - DNA, 75 bp, synthetic construct
  source 1..75: mol_type = other DNA
agtattttcgacgccgggattagtcgagctgtaatcagagaaatcgctctttatcgagaaagtgaaaaagagcaa

SEQ ID NO: 130792 - DNA, 75 bp, synthetic construct
  source 1..75: mol_type = other DNA
tatatcgactgtttccgaaaggtccggctaagcaagccaccaaaattgctggcctgccaaaaccggtaaaatgta

SEQ ID NO: 130793 - DNA, 75 bp, synthetic construct
  source 1..75: mol_type = other DNA
ctgcacgctgagtggcgaaatcccgacatgggaaaatgcgaacgagggcaatattgtctctgtcgaaggcaaata

SEQ ID NO: 130794 - DNA, 75 bp, synthetic construct
  source 1..75: mol_type = other DNA
tatcgctcttttgtcgattttacatatagatacgacgacagaagacactggaatattcgagatctgatcagagag

SEQ ID NO: 130795 - DNA, 75 bp, synthetic construct
  source 1..75: mol_type = other DNA
ctgcactgaccgggcgcgatattaatgtcgagactattatgcgcgttgccttcggcgatagtcagcgtcaggagg

SEQ ID NO: 130796 - DNA, 75 bp, synthetic construct
  source 1..75: mol_type = other DNA
gagatcaatagattctccactggagaacgtttactgcgcggtctggtttatctgccggaagatcgccagtcatcc

SEQ ID NO: 130797 - DNA, 75 bp, synthetic construct
  source 1..75: mol_type = other DNA
tctggaagagatcgaactgatggcagatcgtgtgtatgtgatgcatcagggcgaaattacccactctgcactgac

SEQ ID NO: 130798 - DNA, 75 bp, synthetic construct
  source 1..75: mol_type = other DNA
tttccaagattagctaatgcaaataattccgctgaaagatataaaacgaaaagattaattacaatttcactttta

SEQ ID NO: 130799 - DNA, 75 bp, synthetic construct
  source 1..75: mol_type = other DNA
tgccggagaaattctgggcctggctgggctggtgggagccggacgcacagaactggccgagacgctctatggtct

SEQ ID NO: 130800 - DNA, 75 bp, synthetic construct
  source 1..75: mol_type = other DNA
gcacaaaatgtggctgtgctgcttatctcctccgacctggaagagatcgaactgatggcagatcgtgtgtatgtg

SEQ ID NO: 130801 - DNA, 75 bp, synthetic construct
  source 1..75: mol_type = other DNA
atcgttgagccaaccgagaaacccgttgatgctctgatgcgtctggatctggctgccggtgtagacgtgcagatc

SEQ ID NO: 130802 - DNA, 75 bp, synthetic construct
  source 1..75: mol_type = other DNA
gggttctttggcggcattgtttctaaaataacgtcgttcattattaccgcactgcttttggggttagccgcgtat

SEQ ID NO: 130803 - DNA, 75 bp, synthetic construct
  source 1..75: mol_type = other DNA
gttaatagttcagttttgaattatggaataaagtcattagtatacagtatttctgctggtgaatatagtgatact

SEQ ID NO: 130804 - DNA, 75 bp, synthetic construct
  source 1..75: mol_type = other DNA
tcttcgcaggtttcctttaataacctctctttcaccgaaacaccgccaaaaagcattattgaagccgctgcgaca

SEQ ID NO: 130805 - DNA, 75 bp, synthetic construct
  source 1..75: mol_type = other DNA
tcgcttttggcgtgcataaagtgatggcgtacagcgacgcgggtagcgcatttatcttcggttctctggtcggac

SEQ ID NO: 130806 - DNA, 75 bp, synthetic construct
  source 1..75: mol_type = other DNA
agcccttctccggtctcggttctacccgttctgaacagaaaccggaaggtgaccgggataatcaacctcgccgat

SEQ ID NO: 130807 - DNA, 75 bp, synthetic construct
  source 1..75: mol_type = other DNA
aaaggtcaggacgcgccgggcgaagcgcgtaacgacggtgaaattctggcgggtatctaccatcatctgcgcgag

SEQ ID NO: 130808 - DNA, 75 bp, synthetic construct
  source 1..75: mol_type = other DNA
ctgtacaaagccgagggtggtaaaggcgcagaaccgctgctgaaaatgagctggaactacaagcagccgcatgag

SEQ ID NO: 130809 - DNA, 75 bp, synthetic construct
  source 1..75: mol_type = other DNA
cgcctgccttcgacctgctttgctgaagaagatggttctatcgccaactccggtcgctggttgcagtggcactgg

SEQ ID NO: 130810 - DNA, 75 bp, synthetic construct
  source 1..75: mol_type = other DNA
gtgatgataatccaagctcatcagaagatgagctgaattttgttgcttcagatgatcttaagtatgagcttggaa

SEQ ID NO: 130811 - DNA, 75 bp, synthetic construct
  source 1..75: mol_type = other DNA
gtgatgataatccgggctcatcggaagataatctgaattttgttccgtcagatgatttgaagtatgagcttggaa

SEQ ID NO: 130812 - DNA, 75 bp, synthetic construct
  source 1..75: mol_type = other DNA
gtcccggctggaggaaccagttgttgaatatctttccagtgatgataattattctttcttttcagttacagccct

SEQ ID NO: 130813 - DNA, 75 bp, synthetic construct
  source 1..75: mol_type = other DNA
gttattggggtttcgctccgtacaattgcaaagaagcagaaatgctcagatggtacgatcagaaaagaattgcaa

SEQ ID NO: 130814 - DNA, 75 bp, synthetic construct
  source 1..75: mol_type = other DNA
tgggctgacacagccgcactacatggatatttgcatggcaatgattcgttgtgtggatgcgatttacatgctgaa

SEQ ID NO: 130815 - DNA, 75 bp, synthetic construct
  source 1..75: mol_type = other DNA
gtgagggtgagaatttatatcgctggtccgatgacgggatatgaaaatttcaaccgtgatgcgtttcacaaggcg

SEQ ID NO: 130816 - DNA, 75 bp, synthetic construct
  source 1..75: mol_type = other DNA
agtttctgccggggcggggctgggcgcctgcgcggcaatactgttcggccagcccacggtttacatccagctata

SEQ ID NO: 130817 - DNA, 75 bp, synthetic construct
  source 1..75: mol_type = other DNA
acggcaattctgtggggattatccattgtttacatccagctgtacgcattttgtggcgggctgatggtggtcgcg

SEQ ID NO: 130818 - DNA, 75 bp, synthetic construct
  source 1..75: mol_type = other DNA
tgtctccgcgggtgccggactcggggcctgcgcggcaatcctgtggggattatcgattgtttacatccaactgta

SEQ ID NO: 130819 - DNA, 75 bp, synthetic construct
  source 1..75: mol_type = other DNA
ttttgtggttctggtacaacattgcacgcagcccaagaattagatagaaaatggttaggaatagatcaatcattt

SEQ ID NO: 130820 - DNA, 75 bp, synthetic construct
  source 1..75: mol_type = other DNA
tacaaaaagcaaaccagtggacatgcattatatacaacgattaatctcctgaacaaaaaccacaatgagcgctca

SEQ ID NO: 130821 - DNA, 75 bp, synthetic construct
  source 1..75: mol_type = other DNA
caaggaatacactgattcacttaccgataacaaacatcactggttctgccttcacgaaatattcaaatacgagca

SEQ ID NO: 130822 - DNA, 75 bp, synthetic construct
  source 1..75: mol_type = other DNA
gatatctgcatggcgatgattcgcagcgtggaggcggtttacatgctgagaaactggtaccagtcagcgggggcg

SEQ ID NO: 130823 - DNA, 75 bp, synthetic construct
  source 1..75: mol_type = other DNA
cactgacatggtttatgaatgacgggtacagccggattgctgaaatgcagcgtatggaagctgtctggcagaaaa

SEQ ID NO: 130824 - DNA, 75 bp, synthetic construct
  source 1..75: mol_type = other DNA
aacgaactacacaaagagttaactaactttaattattttttagcctgcaactccgggtatttaggcagcagcgag

SEQ ID NO: 130825 - DNA, 75 bp, synthetic construct
  source 1..75: mol_type = other DNA
ttaatcattgaggggtgccttgctcggctgaagaagaaaaaaccttatgagcattcgttactagtagcacattat

SEQ ID NO: 130826 - DNA, 75 bp, synthetic construct
  source 1..75: mol_type = other DNA
attactggcagcatatgctcgacagttatgccgagcaggcagataacatgccgttattgcatcgggcgctggtgc

SEQ ID NO: 130827 - DNA, 75 bp, synthetic construct
  source 1..75: mol_type = other DNA
ttttcgcgtggcaaactacatcaaaccgcattttgagattggcttagccctcgacaaaaaagatttcaaaactga

SEQ ID NO: 130828 - DNA, 75 bp, synthetic construct
  source 1..75: mol_type = other DNA
tgaatcccatttctctagtgcatggtatgcgttttgccgtaataagaagccgaccattgttgttaacgtcttcac

SEQ ID NO: 130829 - DNA, 75 bp, synthetic construct
  source 1..75: mol_type = other DNA
accgcgcgctgcgtgaaatccacgaacgcgccgatgccgttcgtcgtcagcgtttccaggcgatggctgctgaag

SEQ ID NO: 130830 - DNA, 75 bp, synthetic construct
  source 1..75: mol_type = other DNA
ccaagcgcagctggttctcgcttctgagctgggccgttgttctcgccgtgttggtcgtctcgtggcagggcgcgg

SEQ ID NO: 130831 - DNA, 75 bp, synthetic construct
  source 1..75: mol_type = other DNA
gggcgacaaaccggcggcagggctgtttatcttcagtcagcaggataacgaacctgtggaactggtgagtaaatt

SEQ ID NO: 130832 - DNA, 75 bp, synthetic construct
  source 1..75: mol_type = other DNA
gggtatcgggcaacgacggtggtatttgtctccgataccgtggcgcttagcaaagtgtcaggcaacgaacttctg

SEQ ID NO: 130833 - DNA, 75 bp, synthetic construct
  source 1..75: mol_type = other DNA
aaaaagtctttaatgaatagactgtatgtcagtaatgatatacagttattttacaaaggtctattattatgtaga

SEQ ID NO: 130834 - DNA, 75 bp, synthetic construct
  source 1..75: mol_type = other DNA
gcaaagcgtatttcacgttcctgatgcctgattcgttaacccgctggcgtatcaccgcgcgtgggatgaacggcg

SEQ ID NO: 130835 - DNA, 75 bp, synthetic construct
  source 1..75: mol_type = other DNA
ggcctttgatggttatcccaccgggcttgatgagaactatatcgaaacgctgacccgacaattattaatggacta

SEQ ID NO: 130836 - DNA, 75 bp, synthetic construct
  source 1..75: mol_type = other DNA
cgcaatgaaatgggtgaactggcctatatggtgccggtaaaagaactgacgggaacggtcaccttccgccatttg

SEQ ID NO: 130837 - DNA, 75 bp, synthetic construct
  source 1..75: mol_type = other DNA
cgaatgacagcaaaggccattttgttacggcgaaagaagccgcgaagaacaaccgacaggacgttttgtgctgtg

SEQ ID NO: 130838 - DNA, 75 bp, synthetic construct
  source 1..75: mol_type = other DNA
gggaaaagtgctgcccacgctgcggtaccggggtatacagcagagagggcgagcggcagaaggcgccgccggaaa

SEQ ID NO: 130839 - DNA, 75 bp, synthetic construct
  source 1..75: mol_type = other DNA
tgcccgcgttgtggtactggggtatacagcagggagggggggctgcaggaaggcaactggaaggataggaactga

SEQ ID NO: 130840 - DNA, 75 bp, synthetic construct
  source 1..75: mol_type = other DNA
tttacaaagaaccgacagtaatctaacgtatttaaaattcaattcaataaatacgatttttttcttattggcatc

SEQ ID NO: 130841 - DNA, 75 bp, synthetic construct
  source 1..75: mol_type = other DNA
gggaaaagtgctgcccgcgttgtggtaccggggtatacagcagggagaggggggctgcaggagggcaactggaag

SEQ ID NO: 130842 - DNA, 75 bp, synthetic construct
  source 1..75: mol_type = other DNA
aacatgaccagatgactgtcgctgagaaaatcctgctgcgatgcacctggcttgacccggcagagaaagaggccc

SEQ ID NO: 130843 - DNA, 75 bp, synthetic construct
  source 1..75: mol_type = other DNA
acggaacgacctgggtagaaggtggcggttgtaaggcccacgcctgcggctgggactttatcgtaacactctata

SEQ ID NO: 130844 - DNA, 75 bp, synthetic construct
  source 1..75: mol_type = other DNA
gcgtcagtacaccaacgaatatctcgataacattaccccgccattcactaaagccttgtttacttatgtcaaaga

SEQ ID NO: 130845 - DNA, 75 bp, synthetic construct
  source 1..75: mol_type = other DNA
caaccgccgcaggtggatgaagccgaatgctggcccgttgcgcctggcgaacagtggcacggctttaacgatgcg

SEQ ID NO: 130846 - DNA, 75 bp, synthetic construct
  source 1..75: mol_type = other DNA
gttttgtgtgatgtgtgacgaagattatgaaggagaaaagtgctgcccgcgttgtggtaccggggtatacagcag

SEQ ID NO: 130847 - DNA, 75 bp, synthetic construct
  source 1..75: mol_type = other DNA
ccggaaaagctttaccgacccggagcaagagaacaaagccaacatcattcaccgcgcacacgaccgcatgaccgg

SEQ ID NO: 130848 - DNA, 75 bp, synthetic construct
  source 1..75: mol_type = other DNA
tgagcggcatgttcggtaaaggcgggtatatggatggccctggcggaagtgtaacacctgtaaacattaacggaa

SEQ ID NO: 130849 - DNA, 75 bp, synthetic construct
  source 1..75: mol_type = other DNA
ctcaatattgcgtcggactatgcggaatatgtggcagaggcgcgttacagaagaaaattcccggaggatgtaagc

SEQ ID NO: 130850 - DNA, 75 bp, synthetic construct
  source 1..75: mol_type = other DNA
ctcaatattgcgtcggactatgctgaatatgttgcagaggcgcgttacagaagaaaattaccggaggatgtaagc

SEQ ID NO: 130851 - DNA, 75 bp, synthetic construct
  source 1..75: mol_type = other DNA
gcaagcggcgagtcttgctgaccagctcatggggggcgaagctaataaaatcatgacgtatatgaaggccactgg

SEQ ID NO: 130852 - DNA, 75 bp, synthetic construct
  source 1..75: mol_type = other DNA
atatccgtagtgccagtattaaaaatgattacaaattctatgagttcctgaaagaatactgtcagcgatttaatg

SEQ ID NO: 130853 - DNA, 75 bp, synthetic construct
  source 1..75: mol_type = other DNA
gaagattattgacagatataaaggctcgaataaagaccttagatttgacgacgaatacatcgaaagccttctcaa

SEQ ID NO: 130854 - DNA, 75 bp, synthetic construct
  source 1..75: mol_type = other DNA
tgacaaaccgttgccggaagaggccgcgctggcacgcgaagcatggttaaacgcgggtggcgagatccatgcttc

SEQ ID NO: 130855 - DNA, 75 bp, synthetic construct
  source 1..75: mol_type = other DNA
aaggttttgggcgtcagaaagggcatgccgagctgtaccgggggcggaatacagcgtcaacttcctgccaaaagt

SEQ ID NO: 130856 - DNA, 75 bp, synthetic construct
  source 1..75: mol_type = other DNA
cctcgaaaatgtttatcgtcggtaaaccgaccatcatgggcgaacgcctgtgccgcgtgacgcaggaaagtctgt

SEQ ID NO: 130857 - DNA, 75 bp, synthetic construct
  source 1..75: mol_type = other DNA
atcaaagatggtttccacggcgatacctcgaaaatgtttatcgtcggtaagccaaccatcatgggcgaacgtctg

SEQ ID NO: 130858 - DNA, 75 bp, synthetic construct
  source 1..75: mol_type = other DNA
cggataaaagcgacaacacaggaccaggaagctctgaatactcagctcgccaaaaaacagcggctggagaagtgg

SEQ ID NO: 130859 - DNA, 75 bp, synthetic construct
  source 1..75: mol_type = other DNA
tcagtacgtgaaacatttacatcctggtttaaggataatcagggtggttttgtcagcacaattactgagtgggta

SEQ ID NO: 130860 - DNA, 75 bp, synthetic construct
  source 1..75: mol_type = other DNA
agacgtcgtctactgtcgggaaattaacgaaaagtcaggataaattaaaagacaaaatcgcagcaatgaaactgg

SEQ ID NO: 130861 - DNA, 75 bp, synthetic construct
  source 1..75: mol_type = other DNA
ttctgattgagctaggttttagctctcagaaggttttaaaaggtctggaaaaagccgagaaacaaacgatgcaaa

SEQ ID NO: 130862 - DNA, 75 bp, synthetic construct
  source 1..75: mol_type = other DNA
tttgaagacggtctgttcagcggttacgacgctgaaaaacgtcagtacgataagtcgtcctggaactatcagttc

SEQ ID NO: 130863 - DNA, 75 bp, synthetic construct
  source 1..75: mol_type = other DNA
aaagcgacgctggctgatcaggtgaactactggagcaactatccgaagttcttcgttagcctgatgaaatctttc

SEQ ID NO: 130864 - DNA, 75 bp, synthetic construct
  source 1..75: mol_type = other DNA
agtctgtcttcagcagcagttaaaacagcaggtgcatttatctcaatgcaagctgtattagccagttatcagaag

SEQ ID NO: 130865 - DNA, 75 bp, synthetic construct
  source 1..75: mol_type = other DNA
tgcaggcgactctgacggaaggcgcaatcggctatcgtaaattcaaagtgatcagcgggcaaaaagcgatggcgg

SEQ ID NO: 130866 - DNA, 75 bp, synthetic construct
  source 1..75: mol_type = other DNA
aacgacgagcagcagcaggttggcattgtggatgatgaaggcaatgtctatctggcgggggtcaatgcggacgag

SEQ ID NO: 130867 - DNA, 75 bp, synthetic construct
  source 1..75: mol_type = other DNA
tgcgaaatcgctatgtggacgggttccactttgataacgcgaaagcaatgtacggcgcctataccacagacattt

SEQ ID NO: 130868 - DNA, 75 bp, synthetic construct
  source 1..75: mol_type = other DNA
gcgtacctataaagcaagtacagggtggcacaatccgggcttaaacacgcctaagactgctgcagaaacccgctc

SEQ ID NO: 130869 - DNA, 75 bp, synthetic construct
  source 1..75: mol_type = other DNA
aaggaaaccagcaacgggcaatgggatgattacactcaatcaaaaatataccttcgtgctgatggtaaacctgtg

SEQ ID NO: 130870 - DNA, 75 bp, synthetic construct
  source 1..75: mol_type = other DNA
atgctgtatcctggcgtgaagcagtcagacctcagtgaagagcagaagcagacgataagtacgctggcaactgtg

SEQ ID NO: 130871 - DNA, 75 bp, synthetic construct
  source 1..75: mol_type = other DNA
gcagcaggcgcagcaacgggagagctggcagccagagcgattaccggaatgctgtatcctggcgtgaagcagtca

SEQ ID NO: 130872 - DNA, 75 bp, synthetic construct
  source 1..75: mol_type = other DNA
cgctttaccgcagaactgcgctcgcagctcggcgtgctccccagctacacccaactgggaatggcggcgttgctg

SEQ ID NO: 130873 - DNA, 75 bp, synthetic construct
  source 1..75: mol_type = other DNA
acccgggcaactcacgctgaattgtggttggctgcctgtacaactttcctgaacgggattgaaacctcactgagg

SEQ ID NO: 130874 - DNA, 75 bp, synthetic construct
  source 1..75: mol_type = other DNA
gaaaattactgcgttgggggcaacaaaactttactacggtgcaaattttgcatcgtgggaaaaaggtcggtacgg

SEQ ID NO: 130875 - DNA, 75 bp, synthetic construct
  source 1..75: mol_type = other DNA
tttaccgctctgataaaaacgtagaactgcgcccattgttggctgacacactgaccatccacacagacgatgagc

SEQ ID NO: 130876 - DNA, 75 bp, synthetic construct
  source 1..75: mol_type = other DNA
gttttgaaaccggtcctaacggcccattagttccagaactgaaagcacagtttcccgatgcaccttacattgctc

SEQ ID NO: 130877 - DNA, 75 bp, synthetic construct
  source 1..75: mol_type = other DNA
ttgaatcactgaacgaactgcaatatcaacagcgtcaaaataataaaattatagaaaaactatatagttcagcag

SEQ ID NO: 130878 - DNA, 75 bp, synthetic construct
  source 1..75: mol_type = other DNA
ccaaaatagactcaaagaaagaaattttattgcgttcaacagataatattgataataacaatgaatataacctag

SEQ ID NO: 130879 - DNA, 75 bp, synthetic construct
  source 1..75: mol_type = other DNA
ggatatggggttggcaattatgtggtgaagcctgttgcaaatacagcaggcaagtggataaccggtggctggaat

SEQ ID NO: 130880 - DNA, 75 bp, synthetic construct
  source 1..75: mol_type = other DNA
taaatggataaccggtggctggaatcctaaattcgatccgactctactaaaatatactgaagttaaagggcagtt

SEQ ID NO: 130881 - DNA, 75 bp, synthetic construct
  source 1..75: mol_type = other DNA
gggcagtaaaaactaagacaggtgaggttgtggccaacgttgccgagcaactgcaaagcgcggttgctgaaacgc

SEQ ID NO: 130882 - DNA, 75 bp, synthetic construct
  source 1..75: mol_type = other DNA
cagttgcgtgaatcaggttgtgacggggtgatcgcgtttggcggcgaaagccgttgcgttgctggtgacgaaccc

SEQ ID NO: 130883 - DNA, 75 bp, synthetic construct
  source 1..75: mol_type = other DNA
atgaagaccgtcagtggtgaagaggggtatatttattgcctcgcggaacaccagagcacggaaaacgcatttatg

SEQ ID NO: 130884 - DNA, 75 bp, synthetic construct
  source 1..75: mol_type = other DNA
atatgggggcttctattacatcagaaatgacggggactgaactacaaaaagtcattaatgataaattgaagaaag

SEQ ID NO: 130885 - DNA, 75 bp, synthetic construct
  source 1..75: mol_type = other DNA
aatcagtcgcggcaatggcctgaaaggcgaggactggacgcagaaagttcgcttaatttccgctgtgccgcaaac

SEQ ID NO: 130886 - DNA, 75 bp, synthetic construct
  source 1..75: mol_type = other DNA
cttttactcgctgggtgatggcaatgggaataccgctaacccgggcggcgcttaatgccagtgatgaacggtcct

SEQ ID NO: 130887 - DNA, 75 bp, synthetic construct
  source 1..75: mol_type = other DNA
caaatagatatgcagcgccgggtggcatggataaacccggaagagagtaaatcaaaccgcgcaattggcgttgcg

SEQ ID NO: 130888 - DNA, 75 bp, synthetic construct
  source 1..75: mol_type = other DNA
tgctggatgataaaaaagtccagcgggtgaatattggttccgtcaggcgctggcaggagtgggatattgcgcctg

SEQ ID NO: 130889 - DNA, 75 bp, synthetic construct
  source 1..75: mol_type = other DNA
aaatatcaacctgtagctcaggttgccgaagtgaaggcgattcagtttgcggtgggtaagagcggtaaaatatcg

SEQ ID NO: 130890 - DNA, 75 bp, synthetic construct
  source 1..75: mol_type = other DNA
aatgctgatgaggttgcgcgcgtacgcaatgagtggtggaaagcgaaattacccttcgtcaccgatggcgtggtt

SEQ ID NO: 130891 - DNA, 75 bp, synthetic construct
  source 1..75: mol_type = other DNA
tgtttaatgtggtgtaatgaaaaagaaaaatacactacatataaagaaaatattaaaaaattgttaggtaataca

SEQ ID NO: 130892 - DNA, 75 bp, synthetic construct
  source 1..75: mol_type = other DNA
cgacgaagatgatgattacacaccaatcgcgttttcttctcacaatagcttctacggctacgatgaaggcttaga

SEQ ID NO: 130893 - DNA, 75 bp, synthetic construct
  source 1..75: mol_type = other DNA
atgacctgcctttcgaagtccgtgattatgacattgatttaggtagcttcgttactgtctatgaactggatgaag

SEQ ID NO: 130894 - DNA, 75 bp, synthetic construct
  source 1..75: mol_type = other DNA
gtattgatttcgtattcggtgaccaaagtacacaggttaaaaagttcattcaggatttaactcaagtcacgggta

SEQ ID NO: 130895 - DNA, 75 bp, synthetic construct
  source 1..75: mol_type = other DNA
aacacgcacggcaaatagactcgatcctgatcccatcggtcccaaatttgtcccagtcaaaaaataaggaaggta

SEQ ID NO: 130896 - DNA, 75 bp, synthetic construct
  source 1..75: mol_type = other DNA
aacacgcacggcaaatagactcgattctgaacccatcggtcccaaatttgtcccagtcaagaaataaggaaggta

SEQ ID NO: 130897 - DNA, 75 bp, synthetic construct
  source 1..75: mol_type = other DNA
aggcaggcgacagaactccatgacaagctaaaggctgaagcatggcgggtcagcaaacttggtgaaatacctgat

SEQ ID NO: 130898 - DNA, 75 bp, synthetic construct
  source 1..75: mol_type = other DNA
attgccaatactttaacgccattcgttggtgatgcgaacacgcagacgccggagtttaagtccttccttgtgaat

SEQ ID NO: 130899 - DNA, 75 bp, synthetic construct
  source 1..75: mol_type = other DNA
taaacttggcattgcccagggcgataccgtgaaagtctcctccaaccgtggctatatcaaagccaaagcggtggt

SEQ ID NO: 130900 - DNA, 75 bp, synthetic construct
  source 1..75: mol_type = other DNA
tggtattacctgaagcccgcggtgatttcattcgtatctgggatgatgggcgaggggcggacagtgggcgagcat

SEQ ID NO: 130901 - DNA, 75 bp, synthetic construct
  source 1..75: mol_type = other DNA
tgacggatattggggcggcgaagctggcaagcgctgccgcgctcggtatccctctgaaaattacccagatggcgg

SEQ ID NO: 130902 - DNA, 75 bp, synthetic construct
  source 1..75: mol_type = other DNA
attgccgtggcgaactgcccggaaacctacaaaccacaactgcaggagggaagcggccgcacgcagaccattcgc

SEQ ID NO: 130903 - DNA, 75 bp, synthetic construct
  source 1..75: mol_type = other DNA
gtggtgctgaacgcactaagcccgtgccgccagaaaaccgctttaactcgttgacgtgctactttgcttctgatg

SEQ ID NO: 130904 - DNA, 75 bp, synthetic construct
  source 1..75: mol_type = other DNA
acgcttcagggggaaatatttctcaagcgcgaggggcatatccaacaacaaatggggggaataaatgcccgcgca

SEQ ID NO: 130905 - DNA, 75 bp, synthetic construct
  source 1..75: mol_type = other DNA
tttgtcaggagcaattcatttcacggctagtctggctggggtcaaaacaggttttggggctggacggcattggtg

SEQ ID NO: 130906 - DNA, 75 bp, synthetic construct
  source 1..75: mol_type = other DNA
aagagaacggttctatcgttaactcaggtcgctggttacagtggcactggaaaggtgcggacgccccggggattg

SEQ ID NO: 130907 - DNA, 75 bp, synthetic construct
  source 1..75: mol_type = other DNA
gggaaatggagcaattaccactttacatggtgtggcggatttagccttagttacattcgatgctctgttagatac

SEQ ID NO: 130908 - DNA, 75 bp, synthetic construct
  source 1..75: mol_type = other DNA
ccagcggtcagaaacaagcgagtcagatggctggaaaaggaggaagcaaaacgccttattgaaccgccccgggaa

SEQ ID NO: 130909 - DNA, 75 bp, synthetic construct
  source 1..75: mol_type = other DNA
gtttatctgctacgccttcaacctgacgctcagtacctgggtcggcggcattggtatgcgctatcgtttgtactc

SEQ ID NO: 130910 - DNA, 75 bp, synthetic construct
  source 1..75: mol_type = other DNA
ctgcaaaacagatttatagttccaccgcagagattagaaaaacagatttatgggaattgatggttggagccaagc

SEQ ID NO: 130911 - DNA, 75 bp, synthetic construct
  source 1..75: mol_type = other DNA
tagtggttgttttactaatctgttgcacaggctgggatggcctaagggggagattagcaggaaaattgaggtcat

SEQ ID NO: 130912 - DNA, 75 bp, synthetic construct
  source 1..75: mol_type = other DNA
tgaggaggtgacaaacgaagttcgttgcttcaacaaatattatggcgccgggagtgcagaaaaaatatatggcga

SEQ ID NO: 130913 - DNA, 75 bp, synthetic construct
  source 1..75: mol_type = other DNA
accatcgaacgcttgccggtgctggataatccggtcaaaacgtcaatctcctgcttcagctggacagatgctatc

SEQ ID NO: 130914 - DNA, 75 bp, synthetic construct
  source 1..75: mol_type = other DNA
actgtggtagccgctgtgcacttcgtctgcatgttaaagataatgaagtgacctgggtggaaactgacaacaccg

SEQ ID NO: 130915 - DNA, 75 bp, synthetic construct
  source 1..75: mol_type = other DNA
gattccctggcggtcgccatcggcacggctcatggtatgtatgccagcgcaccggcgcttgatttttctcgactg

SEQ ID NO: 130916 - DNA, 75 bp, synthetic construct
  source 1..75: mol_type = other DNA
gcggcatttttactgcgcgtcaaagagcattacacgcggctgttgccggattacccgcgcttcgagattgcggag

SEQ ID NO: 130917 - DNA, 75 bp, synthetic construct
  source 1..75: mol_type = other DNA
atccatctttacgatcatcacgtgggtctggtggtggagcaactgcgctgcattactaacggccaaagtacggac

SEQ ID NO: 130918 - DNA, 75 bp, synthetic construct
  source 1..75: mol_type = other DNA
ggtcgaatggttacgggaaattctgccgggaaaaaccaccgcagaactgtatatggctatcggctgccagaaaca

SEQ ID NO: 130919 - DNA, 75 bp, synthetic construct
  source 1..75: mol_type = other DNA
agatgtttacaacatctcaaagccatgaagaggtgacaaacgaagttcgttgcttcaacaaatattatggcgccg

SEQ ID NO: 130920 - DNA, 75 bp, synthetic construct
  source 1..75: mol_type = other DNA
gttcatggagtgaaagccaaataatgcaatcttatcatggcggaaagcaagatcttattagtgtggtattaagta

SEQ ID NO: 130921 - DNA, 75 bp, synthetic construct
  source 1..75: mol_type = other DNA
aatcgagcggcggatggtgccgctcaatatctggctggaacaagtggaaggtcagcagttgcgcgacgccattga

SEQ ID NO: 130922 - DNA, 75 bp, synthetic construct
  source 1..75: mol_type = other DNA
aggccatcggtaaatggcatatgggagaaaacaaagagtcgcagccacagaacgtcggctttgatgatttccgcg

SEQ ID NO: 130923 - DNA, 75 bp, synthetic construct
  source 1..75: mol_type = other DNA
gcaaaggctttgccggatacgatcacccaaaccagtatctggttaaaccggcgaccactattgccgacaacatga

SEQ ID NO: 130924 - DNA, 75 bp, synthetic construct
  source 1..75: mol_type = other DNA
atggaattttcgttttcacccaaacttcttgttgttgctgtcgccgccgctcttccactcatggccagcgcagca

SEQ ID NO: 130925 - DNA, 75 bp, synthetic construct
  source 1..75: mol_type = other DNA
tcaacggtaaactcgctgctgtgcgtatggatgaattcaagtatcacgtcctgattcagcaaccttacgcttata

SEQ ID NO: 130926 - DNA, 75 bp, synthetic construct
  source 1..75: mol_type = other DNA
gcgaccactattgccgacaacatgatgccagtaatgcagcatccggcgcaggataaagaaccccagcagaagctg

SEQ ID NO: 130927 - DNA, 75 bp, synthetic construct
  source 1..75: mol_type = other DNA
aggcatgatccaaccgcgtaaatctgacggcattgtcgatctggcagatctcttccctaccgcgctggatctggc

SEQ ID NO: 130928 - DNA, 75 bp, synthetic construct
  source 1..75: mol_type = other DNA
ttattgcggggccgatggctcttgttatctggaaaatacgagggattatcgcatttgttaatgaggtcaggaact

SEQ ID NO: 130929 - DNA, 75 bp, synthetic construct
  source 1..75: mol_type = other DNA
aactggcgcgtgaaattggcacagcaaaacccgcttatatctgccagggctgggggccgcaacgccaggcaaacg

SEQ ID NO: 130930 - DNA, 75 bp, synthetic construct
  source 1..75: mol_type = other DNA
gcagtaatgatggcaacagcaccacggatattgaaaacagcaagctggtcgtgatgtttggtaacaacccggcag

SEQ ID NO: 130931 - DNA, 75 bp, synthetic construct
  source 1..75: mol_type = other DNA
gcctgtgcaccggagactgacctgcaacaactggtagccactcccgtccctgatgaacggcgcatcagcttctgg

SEQ ID NO: 130932 - DNA, 75 bp, synthetic construct
  source 1..75: mol_type = other DNA
gattgcggttcaggcctcgctcaccggccatctggtactctcaacactccacactaacagtgcatcaggcgcagt

SEQ ID NO: 130933 - DNA, 75 bp, synthetic construct
  source 1..75: mol_type = other DNA
gttctttattgcttttgggaaaatgatacctcggcctgaagaatgtaatttactgaataagatactacagaccca

SEQ ID NO: 130934 - DNA, 75 bp, synthetic construct
  source 1..75: mol_type = other DNA
cgcccggtaacgcaatcggtagatccagcgcaaacgctgaaagcgatcaacgcctctttacagcggagtgcatga

SEQ ID NO: 130935 - DNA, 75 bp, synthetic construct
  source 1..75: mol_type = other DNA
ggctgaaaatctgtccgctctggagcaggatatcaccaatctggaaacgagttaccaggcagtggtcacgggtta

SEQ ID NO: 130936 - DNA, 75 bp, synthetic construct
  source 1..75: mol_type = other DNA
tttatctgccgcataaactggaacgcgccgtgaccacgtttcatgacatatccatttttacctgcccggaatatc

SEQ ID NO: 130937 - DNA, 75 bp, synthetic construct
  source 1..75: mol_type = other DNA
cgggagcagcgtaagcaaactcggctggtcaagcaggcaaggctcaaactccaggccacggtgcaggagctggac

SEQ ID NO: 130938 - DNA, 75 bp, synthetic construct
  source 1..75: mol_type = other DNA
cgcctttctcattacctggtttctttcccacgataagaagagcattcgctttctgagcgcctttctggtggggat

SEQ ID NO: 130939 - DNA, 75 bp, synthetic construct
  source 1..75: mol_type = other DNA
gggccaatgaaaccagggctaagcaggctgaaaatctgtccgctctggagcaggatatcaccaatctggaaaaag

SEQ ID NO: 130940 - DNA, 75 bp, synthetic construct
  source 1..75: mol_type = other DNA
agatattacctggcgagaatgggctagcagaaaagggatactacgtgctaatgaattctcatggactcgatgtgc

SEQ ID NO: 130941 - DNA, 75 bp, synthetic construct
  source 1..75: mol_type = other DNA
cgatcaaatttccattaacaggcatcggtcgttacgcattcgagttggctaaccgtttagcttgcagttcggaag

SEQ ID NO: 130942 - DNA, 75 bp, synthetic construct
  source 1..75: mol_type = other DNA
gatggtggaaaaaatggctgccagatatcgtcatgccgccgaactacactggtccgcaacgctggcagaaattga

SEQ ID NO: 130943 - DNA, 75 bp, synthetic construct
  source 1..75: mol_type = other DNA
gggccaatgaagccagagctaagcaggctgaaaatctgtccgctctggagcaggatatcaccaatctggaaaaag

SEQ ID NO: 130944 - DNA, 75 bp, synthetic construct
  source 1..75: mol_type = other DNA
actactggcggaagagttgcgcctggcgcagcagaacttaagcgaaatcaccggggagtttacttcagacgacct

SEQ ID NO: 130945 - DNA, 75 bp, synthetic construct
  source 1..75: mol_type = other DNA
tttaaccccgctgactgtgagacgtttgtgcaaggcattgttcggcagaaccggaagccagtggctggttgttga

SEQ ID NO: 130946 - DNA, 75 bp, synthetic construct
  source 1..75: mol_type = other DNA
gcggatggtgccgctcaatatctggctggaacaagtggaaggtcagcagttgcgcgacgccattgaagaatacgg

SEQ ID NO: 130947 - DNA, 75 bp, synthetic construct
  source 1..75: mol_type = other DNA
atatttctttattaccttcaagtgctgaacaggccatatatgaaatgtttgacatgttggagcaaaaagggattt

SEQ ID NO: 130948 - DNA, 75 bp, synthetic construct
  source 1..75: mol_type = other DNA
tggtagctctattgttcttggtgataatgataccggatttaaacagaatggagacggtattcttgatgtttatgc

SEQ ID NO: 130949 - DNA, 75 bp, synthetic construct
  source 1..75: mol_type = other DNA
atgaacagtttattgaagcgccgggcattcgtggaatggtgatgctggtgttcacgctgccgggttttgatcgag

SEQ ID NO: 130950 - DNA, 75 bp, synthetic construct
  source 1..75: mol_type = other DNA
cgtatccgtgacgggcatgtggaagatgtttatgcgtatcggcgcaggcagaggtttagcgtgcggtatggggag

SEQ ID NO: 130951 - DNA, 75 bp, synthetic construct
  source 1..75: mol_type = other DNA
tatctcgtttatctacagggctgtaatgagcagttcattgaagcgccgggtattcgtggcatggtgatgctggtg

SEQ ID NO: 130952 - DNA, 75 bp, synthetic construct
  source 1..75: mol_type = other DNA
aaacgtctatgctgctgaattgatgaccaaagcggaatttgaaaaggttgaatcgcaatatgaaaaaataggtga

SEQ ID NO: 130953 - DNA, 75 bp, synthetic construct
  source 1..75: mol_type = other DNA
tatcatgtatttcatcattaatcttttcattgcaacccgcatattcagcgacaacgacccaatttgatgcctgct

SEQ ID NO: 130954 - DNA, 75 bp, synthetic construct
  source 1..75: mol_type = other DNA
atgaaaataatctctaaaatgttagtcggtgcgtttgccgttaccaatgtctatgccgcagaattaatgaccaaa

SEQ ID NO: 130955 - DNA, 75 bp, synthetic construct
  source 1..75: mol_type = other DNA
ggaacggcgcggatttaataaaccgaccgtggtggtcgttaacaagaatgcgagaataatctggtcgatgctgag

SEQ ID NO: 130956 - DNA, 75 bp, synthetic construct
  source 1..75: mol_type = other DNA
actgtggagattgctaacaaatacgcgagaataatctggtcgatgctgataaatgatacagaatatcaggcagtg

SEQ ID NO: 130957 - DNA, 75 bp, synthetic construct
  source 1..75: mol_type = other DNA
tcaaaaaagcggatgaaaaaggtgctgatgtgttggtactgacctccggtcagactgacaataagatccacggta

SEQ ID NO: 130958 - DNA, 75 bp, synthetic construct
  source 1..75: mol_type = other DNA
tgataaaatgctaaagtttgatgtagcttactatagatatgttgatgatgtgctaatttatggaaattatgacga

SEQ ID NO: 130959 - DNA, 75 bp, synthetic construct
  source 1..75: mol_type = other DNA
ctgcaatttatctgcaaagtgttgatgataaaatgctaaagtttgatgtagcttactatagatatgttgatgatg

SEQ ID NO: 130960 - DNA, 75 bp, synthetic construct
  source 1..75: mol_type = other DNA
aacaggggctattagtgagaaaaaaagatatggatgggtggcttattattcaaatattaccgaccactctcttct

SEQ ID NO: 130961 - DNA, 75 bp, synthetic construct
  source 1..75: mol_type = other DNA
ctggcggcgctggagaaaacaggcggcaacaaaaccgaagccgcccgccagttagggatcacgcgcaaaacgcta

SEQ ID NO: 130962 - DNA, 75 bp, synthetic construct
  source 1..75: mol_type = other DNA
atgcgcacgcaaactcttggcgcatttatcggctacttcgaaaaattccgcgataacgccccagacttctatttc

SEQ ID NO: 130963 - DNA, 75 bp, synthetic construct
  source 1..75: mol_type = other DNA
acccccttcaggtcctgcccacgttggcatgcactatagggttgaatgaagccatcgttctacagcaaatccact

SEQ ID NO: 130964 - DNA, 75 bp, synthetic construct
  source 1..75: mol_type = other DNA
agcttgctctaccgtaagttgcgcaagaacttaggtaacaaaaactgcgaatttgcgcctgagcacatcacggaa

SEQ ID NO: 130965 - DNA, 75 bp, synthetic construct
  source 1..75: mol_type = other DNA
tcaacctagaacaaaaagccgaaggtctcattgcgcagatattgggtgttaaagtggcggaagctcagggagaag

SEQ ID NO: 130966 - DNA, 75 bp, synthetic construct
  source 1..75: mol_type = other DNA
tgctagatgccatcgttcagttacctaataacctgttctataacactggcattaccacttacatttgggtgttga

SEQ ID NO: 130967 - DNA, 75 bp, synthetic construct
  source 1..75: mol_type = other DNA
gaagaagaaccctggctacaaaaagaaaaaacctaattgcaggattatggggggatgagcttgacgagttaaata

SEQ ID NO: 130968 - DNA, 75 bp, synthetic construct
  source 1..75: mol_type = other DNA
agcctaatgcacactatatgaaacgtctggaagagattacccgttatgcgatggatgattacgccagaatactgg

SEQ ID NO: 130969 - DNA, 75 bp, synthetic construct
  source 1..75: mol_type = other DNA
tcaacctagaacaaaaagccgaaggtctcattgcgcagatattgggtgttaaagtggcggaagtaaaaaaggttc

SEQ ID NO: 130970 - DNA, 75 bp, synthetic construct
  source 1..75: mol_type = other DNA
gcagtggcggcgtatattacaaggcgagacggggtacaacgaaccagacgtgtttgcggtctgtcgtttagtctc

SEQ ID NO: 130971 - DNA, 75 bp, synthetic construct
  source 1..75: mol_type = other DNA
gctacgcacaaaaatacttaacgttggcgctaatgggcggtgccgcttttttcgtattgaaaggttgtggcgata

SEQ ID NO: 130972 - DNA, 75 bp, synthetic construct
  source 1..75: mol_type = other DNA
ttgctactacgacaacgttgaacagagttggatcccggtcgtttctggatttttgttaagccgggttattcgtaa

SEQ ID NO: 130973 - DNA, 75 bp, synthetic construct
  source 1..75: mol_type = other DNA
tgtcatggattatttttgggcttattgccggtattctggcgaagtggatcatgccaggtaaagatggtggtggat

SEQ ID NO: 130974 - DNA, 75 bp, synthetic construct
  source 1..75: mol_type = other DNA
actcgctgtcacatcagaccagtgacaccggcgaatcagaatggattcatttcacaggtagcggatatctgttac

SEQ ID NO: 130975 - DNA, 75 bp, synthetic construct
  source 1..75: mol_type = other DNA
gcacattgtcgttgacattgatggtgttaatatcactgaactgattaataaggccgctgaaaacggttattcact

SEQ ID NO: 130976 - DNA, 75 bp, synthetic construct
  source 1..75: mol_type = other DNA
caggtcggtactgaccacgcagggatcgctacccagatggtcgttgagcgcaagattgccgcagaagaaggtaaa

SEQ ID NO: 130977 - DNA, 75 bp, synthetic construct
  source 1..75: mol_type = other DNA
acctgagcgcggacgtcgcgctgcgtcaggacgaagacgttctcgacacctggttctcttccgcgctgtggacct

SEQ ID NO: 130978 - DNA, 75 bp, synthetic construct
  source 1..75: mol_type = other DNA
caaccagaccatctcggttgatgtccggctgattgcggcgactcatcgcgatcttgccgcagaggtgaatgccgg

SEQ ID NO: 130979 - DNA, 75 bp, synthetic construct
  source 1..75: mol_type = other DNA
cctggcggcgctggcttctaccggtcgcgatatcaactgggatatgaaacgcctggaaggttaccgtaacttctg

SEQ ID NO: 130980 - DNA, 75 bp, synthetic construct
  source 1..75: mol_type = other DNA
tacgtgccgacgtgctggcgaaaccggcggttgaagcggttaagaacggcgacattcagttcgtaccgaagcagt

SEQ ID NO: 130981 - DNA, 75 bp, synthetic construct
  source 1..75: mol_type = other DNA
aggattgcggcttcaacggcggcgagatgacgctgtcgctggcggaccgctggattctggcggagttcaaccaga

SEQ ID NO: 130982 - DNA, 75 bp, synthetic construct
  source 1..75: mol_type = other DNA
ctgattcagcaaccttacgcgtatacccagagcgggtatcagggtggattcaccggcacagtaatgcaaacggcg

SEQ ID NO: 130983 - DNA, 75 bp, synthetic construct
  source 1..75: mol_type = other DNA
acgccaaatatgcgggaagttctccggcacgcacctcgtatggcgactgcatggtggagatgaacgatgtgttcg

SEQ ID NO: 130984 - DNA, 75 bp, synthetic construct
  source 1..75: mol_type = other DNA
acgccaaatatgcgggtagctctccggcgcgcacctcttacggcgactgcatggtggagatgaacgatatcttcg

SEQ ID NO: 130985 - DNA, 75 bp, synthetic construct
  source 1..75: mol_type = other DNA
tcttgtaagtttattactacgtaacagtgaagactgtggacttcgacaaaaacttctgcggtattgccatatcaa

SEQ ID NO: 130986 - DNA, 75 bp, synthetic construct
  source 1..75: mol_type = other DNA
aaagaaataatattctttatctgcgtaggggttttggtaggcggagccatttctaggatgttttttaatttgtaa

SEQ ID NO: 130987 - DNA, 75 bp, synthetic construct
  source 1..75: mol_type = other DNA
tctgaccggcgtaaccgtttttgttgttggtcaactcatcgcaaaaagattcattgagccttatatatcattcag

SEQ ID NO: 130988 - DNA, 75 bp, synthetic construct
  source 1..75: mol_type = other DNA
gggtcatcctggggcgaaagtggcaaatttagtgccgaaaaccacctttatcgatggcgtggatcagacttcttt

SEQ ID NO: 130989 - DNA, 75 bp, synthetic construct
  source 1..75: mol_type = other DNA
ggatcgtcggtgtttaacctgtacaccgatccgcaggaaagcgactctatcggcgtgcgccatattccgatgggt

SEQ ID NO: 130990 - DNA, 75 bp, synthetic construct
  source 1..75: mol_type = other DNA
atggaattttcgttttcacccaaacgtcttgttgttgctgtcgccgccgctcttcctctcatggccagcgcagca

SEQ ID NO: 130991 - DNA, 75 bp, synthetic construct
  source 1..75: mol_type = other DNA
ggggcatcctggggcgaaagtagcgaatttagtgccgaaaaccacctttatcgatggtgtggaccagacatcttt

SEQ ID NO: 130992 - DNA, 75 bp, synthetic construct
  source 1..75: mol_type = other DNA
cggtgggtaaccctacaccagatatcgatgcagttgccagccaggggctgattttaacgtcggcgtattctcaac

SEQ ID NO: 130993 - DNA, 75 bp, synthetic construct
  source 1..75: mol_type = other DNA
tatacccagagcggatatcagggtggattcaccggcacagtaatgcaaacggcgggatcgtcggtgtttaacctg

SEQ ID NO: 130994 - DNA, 75 bp, synthetic construct
  source 1..75: mol_type = other DNA
ttctacttaactcccctttcactgcaaaccgtttttatccccagcggcaaatcgaatacacaacaagtgctaccg

SEQ ID NO: 130995 - DNA, 75 bp, synthetic construct
  source 1..75: mol_type = other DNA
cggggaggggatgtggcaggcgagtagcgtgggcgttacgctaaatcatcgcggtgaatcgatgtcgtcagcgcc

SEQ ID NO: 130996 - DNA, 75 bp, synthetic construct
  source 1..75: mol_type = other DNA
ccgttgcgatttatctgggaagtgcctggcggcgggcggttaattccgccgctaaaagtacaacgtaatgaagtg

SEQ ID NO: 130997 - DNA, 75 bp, synthetic construct
  source 1..75: mol_type = other DNA
gaaagagcagctaccattgaccatgaccgtttacgaccctgcgtgtggtagcggtggtatgctcactgaatctca

SEQ ID NO: 130998 - DNA, 75 bp, synthetic construct
  source 1..75: mol_type = other DNA
tcatctcatttatatggaacattgccgacgactgtttacgtgatgtgtacgttcgcggtaagtaccgcgatgtga

SEQ ID NO: 130999 - DNA, 75 bp, synthetic construct
  source 1..75: mol_type = other DNA
aaaccgtttttgtccagcacagtaaatatccaactaaaccaatggagttcgctgtatttaccgccagtattagta

SEQ ID NO: 131000 - DNA, 75 bp, synthetic construct
  source 1..75: mol_type = other DNA
ttggcaaccttaagcgcagcggcattacccctggaagagagccttgccgtaatcggtcaacaaagcagtaataaa

SEQ ID NO: 131001 - DNA, 75 bp, synthetic construct
  source 1..75: mol_type = other DNA
ccgctgagtacacgcattcttttaggtctgagcgacacgttgcaacgtaccggcccgacattattagcgacagtg

SEQ ID NO: 131002 - DNA, 75 bp, synthetic construct
  source 1..75: mol_type = other DNA
cccccaaaaaagttcgggagtaaaaacacgtcgcccgaggatcagccatagtgaactgacgcttttcacccggca

SEQ ID NO: 131003 - DNA, 75 bp, synthetic construct
  source 1..75: mol_type = other DNA
tctttctacgcgacaacctgcttcaggattgatgacgctggtggcgtggcgttatcagcttatcggcccgacacc

SEQ ID NO: 131004 - DNA, 75 bp, synthetic construct
  source 1..75: mol_type = other DNA
tctccgtaccttaagtattttgcaatccagcggcgtccctctgctggatgggatgaatttgtccaccgaaagcct

SEQ ID NO: 131005 - DNA, 75 bp, synthetic construct
  source 1..75: mol_type = other DNA
gaaaatcggcagaaaatccgcagcaaactcattcagtcgctgatctacccctgcatgctgactgcggtggcgatt

SEQ ID NO: 131006 - DNA, 75 bp, synthetic construct
  source 1..75: mol_type = other DNA
atttttgggatattaccgcggtatcggccctcgacaaggtagtgattaaattccgccgcgaggggactgaggttg

SEQ ID NO: 131007 - DNA, 75 bp, synthetic construct
  source 1..75: mol_type = other DNA
agcaggcagcttaagcggttattcgccaacgatggtgatggtggcgttgattgtggtcttttatctgctgcgcta

SEQ ID NO: 131008 - DNA, 75 bp, synthetic construct
  source 1..75: mol_type = other DNA
gcagaccggcgtgaaactggtggttggcaaaggcggaatggggccgctgaccgaagaaggctgccagaaattcaa

SEQ ID NO: 131009 - DNA, 75 bp, synthetic construct
  source 1..75: mol_type = other DNA
gagaatacttgttacttacccctgactatcctgaatctaacgattgtcaggtgaatctctcaacggaggatgtga

SEQ ID NO: 131010 - DNA, 75 bp, synthetic construct
  source 1..75: mol_type = other DNA
cttgatacagaacctgcttttggtctaataaaaattgggtttggtgatattggtatatttgatgggtataattca

SEQ ID NO: 131011 - DNA, 75 bp, synthetic construct
  source 1..75: mol_type = other DNA
aaacggtgccgactccggcctcacctccctgctgacctacgcaaaattcgggggggctgcgctgttcatcggggg

SEQ ID NO: 131012 - DNA, 75 bp, synthetic construct
  source 1..75: mol_type = other DNA
gatggtaggcgcgctggtgctgtggattttcggcggtgattatatcgatgccgcgatggtcggttacagcgtggt

SEQ ID NO: 131013 - DNA, 75 bp, synthetic construct
  source 1..75: mol_type = other DNA
ctctatcaatcacaaccaaacgacagcagttcgcgcagcattggctcgtacatcatgtggatggggattgttgcc

SEQ ID NO: 131014 - DNA, 75 bp, synthetic construct
  source 1..75: mol_type = other DNA
ttacggaaatgctatggaccgttccgaaggagcacagcaaaacgaaggtcgcaatattccggcccataccggaag

SEQ ID NO: 131015 - DNA, 75 bp, synthetic construct
  source 1..75: mol_type = other DNA
ggtgccgcgctgggcagagacggaactgcaggcaatgggccgctctgttcgcgtgaaaaacggatgctggggctg

SEQ ID NO: 131016 - DNA, 75 bp, synthetic construct
  source 1..75: mol_type = other DNA
ctcaacggcaaagcgattttccacgctggccccatcgtgcgcaaaaacggcgataaatgggagatggtttccgtt

SEQ ID NO: 131017 - DNA, 75 bp, synthetic construct
  source 1..75: mol_type = other DNA
tcttctggctggcctcgcttatcaccctcgctaccggactcaacaacaccggttttattagctggtttggcaaac

SEQ ID NO: 131018 - DNA, 75 bp, synthetic construct
  source 1..75: mol_type = other DNA
gaaaaggcgttgaggtcatctttgattctgcgaaggcgatcgaatggtatgcgcagcgcgaagctgatattgaaa

SEQ ID NO: 131019 - DNA, 75 bp, synthetic construct
  source 1..75: mol_type = other DNA
tgcgtaccgatcataaagagctttctgaacatctgatgctggtggatctcgcccgtaatgatctggcacgcattt

SEQ ID NO: 131020 - DNA, 75 bp, synthetic construct
  source 1..75: mol_type = other DNA
gcatttgcacccccggcagccgctacgtcgccgacctcaccaaagttgaccgttactcttacgtgatgcacctgg

SEQ ID NO: 131021 - DNA, 75 bp, synthetic construct
  source 1..75: mol_type = other DNA
aaagtacctctggacaaacgcctcgtttgcctttgccgccaatatggtgaagagttttgtgaataatggctggtg

SEQ ID NO: 131022 - DNA, 75 bp, synthetic construct
  source 1..75: mol_type = other DNA
cctctgaaactgcaacactcaccaccactgagtccggcggcgtttatcagtccctgttcgataaaattaatttaa

SEQ ID NO: 131023 - DNA, 75 bp, synthetic construct
  source 1..75: mol_type = other DNA
tgtggcggagtacgatacgccgggtggtgaacccattgcagccctgatttctgcctgggagtttgatgcgtctgc

SEQ ID NO: 131024 - DNA, 75 bp, synthetic construct
  source 1..75: mol_type = other DNA
tggatgccgatgaagtggccgatgcgtttaaacatctgcatcagagcggaaaagtacgccattttggcgtctcca

SEQ ID NO: 131025 - DNA, 75 bp, synthetic construct
  source 1..75: mol_type = other DNA
ctgccaattatcggctcaggtaaaattgagcgcgtacgggcagctgtcgaagcagaaacactgaaaatgacccgt

SEQ ID NO: 131026 - DNA, 75 bp, synthetic construct
  source 1..75: mol_type = other DNA
ggatctcggcgtgaccaccgtggaccatgctgatatttatggtggctatcagtgcgaagcggcgtttggcgaggc

SEQ ID NO: 131027 - DNA, 75 bp, synthetic construct
  source 1..75: mol_type = other DNA
acgatcttgacgccctgcacgcttatcgcgcctgtatgaatatgggcacattaagcggtgcgccgaaagtgcgcg

SEQ ID NO: 131028 - DNA, 75 bp, synthetic construct
  source 1..75: mol_type = other DNA
tcgccgtttctcactgccctgcccgtcaccgctggcagcctattacgtgctgaaaaagagtaaccccagcccgta

SEQ ID NO: 131029 - DNA, 75 bp, synthetic construct
  source 1..75: mol_type = other DNA
gtgaaaactgaaatcgcgaaagcctccaatgttgcagctaaagccggtaaaaacgtgggcgggtggatcgatgat

SEQ ID NO: 131030 - DNA, 75 bp, synthetic construct
  source 1..75: mol_type = other DNA
gcaaacgggtggcactctggatgctaaaaccgtggcgattatttctttcgcgttgtgcggtttcgctaactttgg

SEQ ID NO: 131031 - DNA, 75 bp, synthetic construct
  source 1..75: mol_type = other DNA
ccgcgctgctgctgcaaatcgccattggcggcattatgctctacttcccaccgggaaaatgggctgtagagcagg

SEQ ID NO: 131032 - DNA, 75 bp, synthetic construct
  source 1..75: mol_type = other DNA
ccgggttctttattggtctggcgggtaatgactccaacttattgatagtgttttatgttcagataatgcccgatg

SEQ ID NO: 131033 - DNA, 75 bp, synthetic construct
  source 1..75: mol_type = other DNA
cggcattaggcgtacataaagtgatgtcttacagtgacgccggcagtgcctttatttttggttcattggtcgggc

SEQ ID NO: 131034 - DNA, 75 bp, synthetic construct
  source 1..75: mol_type = other DNA
gtgctggccccgttggcatggattatgggggtggactggagtgatgcaaatcttgccggaagtttgattgggcag

SEQ ID NO: 131035 - DNA, 75 bp, synthetic construct
  source 1..75: mol_type = other DNA
ggcatttgtggcgatcattgcgctgatcaacggcattattggtggagttggcggctggtttggttttgccaatgt

SEQ ID NO: 131036 - DNA, 75 bp, synthetic construct
  source 1..75: mol_type = other DNA
ggtaatgggagcgattatctggctgttgctgggtcaaaacgtgaactatttctttgtactgggcgtgttgctggt

SEQ ID NO: 131037 - DNA, 75 bp, synthetic construct
  source 1..75: mol_type = other DNA
caaagggcaaaagctggtgctgccttcatggaaattcgccctcgcccagatgctgatttccagcgttaactggat

SEQ ID NO: 131038 - DNA, 75 bp, synthetic construct
  source 1..75: mol_type = other DNA
tcgatcaaaccacgctgcgtattctcggcattggtttgctgctgataattgcagtctatttatggttttgcgcct

SEQ ID NO: 131039 - DNA, 75 bp, synthetic construct
  source 1..75: mol_type = other DNA
tggcggcatcatgctctattttccaccaggaaaatgggcggtagagcaggcggcattaggcgttcataaagtgat

SEQ ID NO: 131040 - DNA, 75 bp, synthetic construct
  source 1..75: mol_type = other DNA
tcttgcgggtagcctgattgggcagaaactggcgattaacgaattcgtcgcttacctgagtttctccccatacct

SEQ ID NO: 131041 - DNA, 75 bp, synthetic construct
  source 1..75: mol_type = other DNA
tagtagtattgctggcgtcatcgtgcatattccggcggggattggtgtgctggaagcggtgtttatcgcgctact

SEQ ID NO: 131042 - DNA, 75 bp, synthetic construct
  source 1..75: mol_type = other DNA
cgaactgtcagatctttggcattttgcaaaggaggatcaccgggatgtttatttttccagattaataaagttgct

SEQ ID NO: 131043 - DNA, 75 bp, synthetic construct
  source 1..75: mol_type = other DNA
aactggattaaacaacatgggggtaatgcctcatattgtcgagtcattattaggtcacgtatataatgcaggctc

SEQ ID NO: 131044 - DNA, 75 bp, synthetic construct
  source 1..75: mol_type = other DNA
cgaactatcagatctttggtattttgcaaaggagaaacatcgggatatttatttttctagattaataaagttgct

SEQ ID NO: 131045 - DNA, 75 bp, synthetic construct
  source 1..75: mol_type = other DNA
gcaagcatatttacccgcgccttggtcgttatcccctcaccagatgtgaaacccgtcattgggtggcctgttttg

SEQ ID NO: 131046 - DNA, 75 bp, synthetic construct
  source 1..75: mol_type = other DNA
aatggcatgaacgtttagaacttcttgcgggtaatcataaaaatgtggttctgttacctgtagcgaatagagatt

SEQ ID NO: 131047 - DNA, 75 bp, synthetic construct
  source 1..75: mol_type = other DNA
gcgattcaacgttaaaaaaattggtggctgtccaggcagaaaaagagcgtttttactccgacgggggcgggctgg

SEQ ID NO: 131048 - DNA, 75 bp, synthetic construct
  source 1..75: mol_type = other DNA
atgacaaccatttttattaaacctgcgccgggatgcctgatccgcgatcccgacacgatgactccgctctctcag

SEQ ID NO: 131049 - DNA, 75 bp, synthetic construct
  source 1..75: mol_type = other DNA
tgcgggctttatcttcgcctttcgcgtactcccggcgattattttcgttaccgcgctcatcagcctgctgtacta

SEQ ID NO: 131050 - DNA, 75 bp, synthetic construct
  source 1..75: mol_type = other DNA
ttttcggctatttcgccaaaacgtgcaccggaaatcgcccagcttggtttacgggcgctggcagcagcaacgctt

SEQ ID NO: 131051 - DNA, 75 bp, synthetic construct
  source 1..75: mol_type = other DNA
aaacaagccctgaaattctgccgggttcgtcgctatgctgtgagtaccgcgcttgaagatttaacaattccagat

SEQ ID NO: 131052 - DNA, 75 bp, synthetic construct
  source 1..75: mol_type = other DNA
cttaaaccggtcactgttaaggaagctatagaatactggatacgcgaatatgcagaagagaaccgcgcgaatgtt

SEQ ID NO: 131053 - DNA, 75 bp, synthetic construct
  source 1..75: mol_type = other DNA
ggacaccatgaaaccgctggcgcaggagggagaggaaaaacccttcaccccgttctggtgccgccgtcttaatga

SEQ ID NO: 131054 - DNA, 75 bp, synthetic construct
  source 1..75: mol_type = other DNA
cggatatccacatcgagacgtttgaaaagagtctggtgatccgttttcgtgttgacggcacattacatgaaatgt

SEQ ID NO: 131055 - DNA, 75 bp, synthetic construct
  source 1..75: mol_type = other DNA
tgtggattccaacactaaagccaatacagggcttgagttactgtcagatgtgtatccccgcttcaagttagttcc

SEQ ID NO: 131056 - DNA, 75 bp, synthetic construct
  source 1..75: mol_type = other DNA
tggtcaaaaatagacaatcctgcaaaccgtcgattaattgaatcgattgttacaagtgcgaatatttggcttaac

SEQ ID NO: 131057 - DNA, 75 bp, synthetic construct
  source 1..75: mol_type = other DNA
tcaatattccgacgctggttggcgtggatatcgacacgcttactccgtggcaacatcaaacgatttatatcgacg

SEQ ID NO: 131058 - DNA, 75 bp, synthetic construct
  source 1..75: mol_type = other DNA
ttctggaagcgcaccgatccctggctggcgatacttccctgcgcgaacatttactggcaggcgtcagcgccggat

SEQ ID NO: 131059 - DNA, 75 bp, synthetic construct
  source 1..75: mol_type = other DNA
caacttgatagccgtgagtgccgccagttgctcaaccaggcaatggcctgccgtacttcgctggaagtggaacat

SEQ ID NO: 131060 - DNA, 75 bp, synthetic construct
  source 1..75: mol_type = other DNA
ctgcactctgaccagggatggcagtatcgtatgagaagatatcaaaatatccttaaagaacatggtattaaacaa

SEQ ID NO: 131061 - DNA, 75 bp, synthetic construct
  source 1..75: mol_type = other DNA
ctccgatgggggatggtggtcgggaagacacacagaacaggctcagtgtgaataccctgatggtgaatacgtatt

SEQ ID NO: 131062 - DNA, 75 bp, synthetic construct
  source 1..75: mol_type = other DNA
gtgaatattgaagagttaaaaaaacaagccgaaacggaaatcgctgactttatcgcgcaaaaaatcgccgagctg

SEQ ID NO: 131063 - DNA, 75 bp, synthetic construct
  source 1..75: mol_type = other DNA
taatggcggctaaagctgcgctgattagtgaattgttcaaagcagaagctatcaccgatgcgccgactgataaat

SEQ ID NO: 131064 - DNA, 75 bp, synthetic construct
  source 1..75: mol_type = other DNA
aaaaagcttaatcctcacgagcatcctgttctgcactctgaccagggatggcagtatcgtatgagaagatatcaa

SEQ ID NO: 131065 - DNA, 75 bp, synthetic construct
  source 1..75: mol_type = other DNA
atgcttaatcctcacgagcatcctgttctgcactctgaccagggatggcagtatcgtatgagaagatatcaaaat

SEQ ID NO: 131066 - DNA, 75 bp, synthetic construct
  source 1..75: mol_type = other DNA
atctctgtcagaacggttatatcgggaacagggtctggatacgcaaaagttgttaggccataaatccagaaaaat

SEQ ID NO: 131067 - DNA, 75 bp, synthetic construct
  source 1..75: mol_type = other DNA
gtacatgttctccggcattttgctggtggtgccgctgttcaaaatcatcaccgcgcttggcatttacgacaccga

SEQ ID NO: 131068 - DNA, 75 bp, synthetic construct
  source 1..75: mol_type = other DNA
ccgatatgccctttgcgctactgcttctcgcgcccagcttattactgctgggtggtctggtggcctggccaatgg

SEQ ID NO: 131069 - DNA, 75 bp, synthetic construct
  source 1..75: mol_type = other DNA
ttgtgcaaggcattgttcggcagaaccggaagccagtggctggttgttgaaggggtcgtctcagaaaacggaaaa

SEQ ID NO: 131070 - DNA, 75 bp, synthetic construct
  source 1..75: mol_type = other DNA
acagtaacgaccgctgggaagcaccgcaacgtgcctcacgcctggctgccagcgtaaagcgttacaagacatcag

SEQ ID NO: 131071 - DNA, 75 bp, synthetic construct
  source 1..75: mol_type = other DNA
gcagcgatctctgtcagaacggttatatcgggaacagggtctggatacgcaaaagttgttaggtcataaatccag

SEQ ID NO: 131072 - DNA, 75 bp, synthetic construct
  source 1..75: mol_type = other DNA
actcaaaagcggcggcaccacgtcacatacggtaattcttgcccgttcgttcaacattccgacgctggttggcgt

SEQ ID NO: 131073 - DNA, 75 bp, synthetic construct
  source 1..75: mol_type = other DNA
cagcagcaaactatttatatcgacggcaacgccggggcgattgtggtcgaaccgacagacgcggtagcgcgttat

SEQ ID NO: 131074 - DNA, 75 bp, synthetic construct
  source 1..75: mol_type = other DNA
catacggtgatccttgcccgttcgttcaacattccgacgctggttggtgtggatattgatgcccttactccgtgg

SEQ ID NO: 131075 - DNA, 75 bp, synthetic construct
  source 1..75: mol_type = other DNA
ttgtgcgaagaagcggggaaggatggccctctactggtcatgaggcaccgcaattcctcgtcggaaccgctgggc

SEQ ID NO: 131076 - DNA, 75 bp, synthetic construct
  source 1..75: mol_type = other DNA
ggatattgatgcccttactccgtggcagcatcagacgatttatatcgacggcaacgctggggcgattgtggttga

SEQ ID NO: 131077 - DNA, 75 bp, synthetic construct
  source 1..75: mol_type = other DNA
ccaccatcagcgtggcgcgtctggcagcgccggtacgctggggcgatgatgaagcgcaattcatcattatgttaa

SEQ ID NO: 131078 - DNA, 75 bp, synthetic construct
  source 1..75: mol_type = other DNA
tgtatggtatatagcatggcagacagaacgctctaaagaagaagactttaaatcaagcattaagccggaagattt

SEQ ID NO: 131079 - DNA, 75 bp, synthetic construct
  source 1..75: mol_type = other DNA
tattcaatttttacatgctctatgtgcagccttttattggactggttcttgcgggttatggtgtatggaaatttt

SEQ ID NO: 131080 - DNA, 75 bp, synthetic construct
  source 1..75: mol_type = other DNA
gagatgtctgaacgaacagccgcagggctggctttcggcgcaccggctgatgaaaaccctgcgctgggacacagt

SEQ ID NO: 131081 - DNA, 75 bp, synthetic construct
  source 1..75: mol_type = other DNA
gagttcaataatatgtttgatcgcctggagggggcattccggaaactgtcagatttctcgtctgacatcgcgcat

SEQ ID NO: 131082 - DNA, 75 bp, synthetic construct
  source 1..75: mol_type = other DNA
gttcagagcatggtctgctgcagctggagaaacatgatgtggatctggccgccgaactgaatgaattacgtgagt

SEQ ID NO: 131083 - DNA, 75 bp, synthetic construct
  source 1..75: mol_type = other DNA
aaactcttggaataccacgcttgatagtatcttcagaggttctgaaaatggtctgcaagatttcacacgaagcct

SEQ ID NO: 131084 - DNA, 75 bp, synthetic construct
  source 1..75: mol_type = other DNA
gcaactactttgaccgcgccgaatatattaaatggaagtcgttccgcgataccgatgacagccgctatgtgggat

SEQ ID NO: 131085 - DNA, 75 bp, synthetic construct
  source 1..75: mol_type = other DNA
gcgaacagccgtattaatgcccgtcttccctatattttcctgctgtcccgcattgcgcattacctgaagatgatt

SEQ ID NO: 131086 - DNA, 75 bp, synthetic construct
  source 1..75: mol_type = other DNA
tgtggctgagtatgacacgccgggtggtgaacccattgctgccctggtttcggcctgggaatttgatgcatcagc

SEQ ID NO: 131087 - DNA, 75 bp, synthetic construct
  source 1..75: mol_type = other DNA
ttaaagtcatcatcgaaccaggagaggcctgggagagtgagaatcgagcctcattgaaattaatgtggcttactg

SEQ ID NO: 131088 - DNA, 75 bp, synthetic construct
  source 1..75: mol_type = other DNA
tggtgcgcagttttgtcaccaacggctggtgtgttcagatccgcggtcctcaggccggtggtgcggtgcaggatt

SEQ ID NO: 131089 - DNA, 75 bp, synthetic construct
  source 1..75: mol_type = other DNA
gatatcgaagacaatccgggattcttccgcgtgaaactctacgctgtaccgcatttccaggtagaaggtatggac

SEQ ID NO: 131090 - DNA, 75 bp, synthetic construct
  source 1..75: mol_type = other DNA
atgaacgattcagtgttgggtgatatgcagaaccatgttcatgacatctttgctgcgttcggtcgtggagccaaa

SEQ ID NO: 131091 - DNA, 75 bp, synthetic construct
  source 1..75: mol_type = other DNA
ttattatcataccctggcaactgctaacactgagctgaaggacgttgctaatctgaaacctattgtatcagggat

SEQ ID NO: 131092 - DNA, 75 bp, synthetic construct
  source 1..75: mol_type = other DNA
cagacagcagcaagagattaccaacaacaagtacagcaagctgcagacaatgctgccggaagcaatgatatgctc

SEQ ID NO: 131093 - DNA, 75 bp, synthetic construct
  source 1..75: mol_type = other DNA
ttcacttaatctggaaggaacaacattcgggatatggctatggcgtaaattacaaaacgggatatctggacggaa

SEQ ID NO: 131094 - DNA, 75 bp, synthetic construct
  source 1..75: mol_type = other DNA
taactttatcttctggccagttgccgcgctgggctttatcgtctccatcaacggcgcgttgatgaatatgcatca

SEQ ID NO: 131095 - DNA, 75 bp, synthetic construct
  source 1..75: mol_type = other DNA
cagacttcgagaagaaactgaaagagcgtgccgtctctacagagaacatactgaacagcgagttcaggaagctcg

SEQ ID NO: 131096 - DNA, 75 bp, synthetic construct
  source 1..75: mol_type = other DNA
atgaaatctaaaaaatctttttttattgaagggcatatcatgtcgaacagctgtcacggacaggctggacaactt

SEQ ID NO: 131097 - DNA, 75 bp, synthetic construct
  source 1..75: mol_type = other DNA
aaggtaaagttgcggtagtcaccggttgtgacaccgggctgggacagggaatggcactggggctggcacaggcgg

SEQ ID NO: 131098 - DNA, 75 bp, synthetic construct
  source 1..75: mol_type = other DNA
cgttgaaccgactgaaaccatcaagcaggtcacagcgctggggcgtcgttttttaagcctgaccgccgatctgcg

SEQ ID NO: 131099 - DNA, 75 bp, synthetic construct
  source 1..75: mol_type = other DNA
gtgccggacattctctcttttggtgacgaattatcgccgcaaaatgtgcaggtccgctggcgtgaagcggcaaaa

SEQ ID NO: 131100 - DNA, 75 bp, synthetic construct
  source 1..75: mol_type = other DNA
tccatctttacgatctcggcaccggcaatcaggtcaaaattccgtccgaagtgatgatcccggaaacccgcgaat

SEQ ID NO: 131101 - DNA, 75 bp, synthetic construct
  source 1..75: mol_type = other DNA
gactccccggaaatcattcagagcggtttatatcgtcatacatatattcaggagtacgatacgccgggtggcgaa

SEQ ID NO: 131102 - DNA, 75 bp, synthetic construct
  source 1..75: mol_type = other DNA
gaagaaaacggccggcgggaggaatacggcgcgctacctgggtcgttatctgaagaagccgccgatagcagcctc

SEQ ID NO: 131103 - DNA, 75 bp, synthetic construct
  source 1..75: mol_type = other DNA
ctgaaacagacacaacatctgacggtcatgctgcttgatatcgactattccaaagcattaacgataactatggac

SEQ ID NO: 131104 - DNA, 75 bp, synthetic construct
  source 1..75: mol_type = other DNA
tggtgcattgaccacagtaaaacgccaacatcgccctgcgctggatctttcacgcctgcctgaacttctgtcgcg

SEQ ID NO: 131105 - DNA, 75 bp, synthetic construct
  source 1..75: mol_type = other DNA
aatctttacgcattccctacctatgcgctatgccgattttccaacgcttgttgatgctttggactacgccgctct

SEQ ID NO: 131106 - DNA, 75 bp, synthetic construct
  source 1..75: mol_type = other DNA
aaaatccgcaaagctgtcgaacttcaaccttttacctggcaacaaaagacgctctatcttacggtcagcatcggt

SEQ ID NO: 131107 - DNA, 75 bp, synthetic construct
  source 1..75: mol_type = other DNA
ttgcggactggttcagtgagcaattctcaacgggcgttttgatcgtgccttgtatgctgacgttggctattcctg

SEQ ID NO: 131108 - DNA, 75 bp, synthetic construct
  source 1..75: mol_type = other DNA
atcgctgaaacagacacaacatctgactgtcatgctgcttgatatcgactatttcaaaagcattaacgataacta

SEQ ID NO: 131109 - DNA, 75 bp, synthetic construct
  source 1..75: mol_type = other DNA
ttaatagaatcaggtttgtggtcccgtgatgcagttgaacgtcagatgagccatcaggaacgcaatggtgtacgt

SEQ ID NO: 131110 - DNA, 75 bp, synthetic construct
  source 1..75: mol_type = other DNA
gcgatgctgttgaaaggcagatgagtcatcaggagcgtaacggagtacgagcagcttatatccataaagccgaac

SEQ ID NO: 131111 - DNA, 75 bp, synthetic construct
  source 1..75: mol_type = other DNA
gatattgaaaatgccatgtggaccattcctgccgaacgcgagcctctgccaggtgtgaaatactcacaccggggt

SEQ ID NO: 131112 - DNA, 75 bp, synthetic construct
  source 1..75: mol_type = other DNA
tttccgttgcgccgccgtttggctatgaattgtgccagcgccgcgtgaatgaaaaagatctcgctgaactggatc

SEQ ID NO: 131113 - DNA, 75 bp, synthetic construct
  source 1..75: mol_type = other DNA
gccgccccacagtattccccgaacgtcctccggcaagcctgcccgtgcggaagcgaaaaaacgttatcagaaggc

SEQ ID NO: 131114 - DNA, 75 bp, synthetic construct
  source 1..75: mol_type = other DNA
tccaatgggcgtcggtcagcgggattcctggagcgccaaactgcagggtttactggcaagttgccagcccgcagc

SEQ ID NO: 131115 - DNA, 75 bp, synthetic construct
  source 1..75: mol_type = other DNA
cttgccgttatgctgaatttactggtttttattcgttccagtgaactcagatacgcccggtggtctgaaattgat

SEQ ID NO: 131116 - DNA, 75 bp, synthetic construct
  source 1..75: mol_type = other DNA
agcagaacatctggaagaacggcgactgatgctacagtggtgggcagattttctggatgcgaacagagaacaatg

SEQ ID NO: 131117 - DNA, 75 bp, synthetic construct
  source 1..75: mol_type = other DNA
ggccatggattccgggcgatggcgtgcagtgcattgattgaatcaggtttgtggtcccgcgatgctgtggaacgt

SEQ ID NO: 131118 - DNA, 75 bp, synthetic construct
  source 1..75: mol_type = other DNA
tcccctttatcggcaaccgggatatcacaacactcagtaccccggacctgcttatccctgttcgtgctgcagaag

SEQ ID NO: 131119 - DNA, 75 bp, synthetic construct
  source 1..75: mol_type = other DNA
gattttctggatgcgaaccgggagaagggtatcagtccgtttgaatatgcaaaaattaacaatccattaaaatag

SEQ ID NO: 131120 - DNA, 75 bp, synthetic construct
  source 1..75: mol_type = other DNA
agccgaacgcgaacctctgccaggcgtaaaattctcacaccggggatccaagatgcgaacaccacatcttgtgcc

SEQ ID NO: 131121 - DNA, 75 bp, synthetic construct
  source 1..75: mol_type = other DNA
gtcgggagtggttgtgcttcatttcttacgttaacagatgacttcaataagctgatggtggaagctgacgaatgt

SEQ ID NO: 131122 - DNA, 75 bp, synthetic construct
  source 1..75: mol_type = other DNA
tccgtttgttccaggaaggtcatctactacgtaatagcattgcaatttttgcgctaacgacgctgttctatttta

SEQ ID NO: 131123 - DNA, 75 bp, synthetic construct
  source 1..75: mol_type = other DNA
ggttatcaatttatccaatatgatgtttattgcgactgttgctctgctggtggcacgagataagcgtcttggaaa

SEQ ID NO: 131124 - DNA, 75 bp, synthetic construct
  source 1..75: mol_type = other DNA
ggcgatggcatgtagtgcattaatagaatcaggtttgtggtcccgcgatgctgtggaacgccagatgagccatca

SEQ ID NO: 131125 - DNA, 75 bp, synthetic construct
  source 1..75: mol_type = other DNA
catgacccacgtaaaccaatcagtgaaaacaccgtaaataaagccctgagggttatggggtatgacacaacccag

SEQ ID NO: 131126 - DNA, 75 bp, synthetic construct
  source 1..75: mol_type = other DNA
gggattgacccttgcgaacagaaaagagctaaaaaagtagtccctgatttacaactctcttttgaacatattgca

SEQ ID NO: 131127 - DNA, 75 bp, synthetic construct
  source 1..75: mol_type = other DNA
cttgctgttatgctgaatttactggtttttattcgttccagtgaactcagataggcccgttggtctgaaattgat

SEQ ID NO: 131128 - DNA, 75 bp, synthetic construct
  source 1..75: mol_type = other DNA
ctagccgttatgctgaatttactggtttttattcgttccagtgaactcagatacgcccgttggtctgaaattgat

SEQ ID NO: 131129 - DNA, 75 bp, synthetic construct
  source 1..75: mol_type = other DNA
gcattgaccacggtaaaacgccagcatcgcccggctcttgatctttcgcgcctgcctgaacttctgtcgcgtatt

SEQ ID NO: 131130 - DNA, 75 bp, synthetic construct
  source 1..75: mol_type = other DNA
gggcaggtgaaaatggtctgatctttacgggagcacatgacccacgtaaaccaatcagtgaaaacaccgtaaata

SEQ ID NO: 131131 - DNA, 75 bp, synthetic construct
  source 1..75: mol_type = other DNA
ctcgcagttatgctgaatttactggtttttattcgttccagtgaactcagatacgcccgttggtctgaaattgat

SEQ ID NO: 131132 - DNA, 75 bp, synthetic construct
  source 1..75: mol_type = other DNA
cttgcggttatgctgaatttactggtttttattcgttccagtgaactcagatatgcccgttggtctgaaattgat

SEQ ID NO: 131133 - DNA, 75 bp, synthetic construct
  source 1..75: mol_type = other DNA
ggacatcttatcgataaaggcggttatctgagtttcagggaaagggtattgcgtgatgtgacgctgaacccggaa

SEQ ID NO: 131134 - DNA, 75 bp, synthetic construct
  source 1..75: mol_type = other DNA
ttggatgagagacgattgatgctgcagtggtgggcggattttctggatgcaaatcgcgagaaagggattagcccg

SEQ ID NO: 131135 - DNA, 75 bp, synthetic construct
  source 1..75: mol_type = other DNA
tgcctacagaggacaacctctcacccggcaggcaactaaactcaccctgcttatcttcatccgttccagcgaact

SEQ ID NO: 131136 - DNA, 75 bp, synthetic construct
  source 1..75: mol_type = other DNA
gcattgaccacggtaaaacgccagcatcgcccggctcttgatctttcccgcctgcctgaacttgtgtcgcgtatt

SEQ ID NO: 131137 - DNA, 75 bp, synthetic construct
  source 1..75: mol_type = other DNA
gcattgaccacggtaaaacgccagcatcgccccgctcttgatctttcgcgcctgcctgaacttgtgtcgcgtatt

SEQ ID NO: 131138 - DNA, 75 bp, synthetic construct
  source 1..75: mol_type = other DNA
atctggaagaacgccgactgatgctacagtggtgggccgattttctgaatgcaaacagagaaagatttatcagtc

SEQ ID NO: 131139 - DNA, 75 bp, synthetic construct
  source 1..75: mol_type = other DNA
gccagtaacaagcgatggagtgaagaccatcgatcgcgcgttcttcgctatcttgagctttatatcttccctcat

SEQ ID NO: 131140 - DNA, 75 bp, synthetic construct
  source 1..75: mol_type = other DNA
acccggctctggatatggctggtgcattgaccacagtaaaacgccaacatcgccctgcgctggatctttcacgcc

SEQ ID NO: 131141 - DNA, 75 bp, synthetic construct
  source 1..75: mol_type = other DNA
gttgcttacaaaaatagatagctatactggtaggccgctaacccgatgggcgacacaactcactttgctgatctt

SEQ ID NO: 131142 - DNA, 75 bp, synthetic construct
  source 1..75: mol_type = other DNA
tatacttacagaacttcagacatgggctggtgaaaatggtctggtctttacgggagcacatgacccgcataaacc

SEQ ID NO: 131143 - DNA, 75 bp, synthetic construct
  source 1..75: mol_type = other DNA
cgggggcacatgacccgcttaaaccaatcagtgaaaacaccgtaaataaagccctgagggtaatggggtatgaca

SEQ ID NO: 131144 - DNA, 75 bp, synthetic construct
  source 1..75: mol_type = other DNA
taaaccaatcagtgaaaatactgtaaataaagccctgagggtgatggggtatgacacaactcaggaagtctgtgg

SEQ ID NO: 131145 - DNA, 75 bp, synthetic construct
  source 1..75: mol_type = other DNA
ttgtgccactcagccaacaggctgtagccatactggcagaacttcagacatgggctggtgaaaatggtctgatct

SEQ ID NO: 131146 - DNA, 75 bp, synthetic construct
  source 1..75: mol_type = other DNA
aatcagtgaaaacaccgtaaataaagccctcagagttatggggtatgacacaaccctggatatctgtgggcatgg

SEQ ID NO: 131147 - DNA, 75 bp, synthetic construct
  source 1..75: mol_type = other DNA
ttcctgccgaacgcgagcctctgccaggtgtgaaattctcacaccggggttccaagatgcgaacaccacatcttg

SEQ ID NO: 131148 - DNA, 75 bp, synthetic construct
  source 1..75: mol_type = other DNA
catactaacagaacttcagacatgggctggtgaaaatggtctgatctttacgggagcgcatgacccacgtagacc

SEQ ID NO: 131149 - DNA, 75 bp, synthetic construct
  source 1..75: mol_type = other DNA
ataaactgttatgtggtaaactatactctcctgaccgaaaaaccagaacgaattgaagctggagtcgtagttagg

SEQ ID NO: 131150 - DNA, 75 bp, synthetic construct
  source 1..75: mol_type = other DNA
aaggccctcagagtgatggggtatgacacaaccaaggaagtctgtggccatggattccgggcgatggcgtgcagt

SEQ ID NO: 131151 - DNA, 75 bp, synthetic construct
  source 1..75: mol_type = other DNA
cggcaccggtcgtggcagtaatgatcaccggtattctgctgaatgttctttactggtttggcttgttcgttccgg

SEQ ID NO: 131152 - DNA, 75 bp, synthetic construct
  source 1..75: mol_type = other DNA
ctcaccgaatccgatggttgcggcagtattaggtgcagtggttatttcggcagaagtgctattgcttcgttcgat

SEQ ID NO: 131153 - DNA, 75 bp, synthetic construct
  source 1..75: mol_type = other DNA
cgtgatgctgctggttttcgcgtcgaggccccttggccggttgattcgccaaagagcacaggagcggcggaaatg

SEQ ID NO: 131154 - DNA, 75 bp, synthetic construct
  source 1..75: mol_type = other DNA
ggtggtgcggtgccggaagtgaaaagcgcggtgattgctaatgcgcagtcgaaggtgttgattgtcgagtttcat

SEQ ID NO: 131155 - DNA, 75 bp, synthetic construct
  source 1..75: mol_type = other DNA
ggcgtgtatgcagttgcgggctttacctttgtttatgcggtgggctatctctcgccgaatccgatggttgcagcg

SEQ ID NO: 131156 - DNA, 75 bp, synthetic construct
  source 1..75: mol_type = other DNA
ggcggcaccggtcgtggcagtaatgatcaccggtattctgctgaatgttctttactggcttggcctgttcgttcc

SEQ ID NO: 131157 - DNA, 75 bp, synthetic construct
  source 1..75: mol_type = other DNA
aataactattgagctatttcctatgcagtcccaactttatcaccacgactatcagctaattcattcgtcaaatgg

SEQ ID NO: 131158 - DNA, 75 bp, synthetic construct
  source 1..75: mol_type = other DNA
ctgaaaatgtccgccttaaacgacaactggcggagcaggctgaggaactggccatcctccaaaaggccgcgacaa

SEQ ID NO: 131159 - DNA, 75 bp, synthetic construct
  source 1..75: mol_type = other DNA
gtcattgataataaaatagagtctatttaccatttagactggccccctgaatctccagacaaccagtatcactta

SEQ ID NO: 131160 - DNA, 75 bp, synthetic construct
  source 1..75: mol_type = other DNA
gagaacgccaagcggcccgatgccggcgccgtcatggcgtggggtgtcgcgatcgtggcggtgatgatcctcttc

SEQ ID NO: 131161 - DNA, 75 bp, synthetic construct
  source 1..75: mol_type = other DNA
atgctgaatttgcaacactgtcagcaatattcgcagataaaattgaatcactggcagcagaagccgagatggaag

SEQ ID NO: 131162 - DNA, 75 bp, synthetic construct
  source 1..75: mol_type = other DNA
tcagcaatattcacagataaaattgaatcactggcagcagaagccgagatggaagaaaatcagcagaataattaa

SEQ ID NO: 131163 - DNA, 75 bp, synthetic construct
  source 1..75: mol_type = other DNA
ctttttctcagcgacgcggggtgtgcataatacgctttcccgctacagagtcaagcatttttttgcttttctctg

SEQ ID NO: 131164 - DNA, 75 bp, synthetic construct
  source 1..75: mol_type = other DNA
caaatttactggataaaaatggtaagcctgtggaaataatggtgtgtgatgatcaggaactgcatttttttgttc

SEQ ID NO: 131165 - DNA, 75 bp, synthetic construct
  source 1..75: mol_type = other DNA
aggtgacaataaaactgcacactttttaagtggtggtgatgcagaagtcgtttgttgggaaggtgttagagatcg

SEQ ID NO: 131166 - DNA, 75 bp, synthetic construct
  source 1..75: mol_type = other DNA
gctacctcgccagacggtgtaaaagtcgtgctgctttctgccacttttagccaaagcaccttgaatactctcaaa

SEQ ID NO: 131167 - DNA, 75 bp, synthetic construct
  source 1..75: mol_type = other DNA
gtgctgttctgaacggagaactcaacgaacgcgacgggctgagtgggcagttttttaaccgcctgctttactgct

SEQ ID NO: 131168 - DNA, 75 bp, synthetic construct
  source 1..75: mol_type = other DNA
ggaaaacaaatatcatggtttgtaggctacatttctttttctgttgttctgtttaattactgtctgtatctggtc

SEQ ID NO: 131169 - DNA, 75 bp, synthetic construct
  source 1..75: mol_type = other DNA
tttcattgattgtatttttttttagtataacttcacatgctgtagagtttgtttatcgagttgattcccgacctc

SEQ ID NO: 131170 - DNA, 75 bp, synthetic construct
  source 1..75: mol_type = other DNA
agcgtgccgttacgtgcccgattttatcagtatgctccggacatcacgacaggcgaagttgaatcgcatatggtt

SEQ ID NO: 131171 - DNA, 75 bp, synthetic construct
  source 1..75: mol_type = other DNA
cggcaccagtcgtggcagtaatgataactggtattctgctaaatgctctttactggcttggcctgttcgttccgg

SEQ ID NO: 131172 - DNA, 75 bp, synthetic construct
  source 1..75: mol_type = other DNA
cgtaatgacgaaggccgtctctttgttcatctctttatttggtcgcaccctgattcagatcattgcgatggagta

SEQ ID NO: 131173 - DNA, 75 bp, synthetic construct
  source 1..75: mol_type = other DNA
atatcgttaccgtatcagggcaaataatattttttatcctattcaaccgtcagtcaattatctaacccagcgcgg

SEQ ID NO: 131174 - DNA, 75 bp, synthetic construct
  source 1..75: mol_type = other DNA
taacatcagaattattactcacgatgacacggttttgttattaagaggaaccaggaacctgttaaaaattagtac

SEQ ID NO: 131175 - DNA, 75 bp, synthetic construct
  source 1..75: mol_type = other DNA
acctgcttatccctgttcgtgctgcagaagctaaacaaatttatgaaatcgccagtcgtctgcagcaaagaatat

SEQ ID NO: 131176 - DNA, 75 bp, synthetic construct
  source 1..75: mol_type = other DNA
gtctgatctttacgggagcacatgacccgcgtaaaccaatcagtgaaaatactgtaaataaagccctgagggtga

SEQ ID NO: 131177 - DNA, 75 bp, synthetic construct
  source 1..75: mol_type = other DNA
taatagaatcaggtttgtggtcccgcgatgcagttgaacgtcagatgagccatcaggaacgtaacggtgtacgtg

SEQ ID NO: 131178 - DNA, 75 bp, synthetic construct
  source 1..75: mol_type = other DNA
gcattgaccacggtaaaacgccagcatcgccctgctctcgatctttcacgcctgcctgaacttctgtcgcgtatt

SEQ ID NO: 131179 - DNA, 75 bp, synthetic construct
  source 1..75: mol_type = other DNA
gcattgaccacggtaaaacgccagcatcgccctgctctagatctttcacgcctgcctgaacttatgtcgcgtatt

SEQ ID NO: 131180 - DNA, 75 bp, synthetic construct
  source 1..75: mol_type = other DNA
ggtgaaaatggtctgatctttacgggagcacacgacccacgtaaaccaatcagtgaaaataccgtaaataaggcc

SEQ ID NO: 131181 - DNA, 75 bp, synthetic construct
  source 1..75: mol_type = other DNA
gcaacggagtacgtgccgcgtatattcataaagcagaacatctggaagaacgtcggcttatgctgcaatggtggg

SEQ ID NO: 131182 - DNA, 75 bp, synthetic construct
  source 1..75: mol_type = other DNA
cggcttgctgttatgctgaatttactggtttttattcgctccagtgaactcagatatgcccgctggtctgaaatt

SEQ ID NO: 131183 - DNA, 75 bp, synthetic construct
  source 1..75: mol_type = other DNA
cgcattgactacggtaaaacgccagcatcgccccgctcttgatctttctcgcctgcctgaacttttgtcgcgtat

SEQ ID NO: 131184 - DNA, 75 bp, synthetic construct
  source 1..75: mol_type = other DNA
tggtttttattcgttccagtgaactcagatatgcccgctggtcggaaattgatattgacaattccatgtggacta

SEQ ID NO: 131185 - DNA, 75 bp, synthetic construct
  source 1..75: mol_type = other DNA
acccacgtaaaccaatcagtgaaaacaccgtaaataaagccctgagggttatggggtatgacacaacccaggatg

SEQ ID NO: 131186 - DNA, 75 bp, synthetic construct
  source 1..75: mol_type = other DNA
accccggagctgcttatccctgttcgtgctgcagaagctaaacaaatttatgaaatcgccagtcgtctgcagcaa

SEQ ID NO: 131187 - DNA, 75 bp, synthetic construct
  source 1..75: mol_type = other DNA
aggcgatgagcaggcaagggcgcacgttgagcgttatctggatttattagcggtttgtctgggaaatatcctgac

SEQ ID NO: 131188 - DNA, 75 bp, synthetic construct
  source 1..75: mol_type = other DNA
atgacacaaccaaggaagtctgtggccatggattccgggcgatggcgtgcagtgcattgattgaatccggcttat

SEQ ID NO: 131189 - DNA, 75 bp, synthetic construct
  source 1..75: mol_type = other DNA
acccggccctggatatggctggtgcattgaccacggtaaaacgcaagcatcgtcctgcactggatctttcacgcc

SEQ ID NO: 131190 - DNA, 75 bp, synthetic construct
  source 1..75: mol_type = other DNA
cgctgcggctgtggtcaaattggttgtatcgaaaattatctatcaggtcggggctttgcgtggctctggcaacac

SEQ ID NO: 131191 - DNA, 75 bp, synthetic construct
  source 1..75: mol_type = other DNA
gtagctcgtgtcccgcgtattgaacgcgcacgccacggagatgcgggaggaatgcgtggtgctgccttcctacat

SEQ ID NO: 131192 - DNA, 75 bp, synthetic construct
  source 1..75: mol_type = other DNA
gaacgaaaattgcgctgggcgtgttcgacagctcccggcagttgcagtgggaaaagcgggtgccgacgccgagtg

SEQ ID NO: 131193 - DNA, 75 bp, synthetic construct
  source 1..75: mol_type = other DNA
gcattgaccacggtaaaacgccagcatcgccctgctctggatctttctcgcctgcctgaacttttgtcgcgtatt

SEQ ID NO: 131194 - DNA, 75 bp, synthetic construct
  source 1..75: mol_type = other DNA
gcattgaccacggtaaaacgccagcatcgccctgctctggatctttcacgcctgcctgaacttgtgtcgcgtatt

SEQ ID NO: 131195 - DNA, 75 bp, synthetic construct
  source 1..75: mol_type = other DNA
gcattgaccacggtaaaacgccagcatcgccctgctctcgatctttcccgcctgcctgaacttatgtcgcgtatt

SEQ ID NO: 131196 - DNA, 75 bp, synthetic construct
  source 1..75: mol_type = other DNA
ctggctgttatgctgaatttactggtttttattcgttccagtgaactcagataagcccgatggtctgaaattgat

SEQ ID NO: 131197 - DNA, 75 bp, synthetic construct
  source 1..75: mol_type = other DNA
cttgcagttatgctgaatttactggtttttattcgttccagtgaactcagataagcccgctggtctgaaattgat

SEQ ID NO: 131198 - DNA, 75 bp, synthetic construct
  source 1..75: mol_type = other DNA
gcattgaccacggtaaaacgccagcatcgccctgctctggatctttcgcgcctgcctgaacttatgtcgcgtatt

SEQ ID NO: 131199 - DNA, 75 bp, synthetic construct
  source 1..75: mol_type = other DNA
gtcatctgatgatggcttttcggtaattgattatcatcaggtcgccagtgaagcggggagtggcaggatattcag

SEQ ID NO: 131200 - DNA, 75 bp, synthetic construct
  source 1..75: mol_type = other DNA
ataaaacactctccaggaaacccggggcggttcagtgggcaacaaagcaatggccacagttttccggtgtggtcg

SEQ ID NO: 131201 - DNA, 75 bp, synthetic construct
  source 1..75: mol_type = other DNA
gcccctgagtggcaaatgaaacgggaaatgctttctcctgcgtataccaccagatggacagatttgccagtagcc

SEQ ID NO: 131202 - DNA, 75 bp, synthetic construct
  source 1..75: mol_type = other DNA
gcgctccggtcgcccgttttttgcctgttccgacaatcttcaactcgttaccacagcggtgagcgtcagttattt

SEQ ID NO: 131203 - DNA, 75 bp, synthetic construct
  source 1..75: mol_type = other DNA
atgctgctggcggcctggtattatggcgctttagatgcgcgctccggtcgcccgttttttgcctgttccgacaat

SEQ ID NO: 131204 - DNA, 75 bp, synthetic construct
  source 1..75: mol_type = other DNA
tccgcttgcaatcgttgcatttttcttacgaaaaaaggccgcagagtttcacccctgcggcctggtccgggcgca

SEQ ID NO: 131205 - DNA, 75 bp, synthetic construct
  source 1..75: mol_type = other DNA
cccacacaggacagccgggacattattgccgccgcatgcagagccttaaaccatgtctggcgtgaaggataccgc

SEQ ID NO: 131206 - DNA, 75 bp, synthetic construct
  source 1..75: mol_type = other DNA
tgaatggcaaacccattgaagatgcgacggtttatcacattgctactcagagtttccttgctgatggtggagatg

SEQ ID NO: 131207 - DNA, 75 bp, synthetic construct
  source 1..75: mol_type = other DNA
tctccggtgagtgcgccgctggactatctgcatggtcacggttccctgatctctggcctggaaacagcgctggaa

SEQ ID NO: 131208 - DNA, 75 bp, synthetic construct
  source 1..75: mol_type = other DNA
aaccagtcgggaaaagggaaagtgtggtttgcggggcgaggaaccgcccctgaatggcaaatgaaacgggaaatg

SEQ ID NO: 131209 - DNA, 75 bp, synthetic construct
  source 1..75: mol_type = other DNA
cagagcgggccgcagagaaactacgtggggagcgtcagtattgccggcaggtgacgacatttgtacggacatccc

SEQ ID NO: 131210 - DNA, 75 bp, synthetic construct
  source 1..75: mol_type = other DNA
acagtctgaaatatcagtaatatctgcaacaggatgccattccgggctcagtaaggatcttcttcccctgactta

SEQ ID NO: 131211 - DNA, 75 bp, synthetic construct
  source 1..75: mol_type = other DNA
cgacccgattttcctcgacccggaaaagtcgatggagattcagtacgatcttggttcggatatcgtcatgatctt

SEQ ID NO: 131212 - DNA, 75 bp, synthetic construct
  source 1..75: mol_type = other DNA
ttgcacgattttatgcagtggaaaggcccgattcttaccgactccggcggcttccaggtcttcagccttggtgat

SEQ ID NO: 131213 - DNA, 75 bp, synthetic construct
  source 1..75: mol_type = other DNA
cgcagcctctacagtgcattgttggtcagtgcctgcgaagcagacattatcgcgctggtgcttaatgcggacgca

SEQ ID NO: 131214 - DNA, 75 bp, synthetic construct
  source 1..75: mol_type = other DNA
atcgacaagatcacctacatttccagcaatagcagttggaaaacggtattagcattcccatgtgtttcagcaata

SEQ ID NO: 131215 - DNA, 75 bp, synthetic construct
  source 1..75: mol_type = other DNA
ttgggtgcaatttccatgacataaaagccaaagggatatcagattacgagggaagcagtcgcgacaaacaaattt

SEQ ID NO: 131216 - DNA, 75 bp, synthetic construct
  source 1..75: mol_type = other DNA
gtatcgatatgtttgactgcgtaatgccaacccgcaacgcccgaaatggtcatttgttcgtgaccgatggcgtgg

SEQ ID NO: 131217 - DNA, 75 bp, synthetic construct
  source 1..75: mol_type = other DNA
acttatcgcaggtaatgctcacgcagcacgtccttatagcgggttcctgcctgcggcagtgaataataagagtgg

SEQ ID NO: 131218 - DNA, 75 bp, synthetic construct
  source 1..75: mol_type = other DNA
tactgccagtcatgtttttccccttacttatcgcaggtaatgctcacgcagcacgtccttatagcgggttcctgc

SEQ ID NO: 131219 - DNA, 75 bp, synthetic construct
  source 1..75: mol_type = other DNA
atgacgatcatccatcctctgcttgccagtagtagcgcaccgaattatcgccagtcctggcggttagcgggagtg

SEQ ID NO: 131220 - DNA, 75 bp, synthetic construct
  source 1..75: mol_type = other DNA
ccgtggtcccctttttcgccaggctttacctcgtcaatgaatcgcccggtcattggagtagtaaccaaagcagat

SEQ ID NO: 131221 - DNA, 75 bp, synthetic construct
  source 1..75: mol_type = other DNA
cttccgtctgagttacatggcaaaacagcgcaccaagcgctacagcagtaccgaacgctccttcggctgcagtca

SEQ ID NO: 131222 - DNA, 75 bp, synthetic construct
  source 1..75: mol_type = other DNA
atgacaaaattgaaattattgtctttactgccagttatattgtttcccttacttatcgcaggtaatgctcacgca

SEQ ID NO: 131223 - DNA, 75 bp, synthetic construct
  source 1..75: mol_type = other DNA
tgccaaccaattaggaatggttccgtccgcacagaaaagaatgatttctttgaatctacataataataatggaag

SEQ ID NO: 131224 - DNA, 75 bp, synthetic construct
  source 1..75: mol_type = other DNA
acttgcggaaattatgggattttacatatctgaagctatgtatatacaacctccggctttatcagcacgagccag

SEQ ID NO: 131225 - DNA, 75 bp, synthetic construct
  source 1..75: mol_type = other DNA
atgtcgtaaaccacaagcttaaacttcgacttggtagcccgtatcttccagtgtgggattcattgccgcagcacg

SEQ ID NO: 131226 - DNA, 75 bp, synthetic construct
  source 1..75: mol_type = other DNA
gcaacgtatctctgaccaaagaagcaccaaccatgaatgtcgctatggttggcctaggctgggatgcccgtgtaa

SEQ ID NO: 131227 - DNA, 75 bp, synthetic construct
  source 1..75: mol_type = other DNA
actttgcgacagcctggttgccgagtgacagtgagcgtgccgcaatacccttagcactcgatctaggcggcttgt

SEQ ID NO: 131228 - DNA, 75 bp, synthetic construct
  source 1..75: mol_type = other DNA
ctgatcgtctggcgatacaagttggccccagaaacgattaacctgcccgctaggccgggagtaccagagcttcag

SEQ ID NO: 131229 - DNA, 75 bp, synthetic construct
  source 1..75: mol_type = other DNA
tgcgaatcaggcacaaacaccggaagttattatggggatacgcacatcaattgccttagtcccttgcggatttat

SEQ ID NO: 131230 - DNA, 75 bp, synthetic construct
  source 1..75: mol_type = other DNA
taatcgtaaaaaagtgcagcagcaattaatcagcgatatcactaattattattcaataaaaataatcagaacatc

SEQ ID NO: 131231 - DNA, 75 bp, synthetic construct
  source 1..75: mol_type = other DNA
cgccaatcaggtgcaaacgccggaagttattatgggcatccgcacatcaattgccttagtaccttgcggatttat

SEQ ID NO: 131232 - DNA, 75 bp, synthetic construct
  source 1..75: mol_type = other DNA
ttcctttaacgctaaacccgatgaaacagagtaaaaacaagccacgaattcgccaggcggttggagccacccggc

SEQ ID NO: 131233 - DNA, 75 bp, synthetic construct
  source 1..75: mol_type = other DNA
tgtttctgcgcaaggaatgcccgtccaggtgcaggcagatccacttcatcttccttttgccgataaatccgttga

SEQ ID NO: 131234 - DNA, 75 bp, synthetic construct
  source 1..75: mol_type = other DNA
ttttatccgctcacggataaaaattcaaagaaatcgtggttgaaattgataatcgtaaaaaagtgcagcagcaat

SEQ ID NO: 131235 - DNA, 75 bp, synthetic construct
  source 1..75: mol_type = other DNA
ttgtcattcaatattgatgtttttagacaagcattagaggtaaaaaataagaatagttacaagataagtaaattt

SEQ ID NO: 131236 - DNA, 75 bp, synthetic construct
  source 1..75: mol_type = other DNA
agatacaggaaacagtcaatggaaatgacaggttgtttttttaccctactccattaaaaaatggaagttttatct

SEQ ID NO: 131237 - DNA, 75 bp, synthetic construct
  source 1..75: mol_type = other DNA
tggggttgtggttatttttaaagattttataaataactggtggaaatataatcttactttaataacagttcctat

SEQ ID NO: 131238 - DNA, 75 bp, synthetic construct
  source 1..75: mol_type = other DNA
cggtcatggtcacgatcatggccatgaacacggcggtgaaggctgctgtggcggtaagggtaacggcggttgcgg

SEQ ID NO: 131239 - DNA, 75 bp, synthetic construct
  source 1..75: mol_type = other DNA
gttcagcgtgttcctaaagacgtctttatgggcgttgacgaactgcaagtgggtatgcgcttcctggctgaaact

SEQ ID NO: 131240 - DNA, 75 bp, synthetic construct
  source 1..75: mol_type = other DNA
ctctggcctggaaacggcgctggaaggtcatgaagttggcgacaaatttgatgtagctgttggcgcgaacgacgc

SEQ ID NO: 131241 - DNA, 75 bp, synthetic construct
  source 1..75: mol_type = other DNA
agaagccgcataattttacggtgaaaaacttcgagcttaaaccatttacgctgacgagtggaagcccgatcagca

SEQ ID NO: 131242 - DNA, 75 bp, synthetic construct
  source 1..75: mol_type = other DNA
atgaaaattaaaatacttgctgcgggtatcgcattaacactgccgttctgggcttgcgctaaagatgtcactatc

SEQ ID NO: 131243 - DNA, 75 bp, synthetic construct
  source 1..75: mol_type = other DNA
atgttttttatcagaacagcagtaaatcattctgggataagccctataccatcattgaaaaagacggcgtgaaaa

SEQ ID NO: 131244 - DNA, 75 bp, synthetic construct
  source 1..75: mol_type = other DNA
ctcatttgctaaaacaagtatcactgacagagaaaagaatatatatcctgtgatttgtgattcacctgatcactt

SEQ ID NO: 131245 - DNA, 75 bp, synthetic construct
  source 1..75: mol_type = other DNA
cgtcgcgcgctggataaagatattcagacggcaagtcaggtgaaagggctggatattttgatcaccggacatgca

SEQ ID NO: 131246 - DNA, 75 bp, synthetic construct
  source 1..75: mol_type = other DNA
cgtttatcacgccgtggttgattacttcaaagcgggtaacaccatcacggatgaacagatcaacggtatgcgcgt

SEQ ID NO: 131247 - DNA, 75 bp, synthetic construct
  source 1..75: mol_type = other DNA
gatctggttgaaggcgtgcgtcgcggtatcgatatgtttgactgcgtaatgccaacacgtaatgcgcgtaacggt

SEQ ID NO: 131248 - DNA, 75 bp, synthetic construct
  source 1..75: mol_type = other DNA
attattcacgtgcctacttgcatcatcttgatcgttgcaacgaaatattaggcgcgcgactcaacaccattcata

SEQ ID NO: 131249 - DNA, 75 bp, synthetic construct
  source 1..75: mol_type = other DNA
agcagatatgcaccgtattctggagcatgtatgcccgcaaattccggcagacaaaccgcgttacctgatgggcgt

SEQ ID NO: 131250 - DNA, 75 bp, synthetic construct
  source 1..75: mol_type = other DNA
gagtttggcgtgacagcggctatcgatctgttaccgccccacagtattccccgcacgtcttccggcaaacccgcc

SEQ ID NO: 131251 - DNA, 75 bp, synthetic construct
  source 1..75: mol_type = other DNA
taccgcccaggaaaaaatcattttgcagatccagtgtcggattagtgacgaagcacgtcgcaggcagcttatcca

SEQ ID NO: 131252 - DNA, 75 bp, synthetic construct
  source 1..75: mol_type = other DNA
ttcagtggattacttgcgcactcaggatttcgccatgcgcccgctgcaatggcttaaattgatcagcaaaaatcg

SEQ ID NO: 131253 - DNA, 75 bp, synthetic construct
  source 1..75: mol_type = other DNA
acgctagcggtgaactggccgattgtgttagctattttactggtgacgttactttccagcgccatcgtgggttgg

SEQ ID NO: 131254 - DNA, 75 bp, synthetic construct
  source 1..75: mol_type = other DNA
cgctccgcttttctcgccgcgcaggccattcttggctgcatgattgcgcaaaacttgaccggttcgatcctgacc

SEQ ID NO: 131255 - DNA, 75 bp, synthetic construct
  source 1..75: mol_type = other DNA
gcgggggccgctgttctggtcacccgcatgatgctgggtgataacgctgaagcggttaaccagcaaatcgtctgg

SEQ ID NO: 131256 - DNA, 75 bp, synthetic construct
  source 1..75: mol_type = other DNA
atagacgagttgcacgaccacattgaagagctggaaatccagctatcccgcatccgtcgccagaaacagaacagt

SEQ ID NO: 131257 - DNA, 75 bp, synthetic construct
  source 1..75: mol_type = other DNA
ttacactgttccgtgtcatccttatcccattctttgtattggtcttttatttgcctgtcacctggtcgccgtttg

SEQ ID NO: 131258 - DNA, 75 bp, synthetic construct
  source 1..75: mol_type = other DNA
agcattatcacagctggtgggtgaccttaccggcggcaacgatgatcgcccgtgaaattattatttctgcgctac

SEQ ID NO: 131259 - DNA, 75 bp, synthetic construct
  source 1..75: mol_type = other DNA
ggcagtgaactcaaatactacacgtttagcccgttgttaataaagcaaaaccatcccattctcctgcagcaccct

SEQ ID NO: 131260 - DNA, 75 bp, synthetic construct
  source 1..75: mol_type = other DNA
cgccatattcaaagaagagctcgtacgaaagtacgagttttttttcgcattttatttgcctgtacggcagtgaac

SEQ ID NO: 131261 - DNA, 75 bp, synthetic construct
  source 1..75: mol_type = other DNA
atttgcatgcgaccctggctgctgcgggatgcacttttgacgatatcattgatgttacgagctttcataccgatc

SEQ ID NO: 131262 - DNA, 75 bp, synthetic construct
  source 1..75: mol_type = other DNA
caacaagtcagactggcatttgataatttgcatgcgaccctggctgctgcgggatgcacttttgacgatatcatt

SEQ ID NO: 131263 - DNA, 75 bp, synthetic construct
  source 1..75: mol_type = other DNA
tcccttatacgaatcagatgcttagtgaatttggtgagcggctgaaacttgctcgtttacgacgcaggcttaccg

SEQ ID NO: 131264 - DNA, 75 bp, synthetic construct
  source 1..75: mol_type = other DNA
tgcagcagctgaaagtgagagcgcggcagccggttctgcgacttcagcagccggatcagcaactgctgcggctaa

SEQ ID NO: 131265 - DNA, 75 bp, synthetic construct
  source 1..75: mol_type = other DNA
aatgggagcagataaaagggcgatcaaaaaaggcgatcagataatgtttactacgccgcaatttgaaaaaggatc

SEQ ID NO: 131266 - DNA, 75 bp, synthetic construct
  source 1..75: mol_type = other DNA
gtcatatttgcatctccggccccagcctgatgagtggttactttggcgacctggcttcgcaagacgagattgccg

SEQ ID NO: 131267 - DNA, 75 bp, synthetic construct
  source 1..75: mol_type = other DNA
gtctgctcattgaaggtcagagaacgaatactttttcttatacgaatacaccagtatcgtggaactatgacactg

SEQ ID NO: 131268 - DNA, 75 bp, synthetic construct
  source 1..75: mol_type = other DNA
cggcagcgaagaccagcgaaacaaatgctaaagccagcgaaactgcggcgaaaagcagtcaggatgcatcagccc

SEQ ID NO: 131269 - DNA, 75 bp, synthetic construct
  source 1..75: mol_type = other DNA
atcaatatcaggtaacaggcatttatttggacacgtgcgcaatttacgtatctggcataaggaactgacagatgc

SEQ ID NO: 131270 - DNA, 75 bp, synthetic construct
  source 1..75: mol_type = other DNA
caaattcaacctgttcaacagtagccgtatcgatgccatcaacatcaccgaagtgcgcgacaaagcggagggcga

SEQ ID NO: 131271 - DNA, 75 bp, synthetic construct
  source 1..75: mol_type = other DNA
agcctgcgtattccggtgcaatatctcgccaatatgttgagtgccggcgataccggtccggtactgcgggcgctg

SEQ ID NO: 131272 - DNA, 75 bp, synthetic construct
  source 1..75: mol_type = other DNA
tccctcggtgatcgaagaagccctgaaacaaggtattccacaaaacgtgattgacgctgcccagcgttcgcctgt

SEQ ID NO: 131273 - DNA, 75 bp, synthetic construct
  source 1..75: mol_type = other DNA
gaacccaaaaagattatcgacaacatcagagggcgttgctggcggtattcggtaaagtgcttgctgataatgtaa

SEQ ID NO: 131274 - DNA, 75 bp, synthetic construct
  source 1..75: mol_type = other DNA
ggtattccgtggctggtgggcactgacgcgctggagaaataccagagcaccttccttcgccgctgtgggaaagtg

SEQ ID NO: 131275 - DNA, 75 bp, synthetic construct
  source 1..75: mol_type = other DNA
tcagtgatcgaggaagccctgaaacaaggtattccacaaaacgtgattgaagctgcccagcgttcgcctgtctac

SEQ ID NO: 131276 - DNA, 75 bp, synthetic construct
  source 1..75: mol_type = other DNA
cttgggggtagcgccacggcaatcttcccggctggcggcgcaaccggcgaacatctggtttcactgctggctgat

SEQ ID NO: 131277 - DNA, 75 bp, synthetic construct
  source 1..75: mol_type = other DNA
tgaccttgttgataccacgtgcactcataagaacctcctgactgaaagatgtgagataaaccggataccggcgac

SEQ ID NO: 131278 - DNA, 75 bp, synthetic construct
  source 1..75: mol_type = other DNA
gcgcgacaggggcggcgcgaccggaacggtcgctgcaggcctggtttttcagacatcggaccgtagcggcagccc

SEQ ID NO: 131279 - DNA, 75 bp, synthetic construct
  source 1..75: mol_type = other DNA
tggttattagtggaagtttaccccccggcgtgaaactggaaaaattaacccagttgctctccgctgcacaaaaac

SEQ ID NO: 131280 - DNA, 75 bp, synthetic construct
  source 1..75: mol_type = other DNA
gccaccaccggtgaaaagccagagtaccgtcggtgcaggtgacagcatggtcggcgcgatgacgctgaagctggc

SEQ ID NO: 131281 - DNA, 75 bp, synthetic construct
  source 1..75: mol_type = other DNA
cagcctgatgatgtacgcaaagccgcgcaggaaatcgttaatagcggcaaggccaaacgggttgtcgtttccctt

SEQ ID NO: 131282 - DNA, 75 bp, synthetic construct
  source 1..75: mol_type = other DNA
gcctaatagattacccacgaataaggaaagtattttttatctgaacatcctggatattccgcctaacagcccaga

SEQ ID NO: 131283 - DNA, 75 bp, synthetic construct
  source 1..75: mol_type = other DNA
gtaaaagcgaataatgtcaaagtcaattatgaaaccatcatgattgcgccattagaaagccagagtgttaacgtc

SEQ ID NO: 131284 - DNA, 75 bp, synthetic construct
  source 1..75: mol_type = other DNA
atgaaaggattattatctttactcatttcttctatggtccttcctgcacatgccggaattgttatctacgggacg

SEQ ID NO: 131285 - DNA, 75 bp, synthetic construct
  source 1..75: mol_type = other DNA
accctggccgtcaactggccgatcgtgcttgcaattttactggtaacgctgctttccagcgccattgtgggttgg

SEQ ID NO: 131286 - DNA, 75 bp, synthetic construct
  source 1..75: mol_type = other DNA
ttaaggctgttgttgtcccattgatggctgcgctgaaacatcgagcaccgaatattaaaatctctgtgcggcctg

SEQ ID NO: 131287 - DNA, 75 bp, synthetic construct
  source 1..75: mol_type = other DNA
atggattggtgataaaaaatgactcagcaaattgggtaacgatttcggatgtcaaagctaataatgtcaaagtca

SEQ ID NO: 131288 - DNA, 75 bp, synthetic construct
  source 1..75: mol_type = other DNA
cgtgagcggatcctgacagtattacgtgatcgggaaaaaaaactgcagcatcgtgtaatggattcagtaggacgc

SEQ ID NO: 131289 - DNA, 75 bp, synthetic construct
  source 1..75: mol_type = other DNA
aagataatgtactgccaccgcgcgttagatcgaatggttacagttacgtatggaagcccaaaggaagcacaagga

SEQ ID NO: 131290 - DNA, 75 bp, synthetic construct
  source 1..75: mol_type = other DNA
tctggcaaaattatgaactggaaaaagcaaaactccacaacataatgaccgtagctaaattatggcacatgttta

SEQ ID NO: 131291 - DNA, 75 bp, synthetic construct
  source 1..75: mol_type = other DNA
cttagaaagtcagagtgttaatgtcaaaagtaataatgcaaataactggtatctgaccattatcgatgaccacgg

SEQ ID NO: 131292 - DNA, 75 bp, synthetic construct
  source 1..75: mol_type = other DNA
gcggggatacattcacaataaaagatgtaaaagtcatgcctgaatctataccggcaggttatgaagttctacaag

SEQ ID NO: 131293 - DNA, 75 bp, synthetic construct
  source 1..75: mol_type = other DNA
ggacgcagtgcgcaccacagaaacgcgttatcagtacagcgatgttaatgtggttgctattcatcatgcgttgat

SEQ ID NO: 131294 - DNA, 75 bp, synthetic construct
  source 1..75: mol_type = other DNA
aagcatgctgacattcgcatggattcgcagagcaatgtggactggaacctgcgtaccttactgttaatgcagcgg

SEQ ID NO: 131295 - DNA, 75 bp, synthetic construct
  source 1..75: mol_type = other DNA
ctttcgactatggtcgtaacctgggcgcgttgtatgacgtggaagcctggaccgatatgttcccggaatttggtg

SEQ ID NO: 131296 - DNA, 75 bp, synthetic construct
  source 1..75: mol_type = other DNA
aaccgcgacgttaaaaagcaaaacggcgatggcttcggcacgtcattgacatatgactttggcggcagcgatttc

SEQ ID NO: 131297 - DNA, 75 bp, synthetic construct
  source 1..75: mol_type = other DNA
tggtgatgggtattgtggcatctgcatccgtacaggccgcagaaatatataacaaagacggtaataaactggatg

SEQ ID NO: 131298 - DNA, 75 bp, synthetic construct
  source 1..75: mol_type = other DNA
ttgtcattatgcttgaccctggccacggtggcgaagactccggtgcggtggggaaatacaaaacgcgcgaaaaag

SEQ ID NO: 131299 - DNA, 75 bp, synthetic construct
  source 1..75: mol_type = other DNA
gccatgtggctattgagcgtaagtcaggtcagtctggctgcggtcagccaggtcgtggcggtgcgcgtctggcct

SEQ ID NO: 131300 - DNA, 75 bp, synthetic construct
  source 1..75: mol_type = other DNA
gctcggtaaaatcaacaagctgcataaaaatcaggttgaacaggccgggtttgccgtgctgaaagcgcctgatat

SEQ ID NO: 131301 - DNA, 75 bp, synthetic construct
  source 1..75: mol_type = other DNA
gcattgcctggaaaacccggggaaaattccgctcgatttaattgaagtgcgctccggctcttatctcgaagagga

SEQ ID NO: 131302 - DNA, 75 bp, synthetic construct
  source 1..75: mol_type = other DNA
attgttggtaaaccggtagagactatcccccaggtgctgatcgatggccagccgattggcggatacacagaactg

SEQ ID NO: 131303 - DNA, 75 bp, synthetic construct
  source 1..75: mol_type = other DNA
ataactgctcatactgcaaacgtgcggtcgagctggcgaagcaactaaagggacatggctacggtgattatgagt

SEQ ID NO: 131304 - DNA, 75 bp, synthetic construct
  source 1..75: mol_type = other DNA
cgtagttactcacaccacggcgctggtgatggttactcctgctctttggccttgcggcgctggcggcgtttgatc

SEQ ID NO: 131305 - DNA, 75 bp, synthetic construct
  source 1..75: mol_type = other DNA
tcatgaaacgcctcagaaaaatgatgcccaagaccgttgagcctgcattcaattcacctgaggagttgttgcaat

SEQ ID NO: 131306 - DNA, 75 bp, synthetic construct
  source 1..75: mol_type = other DNA
cggtcaccatgcgggcaatccaaaaagccatcgcgctgattgaactcaagtttaccccacaaggcgaatcccatt

SEQ ID NO: 131307 - DNA, 75 bp, synthetic construct
  source 1..75: mol_type = other DNA
aacataccgatattatgaaaaccgaaggcctgaaacaggcgctgaacaaatacggttttgatgccgccttcggtg

SEQ ID NO: 131308 - DNA, 75 bp, synthetic construct
  source 1..75: mol_type = other DNA
gcccagtcagccagaaaacgtaagcctgacgtcgggggcgcaaaagctccggcccctgtaggggcaacggctgcg

SEQ ID NO: 131309 - DNA, 75 bp, synthetic construct
  source 1..75: mol_type = other DNA
tgaagatatgcagatgagtgcagcacgaaatgtggctgtcaacgccggaggtgatatcagtaccggaacaatggg

SEQ ID NO: 131310 - DNA, 75 bp, synthetic construct
  source 1..75: mol_type = other DNA
ttgaaagagaataaagaccgtatcgcaataattgacgctattcagggggcgagcacaaacgaacttaacgctctt

SEQ ID NO: 131311 - DNA, 75 bp, synthetic construct
  source 1..75: mol_type = other DNA
atgaacaggacaacaacaggactctgtctggctgcgctgctggtgagctgcagcatgaacagtgtgctgcgggca

SEQ ID NO: 131312 - DNA, 75 bp, synthetic construct
  source 1..75: mol_type = other DNA
cgagctcgccgctgatatcgccatgatggcgaacttcttcagctccggtcaggtgtgtaccaacggcacccgcgt

SEQ ID NO: 131313 - DNA, 75 bp, synthetic construct
  source 1..75: mol_type = other DNA
acgggcagacccgttactttctggaaattaatggcagtgcagtaaagcctgatgttttacgttttcgtggcaggg

SEQ ID NO: 131314 - DNA, 75 bp, synthetic construct
  source 1..75: mol_type = other DNA
gtaaactgaaaacggcgactttccagcaggaagttgcggagtctattcttgcagggattaaagcgtattttgccg

SEQ ID NO: 131315 - DNA, 75 bp, synthetic construct
  source 1..75: mol_type = other DNA
aaaatatctggcacaaacccagaacgcctcggacttgattggtggcgtgagcaaaagcggtgaccgctatgtcga

SEQ ID NO: 131316 - DNA, 75 bp, synthetic construct
  source 1..75: mol_type = other DNA
tcttcgcatatctactcggctatttatcggttgctggacaaacacggcaatattctggccaataccccctatcgc

SEQ ID NO: 131317 - DNA, 75 bp, synthetic construct
  source 1..75: mol_type = other DNA
tccgtccggcggaaatcccgcgcccgcttatcccgggcacgcttccggcacgtattgagagtcgcgagaagaacg

SEQ ID NO: 131318 - DNA, 75 bp, synthetic construct
  source 1..75: mol_type = other DNA
ggcaaaaccctgtgccggtgaaacgctgggctggcatacgccgctcattgatggcaccgaagtggcgattgcata

SEQ ID NO: 131319 - DNA, 75 bp, synthetic construct
  source 1..75: mol_type = other DNA
ttcgatttcagtctgccgggccactttccgctggactggcagcgcgtgtacagcagtcgtgacgaccgcacggaa

SEQ ID NO: 131320 - DNA, 75 bp, synthetic construct
  source 1..75: mol_type = other DNA
aataaaggtcatcaagttggacaatatctcgatgataattctgctgctgattttattgcttctgttgccaaaaaa

SEQ ID NO: 131321 - DNA, 75 bp, synthetic construct
  source 1..75: mol_type = other DNA
cgctgggattaacaggggagtgggttaatcccaaagatattaatttttctcaaagaacaatatcacctcatgatt

SEQ ID NO: 131322 - DNA, 75 bp, synthetic construct
  source 1..75: mol_type = other DNA
ctaaaatatgctgatccacttggattaactccatgtgctgttagtaaccaaaaagcgaatcgtttattagatagt

SEQ ID NO: 131323 - DNA, 75 bp, synthetic construct
  source 1..75: mol_type = other DNA
aaattcatgggtatggaaataaaaatacctcaccgtataaagcaggtaataacgcacattcgcataaatcagttg

SEQ ID NO: 131324 - DNA, 75 bp, synthetic construct
  source 1..75: mol_type = other DNA
gcagcgtccgtgcatccgtctgcattatgaactggcggcgcatccccggcgggtgacacagatttatcagcattt

SEQ ID NO: 131325 - DNA, 75 bp, synthetic construct
  source 1..75: mol_type = other DNA
aggattacaacaaaggcgacctcgaaaagcaggtgccgcctgcgcagagtggcccacagccaggcaaggccgggc

SEQ ID NO: 131326 - DNA, 75 bp, synthetic construct
  source 1..75: mol_type = other DNA
aggattacaacaaaggcgacctcgaaaagcaggtgccgccagcacaaagtggtccacaaccgggtaaagctgggc

SEQ ID NO: 131327 - DNA, 75 bp, synthetic construct
  source 1..75: mol_type = other DNA
catgcaggcacatgatatcagcgcaacaacgatggctgcattactggccccctggaatatccgccctgccgtctt

SEQ ID NO: 131328 - DNA, 75 bp, synthetic construct
  source 1..75: mol_type = other DNA
ctcagggcggcaaatggcgctatgtgtatgaccggcaggggcatatcacggagacgcacgacccgctggggcggg

SEQ ID NO: 131329 - DNA, 75 bp, synthetic construct
  source 1..75: mol_type = other DNA
ctgatgtcccgggcgctgtccggccagctcagtacggaggaagggcgtgctgagctggtggatggcgtgacacat

SEQ ID NO: 131330 - DNA, 75 bp, synthetic construct
  source 1..75: mol_type = other DNA
aacgcacgcggctgatacggatgacagacgcgcagagccacagcacgcgctacgggtatgacgacagcggccacc

SEQ ID NO: 131331 - DNA, 75 bp, synthetic construct
  source 1..75: mol_type = other DNA
gtttatatttgtgtttatggcggggctgatacggatgttgctgagtcaatattcaatacttataaccccggggcc

SEQ ID NO: 131332 - DNA, 75 bp, synthetic construct
  source 1..75: mol_type = other DNA
tttgcgacgcgtcacgttgagacctggccttgccgggaaccttattacagggcaaatactacctgttagcttatt

SEQ ID NO: 131333 - DNA, 75 bp, synthetic construct
  source 1..75: mol_type = other DNA
tccggactgggtgaatggctgcgaaaattatccgatagcattgtcctgtgaatggccagatactgctgaaaactt

SEQ ID NO: 131334 - DNA, 75 bp, synthetic construct
  source 1..75: mol_type = other DNA
gttggtaaaccggtagagactatcccccaggtgctgatcgatggccagccgattggcggatacacagagatggca

SEQ ID NO: 131335 - DNA, 75 bp, synthetic construct
  source 1..75: mol_type = other DNA
accattttcaacctcaaactgccgatgaaaaacgctacgaagaagtgtcacacaatctggcgtatattcaggcac

SEQ ID NO: 131336 - DNA, 75 bp, synthetic construct
  source 1..75: mol_type = other DNA
aatggatatatttaccggtctatcgacatcgcaacaataccagcatcaggaagcattgatgttcagtttgtaaat

SEQ ID NO: 131337 - DNA, 75 bp, synthetic construct
  source 1..75: mol_type = other DNA
ggtaagcaggcgaatttccacgaacgaagaaatgtaaatgacaactggtgggatactcagcgggtatcaaacgta

SEQ ID NO: 131338 - DNA, 75 bp, synthetic construct
  source 1..75: mol_type = other DNA
actaactttagggtagcaagcgaaaaagatgctgtagatcttattagtcaaggccgtggacggatgcaaagacaa

SEQ ID NO: 131339 - DNA, 75 bp, synthetic construct
  source 1..75: mol_type = other DNA
cctaatccgctgaaatatattgatccactcggattaaaaaaagagctctgtaatggaactactcgtgtgcggcat

SEQ ID NO: 131340 - DNA, 75 bp, synthetic construct
  source 1..75: mol_type = other DNA
aaaaagaagccgttggtcgtcgtctggactttatgatgcaggaattcaaccgcgagtcgaacactcttgcgtcga

SEQ ID NO: 131341 - DNA, 75 bp, synthetic construct
  source 1..75: mol_type = other DNA
aacgcagcgccatctgtactacggcagcggtcatctccagcagataaatctggaccgggaggttatcagtgagtt

SEQ ID NO: 131342 - DNA, 75 bp, synthetic construct
  source 1..75: mol_type = other DNA
agagacagcagaaagccgtacagaatacatctatgatgcggcagaccagctactggaaatccgccgccagcggtc

SEQ ID NO: 131343 - DNA, 75 bp, synthetic construct
  source 1..75: mol_type = other DNA
gttcaggtgtttcagttcccggaaggcgtgacatggggtgaaggtcaggtggcgtatgttgctatcggtattgcc

SEQ ID NO: 131344 - DNA, 75 bp, synthetic construct
  source 1..75: mol_type = other DNA
agcgtacgtggcgatcggtattgctgccagctcggatgaacatctgggcctgctacgccagctgacccacgtact

SEQ ID NO: 131345 - DNA, 75 bp, synthetic construct
  source 1..75: mol_type = other DNA
ctggtatacccgtctgacctgggttcagcacctggccggtcttctgccggtaaccgggcgggaaaccggcacggg

SEQ ID NO: 131346 - DNA, 75 bp, synthetic construct
  source 1..75: mol_type = other DNA
tggaactggaactgcttagcggcgacacgcgcgcggtgctgaaactggcgaaccaactggtatcgcaaaccggat

SEQ ID NO: 131347 - DNA, 75 bp, synthetic construct
  source 1..75: mol_type = other DNA
ttggttaatggatgatgatctcattccgaacaacgattgtttagaaataatgctaacagcgaacatcaagggtat

SEQ ID NO: 131348 - DNA, 75 bp, synthetic construct
  source 1..75: mol_type = other DNA
ggcaaatcggcaaacggacgtagtctgatgaaagttgtggcacttggcgttaagaaaggtcatcgcctacgcttt

SEQ ID NO: 131349 - DNA, 75 bp, synthetic construct
  source 1..75: mol_type = other DNA
gatgtttgcccgcgaaggttacgaagcgcaactggcgatcgcctatatctcgctgattaaccatatcaacaacct

SEQ ID NO: 131350 - DNA, 75 bp, synthetic construct
  source 1..75: mol_type = other DNA
cgcaatgcccgccaggctgtttggcctgtggccgcaaaaagggatattagcgcccggttccgatggtgacgtggt

SEQ ID NO: 131351 - DNA, 75 bp, synthetic construct
  source 1..75: mol_type = other DNA
ttgagtcgacctctggaatgcgaagcggaagccatcgcccgcatgattaacctggcacaaattgccggtaacgcc

SEQ ID NO: 131352 - DNA, 75 bp, synthetic construct
  source 1..75: mol_type = other DNA
aatagtgacttcccggcagaacggcgagcagatccacgcctggctgctgcgctggtttaaccctgagccggactg

SEQ ID NO: 131353 - DNA, 75 bp, synthetic construct
  source 1..75: mol_type = other DNA
caccggcggggatgtgcgggaagaagcggagctgaagcgggctgaccgggcgatgatccgccgggcgctgatggc

SEQ ID NO: 131354 - DNA, 75 bp, synthetic construct
  source 1..75: mol_type = other DNA
gccggtggcgatgctcaatcagatgtgtgaccggctggtcagcagtctgggcagtgccggggtgcagtgtatccg

SEQ ID NO: 131355 - DNA, 75 bp, synthetic construct
  source 1..75: mol_type = other DNA
aagtgagcgggtcattttcaaatggtgggcaaatagggaatggcgatgtttctcctgcgatgattaaagacaata

SEQ ID NO: 131356 - DNA, 75 bp, synthetic construct
  source 1..75: mol_type = other DNA
aaaccgttcatggtttctcctgaacttatcacggacaaacgacaagttaatttcaatattacgccagatatggat

SEQ ID NO: 131357 - DNA, 75 bp, synthetic construct
  source 1..75: mol_type = other DNA
ttttcttgtttttctgccactgagcttgaaataaaaaagcttgctttacctgaggctatttctttgatttattca

SEQ ID NO: 131358 - DNA, 75 bp, synthetic construct
  source 1..75: mol_type = other DNA
tacggttttgatgccgccttcggtggtgcgcgccgcgacgaagagaaatcccgtgctaaagagcgtatctactct

SEQ ID NO: 131359 - DNA, 75 bp, synthetic construct
  source 1..75: mol_type = other DNA
aatatcgtaatgacactggcggcggctactgcgctgtggttctgcttcgccggtaacctgcaaaatgccgcgatc

SEQ ID NO: 131360 - DNA, 75 bp, synthetic construct
  source 1..75: mol_type = other DNA
acgggcgtgacgctgatggtggttgtgttgtttgctttcctttactcatggccgattcaggcgctgctgccgacg

SEQ ID NO: 131361 - DNA, 75 bp, synthetic construct
  source 1..75: mol_type = other DNA
ctgttgctctttggttctgttttgccgggaacctacaaaatgctctgataattgctggtctgggcgttttgtgtg

SEQ ID NO: 131362 - DNA, 75 bp, synthetic construct
  source 1..75: mol_type = other DNA
cgggaacctgcaaaatgctctgataattgccggtctgggtgttttgtgtgctgccatctttatttcttttatggt

SEQ ID NO: 131363 - DNA, 75 bp, synthetic construct
  source 1..75: mol_type = other DNA
tcttaccgagattcagggagactttggcctgacaacggtcgaggcagccagtcttatatccgctgcatttatttc

SEQ ID NO: 131364 - DNA, 75 bp, synthetic construct
  source 1..75: mol_type = other DNA
gcttcattactttcaaagaaaaacgaccagaagataattttcgggtaaccacgccgatagatggaaagtttaatg

SEQ ID NO: 131365 - DNA, 75 bp, synthetic construct
  source 1..75: mol_type = other DNA
acgtcggtgagtctgaatgacggtgatatcattgtgctgggcggactggcggagaacaagacatcaaaggcgcgg

SEQ ID NO: 131366 - DNA, 75 bp, synthetic construct
  source 1..75: mol_type = other DNA
tcttaccgagatacagggggattttggcctgacaacggtcgaggcggccagtcttatatccgctgcatttatttc

SEQ ID NO: 131367 - DNA, 75 bp, synthetic construct
  source 1..75: mol_type = other DNA
tcatcctgcttacgccggatgaacgcctgtcgaagcaacatttagatgagctggagaattctggatttacccaat

SEQ ID NO: 131368 - DNA, 75 bp, synthetic construct
  source 1..75: mol_type = other DNA
gccaaagcttgttcttccatgagctgagtaactatttattcgaggtcgatctaatcgatctcgatgaactgcgtc

SEQ ID NO: 131369 - DNA, 75 bp, synthetic construct
  source 1..75: mol_type = other DNA
ccatcagcgagaagcgtgccacatcgacaccggcgggtgtgcagatttacgacaacggctacaaggtggttgaag

SEQ ID NO: 131370 - DNA, 75 bp, synthetic construct
  source 1..75: mol_type = other DNA
ataaaacaaatcgaaacaaaaacaagtctaaaaaggatagaagagctgataaaagacctgaagccaaaaaggaca

SEQ ID NO: 131371 - DNA, 75 bp, synthetic construct
  source 1..75: mol_type = other DNA
gcgagctattagcccattaacaagaaatgttggagactggctgaatggggggattcaacaaaccgctaatagcat

SEQ ID NO: 131372 - DNA, 75 bp, synthetic construct
  source 1..75: mol_type = other DNA
ttatgttgacttagtaaacgtacctgattcaaaagagaatctggaagccagaaatgtgctttttattgaggatac

SEQ ID NO: 131373 - DNA, 75 bp, synthetic construct
  source 1..75: mol_type = other DNA
gccaaagctgcaactgaagcaactactgagaaagtagctatcgcaacaggggagaacctcgcaaaaaaagaggca

SEQ ID NO: 131374 - DNA, 75 bp, synthetic construct
  source 1..75: mol_type = other DNA
cacagttatcgtttatgggattaccgtgtccgaacctgttcaccggtggttacaactaccatggtaaacatgagt

SEQ ID NO: 131375 - DNA, 75 bp, synthetic construct
  source 1..75: mol_type = other DNA
atgaagttttatcaccggttatgttcccggtgctgcatcagctactgggtcagacgctgattaccaccgatggta

SEQ ID NO: 131376 - DNA, 75 bp, synthetic construct
  source 1..75: mol_type = other DNA
aggcagctcaacaggaaaatgcccaagcgatcagccacgcgaaagctagtggcaattcttccgccgcagccggat

SEQ ID NO: 131377 - DNA, 75 bp, synthetic construct
  source 1..75: mol_type = other DNA
ttacaacggtacaagtgctgccgctgggtatcagaagctgcaaacagtatccagcatcatttcaaaatgggcacc

SEQ ID NO: 131378 - DNA, 75 bp, synthetic construct
  source 1..75: mol_type = other DNA
ttcttcggcaagtgagagtgaaaaaatctctgtaaactcaagggggattccagtttatgacaatggatacaaggt

SEQ ID NO: 131379 - DNA, 75 bp, synthetic construct
  source 1..75: mol_type = other DNA
aaaagtagctcaagcctctcctgttagtggtggtttagctgattcaataaatgatgagggatgcggttgtgcaaa

SEQ ID NO: 131380 - DNA, 75 bp, synthetic construct
  source 1..75: mol_type = other DNA
ggggttccacgaggtaatgagcttcaccattgggctattcagagaaatggcaagtttggcaaatatgttcctgac

SEQ ID NO: 131381 - DNA, 75 bp, synthetic construct
  source 1..75: mol_type = other DNA
aaaagtgagtttcctcaaagttggtctgatgaaaaaattatgcacgtcatttccgatatagctaccgatccaaat

SEQ ID NO: 131382 - DNA, 75 bp, synthetic construct
  source 1..75: mol_type = other DNA
ccgacattacctatgacgaagccggtaacgtggcaacgcgcaaaacggccaaggggcaaaccacaagctacagct

SEQ ID NO: 131383 - DNA, 75 bp, synthetic construct
  source 1..75: mol_type = other DNA
ggcaacaggacctcgatcacgaccgatggcctgagccaaagctacaccatcaactacatgaacaactggttggtg

SEQ ID NO: 131384 - DNA, 75 bp, synthetic construct
  source 1..75: mol_type = other DNA
ccacatggggatatgatactcaggggagagcggttctaagcgaacacgccgggggcgcagagaaaactcaggtaa

SEQ ID NO: 131385 - DNA, 75 bp, synthetic construct
  source 1..75: mol_type = other DNA
tcatcagttaagtttgtttccgacctgtcgtttcttccctgtcaggagtcacttttcgtgttattttttaaggat

SEQ ID NO: 131386 - DNA, 75 bp, synthetic construct
  source 1..75: mol_type = other DNA
aaaagatatccggcttaaccggtaaatcttttggatttaaaaaagcttctcaagtggctgatatcgcaacagcca

SEQ ID NO: 131387 - DNA, 75 bp, synthetic construct
  source 1..75: mol_type = other DNA
gcaaggtgaaatatgctgatggtacatctccagcacaacctgtattgaatgcagttccaacagcaacacctaagc

SEQ ID NO: 131388 - DNA, 75 bp, synthetic construct
  source 1..75: mol_type = other DNA
gacgcgcattccttcatgaagaattatcgctctggtgaggagcaagggaagggaacgccagttggggatgcgctt

SEQ ID NO: 131389 - DNA, 75 bp, synthetic construct
  source 1..75: mol_type = other DNA
cgcaatgcccgccaggctgtttggcctgtggccgcaaaaaggattattgatcttacccagcaatagtggacacgc

SEQ ID NO: 131390 - DNA, 75 bp, synthetic construct
  source 1..75: mol_type = other DNA
gttttccctggcggcgtggatgtccatacgcatttcaatattgatgtcggcatcgcgcgcagttgtgatgatttt

SEQ ID NO: 131391 - DNA, 75 bp, synthetic construct
  source 1..75: mol_type = other DNA
ctgtggcaatgctgcatggctgtcattcgccccctgcttactcattctggtgttagcggggaacaaatagtcggt

SEQ ID NO: 131392 - DNA, 75 bp, synthetic construct
  source 1..75: mol_type = other DNA
gtgcccgaacctgttcactggcggttacaactatcatggtaagcatgagtttgtgactctggaaggtatggaaaa

SEQ ID NO: 131393 - DNA, 75 bp, synthetic construct
  source 1..75: mol_type = other DNA
aaagcgatattgcgtcgcttgataccagagttcagtcgctggagtcgcaggtttcagaccatgaatcgcgcatcg

SEQ ID NO: 131394 - DNA, 75 bp, synthetic construct
  source 1..75: mol_type = other DNA
ttcgcgaactgcttacccattccggcgttagcggggaacaaattgtcggtatcggcatctccgcgcagggaaaag

SEQ ID NO: 131395 - DNA, 75 bp, synthetic construct
  source 1..75: mol_type = other DNA
cggcacttgccgcccgcgtcggcaccggagtttatcgcgatttcagcgaagcccaacgtgatttacagcacccgg

SEQ ID NO: 131396 - DNA, 75 bp, synthetic construct
  source 1..75: mol_type = other DNA
gcgcaaattggctgcgtgatgatgacgcacgactacctgcgctggtgtttaaccggcgtcaaaggttgcgaagag

SEQ ID NO: 131397 - DNA, 75 bp, synthetic construct
  source 1..75: mol_type = other DNA
atggcggattcgaatctcaatgtgccggtaaccattcaggccacacggctcgatacatcagttcttccacgcaat

SEQ ID NO: 131398 - DNA, 75 bp, synthetic construct
  source 1..75: mol_type = other DNA
tggacagcagcaaccggaacggcacttctcggcgcattcaacgctaaccaggcatacacggtcagtaccacgtat

SEQ ID NO: 131399 - DNA, 75 bp, synthetic construct
  source 1..75: mol_type = other DNA
cgtgcagaagcatgggcaacaggtctgaaatacgatgccaataatatttatctggcaactttctattctgaaaca

SEQ ID NO: 131400 - DNA, 75 bp, synthetic construct
  source 1..75: mol_type = other DNA
cggtaatcattcaggctacacggctcgacacatcagtccttccacgcaatatattcagccagtcttacctgctgt

SEQ ID NO: 131401 - DNA, 75 bp, synthetic construct
  source 1..75: mol_type = other DNA
gcccagcggaaccgccaacaggtcaatgcaactaacattttcaggttctgttcctgacacactggtaagcagtcg

SEQ ID NO: 131402 - DNA, 75 bp, synthetic construct
  source 1..75: mol_type = other DNA
actcaggagtatcggtaaccatcccgacagcgccgaccaaccttgttagcctgctgaaaacgctcacgccgtcat

SEQ ID NO: 131403 - DNA, 75 bp, synthetic construct
  source 1..75: mol_type = other DNA
gaagcacatgaacgtccggagggctttgaggaagcatccgtcatgatggtgggactggagtgtgaacgcgtgctt

SEQ ID NO: 131404 - DNA, 75 bp, synthetic construct
  source 1..75: mol_type = other DNA
attaattcttggtgatacgaatagtgcattagctgctataactgccaaacgtaataaaattcctatttttcatat

SEQ ID NO: 131405 - DNA, 75 bp, synthetic construct
  source 1..75: mol_type = other DNA
tcgcgaacatgataccaccgtatcgtctgtggaagatttgtatatatcaagaccgtgggttgaatatatagctga

SEQ ID NO: 131406 - DNA, 75 bp, synthetic construct
  source 1..75: mol_type = other DNA
tactgaaaccgttaggtttccatgattacaaccatttgcagaaaaattcacgtgctgtgctgtctgacagcggta

SEQ ID NO: 131407 - DNA, 75 bp, synthetic construct
  source 1..75: mol_type = other DNA
caagcttgcgactattctcaatactattgctgaaaaatatgatttgccggttattgtatccactcatccgcggac

SEQ ID NO: 131408 - DNA, 75 bp, synthetic construct
  source 1..75: mol_type = other DNA
acggcaggttagtgattacagtatgccaaatgtgtcggataaggtcgtcagaatcgttcactcttatacagatta

SEQ ID NO: 131409 - DNA, 75 bp, synthetic construct
  source 1..75: mol_type = other DNA
ttcgcgccctgcttacccattctggcgtcagcggggaacaaattgtcggtatcggcatctccgcgcagggaaagg

SEQ ID NO: 131410 - DNA, 75 bp, synthetic construct
  source 1..75: mol_type = other DNA
caactttacgggactctcgcccgtcatcaacctgctcgatgtcccgttcctgttccgcgataccgctcacgcgca

SEQ ID NO: 131411 - DNA, 75 bp, synthetic construct
  source 1..75: mol_type = other DNA
agccctacctcttccggcaatctcgaatggtttaccgcacagtggggagaaatctcatttgctgagattaatcag

SEQ ID NO: 131412 - DNA, 75 bp, synthetic construct
  source 1..75: mol_type = other DNA
cggagtggtctgatatggagtttttgggctgtcattatcatggccgttatgctgggaggagtggaccccggtgac

SEQ ID NO: 131413 - DNA, 75 bp, synthetic construct
  source 1..75: mol_type = other DNA
gaattaagagtgctgatcaccgtttttgcttttcttgcttcggcctggtacagcattgtgcagtacagaaaagaa

SEQ ID NO: 131414 - DNA, 75 bp, synthetic construct
  source 1..75: mol_type = other DNA
aaccggcgtcaaaggttgcgaagagagcaatatttctgagtccaatctctacaacatgagtcgcggggaatatga

SEQ ID NO: 131415 - DNA, 75 bp, synthetic construct
  source 1..75: mol_type = other DNA
gggatattgagcaactgctggatgcaatggccgactttttatacgttggtgttggtacgatggtcgccatcaaag

SEQ ID NO: 131416 - DNA, 75 bp, synthetic construct
  source 1..75: mol_type = other DNA
cttaagttccgttggaggttatccgggaaatgatgataaaggtcgtgagctgcaacagcaggttgatccaacaaa

SEQ ID NO: 131417 - DNA, 75 bp, synthetic construct
  source 1..75: mol_type = other DNA
ccacatcgatgagaaatacgcgcaactattgtcagaagctcaacagaggggggtagaaattctggcttacaaagc

SEQ ID NO: 131418 - DNA, 75 bp, synthetic construct
  source 1..75: mol_type = other DNA
cagtgaaagaaaaactatcgcaacccttagctcgccacggtgaactggcttgtggttttgtacgtactgattcag

SEQ ID NO: 131419 - DNA, 75 bp, synthetic construct
  source 1..75: mol_type = other DNA
aaagaaaaattatcgcagccgctagctcgccacggtgaattggcttgcggttatgtacgtactgactcagggtga

SEQ ID NO: 131420 - DNA, 75 bp, synthetic construct
  source 1..75: mol_type = other DNA
acaggattatggggctggtcgcagcttaatcagccggacgcactaatccagcgaatacaactgtctgtcatgcca

SEQ ID NO: 131421 - DNA, 75 bp, synthetic construct
  source 1..75: mol_type = other DNA
cgtcggtgtgagtaaatgcctgcgtgatatccagacccacgcggaatacatcaacgacaaagcaggattcttctg

SEQ ID NO: 131422 - DNA, 75 bp, synthetic construct
  source 1..75: mol_type = other DNA
gagtttacagatgcaggcaaggaattacaaaaagccagggagttaacaaaatcattaataaaaactaataaagca

SEQ ID NO: 131423 - DNA, 75 bp, synthetic construct
  source 1..75: mol_type = other DNA
cgtttattatcctgcgacgctgacgaaccggctactgcttcgtcaatggagtgactggattgcccgactcctagc

SEQ ID NO: 131424 - DNA, 75 bp, synthetic construct
  source 1..75: mol_type = other DNA
tgtggccggataatcctcaggtcagggcgctgaacgcgcagtggcgcaaacagcgggagctgagcgccctgtctg

SEQ ID NO: 131425 - DNA, 75 bp, synthetic construct
  source 1..75: mol_type = other DNA
acactgctagagatttacttaagtactgtccaattagcgaagataaaattagagtgatttataatggtgtatccc

SEQ ID NO: 131426 - DNA, 75 bp, synthetic construct
  source 1..75: mol_type = other DNA
gacttaaagttgcaatatcgtaagccaagaattttagaaagatatagaaatgtaagtgatattaaaactagggtt

SEQ ID NO: 131427 - DNA, 75 bp, synthetic construct
  source 1..75: mol_type = other DNA
gaacgccagttcacatataaagggtagcccgttcgcctcggattttgatgcgtcaatagctctgctgcacaatat

SEQ ID NO: 131428 - DNA, 75 bp, synthetic construct
  source 1..75: mol_type = other DNA
gcaacggttttagcaaagtacgagagaaagccgatagcctgcacagctccgttgggctatggctttcaccgtggg

SEQ ID NO: 131429 - DNA, 75 bp, synthetic construct
  source 1..75: mol_type = other DNA
tggcgttagacgcttttctgctggacgatggctgggacgatcttaccggacgctggttatttggcccggcattca

SEQ ID NO: 131430 - DNA, 75 bp, synthetic construct
  source 1..75: mol_type = other DNA
tttgactttggtctgcgtccgtcgctgggttatgtcttatcgaaagggaaagatattgaaggaatcggtgatgaa

SEQ ID NO: 131431 - DNA, 75 bp, synthetic construct
  source 1..75: mol_type = other DNA
cctgcatcatgcggcggatgactcattcccaagcgaccacggtacggtgattttcacctttgcactggcattttt

SEQ ID NO: 131432 - DNA, 75 bp, synthetic construct
  source 1..75: mol_type = other DNA
acagcacaacggcaactggtgataaaaatcgctatcgcgctggcggtcagcctgtttgtgtcctggacgatggga

SEQ ID NO: 131433 - DNA, 75 bp, synthetic construct
  source 1..75: mol_type = other DNA
tgatgcttatgggacgggaataccggcacggggatacacaccttatccggcggtagatccggctcagtcaaacaa

SEQ ID NO: 131434 - DNA, 75 bp, synthetic construct
  source 1..75: mol_type = other DNA
ttttctggtgacgccaaaaatatcacgcaatggctgggggagttgggggaaaaattcacgaagtttgcggatgaa

SEQ ID NO: 131435 - DNA, 75 bp, synthetic construct
  source 1..75: mol_type = other DNA
tacgaaataattgcataggatatatacatggtcattcggctggaggaacaaacccttctttagtcgaggcaatgc

SEQ ID NO: 131436 - DNA, 75 bp, synthetic construct
  source 1..75: mol_type = other DNA
gacaaggtgttgttaataagaggaagcagaaatctattaaaagtcagtgccactaagaaccctgagcaagtaata

SEQ ID NO: 131437 - DNA, 75 bp, synthetic construct
  source 1..75: mol_type = other DNA
agatgtttgagcaagtgagaacggagctaaacttttcctggttttacacagagttaaaacgtcatcatattgcgc

SEQ ID NO: 131438 - DNA, 75 bp, synthetic construct
  source 1..75: mol_type = other DNA
attacatttattatctggctacggataacatcagaattattactcacgatgacacggttttgttattaagaggaa

SEQ ID NO: 131439 - DNA, 75 bp, synthetic construct
  source 1..75: mol_type = other DNA
gtgaattaattgagtcagccgctgaaaatgcctataatataataataggaccagaggtaaacgaacatgaagaag

SEQ ID NO: 131440 - DNA, 75 bp, synthetic construct
  source 1..75: mol_type = other DNA
gagttgtcaaagattaaatccgttgatgttgaaaagtttgaaatttctttagaagcgattcctacaccagcgcta

SEQ ID NO: 131441 - DNA, 75 bp, synthetic construct
  source 1..75: mol_type = other DNA
gggtagaaattctggcttataaggcggaactttctgctgaaggtatggctcttaaaaaatcactgcccgttactc

SEQ ID NO: 131442 - DNA, 75 bp, synthetic construct
  source 1..75: mol_type = other DNA
gcaaatctgatcgtactaatgaacaagctggtgacggctacggtggatttgcccctatatttccagacatctgtt

SEQ ID NO: 131443 - DNA, 75 bp, synthetic construct
  source 1..75: mol_type = other DNA
agttgccgatggaaacggttcaaatgctgaactgtggtcattggctgcaaagtatgacgcgaacaatgtctacgc

SEQ ID NO: 131444 - DNA, 75 bp, synthetic construct
  source 1..75: mol_type = other DNA
gagcgcagctgaagcattgaaaaaaacatgttcacccagtaaagggcaaagcttgaatatcgtagcgaaaaaaga

SEQ ID NO: 131445 - DNA, 75 bp, synthetic construct
  source 1..75: mol_type = other DNA
cgacacgctcaggccagaggaaaacctgacgacctacattgatcgccagatagcattgatgaaaaaaaaccttgg

SEQ ID NO: 131446 - DNA, 75 bp, synthetic construct
  source 1..75: mol_type = other DNA
ggtgttaaccctgaccagtcagcgcccttttgatgagcatactgaccagttatggactgcctggttgaccagttt

SEQ ID NO: 131447 - DNA, 75 bp, synthetic construct
  source 1..75: mol_type = other DNA
cgccacccaccgttctggaaaaacagaagtgtaccagcgtcaggccgggtttatcaccgggccagcaaaggtact

SEQ ID NO: 131448 - DNA, 75 bp, synthetic construct
  source 1..75: mol_type = other DNA
agctcaacagaggggggtagaaattctggcttacaaagcggaactttctgccgaaggcatggctcttaaaaaatc

SEQ ID NO: 131449 - DNA, 75 bp, synthetic construct
  source 1..75: mol_type = other DNA
gggtagaaattctggcttataaagcggaactttctgccaaaggtatggctcttaaaaaatcactgcccgttacac

SEQ ID NO: 131450 - DNA, 75 bp, synthetic construct
  source 1..75: mol_type = other DNA
ctgacgacctacattgatcgccagatagcattgatgaaaaaaaaccttggccagcatcgggtactttcgcgggga

SEQ ID NO: 131451 - DNA, 75 bp, synthetic construct
  source 1..75: mol_type = other DNA
gacgcaggacggcgttcgggtacgacgcttacgggcgtctggtcacgctgacaaacgagaacggagaaagctacc

SEQ ID NO: 131452 - DNA, 75 bp, synthetic construct
  source 1..75: mol_type = other DNA
gaaaagagatggtactgtccgttataggaaagattaccctattgattctaatactggtcgtgtatatggtcatga

SEQ ID NO: 131453 - DNA, 75 bp, synthetic construct
  source 1..75: mol_type = other DNA
tatgaccggcaggggcatatcacggagacgcacgacccgctggggcgggtggcacagacacagtggcacccggtg

SEQ ID NO: 131454 - DNA, 75 bp, synthetic construct
  source 1..75: mol_type = other DNA
gggagtcagggatgcccttggtatcatgagcgaacagctttctctttccgtctctgacctgacgcgtatcctggt

SEQ ID NO: 131455 - DNA, 75 bp, synthetic construct
  source 1..75: mol_type = other DNA
aatggccggacaatgcaaatgcattccggaaactcatcagtgatgaaaagaatacggatattattttctggcacg

SEQ ID NO: 131456 - DNA, 75 bp, synthetic construct
  source 1..75: mol_type = other DNA
ctgcccgccggcaatgccgccggtacagtggcagaacgccttgagctgctcatgcagacacacaacctcaccgcg

SEQ ID NO: 131457 - DNA, 75 bp, synthetic construct
  source 1..75: mol_type = other DNA
tcaatactgacaccctgaccgtggcactgacctggcgctttttgctgcccaacagtacgccgcccgtgagggtac

SEQ ID NO: 131458 - DNA, 75 bp, synthetic construct
  source 1..75: mol_type = other DNA
cgtttaccctgaagcagttcaccgcctgtcttgagggcaacgctgactggtttgcccctgaatttcagcctgcgg

SEQ ID NO: 131459 - DNA, 75 bp, synthetic construct
  source 1..75: mol_type = other DNA
ggttttggtcagtttgaatacaaccttgatgccagcaagcctgaaggttctaatcaggaaaaaacccgtttaacc

SEQ ID NO: 131460 - DNA, 75 bp, synthetic construct
  source 1..75: mol_type = other DNA
tcgcagataaccctggtgtcaaccgtggcgctgatgtttcttcgcccgggtaaaatgctttctgaaatcgcctgt

SEQ ID NO: 131461 - DNA, 75 bp, synthetic construct
  source 1..75: mol_type = other DNA
aaaaatatgacaggtgagtcaggccccagcactaagaacttaatggaatatcttactgaaaataaaacaaaagca

SEQ ID NO: 131462 - DNA, 75 bp, synthetic construct
  source 1..75: mol_type = other DNA
acgcggcgggaaacctgctggggaggcgcgcgggggaaagggccacggcagaaaacagcgtggtgccgttcaacc

SEQ ID NO: 131463 - DNA, 75 bp, synthetic construct
  source 1..75: mol_type = other DNA
gagttccggaggaaataaataggaagattgttgatcatatttcagatattaatttaacatatagtgagatagcta

SEQ ID NO: 131464 - DNA, 75 bp, synthetic construct
  source 1..75: mol_type = other DNA
ccaaatgtttcagataaagttgtgcgtattatccattcatatactgactacgttaaacgggttgtctggaagcaa

SEQ ID NO: 131465 - DNA, 75 bp, synthetic construct
  source 1..75: mol_type = other DNA
gttagttcttggtgatactaactcctgtatttcagcaataccagcaaagcgtcgaagaattccgatcttccatat

SEQ ID NO: 131466 - DNA, 75 bp, synthetic construct
  source 1..75: mol_type = other DNA
atgccctggtatgactcaaatgggttgcgcttaacttttagcccgcgcgattttattcaggtcaatgcgggtgtg

SEQ ID NO: 131467 - DNA, 75 bp, synthetic construct
  source 1..75: mol_type = other DNA
aagctctcgatattcattgaaatgaccactggcgtatcaaaagaaaaattacgtccagatatttttcaaaagatt

SEQ ID NO: 131468 - DNA, 75 bp, synthetic construct
  source 1..75: mol_type = other DNA
ctattgttggaacacggcctgaaatcattaggttatctagagtaatatctagattagatgagtgcagcgaacata

SEQ ID NO: 131469 - DNA, 75 bp, synthetic construct
  source 1..75: mol_type = other DNA
atggcggattcgaatctcaatacccctgttattgtgcaggctacgcggctcgatacatcagtccttccacgcaat

SEQ ID NO: 131470 - DNA, 75 bp, synthetic construct
  source 1..75: mol_type = other DNA
tggataaagacggctttcttgccacaaatggcagtacgttaaccattcagtcgaatggtgcggcgtttactgcca

SEQ ID NO: 131471 - DNA, 75 bp, synthetic construct
  source 1..75: mol_type = other DNA
atcgagttcctgaggaaattaatcgaaagattgtggatcatattgccgatataaaccttacttacagcgaaattg

SEQ ID NO: 131472 - DNA, 75 bp, synthetic construct
  source 1..75: mol_type = other DNA
aaaacgatattgattatctgacggatgaagttgtcgccattcaaaacacgctttcagaccatgaaacgcgcatcg

SEQ ID NO: 131473 - DNA, 75 bp, synthetic construct
  source 1..75: mol_type = other DNA
gctaaccttttccggctctgttcctgatacgctggtcagcagtcgtaatgcggcgacaacaaccgacaacatcct

SEQ ID NO: 131474 - DNA, 75 bp, synthetic construct
  source 1..75: mol_type = other DNA
tcgttggcaccattcttcgacaccgttaacaacaagatggttgtgttcaacgagaacaaaaccctgttcttcaag

SEQ ID NO: 131475 - DNA, 75 bp, synthetic construct
  source 1..75: mol_type = other DNA
gaaccggaaattcattctggcgatgcgattgcttttgttaccgcccaggaaaaaatcattttgcagatccagtgt

SEQ ID NO: 131476 - DNA, 75 bp, synthetic construct
  source 1..75: mol_type = other DNA
acaggtactgcgattgtagttcaggctgcaggtaaaaacgtttctttcgatggcacagaaggtgatgctaatacc

SEQ ID NO: 131477 - DNA, 75 bp, synthetic construct
  source 1..75: mol_type = other DNA
atactgcgattgttaagaagtcgtcagccaataatgcccaagttactgagggtgctttttctgcagtcgcaacct

SEQ ID NO: 131478 - DNA, 75 bp, synthetic construct
  source 1..75: mol_type = other DNA
accggcaccatcactcgtgattacgcccgccgggcggcgctcgggcaaataaagtctggttccagcgtgaaaaca

SEQ ID NO: 131479 - DNA, 75 bp, synthetic construct
  source 1..75: mol_type = other DNA
catctggtcaaatactgatgataataacagcgaaaacgaagatacctcctatgctcgtttcggtgttaaaggtga

SEQ ID NO: 131480 - DNA, 75 bp, synthetic construct
  source 1..75: mol_type = other DNA
atcaactggaatatcagacgttaaaaacgcgtgccgaagctggtgcgaagcggttgttatcgctgaacctgaaaa

SEQ ID NO: 131481 - DNA, 75 bp, synthetic construct
  source 1..75: mol_type = other DNA
aaaatatttgcgctcgacgtggctgccagtcagcagctgcgcttcaccctcgatacacaggatgcgctgcagcta

SEQ ID NO: 131482 - DNA, 75 bp, synthetic construct
  source 1..75: mol_type = other DNA
gatcgtgacggcgtcagactgagcatcgacgtcagcccccataccttccggcacagttttgcaatgcacctttta

SEQ ID NO: 131483 - DNA, 75 bp, synthetic construct
  source 1..75: mol_type = other DNA
ttggcagaaagaataaagattccagtgctaacacagcaattctttcagagccagatctcacaattgcacgagcga

SEQ ID NO: 131484 - DNA, 75 bp, synthetic construct
  source 1..75: mol_type = other DNA
actgctctggttaagaaagacgcaagtggcaagaatgtagctgaaggtgccttctcagcagttgcgaatttcaac

SEQ ID NO: 131485 - DNA, 75 bp, synthetic construct
  source 1..75: mol_type = other DNA
atattagagaggaaataataaaaaaaaatatttttaacttagcatttaatatattaatatcgtttcgagtttcga

SEQ ID NO: 131486 - DNA, 75 bp, synthetic construct
  source 1..75: mol_type = other DNA
aaaataaaagaaaaggaaaaaacataccagtcatgggaaacaattaaaaaaaaggtatacgattattcacttttc

SEQ ID NO: 131487 - DNA, 75 bp, synthetic construct
  source 1..75: mol_type = other DNA
ttttatccgctcacggataaaaaattcaaagaaatcgttgttgaaattgataatcgtaaaaaagtgcagcagcaa

SEQ ID NO: 131488 - DNA, 75 bp, synthetic construct
  source 1..75: mol_type = other DNA
gccggtaatgaacgtaatgtacagcgcggcagaaggcaaagcctggaaagaagagtgcggtgtgcgcaagcagat

SEQ ID NO: 131489 - DNA, 75 bp, synthetic construct
  source 1..75: mol_type = other DNA
aacattgcgctcattgaccatggcaaaccgattttaggtgtggtgtatgcgccggtaatgaacgtaatgtacagc

SEQ ID NO: 131490 - DNA, 75 bp, synthetic construct
  source 1..75: mol_type = other DNA
ccgtttattattacaccgccattattcaaacttgatcctgataaaaataacgtcttacgtatcgtcaatattgaa

SEQ ID NO: 131491 - DNA, 75 bp, synthetic construct
  source 1..75: mol_type = other DNA
tgattaagctgctgactggattattgctgctcgcctggccgtttgtgatttggtttggcttagcgcataacggcc

SEQ ID NO: 131492 - DNA, 75 bp, synthetic construct
  source 1..75: mol_type = other DNA
atgttagaacaagtatgtcaactcgcacggaatgcgggcgatgccattatgcaggtctacgacgggacaaaaccg

SEQ ID NO: 131493 - DNA, 75 bp, synthetic construct
  source 1..75: mol_type = other DNA
agcgcacgttcatgactggcagggtaaaccgctggattacactccgcgcgagtcgttcctgaatccgggattcag

SEQ ID NO: 131494 - DNA, 75 bp, synthetic construct
  source 1..75: mol_type = other DNA
atcccaacggtgcatggctgcttgatgaagccatttctctatgcaaagggctgaatgatgttcttacctatgccg

SEQ ID NO: 131495 - DNA, 75 bp, synthetic construct
  source 1..75: mol_type = other DNA
ggtgaagatctggaaaaagttctgaatacgctttccggccttacagggattgtctatgaagttattggtaattgg

SEQ ID NO: 131496 - DNA, 75 bp, synthetic construct
  source 1..75: mol_type = other DNA
aattgtttttgaggtaattggaaattgggtgtggatcgatggagagacgaagaagcataaggaagcattaaataa

SEQ ID NO: 131497 - DNA, 75 bp, synthetic construct
  source 1..75: mol_type = other DNA
cctgaataaagtggttcagcaggtgcataaaggtaatcaggcagccgattttgataccttcggcaaaggtgcctg

SEQ ID NO: 131498 - DNA, 75 bp, synthetic construct
  source 1..75: mol_type = other DNA
cgcaatattgtggtactcaccgataacgccgggcataccggcattggtgaagcgccgggcggagaggtgatttat

SEQ ID NO: 131499 - DNA, 75 bp, synthetic construct
  source 1..75: mol_type = other DNA
atcccaacggtgcctggctgcttgatgaagccatttctctgtgcaaagggctgaatgatgttcttacctatgcgg

SEQ ID NO: 131500 - DNA, 75 bp, synthetic construct
  source 1..75: mol_type = other DNA
gattacccattacaacctgcgcttcgctggatattactccgcctggcagtgtgcactgcgtgacgatgacgtcta

SEQ ID NO: 131501 - DNA, 75 bp, synthetic construct
  source 1..75: mol_type = other DNA
agttcgtttactcaactgaaaaatcaacaacctgccaccttgtgctatgcaccgccgctatcgactgacgatacg

SEQ ID NO: 131502 - DNA, 75 bp, synthetic construct
  source 1..75: mol_type = other DNA
atgtattccgatgatgatccgtacgttgatggtgcagccgccttcagcgaacgatcagcaacaccgcctgcggga

SEQ ID NO: 131503 - DNA, 75 bp, synthetic construct
  source 1..75: mol_type = other DNA
ttctcaacccgaaagccactgcgaaagtgctggaagccgatggctggctacataccggcgataccggataccgcg

SEQ ID NO: 131504 - DNA, 75 bp, synthetic construct
  source 1..75: mol_type = other DNA
gcggagatccgcgacgatcacaatcgtccgctcccggcgggagagatcggcgaaatctgcattaaaggcgaaccg

SEQ ID NO: 131505 - DNA, 75 bp, synthetic construct
  source 1..75: mol_type = other DNA
ggcgcttcccgctgatgatggcgtcagttcgtttactcaactgaaagatcaacaacctgccaccttgtgctatgc

SEQ ID NO: 131506 - DNA, 75 bp, synthetic construct
  source 1..75: mol_type = other DNA
gcgcgttgcgttggtgctgcgctgcgccagaacccgcaaatgaagcgggcgctggataattttaaagcggtgctg

SEQ ID NO: 131507 - DNA, 75 bp, synthetic construct
  source 1..75: mol_type = other DNA
gtcaccagcatgaacacggtcaatgctgcggtggtcgccacggtcgcggcggcggtcgtcggcaacgtttctttg

SEQ ID NO: 131508 - DNA, 75 bp, synthetic construct
  source 1..75: mol_type = other DNA
aacggtaaacatattcatgtacgcggagcaaaactgctcttcccgccgattcaacagccctatcctccgctttac

SEQ ID NO: 131509 - DNA, 75 bp, synthetic construct
  source 1..75: mol_type = other DNA
ttcgcaaaggcgacaaggttgcactacatctcgacaactgcccggaatttatcttttgctggttcgggctggcaa

SEQ ID NO: 131510 - DNA, 75 bp, synthetic construct
  source 1..75: mol_type = other DNA
tacaggaagttagcgaaattgatgaggctaagcgtcaatggttacacagtatgcgtcagcccgatgccccagtgg

SEQ ID NO: 131511 - DNA, 75 bp, synthetic construct
  source 1..75: mol_type = other DNA
gtcacggtgaattgcgtctggtgattctggatattctctcgcgcgatgacagccacggttacgagttgattaaag

SEQ ID NO: 131512 - DNA, 75 bp, synthetic construct
  source 1..75: mol_type = other DNA
aaaaactgaacgtcattgatgaggggtggcgtctgctggacttcaaaaatcacaaggttggtgagtttattgaga

SEQ ID NO: 131513 - DNA, 75 bp, synthetic construct
  source 1..75: mol_type = other DNA
ctctgatgagccgtccctgcgggatgacgcaaaaatggtggtgctggagctgggcggactggaagaccgtccgtc

SEQ ID NO: 131514 - DNA, 75 bp, synthetic construct
  source 1..75: mol_type = other DNA
gtaaagaggggctgagtattcatgaggcggtgtggcagctggcgtggaagaagtcagggccggagatggcttcgc

SEQ ID NO: 131515 - DNA, 75 bp, synthetic construct
  source 1..75: mol_type = other DNA
aataacgcttatctggacactggctattgtcggttgctccacatttttgattggttttattccgacgtatcagga

SEQ ID NO: 131516 - DNA, 75 bp, synthetic construct
  source 1..75: mol_type = other DNA
caccgttactggatacgattcgttccgcttactcgctgacgacggcgcaaaccggcttattgaccaccctgccat

SEQ ID NO: 131517 - DNA, 75 bp, synthetic construct
  source 1..75: mol_type = other DNA
tattggcctttgcgctaatctcacctttggccgccccggtggcgcgacgttttggtatggaacgtagcctgtttg

SEQ ID NO: 131518 - DNA, 75 bp, synthetic construct
  source 1..75: mol_type = other DNA
cattccattgttacaagcctgaaagatgatgatgtatgtagtgttttttatgttgaagccagagctttccctgtg

SEQ ID NO: 131519 - DNA, 75 bp, synthetic construct
  source 1..75: mol_type = other DNA
gtacgcagccctttattacatctctgatgatgataaagcaaaggtcgaggttacagagtggatagttcgctctat

SEQ ID NO: 131520 - DNA, 75 bp, synthetic construct
  source 1..75: mol_type = other DNA
gaggaaatggtccgtatgcagacggccaccggcacagccatcacccagaactcagaaaaactggccaccgtcatt

SEQ ID NO: 131521 - DNA, 75 bp, synthetic construct
  source 1..75: mol_type = other DNA
ttcaactgcattacatctacgaaacccgaaaactaggcattaaagagcaaattgttgaaatggttcataacggag

SEQ ID NO: 131522 - DNA, 75 bp, synthetic construct
  source 1..75: mol_type = other DNA
gtgttgcctttgatggttctggagatattacccttaatgccagaaatgtcggtgcatttgcacttcggcagacag

SEQ ID NO: 131523 - DNA, 75 bp, synthetic construct
  source 1..75: mol_type = other DNA
tactacatggacgcatcaggctccgtcaggttgcgtatataccggcattattgttcaggataccggctcaaactc

SEQ ID NO: 131524 - DNA, 75 bp, synthetic construct
  source 1..75: mol_type = other DNA
taaggcgctaattgacctatccgtgattcttcaaggcccaaaagtagggcgcagttacagttaccgtctgaaccc

SEQ ID NO: 131525 - DNA, 75 bp, synthetic construct
  source 1..75: mol_type = other DNA
acgcaaatattgatgacttttttaagtctgtccttaatgctaacggccttgtagttgtcgctggcaatcctgccg

SEQ ID NO: 131526 - DNA, 75 bp, synthetic construct
  source 1..75: mol_type = other DNA
cccccttaatcgccagaccatggaggaaagctggtcgtgtcccgtggtatttaacccccttaatcgccagaccat

SEQ ID NO: 131527 - DNA, 75 bp, synthetic construct
  source 1..75: mol_type = other DNA
ggaccggtcagggccgtacaccgaagccaattgctcaggcgctggcagaaggtaaatctctcgacgatttcctga

SEQ ID NO: 131528 - DNA, 75 bp, synthetic construct
  source 1..75: mol_type = other DNA
cattgttactgcctttgcacttaattattcaaccagaatatggggttaccgcgcgaacttttccttaatattggt

SEQ ID NO: 131529 - DNA, 75 bp, synthetic construct
  source 1..75: mol_type = other DNA
ctgggcctgcggcagggaggtatcagtgaagaaacacaaaatgacagctgtgagaaaatactgacgccgacagag

SEQ ID NO: 131530 - DNA, 75 bp, synthetic construct
  source 1..75: mol_type = other DNA
ttgacgtgaatgtacaaggtattcaggtgtggcatttgagagaagtggtcaacaccacctacaacctgtgggatt

SEQ ID NO: 131531 - DNA, 75 bp, synthetic construct
  source 1..75: mol_type = other DNA
aaacaaaagggatataaacatcagacaggtttacgttactatcaggcatatcgcctcagaatcagatgaaaacta

SEQ ID NO: 131532 - DNA, 75 bp, synthetic construct
  source 1..75: mol_type = other DNA
cgcatgtagttcaattccgcaaaatatcaaaggcaataaccaacctgatattcaaaaaagttttgttgctgttca

SEQ ID NO: 131533 - DNA, 75 bp, synthetic construct
  source 1..75: mol_type = other DNA
cgttattgttaatcctgatgttaaaggaaccgtaacggtatttaatgctgatgttaatcccacaaatattgatag

SEQ ID NO: 131534 - DNA, 75 bp, synthetic construct
  source 1..75: mol_type = other DNA
tattcacttattctttttgcgtttctgctgaaactgttaatctgaataattcatccgttcgctcatttgtccagt

SEQ ID NO: 131535 - DNA, 75 bp, synthetic construct
  source 1..75: mol_type = other DNA
actattcccttcttcgcctggctcgccgatcgctttggccgacgccgcgtctacattactggcgcattaaccggc

SEQ ID NO: 131536 - DNA, 75 bp, synthetic construct
  source 1..75: mol_type = other DNA
aaggctatccgtgcgaagttttgcgtaattgggcatccctaacaccaacgatcatacccaaggattatataccac

SEQ ID NO: 131537 - DNA, 75 bp, synthetic construct
  source 1..75: mol_type = other DNA
cgactgatgctcgactctgccgggagtgtggctttctttcgcagcccgtggccggagctgatgcgtaatgctggt

SEQ ID NO: 131538 - DNA, 75 bp, synthetic construct
  source 1..75: mol_type = other DNA
tggtcgatggcgaattaagtctggttggtaccgttaaccttgatatgcgtagtctgtggctgaatttcgagatta

SEQ ID NO: 131539 - DNA, 75 bp, synthetic construct
  source 1..75: mol_type = other DNA
catggcagcatatcctcaagctcatttcctatttattggccagggtgatgaagttgaattaattaattcattagc

SEQ ID NO: 131540 - DNA, 75 bp, synthetic construct
  source 1..75: mol_type = other DNA
tctgccaaacactcttctcacaattttccgggtaagttgttaggttacatggttcagtctctacctatattaggt

SEQ ID NO: 131541 - DNA, 75 bp, synthetic construct
  source 1..75: mol_type = other DNA
agcgtaaatgccggaaatgatttgctcgacattgtcaatcaaaataatgcgggattaatccatgtcaatggtgag

SEQ ID NO: 131542 - DNA, 75 bp, synthetic construct
  source 1..75: mol_type = other DNA
ctggtcggctgggccagtcgcgcattctttacggaactgctggctgctggggttaaaatttatcagtttgaaggc

SEQ ID NO: 131543 - DNA, 75 bp, synthetic construct
  source 1..75: mol_type = other DNA
ctacttcgtgcccagcgatgacttacttcacgcgatttgcacagcagcacagcgcggagttgatgtcagtattat

SEQ ID NO: 131544 - DNA, 75 bp, synthetic construct
  source 1..75: mol_type = other DNA
gaaccattgttactgaatccacataaagtcggccctatgcgaagtagaatttttaattgcatggcggataagaca

SEQ ID NO: 131545 - DNA, 75 bp, synthetic construct
  source 1..75: mol_type = other DNA
aacgtggtgttgatgtcagtattatcctgccacgtaaaaatgactcaatgctggttggctgggccagccgcgcgt

SEQ ID NO: 131546 - DNA, 75 bp, synthetic construct
  source 1..75: mol_type = other DNA
gtgaatatttgatcatgacaacgccctactttgtgccaagcgatgatttacttcatgcgatttgcacggcggcgc

SEQ ID NO: 131547 - DNA, 75 bp, synthetic construct
  source 1..75: mol_type = other DNA
tcaatctgatgcgtgtgtttttacgccgtatggacctgcgccaacatcgcaagatgatcatgatcgataattaca

SEQ ID NO: 131548 - DNA, 75 bp, synthetic construct
  source 1..75: mol_type = other DNA
gatttcgaatacatcccgccagtgacttaccgtgctgttgatgatttcctggctgaacatgaagacgaggaggat

SEQ ID NO: 131549 - DNA, 75 bp, synthetic construct
  source 1..75: mol_type = other DNA
aatatatcccgccagttacttactgttctgtcgatgatttcctagctgaacaagaagacgatgaagaggatgatt

SEQ ID NO: 131550 - DNA, 75 bp, synthetic construct
  source 1..75: mol_type = other DNA
ttgaatttggatggtgtcgtcgtttataagttccctaatggtgctataaagaatgtatctaaaatatcaagagca

SEQ ID NO: 131551 - DNA, 75 bp, synthetic construct
  source 1..75: mol_type = other DNA
acgggtcatattgacgtcaataattcagctactgggtttagcatcgcaaccagtgagggagttatctcattaact

SEQ ID NO: 131552 - DNA, 75 bp, synthetic construct
  source 1..75: mol_type = other DNA
agcgctggcaaactacggcaatgaaacgctgaatagcaatgtggctgccaaagcgtggctttataaccaggataa

SEQ ID NO: 131553 - DNA, 75 bp, synthetic construct
  source 1..75: mol_type = other DNA
atgaaactaggccttgagactgagtcatatcatctgttctttcagcagggaatgatggatattttcgacttcatt

SEQ ID NO: 131554 - DNA, 75 bp, synthetic construct
  source 1..75: mol_type = other DNA
tcatctcgccattcttcacataatttccccgggaaattactagggtatatggttcaatcaatcccgatccttggg

SEQ ID NO: 131555 - DNA, 75 bp, synthetic construct
  source 1..75: mol_type = other DNA
ggttcaatcaatcccgatccttgggagtgtgaatggcggcaatgatttaatggatgtaattaataagcacagggc

SEQ ID NO: 131556 - DNA, 75 bp, synthetic construct
  source 1..75: mol_type = other DNA
atgaaacttgcattaatcattgatgattatttgccccatagcacacgtgttggggctaaaatgtttcatgagtta

SEQ ID NO: 131557 - DNA, 75 bp, synthetic construct
  source 1..75: mol_type = other DNA
tcccaccggaacgcgaactggcgaaacagtttgacgtctcccgtccctccttgcgtgaggcgattcaacgtctcg

SEQ ID NO: 131558 - DNA, 75 bp, synthetic construct
  source 1..75: mol_type = other DNA
cgggatcatgctctcaacgcgcttgttaagcgatgtgaatcaggccgaagaagcgctacgtaaaaaaagggcctg

SEQ ID NO: 131559 - DNA, 75 bp, synthetic construct
  source 1..75: mol_type = other DNA
tccagcaaattcataccggcatcatgctctcaacacgcttgctgaatgatgttaatcagcctgaagaagcgctgc

SEQ ID NO: 131560 - DNA, 75 bp, synthetic construct
  source 1..75: mol_type = other DNA
aggtgaacctgcgtactcagggagacagaacgattgtcgatggtctgtttgacaaagcgtatctcgtgatcggcg

SEQ ID NO: 131561 - DNA, 75 bp, synthetic construct
  source 1..75: mol_type = other DNA
atgatgttcacggtagtgaagaaatcactttcactgattcacatcatccctgatgaaattatgaagtggcttggt

SEQ ID NO: 131562 - DNA, 75 bp, synthetic construct
  source 1..75: mol_type = other DNA
ataagctgtagtgagcgaatgcctgaaaagaaccagaacgtgcttatttcggtgaatttcgatagctctctggtt

SEQ ID NO: 131563 - DNA, 75 bp, synthetic construct
  source 1..75: mol_type = other DNA
attttgttggttggtgggattttagcagcatacacgctaatagccggaacgatgtcaacggcgcatgatggcgaa

SEQ ID NO: 131564 - DNA, 75 bp, synthetic construct
  source 1..75: mol_type = other DNA
tgggatgcgattcgttcacgcgaagccaagcagttacgtgataacaccattccgcaaaccggtgaatatctcggc

SEQ ID NO: 131565 - DNA, 75 bp, synthetic construct
  source 1..75: mol_type = other DNA
atgttgggcttgatacgtcgctggttgtcactacagaccgccgtacctatcgcttccggttgaagtccagccgca

SEQ ID NO: 131566 - DNA, 75 bp, synthetic construct
  source 1..75: mol_type = other DNA
aacacgtgcgggcgaaagctgccgcgcatggacgcaaaattcgtttcggtattcgtctgcatgtgattgttcgtg

SEQ ID NO: 131567 - DNA, 75 bp, synthetic construct
  source 1..75: mol_type = other DNA
tctgggaacggaagaaggttcacgtctggttgatcacggttatctgcaacaaattgcgcaagcggcggatcgtct

SEQ ID NO: 131568 - DNA, 75 bp, synthetic construct
  source 1..75: mol_type = other DNA
gcccgcgccttctgggggcaagtacaaaagtatcgcgccaccgtcaccgaatgtattccgatgatgatccgcacc

SEQ ID NO: 131569 - DNA, 75 bp, synthetic construct
  source 1..75: mol_type = other DNA
caagcaagctacctgatacggcgatggagtatctgaaacagaatgggctgataaacacagagagtattttacgat

SEQ ID NO: 131570 - DNA, 75 bp, synthetic construct
  source 1..75: mol_type = other DNA
aacaatgtgggtgaagcggttatctcattccttaaaaagcgttaataaatcaagcaaactaccggataaagcgat

SEQ ID NO: 131571 - DNA, 75 bp, synthetic construct
  source 1..75: mol_type = other DNA
cgcgatgctgatttgcgctggattcatggcgtaatagttcaggccgcgtggtttgtaaaggcatcactggagcag

SEQ ID NO: 131572 - DNA, 75 bp, synthetic construct
  source 1..75: mol_type = other DNA
tagcgtcttatgtgcggtctccgcgctattaccgtgcgttaatggctggcggcgcccgttatgacctgaaggggc

SEQ ID NO: 131573 - DNA, 75 bp, synthetic construct
  source 1..75: mol_type = other DNA
attgatgaacagcgctatacactgacggaattgattttgcgtaaaaataaggataccggagatgctttaagtaac

SEQ ID NO: 131574 - DNA, 75 bp, synthetic construct
  source 1..75: mol_type = other DNA
ctgacctgggaacatcaatcctcgttgcgctttccggtctgtttgtactgttcctctctggccttagctggcgtc

SEQ ID NO: 131575 - DNA, 75 bp, synthetic construct
  source 1..75: mol_type = other DNA
tgacgctctgaaacaatgtgccatccggtgctggcgttatagctggatactggaagtggacatcagtgcgttttt

SEQ ID NO: 131576 - DNA, 75 bp, synthetic construct
  source 1..75: mol_type = other DNA
cagccgggtaaaacagccacggaatataaagttaaacccgcatacctcacccggcagaatgataatcagaaggcc

SEQ ID NO: 131577 - DNA, 75 bp, synthetic construct
  source 1..75: mol_type = other DNA
ggcgcccgttacgacctgaaggggcagccgtgcgggaaagtgactccacaggaacagaaagaggcagagacccgg

SEQ ID NO: 131578 - DNA, 75 bp, synthetic construct
  source 1..75: mol_type = other DNA
cgcgccagtgaaatgctgaaggcggtcgatctcgacgacagcgtgctcgacaaacgcccaccgcagttaagcggc

SEQ ID NO: 131579 - DNA, 75 bp, synthetic construct
  source 1..75: mol_type = other DNA
tgaataaaaacttactggtatccaaatcagcgtgtggaagtatcacattgacagacccggaggctaaagcgtctt

SEQ ID NO: 131580 - DNA, 75 bp, synthetic construct
  source 1..75: mol_type = other DNA
aaagtatttataccgatacaattacggtgctaataatgctggtaatgaaatgaataaaaacttactggtatccaa

SEQ ID NO: 131581 - DNA, 75 bp, synthetic construct
  source 1..75: mol_type = other DNA
ctctctggccttagctggcgcctgatcggcgttgcagtggtgctggtagccgcgttcattccgattctgtggttc

SEQ ID NO: 131582 - DNA, 75 bp, synthetic construct
  source 1..75: mol_type = other DNA
actggcggaagagctgggattagtgggcattctgattctgctcgctctctacattctgctgatcatgcgcgggct

SEQ ID NO: 131583 - DNA, 75 bp, synthetic construct
  source 1..75: mol_type = other DNA
gaatattagctggcgcggcgaaccgttggcaaagctcaatcgcgcccagcgtaaagcgttccgccgcgatattca

SEQ ID NO: 131584 - DNA, 75 bp, synthetic construct
  source 1..75: mol_type = other DNA
cgacgctgccgggtaaagcctggctggaacacgcgctgccgctgattgctgaacagttgcagggtcgccgttcag

SEQ ID NO: 131585 - DNA, 75 bp, synthetic construct
  source 1..75: mol_type = other DNA
aaacagaagcagatatttctgaatatataacaaaaaaaattattgaacttaagaaaaagaccgggaaagaagtta

SEQ ID NO: 131586 - DNA, 75 bp, synthetic construct
  source 1..75: mol_type = other DNA
atggactattgatattagagggaatcagcaattggctgaaattgcacataaatacggacgtcaggttgaaattaa

SEQ ID NO: 131587 - DNA, 75 bp, synthetic construct
  source 1..75: mol_type = other DNA
attataaatgtaatgagattgaacaagagcttattgaagagtacaataataagattcaatccgcatcggtggtta

SEQ ID NO: 131588 - DNA, 75 bp, synthetic construct
  source 1..75: mol_type = other DNA
tctccagcagacaacccaactgctcgacccggcaaaagcctatgccaaaggcgtaggtaactcggtgccggatat

SEQ ID NO: 131589 - DNA, 75 bp, synthetic construct
  source 1..75: mol_type = other DNA
catgacgccatcggccttcttccccagcagttatttcacctatcaggaacccggcgtcatgagtgccgatcgcct

SEQ ID NO: 131590 - DNA, 75 bp, synthetic construct
  source 1..75: mol_type = other DNA
cttggcaaaattatcgaaaggttacagtagatgggcggcaatatgcacaaataggtcatcgtttgtattcacaac

SEQ ID NO: 131591 - DNA, 75 bp, synthetic construct
  source 1..75: mol_type = other DNA
gcttaataatggtgaagaaagagcaattgccgtagagcgaattaaagaagcttacaattcgaacatggcatctct

SEQ ID NO: 131592 - DNA, 75 bp, synthetic construct
  source 1..75: mol_type = other DNA
accatctccagcaatttttgtgaacgactggcacaatggggtaataagtcgcttaataatggtgaagaaagagca

SEQ ID NO: 131593 - DNA, 75 bp, synthetic construct
  source 1..75: mol_type = other DNA
acaaggagaaagagcagaggcgtctgcagacagtgtggcttatcagtgacattggcagtcaggtggcggatatcg

SEQ ID NO: 131594 - DNA, 75 bp, synthetic construct
  source 1..75: mol_type = other DNA
tttatcgtcgtcccaagaacaaacaggtgccagatggactattgatattaaggggaataaacaactttctgacat

SEQ ID NO: 131595 - DNA, 75 bp, synthetic construct
  source 1..75: mol_type = other DNA
gaaatgggggaatacaagcgccaggatctggtttacgagaaagaggatctgctgatctccggtccgggcaaatac

SEQ ID NO: 131596 - DNA, 75 bp, synthetic construct
  source 1..75: mol_type = other DNA
ccgcgttagcgcccggatgccggatgccgagtttcagtcacatattcagttagatagcaaaataccggtgctggt

SEQ ID NO: 131597 - DNA, 75 bp, synthetic construct
  source 1..75: mol_type = other DNA
gattgtggaaattctcaatagcgccatcgaagccgtggttgaccgaattggctctgaataccatgagctttccgg

SEQ ID NO: 131598 - DNA, 75 bp, synthetic construct
  source 1..75: mol_type = other DNA
gattgtggaaattcttaatagcgccatcgaagcggtggttgatcgtattggctctgaataccacgagctttccgg

SEQ ID NO: 131599 - DNA, 75 bp, synthetic construct
  source 1..75: mol_type = other DNA
atcaataaaaaagtccaaaccggtgatggcatcaacaatgatgtcgataccaaaaccgacggtaccacgcagtaa

SEQ ID NO: 131600 - DNA, 75 bp, synthetic construct
  source 1..75: mol_type = other DNA
ccggatatcaataaaaaagtccaaaccggtgatggcatcaacaatgatgtcgataccaaaaccgacggtaccacg

SEQ ID NO: 131601 - DNA, 75 bp, synthetic construct
  source 1..75: mol_type = other DNA
gtaaatgaactggggtatatgcctaatctcactgcaagtgcgctggcatcggcatcttctcatactattgcgatg

SEQ ID NO: 131602 - DNA, 75 bp, synthetic construct
  source 1..75: mol_type = other DNA
gtcttgagcaaatcccacaaatcctgaaacgttttcgtcaggcggtgttgtctgctgccgtaagcggaaacatct

SEQ ID NO: 131603 - DNA, 75 bp, synthetic construct
  source 1..75: mol_type = other DNA
cctcaatatctttctggtaaaaatgctccaagtcgagcaagaaaggttattaaggcaggagatgtaattgtttcc

SEQ ID NO: 131604 - DNA, 75 bp, synthetic construct
  source 1..75: mol_type = other DNA
tacaacaaaatacacgacacagaactcattaatgcactgagggataaggctagaaattctgtctccatgtttcag

SEQ ID NO: 131605 - DNA, 75 bp, synthetic construct
  source 1..75: mol_type = other DNA
gcgagcgaaagatatggggtccgcggcggtgttgatcgcgattatcgtcgcagtgattacctggtgcatcctgtt

SEQ ID NO: 131606 - DNA, 75 bp, synthetic construct
  source 1..75: mol_type = other DNA
ttcctggaaaggtttacgcgctgcatggatcaacgaagcggcattccgtcaggaaggcgtagcggtattgttagc

SEQ ID NO: 131607 - DNA, 75 bp, synthetic construct
  source 1..75: mol_type = other DNA
cccagtggcgggccgaaaacccggatttaatcagcggagaaaacagcgccgctgcgttgctggagaaaatcaaag

SEQ ID NO: 131608 - DNA, 75 bp, synthetic construct
  source 1..75: mol_type = other DNA
tccggcagagcgccgcaggctgatacctggagtcaggaaatgcgtggggtgccaggaagttcaggagattaaggg

SEQ ID NO: 131609 - DNA, 75 bp, synthetic construct
  source 1..75: mol_type = other DNA
tgggcaatagtgacagggaaaaactcaaatgcaagaggaaaaccagaagctaaaggaatgtccttcgacaaatat

SEQ ID NO: 131610 - DNA, 75 bp, synthetic construct
  source 1..75: mol_type = other DNA
cccggcagaacgtcgccggctgataccgggtgtgcggaaatgcgtggggtgtcaggaggtacaggagattcggac

SEQ ID NO: 131611 - DNA, 75 bp, synthetic construct
  source 1..75: mol_type = other DNA
tatgtcaaatttatcttacataacggatgtgactaaaaaaattcttatcaaatacccacccaaagttatcatgat

SEQ ID NO: 131612 - DNA, 75 bp, synthetic construct
  source 1..75: mol_type = other DNA
atgcagaaaataacaaatggttaaaggagagaataaacacaataaaaagacatgttttatctggacagaatctgg

SEQ ID NO: 131613 - DNA, 75 bp, synthetic construct
  source 1..75: mol_type = other DNA
gattaatccatattgttgactggaaaggcgaaaaagaagatggtgagctggctaattttgctgctgaccgcttct

SEQ ID NO: 131614 - DNA, 75 bp, synthetic construct
  source 1..75: mol_type = other DNA
ccagtgctggacgtccttcctggatgcgggcggtctgcgcgatatcgaggttgaagccgtcaccaaaatgctggc

SEQ ID NO: 131615 - DNA, 75 bp, synthetic construct
  source 1..75: mol_type = other DNA
gcttcccgactggctcattacaacggaggtgcgagcctgagcttccgttacctggaccacaatacaggagagacg

SEQ ID NO: 131616 - DNA, 75 bp, synthetic construct
  source 1..75: mol_type = other DNA
cgtgcctgcccgtcctgcggaaagaaggccacagacctgtggatagcgacacagctgaatcgtcttcctgactgc

SEQ ID NO: 131617 - DNA, 75 bp, synthetic construct
  source 1..75: mol_type = other DNA
tgaaatcctccggaatttgcggaagcgatgtccactatatctaccaccagcaccgcgctacggcggcggcatccg

SEQ ID NO: 131618 - DNA, 75 bp, synthetic construct
  source 1..75: mol_type = other DNA
acaaagagagcggcgcactgttcgttgaccgcttcatgtccaccgcaatgttctatccgtgcaactacggttaca

SEQ ID NO: 131619 - DNA, 75 bp, synthetic construct
  source 1..75: mol_type = other DNA
aattaactcttgaaaacggcaacaacatttgtgtcaataattatagtcattatctgttatcagagtctgtaagtc

SEQ ID NO: 131620 - DNA, 75 bp, synthetic construct
  source 1..75: mol_type = other DNA
atgcttttggccgggagtagtttactgacgttactcgatgatatcgccactttgctggacgatatttccgtgatg

SEQ ID NO: 131621 - DNA, 75 bp, synthetic construct
  source 1..75: mol_type = other DNA
tttcgcgaaaagtgccgcgctggtagtgaagaatccctacctgacttacgcgcgcatggcgcaaattttagatac

SEQ ID NO: 131622 - DNA, 75 bp, synthetic construct
  source 1..75: mol_type = other DNA
atgcctgcgctcaggaagatgcgcattgacagcaagacagcatggctatcagcttgtcgtcgtgcaggagttgaa

SEQ ID NO: 131623 - DNA, 75 bp, synthetic construct
  source 1..75: mol_type = other DNA
aaaccaaaattcattgattaatctggaagcacaaaataacaacctgacaaaaattaatatttctgaaagttataa

SEQ ID NO: 131624 - DNA, 75 bp, synthetic construct
  source 1..75: mol_type = other DNA
ggcacccctcctggaatgaaagttgaaaagtataaaactggatttgcaattggtgaaagtttacaagacattata

SEQ ID NO: 131625 - DNA, 75 bp, synthetic construct
  source 1..75: mol_type = other DNA
gaacccactttgcttgtactgctctgatgcaaccctttttgcaaaagcagcaggaaaaatgtctggagcaggctt

SEQ ID NO: 131626 - DNA, 75 bp, synthetic construct
  source 1..75: mol_type = other DNA
agtcgcggcttatgccgatgatacagagccatatgtatacacaagctacgatgagtctatagagaaatatcgaat

SEQ ID NO: 131627 - DNA, 75 bp, synthetic construct
  source 1..75: mol_type = other DNA
atgtccctggagaaagatcattccatatcgttaatttatcagaagtatttgtattacttccactctgatggtgat

SEQ ID NO: 131628 - DNA, 75 bp, synthetic construct
  source 1..75: mol_type = other DNA
atctaatcagcacagcggtgagtggcaggcgtttatcaattcgctgaccacgaatctgacggcatttttccgtga

SEQ ID NO: 131629 - DNA, 75 bp, synthetic construct
  source 1..75: mol_type = other DNA
acgcagacggtgaagtcggcggcatcaatgacaaactgcgcggttgcctggtgttcagctatgaccgcagcggct

SEQ ID NO: 131630 - DNA, 75 bp, synthetic construct
  source 1..75: mol_type = other DNA
agttctctacagtcggcaaaagaaaagaccacggtattgcaagatttacgtaaaatttgcacgccacaggcgtca

SEQ ID NO: 131631 - DNA, 75 bp, synthetic construct
  source 1..75: mol_type = other DNA
atgaaaaaactgttactgatctgtttgccggtccttctcaccggctgtagcgcgttcaatcaactggttgagcgc

SEQ ID NO: 131632 - DNA, 75 bp, synthetic construct
  source 1..75: mol_type = other DNA
atggctcacacagttacgcgccttttgccagaggcatttgaacgactggcagcaatcaaaaccaaatatcccgat

SEQ ID NO: 131633 - DNA, 75 bp, synthetic construct
  source 1..75: mol_type = other DNA
atgactcacacagttacgcgccttttgccagaggcatttgaacgactggcagcaatcaaagccaaatatcccgat

SEQ ID NO: 131634 - DNA, 75 bp, synthetic construct
  source 1..75: mol_type = other DNA
actcaaagcacagtccgctgtaacaggttgctcaatgattcaggtgttaagcgctaaggttcatcaactggcgga

SEQ ID NO: 131635 - DNA, 75 bp, synthetic construct
  source 1..75: mol_type = other DNA
ctgattttgcaggcagtggtcgtgaatatctttttgggctggctgtgacggatattccggcaagtctgggaacgg

SEQ ID NO: 131636 - DNA, 75 bp, synthetic construct
  source 1..75: mol_type = other DNA
actcaaagcacagtccgcagtagcaggctgctcaatgattcaggtcttgagcgataaggtttgcaagcttgctga

SEQ ID NO: 131637 - DNA, 75 bp, synthetic construct
  source 1..75: mol_type = other DNA
actcaaagcacagtccgcagtagcaggctgctcaatgattcaggtgttgagcgctaaggtccatcaattagcgga

SEQ ID NO: 131638 - DNA, 75 bp, synthetic construct
  source 1..75: mol_type = other DNA
tatgcgtatgcgccgaatccgctgtcatggatcgacccgctaggattaacaggcacaccccttgaaaaaggtgct

SEQ ID NO: 131639 - DNA, 75 bp, synthetic construct
  source 1..75: mol_type = other DNA
cgcaaagaagtgattatcccgaacaaagcgttcgtaaccgagcgtctgatcaactggtcgttaaccgacaccacc

SEQ ID NO: 131640 - DNA, 75 bp, synthetic construct
  source 1..75: mol_type = other DNA
tgtcgccaaactggaagagggtcatgcgaatgaagtcaacgacgaagtccgtgacgcattgttgcaagtagttga

SEQ ID NO: 131641 - DNA, 75 bp, synthetic construct
  source 1..75: mol_type = other DNA
catcgcatccagaacctcattatcatgaaggtcaaaagcctgatatttcacatcagggtgatgggcgagatataa

SEQ ID NO: 131642 - DNA, 75 bp, synthetic construct
  source 1..75: mol_type = other DNA
gcactatcgttatgacgaacacggccgggtggtggaaaagcagggccggagcggaacgcagagttaccgttatga

SEQ ID NO: 131643 - DNA, 75 bp, synthetic construct
  source 1..75: mol_type = other DNA
gaggggtatctggcgagctggcagtacgacgcggcgggaaacctgctggggaggcgtgcgggggaaagggccacg

SEQ ID NO: 131644 - DNA, 75 bp, synthetic construct
  source 1..75: mol_type = other DNA
ttcctttcatcaaaaaatcaacggctaaaagcccatctgaatatgaatcaatggttgttgaccaatgtaaatcta

SEQ ID NO: 131645 - DNA, 75 bp, synthetic construct
  source 1..75: mol_type = other DNA
ggaaaaacggcggctgattattcgttttcaagctcggcctcctgggtaggcgttgatgctactggtaaagtgaca

SEQ ID NO: 131646 - DNA, 75 bp, synthetic construct
  source 1..75: mol_type = other DNA
agaagcacaccagcgagaaaatcacctttgaatgctcacatttgtttaacattggatggaaagctggtgatttag

SEQ ID NO: 131647 - DNA, 75 bp, synthetic construct
  source 1..75: mol_type = other DNA
cgctgatgacgatcaacttaaagcgcctgaggcactgacccaactaaaaggactaaaaaaagatgccactcaggt

SEQ ID NO: 131648 - DNA, 75 bp, synthetic construct
  source 1..75: mol_type = other DNA
taagacagccatcagcgttgaggttatgcggacctttttatcagaacgacaactccgcgactggcgtgaattgcg

SEQ ID NO: 131649 - DNA, 75 bp, synthetic construct
  source 1..75: mol_type = other DNA
atagaacgtgatttcgctatgatgcactcaatgccattagccgagttggaaccggaagacctagaacttgattta

SEQ ID NO: 131650 - DNA, 75 bp, synthetic construct
  source 1..75: mol_type = other DNA
gccagaaactcaatgatattcgtgccgacgccagcgacaatagtatgagcaacgctttccgggcatttgccgcct

SEQ ID NO: 131651 - DNA, 75 bp, synthetic construct
  source 1..75: mol_type = other DNA
accagcaggcttatcgcggcgcactggcgcacatgatggaaggtcgctctccggacattgagcctttctacgatc

SEQ ID NO: 131652 - DNA, 75 bp, synthetic construct
  source 1..75: mol_type = other DNA
gtcagcggcaatcgcgcgggatgcggaagcgtatgcctacagccgcgcctatgatgatgttgtgccggaatatat

SEQ ID NO: 131653 - DNA, 75 bp, synthetic construct
  source 1..75: mol_type = other DNA
gtcactgtaagcacagtcacaagcgcaggtggaatgcaaacagtagatatatcgctagtggcaggcccagcagac

SEQ ID NO: 131654 - DNA, 75 bp, synthetic construct
  source 1..75: mol_type = other DNA
agtgacattcaaaaatgacggtgatagcaatactgtagaaatcacagcaaccccaagatcaggtggcgctattta

SEQ ID NO: 131655 - DNA, 75 bp, synthetic construct
  source 1..75: mol_type = other DNA
tctagtcccgcaaactcaagcgaacaatacgtagtttccctggcaacaggtgatcaaagcgtatttgaaaagctt

SEQ ID NO: 131656 - DNA, 75 bp, synthetic construct
  source 1..75: mol_type = other DNA
atgttcgtatgggatctgaattctaacttggtggagggaatgatctttatactgatcgctttatttaccattgat

SEQ ID NO: 131657 - DNA, 75 bp, synthetic construct
  source 1..75: mol_type = other DNA
cgttttatcgccctgagcacagcacaaccgcgcgtaattcacatcgaggccaccagcgaacaggaagcacgccag

SEQ ID NO: 131658 - DNA, 75 bp, synthetic construct
  source 1..75: mol_type = other DNA
gcgaagaaaacacgctgtttattcagaaatgcgaaaacaattttatctggcgttttatcgccctgagtacggcac

SEQ ID NO: 131659 - DNA, 75 bp, synthetic construct
  source 1..75: mol_type = other DNA
tttattgctagtttaatcacggtgtttctgttaccaacttacaacgatgaagacgtgaaatatggcgagaagcta

SEQ ID NO: 131660 - DNA, 75 bp, synthetic construct
  source 1..75: mol_type = other DNA
tgaagtcaggattggattttttcattaagaagaaaactattgaacaggaagtaaagaaaacgaatgtagaagggc

SEQ ID NO: 131661 - DNA, 75 bp, synthetic construct
  source 1..75: mol_type = other DNA
gttcagaaaactaacgccgaaggacaaatagaagtaaacaaagaagaaattgaaagagtatcatttcactggcgt

SEQ ID NO: 131662 - DNA, 75 bp, synthetic construct
  source 1..75: mol_type = other DNA
ggatgcaccaccacaactgcgcgtttcggctatcaatgccgccagcgaaaaattactcacccgtcttggcgtctg

SEQ ID NO: 131663 - DNA, 75 bp, synthetic construct
  source 1..75: mol_type = other DNA
cgcagcaacgcgaggaacgaacaccattgtcgaggaagcggataaaaagacaaccgatagcatgagagttaatta

SEQ ID NO: 131664 - DNA, 75 bp, synthetic construct
  source 1..75: mol_type = other DNA
taggcaagttaatgccgggcgaagaagaggtggctgagaaccctcgtgctcgtagttcagttctgcgtattgcag

SEQ ID NO: 131665 - DNA, 75 bp, synthetic construct
  source 1..75: mol_type = other DNA
tggtcgttgagcagttaaaacggcaattagcgattattcatgaagcgcagcgtgcccgtggcgtgccgctggatg

SEQ ID NO: 131666 - DNA, 75 bp, synthetic construct
  source 1..75: mol_type = other DNA
gatatcaccctgctagctcctgcagaattacagcaggtcgcctggggagagaacgaaaccttcctgacgctgaaa

SEQ ID NO: 131667 - DNA, 75 bp, synthetic construct
  source 1..75: mol_type = other DNA
gctatgagcgtagccgcaagcacagtgcggcgctgatgctggctggtatgcagggattccgcgatctgttttccg

SEQ ID NO: 131668 - DNA, 75 bp, synthetic construct
  source 1..75: mol_type = other DNA
attaaggcgttcccgcaaacgttgcaggatgaattcaagtcgatgaaaattacggtgaactgggaaaaagcctgg

SEQ ID NO: 131669 - DNA, 75 bp, synthetic construct
  source 1..75: mol_type = other DNA
atcagctaatgcagcaaaacattaaagtcaaaaactggcttgagcgggcgctgcaatcggaacgaaatattaaag

SEQ ID NO: 131670 - DNA, 75 bp, synthetic construct
  source 1..75: mol_type = other DNA
aagatgaatttaagtcgatgaaaatcacggtgaactgggaaaaagcctggcccgccgtttttatcgctttcctcg

SEQ ID NO: 131671 - DNA, 75 bp, synthetic construct
  source 1..75: mol_type = other DNA
cggcgtatcgcctggcgtcgcgcgctggcgcgtcggcagaatctggtgaaagaaggagcggaaggcgctgaaccg

SEQ ID NO: 131672 - DNA, 75 bp, synthetic construct
  source 1..75: mol_type = other DNA
gcctcgcgttgctgcctatccatttctggtctgtggtggcagaactttccccgctgcatctgatggatgatgtgc

SEQ ID NO: 131673 - DNA, 75 bp, synthetic construct
  source 1..75: mol_type = other DNA
cccgccgtattcatcgccttcctcgctggtttgccgctgctgttgattgccgggctgattcactggcgtttaggc

SEQ ID NO: 131674 - DNA, 75 bp, synthetic construct
  source 1..75: mol_type = other DNA
atggtgagcaaaatcgctcgccctgacgccagcagtgaaacattaattcgcgaagccctgcgcgccgcgttatga

SEQ ID NO: 131675 - DNA, 75 bp, synthetic construct
  source 1..75: mol_type = other DNA
tcattgaaaaacaacccccgctggtgttaattgaagtgggcggcgtaggctatgaagtgcatatgccgatgacct

SEQ ID NO: 131676 - DNA, 75 bp, synthetic construct
  source 1..75: mol_type = other DNA
ttaatcaaatttttgccggatgcggcgtgaacgccttatccggcctacaacgggcaattttacggcacccgttaa

SEQ ID NO: 131677 - DNA, 75 bp, synthetic construct
  source 1..75: mol_type = other DNA
catcattattgccgttggtgcgatgacggtgttcggatcgctgggcgtctcttgggataaactccagtggctggc

SEQ ID NO: 131678 - DNA, 75 bp, synthetic construct
  source 1..75: mol_type = other DNA
cctgctgttgtctcgtatcctttaccagcaacaacaaacgctgccctcggcggatgaactggaaaacatgaccaa

SEQ ID NO: 131679 - DNA, 75 bp, synthetic construct
  source 1..75: mol_type = other DNA
ggtggcgctgggctataaaccacaagaagcaagccgcatggtgagcaaaatcgctcgccctgacgccagcagtga

SEQ ID NO: 131680 - DNA, 75 bp, synthetic construct
  source 1..75: mol_type = other DNA
gaatctgagctatgtgaaaagtcagcgaactgcgagcatttcgggcgcgggaagccagcgtttcaacattgatga

SEQ ID NO: 131681 - DNA, 75 bp, synthetic construct
  source 1..75: mol_type = other DNA
cgccagttcgtggcagaacgtcctgaccagctgtgggtggcggattttacttacgtcagcacatggcagggctga

SEQ ID NO: 131682 - DNA, 75 bp, synthetic construct
  source 1..75: mol_type = other DNA
atgaacagtggaatctcaatggtcgtattctgttaggttttgatggtatgcgaaaactggataatggttatttcg

SEQ ID NO: 131683 - DNA, 75 bp, synthetic construct
  source 1..75: mol_type = other DNA
aagtggcttcagcctgcccgacagtgagttttataccccgtggcgggtgttcaactcccatggttgtaacggatg

SEQ ID NO: 131684 - DNA, 75 bp, synthetic construct
  source 1..75: mol_type = other DNA
cgctgtggcgtgtcgaggctgacacgctcaaaaaggtggttaaaaacgtaaaagtgataaccgtaaccgcaacgt

SEQ ID NO: 131685 - DNA, 75 bp, synthetic construct
  source 1..75: mol_type = other DNA
cagccggtggattttcgcaaagtcggttttcaccgttctgctggctacattcttggcgttgccccatatgaagct

SEQ ID NO: 131686 - DNA, 75 bp, synthetic construct
  source 1..75: mol_type = other DNA
ggctacattctgggtgttgacccgcgagaagctcccgtccggctagacctgtctgcacccagggttatccaggag

SEQ ID NO: 131687 - DNA, 75 bp, synthetic construct
  source 1..75: mol_type = other DNA
ttgccagaagtttattttttgcagttatcgtcattgctatatttcttatcggttgggtattggtgttgtattctt

SEQ ID NO: 131688 - DNA, 75 bp, synthetic construct
  source 1..75: mol_type = other DNA
cctcttttgctactgtcagcagcgattgcgctggcggttacaatttcgataagatcttatgggtcgatttttatc

SEQ ID NO: 131689 - DNA, 75 bp, synthetic construct
  source 1..75: mol_type = other DNA
tggtacaaaccccagtttaagagggaatatcagacgatccactatgagaatacttggtattacgttcttgcacgc

SEQ ID NO: 131690 - DNA, 75 bp, synthetic construct
  source 1..75: mol_type = other DNA
gaatcacattccctggggagcggaagactttaccggcagttttccgctacaggagcgggttaatctgctgcgtca

SEQ ID NO: 131691 - DNA, 75 bp, synthetic construct
  source 1..75: mol_type = other DNA
aataaccagccggtggattttcgtcaggtcggtttccatcgttcagctggttacattctgggcgttgacccacgg

SEQ ID NO: 131692 - DNA, 75 bp, synthetic construct
  source 1..75: mol_type = other DNA
gtgactgtatgtcttattgataaacgtcgacgtgggcaacaaataccatctgttgaaatgccgaatcacacatgg

SEQ ID NO: 131693 - DNA, 75 bp, synthetic construct
  source 1..75: mol_type = other DNA
ccgagtacggcggcaagagccagctaaacctcggtcatctggtggacgccgggaaacagcagcgcggggaaggct

SEQ ID NO: 131694 - DNA, 75 bp, synthetic construct
  source 1..75: mol_type = other DNA
atgaaacaccctttagaaaccttgaccaccgcagcaggcattttgctgatggctttcctctcttgcctgctgctg

SEQ ID NO: 131695 - DNA, 75 bp, synthetic construct
  source 1..75: mol_type = other DNA
gccgtggactcatccgatttttgtcttgaatgcctgctgaatgccatcaaaaacgatgacgctgttgttgaagga

SEQ ID NO: 131696 - DNA, 75 bp, synthetic construct
  source 1..75: mol_type = other DNA
gaattaagcctgcctgctgcaaatctcaagctggaaaataagctggcgattatggagcagtatgttggtaaaaaa

SEQ ID NO: 131697 - DNA, 75 bp, synthetic construct
  source 1..75: mol_type = other DNA
gcgcatttgattccgatgtcagagcatcccgttgatctgatggcgattgacgatcaggggcatgaagtttacggc

SEQ ID NO: 131698 - DNA, 75 bp, synthetic construct
  source 1..75: mol_type = other DNA
ccgtatgcgggagacacctacggcctgcacctgccgctgctggcgggaacggaggtcagcatcgcctttgaggaa

SEQ ID NO: 131699 - DNA, 75 bp, synthetic construct
  source 1..75: mol_type = other DNA
tgattttgatgcacgcgccgaaaggtgtggcggtcgccagcggcgagcacctgcaactggcagcggtgaaaaacc

SEQ ID NO: 131700 - DNA, 75 bp, synthetic construct
  source 1..75: mol_type = other DNA
attccttatgcaaacaccaaatatatagcaagattaccagatggtacaacaaaagacggcattacaagcgatgat

SEQ ID NO: 131701 - DNA, 75 bp, synthetic construct
  source 1..75: mol_type = other DNA
cgccagcggcgagcacctgcaactggcagcggtgaaaaacctccagataaatgcgggaaacaacgccgatatcgg

SEQ ID NO: 131702 - DNA, 75 bp, synthetic construct
  source 1..75: mol_type = other DNA
cgcagtatcggtacaggcgcagcacgatctgatggagttactggcgaagaagtcgatagagatcgtcagtacgga

SEQ ID NO: 131703 - DNA, 75 bp, synthetic construct
  source 1..75: mol_type = other DNA
gatagagatcgtcagtaccgaagatgagatcaggatttcagcgaagaaaaaaataacgattaatggcggtggaag

SEQ ID NO: 131704 - DNA, 75 bp, synthetic construct
  source 1..75: mol_type = other DNA
aaaatctgccctctccgacggtcatgtcaggcgataaattcgatactgtctgggataccgtctgcgaatggggca

SEQ ID NO: 131705 - DNA, 75 bp, synthetic construct
  source 1..75: mol_type = other DNA
aaatcttcctcggcagggatgaccatcgtcagctcctgagcgaacaagtcagcgccttccatactctggcggcat

SEQ ID NO: 131706 - DNA, 75 bp, synthetic construct
  source 1..75: mol_type = other DNA
aaatcttcctcggcagggatgaccatcgtcagctcctgagcgaacaagtcagcgccttccatgctctggcagcat

SEQ ID NO: 131707 - DNA, 75 bp, synthetic construct
  source 1..75: mol_type = other DNA
tgacactgcgtgccattcagggatttgccgtcggcggcgaatggggaggcgcggcgttgctttccgttgaaagtg

SEQ ID NO: 131708 - DNA, 75 bp, synthetic construct
  source 1..75: mol_type = other DNA
cgatactcagctacttcgaaccggataaccgcgactgggtgacgggtgagatcggcgcacctccccttgatgtat

SEQ ID NO: 131709 - DNA, 75 bp, synthetic construct
  source 1..75: mol_type = other DNA
cggtttaccgggacagtgtgccgttgtgcgagatagtggcggcgctgataacgcaataccaggtgaatacatgcg

SEQ ID NO: 131710 - DNA, 75 bp, synthetic construct
  source 1..75: mol_type = other DNA
ggccggacgtaccatgaggacaaccgttcgccgggggacctgccgggaacgaagacgcagatgacgatacggtcg

SEQ ID NO: 131711 - DNA, 75 bp, synthetic construct
  source 1..75: mol_type = other DNA
attggtgcgccgccgttcgatgtgtcgggtgtggcctacctgcttcatggcatggtgtcgttcgataagcgtcac

SEQ ID NO: 131712 - DNA, 75 bp, synthetic construct
  source 1..75: mol_type = other DNA
ttttacagacgatgacgggataccgtattcagaaacccgctacattgccttctttgaggatggcacgcagacccg

SEQ ID NO: 131713 - DNA, 75 bp, synthetic construct
  source 1..75: mol_type = other DNA
atgagccatgtctcgttacaagaatttttgaaaacggagccggacggtacgctggaggtggtagccgaacaatac

SEQ ID NO: 131714 - DNA, 75 bp, synthetic construct
  source 1..75: mol_type = other DNA
agcaaaaaggaaggtggtcatgaccagaaagtgacggtagcgaacgatcagcatctcacgataaaaaatgaccgg

SEQ ID NO: 131715 - DNA, 75 bp, synthetic construct
  source 1..75: mol_type = other DNA
gggcggggccggggttcggtaacctggcgataccgcgtgtgggtcaggaagtgatagtggacttcctgaacgggg

SEQ ID NO: 131716 - DNA, 75 bp, synthetic construct
  source 1..75: mol_type = other DNA
ccgcgatgtggtcaaaaaatgcctgtttcagaatgcatttttgatggtgaaggctcatgccaccttacaaccacg

SEQ ID NO: 131717 - DNA, 75 bp, synthetic construct
  source 1..75: mol_type = other DNA
gatatggaagccatgattaagggccttgaatcaaaaggattcatgtatcaagggagcattcaatcggcggatgtc

SEQ ID NO: 131718 - DNA, 75 bp, synthetic construct
  source 1..75: mol_type = other DNA
aaccagaaaatgacctttctgaaagaaaaggaagattatcaaaatctgaagatggaatggacggttgcaaccaac

SEQ ID NO: 131719 - DNA, 75 bp, synthetic construct
  source 1..75: mol_type = other DNA
caatctgcaaaaagcaaaaatgcgcggtgaaacctcggaatgcatgctgttgtgtgcagaaactgatgacggcag

SEQ ID NO: 131720 - DNA, 75 bp, synthetic construct
  source 1..75: mol_type = other DNA
atctgcagagtgcgctgagcctgacgtcgcttcagtccaaatcaagtgtcagtaataacccaggaagctattcac

SEQ ID NO: 131721 - DNA, 75 bp, synthetic construct
  source 1..75: mol_type = other DNA
atgcctcattcaggggcgtccgctttgatgtggttaatacccgtgacagcgccagtcgcgacattgcgacgtatg

SEQ ID NO: 131722 - DNA, 75 bp, synthetic construct
  source 1..75: mol_type = other DNA
gcttttctgaagattattgcgctgcgactgtgcgagttgctgacgatgtatatcgttaccgcctttgcgcttaac

SEQ ID NO: 131723 - DNA, 75 bp, synthetic construct
  source 1..75: mol_type = other DNA
tggtggtgtgtgtgcaacaaccgatgtttaccgaaatgtttggtgccagttatcgctatagtggtgctggagtcg

SEQ ID NO: 131724 - DNA, 75 bp, synthetic construct
  source 1..75: mol_type = other DNA
tattcaacccagaatatggggttaccgcgcgaacttttcctcaatattggtttgctggtaggtggattaagctgc

SEQ ID NO: 131725 - DNA, 75 bp, synthetic construct
  source 1..75: mol_type = other DNA
gcacattaacggtgcaaagcctgaaaaccagaaaatgacctttctgaaagaaaaggaagattatcaaaatctgaa

SEQ ID NO: 131726 - DNA, 75 bp, synthetic construct
  source 1..75: mol_type = other DNA
tttagtgaggggacaagtgatttggttgaaatgctaatgctccttgccttaacagcagctattgttactattggc

SEQ ID NO: 131727 - DNA, 75 bp, synthetic construct
  source 1..75: mol_type = other DNA
atgctgaccgtctggatgatgggcatcgcgacagccttgattggtattcttccttcattctcgaccattgggtgg

SEQ ID NO: 131728 - DNA, 75 bp, synthetic construct
  source 1..75: mol_type = other DNA
gcagcgttacccgcgcacaccgggcaacatggcggcggtatttaaatatatcgcctcactggcggatgaactgcg

SEQ ID NO: 131729 - DNA, 75 bp, synthetic construct
  source 1..75: mol_type = other DNA
gcagcgttacccgcgcacaccgggcaacatggcggcagtgtttaaatatatcgcctcactggcggatgaactgcg

SEQ ID NO: 131730 - DNA, 75 bp, synthetic construct
  source 1..75: mol_type = other DNA
gtggtttcgaatcagagatctgttgaagatggaaggggcaacagcagtcgtggagtggcgaaacgagaaaagttt

SEQ ID NO: 131731 - DNA, 75 bp, synthetic construct
  source 1..75: mol_type = other DNA
ctgagctactttcatgtcgatcacccttccggtgtttctccggatgtcagggtgatgctggacggcgttcacgca

SEQ ID NO: 131732 - DNA, 75 bp, synthetic construct
  source 1..75: mol_type = other DNA
ggcctgctgctcgctgcacctcatctgctaaaaagtgatgactgggggatttcttttacgcgaaacagctggctg

SEQ ID NO: 131733 - DNA, 75 bp, synthetic construct
  source 1..75: mol_type = other DNA
cagtttgtgatctggcaatacaatgcatacaaacacggaatgaaggaacatcaacttaatgcgcagttgacaaag

SEQ ID NO: 131734 - DNA, 75 bp, synthetic construct
  source 1..75: mol_type = other DNA
atcgacgccacgttgtatgtcacgcttgaaccatgtgtaatgtgttgccggagcgatgatccacagtcgcattgg

SEQ ID NO: 131735 - DNA, 75 bp, synthetic construct
  source 1..75: mol_type = other DNA
aaatcatggccctgcggcagggcggtctggtgatgcaaaattatcgtctgatcgacgccacgttgtatgtcacgc

SEQ ID NO: 131736 - DNA, 75 bp, synthetic construct
  source 1..75: mol_type = other DNA
aatactggatgcgtcatgcaatgacgctggcgaagcgtgcctgggatgagcgggaagtgccggtcggcgcggtat

SEQ ID NO: 131737 - DNA, 75 bp, synthetic construct
  source 1..75: mol_type = other DNA
gtggatcacttttcatccgtcgttgacaaatggatcgtggatgttgatatcaaaggtttctttgacaatatcccc

SEQ ID NO: 131738 - DNA, 75 bp, synthetic construct
  source 1..75: mol_type = other DNA
cagacaggcagatgcaaagaaattgctgaagcagaaaatgcaagggcggcacgctctccggagatccaccacagg

SEQ ID NO: 131739 - DNA, 75 bp, synthetic construct
  source 1..75: mol_type = other DNA
aaatcatggctctgcggcagggcggtcttgtgatgcaaaattatcgtctgatcaacgccacattgtatgtcacgc

SEQ ID NO: 131740 - DNA, 75 bp, synthetic construct
  source 1..75: mol_type = other DNA
gaatacggtgaatacctgaccggcgtgcgaattgaagggctcacctattcactattctcatttacccgtaaatgc

SEQ ID NO: 131741 - DNA, 75 bp, synthetic construct
  source 1..75: mol_type = other DNA
gatatatcgccaatcaggcgcaaacgccggaagttattatgggcatccgcacatcaattgccttagtaccttgcg

SEQ ID NO: 131742 - DNA, 75 bp, synthetic construct
  source 1..75: mol_type = other DNA
aaatcagactggtcattgccggaaggtcgcattctgactggagcagttatcgtattgacagcgatttcctgaaag

SEQ ID NO: 131743 - DNA, 75 bp, synthetic construct
  source 1..75: mol_type = other DNA
ttgtctgtctggcttttctgataggaccgagcattaaaaactccagcccggaggagatggtgtcggtgtaccatt

SEQ ID NO: 131744 - DNA, 75 bp, synthetic construct
  source 1..75: mol_type = other DNA
gcgttaccatgactgtgatgtgggcgctggaagccgataccgtagaatatggtgaatacctgaccggcgtgcgga

SEQ ID NO: 131745 - DNA, 75 bp, synthetic construct
  source 1..75: mol_type = other DNA
atttctggacgattgtgctggcgattgccggaatggtgctttacttcatctgcttcaaatcgacgcgtgagaatg

SEQ ID NO: 131746 - DNA, 75 bp, synthetic construct
  source 1..75: mol_type = other DNA
gcgagcgcgcggacgtgtggaagcgcatgagttattacaggcaggggtgacgcagttttcccgtgaaacattctc

SEQ ID NO: 131747 - DNA, 75 bp, synthetic construct
  source 1..75: mol_type = other DNA
cagtgcgttagagctggggcgcaagacgctggtcacgcttggcatgcatccgcatcaggcacagcgggcgcaact

SEQ ID NO: 131748 - DNA, 75 bp, synthetic construct
  source 1..75: mol_type = other DNA
tgcaactcagctaccacaaggcattgaagtcacattggtggttgatgattttgcgcaattgacgcgactattttt

SEQ ID NO: 131749 - DNA, 75 bp, synthetic construct
  source 1..75: mol_type = other DNA
atatgggcgttcagtgattttgtccgcgatcatcgaggtgtgtatgatccggaagcccgttacctcgccggtaat

SEQ ID NO: 131750 - DNA, 75 bp, synthetic construct
  source 1..75: mol_type = other DNA
aagccacaccataacgccaaagccgaaacgctccgcgagaagatcgcagataagcgtaaagaactgggcgtgtaa

SEQ ID NO: 131751 - DNA, 75 bp, synthetic construct
  source 1..75: mol_type = other DNA
ctaggcaagaagccgggcaataaaacggctgaaactctggcaaaagagatcgccgaaaagcgtgccgaactgggc

SEQ ID NO: 131752 - DNA, 75 bp, synthetic construct
  source 1..75: mol_type = other DNA
cacgccgaacgcaccggcggtgtccatgccctgttacatgacgtgctgaccgaagacgaaatcaacaaactgatc

SEQ ID NO: 131753 - DNA, 75 bp, synthetic construct
  source 1..75: mol_type = other DNA
gacgttaagcggtaaaaccggcgcacacgccgaacgcaccggcggtgtccatgccctgttacatgacgtgctgac

SEQ ID NO: 131754 - DNA, 75 bp, synthetic construct
  source 1..75: mol_type = other DNA
aaagcaggaaacagcttgagaccatcaccagaaagggagagcaggctcaggaaacgctgaatgcgcaggttattg

SEQ ID NO: 131755 - DNA, 75 bp, synthetic construct
  source 1..75: mol_type = other DNA
gaacaggaagcggaccgcattggtattcaggtgctgcaacgctcgggattcgatccgcaggcgatgccgaccttc

SEQ ID NO: 131756 - DNA, 75 bp, synthetic construct
  source 1..75: mol_type = other DNA
agctacgcggcagcgcgccgttaattaatgacccgctattaacgcaatatattaattcgctggggatgcgcctgg

SEQ ID NO: 131757 - DNA, 75 bp, synthetic construct
  source 1..75: mol_type = other DNA
caccagcgatttactggatgaatgggcgaaaggtaacgttcgccagcagcgcgcggcgcagtatggtcgtgcttt

SEQ ID NO: 131758 - DNA, 75 bp, synthetic construct
  source 1..75: mol_type = other DNA
gaaaaagtatccccggaggggcagaaacaggaaaaaacggctcagtcaaataaggcagaagaggccaggaaatca

SEQ ID NO: 131759 - DNA, 75 bp, synthetic construct
  source 1..75: mol_type = other DNA
atgacgacactctggatgcaacgacaccattgtttccgtggcatcctgtaccactaactgtcttgctccgatggc

SEQ ID NO: 131760 - DNA, 75 bp, synthetic construct
  source 1..75: mol_type = other DNA
gtcattgatgcggtcatcgtcgggccaaaagtggatgtctcggcggtgaaagagcggattgtgattcaggaggtg

SEQ ID NO: 131761 - DNA, 75 bp, synthetic construct
  source 1..75: mol_type = other DNA
gcttccctgaaagcggaacttgatgaaagcaggaaacagcttgagaccatcaccagaaagggagagcaggctcag

SEQ ID NO: 131762 - DNA, 75 bp, synthetic construct
  source 1..75: mol_type = other DNA
ggaaggtgttactgaatgaaagcatgctggattctgcgctgcaaaaagcagaagaggtggcacagaaagcccgcc

SEQ ID NO: 131763 - DNA, 75 bp, synthetic construct
  source 1..75: mol_type = other DNA
atgctcggggtaccgtcgtctcccggcctctgggcgactatccaccattatttcgttctgcactattgttgctga

SEQ ID NO: 131764 - DNA, 75 bp, synthetic construct
  source 1..75: mol_type = other DNA
gtgccttacggctatttaattactgtctgcttgccgcattattatgcgctattgtcgggggcgattggttcggtc

SEQ ID NO: 131765 - DNA, 75 bp, synthetic construct
  source 1..75: mol_type = other DNA
gcagatgatgcctgctatcgcgcttattgtgtcggttattgcctcggtagtcattggcggagcggggagtctggc

SEQ ID NO: 131766 - DNA, 75 bp, synthetic construct
  source 1..75: mol_type = other DNA
atgtaccgggagaagccattagctgaaatcattgctgcgttacaggcaatagatgacaggcgcgagaagacatca

SEQ ID NO: 131767 - DNA, 75 bp, synthetic construct
  source 1..75: mol_type = other DNA
gctggcgaaacgtgcctgggatgagcgggaagtgccggtcggcgcggtattagtgcataacaatcgggtaatcgg

SEQ ID NO: 131768 - DNA, 75 bp, synthetic construct
  source 1..75: mol_type = other DNA
atgaaattttatgaattatcttctgagtcccgatctcaggccaaaatcacactgggtcagttgattgtggctcgg

SEQ ID NO: 131769 - DNA, 75 bp, synthetic construct
  source 1..75: mol_type = other DNA
tttgatggacagcacaacgcagagaacaacgctcgttatatcgcagctttcaaccctgaagtagtgcaggcgctg

SEQ ID NO: 131770 - DNA, 75 bp, synthetic construct
  source 1..75: mol_type = other DNA
atgcaatatggttatgcgagggtgtcaacttttgaccagaatttggaattacaactggaggcgctcaggagttta

SEQ ID NO: 131771 - DNA, 75 bp, synthetic construct
  source 1..75: mol_type = other DNA
caatcaaggtcgtctggatgaaatacataaagagatagcctatcgagaaagccaaatcgaaaaattgaaggttat

SEQ ID NO: 131772 - DNA, 75 bp, synthetic construct
  source 1..75: mol_type = other DNA
caggcggggatggcggcgctgaccggtacactggcgggaacgcgccaggggatgatcagtttcacccagcaaaat

SEQ ID NO: 131773 - DNA, 75 bp, synthetic construct
  source 1..75: mol_type = other DNA
cgcttgctcgtgcgacgagcgcaaacttccccactctggctttgtgggcacgcaaatataacgcctgcattattt

SEQ ID NO: 131774 - DNA, 75 bp, synthetic construct
  source 1..75: mol_type = other DNA
cactggcgacggtagccgttccagccggccagagccttttgatgccggattcatccatcaccacaccttcgtcga

SEQ ID NO: 131775 - DNA, 75 bp, synthetic construct
  source 1..75: mol_type = other DNA
cgtaactggacttatgcccataatggacaactgacgggctacaaatcactggaaaccggcaacttccgcccggtc

SEQ ID NO: 131776 - DNA, 75 bp, synthetic construct
  source 1..75: mol_type = other DNA
atctggaagaagcgtatcgggttggcgaattactgttcccacatctggatgttgccattccacagattccccaac

SEQ ID NO: 131777 - DNA, 75 bp, synthetic construct
  source 1..75: mol_type = other DNA
ccgcgggagcttaaggaatcgaaccttatcctgaattcattactgcttacccctctgggagaatctcatctggtt

SEQ ID NO: 131778 - DNA, 75 bp, synthetic construct
  source 1..75: mol_type = other DNA
atcgttgaattacacttggactcaaagtgaacaacgtgatggtgataacaaaggtgcaccactgagctatactcc

SEQ ID NO: 131779 - DNA, 75 bp, synthetic construct
  source 1..75: mol_type = other DNA
gtatggctctgatgcaatgggcggtgtggtgaatatcattaccaaaaagaatgcagacaaatggcgttcttccat

SEQ ID NO: 131780 - DNA, 75 bp, synthetic construct
  source 1..75: mol_type = other DNA
ctctgttgtcagaggatgtgactctgtctctgaattatacctggacgcagagtgaacaacgggatggggataata

SEQ ID NO: 131781 - DNA, 75 bp, synthetic construct
  source 1..75: mol_type = other DNA
acgatgatggcaacgccagtgaagaagcggttattgcgcgttgccccctggtttttaccggtgggcatcgtggcg

SEQ ID NO: 131782 - DNA, 75 bp, synthetic construct
  source 1..75: mol_type = other DNA
catgaacacggggtttatgccacctctggccgccatcgaacgtattgagattatcaggggccccatgtccactct

SEQ ID NO: 131783 - DNA, 75 bp, synthetic construct
  source 1..75: mol_type = other DNA
ccccaacctgaagccggaagagagcgtcagttatgaggctggggtgtattacgataaccccgccggtctgaatgc

SEQ ID NO: 131784 - DNA, 75 bp, synthetic construct
  source 1..75: mol_type = other DNA
actcgccaagttattcgataacgaaaaagacatacaggccattttgacggccaaaacgacgcaggacattttgtc

SEQ ID NO: 131785 - DNA, 75 bp, synthetic construct
  source 1..75: mol_type = other DNA
tgaatatctgaaagcctggacggtactggatgcgggcatgtcgtggaaagtgacggatgcactgacgctgaatgc

SEQ ID NO: 131786 - DNA, 75 bp, synthetic construct
  source 1..75: mol_type = other DNA
gaagactacggaacaagatatgctctggtttgatatggataccactcgacagcgttatgataaccgggatggtca

SEQ ID NO: 131787 - DNA, 75 bp, synthetic construct
  source 1..75: mol_type = other DNA
gaaggctacggagcaggatgtgctctggtttgatatggataccacccgacagcgttacgataaccaggatggtca

SEQ ID NO: 131788 - DNA, 75 bp, synthetic construct
  source 1..75: mol_type = other DNA
cggcattgcataaccttgcagtggcgcttgagcattacaatgaaaaccatccgcatagtgcgttgggttatcgct

SEQ ID NO: 131789 - DNA, 75 bp, synthetic construct
  source 1..75: mol_type = other DNA
atggcaatcagtagccctcagagtaatggaatggcagaacggtttgtgaaaacgatgaaggaagactacatcgcg

SEQ ID NO: 131790 - DNA, 75 bp, synthetic construct
  source 1..75: mol_type = other DNA
ctcgaaaaattactcgatcaggcgcgttactcttcgcgtccgccggaaattttattgactcacccgttgccggaa

SEQ ID NO: 131791 - DNA, 75 bp, synthetic construct
  source 1..75: mol_type = other DNA
ttcttaattatgatgagttaaacgaaaaggggctggcaaaactcgtcaaagaaatcggtaaaggaggctacaaga

SEQ ID NO: 131792 - DNA, 75 bp, synthetic construct
  source 1..75: mol_type = other DNA
atgttgggacttgaaccgaagaacacggcggtgcggagtccggagagtaacggaatagcagagagcttcgtgaaa

SEQ ID NO: 131793 - DNA, 75 bp, synthetic construct
  source 1..75: mol_type = other DNA
cgatgaaggaagactacatcgcgttcatgccgaaaccgaatgtaagaacggcattgcgtaaccttgccgtggcga

SEQ ID NO: 131794 - DNA, 75 bp, synthetic construct
  source 1..75: mol_type = other DNA
agtaaaacagcagaatacagtgcagtagccgggcctttagccaaacaaatggcagagcaatggtgtaaaaaatac

SEQ ID NO: 131795 - DNA, 75 bp, synthetic construct
  source 1..75: mol_type = other DNA
atggacttttgcaagagggagggcattccattacggcctgttggaactcagtttattggtaaaactgacttttgc

SEQ ID NO: 131796 - DNA, 75 bp, synthetic construct
  source 1..75: mol_type = other DNA
cgctcgcggctatgttgggatgcgtatctgttaatactgccaatgcaactgcgttacctgcacaattcagggcag

SEQ ID NO: 131797 - DNA, 75 bp, synthetic construct
  source 1..75: mol_type = other DNA
attaattcgctgggtatgcgtctggtttcgcatgccaattcagttaagacgccgttccatttctttctgatcaat

SEQ ID NO: 131798 - DNA, 75 bp, synthetic construct
  source 1..75: mol_type = other DNA
acagcaacggctgggatttgctggcacaggcggaagccgcgctaaataaccgcgatcaggagctggctgcgcgag

SEQ ID NO: 131799 - DNA, 75 bp, synthetic construct
  source 1..75: mol_type = other DNA
acagcaacggctgggatttactggcacaggcggaagccgcgctaaataaccgcgatcaggaactggctgcgcgag

SEQ ID NO: 131800 - DNA, 75 bp, synthetic construct
  source 1..75: mol_type = other DNA
atgataacgacattatttgttgaatcagatgaaccccttgtgtgtgccgccggaatgccggtctgtggcggaacg

SEQ ID NO: 131801 - DNA, 75 bp, synthetic construct
  source 1..75: mol_type = other DNA
aaagtgaacgtcaacgccgcgaaagccgaagcgatgggcgtggaactgtctgatatcaaccagaccctctctacc

SEQ ID NO: 131802 - DNA, 75 bp, synthetic construct
  source 1..75: mol_type = other DNA
cctctttcttaccggaagaggatcagggggtctttatgaccaccgcgcagttaccgtcaggttccaccatggtta

SEQ ID NO: 131803 - DNA, 75 bp, synthetic construct
  source 1..75: mol_type = other DNA
attcagcattagcgcaggaactgctcgatcagtgtgcacaacattccgaacttcgattcgaattagtcaaccttc

SEQ ID NO: 131804 - DNA, 75 bp, synthetic construct
  source 1..75: mol_type = other DNA
tagaacctaaagacttggtttcggcaatcatggcttatgtactcagtaataggcgcgatttttgggctctagatg

SEQ ID NO: 131805 - DNA, 75 bp, synthetic construct
  source 1..75: mol_type = other DNA
ctgaccggcgtttatttcggggatttgcgcggttatccctggcattcactggatgacgcatttccgcctgatatg

SEQ ID NO: 131806 - DNA, 75 bp, synthetic construct
  source 1..75: mol_type = other DNA
gtgtagttttgtccgttgatgctcttaaattatcacgccagtctccattaggtgttggcattggtggtggtggcg

SEQ ID NO: 131807 - DNA, 75 bp, synthetic construct
  source 1..75: mol_type = other DNA
tgatatttacctgaatcataaatacacgctggaagatctgatggcctccgctgacccctacacgctgatttttcc

SEQ ID NO: 131808 - DNA, 75 bp, synthetic construct
  source 1..75: mol_type = other DNA
gttccggtgaggcgcaatgttgcgggggctttatccctggtggcattggttgctggagagagaaaacccccgtac

SEQ ID NO: 131809 - DNA, 75 bp, synthetic construct
  source 1..75: mol_type = other DNA
cagctttttggttccgagtacgccatgcgtatctggctggatccgcaaaaactcaataaatacaaccttgttcct

SEQ ID NO: 131810 - DNA, 75 bp, synthetic construct
  source 1..75: mol_type = other DNA
cagtacgatatcgcggactatgtagcgtctaatatcaaagacccgctaagccgtaccgcgggcgttggtagcgta

SEQ ID NO: 131811 - DNA, 75 bp, synthetic construct
  source 1..75: mol_type = other DNA
aaatttcaattcaggaagttttcaaaacgctggttgaggcgatcatcctcgtcttcctggtcatgtatctgtttt

SEQ ID NO: 131812 - DNA, 75 bp, synthetic construct
  source 1..75: mol_type = other DNA
cgaacagctgtatcttaatgagttaggatatgtttatggtaatgaagaaaaaacaaatgaaattgtaaaaaaaca

SEQ ID NO: 131813 - DNA, 75 bp, synthetic construct
  source 1..75: mol_type = other DNA
attgatttgggagaagttggttgtatatgtcaatgattttaatttaagtaatcaagaaaaatcgcgcttaatact

SEQ ID NO: 131814 - DNA, 75 bp, synthetic construct
  source 1..75: mol_type = other DNA
acaggaattgatttgggataagttggttgcgtatgtcaatgattttaacttaagcaatcaagaaaaatcacgctt

SEQ ID NO: 131815 - DNA, 75 bp, synthetic construct
  source 1..75: mol_type = other DNA
atgactttacttaacgtctccggcctttcccatcactatgcgcacggtggatttagcggtaagcaccagcatcag

SEQ ID NO: 131816 - DNA, 75 bp, synthetic construct
  source 1..75: mol_type = other DNA
tttggcaccgcctgcctgttcatcacccacgacttacgcctggtggaacgcttctgtcagcgggtgatggtgatg

SEQ ID NO: 131817 - DNA, 75 bp, synthetic construct
  source 1..75: mol_type = other DNA
aacggacaaatcgtcgaaacccaggtggtgggagataaattaaccttttcctctgacgccggacgtgtgctacaa

SEQ ID NO: 131818 - DNA, 75 bp, synthetic construct
  source 1..75: mol_type = other DNA
atgataacgaccttatttgttgaatcagatgaacccttggtatgtgccgccggaatgccgctctgtggcggaaca

SEQ ID NO: 131819 - DNA, 75 bp, synthetic construct
  source 1..75: mol_type = other DNA
gccttgaagatgaggacggacaggtgacgcactggtgtcatatttcggctttaccggaattacgggaggtgaatg

SEQ ID NO: 131820 - DNA, 75 bp, synthetic construct
  source 1..75: mol_type = other DNA
cggaatgccggtctgtggcggaacgctgaccggtgtttatttcggggatttgcgcggttatccctggcattcact

SEQ ID NO: 131821 - DNA, 75 bp, synthetic construct
  source 1..75: mol_type = other DNA
cagtagctatttatgttgatactggctatgagccagtaccgtcggctacagcaatgcttgataacctgctcgctg

SEQ ID NO: 131822 - DNA, 75 bp, synthetic construct
  source 1..75: mol_type = other DNA
aagatgatgccaggcggatcttggctgataaatttcgctggatttggcgtcatggaggaataaggtcaaaattaa

SEQ ID NO: 131823 - DNA, 75 bp, synthetic construct
  source 1..75: mol_type = other DNA
gcaaagggtatccgcctttggtctgtgggggatgatttggataaggtcacaatgcaggtttcagcgattcgcttc

SEQ ID NO: 131824 - DNA, 75 bp, synthetic construct
  source 1..75: mol_type = other DNA
ttttaatcgccaagtcatttctcgatttctttacggcgatgatcttcgcctgctcgctgggtattgcggtgtcgg

SEQ ID NO: 131825 - DNA, 75 bp, synthetic construct
  source 1..75: mol_type = other DNA
acctgcagagtgcgctgagtctgacgtcgtttcagtccaaatcaagtgtcagtaataatccaggaagctattcac

SEQ ID NO: 131826 - DNA, 75 bp, synthetic construct
  source 1..75: mol_type = other DNA
gaccgggaaaaaaacggttgctgttgccgttccggcaggctcatcaacctcggatattaccgagctgataacggc

SEQ ID NO: 131827 - DNA, 75 bp, synthetic construct
  source 1..75: mol_type = other DNA
tgacatcaatttttggtctggcatcgctggggattggtattttactggtggtgaaatgcgccaaccttccggcga

SEQ ID NO: 131828 - DNA, 75 bp, synthetic construct
  source 1..75: mol_type = other DNA
cagccccagcgaccgaaccgccaggtgagcgagtgggcgaggaggcgcaagggagtcagagggtgatgtttgcac

SEQ ID NO: 131829 - DNA, 75 bp, synthetic construct
  source 1..75: mol_type = other DNA
gtggtcatcggcccttttatcaacgcaagtgcagtcttactgggtggcgttttcggcgcacttcttagccaacgc

SEQ ID NO: 131830 - DNA, 75 bp, synthetic construct
  source 1..75: mol_type = other DNA
ccctttttttacaagaagcaatttctgatatgaaaaattttatgcttaagttttccagagatgcatttggatatc

SEQ ID NO: 131831 - DNA, 75 bp, synthetic construct
  source 1..75: mol_type = other DNA
ataaacaacctgttcaggatccaaaaccagatctgttatccacgatggaacacgaaaacgtacgcggcagtgagt

SEQ ID NO: 131832 - DNA, 75 bp, synthetic construct
  source 1..75: mol_type = other DNA
agttacagttacaccctggtgaagaaagtcagagttcatgccgattaccacgtgaaatcgacaaacattactact

SEQ ID NO: 131833 - DNA, 75 bp, synthetic construct
  source 1..75: mol_type = other DNA
ccatacggatacccaaaacgccggcgtttacatcaagaacattcccgaacatgtgaaaaagcttgatgaggcggt

SEQ ID NO: 131834 - DNA, 75 bp, synthetic construct
  source 1..75: mol_type = other DNA
tccagattgctgccgtacttgatcgcagtattatcgcgctggcagatgtgatcatgcgttgtgcaaaacgtcgtg

SEQ ID NO: 131835 - DNA, 75 bp, synthetic construct
  source 1..75: mol_type = other DNA
ctgtgtttcttagacatgattcgtgcaactaaagctactcgtattgacgatatcatgttgattggatataggtct

SEQ ID NO: 131836 - DNA, 75 bp, synthetic construct
  source 1..75: mol_type = other DNA
ggggagcaaaaaggaaggtggtcatgaccagaaagtgatagtggcgaacgaccggtgcatcacggtacgtaacga

SEQ ID NO: 131837 - DNA, 75 bp, synthetic construct
  source 1..75: mol_type = other DNA
cccggcaggcatttctgccgggattgcgctggatgaggctctggccgaaggtgacgttatccgcatcctgcgcgg

SEQ ID NO: 131838 - DNA, 75 bp, synthetic construct
  source 1..75: mol_type = other DNA
cgaaaacgggcagcaatgctgtcgccggaatcgcgctggatgcggcaacgcaggcgggcgatacggtgcgcattc

SEQ ID NO: 131839 - DNA, 75 bp, synthetic construct
  source 1..75: mol_type = other DNA
gatacggtcgaagacctataaaggaagcggctttaatgaactgcggtttgaagacgccacgggcggtgaacaggt

SEQ ID NO: 131840 - DNA, 75 bp, synthetic construct
  source 1..75: mol_type = other DNA
ttgtggtcatccattcagggggcgtggacatcgtcgggccgaaaatcagtctcaatagcggcggtagtccgggga

SEQ ID NO: 131841 - DNA, 75 bp, synthetic construct
  source 1..75: mol_type = other DNA
aggaagattagcggtgcgctgggaatgaaggtccgggatgaaatcgtactggagagtggcggtaaaatcaccatg

SEQ ID NO: 131842 - DNA, 75 bp, synthetic construct
  source 1..75: mol_type = other DNA
atgatccggaatattttcaaacgatttaccaatcagactttccgttgtcctctccccggtcagtggtacaccacg

SEQ ID NO: 131843 - DNA, 75 bp, synthetic construct
  source 1..75: mol_type = other DNA
cattgcgaaatgctgaactgttatgttcagagaaaaaactggcaccgacagttaatgtctttacggtgttgttta

SEQ ID NO: 131844 - DNA, 75 bp, synthetic construct
  source 1..75: mol_type = other DNA
tggtcgctgactaccacaagaacagttccctggccaaagccgggcgtaatcgtggcacgacgattcaggacattg

SEQ ID NO: 131845 - DNA, 75 bp, synthetic construct
  source 1..75: mol_type = other DNA
atgacaaaacgtcagcgtaaaaagcgtaagcgtattaatcgtcttgtggaacactggcctgagttattcaaccgg

SEQ ID NO: 131846 - DNA, 75 bp, synthetic construct
  source 1..75: mol_type = other DNA
gcccaaggttaccattttaaagtaaaaaccgtgacggaaagcctgcgccgtcacggactgagggcaaaagcatcc

SEQ ID NO: 131847 - DNA, 75 bp, synthetic construct
  source 1..75: mol_type = other DNA
gtggtcatcggcccttttatcaacgctagtgcagtattactgggtggcattctcggcgcactgcttagccaacgt

SEQ ID NO: 131848 - DNA, 75 bp, synthetic construct
  source 1..75: mol_type = other DNA
gggattgcgggaagcatgtcatggtcgccgggatcgaatcgcaaaatcaggcctcgctgcatctgcaccagtcgc

SEQ ID NO: 131849 - DNA, 75 bp, synthetic construct
  source 1..75: mol_type = other DNA
gtgccggcagcagcacactttatgccggtgattacttccagacgggagcctcgacaacgggctatgtgatacctg

SEQ ID NO: 131850 - DNA, 75 bp, synthetic construct
  source 1..75: mol_type = other DNA
tataacaggctttataacagacttctccaacaagattgtctcttattccattgatgataacaccaatagctatac

SEQ ID NO: 131851 - DNA, 75 bp, synthetic construct
  source 1..75: mol_type = other DNA
gccgcaggtaggcactaaatttggtcgctggctggatctcacctttatgcagttgcaactcgacgaacgcagtga

SEQ ID NO: 131852 - DNA, 75 bp, synthetic construct
  source 1..75: mol_type = other DNA
gccgcaagtgggcactaaatttggacgctggctggacctcacctttatgcaattacaactcgacgatcgcagcga

SEQ ID NO: 131853 - DNA, 75 bp, synthetic construct
  source 1..75: mol_type = other DNA
tgggatttgtcgtcaccgcgcaaatgccgcaggtaggcactaaatttgggcgctggctggatctgacatttatgc

SEQ ID NO: 131854 - DNA, 75 bp, synthetic construct
  source 1..75: mol_type = other DNA
tctggtgtcgatgtttgtcggctggctggagcgcaaacgctcaccgctcgatccggtagtgcgatcgcttgtcag

SEQ ID NO: 131855 - DNA, 75 bp, synthetic construct
  source 1..75: mol_type = other DNA
atgggtttaccgccgctgagcaaaattcctttggttttacgcccgcaggcgtggctacatcgtcgccattacggc

SEQ ID NO: 131856 - DNA, 75 bp, synthetic construct
  source 1..75: mol_type = other DNA
acggctttgatcggcttacaaaacctgtcggctcgttttaattctgccatggacattcctgcccaggggctgtgc

SEQ ID NO: 131857 - DNA, 75 bp, synthetic construct
  source 1..75: mol_type = other DNA
ttaatgcagcatgtgcaagagctctgaaaacaaaggtatggcgtctgtcaggtattaaatcgatcctggaaaaag

SEQ ID NO: 131858 - DNA, 75 bp, synthetic construct
  source 1..75: mol_type = other DNA
agtattgtttctgactctggtagatatatcgttttctctaataaaaggataaaagaaattattagcgggactata

SEQ ID NO: 131859 - DNA, 75 bp, synthetic construct
  source 1..75: mol_type = other DNA
gcgtatccgaaaaattgcaacgctcactattgatgcaaaagcccggctccagcctgcccggggttacaccattgt

SEQ ID NO: 131860 - DNA, 75 bp, synthetic construct
  source 1..75: mol_type = other DNA
attaacaccatgtctcaggttccgaccatcagccagctgctgccgttaccggcatcagatgatgatgatctgaaa

SEQ ID NO: 131861 - DNA, 75 bp, synthetic construct
  source 1..75: mol_type = other DNA
aaaccggtgaagcgcagtttgcttttcctgttccctatgagcaggcggcgctgttggagaaaaacaagaatatcg

SEQ ID NO: 131862 - DNA, 75 bp, synthetic construct
  source 1..75: mol_type = other DNA
agagatgaagctgaaaaatgtgctggcggagagctataccgtctccgatgacggactgacatatattgtgaaatt

SEQ ID NO: 131863 - DNA, 75 bp, synthetic construct
  source 1..75: mol_type = other DNA
cgccacatcaagggcatgtaagtatgatcctgacgttaatcctacctaccagcagatgcttgagcattataatgt

SEQ ID NO: 131864 - DNA, 75 bp, synthetic construct
  source 1..75: mol_type = other DNA
cagtggttgggtggcgttcctgaacttgttgttccggacaatctgaaaagcgccacatccagggcatgtaagtat

SEQ ID NO: 131865 - DNA, 75 bp, synthetic construct
  source 1..75: mol_type = other DNA
ggtattaaatcgatcctggaaaaaggtctggataaacaacctgttcaggatccaaaacagatctgttatccacga

SEQ ID NO: 131866 - DNA, 75 bp, synthetic construct
  source 1..75: mol_type = other DNA
aaaaagataatatagagaaaagaattggccaccctgaaatgtttggaatagaccagcgagatgtagatgattatt

SEQ ID NO: 131867 - DNA, 75 bp, synthetic construct
  source 1..75: mol_type = other DNA
tagcatcattggataaagagcaaatattgagcttcaaacaggtttacattggtgaaatagagacaaacctagtat

SEQ ID NO: 131868 - DNA, 75 bp, synthetic construct
  source 1..75: mol_type = other DNA
atcgggtactggtcagatgtgaaagagttcactggcccaaaccgaccatcctgggaaaaagcaaaacaggcagct

SEQ ID NO: 131869 - DNA, 75 bp, synthetic construct
  source 1..75: mol_type = other DNA
agttgatggccagtccgtcaattatgcagcgttatatcagtatgaacgtgacgcaaaagccgttcgataacccga

SEQ ID NO: 131870 - DNA, 75 bp, synthetic construct
  source 1..75: mol_type = other DNA
agcagatgcttgagcattataatgtcgcagttttgcctgcgcggccacgtaaaccgaaagataaagccaaagctg

SEQ ID NO: 131871 - DNA, 75 bp, synthetic construct
  source 1..75: mol_type = other DNA
ggtgatgagtcatgttcgctgcttccagtggttgggtggcgttcctgaacttgttgttccggacaatctgaaaag

SEQ ID NO: 131872 - DNA, 75 bp, synthetic construct
  source 1..75: mol_type = other DNA
cctcgggttagagaatattcctctggatatccgacaaaataacagtagtggcgacgatgatatccctcatcttac

SEQ ID NO: 131873 - DNA, 75 bp, synthetic construct
  source 1..75: mol_type = other DNA
aagatctcaagcaaatgattgacgatattattgataagtatcaggagcgcactcgaaaaaaaaatgacaatcacg

SEQ ID NO: 131874 - DNA, 75 bp, synthetic construct
  source 1..75: mol_type = other DNA
tacattgtatgtataattgaaaccaccgccgagcttgttaaattaaaaacatcatattcatgtgcaacagaaatc

SEQ ID NO: 131875 - DNA, 75 bp, synthetic construct
  source 1..75: mol_type = other DNA
gataaaaaaggtgacaccgacgtccaccaaagtgcgctcgggcgtttgctgcaaaaaggggaaccacaagatgcg

SEQ ID NO: 131876 - DNA, 75 bp, synthetic construct
  source 1..75: mol_type = other DNA
tgagcgcctgattgaagcctctgccggcacaggcaaaacctttacgattgcggcgctctatttgcgcctgttact

SEQ ID NO: 131877 - DNA, 75 bp, synthetic construct
  source 1..75: mol_type = other DNA
atgaattgctaatattaacgggctgcaaatatgcaagccaccagcgaaaatggttaacggaaaacgggcttccgt

SEQ ID NO: 131878 - DNA, 75 bp, synthetic construct
  source 1..75: mol_type = other DNA
tcaacggcattgtttcaaacgaaactacccttctctgcaacgctcgcgatctgcacacctttctcgaagtaggta

SEQ ID NO: 131879 - DNA, 75 bp, synthetic construct
  source 1..75: mol_type = other DNA
aagcgataggcaaaatgacaggaaggcaagcactatgcgccgtcgccgctatcgtcttagctgccagcacggtag

SEQ ID NO: 131880 - DNA, 75 bp, synthetic construct
  source 1..75: mol_type = other DNA
ttacgccagcctgccggatagtgtagttgaacaggttcgcgctgcgtggaagaccaatattaaagacagtagcgg

SEQ ID NO: 131881 - DNA, 75 bp, synthetic construct
  source 1..75: mol_type = other DNA
atagtctttgtcgggaaacaaatttatatacacaactggaaggagcagaacattttagtgaacagctacattgtt

SEQ ID NO: 131882 - DNA, 75 bp, synthetic construct
  source 1..75: mol_type = other DNA
ctccatcctggagcgccgtggcgacacagcagcccttaccctgctacagaatccgttctggcgacagcctgacct

SEQ ID NO: 131883 - DNA, 75 bp, synthetic construct
  source 1..75: mol_type = other DNA
atgatgcacgcctttctcgaagtaggtaaacgctttgctacttggatcaccgagcgaatcagcgagtatgaattc

SEQ ID NO: 131884 - DNA, 75 bp, synthetic construct
  source 1..75: mol_type = other DNA
atgaattagccttttcttgtaccgatcatgaatatcgtttgccagtaaaacataagcacttaaagaccgactaca

SEQ ID NO: 131885 - DNA, 75 bp, synthetic construct
  source 1..75: mol_type = other DNA
cataagcatttaaaaaccgattacacaacatctgggtttagccgtgaggaagcgaaagagattttaatagaattt

SEQ ID NO: 131886 - DNA, 75 bp, synthetic construct
  source 1..75: mol_type = other DNA
acaggtggagatggaattttatctgccaattagtgaaccgctcgtcgccagccaacttgatgcgctaatccgcca

SEQ ID NO: 131887 - DNA, 75 bp, synthetic construct
  source 1..75: mol_type = other DNA
gttaccaggtgaatcttgcccagcgttttcaagctacctattctggtgatgagtggctggcgttcgttaaactca

SEQ ID NO: 131888 - DNA, 75 bp, synthetic construct
  source 1..75: mol_type = other DNA
ccatttcagggcggcgcgctggggttgtttggctacgatctgggccgccgttttgagtcactgccagaaattgcg

SEQ ID NO: 131889 - DNA, 75 bp, synthetic construct
  source 1..75: mol_type = other DNA
aagtacgggattaaggcagagttctttatgtcggttgacgactcacccatgttcaagataaaatctaagtcctct

SEQ ID NO: 131890 - DNA, 75 bp, synthetic construct
  source 1..75: mol_type = other DNA
atgagtgatgtcgccgagacactagatcctttgcgcttgcccttacagggcgagcgcctgattgaagcctctgcc

SEQ ID NO: 131891 - DNA, 75 bp, synthetic construct
  source 1..75: mol_type = other DNA
cctgcgcggtgttgataaagaacatccgcaacaaggaatttacacgacccgacccgatgctgggttgattgccct

SEQ ID NO: 131892 - DNA, 75 bp, synthetic construct
  source 1..75: mol_type = other DNA
tttcttagaagatcgcacgaaagccgggggggaaaccccgcgacatccactgtttgaggcgatcgaacaactgct

SEQ ID NO: 131893 - DNA, 75 bp, synthetic construct
  source 1..75: mol_type = other DNA
acgaagggcgttattacctgctcgactataaatccaactggctgggtgaagacagttcggcttacacccaacagg

SEQ ID NO: 131894 - DNA, 75 bp, synthetic construct
  source 1..75: mol_type = other DNA
gcgcgatgccttaacgctgctggaaatcccttccgtttacctttcgaaccgcgacagtgtttttgaaactctgga

SEQ ID NO: 131895 - DNA, 75 bp, synthetic construct
  source 1..75: mol_type = other DNA
cgacaaccctctgtatgcgcgcctgctggaagagattgacgataaagcgcaggccgcgcagtggctgctgttagc

SEQ ID NO: 131896 - DNA, 75 bp, synthetic construct
  source 1..75: mol_type = other DNA
aagccagaataatcagtggcaatacgacaagttagtgctggcaaccggtgccagcgcctttgtcccgccggtgcc

SEQ ID NO: 131897 - DNA, 75 bp, synthetic construct
  source 1..75: mol_type = other DNA
gaaattaacggtcaggtattgccgttcctccagccgattcaacttagcgcgatggtgctggcaaaaatcttctcg

SEQ ID NO: 131898 - DNA, 75 bp, synthetic construct
  source 1..75: mol_type = other DNA
ggcgaaacccagcgtcaggatttacgctggcaaattaataccgaacgccagggaatggtggcgcgcggcgttgac

SEQ ID NO: 131899 - DNA, 75 bp, synthetic construct
  source 1..75: mol_type = other DNA
catgctgcatgaggttgggttaaatatcaaccatagcggcttacatcgacattctgcatatattttgcaaaacag

SEQ ID NO: 131900 - DNA, 75 bp, synthetic construct
  source 1..75: mol_type = other DNA
tgatccataaagatcagaagaaaccagaacaaggcaccgaagtgctgaagttcttcgactgggcatacaaaaccg

SEQ ID NO: 131901 - DNA, 75 bp, synthetic construct
  source 1..75: mol_type = other DNA
ggcaataacacgccgctgaaactaccggcgatgctggtgaaaatcaaaacgccggaattaccgctgcatctggca

SEQ ID NO: 131902 - DNA, 75 bp, synthetic construct
  source 1..75: mol_type = other DNA
tggcaccgtctggtttgcttttgcctcagccagcggcgaaggtattacccgccgggaatgcttcagtggcgaccg

SEQ ID NO: 131903 - DNA, 75 bp, synthetic construct
  source 1..75: mol_type = other DNA
tggaaatggcgataggcgcactgaaagcggctcgtgctgattatgccgtgtctattagtggtatcgccgggccgg

SEQ ID NO: 131904 - DNA, 75 bp, synthetic construct
  source 1..75: mol_type = other DNA
tggcactgtctggtttgcttttgcttcagccagcggcgaaggtattacccgccgggaatgcttcagcggtgaccg

SEQ ID NO: 131905 - DNA, 75 bp, synthetic construct
  source 1..75: mol_type = other DNA
tggcgtcgttaatgccaccggaagtaagcagccgcttgcagcatcggttgacggagatgggcgttcatctgctgt

SEQ ID NO: 131906 - DNA, 75 bp, synthetic construct
  source 1..75: mol_type = other DNA
cgcggatttgtcacctacagtaacgaagccaaagcgcagatgatcggcgtacgtgaagagacgctggcgcagcat

SEQ ID NO: 131907 - DNA, 75 bp, synthetic construct
  source 1..75: mol_type = other DNA
atgattgacagtgaactgatgcagttaagcgaacaggtagggcagacgctgaaagcccgtggcgcaaccgtaaca

SEQ ID NO: 131908 - DNA, 75 bp, synthetic construct
  source 1..75: mol_type = other DNA
accgaatatggccgggacaacggcatccgtctgtctgccgtgtggctgacgcacgacccggaatacccggagaat

SEQ ID NO: 131909 - DNA, 75 bp, synthetic construct
  source 1..75: mol_type = other DNA
ccggctggtgcactacacgcggacacaatatgaagagccgctggtcgaaagtcgctatctttacgacccgctggg

SEQ ID NO: 131910 - DNA, 75 bp, synthetic construct
  source 1..75: mol_type = other DNA
accggcaggctgaccggcgttcacaccaccgcagcgaatctggatatccgcatcccgtatgccacagacccggca

SEQ ID NO: 131911 - DNA, 75 bp, synthetic construct
  source 1..75: mol_type = other DNA
acctgaagaagaaaaccaacccaggttactccgcaattggtcgtctgaaaggcctggccgaagttcgcggtactg

SEQ ID NO: 131912 - DNA, 75 bp, synthetic construct
  source 1..75: mol_type = other DNA
ccggctgatacaggaaaccggctttgacggccgcacacagcgttatcaccacgacctgaccggcaaacttatccg

SEQ ID NO: 131913 - DNA, 75 bp, synthetic construct
  source 1..75: mol_type = other DNA
actcaccggtaccattacgacagtcagcaccggctggtgcactacacgcggacacaatatgcagagccgctggtc

SEQ ID NO: 131914 - DNA, 75 bp, synthetic construct
  source 1..75: mol_type = other DNA
gggttgcgtcagctttgcccagctttatttccagggcggcgtcatcaataaagagaattttcagcgcgcacgcat

SEQ ID NO: 131915 - DNA, 75 bp, synthetic construct
  source 1..75: mol_type = other DNA
gcaaccaccacaccgccaacattgacgctgattaccgatgacagtcactggacactgcgtttcccgcatgactgg

SEQ ID NO: 131916 - DNA, 75 bp, synthetic construct
  source 1..75: mol_type = other DNA
tgcgctatcaccgtaaagcgattaagctcgacgatctgccgcgctttaccttgtttaagaagaaacagttcctgc

SEQ ID NO: 131917 - DNA, 75 bp, synthetic construct
  source 1..75: mol_type = other DNA
ggcaggcttaagctacacgtatcagtatgagaaagaccgcatcaccatcaccgacagcctggaccgccgtgaagt

SEQ ID NO: 131918 - DNA, 75 bp, synthetic construct
  source 1..75: mol_type = other DNA
cacggaaaccggaagtgacctggtacggctgggacggcgaccggctgaccacgatacagaacgacagaacccgca

SEQ ID NO: 131919 - DNA, 75 bp, synthetic construct
  source 1..75: mol_type = other DNA
catgctgcatgaggtcggattgaatatcaaccatagcggtttgcatcgccactccgcttatatcttgcaaaacag

SEQ ID NO: 131920 - DNA, 75 bp, synthetic construct
  source 1..75: mol_type = other DNA
gcagacggtctgaaaacctggacagtgttaacgaccattctcggttttaccggattcttaattacctggtgcgta

SEQ ID NO: 131921 - DNA, 75 bp, synthetic construct
  source 1..75: mol_type = other DNA
gaccaaatatctggggttgtcggtagcagacggtctgaaaacctggacagtgttaacgaccattctcggttttac

SEQ ID NO: 131922 - DNA, 75 bp, synthetic construct
  source 1..75: mol_type = other DNA
atccgaagatcctgcaatggctgatggtgcatgagaagtttgagtgcaatgaggtcaacaccaaagtctttgccc

SEQ ID NO: 131923 - DNA, 75 bp, synthetic construct
  source 1..75: mol_type = other DNA
agcaggagttttcagtccagttatttgagaaaattggccgacggatgtgccttacccgcgaaggaaaaaagttgc

SEQ ID NO: 131924 - DNA, 75 bp, synthetic construct
  source 1..75: mol_type = other DNA
ctctcttaccgaatgccgcaggtgctgcaacgttttcgacaacgggcgccaaaagtgcgtttatctttgcagtcg

SEQ ID NO: 131925 - DNA, 75 bp, synthetic construct
  source 1..75: mol_type = other DNA
catctatgaactcaccagagtgatggatacccttcgtgaggctgccaaaaaagagtcggatccggacggggaact

SEQ ID NO: 131926 - DNA, 75 bp, synthetic construct
  source 1..75: mol_type = other DNA
aaaaagccgagtgccaaccaatgcaggaacagccagcaccactaaagacacccttccgacgtatgacggagaagt

SEQ ID NO: 131927 - DNA, 75 bp, synthetic construct
  source 1..75: mol_type = other DNA
tgcctgtcactggatgaaacaagccggagaacgcgcagtcgccagaagcgaggggccaggcagttttgttccaca

SEQ ID NO: 131928 - DNA, 75 bp, synthetic construct
  source 1..75: mol_type = other DNA
atgcaagtcgacctgctgagttccgcgcaatctgcgcgcatgttacacctctttcaccaacactctccccttgtg

SEQ ID NO: 131929 - DNA, 75 bp, synthetic construct
  source 1..75: mol_type = other DNA
atgggatgattttagtgtttttaagactattgcggaaataaagcaaagaattcgagttgatataattaattcatt

SEQ ID NO: 131930 - DNA, 75 bp, synthetic construct
  source 1..75: mol_type = other DNA
agtttctaataaaggaaaaatctaatttagttggacatattgaagtttataatgcctgtaaaaaagttataaatc

SEQ ID NO: 131931 - DNA, 75 bp, synthetic construct
  source 1..75: mol_type = other DNA
gtggatcactattgcaccgttcgtgacaccagttataaagctattacttttgacgctgttccggcaactaaggtt

SEQ ID NO: 131932 - DNA, 75 bp, synthetic construct
  source 1..75: mol_type = other DNA
atgacaaagacacggtaaaagaccttggttttgccggttttaaagtgctttacccgatcaacagcaaagataaaa

SEQ ID NO: 131933 - DNA, 75 bp, synthetic construct
  source 1..75: mol_type = other DNA
gcctggggactggagccggaaagccgtttaagctgtcaggcgcgcgtcaccgacgaagatttagtggtcgaaatc

SEQ ID NO: 131934 - DNA, 75 bp, synthetic construct
  source 1..75: mol_type = other DNA
aagacatcaaaacgctaaaatccgacgttagcaaattaaaaaacgatcaaggaagctacgcaacaaaatcatatg

SEQ ID NO: 131935 - DNA, 75 bp, synthetic construct
  source 1..75: mol_type = other DNA
gatgaactttaaatacaccattactttcagccgtgatgaagacaaacttcacgcgcctgataacgcctgggtgca

SEQ ID NO: 131936 - DNA, 75 bp, synthetic construct
  source 1..75: mol_type = other DNA
aagtgaaagatgccaagaaaaccaccgaaatgcgtgctgccctggttaatgccgatcagacgttgagtgaaacct

SEQ ID NO: 131937 - DNA, 75 bp, synthetic construct
  source 1..75: mol_type = other DNA
tccacgtgcggcaggggcttataagtttgttgtcatgccggggcgtgacacggttgtcgatgtgcagtcgaaaat

SEQ ID NO: 131938 - DNA, 75 bp, synthetic construct
  source 1..75: mol_type = other DNA
tcagtttatttcccccagccagcatgtggctgacgctttcaatagcctgtacggtccagggcgttgccggattat

SEQ ID NO: 131939 - DNA, 75 bp, synthetic construct
  source 1..75: mol_type = other DNA
ttaatcgaattaccttttggcgaacagtcgcagacgattacagcaatgtgcgcacaccatgctggaaaagcggtt

SEQ ID NO: 131940 - DNA, 75 bp, synthetic construct
  source 1..75: mol_type = other DNA
tgctggtggcttcaccgcaaattgcagatgtcgattttactgagccgggaagacataacgcctgtagctttatta

SEQ ID NO: 131941 - DNA, 75 bp, synthetic construct
  source 1..75: mol_type = other DNA
cacataacgggacaaaaggtatcttttgggactttagtgatctttacggaggaactttaatttttccaggcagtg

SEQ ID NO: 131942 - DNA, 75 bp, synthetic construct
  source 1..75: mol_type = other DNA
gcattcagtccggtagtagatagaatcacgggcgtgattgagcgtaagacggggaaagcagccagaggcattggc

SEQ ID NO: 131943 - DNA, 75 bp, synthetic construct
  source 1..75: mol_type = other DNA
atgaccctcgcggcgctggaagccacgttgcgtctttatttacaccctgaagctctgagtgaaaaattaccgacc

SEQ ID NO: 131944 - DNA, 75 bp, synthetic construct
  source 1..75: mol_type = other DNA
tggccgattatgccgaccgaatgggtacatactctgctaaaaccatggaacttctttgacgaaacgccaacgcta

SEQ ID NO: 131945 - DNA, 75 bp, synthetic construct
  source 1..75: mol_type = other DNA
ataccttttttggttgggcttcccgttaaagagatgtttatttggggagatgatactgaatacacttggcgaatt

SEQ ID NO: 131946 - DNA, 75 bp, synthetic construct
  source 1..75: mol_type = other DNA
gtggtgctccaggggcggtaccagttcatgcatccggaaagatgtatcaatgccaaattttaccaaacggtgctg

SEQ ID NO: 131947 - DNA, 75 bp, synthetic construct
  source 1..75: mol_type = other DNA
gtcaccttcttctcgcgtactaaacagcgcctgtggaccaaaggcgaaatctcgggcaatttcctcaacgtggtg

SEQ ID NO: 131948 - DNA, 75 bp, synthetic construct
  source 1..75: mol_type = other DNA
cggcgcggggtgtgcataatacgctttcccgctacagagtcaagcatttattttgctttctctgccgaagttctc

SEQ ID NO: 131949 - DNA, 75 bp, synthetic construct
  source 1..75: mol_type = other DNA
tatcatttcactggctctcagggcatcacagggctcagcgacagtggctattcttactaccggtgggctactttc

SEQ ID NO: 131950 - DNA, 75 bp, synthetic construct
  source 1..75: mol_type = other DNA
tatgcttcgctatgctattgccaccatgcagcggcatcttgaagcgggacatgattatctgcctctggtgatccc

SEQ ID NO: 131951 - DNA, 75 bp, synthetic construct
  source 1..75: mol_type = other DNA
gtagaggaaaacctgcgccagtattacaacgacgtactttattcagtagagacgacgaaagggtgcggatatatc

SEQ ID NO: 131952 - DNA, 75 bp, synthetic construct
  source 1..75: mol_type = other DNA
acaattttaagcctctcgccagagcgttttattctttgtgatgacggtgagatccagacccgtccgattaaaggc

SEQ ID NO: 131953 - DNA, 75 bp, synthetic construct
  source 1..75: mol_type = other DNA
tatgctctctatatgataaggacacgttagtgcaacttgttgaaactggtggagctcatcctctgagtcgagaac

SEQ ID NO: 131954 - DNA, 75 bp, synthetic construct
  source 1..75: mol_type = other DNA
gatatagcgaaaggcatcgacattaaagcgcaaccagcgcccacagagacgctacaggacgctattacggcgtac

SEQ ID NO: 131955 - DNA, 75 bp, synthetic construct
  source 1..75: mol_type = other DNA
aaagtgaatgaagagtggaaaaacaacgttggtactggctctaccgtaaaatggccgatcggtctgggtggtaaa

SEQ ID NO: 131956 - DNA, 75 bp, synthetic construct
  source 1..75: mol_type = other DNA
ttgatgtatcacctgctggtgctgttgcaggatcaggatctggatttaacaacggtgatagagaacttgcgtaag

SEQ ID NO: 131957 - DNA, 75 bp, synthetic construct
  source 1..75: mol_type = other DNA
ggacaaaaccatcgaaagcggcaaagtcaccttcttctcgcgcactaaacaacggctgtggaccaaaggcgaaac

SEQ ID NO: 131958 - DNA, 75 bp, synthetic construct
  source 1..75: mol_type = other DNA
caccaaacgcattgcgcagaaagtaggtgaagaaggggtggaaaccgcactggcagcgacggtacatgaccgctt

SEQ ID NO: 131959 - DNA, 75 bp, synthetic construct
  source 1..75: mol_type = other DNA
aaacctttactgccaataccttactggcgctcggtgcatcgccagcgatggttatcgaaaccgaagaggccagtc

SEQ ID NO: 131960 - DNA, 75 bp, synthetic construct
  source 1..75: mol_type = other DNA
tatgttaccgatggtcgtcgcaccgttggcattcacggcggcgatccgttaatggccaaagtggtaggaactggc

SEQ ID NO: 131961 - DNA, 75 bp, synthetic construct
  source 1..75: mol_type = other DNA
tagcaggcatcgctaatggtggtcgtggtgtggattctaccgacgccgcagccaacgcgttacccgccgcacaaa

SEQ ID NO: 131962 - DNA, 75 bp, synthetic construct
  source 1..75: mol_type = other DNA
ttaatgtatcacctactggtgctgctgcaggatcaagagctggatttgacggcggtgattgagaatcttcgtaag

SEQ ID NO: 131963 - DNA, 75 bp, synthetic construct
  source 1..75: mol_type = other DNA
tgaagcgtcggacttgatgtaccacctgctggtgctgctgcaggatcaggatctcgatttaacgaccgtgattga

SEQ ID NO: 131964 - DNA, 75 bp, synthetic construct
  source 1..75: mol_type = other DNA
taccaagcgcatcgcacagaaagtgggcgaagaaggcgtggaaactgcgctggccgcgacggtacatgaccgctt

SEQ ID NO: 131965 - DNA, 75 bp, synthetic construct
  source 1..75: mol_type = other DNA
tgtacgccagcggcaccaagcgtatcgcgcagaaagtgggtgaagaaggcgtggaaaccgcgctggccgccacgg

SEQ ID NO: 131966 - DNA, 75 bp, synthetic construct
  source 1..75: mol_type = other DNA
ctgccataaaggcacctcaagctgcttcggcgacaccagccaccagtggctgttcctgtatcagcttgagcagct

SEQ ID NO: 131967 - DNA, 75 bp, synthetic construct
  source 1..75: mol_type = other DNA
tgaagcatcagatttgatgtatcacctgctggtgctgctgcaggatcaggaactggatttaaccactgtgattga

SEQ ID NO: 131968 - DNA, 75 bp, synthetic construct
  source 1..75: mol_type = other DNA
tacaacgccaacaaaagtcggtgaattttcatctaaagatcaactagctggtgagcttttctctaacgtagtatc

SEQ ID NO: 131969 - DNA, 75 bp, synthetic construct
  source 1..75: mol_type = other DNA
aaagtcgacagcgacggcgcgggctaccacattctttgggggttaaccaacgaagccgtccccacttccgaactt

SEQ ID NO: 131970 - DNA, 75 bp, synthetic construct
  source 1..75: mol_type = other DNA
caaagccggtgttatgcttaatgacttcactccttctggcgttgctcagctgaacctgtttgatgagcaacagcc

SEQ ID NO: 131971 - DNA, 75 bp, synthetic construct
  source 1..75: mol_type = other DNA
gaagccggggtctggggacgctatatgctcggtcaggggagtggcactgacggttatcagaatacatacaaccac

SEQ ID NO: 131972 - DNA, 75 bp, synthetic construct
  source 1..75: mol_type = other DNA
tatgggggacattcgcgacagtggagaagccggggtctggggacgctatatgctcggtcaggggagtggcactga

SEQ ID NO: 131973 - DNA, 75 bp, synthetic construct
  source 1..75: mol_type = other DNA
ttgctacggcgaaacatatcctgcgcccattggtccgtcgcaatcggatttcggtggcgtaggattattacaaac

SEQ ID NO: 131974 - DNA, 75 bp, synthetic construct
  source 1..75: mol_type = other DNA
ggaactccgtggtttcagataaaaaacgaaagatacccggaaaaaatatatgcgttttcaagtaattatgaactt

SEQ ID NO: 131975 - DNA, 75 bp, synthetic construct
  source 1..75: mol_type = other DNA
gcatgtcgcttgaggaagccccgccaacaaagcagcagatcgtctgcagccgcagttttggagagaaaatcacgg

SEQ ID NO: 131976 - DNA, 75 bp, synthetic construct
  source 1..75: mol_type = other DNA
gcctcaaaggagtggaaacagtttcgtggtgtgctcgcactcacccgggggaatccacagcgaacgcggaaactg

SEQ ID NO: 131977 - DNA, 75 bp, synthetic construct
  source 1..75: mol_type = other DNA
caggcctgggaaaagtgtggtttgcgggacgaggcattgctcctgagtggcaaatgaaacgagaaatgctttccc

SEQ ID NO: 131978 - DNA, 75 bp, synthetic construct
  source 1..75: mol_type = other DNA
tgttgttcagtatgcggagcgggcagcagagaaactacgtggggagcgtcagtattgccggcaggtggcgacatt

SEQ ID NO: 131979 - DNA, 75 bp, synthetic construct
  source 1..75: mol_type = other DNA
ctgtggaaaagcttccattgcccacacaggacagccgggacattattgccgcagcatgcagagcgttaaaccatg

SEQ ID NO: 131980 - DNA, 75 bp, synthetic construct
  source 1..75: mol_type = other DNA
gagttgatagttaaggcaaacctacagttacgcaatatcagtcaagcaaatttctggctgttgcaacgaaagcaa

SEQ ID NO: 131981 - DNA, 75 bp, synthetic construct
  source 1..75: mol_type = other DNA
gaaggcttccgcgtggtgccacccgcggcagtgcgtcagggtgcgtttatcgcccgtaacactgtgctgatgccg

SEQ ID NO: 131982 - DNA, 75 bp, synthetic construct
  source 1..75: mol_type = other DNA
cagattggtaaaaacgtccacctttccggtggcgtgggcatcggcggcgtgctggaaccgctgcaggctaaccca

SEQ ID NO: 131983 - DNA, 75 bp, synthetic construct
  source 1..75: mol_type = other DNA
acgatcgcagaatgtaaggagctaataaacatctatcaggctaaattggacgccttaaggagaaaggcagcatga

SEQ ID NO: 131984 - DNA, 75 bp, synthetic construct
  source 1..75: mol_type = other DNA
tttcttccctgttacgtataagtttacttgctgcattgtcggtagccttcgttggtccgattggttttattggtc

SEQ ID NO: 131985 - DNA, 75 bp, synthetic construct
  source 1..75: mol_type = other DNA
aaaggcgaagcacgttgcatcgttgcgaaagcaggttttgcagaagatgaagtggttgcagtaagcaaactgggt

SEQ ID NO: 131986 - DNA, 75 bp, synthetic construct
  source 1..75: mol_type = other DNA
tttatgccgttccttgtctcgatggtgagttttaccagtgacgcacgtcgagcgtgggactggcgaaacgggacc

SEQ ID NO: 131987 - DNA, 75 bp, synthetic construct
  source 1..75: mol_type = other DNA
aggtagtaaacaaaatctggctaatcaaaccgttattgataacaaggattataatgtacttgtcggtcgtactgg

SEQ ID NO: 131988 - DNA, 75 bp, synthetic construct
  source 1..75: mol_type = other DNA
tggtctgggtgggtatacgtccatcttctttgataacggttttatactgattttatcgctaaatacatccattca

SEQ ID NO: 131989 - DNA, 75 bp, synthetic construct
  source 1..75: mol_type = other DNA
cagattggtaaaaacgtccacctttccggtggcgtgggcatcggcggcgtgctggagccgctgcaggctaacccg

SEQ ID NO: 131990 - DNA, 75 bp, synthetic construct
  source 1..75: mol_type = other DNA
gatcgcgtttccgacgcagaccgtctacctcgcgcagccagaagagccgcctgaggccatgcgacctgcagccgc

SEQ ID NO: 131991 - DNA, 75 bp, synthetic construct
  source 1..75: mol_type = other DNA
tagccatgctgttggcattcatctatcaactcgcggtcggagaggtaaatctcttaggggttggtatatacccgg

SEQ ID NO: 131992 - DNA, 75 bp, synthetic construct
  source 1..75: mol_type = other DNA
cactcatcctgttgggacacacatttctgacgcctgctgtacaggccatagggttcgactattacaatgatcacg

SEQ ID NO: 131993 - DNA, 75 bp, synthetic construct
  source 1..75: mol_type = other DNA
agcagcgagttgaagaagaacgccaacgtcatatccgtgctgcccgtgccaaaatgccgggcgtgtcccgcgtgc

SEQ ID NO: 131994 - DNA, 75 bp, synthetic construct
  source 1..75: mol_type = other DNA
tttgtattgaatgtgaagcgccaattccgccagcacgacgccgcgccattcctggagtgcagctttgcattacct

SEQ ID NO: 131995 - DNA, 75 bp, synthetic construct
  source 1..75: mol_type = other DNA
cactcatcctgttggggcacacatttctgacacctgctgtacaggccatagggttcgactattacaatgatcacg

SEQ ID NO: 131996 - DNA, 75 bp, synthetic construct
  source 1..75: mol_type = other DNA
aagagaatgtgcgtgaacttcacaacagagacattattattccgttgacggatgaatcatgccggaacgcagcag

SEQ ID NO: 131997 - DNA, 75 bp, synthetic construct
  source 1..75: mol_type = other DNA
tccaatgatctgcttatccgcagtgggcagaatatttatttaaatggcgttcaccttacggcgaatgcagactca

SEQ ID NO: 131998 - DNA, 75 bp, synthetic construct
  source 1..75: mol_type = other DNA
ggcagcggttatctggcgggcatgaagcttggcgacacgccgctgctggagtacacgcgcgaccgcatgcaccgg

SEQ ID NO: 131999 - DNA, 75 bp, synthetic construct
  source 1..75: mol_type = other DNA
tacggcattttaagggggtattatgccatccctgtcacgcgacaggatctggaagaaaaaacaccggcgggagaa

SEQ ID NO: 132000 - DNA, 75 bp, synthetic construct
  source 1..75: mol_type = other DNA
cgtaaggtgtatggcgtggcacagtcttataaaacggttcatgccacccggcaggatattttatccggcacggag

SEQ ID NO: 132001 - DNA, 75 bp, synthetic construct
  source 1..75: mol_type = other DNA
atggctgatgcaatggatctcgtacagctgcgcgttgaagaagaacgccaacgccatatccgtgctgcccgttcc

SEQ ID NO: 132002 - DNA, 75 bp, synthetic construct
  source 1..75: mol_type = other DNA
ccaggagcgcagctttgcattacctgtcaggaaatcgcagagctgaaaggcaaacattacaacggaggtgctgta

SEQ ID NO: 132003 - DNA, 75 bp, synthetic construct
  source 1..75: mol_type = other DNA
gactggatcttccatgaaaacggcactattggcatcgatgccggtgctacgggcatcgaagcggtgaaaggtgtt

SEQ ID NO: 132004 - DNA, 75 bp, synthetic construct
  source 1..75: mol_type = other DNA
caacgtatgaagccatgcgtcaggccatctgtcagcatgcagaacgcgctgcggagaagctgcgcggagagcacc

SEQ ID NO: 132005 - DNA, 75 bp, synthetic construct
  source 1..75: mol_type = other DNA
caaagccggcatcatgctgaacgatttctccccgaccggcgtctctcagctgaatctgtttgatgacgtacagcc

SEQ ID NO: 132006 - DNA, 75 bp, synthetic construct
  source 1..75: mol_type = other DNA
agtactgccggcatatcagcaccttcatcaagacatccccttttgcggttaatgagccgtattacggtaacgtgg

SEQ ID NO: 132007 - DNA, 75 bp, synthetic construct
  source 1..75: mol_type = other DNA
acgagggatagcgccatcatggcaaatgaaacgcgacatgctctcccctgcgtacaccacccgctggaaagatat

SEQ ID NO: 132008 - DNA, 75 bp, synthetic construct
  source 1..75: mol_type = other DNA
ttatgtctcatctcgaagaactggcgccgcgcgtggagcagtacagcatcgacgagatgtttctggatatccgcg

SEQ ID NO: 132009 - DNA, 75 bp, synthetic construct
  source 1..75: mol_type = other DNA
gctgccatcagagctctggacaggatctgggtggatggtcaccgttacgcaaaggcaggctgtatgctgaacgat

SEQ ID NO: 132010 - DNA, 75 bp, synthetic construct
  source 1..75: mol_type = other DNA
gtgaataaatggcgtaaccccggtgggtggttatgtgcggtagctttgtcttttgtctgcctgctttccgggtgc

SEQ ID NO: 132011 - DNA, 75 bp, synthetic construct
  source 1..75: mol_type = other DNA
cgctggatacgccagacctggtcattgatcgctcatttaatagcggcaaacaacatgcttactttatccgccaat

SEQ ID NO: 132012 - DNA, 75 bp, synthetic construct
  source 1..75: mol_type = other DNA
cgtaaacagctcacgcccgaccgtcagtggagcaagtggatagacctaccaggtattgaacctgaacaattccat

SEQ ID NO: 132013 - DNA, 75 bp, synthetic construct
  source 1..75: mol_type = other DNA
ttgtccagggaatgatcaaagccaccaccgacgcctggctgaaaggctgggatgagcgcaacggcggcaacctga

SEQ ID NO: 132014 - DNA, 75 bp, synthetic construct
  source 1..75: mol_type = other DNA
ggataccgcaatctgggaaaatcggtctggcgggctacatataaaattcctgatccaccggaaaaaagttggtac

SEQ ID NO: 132015 - DNA, 75 bp, synthetic construct
  source 1..75: mol_type = other DNA
ttttgtctgcctgctttccgggtgcagcattgacagcgacgacgtgccggacctgatgtcacaaagactcgatct

SEQ ID NO: 132016 - DNA, 75 bp, synthetic construct
  source 1..75: mol_type = other DNA
gcaaaagctgaaggaaagtaacgagccgatactctatctggcagaacgatatggcttcgagtcccaacaaactct

SEQ ID NO: 132017 - DNA, 75 bp, synthetic construct
  source 1..75: mol_type = other DNA
gtaaaagcgaactatggcaaagcccatgaaatcgctgtaaagctgggattaaaaaccatcactgacgccgcttaa

SEQ ID NO: 132018 - DNA, 75 bp, synthetic construct
  source 1..75: mol_type = other DNA
accacgctgaaggacggactggcccgctggacgtcgtccgaaaaatgcccccacggtacctggacgctgcgctgg

SEQ ID NO: 132019 - DNA, 75 bp, synthetic construct
  source 1..75: mol_type = other DNA
ttttgtgtagtgctattggatttattgaaggaatcctcggggttttcggtgctcagagtgctccacaacaggctg

SEQ ID NO: 132020 - DNA, 75 bp, synthetic construct
  source 1..75: mol_type = other DNA
gaagagcacggcgatagcatcgaactggttactgatgatcatagcgagaaaacccgctacaacaactgctggaca

SEQ ID NO: 132021 - DNA, 75 bp, synthetic construct
  source 1..75: mol_type = other DNA
cgatctgctacaggcgggcggcattgggttacttaatgccgtcgaacgctatgacgccctacaaggaacggcatt

SEQ ID NO: 132022 - DNA, 75 bp, synthetic construct
  source 1..75: mol_type = other DNA
agattgggaaccttataagaaaatgcagcaggaacgggagcagcacgagcaggaagaaattatgcgtggacaggc

SEQ ID NO: 132023 - DNA, 75 bp, synthetic construct
  source 1..75: mol_type = other DNA
caggcaattcagtatttacctccttctcagcagcaagaagaaatgcagaatgaaccgccccgggtttcctggaga

SEQ ID NO: 132024 - DNA, 75 bp, synthetic construct
  source 1..75: mol_type = other DNA
ctccactcatgatggggttgttcggcttgtggctcagactggcataatgccttcgcaggtcatcacgcagctttc

SEQ ID NO: 132025 - DNA, 75 bp, synthetic construct
  source 1..75: mol_type = other DNA
gatgcgccgcgcgataaatgcactctatcttgtgcgataaatggcatccacgcggcgtttcattatttgaaaaag

SEQ ID NO: 132026 - DNA, 75 bp, synthetic construct
  source 1..75: mol_type = other DNA
gaaacgcatcccggacagccaaccgctggatgtgatctggtttaacgatcagaaaaaagaacacgttaatgcgta

SEQ ID NO: 132027 - DNA, 75 bp, synthetic construct
  source 1..75: mol_type = other DNA
aaacaaaagcaggtgatcaccggcaaaatgttcattaccgaaaccggggaactgatgggaccgcgctggattgtt

SEQ ID NO: 132028 - DNA, 75 bp, synthetic construct
  source 1..75: mol_type = other DNA
tctcttcctgacgtgaattacaaaagtttgcgtcgtttacccaatttattaatagacccgacaacactagacaaa

SEQ ID NO: 132029 - DNA, 75 bp, synthetic construct
  source 1..75: mol_type = other DNA
atgcactatcgcaatgtggtttgtttgttggcttgttcattggtcttatcatcggcatggggatgtcggctttcc

SEQ ID NO: 132030 - DNA, 75 bp, synthetic construct
  source 1..75: mol_type = other DNA
tgggataaagtacctcctctgactgatctgacaaccgactacctctatgaaggcgcacaggcctggtatcctcat

SEQ ID NO: 132031 - DNA, 75 bp, synthetic construct
  source 1..75: mol_type = other DNA
gggtagcgaaagttattaccgatattgccggcagttccgcctggtttgaacgcggatttgtcacctacagtaacg

SEQ ID NO: 132032 - DNA, 75 bp, synthetic construct
  source 1..75: mol_type = other DNA
atttgacaaccgactacctctatgagggcgcacaggcctggtatcctcattattcctggcatagcgatggtcgct

SEQ ID NO: 132033 - DNA, 75 bp, synthetic construct
  source 1..75: mol_type = other DNA
gtttgcgtcgtttacctaatttattaatagacccgacaacacaagatgaatgggataaagtacctcctctgactg

SEQ ID NO: 132034 - DNA, 75 bp, synthetic construct
  source 1..75: mol_type = other DNA
cgcccacggtggcacgctgtttcttgacgagataggcgaaatgccgctgccgttgcagactcggctgctgcgggt

SEQ ID NO: 132035 - DNA, 75 bp, synthetic construct
  source 1..75: mol_type = other DNA
aacgccgtccgccctactcagcacgctcctgttaaccaatgggcagccggaggccttgctgcataacagcgccga

SEQ ID NO: 132036 - DNA, 75 bp, synthetic construct
  source 1..75: mol_type = other DNA
ctcaaccaccgcgatgtgtcagccatccgcgtgatgcgtcaactggtgcaacggcaaaacgtgcctgccgttccg

SEQ ID NO: 132037 - DNA, 75 bp, synthetic construct
  source 1..75: mol_type = other DNA
ccacataaataccggatgaccaatatgcagggcgaatcgcgctttttacatccattaaatcattacaacagctag

SEQ ID NO: 132038 - DNA, 75 bp, synthetic construct
  source 1..75: mol_type = other DNA
atgaaaatagcgcgaatatatttgcgggttagtacagacgaacaagatttaacccggcaaaatgaaattattgaa

SEQ ID NO: 132039 - DNA, 75 bp, synthetic construct
  source 1..75: mol_type = other DNA
caaactatattgttctactgagccagtgtacgacttctggagctatttcaaaacctcggtacgctatcagtcttc

SEQ ID NO: 132040 - DNA, 75 bp, synthetic construct
  source 1..75: mol_type = other DNA
acctgatgaaagcgtgccgttatatctacaacgtctggagtattatcgtcggctttatcggccgaaacaggtaga

SEQ ID NO: 132041 - DNA, 75 bp, synthetic construct
  source 1..75: mol_type = other DNA
cccgtaacacaattccgtccgatattcctgaggaaaacgtgccgttatatctacaacgtctggaatattatcgcc

SEQ ID NO: 132042 - DNA, 75 bp, synthetic construct
  source 1..75: mol_type = other DNA
gagaacagggaaatgcaggatgcagtgcctgattttttctataccggactgcggatgtatcggtttcatcccgga

SEQ ID NO: 132043 - DNA, 75 bp, synthetic construct
  source 1..75: mol_type = other DNA
cgcaccgtatcacgacaatttccaccaacaaccgcgctatatcccgctcagccagcccatgcctttactggcaaa

SEQ ID NO: 132044 - DNA, 75 bp, synthetic construct
  source 1..75: mol_type = other DNA
ttgtccagggaatgattaaagccaccaccgacgcctggctgaaaggctgggacgagcgcaacggcggcaacctga

SEQ ID NO: 132045 - DNA, 75 bp, synthetic construct
  source 1..75: mol_type = other DNA
ggcaaattcttccgtaacgtccagcttgatcctgcggctaacttaggcgtcgtaaaagtcgacagcgacggcgcg

SEQ ID NO: 132046 - DNA, 75 bp, synthetic construct
  source 1..75: mol_type = other DNA
aaatggacgatcgaagaatgcaaagaaataataaatatatatcagcgtaaattagacacattaaggaaggagaga

SEQ ID NO: 132047 - DNA, 75 bp, synthetic construct
  source 1..75: mol_type = other DNA
ttacaggacggtcgccgccgccggacaccttcgcttcaatgaagataacgtccataaacaatgtaggcactgcaa

SEQ ID NO: 132048 - DNA, 75 bp, synthetic construct
  source 1..75: mol_type = other DNA
cgaacgtgatgcgcggttgccgtgtatatcctgcgggacttactacggtgagcaatgcgggtgggatgcgggcca

SEQ ID NO: 132049 - DNA, 75 bp, synthetic construct
  source 1..75: mol_type = other DNA
gagcggcgagaagatgatgtactcaacggtgaagaattcgatacattcagtcaggaaatgaccgatattatctat

SEQ ID NO: 132050 - DNA, 75 bp, synthetic construct
  source 1..75: mol_type = other DNA
cggcaacgaagatccagttattacaaaaattactggaaaaagcgatcagcgacttcaagaaagtgaaccagttgc

SEQ ID NO: 132051 - DNA, 75 bp, synthetic construct
  source 1..75: mol_type = other DNA
atgttgcaacattattcagtgtcatggaaaaaaggactggctgcactctgtttactggctgttgctgggcttagc

SEQ ID NO: 132052 - DNA, 75 bp, synthetic construct
  source 1..75: mol_type = other DNA
atgatacttcaattagaattattttctgtaaaacgctttctgccttccggacagaaaataccatcgttatgctca

SEQ ID NO: 132053 - DNA, 75 bp, synthetic construct
  source 1..75: mol_type = other DNA
atggctcgcagctgtggcgctacccaacccccaacaccaaagccgtgcgggtgacatggaaaaccaaacattcag

SEQ ID NO: 132054 - DNA, 75 bp, synthetic construct
  source 1..75: mol_type = other DNA
cctgggatcagcgaggaaagttctccaccgcgtttaacccctgcgttgctgtgccgtttggcccctgggatacgc

SEQ ID NO: 132055 - DNA, 75 bp, synthetic construct
  source 1..75: mol_type = other DNA
tagttgagacaaaaacccctgagagtcgtattaatggagaattattcataacccctgacgtgttaacacctcgta

SEQ ID NO: 132056 - DNA, 75 bp, synthetic construct
  source 1..75: mol_type = other DNA
gcgagcgcaagggtgacatcaccaccagcccgacgcagctgggtattacctccggtaacgcagcgcctgtcacca

SEQ ID NO: 132057 - DNA, 75 bp, synthetic construct
  source 1..75: mol_type = other DNA
tacgcaaatcagctgtacggtaaatatggctctgaaacgctggcgggtgctgcgtataactggggtatgggtaac

SEQ ID NO: 132058 - DNA, 75 bp, synthetic construct
  source 1..75: mol_type = other DNA
catgagactatttatgatagaaacgtagaatttgacaaactcaggaaaaatatcaggtcagaaatattaaaaaga

SEQ ID NO: 132059 - DNA, 75 bp, synthetic construct
  source 1..75: mol_type = other DNA
cagatgcccgcccggatatgaccccgcaggagttcttctttaagggacttacccaaatacaatcttacgaaaaga

SEQ ID NO: 132060 - DNA, 75 bp, synthetic construct
  source 1..75: mol_type = other DNA
ccgggttacacagagtatgtcctggctgaaggatctttctcatacgggcaggcggttgctgtcataaccgcttac

SEQ ID NO: 132061 - DNA, 75 bp, synthetic construct
  source 1..75: mol_type = other DNA
atatcctctatgcgggtgaagttgtgaaaaaccctcccggcacacctcccgtcgatgtcgcctcattcaaggcat

SEQ ID NO: 132062 - DNA, 75 bp, synthetic construct
  source 1..75: mol_type = other DNA
caaggagcgtcattattttctgcaaagtacccgacaaaaacaggatgtacaggtcttcaccagcagtggcccgct

SEQ ID NO: 132063 - DNA, 75 bp, synthetic construct
  source 1..75: mol_type = other DNA
acccgatcagtgacatcgtggcgcagtatcaggacaagttgttcgccatcagtaaaacccccttcggtcaaaatc

SEQ ID NO: 132064 - DNA, 75 bp, synthetic construct
  source 1..75: mol_type = other DNA
ctaccaacctttatggcggtacgatgatttttcccggtgacagcggatacctcaaaatgggtaactgccttatgt

SEQ ID NO: 132065 - DNA, 75 bp, synthetic construct
  source 1..75: mol_type = other DNA
acgggtgatgcggtaactggcttggatgcgctggttcagaaaggccagaaagtagttgatgttgctgtaaaccag

SEQ ID NO: 132066 - DNA, 75 bp, synthetic construct
  source 1..75: mol_type = other DNA
agtaaattaattgctgcctctgattcctcaggttcattttttggtgggctaggtaaaagcacatcagcaattatg

SEQ ID NO: 132067 - DNA, 75 bp, synthetic construct
  source 1..75: mol_type = other DNA
atattacccttgatcaggctgcttccaacgactctatccagtggaaatcttctctaccaattactgtttcttacc

SEQ ID NO: 132068 - DNA, 75 bp, synthetic construct
  source 1..75: mol_type = other DNA
cgactggaaggatttacacaaggcttgcagcaagccggagtaacgctacaacctgaatggattattcacggtaat

SEQ ID NO: 132069 - DNA, 75 bp, synthetic construct
  source 1..75: mol_type = other DNA
tgtttatagtgcattttatggttccggcatcaaaaaaggcgaaaaaatcaggatcactcttgacaaccctgcagg

SEQ ID NO: 132070 - DNA, 75 bp, synthetic construct
  source 1..75: mol_type = other DNA
gttggtgatgatgtaactggtctggatgcgcaaattaagaaaggccagaaagaagttagtatttttgcaccacaa

SEQ ID NO: 132071 - DNA, 75 bp, synthetic construct
  source 1..75: mol_type = other DNA
tacgctggataaagcggctatgccggatttaagttccgtgaattcaggaagcggtgtggcgacactaattaaccc

SEQ ID NO: 132072 - DNA, 75 bp, synthetic construct
  source 1..75: mol_type = other DNA
cggtttctcagggggcgggttccctgacgttccgtgataattacacagtaacaacctctaacggaagtacctgga

SEQ ID NO: 132073 - DNA, 75 bp, synthetic construct
  source 1..75: mol_type = other DNA
tttactcgactcagatatccatctgacgagctttgacgatcactatctttatgattcgctgtcgctgcgtatcga

SEQ ID NO: 132074 - DNA, 75 bp, synthetic construct
  source 1..75: mol_type = other DNA
gtattcgtactcagactgctgaggtgtttcatggacaggctggtatcactccgcagattagctatggtaatgcgg

SEQ ID NO: 132075 - DNA, 75 bp, synthetic construct
  source 1..75: mol_type = other DNA
gcgctgttgcggacaatatcttggctgaagcgagagaacattataatccccaggggcactatgacactcctgcac

SEQ ID NO: 132076 - DNA, 75 bp, synthetic construct
  source 1..75: mol_type = other DNA
gccggaacaactgaatctcaggtatcaacggatgtcagtgatgatgtgacagatgcaacctctccggttgcaccg

SEQ ID NO: 132077 - DNA, 75 bp, synthetic construct
  source 1..75: mol_type = other DNA
gacattctgctctccgcgccgtcgattgttgttggtctgtttgtttataccatcgtggtggctcagatggagcac

SEQ ID NO: 132078 - DNA, 75 bp, synthetic construct
  source 1..75: mol_type = other DNA
ggctgaagttattcgcttcattaacgacattctgctctccgcgccgtcgattgttgttggtctgtttgtttatac

SEQ ID NO: 132079 - DNA, 75 bp, synthetic construct
  source 1..75: mol_type = other DNA
ctgtcggcatcggtattccgggaatgccggaaacagaagatggtacgctgtatgccgccaatgtccccgctgcca

SEQ ID NO: 132080 - DNA, 75 bp, synthetic construct
  source 1..75: mol_type = other DNA
acgggctgcgcgacgcctcgtttcgcggtgtccccttctttctggtggatacagaaggcaccggtggccgcaggg

SEQ ID NO: 132081 - DNA, 75 bp, synthetic construct
  source 1..75: mol_type = other DNA
gatgctggcgactggttcagtgtacctgacgggctgggtgatatggccgacagctttctggccgatatggaaaac

SEQ ID NO: 132082 - DNA, 75 bp, synthetic construct
  source 1..75: mol_type = other DNA
gaagcgtttgaactggaggcgtttgactacattctcaaaccgtatcaggagtcacgtattaccgggatgctgcaa

SEQ ID NO: 132083 - DNA, 75 bp, synthetic construct
  source 1..75: mol_type = other DNA
cttatgatgcaattgttctggagttgatgtctgaactgggtgaaagcagtgccacaatgtttacccgacacgctg

SEQ ID NO: 132084 - DNA, 75 bp, synthetic construct
  source 1..75: mol_type = other DNA
tgattttgactttcttgatgccgccgcgttgctcgatacagatgggaaaaaaattgtgatgacatggtttgccga

SEQ ID NO: 132085 - DNA, 75 bp, synthetic construct
  source 1..75: mol_type = other DNA
ccagccgcgacagatttcacctgatgctgcaaaaatacccgttgctgtctcattactggagtacgcaggaaaaca

SEQ ID NO: 132086 - DNA, 75 bp, synthetic construct
  source 1..75: mol_type = other DNA
ggtgtttggttacgcgatgaaaaacagtgggctctggttggcagcacgcagtactaaaaccgctcaccataagca

SEQ ID NO: 132087 - DNA, 75 bp, synthetic construct
  source 1..75: mol_type = other DNA
gcggcatgaacatacttctctctattgcaatcacaacaggcattctctccggtatttggggatgggtggctgttt

SEQ ID NO: 132088 - DNA, 75 bp, synthetic construct
  source 1..75: mol_type = other DNA
taaactcgcaagccgactgatgccttctgaacaatggaaaggtattattgccgtaagccgtggcggtctggtacc

SEQ ID NO: 132089 - DNA, 75 bp, synthetic construct
  source 1..75: mol_type = other DNA
gaccgtctcaggacatgtgtggtccgagtatgggaaaggcgatcacaaactcgaacaggtagacaaacattcggc

SEQ ID NO: 132090 - DNA, 75 bp, synthetic construct
  source 1..75: mol_type = other DNA
caatttttacaccagagtctctaaaaacgactcaaaacattgttaaggccgggcgtgtcgtacaggtttttagta

SEQ ID NO: 132091 - DNA, 75 bp, synthetic construct
  source 1..75: mol_type = other DNA
attattatcagaaacagagcctgaacgctatgggttgatgccaaaagattattcagcacccactactgtagcaga

SEQ ID NO: 132092 - DNA, 75 bp, synthetic construct
  source 1..75: mol_type = other DNA
agaagcgaccaaacaaacgcccgacaaacgcagatttgcgtgattctggaagcattgaacaggacgcagactcaa

SEQ ID NO: 132093 - DNA, 75 bp, synthetic construct
  source 1..75: mol_type = other DNA
gctgaaatcatcgtgacgaaaaaccgttttggctcgcttggtacagtttaccagcggttctgtaacggacacttt

SEQ ID NO: 132094 - DNA, 75 bp, synthetic construct
  source 1..75: mol_type = other DNA
acctttgacaggctgtcactgaagaacactgattttggtcttggtcgcaatgccacactgaacacaaccatccag

SEQ ID NO: 132095 - DNA, 75 bp, synthetic construct
  source 1..75: mol_type = other DNA
atgagttgctggtgacaaatggtatagacgtgtcagtcaagcgcgttgagtccgccgtgaacagctacagagttg

SEQ ID NO: 132096 - DNA, 75 bp, synthetic construct
  source 1..75: mol_type = other DNA
gtcagggtttcgtcctgggtttcattttcctgtttttcacggcgcagctccccacttcaacactcgccagctgtt

SEQ ID NO: 132097 - DNA, 75 bp, synthetic construct
  source 1..75: mol_type = other DNA
gtccgggtttcgtcctggatttcattttcctgcttttcacagcgcagctccccacttcaatactcgtcagttgtt

SEQ ID NO: 132098 - DNA, 75 bp, synthetic construct
  source 1..75: mol_type = other DNA
ctaagtcagctttcacgcgatgttgagaagcgaccaaacaaacgcccgacaaacgcagatttgcgtgattcagga

SEQ ID NO: 132099 - DNA, 75 bp, synthetic construct
  source 1..75: mol_type = other DNA
ggatcaactggcgtcgtcgccgtaccgcggcggtggctgtgatcaccggtgtgaactacggaactgcgtccggcg

SEQ ID NO: 132100 - DNA, 75 bp, synthetic construct
  source 1..75: mol_type = other DNA
aagcatctggcttcacaacataaaccgcaggaacgaccaataaacggtagtccgtatggagaacaccccgttgag

SEQ ID NO: 132101 - DNA, 75 bp, synthetic construct
  source 1..75: mol_type = other DNA
ggtatttggttacgcaatgaaaaacagcggcctgtggctggcggcgcgtagtgcaaagacggctcaccgtgagca

SEQ ID NO: 132102 - DNA, 75 bp, synthetic construct
  source 1..75: mol_type = other DNA
atggccgcgttttctgctatcatgcgcagcatgaacatacttctctctattgcaatcacaacaggcattctctct

SEQ ID NO: 132103 - DNA, 75 bp, synthetic construct
  source 1..75: mol_type = other DNA
ggaggactgggagaaccggagctttacctttgacaggctgtcactgaagaacaccgattttggccttggtcgtaa

SEQ ID NO: 132104 - DNA, 75 bp, synthetic construct
  source 1..75: mol_type = other DNA
agattacactattcagggagagctgagtgacctgtccggcagggcaaaaagccatatcctgacagcgggtatccg

SEQ ID NO: 132105 - DNA, 75 bp, synthetic construct
  source 1..75: mol_type = other DNA
ttctgggacagaatggacagattgacctgaaagacaatgttgcacagggggcaggttctctgacattccgtaatg

SEQ ID NO: 132106 - DNA, 75 bp, synthetic construct
  source 1..75: mol_type = other DNA
gtttaatgggagcgctgtcctgaacgggaagacgacactggatatcatgaacgcaacctttaatggtgatatcag

SEQ ID NO: 132107 - DNA, 75 bp, synthetic construct
  source 1..75: mol_type = other DNA
tgaaatgcatgggaaaaaaaataatgatctaaataatggaaaaaacctcttgtttaaaggtaatgaagccaaaat

SEQ ID NO: 132108 - DNA, 75 bp, synthetic construct
  source 1..75: mol_type = other DNA
aaacaggaaaatccaaacctgtcactcatcatggcggattatcttggcctgattgagaagccgaaagcagaccgc

SEQ ID NO: 132109 - DNA, 75 bp, synthetic construct
  source 1..75: mol_type = other DNA
gtcgatgcctcgcggttatcggtcgaagaaatacgctcaatcgcagaacggcacaaacaggaaaatccaaacctg

SEQ ID NO: 132110 - DNA, 75 bp, synthetic construct
  source 1..75: mol_type = other DNA
cccggtactattctctgcaggaagtcttgcgggaacggtcaataatgaactcgagtatcagttatttcgtgattt

SEQ ID NO: 132111 - DNA, 75 bp, synthetic construct
  source 1..75: mol_type = other DNA
gctcctaaaaataccgatagcaatttatttaacattggttctctgtcttctgggttccatacggttacaccttta

SEQ ID NO: 132112 - DNA, 75 bp, synthetic construct
  source 1..75: mol_type = other DNA
taattcttctgttaactcggctagtattaataattcagttatcgatatgtcttcttataatgtgaactttaaaac

SEQ ID NO: 132113 - DNA, 75 bp, synthetic construct
  source 1..75: mol_type = other DNA
agagaacgcgcgatcattgatgcgcagaatgtgccaggacgtaagaaacgtgctggacgtaaatcacaattaatc

SEQ ID NO: 132114 - DNA, 75 bp, synthetic construct
  source 1..75: mol_type = other DNA
tctacattgccctgaaatgtggggaagtgaaacgccacacaatagccagcaatttggggcaatgcgttacccgtg

SEQ ID NO: 132115 - DNA, 75 bp, synthetic construct
  source 1..75: mol_type = other DNA
ttcgaattaataataaatcaacatatcatttcacgctccgattttctgtcggaggcgaaactgcggctattcata

SEQ ID NO: 132116 - DNA, 75 bp, synthetic construct
  source 1..75: mol_type = other DNA
tcacgttccgtttatccggtcatgtcatcagcactaaataattcatcctggaaatttagtacccgaatgcaaaaa

SEQ ID NO: 132117 - DNA, 75 bp, synthetic construct
  source 1..75: mol_type = other DNA
gtggttgcaggacaggatgttgacattgttgcaaatataaaaaataacacctaccaaagtggcatcagcaacaac

SEQ ID NO: 132118 - DNA, 75 bp, synthetic construct
  source 1..75: mol_type = other DNA
tacagtatcccgtgaagagttttctgactatctccgctgggctgctgaagatatgaataacctgtatttcagtca

SEQ ID NO: 132119 - DNA, 75 bp, synthetic construct
  source 1..75: mol_type = other DNA
tccggttatccgttaaccgatcagtactattgtttttcatttaaaaaacgctctgatgaaaattgtacaggggct

SEQ ID NO: 132120 - DNA, 75 bp, synthetic construct
  source 1..75: mol_type = other DNA
gtgggcgttattcatgataagaaatgtgaaaaacaaagacctgttaatctggacctacagaccatccggttcccc

SEQ ID NO: 132121 - DNA, 75 bp, synthetic construct
  source 1..75: mol_type = other DNA
aagcgggtaaacgctccgccaaaatctcctttgtcattactgtcgtgctttcaattcttgcaggagtcctcgtat

SEQ ID NO: 132122 - DNA, 75 bp, synthetic construct
  source 1..75: mol_type = other DNA
gtgtggagtatttttctggtaatgtcacggctgaagacaattatcccggcgggagagagttcactgtcactgtga

SEQ ID NO: 132123 - DNA, 75 bp, synthetic construct
  source 1..75: mol_type = other DNA
agatgttctcagtcagttgcatatagacttcagagcactcaatggcgtgatggcagcaggctcccaacaaatttt

SEQ ID NO: 132124 - DNA, 75 bp, synthetic construct
  source 1..75: mol_type = other DNA
aaatgtcttaaatcagctacacatagactttagggcacaaagtggtgcaatggctaatggttcccgacaaatatt

SEQ ID NO: 132125 - DNA, 75 bp, synthetic construct
  source 1..75: mol_type = other DNA
cggcactgatgccgactgtaatctgcagagtctgtgctggccgtgtcataagtcgaagacggcccgtgaacgact

SEQ ID NO: 132126 - DNA, 75 bp, synthetic construct
  source 1..75: mol_type = other DNA
aacaaaaaagattgccgtgatggcatccgcacccaacgcgaaagctgcggtctatccaccgctgaactcgccacg

SEQ ID NO: 132127 - DNA, 75 bp, synthetic construct
  source 1..75: mol_type = other DNA
gttacagcgcttgctgggtaagaaaccatggaagttgagatcctcaaagaagcggtggagtatggtcagtcgcga

SEQ ID NO: 132128 - DNA, 75 bp, synthetic construct
  source 1..75: mol_type = other DNA
agctaaaagtcgtaatctgtcagaatactggaaagccgaagtcatcatgcgggataagtttgtcttacaccgcct

SEQ ID NO: 132129 - DNA, 75 bp, synthetic construct
  source 1..75: mol_type = other DNA
tcatccctaaagcgcatggcggcactgatgccgacagcaatctgcagagcctgtgctggccgtgtcataaggcga

SEQ ID NO: 132130 - DNA, 75 bp, synthetic construct
  source 1..75: mol_type = other DNA
gcgggagaagtttgtttttcaccggcttatcaggaacggtatgcagaggcagagaggctttcttctgtggtggcg

SEQ ID NO: 132131 - DNA, 75 bp, synthetic construct
  source 1..75: mol_type = other DNA
aaaccagccggggagaatattttgcccacaatatctgccttggtacaggaaaacaaccttatttaccaccctgtg

SEQ ID NO: 132132 - DNA, 75 bp, synthetic construct
  source 1..75: mol_type = other DNA
tcacgttccgtttatccggtcatgtcatcagcactaaacaattcatcctggaaatttagcacccgaatgcaaaaa

SEQ ID NO: 132133 - DNA, 75 bp, synthetic construct
  source 1..75: mol_type = other DNA
aaaatcgatccagcgctgaatgtcacctctggcccactgataagccatgtgttagtggatatttactacgaataa

SEQ ID NO: 132134 - DNA, 75 bp, synthetic construct
  source 1..75: mol_type = other DNA
ataaaagagttacagcgctttctgggtaaaaaaccatggaatttgagatcctcaaagaagcagtggagtatggtc

SEQ ID NO: 132135 - DNA, 75 bp, synthetic construct
  source 1..75: mol_type = other DNA
atgcatcccactcaacgtaagctgatgaagagaataattctgtttctgtcactactgtttcccattacctgtcca

SEQ ID NO: 132136 - DNA, 75 bp, synthetic construct
  source 1..75: mol_type = other DNA
ctagtgacaaaatttatcaaagagacgcttttctcagatataaatgcacttgatgcgagttgttcatcattgtaa

SEQ ID NO: 132137 - DNA, 75 bp, synthetic construct
  source 1..75: mol_type = other DNA
atgagcgaaaaatacatcgtcacctgggacaggttgcagatccatgcacgtaaactcgcaagccgactgatgcct

SEQ ID NO: 132138 - DNA, 75 bp, synthetic construct
  source 1..75: mol_type = other DNA
tcatcgttattgatgacctggtggataccggtggtactgcggttgcgattcgtgaaatgtatccaaaagcgcact

SEQ ID NO: 132139 - DNA, 75 bp, synthetic construct
  source 1..75: mol_type = other DNA
tctgaacaatggaaaggcattattgccgtaagccgtggcggtctggtaccgggtgcgttactggcgcgtgaactg

SEQ ID NO: 132140 - DNA, 75 bp, synthetic construct
  source 1..75: mol_type = other DNA
aatcaggtagaccagttcggcggttataccggaatgacgcccgccgattttcgcggctttgtttgtcagctcgcc

SEQ ID NO: 132141 - DNA, 75 bp, synthetic construct
  source 1..75: mol_type = other DNA
ccgttagccgtggcggtctggtgcccggagccttactggcgcgtgaactgggtattcgtcatgtcgataccgtat

SEQ ID NO: 132142 - DNA, 75 bp, synthetic construct
  source 1..75: mol_type = other DNA
tctgaacagtggaaaggcattattgccgttagccgtggcgggctggtaccgggtgcgttactggcgcgtgaactg

SEQ ID NO: 132143 - DNA, 75 bp, synthetic construct
  source 1..75: mol_type = other DNA
aaccggaatctctcgacgatatccttggcgatattctgaaaaaagagacaacgataacctcgtttttaaatatgc

SEQ ID NO: 132144 - DNA, 75 bp, synthetic construct
  source 1..75: mol_type = other DNA
ggcggtggtctggcgaacgccctggcaggtagcggcttgttaattttgtgggctacggtattcggtacgccactg

SEQ ID NO: 132145 - DNA, 75 bp, synthetic construct
  source 1..75: mol_type = other DNA
ggcggtggtctggcgaacgccctggcgggtagcggcctgttaattttgtgggccacggtattcggtacgccgctg

SEQ ID NO: 132146 - DNA, 75 bp, synthetic construct
  source 1..75: mol_type = other DNA
aaacgacggtgccatactggttgtggatcggtcactgaatgcggagcacggttccattgtcgttgcactgattga

SEQ ID NO: 132147 - DNA, 75 bp, synthetic construct
  source 1..75: mol_type = other DNA
ggaatttgctctggcaggtcagattgtcagtctggagcctcatcgtcttgccagcgtcattgctgccggagtggc

SEQ ID NO: 132148 - DNA, 75 bp, synthetic construct
  source 1..75: mol_type = other DNA
tcccgccgtattcagtatgcgtttcctgataatgaaggccacgtatcggtacgttatgccgcagcgaataattta

SEQ ID NO: 132149 - DNA, 75 bp, synthetic construct
  source 1..75: mol_type = other DNA
cagattggttgctctgaacgaacggtcagacgttacctcaaataccctgaaccgccagccagaaaaaacgccaca

SEQ ID NO: 132150 - DNA, 75 bp, synthetic construct
  source 1..75: mol_type = other DNA
atgaatcagaagtggaagacgctaatagtttcagtattaacaccatcaagtattatatcagggattgcgttgata

SEQ ID NO: 132151 - DNA, 75 bp, synthetic construct
  source 1..75: mol_type = other DNA
ggcattacgcccaatgcgcaaaccgttagtgataatgatgagtaagcgtttacttcggtttaaaggcgctatgag

SEQ ID NO: 132152 - DNA, 75 bp, synthetic construct
  source 1..75: mol_type = other DNA
ctggagaagctggggctaatcaacgcattgggttatgcaccaggtgatatgcaaccgtcagattccgcaacctag

SEQ ID NO: 132153 - DNA, 75 bp, synthetic construct
  source 1..75: mol_type = other DNA
gcgctatccatccctcttgattccctgcgggagaatcttgataagttgcctgaagataaagagattattatcggg

SEQ ID NO: 132154 - DNA, 75 bp, synthetic construct
  source 1..75: mol_type = other DNA
atcttactgacatggatgctatccaggcgtggattgagcaacataatatcgctcacaccacgcttgtcggggggg

SEQ ID NO: 132155 - DNA, 75 bp, synthetic construct
  source 1..75: mol_type = other DNA
ttgcgaggaggatactgacacaaactttgtcaatttaattaacagttttcttgaaacgacattaagagtccaaga

SEQ ID NO: 132156 - DNA, 75 bp, synthetic construct
  source 1..75: mol_type = other DNA
tcacccaagagttatcatcccctaactgggaaagaagcatcatacgcaagctaacaagaaattatatcagtttat

SEQ ID NO: 132157 - DNA, 75 bp, synthetic construct
  source 1..75: mol_type = other DNA
gccacgcatcattgccctggtggttcaacccggcgtcgaattcgatcacaccaacgttattgattatcagcccgc

SEQ ID NO: 132158 - DNA, 75 bp, synthetic construct
  source 1..75: mol_type = other DNA
tggttgcgtacgccggaaaaactcccggaagactggcggcgtttttttctttcacctgaactgactgtccaaagc

SEQ ID NO: 132159 - DNA, 75 bp, synthetic construct
  source 1..75: mol_type = other DNA
gataagagtgttaatttcaaagtgatagccgaactggctttcatgtcatattttatctttcttctgacaatgctt

SEQ ID NO: 132160 - DNA, 75 bp, synthetic construct
  source 1..75: mol_type = other DNA
ttgatcattaccctgtgcgtactgctgctgaacattctggcgcgcgttgtttttgcgaagaataaacacggttaa

SEQ ID NO: 132161 - DNA, 75 bp, synthetic construct
  source 1..75: mol_type = other DNA
aggccggatgcgaatgaaaatgcgccgtcagcgttatgccgtctggggaaacaccgaacagacacgtaatttagc

SEQ ID NO: 132162 - DNA, 75 bp, synthetic construct
  source 1..75: mol_type = other DNA
ggctggaaaacgggctgccagaaatgcccgaccttaaataactatccgccggtgaagattgatcgcgcacaccag

SEQ ID NO: 132163 - DNA, 75 bp, synthetic construct
  source 1..75: mol_type = other DNA
gaagatgaaatggtcgggatcatccgattcggtaaagaggattgcgtacgttcggcactttgccaacgtacgctg

SEQ ID NO: 132164 - DNA, 75 bp, synthetic construct
  source 1..75: mol_type = other DNA
tggtacagcgccatgcgccaggtgactacaccccaacggtaaaaccaagcagcaaaggcaactaccactcggtat

SEQ ID NO: 132165 - DNA, 75 bp, synthetic construct
  source 1..75: mol_type = other DNA
ggcgcaccggcagctccggagccggaaggcatcgcgggaggggggagtgcttcagatagcggtgaccccacacct

SEQ ID NO: 132166 - DNA, 75 bp, synthetic construct
  source 1..75: mol_type = other DNA
tgtgctgtatctcctttcgggtggataccgggccatgcgtgacttctggcgcagacagattgacaaaagggccgc

SEQ ID NO: 132167 - DNA, 75 bp, synthetic construct
  source 1..75: mol_type = other DNA
agaagccattggtatggcccgcgacagtcgcgatacttcgcccatcctcgcgcgaaatgaagcgcaattgcacta

SEQ ID NO: 132168 - DNA, 75 bp, synthetic construct
  source 1..75: mol_type = other DNA
tggtccggcgcttaggggcttcctttatgcagtactgcctgcgaccggaaatagggaaggtggaaattgcgccgt

SEQ ID NO: 132169 - DNA, 75 bp, synthetic construct
  source 1..75: mol_type = other DNA
atggtaacgtcctgtactggacatgttttagataatcaacgcgccaccactcgcggagttttctcctccggtagt

SEQ ID NO: 132170 - DNA, 75 bp, synthetic construct
  source 1..75: mol_type = other DNA
aagtgacgcgctggaacgtttcgaagaagatgaaatggtcgggatcgtccggttcggtaaagaggattgcgtacg

SEQ ID NO: 132171 - DNA, 75 bp, synthetic construct
  source 1..75: mol_type = other DNA
tggctcaggaccggcagggggaacctggcggatttaaaggaagagctctggtactacaaccttttcatcaatccg

SEQ ID NO: 132172 - DNA, 75 bp, synthetic construct
  source 1..75: mol_type = other DNA
catggtgtcggaaaatcgttttatattagatgtcgactttgaccaaaccgaagcacagcaaggtcttactggacg

SEQ ID NO: 132173 - DNA, 75 bp, synthetic construct
  source 1..75: mol_type = other DNA
atgatcctgcacgcgcaggcaaaacacggcaaaccaggtttaccctggctggtttttttgcacggtttttccggc

SEQ ID NO: 132174 - DNA, 75 bp, synthetic construct
  source 1..75: mol_type = other DNA
gcggggctttgtggagttgttgtcgaaggcgggcatcctgggttgcaaaatgctgaacaacgcgcggaacgtcag

SEQ ID NO: 132175 - DNA, 75 bp, synthetic construct
  source 1..75: mol_type = other DNA
tgactttaaccgcatcatgagcgtgctgcataatcttggttatttcgtatgcgcccctgaggtaaataaaataat

SEQ ID NO: 132176 - DNA, 75 bp, synthetic construct
  source 1..75: mol_type = other DNA
catcacattatcacatccaccagcaggacgtgtgaccatctaatgatcgaccttgaaaccatgggaaaaaatcct

SEQ ID NO: 132177 - DNA, 75 bp, synthetic construct
  source 1..75: mol_type = other DNA
tattggtattcatcacattttctgcgcaggccgcagagcttcaggtcacaagtagtgaaataaaaacaggaaaac

SEQ ID NO: 132178 - DNA, 75 bp, synthetic construct
  source 1..75: mol_type = other DNA
gatgatggcggcttgccaggggctggcggggctttatggggttattgtcgaaggcgggcatccggggctgcaaaa

SEQ ID NO: 132179 - DNA, 75 bp, synthetic construct
  source 1..75: mol_type = other DNA
cttgtccggtctggggctggccgccgttcatgcctggaagaagtggcaaatttcgccagtccctaccggggagca

SEQ ID NO: 132180 - DNA, 75 bp, synthetic construct
  source 1..75: mol_type = other DNA
atgtcagaaattacatccctggtcactgcagaggcagtgaaggaagtcctgcgctctgaagaagtccggagcgca

SEQ ID NO: 132181 - DNA, 75 bp, synthetic construct
  source 1..75: mol_type = other DNA
atgtcagaaatcacatccctggtcactgcagaggcagtgaaggaagtccggagcgcactgaaacagaaacttcgc

SEQ ID NO: 132182 - DNA, 75 bp, synthetic construct
  source 1..75: mol_type = other DNA
caggtctgaacctcaacaaaacgttaaaaaagggattcgtgggtggagtcgccgcacggataaccgcagggcttt

SEQ ID NO: 132183 - DNA, 75 bp, synthetic construct
  source 1..75: mol_type = other DNA
tgtaggtgctaaagaaaaaaaacatggtgctattgttagcactaggaatccgctaaactcaacagaaaccaataa

SEQ ID NO: 132184 - DNA, 75 bp, synthetic construct
  source 1..75: mol_type = other DNA
tcgctgatattaaatataacacccagttcagcttaaattatcaactcaaagaaagctttataaacccagtaacca

SEQ ID NO: 132185 - DNA, 75 bp, synthetic construct
  source 1..75: mol_type = other DNA
atgtcatgccaccgcatttaaccagcattccgaccgggatctgaaagacaacattcaggtgatcgataatgcaac

SEQ ID NO: 132186 - DNA, 75 bp, synthetic construct
  source 1..75: mol_type = other DNA
cgtatggtgtgcggggaagtaacgcgcttattaaatttgattacacagacacattacaaatcaaatacgctaatc

SEQ ID NO: 132187 - DNA, 75 bp, synthetic construct
  source 1..75: mol_type = other DNA
ggcaactccagccgtcctgttgtttatgaagtcggtgttgatggtggcgcttatatgttctatgcgcagaaaaat

SEQ ID NO: 132188 - DNA, 75 bp, synthetic construct
  source 1..75: mol_type = other DNA
ggaacaaaaggtatcttttgggattttagcgatctttacggtggaacattaatttttccaggcagtgatggttac

SEQ ID NO: 132189 - DNA, 75 bp, synthetic construct
  source 1..75: mol_type = other DNA
acagggatccgctcacgctggcgtaacaactagactatggggtaattctagccgtccggttgtttatgaagttgg

SEQ ID NO: 132190 - DNA, 75 bp, synthetic construct
  source 1..75: mol_type = other DNA
cctatggggatcgtgtagataatgccctgattaaatttgattatacagacacactacagatcaaatatgctaatc

SEQ ID NO: 132191 - DNA, 75 bp, synthetic construct
  source 1..75: mol_type = other DNA
ggattaccgtcgtgttctgccgaagaatccggacaaacatctcgaagcagggtgcgatctgctcaagcaggcgtt

SEQ ID NO: 132192 - DNA, 75 bp, synthetic construct
  source 1..75: mol_type = other DNA
atggttacaaaaacagtaattcctgatgacatcaaaacgctaaaatccgatgttagtaaactaaaaactgatcaa

SEQ ID NO: 132193 - DNA, 75 bp, synthetic construct
  source 1..75: mol_type = other DNA
atattcaggtgatcgataatgcaaccgaccgcattcgtaaaatgaacggctatacatacacgcttaaagaaaacg

SEQ ID NO: 132194 - DNA, 75 bp, synthetic construct
  source 1..75: mol_type = other DNA
ggctctgaccgggatctgaaagacaatattcaggtgatcgataatgcaatcgaccgcattcgtaaaatgaacggc

SEQ ID NO: 132195 - DNA, 75 bp, synthetic construct
  source 1..75: mol_type = other DNA
acagcactggaagaagaaaacgcagaattaaaacaaagattatctgcaattgaggcggcgcttgcgtctaaataa

SEQ ID NO: 132196 - DNA, 75 bp, synthetic construct
  source 1..75: mol_type = other DNA
gaagcggaagagatcctcggacaaacatctggaagctggctgggatctgctcaagcaggcgtttgctcgtgcggc

SEQ ID NO: 132197 - DNA, 75 bp, synthetic construct
  source 1..75: mol_type = other DNA
ggtgcaattcaggcaattaaagaagcgggcctgaaaccgggtaaagatatcctcacgggttccattgatggcgta

SEQ ID NO: 132198 - DNA, 75 bp, synthetic construct
  source 1..75: mol_type = other DNA
ccgtagtaaaggcaaagaggtcatggagggtaatgactccaacttattgatagtgttttatgttcagataatgcc

SEQ ID NO: 132199 - DNA, 75 bp, synthetic construct
  source 1..75: mol_type = other DNA
gcaagttgatcggcgactggctggtgaaagaggtcaacggcaagccgtgtaatgtggttgagttgcaaggcactg

SEQ ID NO: 132200 - DNA, 75 bp, synthetic construct
  source 1..75: mol_type = other DNA
gaagatgaaatggtcgggatcgtccgattcggtaaagaggattgcgtacgttcggcactttgccaacgtacgcta

SEQ ID NO: 132201 - DNA, 75 bp, synthetic construct
  source 1..75: mol_type = other DNA
atgtggaaacgcttacttgtagtctctgcagtctcggcagccatgtcgtctatggcgttggccgctcgattttcg

SEQ ID NO: 132202 - DNA, 75 bp, synthetic construct
  source 1..75: mol_type = other DNA
gcaccatgcctgaaaagctgacgttaaccaaatccaccctttacctgcctgataccgcaaaagaagagttagaga

SEQ ID NO: 132203 - DNA, 75 bp, synthetic construct
  source 1..75: mol_type = other DNA
ctggagaaatttaacggcgataaaacagcagcagcgaattatttaggcatcagccgcacgacgttctggcggcga

SEQ ID NO: 132204 - DNA, 75 bp, synthetic construct
  source 1..75: mol_type = other DNA
tgagaactcgttacgtgctgggcgatatgctcggtcaatcaccacagatggaacaggtgcggcagactattttgc

SEQ ID NO: 132205 - DNA, 75 bp, synthetic construct
  source 1..75: mol_type = other DNA
atcagattatcgccgtgattaaatcgcttgaatacgggcaaactgttaaagatgtctgccgggaggccggcttat

SEQ ID NO: 132206 - DNA, 75 bp, synthetic construct
  source 1..75: mol_type = other DNA
tttcgcgatatcagcctcgagtttgatcacctggcgaatatcacccctattcagcttggctttgaaaaagcggtg

SEQ ID NO: 132207 - DNA, 75 bp, synthetic construct
  source 1..75: mol_type = other DNA
tggatgtgcgggtcatcagcgccacccactgcaatctggaagaggatatgcagcaaggacattttcgccgtgatc

SEQ ID NO: 132208 - DNA, 75 bp, synthetic construct
  source 1..75: mol_type = other DNA
caagtgaaactgtgctgctgcactacgactggccaggcaatattcgtgaactgggtgatgctgccaacttactga

SEQ ID NO: 132209 - DNA, 75 bp, synthetic construct
  source 1..75: mol_type = other DNA
cagtagtgcaacaggaaccggaaaaagtctgcaccgtctgcggtcagagcagcggcggcaactgtcctgactgtg

SEQ ID NO: 132210 - DNA, 75 bp, synthetic construct
  source 1..75: mol_type = other DNA
cgttcaaagaatggtccgcagcacttcgcgcaacccctggtattctggattattcccgtgccgctatttttgcac

SEQ ID NO: 132211 - DNA, 75 bp, synthetic construct
  source 1..75: mol_type = other DNA
tcatacgaacgacagggcatcccctgcccgtggcgctggtccaacgatcgcgatgtacgcacaatcgttgagctg

SEQ ID NO: 132212 - DNA, 75 bp, synthetic construct
  source 1..75: mol_type = other DNA
gccattttaacagaccaggtaaaactgaaggatgccctttcgcagtttcggaagttcatcaacgaatattcagat

SEQ ID NO: 132213 - DNA, 75 bp, synthetic construct
  source 1..75: mol_type = other DNA
tacgaacgacagggtatcccctgcccgtggcgctactgcaacgatcgcgatgtacgcacaatcgttgagctgggg

SEQ ID NO: 132214 - DNA, 75 bp, synthetic construct
  source 1..75: mol_type = other DNA
ctggatgaatctcaggaaaaagatccggaggaaatggaaggcgctgaacatccacacaaggagaatgctggcagc

SEQ ID NO: 132215 - DNA, 75 bp, synthetic construct
  source 1..75: mol_type = other DNA
gatggggccggagttcagcaaaacgattgatgcaaaaaccggtggcggcactgtcgacataagcacaatcgaatg

SEQ ID NO: 132216 - DNA, 75 bp, synthetic construct
  source 1..75: mol_type = other DNA
cactactgcaattgcgggaatttatagatgaaaactcctgtggattttatgttcgagtctggggaaatggagcca

SEQ ID NO: 132217 - DNA, 75 bp, synthetic construct
  source 1..75: mol_type = other DNA
ttccgatggattttaatatttatgaaattcccgggagcgtttatcgtcgcgcaaaagaaatcgtcctgaaaaaag

SEQ ID NO: 132218 - DNA, 75 bp, synthetic construct
  source 1..75: mol_type = other DNA
aaaaacctgtccgcgtccatttccccgttgtgaatgaccttccaccggaaggcgtgtttgataccgaattctgca

SEQ ID NO: 132219 - DNA, 75 bp, synthetic construct
  source 1..75: mol_type = other DNA
accgctatgaaaaaggcgggaaagatggcatcacaatgacatttatcggcccttccccctctgttcaggacaaat

SEQ ID NO: 132220 - DNA, 75 bp, synthetic construct
  source 1..75: mol_type = other DNA
tcccattagatgatgcgctgctgcaattcagggaattcatcagcgagcattcagatgaaaaattcgtgcaggtat

SEQ ID NO: 132221 - DNA, 75 bp, synthetic construct
  source 1..75: mol_type = other DNA
gtcaaaatggaattgagcgagtcagggtttcgtcctgggtttcattttcctgtttttcacggcgtagttccccac

SEQ ID NO: 132222 - DNA, 75 bp, synthetic construct
  source 1..75: mol_type = other DNA
aatgaatcggtggtcaggctgatgcagcagcaattgcagcagactgtgatgactcacggctggatttacaccgac

SEQ ID NO: 132223 - DNA, 75 bp, synthetic construct
  source 1..75: mol_type = other DNA
atgatatctctccctgccggttcgcgtatctggctggttgccggcatcaccgacatgcgaaatggctttaacggc

SEQ ID NO: 132224 - DNA, 75 bp, synthetic construct
  source 1..75: mol_type = other DNA
atttttcattgtctgaaaagtttgaatgatttggtgcgactggcgaaggcgctggacgtcgattttcctttttct

SEQ ID NO: 132225 - DNA, 75 bp, synthetic construct
  source 1..75: mol_type = other DNA
aacaagtcaaaatggaattgagtgagtctgggtttcgtcctgggtttcattttcctgtttttcacggcgtagttc

SEQ ID NO: 132226 - DNA, 75 bp, synthetic construct
  source 1..75: mol_type = other DNA
cgcataaactgttgaattacgcgcagcaggcgcgggaatacctggattttcgtgcgcacgggttaaacgtcgctt

SEQ ID NO: 132227 - DNA, 75 bp, synthetic construct
  source 1..75: mol_type = other DNA
ttccagcaaagtgaaccgccccgggtttcctggagagtattttatctgtgaactcaggctgccagatcatcgttt

SEQ ID NO: 132228 - DNA, 75 bp, synthetic construct
  source 1..75: mol_type = other DNA
tgaactctatcgcctatgacgcaaaagatgactcaatcatcctctcctctcgccaccagggtgttgtgaaaattg

SEQ ID NO: 132229 - DNA, 75 bp, synthetic construct
  source 1..75: mol_type = other DNA
tcaactccatcgcctatgatgcaaaagatgattcgatcattatctcttctcgccatcagggtgtatttaaaatcg

SEQ ID NO: 132230 - DNA, 75 bp, synthetic construct
  source 1..75: mol_type = other DNA
aatggtttacgccattgaagacgagaacaacacaatagttgtgctacgcattctccattcagcacagcaatggcc

SEQ ID NO: 132231 - DNA, 75 bp, synthetic construct
  source 1..75: mol_type = other DNA
gtgcgcctttatggatttaggccctgcggtcggtactgccaacctggcggccaaacatgccggtatggaggctgc

SEQ ID NO: 132232 - DNA, 75 bp, synthetic construct
  source 1..75: mol_type = other DNA
cgtcaccagggtgttgtgaaaattggtcgtgataaacaagtgaaatggatacttgcgccgtctaaaggctgggaa

SEQ ID NO: 132233 - DNA, 75 bp, synthetic construct
  source 1..75: mol_type = other DNA
tactctctcgtcgccagtaccagaaactgatgcagtggaaacggcaattccggacaacgaaaaaaccgaatgcaa

SEQ ID NO: 132234 - DNA, 75 bp, synthetic construct
  source 1..75: mol_type = other DNA
tcgtggttgcgtccgtgaaagaagcaccaattggtatcgaggtcatccctgcgcacgtcactgaatatctgaaca

SEQ ID NO: 132235 - DNA, 75 bp, synthetic construct
  source 1..75: mol_type = other DNA
ttataaccttcatccggtacacgctaaacgcattgagcaaattatcgctgaaaataaaccgcccttttctgtttt

SEQ ID NO: 132236 - DNA, 75 bp, synthetic construct
  source 1..75: mol_type = other DNA
aaatcaaggtgattgcagcgcatgcactttgtcaacgtctgtccgaagttgaattagaatctgcaacgaagaaag

SEQ ID NO: 132237 - DNA, 75 bp, synthetic construct
  source 1..75: mol_type = other DNA
attcctgtggattctaattccagcggagcgttagggaaggtgcgaataagcaggtcatgtcttcccaagctgact

SEQ ID NO: 132238 - DNA, 75 bp, synthetic construct
  source 1..75: mol_type = other DNA
ataaaccccatcattaccagtttaaagtatgggctctaaaaactgataagattcctgtggattctaattccagcg

SEQ ID NO: 132239 - DNA, 75 bp, synthetic construct
  source 1..75: mol_type = other DNA
agctcagaaaaatgatccggaggaaatggaaggcactgaacatctgcacaaggagaacactggcagcgatcagta

SEQ ID NO: 132240 - DNA, 75 bp, synthetic construct
  source 1..75: mol_type = other DNA
cgcggggatcatcattgcggtcagcaaagccggcgaatgctcaccgttcatgattgtgcgcagaaccttaattcc

SEQ ID NO: 132241 - DNA, 75 bp, synthetic construct
  source 1..75: mol_type = other DNA
attgaatatggcggcagcgtatacgatattgataatttacgaattgttacccccagactacacgatgagattcac

SEQ ID NO: 132242 - DNA, 75 bp, synthetic construct
  source 1..75: mol_type = other DNA
cgaggaagattcagatgaatctcaggaaaaagctccggaggagatggaaaaccctgaacatccgcatccggaaaa

SEQ ID NO: 132243 - DNA, 75 bp, synthetic construct
  source 1..75: mol_type = other DNA
aatcgttgagatggggaaaatcacagacttcaatgccagaagcgtaattccattcgaaggcgtgcgccataatgc

SEQ ID NO: 132244 - DNA, 75 bp, synthetic construct
  source 1..75: mol_type = other DNA
aaccaacaccaatgcacccatagtagttattggtgcggttttcttcgacccggaaacaggggaaatcgggccggt

SEQ ID NO: 132245 - DNA, 75 bp, synthetic construct
  source 1..75: mol_type = other DNA
gcaggggtcagtggtgctgcattttcatgtcctgcacagttactggttgaatctcaacaacgtggtgagattttg

SEQ ID NO: 132246 - DNA, 75 bp, synthetic construct
  source 1..75: mol_type = other DNA
ccgtttgggcggttatgaaggcgcgttgctgggtctggcgttgattcctgcgctggtggtgattcctgccgtcat

SEQ ID NO: 132247 - DNA, 75 bp, synthetic construct
  source 1..75: mol_type = other DNA
gcgtaattgcttattatgtcagttaccgtttgggcggttatgaaggggcattgctggggctggcgctgattcccg

SEQ ID NO: 132248 - DNA, 75 bp, synthetic construct
  source 1..75: mol_type = other DNA
gtcagtgaaatgcagaactatattccggaaaaccgctgttaccgtgcaaccctggagtttcaggtcacggtgtga

SEQ ID NO: 132249 - DNA, 75 bp, synthetic construct
  source 1..75: mol_type = other DNA
accgggtccggtggtcctgcattttcatgtgctgcacagctactggttgaatcttaacagcgtggtgcgcttttg

SEQ ID NO: 132250 - DNA, 75 bp, synthetic construct
  source 1..75: mol_type = other DNA
cggtgcgcgaaactcagggcaagccgaaaatcgcggtggtagcgcatgacctgcgttacgacggcaaaactaacc

SEQ ID NO: 132251 - DNA, 75 bp, synthetic construct
  source 1..75: mol_type = other DNA
gacagagtcgtccatcacgattagcgcaccggttatcaatatatcagtaactgcggcgtgtaaatcagcagcgga

SEQ ID NO: 132252 - DNA, 75 bp, synthetic construct
  source 1..75: mol_type = other DNA
tcatcagaaatttatcaaatcatgtccgcaattcttttaccggactgtattcagattcgttcacaaacaatcatt

SEQ ID NO: 132253 - DNA, 75 bp, synthetic construct
  source 1..75: mol_type = other DNA
gcgcctacaggcagcggatggtggcactggactgttgctaatattccagcaacggtaacatatttgcccgctgat

SEQ ID NO: 132254 - DNA, 75 bp, synthetic construct
  source 1..75: mol_type = other DNA
catcgttcagcgtatatttgctgcccacgttgtcgcggctaacggaaaagcgcgatatcacccgggaagtggtta

SEQ ID NO: 132255 - DNA, 75 bp, synthetic construct
  source 1..75: mol_type = other DNA
ttgcctggcagttggtgggtgatgtgttaaaagtgggcgcttatgtctttggttatctggtgatcgccaaagcgt

SEQ ID NO: 132256 - DNA, 75 bp, synthetic construct
  source 1..75: mol_type = other DNA
atgtcactggcaaaagcgtctttgtggacggcggccagtacgctggtcaagattggtgccgggttactggttggt

SEQ ID NO: 132257 - DNA, 75 bp, synthetic construct
  source 1..75: mol_type = other DNA
atcgctgtgtctggttgcttgtggggtatgacgaactggtcatgaaagcgtttcatgcctttcactacgggctga

SEQ ID NO: 132258 - DNA, 75 bp, synthetic construct
  source 1..75: mol_type = other DNA
aaggttgatactccgccgactaacccggatgcaggtaacccaggtacaggtaacccaggtacaggtaaccctgac

SEQ ID NO: 132259 - DNA, 75 bp, synthetic construct
  source 1..75: mol_type = other DNA
tcgttaacagcggagggagccaatatgtctacagcggcggcaatgcgttgaacgcctctgttaatgacggtgggc

SEQ ID NO: 132260 - DNA, 75 bp, synthetic construct
  source 1..75: mol_type = other DNA
tgcatgggcgcagccatacgtgcggacgacggcattccgggcagatgagaaggatatccgactgaataacggcat

SEQ ID NO: 132261 - DNA, 75 bp, synthetic construct
  source 1..75: mol_type = other DNA
atctgcgtttccgtcatggtgatgtgatgcagaatactcgtgcaccagggggcgtatggggccgttataccgggt

SEQ ID NO: 132262 - DNA, 75 bp, synthetic construct
  source 1..75: mol_type = other DNA
gtcggtgacgtagtcacaaacgaaggcaacctgtattacctcaacaacagtgctgcgaccttcgcaggcaccctg

SEQ ID NO: 132263 - DNA, 75 bp, synthetic construct
  source 1..75: mol_type = other DNA
tgcctcaattcaagattccgctttttgagcatacaacagttttcttctgcccgacccgcgacatgttctacgagt

SEQ ID NO: 132264 - DNA, 75 bp, synthetic construct
  source 1..75: mol_type = other DNA
aaggaagaagaaaagccagcgaagaaaggtaaacgtaagcctaagcaaaaagatgcgttagtccagcgtgtaatg

SEQ ID NO: 132265 - DNA, 75 bp, synthetic construct
  source 1..75: mol_type = other DNA
cttaacctgtttgatacagattacggacatgacaataattcatgggtaagtacgaaagcagtattcgactcaaac

SEQ ID NO: 132266 - DNA, 75 bp, synthetic construct
  source 1..75: mol_type = other DNA
gtaccgctacagaccgaaatgcacgcgtatatggagatcctgaaaaaatatccaccacgcgcgcagattaaatct

SEQ ID NO: 132267 - DNA, 75 bp, synthetic construct
  source 1..75: mol_type = other DNA
tgagcatacaaccgttttcttttgcccgacccgcgagatgttctatgaattttgcgaaaaggcaggaattccgat

SEQ ID NO: 132268 - DNA, 75 bp, synthetic construct
  source 1..75: mol_type = other DNA
ggcattagagcaggcagagaaggctactgatgcagcagagcaggcagtagagcaggcagaggagccgaaagaaga

SEQ ID NO: 132269 - DNA, 75 bp, synthetic construct
  source 1..75: mol_type = other DNA
tgcaggctgctgaagtagtagagcaggcattagaacaggcagaacagccgaagaaagaagaaaaacccgctaaga

SEQ ID NO: 132270 - DNA, 75 bp, synthetic construct
  source 1..75: mol_type = other DNA
taacgatggcggagagcagaatgttgagagttggggcgtagctgtgaataccgttattaacaacggcgggaatca

SEQ ID NO: 132271 - DNA, 75 bp, synthetic construct
  source 1..75: mol_type = other DNA
agtgacagcagtttagcggtaggtactttcttctcttacagcgacaacagcattaaacatgcccgtggaggaaag

SEQ ID NO: 132272 - DNA, 75 bp, synthetic construct
  source 1..75: mol_type = other DNA
ctccagtggtggcagtgccactaaaacaaccgttaacagtggcgggcgtcagcatgtttataaaaacggaaatgt

SEQ ID NO: 132273 - DNA, 75 bp, synthetic construct
  source 1..75: mol_type = other DNA
tccagtgcgattggtaacgtgcggattatcgacccggcagtcactcagccgcagccagtaaaaccgaaaaaagcg

SEQ ID NO: 132274 - DNA, 75 bp, synthetic construct
  source 1..75: mol_type = other DNA
ggaaaaacgccagacgctggagcaagaacgcaaacgcctgaataagcgggtatcggcaatgccttccacccaaca

SEQ ID NO: 132275 - DNA, 75 bp, synthetic construct
  source 1..75: mol_type = other DNA
ggactcagaaggtcaacagtggcggcagtgttacggataccaccatcaacagtggcggaggacagtatgtttacg

SEQ ID NO: 132276 - DNA, 75 bp, synthetic construct
  source 1..75: mol_type = other DNA
ccgtattaactcagcaggctttgctccagcaacatctcaataaaattaatccgcactcagcacgcatcgcttttc

SEQ ID NO: 132277 - DNA, 75 bp, synthetic construct
  source 1..75: mol_type = other DNA
agcgcatctgttaccagcggagcgcgacagtttgtctccagtggcggcatcgtcaaggcgacttctgttaatagc

SEQ ID NO: 132278 - DNA, 75 bp, synthetic construct
  source 1..75: mol_type = other DNA
cggccggtttcactggtgtctgaaagtctttcaggtaacgggacattccggatgaacacggatatcgcatctcat

SEQ ID NO: 132279 - DNA, 75 bp, synthetic construct
  source 1..75: mol_type = other DNA
tgacggctactacgtggacggtgtgctgaaatacaaccgctttaataatgagctgcgtacctggatgagtgacgg

SEQ ID NO: 132280 - DNA, 75 bp, synthetic construct
  source 1..75: mol_type = other DNA
tgatgccagatttacactggacggtggaaaggttgatgcaggtacatgggaatactatctgaataaagaaaatac

SEQ ID NO: 132281 - DNA, 75 bp, synthetic construct
  source 1..75: mol_type = other DNA
gaacgggaataattcaaaataatggtggcgcaatcagagcgaacacatcggccatcctgagtggaacgaacgtaa

SEQ ID NO: 132282 - DNA, 75 bp, synthetic construct
  source 1..75: mol_type = other DNA
cgggggcatgagcaggataacgaaacgctaaaatccaatgccattcgctggttgcgtggagagtacactactaaa

SEQ ID NO: 132283 - DNA, 75 bp, synthetic construct
  source 1..75: mol_type = other DNA
attcataaacgcctggcagcactatcagatatggtcggtggatatgactttgcgaagatcattgatgcattctgg

SEQ ID NO: 132284 - DNA, 75 bp, synthetic construct
  source 1..75: mol_type = other DNA
gtatcaggatattgaacgtattgccgatggtggggcgggattcaggttgattatcggggaatacggctcaggtaa

SEQ ID NO: 132285 - DNA, 75 bp, synthetic construct
  source 1..75: mol_type = other DNA
atttaatcggtgttattcatccagggtataagaatcgtatatcgattctttacccttgggaaagaagaaaaaatg

SEQ ID NO: 132286 - DNA, 75 bp, synthetic construct
  source 1..75: mol_type = other DNA
cattgcgatccctgttaccggcaggctggcacaaagaataggcgaattaaggttatttttactttcagtcacttt

SEQ ID NO: 132287 - DNA, 75 bp, synthetic construct
  source 1..75: mol_type = other DNA
tttattcacgccactgtcataaatgatgaggagttaaaacccacgggttctcattataaccctgaggctaaaccc

SEQ ID NO: 132288 - DNA, 75 bp, synthetic construct
  source 1..75: mol_type = other DNA
ttttatttccggctccatgaaacgttttgacggtcagccgctgggtgcactgcccgctggtaaagaaaaaggctg

SEQ ID NO: 132289 - DNA, 75 bp, synthetic construct
  source 1..75: mol_type = other DNA
tgccgtttgggtgcagtaacagcctaaccatgatgtttaaccagctattgaatagcgccagacagggagcagccc

SEQ ID NO: 132290 - DNA, 75 bp, synthetic construct
  source 1..75: mol_type = other DNA
ctggcgtgatgccgggctacgctatacctcacagctcgatctgctgccctttggtcaactgactctcgaagaaca

SEQ ID NO: 132291 - DNA, 75 bp, synthetic construct
  source 1..75: mol_type = other DNA
gcgccgattactgccgatgctcattcatcgtgatgaagcgatggctgaatgcctggcggctaagcaaccagtagg

SEQ ID NO: 132292 - DNA, 75 bp, synthetic construct
  source 1..75: mol_type = other DNA
aaatgggtctcgcactttcgccggctactacgtcattgccaacaatgggacaacgaacttcttttccacatctgg

SEQ ID NO: 132293 - DNA, 75 bp, synthetic construct
  source 1..75: mol_type = other DNA
tgaaagaggggcgagcgcaggcctgtgtcagtgccggtaataccggggcgctgatgggactggcaaaattattgc

SEQ ID NO: 132294 - DNA, 75 bp, synthetic construct
  source 1..75: mol_type = other DNA
atgtcatgggaggggattttggcccttccgtgacagtgcctgcagcattgcaggcactgaattctaattcgcaac

SEQ ID NO: 132295 - DNA, 75 bp, synthetic construct
  source 1..75: mol_type = other DNA
cagattattcctgcgcagtcagttatcgccagtgatgcccggccttcgcaagctatccgcgccagtcgtgggagt

SEQ ID NO: 132296 - DNA, 75 bp, synthetic construct
  source 1..75: mol_type = other DNA
attgcgacggttgatatgtcaaaaaattttccagacaggtacatccttctggaaagccgcgaaattgaaattacc

SEQ ID NO: 132297 - DNA, 75 bp, synthetic construct
  source 1..75: mol_type = other DNA
gcgtttttttctgggctaattggcgcgcaattctgggcggagagggtgcaaccaaaaagcccagaattggacgct

SEQ ID NO: 132298 - DNA, 75 bp, synthetic construct
  source 1..75: mol_type = other DNA
ctgccggcggcagttttacctttggctccatgaccggctcaggttacatcgctgcctcccgggataagatgaaga

SEQ ID NO: 132299 - DNA, 75 bp, synthetic construct
  source 1..75: mol_type = other DNA
atgtctatcccgttgacggccgaatcgatgttcgtggcgtgctgaaaatgtggattggtaactctaagccttcca

SEQ ID NO: 132300 - DNA, 75 bp, synthetic construct
  source 1..75: mol_type = other DNA
ccaccaaaattattgccattattattctgtcgctcacgacactggtctttattctgggctttgccgtggcatggc

SEQ ID NO: 132301 - DNA, 75 bp, synthetic construct
  source 1..75: mol_type = other DNA
tggatcggcaactcaaaacccaccacggaattaaaaaactatcgtctccgccttaagtacgccggtggctttacc

SEQ ID NO: 132302 - DNA, 75 bp, synthetic construct
  source 1..75: mol_type = other DNA
tcatatcgtgcctaaaccggccagcgctgccgctggcgtgctgcggttctacaagctgaacgcggcggatgtggt

SEQ ID NO: 132303 - DNA, 75 bp, synthetic construct
  source 1..75: mol_type = other DNA
gaagtgacgcttcacaccccggataacgcgatgattaccgatgctgaacgtgctgatctgccgggggtcgttgaa

SEQ ID NO: 132304 - DNA, 75 bp, synthetic construct
  source 1..75: mol_type = other DNA
cccgcctttctgctgtcgagacaactgaccggaccgcttgcggtaatagtcggctggctgttttccctgggctta

SEQ ID NO: 132305 - DNA, 75 bp, synthetic construct
  source 1..75: mol_type = other DNA
cagatgccagttatgtggatatacagcgaacgccgatgtaaatggcgctcgtaacattttagcggcggggcacgc

SEQ ID NO: 132306 - DNA, 75 bp, synthetic construct
  source 1..75: mol_type = other DNA
ccagcttgagtacaagcagctctggcgtggcggtcaggtgcttgctgttccgccagcgtacacaagccagcgttg

SEQ ID NO: 132307 - DNA, 75 bp, synthetic construct
  source 1..75: mol_type = other DNA
tgaactttttgatggtgtgcttagcgacagcgaacttaactggcaaggttcattgctgttggtagcaagttctcc

SEQ ID NO: 132308 - DNA, 75 bp, synthetic construct
  source 1..75: mol_type = other DNA
aaatcgcctgtcacaaagtaaattcagatgccaggcatgtggatatacagcgaacgctgatgtaaatggcgctcg

SEQ ID NO: 132309 - DNA, 75 bp, synthetic construct
  source 1..75: mol_type = other DNA
tcagagcgtgtaaaaacggatattaataaaaacaattttaatgatgttctggcagatatctccccgtttgtgcgt

SEQ ID NO: 132310 - DNA, 75 bp, synthetic construct
  source 1..75: mol_type = other DNA
ggccatgcgtagccttctgcgggacctgaaagccaatctgctggataacgtgactttccgtaaagagctggaaaa

SEQ ID NO: 132311 - DNA, 75 bp, synthetic construct
  source 1..75: mol_type = other DNA
cgcaaggtcaaattcagcaacaacgggcagaagcagaaacgcaaaatacagcgactgcattcccgtatcgcaaat

SEQ ID NO: 132312 - DNA, 75 bp, synthetic construct
  source 1..75: mol_type = other DNA
aggtatgtggatatacagcgaacgccgatgtaaacggcgctcgtaacattttagctgcggggcacgccgttcttg

SEQ ID NO: 132313 - DNA, 75 bp, synthetic construct
  source 1..75: mol_type = other DNA
gtcacaaagtaaattcagatgccaggcatgtggatatacagcgaacgccgatgtaaatggcgctcgtaacatttt

SEQ ID NO: 132314 - DNA, 75 bp, synthetic construct
  source 1..75: mol_type = other DNA
cagtattcagacagaaagtgaagtatcaactccggttcacccttcagcatcaatggtcgggctggatgctggcgt

SEQ ID NO: 132315 - DNA, 75 bp, synthetic construct
  source 1..75: mol_type = other DNA
ctaccggaatagccgtcaggtcacgggtgttgtgaaaaatgtcactgtcagccagtcctgcggtaagtggtacat

SEQ ID NO: 132316 - DNA, 75 bp, synthetic construct
  source 1..75: mol_type = other DNA
ttagcggcggggcacgccgtacttgcctgtggagggatggtgcagtcaggccgcccgttgaagcaggaacccacc

SEQ ID NO: 132317 - DNA, 75 bp, synthetic construct
  source 1..75: mol_type = other DNA
gatgtagataagctgggcgctcttgaagagcgtcgtaaagtattgcaggtcaaaacggaaaacctgcaagcggag

SEQ ID NO: 132318 - DNA, 75 bp, synthetic construct
  source 1..75: mol_type = other DNA
gatcaacaataaaaatgcaaccggtggcgacggcgatacccaatttggccgtgcgatgcatgaactgaacattca

SEQ ID NO: 132319 - DNA, 75 bp, synthetic construct
  source 1..75: mol_type = other DNA
cgtctgatgcacctgctgtttgtgaaatctgagtccacttttacctattttgaagcgacgcgcggctatatcgag

SEQ ID NO: 132320 - DNA, 75 bp, synthetic construct
  source 1..75: mol_type = other DNA
ccgttctgaagccggttcttatggtcgtgacactcgtggtctgatccgtatgcaccagttcgacaaagttgaaat

SEQ ID NO: 132321 - DNA, 75 bp, synthetic construct
  source 1..75: mol_type = other DNA
ggtgcagatcgtgcgcccggaagactcaatggcggcgctggaagagatgactggtcatgcagaaaaagtcctgca

SEQ ID NO: 132322 - DNA, 75 bp, synthetic construct
  source 1..75: mol_type = other DNA
actgctgggtctgccgtaccgtaaaatcatcctttgcactggtgacatgggctttggcgcgtgcaaaacttacga

SEQ ID NO: 132323 - DNA, 75 bp, synthetic construct
  source 1..75: mol_type = other DNA
acgggacaataatcgctcactatcgttaccttgttctggtgatgttagcgaaactttatggaattgcagagttaa

SEQ ID NO: 132324 - DNA, 75 bp, synthetic construct
  source 1..75: mol_type = other DNA
cgctaaaatgtatgtcgatgaaattttctccggtctggattacgccaatttcccgaaaatcaccctcattgaaaa

SEQ ID NO: 132325 - DNA, 75 bp, synthetic construct
  source 1..75: mol_type = other DNA
tgactttccgtaaagagctggaaaaaattctgcgtgacccggcactgagccaggcgttgtgtgatgaactgcgtg

SEQ ID NO: 132326 - DNA, 75 bp, synthetic construct
  source 1..75: mol_type = other DNA
accggggtcggccctgtacagcactagtctatgttgacgatgcgaccagccgcctgatgcacttgttgtttgtga

SEQ ID NO: 132327 - DNA, 75 bp, synthetic construct
  source 1..75: mol_type = other DNA
aagtatatcgatgtctggcactatcctgacgggcataaggaactgcgcctgaatgatgtgctgctcccctattcc

SEQ ID NO: 132328 - DNA, 75 bp, synthetic construct
  source 1..75: mol_type = other DNA
gaggaagttcacggtctggtccttggaaaggaaaccatccgacgtctcatgataaaggccggactctggattccc

SEQ ID NO: 132329 - DNA, 75 bp, synthetic construct
  source 1..75: mol_type = other DNA
ggcgatcaacgactggggcaatttgtatatgtccgagacgctgggcgtcgatctggtcacggcgaatacggcagt

SEQ ID NO: 132330 - DNA, 75 bp, synthetic construct
  source 1..75: mol_type = other DNA
ggagcggtttttttgtggttatcgctatcgccgccgggatttcggcgctgctgttactgccctttttgaatgctc

SEQ ID NO: 132331 - DNA, 75 bp, synthetic construct
  source 1..75: mol_type = other DNA
gaacgcggtggttggtgggcattatggaacacggcgcataacgttggcggtgcgctcattcccattgtgatggca

SEQ ID NO: 132332 - DNA, 75 bp, synthetic construct
  source 1..75: mol_type = other DNA
ctcaacaacagtgcggcgacctttgcgggtaccctgacggggagcggtaccctgacccaggaaggcggaaatacc

SEQ ID NO: 132333 - DNA, 75 bp, synthetic construct
  source 1..75: mol_type = other DNA
gacccagaacagcggtggcgcaattgttaccaataccagtgctgtcctgagcggcactaacgataaaggcacctt

SEQ ID NO: 132334 - DNA, 75 bp, synthetic construct
  source 1..75: mol_type = other DNA
gtgccaccagtactacggtaaacaatgggaatcagtatatctacaacggcggtagtgcgactgacaccacgctca

SEQ ID NO: 132335 - DNA, 75 bp, synthetic construct
  source 1..75: mol_type = other DNA
caatcctccagtacggcacaccacaaagtcgactgatgctgtactgaatatggcaagcgcaccgacatatatctt

SEQ ID NO: 132336 - DNA, 75 bp, synthetic construct
  source 1..75: mol_type = other DNA
cgccgaacacgggggtgtgggcagaagccatctatcagaaaggaagtaatattgaatcgccggtaatgggtagta

SEQ ID NO: 132337 - DNA, 75 bp, synthetic construct
  source 1..75: mol_type = other DNA
cgtcaatattaaaggcgcaatcctcaatggtgtgattaaacgcgccagcaccgcttacagttacggctataacta

SEQ ID NO: 132338 - DNA, 75 bp, synthetic construct
  source 1..75: mol_type = other DNA
ggggttcgccggtttgtgcgcggctgttaaccgcctggtattcacgtaccgagcgcggcggttggtgggcgttat

SEQ ID NO: 132339 - DNA, 75 bp, synthetic construct
  source 1..75: mol_type = other DNA
ttcttcaccattggtttttttgtctttggcccgcagatgttaatcggtatggcggcggcagagtgttcccacaaa

SEQ ID NO: 132340 - DNA, 75 bp, synthetic construct
  source 1..75: mol_type = other DNA
atcggtgcgctggtagcgggttggggctcggacaaattgtttaacggcaaccgcgggccgatgaatttgattttc

SEQ ID NO: 132341 - DNA, 75 bp, synthetic construct
  source 1..75: mol_type = other DNA
ggcggtcttcctgattggtagctggctgcgctatgactacgggcagtacacctggcgcgcggcgtccagccagat

SEQ ID NO: 132342 - DNA, 75 bp, synthetic construct
  source 1..75: mol_type = other DNA
tctcgtctggtgcacatctggagcgtgccggttgagtatctgacgcgtaagtatcaactggtgcgtgctcgccac

SEQ ID NO: 132343 - DNA, 75 bp, synthetic construct
  source 1..75: mol_type = other DNA
gcagcgggtacggtcagcctgccggggcgcaatgtccgggcaaaatcaggtttaaaccgttcgatactggatcag

SEQ ID NO: 132344 - DNA, 75 bp, synthetic construct
  source 1..75: mol_type = other DNA
gtggctaaactcgccacgctgtcagatggcacagtctttgagcctgtaaacagttttcagaaaaaccagaagacg

SEQ ID NO: 132345 - DNA, 75 bp, synthetic construct
  source 1..75: mol_type = other DNA
actccggttcacccttcagcattaatggtcggactggatgctggcgtggctaaactcgccacgctgtcagatggc

SEQ ID NO: 132346 - DNA, 75 bp, synthetic construct
  source 1..75: mol_type = other DNA
cgcgtgctgtggtcatacagcgaaagaaaaccgcctgtcacaaagtaaattcagatgccaggtatgtggatatac

SEQ ID NO: 132347 - DNA, 75 bp, synthetic construct
  source 1..75: mol_type = other DNA
attcattatcaagagcaataaaaaaaagtgatttctataaatatgatcagctcagtgatgatgcgtacttagaaa

SEQ ID NO: 132348 - DNA, 75 bp, synthetic construct
  source 1..75: mol_type = other DNA
catctgaatacctgctacaggctggtatggaatcacatgacgggcgctttcgtggttgcctccgaactggcccgc

SEQ ID NO: 132349 - DNA, 75 bp, synthetic construct
  source 1..75: mol_type = other DNA
ttatcaggggtggtctgaaggtatcagtgttgttcctgcctcaatcattagtaaaataatccaagaggatataat

SEQ ID NO: 132350 - DNA, 75 bp, synthetic construct
  source 1..75: mol_type = other DNA
aaacagttttcagaaaaaccagaagacgctggcgagacttcagcgacagttaagccgcaaggtcaaattcagcaa

SEQ ID NO: 132351 - DNA, 75 bp, synthetic construct
  source 1..75: mol_type = other DNA
gcgggcttacaaaaacttcttccagaatcgggctgcttttccccgattcaaaaagcggggacagaatgatgcatt

SEQ ID NO: 132352 - DNA, 75 bp, synthetic construct
  source 1..75: mol_type = other DNA
tacggggatattttataattatccattggtaagcgatgatagcgaatcattaaaggtgattgatgcgtatcttaa

SEQ ID NO: 132353 - DNA, 75 bp, synthetic construct
  source 1..75: mol_type = other DNA
tcaaaaaactgaccgaacagtacaacgtgacctatatcggtatcgactcaaccggcgttggtcacggggtttacg

SEQ ID NO: 132354 - DNA, 75 bp, synthetic construct
  source 1..75: mol_type = other DNA
gtgaatggctttgccgatatcccgccggataacgacatcctgtgcgtggtgattaactgtgccgggtccctgcgc

SEQ ID NO: 132355 - DNA, 75 bp, synthetic construct
  source 1..75: mol_type = other DNA
atcggcgcgaccttctattttgcccgtgaagccctgattgacgctctgcttaccggacgtaaccagatttttctt

SEQ ID NO: 132356 - DNA, 75 bp, synthetic construct
  source 1..75: mol_type = other DNA
ccagctcattatgaaggagcacaaagaagggaaagactttaaagaaattgacctgctggcgcgccagtcggagcg

SEQ ID NO: 132357 - DNA, 75 bp, synthetic construct
  source 1..75: mol_type = other DNA
ccgtctggagtttgacgccggacacactgacattgcgcagtcattcatggcaatccgtcgcgcaaccaccgccag

SEQ ID NO: 132358 - DNA, 75 bp, synthetic construct
  source 1..75: mol_type = other DNA
gtcacaccgtggcgacagcgccggatgcgtggtgctggcaccgccggtagtggccggaggcaaattcagaatact

SEQ ID NO: 132359 - DNA, 75 bp, synthetic construct
  source 1..75: mol_type = other DNA
aacgttaaaaacgccctggtactcaaagcctacgacattatcagtcaccgtcgtctggagtttgacgccggacac

SEQ ID NO: 132360 - DNA, 75 bp, synthetic construct
  source 1..75: mol_type = other DNA
atcagggcgtctattatccgctgggaatgcaacaggcttcggttaacggtaaatccatcttcttcatggtggcct

SEQ ID NO: 132361 - DNA, 75 bp, synthetic construct
  source 1..75: mol_type = other DNA
aagacgtacatgagtgattgcctgaagaacagtaagtctgcgcccggcgagaagagtttgacgccgcaacagcag

SEQ ID NO: 132362 - DNA, 75 bp, synthetic construct
  source 1..75: mol_type = other DNA
attccaggagctacgcaaagtggcatctgggatggcgattcacaaaaaatggcggcaaacctatttttccacgcc

SEQ ID NO: 132363 - DNA, 75 bp, synthetic construct
  source 1..75: mol_type = other DNA
gcatggtggacagctgggaagtctggactgactttcatgcactggcgctgcgcccgtttggctggcacgaagtgt

SEQ ID NO: 132364 - DNA, 75 bp, synthetic construct
  source 1..75: mol_type = other DNA
ggatcggttatgacccggcgaaaggtacgcagaatggcgacagcgccggatgcgtggtggtggcaccgccagccg

SEQ ID NO: 132365 - DNA, 75 bp, synthetic construct
  source 1..75: mol_type = other DNA
aagagggcgtcagtacaacagagtttgttgtagggtatggtgctatttcgatggtaaaaaaatcagagtcgatgg

SEQ ID NO: 132366 - DNA, 75 bp, synthetic construct
  source 1..75: mol_type = other DNA
tgttgtgggatatggtgctatttcgatggtaaaaaaatcggaatcgatggcagctaaaggattggttggactgga

SEQ ID NO: 132367 - DNA, 75 bp, synthetic construct
  source 1..75: mol_type = other DNA
ttatgatttcggattttttttgaggatgatgccctatatggagccagggttaatcaagcgtgacatagatgagct

SEQ ID NO: 132368 - DNA, 75 bp, synthetic construct
  source 1..75: mol_type = other DNA
ccaggactgcaggagttagtgaagtctgctgttagtcaaggatatttgaaagcctttacagaaccgcaaaaagct

SEQ ID NO: 132369 - DNA, 75 bp, synthetic construct
  source 1..75: mol_type = other DNA
ttaaaataggagcgccagcagatcctgatggatttgtaagggaaatggcaactcgtcttggcgctacagttacag

SEQ ID NO: 132370 - DNA, 75 bp, synthetic construct
  source 1..75: mol_type = other DNA
cgttgttttcgattctctcaggacagtcttcggcactgccttgtcgggtcgaggtggcaaaccctgcaagtccat

SEQ ID NO: 132371 - DNA, 75 bp, synthetic construct
  source 1..75: mol_type = other DNA
tggacatcgacctgtcccacagcaatctggcccccggcctgctgtgcacagacgggcaataccgccagatagtca

SEQ ID NO: 132372 - DNA, 75 bp, synthetic construct
  source 1..75: mol_type = other DNA
tggcaaccgcccgacctatgaagcaagccgcagcgaagaagccagccatgccgatctggcctgggcaacaatgca

SEQ ID NO: 132373 - DNA, 75 bp, synthetic construct
  source 1..75: mol_type = other DNA
accgacattgcgcagtcatttatggcaatccgtcgcgctaccactgccagtggcaaccgcccgacctatgaagca

SEQ ID NO: 132374 - DNA, 75 bp, synthetic construct
  source 1..75: mol_type = other DNA
agccacggtattgccgaaatatataaaatacatggttgctgcactgagcctaactcattgattttaacatcaagt

SEQ ID NO: 132375 - DNA, 75 bp, synthetic construct
  source 1..75: mol_type = other DNA
gcatggtggacagctgggaagtctggaccgactttcatgctctggccctgcgcccgtttggctggcgcgaagtgt

SEQ ID NO: 132376 - DNA, 75 bp, synthetic construct
  source 1..75: mol_type = other DNA
gttcgtggacgatctcgcgtccgtgttcccgctcagcgagctgcaagcgtgcatggtggacagttgggaagtctg

SEQ ID NO: 132377 - DNA, 75 bp, synthetic construct
  source 1..75: mol_type = other DNA
tactaattaatcaggccaacgattatatgaacagtaaacaatggccaggtaaagcggctattggtcgtctgaaag

SEQ ID NO: 132378 - DNA, 75 bp, synthetic construct
  source 1..75: mol_type = other DNA
gacagaagatcgttttgtcagccagggtgagctggtcagagacaccgcccgcgatattagtacggcgttgggact

SEQ ID NO: 132379 - DNA, 75 bp, synthetic construct
  source 1..75: mol_type = other DNA
caatgtcgcgatccgtaacggcaatgaagcagtattaattggtcagttagagtgtaaatcgatggtcaggatgtg

SEQ ID NO: 132380 - DNA, 75 bp, synthetic construct
  source 1..75: mol_type = other DNA
ctggaagtggcagagctgctgccgcagatagccgaacctgaagcaccagaatcacgaattgtcggcattttccgg

SEQ ID NO: 132381 - DNA, 75 bp, synthetic construct
  source 1..75: mol_type = other DNA
atactctgtgagcatccggtaaataacgtcgaagaagcggttctggcagcgcgcgaactcattgcgcaagggcca

SEQ ID NO: 132382 - DNA, 75 bp, synthetic construct
  source 1..75: mol_type = other DNA
ccaggttccggcgaaaacgacgttgttaatggcgaccggacaacaagctggtgcactggttgaagcgttgctggt

SEQ ID NO: 132383 - DNA, 75 bp, synthetic construct
  source 1..75: mol_type = other DNA
atggtcgaaccggtcggcggcggtccactgctggatggtattgcttttaatgtcgataccgccctctggccggat

SEQ ID NO: 132384 - DNA, 75 bp, synthetic construct
  source 1..75: mol_type = other DNA
gcgacaacatcggcgaagcgcgcgtgctggcaaatgaactcgatgcgctaaaccagacgcgaaaagagatcgaac

SEQ ID NO: 132385 - DNA, 75 bp, synthetic construct
  source 1..75: mol_type = other DNA
tgacggtacgctgaaaggttccggtcgctccattcaggggctgcatatgcgtgatgcgctggagcggctagacac

SEQ ID NO: 132386 - DNA, 75 bp, synthetic construct
  source 1..75: mol_type = other DNA
ctgcatgcttccggtgcgggcaaagcgctgctttatccgctggcggaagaggagttgatgagcatcattctgcaa

SEQ ID NO: 132387 - DNA, 75 bp, synthetic construct
  source 1..75: mol_type = other DNA
gctggcaaatgaactcgatgcgctaaaccagacgcgaaaagagatcgaacagggaatgcaggttgaagccctgac

SEQ ID NO: 132388 - DNA, 75 bp, synthetic construct
  source 1..75: mol_type = other DNA
gtgaaacaacagatacaacttcgtcgtcgtgaagtcgacgaaacggcagacttgcccgctgacctgccccccttg

SEQ ID NO: 132389 - DNA, 75 bp, synthetic construct
  source 1..75: mol_type = other DNA
gcggctgcgtggcggcctgtggtctggcgggtggttttactctgccaaccacggtcatgccatttattctgcgta

SEQ ID NO: 132390 - DNA, 75 bp, synthetic construct
  source 1..75: mol_type = other DNA
cttgcgacggagcggggtcgctgccgaccggctcatcctcgatccggggatgggatttttcttgagccccgcacc

SEQ ID NO: 132391 - DNA, 75 bp, synthetic construct
  source 1..75: mol_type = other DNA
acgatatccaaggatttcctgaccctgcgctctatcccgatattgctgaggcggactgcaggctggtggttatgc

SEQ ID NO: 132392 - DNA, 75 bp, synthetic construct
  source 1..75: mol_type = other DNA
caacgcaacaatctctgaaaggtgatgatcgtaataagtttatgagtgcctgcctcaaaaagccgcctgatacct

SEQ ID NO: 132393 - DNA, 75 bp, synthetic construct
  source 1..75: mol_type = other DNA
atgaaaataacattactggttaccttgcttttcggtctggtttttttaaccaccgtcggcgctgccgagagaacc

SEQ ID NO: 132394 - DNA, 75 bp, synthetic construct
  source 1..75: mol_type = other DNA
tgactacgtccgcacccacgcgcctggggatctgcgaagcgcaatcaccttctcggaaaccctcgcgaaatttcg

SEQ ID NO: 132395 - DNA, 75 bp, synthetic construct
  source 1..75: mol_type = other DNA
gtacgctggtttaacggtgatgtgatccgcccgaaaacatggttctggcaggatgtgaaaacccgaaaaattctg

SEQ ID NO: 132396 - DNA, 75 bp, synthetic construct
  source 1..75: mol_type = other DNA
ccttccggtaatacggaacgagtgaagaatcaggagcgtgatgatgaatacgaaactgagcgtgatgaatatctg

SEQ ID NO: 132397 - DNA, 75 bp, synthetic construct
  source 1..75: mol_type = other DNA
accgcactagagcaggtgtcaaaggtggtaaagcaattgaatacaatgcgaactctttacctgttgaagcgaaag

SEQ ID NO: 132398 - DNA, 75 bp, synthetic construct
  source 1..75: mol_type = other DNA
tcaggccgcagacgaaatgctgaaccaggggatttcaacaaaaacggcttttgcgaccgttgcagggcattacca

SEQ ID NO: 132399 - DNA, 75 bp, synthetic construct
  source 1..75: mol_type = other DNA
ttgatccacagcagctacacagcacggtttattgctacaccctggacggtcggtttatctgtgaagcggaatgtc

SEQ ID NO: 132400 - DNA, 75 bp, synthetic construct
  source 1..75: mol_type = other DNA
atcccggaggattttcacatcaccattgataacacccgtggtgcagcgaataaatggctgacggggggcgcgccc

SEQ ID NO: 132401 - DNA, 75 bp, synthetic construct
  source 1..75: mol_type = other DNA
atgataagcagttaaaattgaccgatatctaccaaaattgtgaaatctatcgcaggacgtatgacaactttttcg

SEQ ID NO: 132402 - DNA, 75 bp, synthetic construct
  source 1..75: mol_type = other DNA
tccagattgtccttttcgccagaaaaatattcgttttacggtgatcattgatgaactacatgaagcctacactcg

SEQ ID NO: 132403 - DNA, 75 bp, synthetic construct
  source 1..75: mol_type = other DNA
ggcgccttgctccgttggtctatgagttttttgaccgctttattgaagtgggtgacgatctgctctgcatcgacg

SEQ ID NO: 132404 - DNA, 75 bp, synthetic construct
  source 1..75: mol_type = other DNA
aacgcatccgcatgcgcaacagcgaaggcgacataacgcgcaccgaactgtattacgaagtcgaaaatgatgcca

SEQ ID NO: 132405 - DNA, 75 bp, synthetic construct
  source 1..75: mol_type = other DNA
taatttcgcccacggcgaaaactatcgcctgttaatggccgaacatgatatgagcttattcaaagtcgtcgtgca

SEQ ID NO: 132406 - DNA, 75 bp, synthetic construct
  source 1..75: mol_type = other DNA
tcctcgttttacagcgaagtaaaggacaacagcggcaacctcaatacattacctaactacgttaccgtgcttaaa

SEQ ID NO: 132407 - DNA, 75 bp, synthetic construct
  source 1..75: mol_type = other DNA
atatgagttttttgaccgctttattgaagtgggtaacgacctgctctgcatcgacgttaaacgctgggcgacgca

SEQ ID NO: 132408 - DNA, 75 bp, synthetic construct
  source 1..75: mol_type = other DNA
ggagttttaatgactcagtcgtgcaaaactcatgatacgcctgatgaaggtgtgttttttctttttcagcattgg

SEQ ID NO: 132409 - DNA, 75 bp, synthetic construct
  source 1..75: mol_type = other DNA
ataataccgattcattagcattaattaaatggctggcacaattcatttctcagtcctcttcagaagaggattcgg

SEQ ID NO: 132410 - DNA, 75 bp, synthetic construct
  source 1..75: mol_type = other DNA
agtcagagtcagtcatttagtgatgcagaacagcgacatgcgtttgaacaggccatcgtagaaaatggtcgccgc

SEQ ID NO: 132411 - DNA, 75 bp, synthetic construct
  source 1..75: mol_type = other DNA
acgcttagtgctcatcaattccccgttttacagcgaagtaaaggacaacagtggcaacctcaatacattacctaa

SEQ ID NO: 132412 - DNA, 75 bp, synthetic construct
  source 1..75: mol_type = other DNA
atcagttaaaattgaccgatatctaccaaaattgtgaaatctatcgcaggacatatgacaactttttcgacgcgt

SEQ ID NO: 132413 - DNA, 75 bp, synthetic construct
  source 1..75: mol_type = other DNA
aacgctgatgagttgatcgcgctgttactgcttttcacccggcaggttggtcagtcccgaactgacctgatttga

SEQ ID NO: 132414 - DNA, 75 bp, synthetic construct
  source 1..75: mol_type = other DNA
tcatactcctcttgtcagaaaaaacgctgatgagttgatcgcgctgttactgcttttcactcgcaggttggtcag

SEQ ID NO: 132415 - DNA, 75 bp, synthetic construct
  source 1..75: mol_type = other DNA
agaaatacactaccacaaaataaatgtaggtgatgtgttttttgctggtgttcccaaggaatatgaagatttctg

SEQ ID NO: 132416 - DNA, 75 bp, synthetic construct
  source 1..75: mol_type = other DNA
atgaccgtatttgaatatctccaggctcatccaaataccaccagcggtgaaatcgccaaaggcatgaacaaaacg

SEQ ID NO: 132417 - DNA, 75 bp, synthetic construct
  source 1..75: mol_type = other DNA
cgcaactctatggcaccggccggatcgtgaagtcaggtgttcgcaagggcattccaacataccgtgttaacgata

SEQ ID NO: 132418 - DNA, 75 bp, synthetic construct
  source 1..75: mol_type = other DNA
gtgacaacccaaacctgacgaaagagcagagggaagaagggaactgtctttgggatatgggcgaacccacggatc

SEQ ID NO: 132419 - DNA, 75 bp, synthetic construct
  source 1..75: mol_type = other DNA
gacaacggcggcagtggtgaggggtttgggcctctgacgctctccctacgtctgaaagacaaagggggaaacacg

SEQ ID NO: 132420 - DNA, 75 bp, synthetic construct
  source 1..75: mol_type = other DNA
cagcgttacatcagtatccgtaataccgacatggtctgggtgccgggcaatatctgcgtctggcagtttcgcctg

SEQ ID NO: 132421 - DNA, 75 bp, synthetic construct
  source 1..75: mol_type = other DNA
agagcgtaatggttaccagattgacctgccactgtccgttttcgacccgcagtactaccgaccgttacaagtcac

SEQ ID NO: 132422 - DNA, 75 bp, synthetic construct
  source 1..75: mol_type = other DNA
tggattgaaacaactccaagaaaaaataatgatcagtccaaccgagtctttaactatttttaatattgatactat

SEQ ID NO: 132423 - DNA, 75 bp, synthetic construct
  source 1..75: mol_type = other DNA
cccgcattggcgagtggcagacaacgcgtactggaaaattccagacaactggtctggaaagagtggataacgctt

SEQ ID NO: 132424 - DNA, 75 bp, synthetic construct
  source 1..75: mol_type = other DNA
atccctgaaatgacccgcgaggatgtggaggactatggtccgaatggtgtgaagttcaaccagcacggtccaatt

SEQ ID NO: 132425 - DNA, 75 bp, synthetic construct
  source 1..75: mol_type = other DNA
ggatcggatatgacccggcgaaaggtacgcaaaacggcgacagtgccggatgcgtggtggtggctccgccagcgg

SEQ ID NO: 132426 - DNA, 75 bp, synthetic construct
  source 1..75: mol_type = other DNA
accctaacgtcgccaaccgcaataaaggcccacgccgtcagccggaaaagaatgttttcaccgatgaacagattg

SEQ ID NO: 132427 - DNA, 75 bp, synthetic construct
  source 1..75: mol_type = other DNA
gctgaaaggtgatccgatggtgcttcctaacggtgccactctttacttcctcggcaccaatgcccgcactgccca

SEQ ID NO: 132428 - DNA, 75 bp, synthetic construct
  source 1..75: mol_type = other DNA
atgaagggaattaatttggttaaaatcaaattaaccttctctgatacatacctggtgacattttcccgtgtccgt

SEQ ID NO: 132429 - DNA, 75 bp, synthetic construct
  source 1..75: mol_type = other DNA
atggcgactggtcatgaccgggttatgttttgccctgtttggtctcggcggcctgctgctttctgtcgtgtggtt

SEQ ID NO: 132430 - DNA, 75 bp, synthetic construct
  source 1..75: mol_type = other DNA
cgtattgccgccgctgttccagataaaagcgatactgttaaagtgtattgcaatgccggacgtcagtcagggcag

SEQ ID NO: 132431 - DNA, 75 bp, synthetic construct
  source 1..75: mol_type = other DNA
cgtgacctacatcggcatcgactcgaccggcgtcggccacggggtttacgagaacgtgaaagcattctttcctgc

SEQ ID NO: 132432 - DNA, 75 bp, synthetic construct
  source 1..75: mol_type = other DNA
ttgccgaggaacgcagtgatttgaccttcccgcatacggtagttgaaggccaaacccctgatatctttgttgcac

SEQ ID NO: 132433 - DNA, 75 bp, synthetic construct
  source 1..75: mol_type = other DNA
ttgttgtcggcctaagaaacccaaagatcgcttgtttgggattggcatttaaaccggatattgatgacctacgag

SEQ ID NO: 132434 - DNA, 75 bp, synthetic construct
  source 1..75: mol_type = other DNA
ccgtctggagtttgacgccggatataccgacattgcgcagtcatttatggcaatccgtcgcgccaccaccgccag

SEQ ID NO: 132435 - DNA, 75 bp, synthetic construct
  source 1..75: mol_type = other DNA
tgcgtggtggtggcaccgccagccgtgccaggcggtaagtttcgcattcttgaacgtcaccagtggcgcgggatg

SEQ ID NO: 132436 - DNA, 75 bp, synthetic construct
  source 1..75: mol_type = other DNA
cgtgacctatatcggcatcgactcgacaggcgtcggtcacggtgtctacgagaacgtgaaagcgttctttcctgc

SEQ ID NO: 132437 - DNA, 75 bp, synthetic construct
  source 1..75: mol_type = other DNA
actcttcaggttattgatgcttattcggataggattatagcaaaatcatctgttggtgcattgcctcaggctctt

SEQ ID NO: 132438 - DNA, 75 bp, synthetic construct
  source 1..75: mol_type = other DNA
atgtgtataattatggagaaaaacatgcaaaacttataaaaaaaatccccgcagaaacgcttcctcatggcatct

SEQ ID NO: 132439 - DNA, 75 bp, synthetic construct
  source 1..75: mol_type = other DNA
gtagccgcctggcagtcgtcagtcagacgccgttccttttttccgacaccgtggcgaataacattgcgctgggtt

SEQ ID NO: 132440 - DNA, 75 bp, synthetic construct
  source 1..75: mol_type = other DNA
cagttatctcctgaagaggattcactgcttttacagtctattgtcagatggaaggaaggcgatgatgagcaacgc

SEQ ID NO: 132441 - DNA, 75 bp, synthetic construct
  source 1..75: mol_type = other DNA
ggaatcttagctaatcagtcgtgtaatatttctgatacgcctgacgaagggggcgttattctttttcagcattgg

SEQ ID NO: 132442 - DNA, 75 bp, synthetic construct
  source 1..75: mol_type = other DNA
caattattgatagccagaatggaaaagaaaaaaaacgtatagtgcttgagtctggcccaggaatggttactttta

SEQ ID NO: 132443 - DNA, 75 bp, synthetic construct
  source 1..75: mol_type = other DNA
gcgcgatgctggcggaagcgccggtggtgaacgatggtagcgaacccgtgccggaagggcgtggcgaactggatg

SEQ ID NO: 132444 - DNA, 75 bp, synthetic construct
  source 1..75: mol_type = other DNA
cagctcaccagttttatgatgtatttaggtctgatgatttggccaatgctggcgctggcatggatgtttaacata

SEQ ID NO: 132445 - DNA, 75 bp, synthetic construct
  source 1..75: mol_type = other DNA
atggaaaactacgctaaatttgttgctactgaaattcttaatcagcttggcggaaatcgcttcattgctatgaca

SEQ ID NO: 132446 - DNA, 75 bp, synthetic construct
  source 1..75: mol_type = other DNA
ggtgcagggcagcttaacgctggggcagctcaccagttttatgatgtatctggggttaatgatttggccgatgct

SEQ ID NO: 132447 - DNA, 75 bp, synthetic construct
  source 1..75: mol_type = other DNA
aactggatgtaaatattcgccagttcacgtatccgcagactgaccatcctgcgctggaaaacgtcaatttcgccc

SEQ ID NO: 132448 - DNA, 75 bp, synthetic construct
  source 1..75: mol_type = other DNA
tgcgtcatcgcacgggtgacctcatggctcgtgcgaccaatgacgtcgatcgcgtcgtgtttgccgccggagaag

SEQ ID NO: 132449 - DNA, 75 bp, synthetic construct
  source 1..75: mol_type = other DNA
aggagcgtcgtaaagtattgcaggtcaaaacggaaaacctgcaagcggagcgtaactcccgatcgaaattcattg

SEQ ID NO: 132450 - DNA, 75 bp, synthetic construct
  source 1..75: mol_type = other DNA
atggcggtagcattgttcagggttcagccggggtgcgcattggtgcccccaccggcgtggcctgttcggtgtgcc

SEQ ID NO: 132451 - DNA, 75 bp, synthetic construct
  source 1..75: mol_type = other DNA
agcacctgaacagcctgcagtatgaccgcgattacacctggaacgacaacggcgaactcatccgcatcagcagcc

SEQ ID NO: 132452 - DNA, 75 bp, synthetic construct
  source 1..75: mol_type = other DNA
accatcaccgacagcctggaccgccgtgaagtgctgcacacgcagggcgaaggcgggctgaagcgggtggtgaaa

SEQ ID NO: 132453 - DNA, 75 bp, synthetic construct
  source 1..75: mol_type = other DNA
gcgaccgcctgcaccgggaaacgctgcgcagcttcggccgttatgaactcaccaccgcttatacccctgccgggc

SEQ ID NO: 132454 - DNA, 75 bp, synthetic construct
  source 1..75: mol_type = other DNA
ggcaggcgctgccggaagagctccgcctaagtccgcatcgttatctggcgacgaacagtccgcaggggccgtggt

SEQ ID NO: 132455 - DNA, 75 bp, synthetic construct
  source 1..75: mol_type = other DNA
ggcaggcgctgccggaagacctacgcataagtccgcatcgttatctggcgacgaacagtccgcaggggccgtggt

SEQ ID NO: 132456 - DNA, 75 bp, synthetic construct
  source 1..75: mol_type = other DNA
aatatgatgaatccggccgtctgattcaggaaaccgcacacaacggcgatatcacccgctaccgttatgataatc

SEQ ID NO: 132457 - DNA, 75 bp, synthetic construct
  source 1..75: mol_type = other DNA
tacacgcggacacaatatgcagagccgctggtcgaaagccgctatctttacgacccgctgggccgcagggtggca

SEQ ID NO: 132458 - DNA, 75 bp, synthetic construct
  source 1..75: mol_type = other DNA
ctataaccaccacagccagttaacgtcagccaccgggcctgacgggctggaaatgcgccgcaaatatgatgaatc

SEQ ID NO: 132459 - DNA, 75 bp, synthetic construct
  source 1..75: mol_type = other DNA
ggggcaacctgctgaatgaagagaacccgcatcagctgcagcagctcatccgcctgccgggtcagcagtatgatg

SEQ ID NO: 132460 - DNA, 75 bp, synthetic construct
  source 1..75: mol_type = other DNA
agacaaattggccaacaactcaattaccaccaggatatacttgtgcagaaccctatttattccctgacattaata

SEQ ID NO: 132461 - DNA, 75 bp, synthetic construct
  source 1..75: mol_type = other DNA
aaatgataatgatagtgtagacttgcgaaatataaaatgccctgaaggttcagagagagtaggcgattatcacac

SEQ ID NO: 132462 - DNA, 75 bp, synthetic construct
  source 1..75: mol_type = other DNA
tggacgctctccgccagcggcgaactgtggcagcatctggcgatcagttcctggcgggcgctgattggcttttca

SEQ ID NO: 132463 - DNA, 75 bp, synthetic construct
  source 1..75: mol_type = other DNA
ggcgccctgccctcaattatggtcggcgtgcgcttcgcgttaggtctgatgtggctgacgctgattgttgctgaa

SEQ ID NO: 132464 - DNA, 75 bp, synthetic construct
  source 1..75: mol_type = other DNA
tgctcggcaaacttgctgacgtcagcgcccaattgttagagcgcgtctggctgcgctggaacccggcttatcatc

SEQ ID NO: 132465 - DNA, 75 bp, synthetic construct
  source 1..75: mol_type = other DNA
ttctgaagaaagagaagattgtcattgaagtgaagaaaactcgccgctctctaggggcaaataaaattggagagg

SEQ ID NO: 132466 - DNA, 75 bp, synthetic construct
  source 1..75: mol_type = other DNA
aaggttgggtgactaacccgaaaggtgtgatagacgatcttgaggggaaagatgctgatggaaagactagagttg

SEQ ID NO: 132467 - DNA, 75 bp, synthetic construct
  source 1..75: mol_type = other DNA
aagattaaatttagaactaaataaaaatgatgtgcttatttcaagcgatattaaaatgtctctgctattattttt

SEQ ID NO: 132468 - DNA, 75 bp, synthetic construct
  source 1..75: mol_type = other DNA
gtgtgccccggcggggtgacgtccggccatccggtcaatccgctgctcggcgcgaaggtccttcccggcgaaacc

SEQ ID NO: 132469 - DNA, 75 bp, synthetic construct
  source 1..75: mol_type = other DNA
cgttatcaccacgacctgaccggcaaacttatccgcagcgaggatgaggggcttatcaccctccggcactacgat

SEQ ID NO: 132470 - DNA, 75 bp, synthetic construct
  source 1..75: mol_type = other DNA
tggacaatgttattgtgctatgtatgttgaaatgtcaacgggaagcaatcaagatgaggctgatataatgtgcgg

SEQ ID NO: 132471 - DNA, 75 bp, synthetic construct
  source 1..75: mol_type = other DNA
ttggcacgctattccccatttatatcaacacctggcatgggatccgtaatatcgatcgcgggctggtagagatgg

SEQ ID NO: 132472 - DNA, 75 bp, synthetic construct
  source 1..75: mol_type = other DNA
acgctctcagccagcggcgaactgtggcaacatctggcgatcagttcatggcgggcgctaattggtttttcgatt

SEQ ID NO: 132473 - DNA, 75 bp, synthetic construct
  source 1..75: mol_type = other DNA
atcgatcgcgggctggtagagatggcgcgcagctatggcttatccggcgtgccgctgtttatccatgtgatcctg

SEQ ID NO: 132474 - DNA, 75 bp, synthetic construct
  source 1..75: mol_type = other DNA
aacgcaaacccgcacaacaaagaagcaaacttccccgctatgttgtgaaacttcatccggatgatttttttgacg

SEQ ID NO: 132475 - DNA, 75 bp, synthetic construct
  source 1..75: mol_type = other DNA
acggttcactggccggacggagtccccccgccttctgatgcttccccgttttgccgacatttttcagcagggtaa

SEQ ID NO: 132476 - DNA, 75 bp, synthetic construct
  source 1..75: mol_type = other DNA
gcatcagagaactacgtcaggatgccgcgctgctcgtctcattcgatgcgaaagacctggctgagctttcctaca

SEQ ID NO: 132477 - DNA, 75 bp, synthetic construct
  source 1..75: mol_type = other DNA
cgccaggctgcctactcgactgactgctcgggctaccagacccgctatgaatacgaccgcttcggccagatgacg

SEQ ID NO: 132478 - DNA, 75 bp, synthetic construct
  source 1..75: mol_type = other DNA
ggcgggtggtggagcagctgaacccggcaggcctgagttaccgctaccagtatgagcaggaccgcatcaccgtca

SEQ ID NO: 132479 - DNA, 75 bp, synthetic construct
  source 1..75: mol_type = other DNA
gctggtcttctggtttgtacgtgttgatggggagcccgcagaattcggaaaaaatcgtacgctaaggttttccgg

SEQ ID NO: 132480 - DNA, 75 bp, synthetic construct
  source 1..75: mol_type = other DNA
cgtacgactcgcagcgtgacgttgacagcggctggcgagcatctactttcccaggccagagactggctgagctgg

SEQ ID NO: 132481 - DNA, 75 bp, synthetic construct
  source 1..75: mol_type = other DNA
cggtagaagatattgtgaccttgtttacccagcgcaggccggaaatcagcggatttttagaaattttcggcaacc

SEQ ID NO: 132482 - DNA, 75 bp, synthetic construct
  source 1..75: mol_type = other DNA
cagcatgaatggcaatggtgctgaaatgagcgcggaagccgcaggcattgctgtctgcctgatcgaatacagcca

SEQ ID NO: 132483 - DNA, 75 bp, synthetic construct
  source 1..75: mol_type = other DNA
gactatacttgccgctatcagcgccggcggcatatactgcccagaaagcggaacagttcactggccggacggtgt

SEQ ID NO: 132484 - DNA, 75 bp, synthetic construct
  source 1..75: mol_type = other DNA
tcaggtagttatatggcccgttcagctaaaccccgtaaacgcaaacccgcacaacaaagaagcaaacttccccgc

SEQ ID NO: 132485 - DNA, 75 bp, synthetic construct
  source 1..75: mol_type = other DNA
agacgctgggcgcggtagagcatagcccgttgtatacctcggtagatccgctgcaaagcatgagccgtgaagaga

SEQ ID NO: 132486 - DNA, 75 bp, synthetic construct
  source 1..75: mol_type = other DNA
tgaaggttatctgcactggattaacgtcgaagatggtcgtttcgttgcccagcaaaaagttgatagttccggttt

SEQ ID NO: 132487 - DNA, 75 bp, synthetic construct
  source 1..75: mol_type = other DNA
ccattgatggcggcgttacgctgtgggcacaaagcgatctgctgcatcgcctgctgacttctccggtgctgtata

SEQ ID NO: 132488 - DNA, 75 bp, synthetic construct
  source 1..75: mol_type = other DNA
cgctccgcttctcttgcctatcaaaatgcggttaccgcagtgagcgaaggcaaaccggatagcatcccggcggcg

SEQ ID NO: 132489 - DNA, 75 bp, synthetic construct
  source 1..75: mol_type = other DNA
aaccatttttgccggtatcagcgccggcggcatgtactgtccggagtgcggcacggttcactggccggacggagt

SEQ ID NO: 132490 - DNA, 75 bp, synthetic construct
  source 1..75: mol_type = other DNA
aagaagacacagaagttctgcgctttgataattttgacgatgccgttgagtgctgcgctgacctgggtattccgt

SEQ ID NO: 132491 - DNA, 75 bp, synthetic construct
  source 1..75: mol_type = other DNA
cattgccgaccgttgaaaaccagtttacgccgaccacggcgtggagcacttccgttggtagcggcattggcaact

SEQ ID NO: 132492 - DNA, 75 bp, synthetic construct
  source 1..75: mol_type = other DNA
aatggcgctcgtaacattttagcggcgggggacgccgttcttgcctgtggagagatggtgcagtcaggccgcccg

SEQ ID NO: 132493 - DNA, 75 bp, synthetic construct
  source 1..75: mol_type = other DNA
cagcgttgcgcgtgctgtggtcatacagcgaaagagaaccgcctgtcacaaagtaaattcagatgccaggtatgt

SEQ ID NO: 132494 - DNA, 75 bp, synthetic construct
  source 1..75: mol_type = other DNA
gcagaaacgcaaaatacagcgactgcattcccgtatcgcaaatatccgcagggactaccttcacaaagtcacaac

SEQ ID NO: 132495 - DNA, 75 bp, synthetic construct
  source 1..75: mol_type = other DNA
ggccattcttgccggtatcagcgccggcggtatgtactgcccgagtgtggcacagttcactggccggacggagtc

SEQ ID NO: 132496 - DNA, 75 bp, synthetic construct
  source 1..75: mol_type = other DNA
aacgaaaacctgcacctcaaagaagcaaactcctccgctatgtcgtaaaacttcacgaagatgatttttttgacg

SEQ ID NO: 132497 - DNA, 75 bp, synthetic construct
  source 1..75: mol_type = other DNA
tatttttctgccgaaactgggctggatgcgctaccggaatagccgtcaggtcacgggtgttgtgaaaaatgtcac

SEQ ID NO: 132498 - DNA, 75 bp, synthetic construct
  source 1..75: mol_type = other DNA
tttcgtgattttctgaacgaccgcaatggctggcgcaatgccacgttaattgccgtaaccagtaaacaatactga

SEQ ID NO: 132499 - DNA, 75 bp, synthetic construct
  source 1..75: mol_type = other DNA
gaattctgtacagcatatgctgaagcaacaaaaaagcaggctggaaaaatttcgtcaggtaaaccataaaaaggc

SEQ ID NO: 132500 - DNA, 75 bp, synthetic construct
  source 1..75: mol_type = other DNA
atctcagaggacaacggtttgccattcagtggaaacaacttgtaagaacccttcgtcggtgggacaacttctggg

SEQ ID NO: 132501 - DNA, 75 bp, synthetic construct
  source 1..75: mol_type = other DNA
agccttctctttaggctggtaggaggggaggccgttactgggctgcaggttgatgagaacggcctgatgacccta

SEQ ID NO: 132502 - DNA, 75 bp, synthetic construct
  source 1..75: mol_type = other DNA
aacgacaccacagaaatcatgcaacaagcggtagcagacttgcaaccactcattaatgaactaatcgacaaggct

SEQ ID NO: 132503 - DNA, 75 bp, synthetic construct
  source 1..75: mol_type = other DNA
gcaggggactttccgtgattttctgaacgaccgcaatggctggcgcaatgccacgttaattgccgtaaccagtaa

SEQ ID NO: 132504 - DNA, 75 bp, synthetic construct
  source 1..75: mol_type = other DNA
atgaaaaacatcttcgctcagttctggcgttcgtggctcaggacatgaaaccgcagatagctgaatgtttcagct

SEQ ID NO: 132505 - DNA, 75 bp, synthetic construct
  source 1..75: mol_type = other DNA
atatcgttactaaaacaactcagaattacgctaaagctcgccagttaattttagactctgatttttgcgatgaaa

SEQ ID NO: 132506 - DNA, 75 bp, synthetic construct
  source 1..75: mol_type = other DNA
atgttaagtattattttgacagggcatggcggatttgccagcggcatggaaaaagcaatgaagcaaattctcggt

SEQ ID NO: 132507 - DNA, 75 bp, synthetic construct
  source 1..75: mol_type = other DNA
tttcgtgattttctgaacaaccgcaatggctggcgcaatgccacattaattgccgtaaccagtaaacaatactga

SEQ ID NO: 132508 - DNA, 75 bp, synthetic construct
  source 1..75: mol_type = other DNA
ccgaaggtggctactaccttaacaccagccataagctggaagttacaaaccctgatttagctgctgacctcaagg

SEQ ID NO: 132509 - DNA, 75 bp, synthetic construct
  source 1..75: mol_type = other DNA
tggtggcgtcggtaatcccctatgaagaggcgaagattcgcattcttaactcttcacacagttgcatcgcctggg

SEQ ID NO: 132510 - DNA, 75 bp, synthetic construct
  source 1..75: mol_type = other DNA
aactggaatgtatcaatgtcgtcatcataaacggacgttgtaagtttgatggcatcaagccggaatggttatgta

SEQ ID NO: 132511 - DNA, 75 bp, synthetic construct
  source 1..75: mol_type = other DNA
ctacggtactctggaggaaagccactggcggaaatggactcagtcccgaaccctcaagttgcagaacccgtttaa

SEQ ID NO: 132512 - DNA, 75 bp, synthetic construct
  source 1..75: mol_type = other DNA
atgcctgctgtggactgctgtgtcctgcttatccacaacattttgcgcacggttatgtggacaaaatacctggtt

SEQ ID NO: 132513 - DNA, 75 bp, synthetic construct
  source 1..75: mol_type = other DNA
atatcagcgtttacagccgttctcccctgggttaccggtgcgtatggctgctggtcggttacgaccaactggcaa

SEQ ID NO: 132514 - DNA, 75 bp, synthetic construct
  source 1..75: mol_type = other DNA
tcccgtagtctccatgagaaaaaacggcctgaaatcattagtatgccgaaggccattcagcgtgccggggtggct

SEQ ID NO: 132515 - DNA, 75 bp, synthetic construct
  source 1..75: mol_type = other DNA
atgaatactcaggtattgtcaagtaatttttgcaaattagtgtgtatttatgattatatcaaaaatagtcacagg

SEQ ID NO: 132516 - DNA, 75 bp, synthetic construct
  source 1..75: mol_type = other DNA
tgatatcggcaactatattggcaacctcctgctggcgtacttctcacgccctgggtgggatgcgaatgagcaacg

SEQ ID NO: 132517 - DNA, 75 bp, synthetic construct
  source 1..75: mol_type = other DNA
acggcattgtttttctgacagatttgctgggcggcacgccgtttcgcgtagcttcaacgctggcgatgcaaaaac

SEQ ID NO: 132518 - DNA, 75 bp, synthetic construct
  source 1..75: mol_type = other DNA
cagcgcgtaacagctgaaagcttcccggcatcagtggggggggatgtttggcaagggtatgtctggcaaacttgg

SEQ ID NO: 132519 - DNA, 75 bp, synthetic construct
  source 1..75: mol_type = other DNA
agctggagtgtatcaatgttgtcatcattaacggcccctgcaagtttgaaggtgagaagccagactggctttgca

SEQ ID NO: 132520 - DNA, 75 bp, synthetic construct
  source 1..75: mol_type = other DNA
ctatgggaagctggaggagagccactggcgaaaatggaaatcgtcagggacactaaagttacaaaacccgttcag

SEQ ID NO: 132521 - DNA, 75 bp, synthetic construct
  source 1..75: mol_type = other DNA
gtgtttatcgttgaggggacacataaaaccatcattgtaaaacaagctctgccctggcttcgtgcagggggcgaa

SEQ ID NO: 132522 - DNA, 75 bp, synthetic construct
  source 1..75: mol_type = other DNA
actttatgcttgctggtagtggttctgtagccaggtggctgaaggtctatgaagagcgcggagaagctggtttac

SEQ ID NO: 132523 - DNA, 75 bp, synthetic construct
  source 1..75: mol_type = other DNA
tctgcttttcaccggatcacagtaaaacgctgccagagctcagtgttgcggcattgacggaaatcgtcaaaacct

SEQ ID NO: 132524 - DNA, 75 bp, synthetic construct
  source 1..75: mol_type = other DNA
cgtttaatggcgaagagaaccaacactggcagttgcacgcgcacttttatccacctctgttacgctctgccaccg

SEQ ID NO: 132525 - DNA, 75 bp, synthetic construct
  source 1..75: mol_type = other DNA
tctctcgccacccggaatccctgctcgccaagacccgtgcgctcaatgaagaaggtatcagcgcctggatgctga

SEQ ID NO: 132526 - DNA, 75 bp, synthetic construct
  source 1..75: mol_type = other DNA
cactgactacgtaccgttttcagcagaacgaaatgcggcgatggtcatttggcggacagccatagatagccgtcc

SEQ ID NO: 132527 - DNA, 75 bp, synthetic construct
  source 1..75: mol_type = other DNA
gcctggcaggatattcccaatgttgatccggaacagttccatctgatcactgaccgcatcgcgcagtatcaggat

SEQ ID NO: 132528 - DNA, 75 bp, synthetic construct
  source 1..75: mol_type = other DNA
gattacagtccacaaggtatcgcacttgtacaaagtgttctttttccaggaattattcgccggattatccttgat

SEQ ID NO: 132529 - DNA, 75 bp, synthetic construct
  source 1..75: mol_type = other DNA
tgtatcaccaaatctaccggacctggtattaagtgtgggtcagatgaatactccggttctgtctaatcccgaaat

SEQ ID NO: 132530 - DNA, 75 bp, synthetic construct
  source 1..75: mol_type = other DNA
tgatgctgccagagaagatttagcacatatagacacggctcaagctattacaactgaaaattcagagctggatgt

SEQ ID NO: 132531 - DNA, 75 bp, synthetic construct
  source 1..75: mol_type = other DNA
caccgggcaatggattctggtttcaccgcaccgtgctaagcgcccctggcagggggcgcaggaaacgccagccaa

SEQ ID NO: 132532 - DNA, 75 bp, synthetic construct
  source 1..75: mol_type = other DNA
acactggttagccgttgtgccttactgggctgcctggccgttcgaaacgctactgctgcccaaagcccacgtttt

SEQ ID NO: 132533 - DNA, 75 bp, synthetic construct
  source 1..75: mol_type = other DNA
tctgcttttcaccggatcacagtaaaacgttgccagaactgagcgttgcggcattgacggaaatcgtcaaaacct

SEQ ID NO: 132534 - DNA, 75 bp, synthetic construct
  source 1..75: mol_type = other DNA
aaatttcttgtgaaatcggtcagacacattggttcgtatctgacagccgatggcgatgcctgggtgacggtattc

SEQ ID NO: 132535 - DNA, 75 bp, synthetic construct
  source 1..75: mol_type = other DNA
acattggagcatatcttactgctgacggcgatgcctgggtgacggttttcgaggcatatgctgagaactgggtga

SEQ ID NO: 132536 - DNA, 75 bp, synthetic construct
  source 1..75: mol_type = other DNA
aatacgaatttacgataacgcgtcagcaaagtggggagagcccaaaacaattcatgcccatgaactgattgggca

SEQ ID NO: 132537 - DNA, 75 bp, synthetic construct
  source 1..75: mol_type = other DNA
ccggacggacgacgagcggacccaccactaccactacgacagccagcaccgtctggtgttctacacgcggataca

SEQ ID NO: 132538 - DNA, 75 bp, synthetic construct
  source 1..75: mol_type = other DNA
atcggcattcctgtcgccaaaaagtgtaaagccctggcccgcgattccttaagcctgcttgcctacgtaaaataa

SEQ ID NO: 132539 - DNA, 75 bp, synthetic construct
  source 1..75: mol_type = other DNA
tctcggtgaagacagctaccgcgatctcagcggcattggcattcccgtcgctaaaaagtgcaaagccctggcccg

SEQ ID NO: 132540 - DNA, 75 bp, synthetic construct
  source 1..75: mol_type = other DNA
atgtcatggttgtgataaagaacataaaaaaataataacgcctcgtattttctcaaatgctaaagatgaggttcc

SEQ ID NO: 132541 - DNA, 75 bp, synthetic construct
  source 1..75: mol_type = other DNA
ttaatccagacttaaatatcgacgcccaggaatacgccgacctgttaattgaacgctttagcaaccgtaatgttg

SEQ ID NO: 132542 - DNA, 75 bp, synthetic construct
  source 1..75: mol_type = other DNA
ccgacggcaacggtagccagccgttcttcgatgacgaagggaatttaacccatatcggtgttgcaggttttgaaa

SEQ ID NO: 132543 - DNA, 75 bp, synthetic construct
  source 1..75: mol_type = other DNA
tcactgggaacaggttaaggcgttcatgctcggcacattccggtcgctgtgggctggccttgcgcctgttcgtga

SEQ ID NO: 132544 - DNA, 75 bp, synthetic construct
  source 1..75: mol_type = other DNA
atcaacaacctgctctacaacccccaggccgtcgcccagttgctggcgtggctgaatgaacgttacccctttacc

SEQ ID NO: 132545 - DNA, 75 bp, synthetic construct
  source 1..75: mol_type = other DNA
acgttctccgtcacctgaaaggcattgaggggaataccggtggtctgctggctgaaaaccgtaaacgtatcggac

SEQ ID NO: 132546 - DNA, 75 bp, synthetic construct
  source 1..75: mol_type = other DNA
caggtgcttgctgttccgccagcgtagacaagccagcgttgcgcgtcctgtggtcatacagcgaaagataatcgc

SEQ ID NO: 132547 - DNA, 75 bp, synthetic construct
  source 1..75: mol_type = other DNA
caggtgcttgctgttccgccagcgtacacaagccagcgttgcgcgtgctgtggtcatacagcgaaagataatcgc

SEQ ID NO: 132548 - DNA, 75 bp, synthetic construct
  source 1..75: mol_type = other DNA
caggtgcttgctgttccgccagcgtatacaagccagcgttgcgcgtactgtggtcatacagcgaaagagaatcgc

SEQ ID NO: 132549 - DNA, 75 bp, synthetic construct
  source 1..75: mol_type = other DNA
acaatgcgcaactggctgaaacaggcggtgaagcgggctgaagctgacggcgtgcatttttcgatccccgtgacg

SEQ ID NO: 132550 - DNA, 75 bp, synthetic construct
  source 1..75: mol_type = other DNA
ggacagaatgatgcattccgctacccgcagggcgttaagctcgatcaggaaaacagccgtatttttctgccgaaa

SEQ ID NO: 132551 - DNA, 75 bp, synthetic construct
  source 1..75: mol_type = other DNA
ccactgaaacgcaatggcttaaagattctccctcacagccattgcaacagtcactgaaagaccttgagcgggctt

SEQ ID NO: 132552 - DNA, 75 bp, synthetic construct
  source 1..75: mol_type = other DNA
gtctggaagggcgcgtgaaacgtgtgacggataaaccgctgatattgattaataactatattggcgatccaaaac

SEQ ID NO: 132553 - DNA, 75 bp, synthetic construct
  source 1..75: mol_type = other DNA
gggttggtcataaaatatgtcgataaggcactggaaaaacgcatacctgccggttttgagatggttatcaataac

SEQ ID NO: 132554 - DNA, 75 bp, synthetic construct
  source 1..75: mol_type = other DNA
atttattgcccgtgatgattggttctaccggtggtcatctggtcggcggtaaacgcggggcggtcatgggcggaa

SEQ ID NO: 132555 - DNA, 75 bp, synthetic construct
  source 1..75: mol_type = other DNA
caggtgcttgctgttccgccagcgtaaacaagccagcgttgcgcgttctgtggtcatacagcgaaagagaatcgc

SEQ ID NO: 132556 - DNA, 75 bp, synthetic construct
  source 1..75: mol_type = other DNA
ggtgcatttttctataccggtgacgccgcataccttccggcacagctatatcatgcacatgctctatcaccgcca

SEQ ID NO: 132557 - DNA, 75 bp, synthetic construct
  source 1..75: mol_type = other DNA
tgtcagtcatcaatgaaccggcgaaagtgcttttccttaataatgcgatcgatcagggcgtctattatccgctgg

SEQ ID NO: 132558 - DNA, 75 bp, synthetic construct
  source 1..75: mol_type = other DNA
catcactaccattacgacagcctgcaccgcctggtccattacatccgtatccaatatgaggagccgctggtcgag

SEQ ID NO: 132559 - DNA, 75 bp, synthetic construct
  source 1..75: mol_type = other DNA
cgtgggtgcaattagatttagaggaaaagatcccctccccccaatagattatcctgaaaagtgtggaacgatatg

SEQ ID NO: 132560 - DNA, 75 bp, synthetic construct
  source 1..75: mol_type = other DNA
tgatggtgccaaggatttagataatgggagttgtccatctggttaccataaagctcaattgtttattcgtcctca

SEQ ID NO: 132561 - DNA, 75 bp, synthetic construct
  source 1..75: mol_type = other DNA
tttgcgctggatatggctgccacgctggcagtgcctttcacaggtgacgggcgcgatgctgcagagatcctgcgt

SEQ ID NO: 132562 - DNA, 75 bp, synthetic construct
  source 1..75: mol_type = other DNA
accacacaccttcctgcacagctatatcatgcacatgctctatcaccgccagcctcggaaagtcttccaggcagt

SEQ ID NO: 132563 - DNA, 75 bp, synthetic construct
  source 1..75: mol_type = other DNA
ccgcatacgtttcgtcacagctatatcatgcacatgctttatcaccgccagccgaagaaggtcattcaggccctg

SEQ ID NO: 132564 - DNA, 75 bp, synthetic construct
  source 1..75: mol_type = other DNA
aaaatgacgtgatttctaaggtctatcttcacctcgtccagcattgggacgttcaggacttccttgcgatattcg

SEQ ID NO: 132565 - DNA, 75 bp, synthetic construct
  source 1..75: mol_type = other DNA
gacaaatgaagaatgggaaagacaaagaagttatattcccaaaatctggagctactgccagcattacatggcctt

SEQ ID NO: 132566 - DNA, 75 bp, synthetic construct
  source 1..75: mol_type = other DNA
aaccattatgggccgtgaccgacgaaaccatgcgcaactggctgaagcaggctgtcagacgggccgaagctgacg

SEQ ID NO: 132567 - DNA, 75 bp, synthetic construct
  source 1..75: mol_type = other DNA
aattcagcggcgaaatcaccggcgtgacggatggtgccgggcgtcacttccggctggtactgaccacgcaggcgc

SEQ ID NO: 132568 - DNA, 75 bp, synthetic construct
  source 1..75: mol_type = other DNA
caccatgattctgcatcccggcgcgattggcgtgcccgccaatcgtgaactgccggataagaaggcgctatacca

SEQ ID NO: 132569 - DNA, 75 bp, synthetic construct
  source 1..75: mol_type = other DNA
aaatcaagaaaatgactcaaaaagagtttgaccagttttatgagttagaaggttggtcttccacgctgatcaatt

SEQ ID NO: 132570 - DNA, 75 bp, synthetic construct
  source 1..75: mol_type = other DNA
gcaggatctcacccaaccgcagcatattaataccatgctctacgaagcagagctgttcgctaccctggtggatga

SEQ ID NO: 132571 - DNA, 75 bp, synthetic construct
  source 1..75: mol_type = other DNA
aactgttcgccaccctggtggatgaacatctggtgaatcatccggggctagcggtcagtcgcattaccgccaaac

SEQ ID NO: 132572 - DNA, 75 bp, synthetic construct
  source 1..75: mol_type = other DNA
gtcagggtgtggataagcagttccgccatatcaacattgcggaagccgatcacttcaaacgtaaccggctcattt

SEQ ID NO: 132573 - DNA, 75 bp, synthetic construct
  source 1..75: mol_type = other DNA
tactggcatctgccggggctgaacagtcagtttaaggtgctgccggagtcatgccggcgactgtggttaaaataa

SEQ ID NO: 132574 - DNA, 75 bp, synthetic construct
  source 1..75: mol_type = other DNA
gcggtcagtcgcatcactgccaaactgctgaccgagatccgccgccagactggagttgtttttccggccgatagc

SEQ ID NO: 132575 - DNA, 75 bp, synthetic construct
  source 1..75: mol_type = other DNA
gcgtaaagtctttttcaactactgccagtattcctcgcggtatcagcgttatctggacggcgagaatcccaacac

SEQ ID NO: 132576 - DNA, 75 bp, synthetic construct
  source 1..75: mol_type = other DNA
agttccatctgatggggcgtcgtgggcgcatcgttaagattgaagaaaaacgtatttctctgcaggaagtagaac

SEQ ID NO: 132577 - DNA, 75 bp, synthetic construct
  source 1..75: mol_type = other DNA
cctgttcatcttccgcggacgccggggtgaccagataaagtgttgtgggctgacagcgacggactgtgcctcttc

SEQ ID NO: 132578 - DNA, 75 bp, synthetic construct
  source 1..75: mol_type = other DNA
actgctgggcctgccgtaccgtaagatcattctttgcaccggtgacatgggctttggcgcatgcaaaacttatga

SEQ ID NO: 132579 - DNA, 75 bp, synthetic construct
  source 1..75: mol_type = other DNA
gtgtggatacgcagttccgccatatcaacattgcggaagccgatcacttcaaacagttcctgcgtcagattaagc

SEQ ID NO: 132580 - DNA, 75 bp, synthetic construct
  source 1..75: mol_type = other DNA
tggatacccagctttctccgccgcccgttcaggtgcttctctctgctggcggtgagctgccgtggcaggacgtac

SEQ ID NO: 132581 - DNA, 75 bp, synthetic construct
  source 1..75: mol_type = other DNA
ttgttgccgggagggaaaaaaaacaccggggaagagtgggacgtcctggaattcagcagcctgactgagctgaaa

SEQ ID NO: 132582 - DNA, 75 bp, synthetic construct
  source 1..75: mol_type = other DNA
gtcgtcggttccgtattgccgcagcatttgtacggcctgacttttcgcgttttcctgccaatggcgctgggatta

SEQ ID NO: 132583 - DNA, 75 bp, synthetic construct
  source 1..75: mol_type = other DNA
ggaagaagacgcctataacaccaaagtcattaccctttcacgtagcggttcgctgccggaagtgatcgaaaccag

SEQ ID NO: 132584 - DNA, 75 bp, synthetic construct
  source 1..75: mol_type = other DNA
gtggtttcctgccttgtcaccctcgagctgacgggcatcaccgtgtcgttcaatagtgcgccgctggaatggtgg

SEQ ID NO: 132585 - DNA, 75 bp, synthetic construct
  source 1..75: mol_type = other DNA
atactttcgtcaaagagtgtattgaggcgctggtacatgcgggttatctgccattgttgtcagtcatcaatgaac

SEQ ID NO: 132586 - DNA, 75 bp, synthetic construct
  source 1..75: mol_type = other DNA
ggtgcttttattgcctggggttttataacggcgttatttattcccaccggttggttgcctaacgaacatttcgcc

SEQ ID NO: 132587 - DNA, 75 bp, synthetic construct
  source 1..75: mol_type = other DNA
tactggtggtcatctggtcggcggtaaacgcggggcggtcatgggcggaataggtactattggtgtgatcgttgg

SEQ ID NO: 132588 - DNA, 75 bp, synthetic construct
  source 1..75: mol_type = other DNA
atgattaaacaaactattgtcgcgttgcttttgagtgcgggggcgtcatcagtcttcgcggcgggaaccgtcaag

SEQ ID NO: 132589 - DNA, 75 bp, synthetic construct
  source 1..75: mol_type = other DNA
cgatatcgtccgcgttgccgaacgcggtaacccgccgttgcagggcaactacacgctgtgggtcggaccaccgcc

SEQ ID NO: 132590 - DNA, 75 bp, synthetic construct
  source 1..75: mol_type = other DNA
attggtcttctgttctggtttgcgttgacccatttcaaaaaagggaagggcacttcctggctttttaacatgtgt

SEQ ID NO: 132591 - DNA, 75 bp, synthetic construct
  source 1..75: mol_type = other DNA
cgtaaacgtgctgccttcgatcgcgatgttgatgattatgtgtctgaatttgatgggagccggtggccctcgtct

SEQ ID NO: 132592 - DNA, 75 bp, synthetic construct
  source 1..75: mol_type = other DNA
cctcaaaacgaacatcagcgttccgggctgcgcttcgcccggcgcgtcaggttaccccgtatggtaggactggcg

SEQ ID NO: 132593 - DNA, 75 bp, synthetic construct
  source 1..75: mol_type = other DNA
atgattaaaccaactattgtcgcgctgcttttgagcgtgggagcgtcatcggtctttgcggcaggaaccatcaag

SEQ ID NO: 132594 - DNA, 75 bp, synthetic construct
  source 1..75: mol_type = other DNA
gccatcgtcggcattttccatgacgaagccgtacgcaatgacgtcgccgaccgcctgcacccaatgggagcctct

SEQ ID NO: 132595 - DNA, 75 bp, synthetic construct
  source 1..75: mol_type = other DNA
tttctactgttgtcccgtctcgtccggtttctcatcacagtaacaacgccggtggtggtacgagcagtaactacc

SEQ ID NO: 132596 - DNA, 75 bp, synthetic construct
  source 1..75: mol_type = other DNA
ggaacgtgttccagtttctatttatttggtgaatggtattaagctgcaaggacaaatcgagtcttttgatcagtt

SEQ ID NO: 132597 - DNA, 75 bp, synthetic construct
  source 1..75: mol_type = other DNA
tgccggtctggataaggcaaacccggagcactttaccgcagggggggaacccaaagtgaaagccgtcagtgcggc

SEQ ID NO: 132598 - DNA, 75 bp, synthetic construct
  source 1..75: mol_type = other DNA
gcgatcattcgtgccgacagcgtgctgtctgtggtatctgcatcgtcagcagaaacgctcgctgaggctgggtgg

SEQ ID NO: 132599 - DNA, 75 bp, synthetic construct
  source 1..75: mol_type = other DNA
tccggcggcgaacagcagcgcgtcaacatcgcccgcggctttatcgtcgactaccccattctgctgctcgacgaa

SEQ ID NO: 132600 - DNA, 75 bp, synthetic construct
  source 1..75: mol_type = other DNA
tggatgaaccgctcggcgcactggatctcaaattgcgtgagcagatgcagctggaactgaaaaaactgcaacagt

SEQ ID NO: 132601 - DNA, 75 bp, synthetic construct
  source 1..75: mol_type = other DNA
atgtccgatcgcgtggcagtattcaacaatggccgcattgagcaggtggattcgccgcgcgatctctatatgcgc

SEQ ID NO: 132602 - DNA, 75 bp, synthetic construct
  source 1..75: mol_type = other DNA
aagaactccccgctacgcttactccagggcaacaagtgatggtttcctgggcgcgcgatgtgatggtgccactgg

SEQ ID NO: 132603 - DNA, 75 bp, synthetic construct
  source 1..75: mol_type = other DNA
agctgcagcagcttatccggctgccggggcagcagtatgatgaggagtccggcctgtattacaaccgccaccgct

SEQ ID NO: 132604 - DNA, 75 bp, synthetic construct
  source 1..75: mol_type = other DNA
gggcgacgactcgttttgaactgaaacttagtggcggtgaaaaactgctggtcagtctgggcaacatgacgggcg

SEQ ID NO: 132605 - DNA, 75 bp, synthetic construct
  source 1..75: mol_type = other DNA
ggcgctggaaaaagtggcgcttggtttcgtgctgcaacgtaagccgtcacagctttccggtggtcaacgccagag

SEQ ID NO: 132606 - DNA, 75 bp, synthetic construct
  source 1..75: mol_type = other DNA
ttcgcctggatggagcgtttctgtgcgacctacagcggcggtatctggtcgttatacaccctgagtaacggtggc

SEQ ID NO: 132607 - DNA, 75 bp, synthetic construct
  source 1..75: mol_type = other DNA
tttaccggtgggcatcgtggcggtgtggcaactggcctcctcggttggctggctatcgacgcgtattttgccctc

SEQ ID NO: 132608 - DNA, 75 bp, synthetic construct
  source 1..75: mol_type = other DNA
accgcaggcgaaggcgggctgaagcgggtggtgaaaaaggaacacgctgacggcagcgtcacgcagagccggttt

SEQ ID NO: 132609 - DNA, 75 bp, synthetic construct
  source 1..75: mol_type = other DNA
ggaacgtgttccagtttctatttatttagtgaatggtattaagctgcaagggcaaatcgagtcttttgatcagtt

SEQ ID NO: 132610 - DNA, 75 bp, synthetic construct
  source 1..75: mol_type = other DNA
tttttacaccctcagcaatggcggcgcgtttatggcccctgacgctgacgataactggcatatgttcaacagcat

SEQ ID NO: 132611 - DNA, 75 bp, synthetic construct
  source 1..75: mol_type = other DNA
cggcacgaacggcaatggtgcggaaatgagcgcggaagccgcaggtatcgctgtctgcctgattgaatacagcca

SEQ ID NO: 132612 - DNA, 75 bp, synthetic construct
  source 1..75: mol_type = other DNA
tcggcaaacttgctgacgtcagtgcgcagctgttagagcgcctctggttgcgctggaacccggcttatcatttga

SEQ ID NO: 132613 - DNA, 75 bp, synthetic construct
  source 1..75: mol_type = other DNA
tttaccggtgggcatcgtggcggtgtggcaactggcctcctcagttggctggctgtcgacgcgtattttgccctc

SEQ ID NO: 132614 - DNA, 75 bp, synthetic construct
  source 1..75: mol_type = other DNA
tgccggtctggataaggcaaacccggaacactttaccgcagggggagaacccaaagtgaaagccgtcagtgcggc

SEQ ID NO: 132615 - DNA, 75 bp, synthetic construct
  source 1..75: mol_type = other DNA
gaatacccggaaaacctgccagccgcgccgctggtgcgctatggctggacgccgcgtggcgaactggcagcggtg

SEQ ID NO: 132616 - DNA, 75 bp, synthetic construct
  source 1..75: mol_type = other DNA
cggcgcggaacttactggcgaagcggcagggatagccgcctgcctgatggcatacagccaccatgcgtgtcgtac

SEQ ID NO: 132617 - DNA, 75 bp, synthetic construct
  source 1..75: mol_type = other DNA
gtatctggagctttttgacgctcagcaatggcggcgcttttatggctcctgagtcagagcacgatgagaagtggg

SEQ ID NO: 132618 - DNA, 75 bp, synthetic construct
  source 1..75: mol_type = other DNA
ggtgtgatacggacggacgacgagcggacccaccactaccactacgacagccagcaccgcctggtgttctacacg

SEQ ID NO: 132619 - DNA, 75 bp, synthetic construct
  source 1..75: mol_type = other DNA
ggagacagtacgctaccgctacgatgacgcgcacagtgagttaccggcgacgacaacggatgcgacgggcagcac

SEQ ID NO: 132620 - DNA, 75 bp, synthetic construct
  source 1..75: mol_type = other DNA
ggctgatgcacgacccggcatacccggagagcctgcccgctgcgccactggtgcggtacacgtatacggaagccg

SEQ ID NO: 132621 - DNA, 75 bp, synthetic construct
  source 1..75: mol_type = other DNA
atggcaaaccgcaaacaacagcgcgcccgcgctgagcgccttcacatccgcaccgaaatcaaccgcagacttttc

SEQ ID NO: 132622 - DNA, 75 bp, synthetic construct
  source 1..75: mol_type = other DNA
atcactccggacggcaaccggagcgagacacagtacgatgcgtggggaaaagcggtcagcaccacgcagggcggg

SEQ ID NO: 132623 - DNA, 75 bp, synthetic construct
  source 1..75: mol_type = other DNA
aggtgacgtggtatggctgggacggagacaggctgacgacggtgcagactgacaccacacgtatccagacggtat

SEQ ID NO: 132624 - DNA, 75 bp, synthetic construct
  source 1..75: mol_type = other DNA
atgggtgaaaccgcagagcggtggcggtatgacgaacgcggctggctgacagacatcagccatatcagcgaaggg

SEQ ID NO: 132625 - DNA, 75 bp, synthetic construct
  source 1..75: mol_type = other DNA
ctggggatgagatgggagcctctgtctctgattattttaaaaagatgcaaccccgcagagatacctggatttgga

SEQ ID NO: 132626 - DNA, 75 bp, synthetic construct
  source 1..75: mol_type = other DNA
gcctataagcctacaagtgctcggtgagttatatggatatcaaagatattttatgcctaaaggtcctttcactgg

SEQ ID NO: 132627 - DNA, 75 bp, synthetic construct
  source 1..75: mol_type = other DNA
atcagcgaagggcaccgggtggcggtgcactatggttatgacagtaaaggccgcctcgccagtgaacacctgacg

SEQ ID NO: 132628 - DNA, 75 bp, synthetic construct
  source 1..75: mol_type = other DNA
agatataacaatgatagtttctcgtggaaatgttgcagacacagggataactgatcgtgtcaatgacataataaa

SEQ ID NO: 132629 - DNA, 75 bp, synthetic construct
  source 1..75: mol_type = other DNA
gcagcccgcgccagacccggagttacagctacagcaccaccggcaggctgaccggcgttcacaccaccgcagcga

SEQ ID NO: 132630 - DNA, 75 bp, synthetic construct
  source 1..75: mol_type = other DNA
accatgtcggtaacgccggaactgacgctggcgaatatccgtgcgctgtttaatccggcgaattacgacatcatt

SEQ ID NO: 132631 - DNA, 75 bp, synthetic construct
  source 1..75: mol_type = other DNA
catcgttaatgaggacggcagtgatgacgttgcgctgatgactggtgaagttgttgaccatcagacagggcagat

SEQ ID NO: 132632 - DNA, 75 bp, synthetic construct
  source 1..75: mol_type = other DNA
tcctgccgatggtcagtctgaaaaacaaaaacggagatattactgcgcaggctcaggtcagcagttatacgcctc

SEQ ID NO: 132633 - DNA, 75 bp, synthetic construct
  source 1..75: mol_type = other DNA
agagcattggtgaatgaaccgcgcgtattgctgttggatgaaccgctcggcgcactggatctcaaattgcgtgag

SEQ ID NO: 132634 - DNA, 75 bp, synthetic construct
  source 1..75: mol_type = other DNA
tcgtcgggacatccaacgtttttgatccgctaatggccgagaatctttgcggcatgatgggcagttttgccctgc

SEQ ID NO: 132635 - DNA, 75 bp, synthetic construct
  source 1..75: mol_type = other DNA
cgccagcaatctgccaccgtgggagcgggatgttaataccgttttccaggactatgcgctgtttccccatatgtc

SEQ ID NO: 132636 - DNA, 75 bp, synthetic construct
  source 1..75: mol_type = other DNA
taacgatggtatcgctgccgggtattacgcggcagtcttcagctatctggccgaagacctggcagaactgcagga

SEQ ID NO: 132637 - DNA, 75 bp, synthetic construct
  source 1..75: mol_type = other DNA
cgaaaatccgtcacaacttcccgcaagccattgcggtagagatggaagcgacggctatcgctcatgtctgccaca

SEQ ID NO: 132638 - DNA, 75 bp, synthetic construct
  source 1..75: mol_type = other DNA
acagctattgcccacgtctgccacaattttaacgtgccgtttgtggtggtacgcgccatctccgacgtagccgat

SEQ ID NO: 132639 - DNA, 75 bp, synthetic construct
  source 1..75: mol_type = other DNA
gcaatctggtttgtatgctggagttgcaaatcaatgcatactgggccacgcgccccagccatttcgtgttattga

SEQ ID NO: 132640 - DNA, 75 bp, synthetic construct
  source 1..75: mol_type = other DNA
tgaaactgctcggacagttccagcaacagcaaggagacaatgcccgtgctgatgcagagcttgtcctgaaaagtc

SEQ ID NO: 132641 - DNA, 75 bp, synthetic construct
  source 1..75: mol_type = other DNA
gcattccaggcacagactgatgctcaggttgcagcggcaaatgttgtgaaaatcctcgcatctgccgatagccag

SEQ ID NO: 132642 - DNA, 75 bp, synthetic construct
  source 1..75: mol_type = other DNA
gccgtaagcgtggatgcgcaggtacaaccacagacagttctggttactgcgataaacatcgtggcgaaggatggg

SEQ ID NO: 132643 - DNA, 75 bp, synthetic construct
  source 1..75: mol_type = other DNA
catgcaaaaggcgttttctcagaatggagataatatgctcaaacgtctgggtgacggcttctacgagcagcgcct

SEQ ID NO: 132644 - DNA, 75 bp, synthetic construct
  source 1..75: mol_type = other DNA
gtccggtgccggcatgacgattgtggcagacaaactgcttaatgataaaagtcaggttgttgcaggtggtctgct

SEQ ID NO: 132645 - DNA, 75 bp, synthetic construct
  source 1..75: mol_type = other DNA
tacacatcacgacgcaggaccttgataaccaggagggcagtattctggcagacagggcgcttacggttatggcag

SEQ ID NO: 132646 - DNA, 75 bp, synthetic construct
  source 1..75: mol_type = other DNA
taacggcgatgtcacgctgaccgccggacgggatatgacatcacaggcggcatcgctgtcggctcagaaaggcct

SEQ ID NO: 132647 - DNA, 75 bp, synthetic construct
  source 1..75: mol_type = other DNA
tgtgcagaatgaccagggcagactggtgctgcaggccggacgggacataaacctgacggcagcaacggtggtgaa

SEQ ID NO: 132648 - DNA, 75 bp, synthetic construct
  source 1..75: mol_type = other DNA
tttggtaagcaatacaacctgaaacctggtgtagcactgaccgcagagcagatggcgttactgaccagtgatatt

SEQ ID NO: 132649 - DNA, 75 bp, synthetic construct
  source 1..75: mol_type = other DNA
ggtggttgtgaaggctcacgggaacagtgtgctgtacgtgacccgagtcgcgatggtacccggggaccggggcat

SEQ ID NO: 132650 - DNA, 75 bp, synthetic construct
  source 1..75: mol_type = other DNA
gttacaggtgaggtgaataaggctgcaaatgtggctgctcatgctgtggtgaatgctgcactggcggtggcacag

SEQ ID NO: 132651 - DNA, 75 bp, synthetic construct
  source 1..75: mol_type = other DNA
attctttactgatggtccaaatacagcttcactggccggggctggtattggtgctggtctgggtggggcatttgg

SEQ ID NO: 132652 - DNA, 75 bp, synthetic construct
  source 1..75: mol_type = other DNA
tgacctgtttaacagcggtaaactggccgggaagcagaccgtgcagctcagtgcagaaaacattcacaaccaggc

SEQ ID NO: 132653 - DNA, 75 bp, synthetic construct
  source 1..75: mol_type = other DNA
ggtgtctggcgaactggcggtgacgctggatggtgcgctggataatgcatccggcaaactgctttcacagaaaac

SEQ ID NO: 132654 - DNA, 75 bp, synthetic construct
  source 1..75: mol_type = other DNA
ttaatgaggtgaacagtcgcaatcccagccagttgaacggttttgttgaggtcgccgggaaaaaggcacaggtgg

SEQ ID NO: 132655 - DNA, 75 bp, synthetic construct
  source 1..75: mol_type = other DNA
agccctgagcaggtggcacaactggtagaaagtattaagcaattcggctggactaatccggtgctgattgacgaa

SEQ ID NO: 132656 - DNA, 75 bp, synthetic construct
  source 1..75: mol_type = other DNA
gaattgcggactattacgctcacgcccccgctgaaattcagtgttttttcgaggagtcggcgctggtgatcattg

SEQ ID NO: 132657 - DNA, 75 bp, synthetic construct
  source 1..75: mol_type = other DNA
atatgctgttgcttctggtcgtgtaaatgtggccgggatgacaccagataacatggctccgctctgcgaagccat

SEQ ID NO: 132658 - DNA, 75 bp, synthetic construct
  source 1..75: mol_type = other DNA
tgtggatttaggcggaaccacgctggatgtggcaaaggttcaagggcaactggcaggtatcagccaggtgttttg

SEQ ID NO: 132659 - DNA, 75 bp, synthetic construct
  source 1..75: mol_type = other DNA
ctgcggagttaatgcgactttcatcgcggacggagtgccacaatttgctctggttaatgggctgtacgcaatgaa

SEQ ID NO: 132660 - DNA, 75 bp, synthetic construct
  source 1..75: mol_type = other DNA
caatgacgcacattacaacagcctgatggcggttattcgtgaaaaggaagaaacactgaaacaacgtgtactccg

SEQ ID NO: 132661 - DNA, 75 bp, synthetic construct
  source 1..75: mol_type = other DNA
gcagatatcagcacagagcctgtcaaaccacaggggtaaactgattcagacgggaacaggggatttttcactgaa

SEQ ID NO: 132662 - DNA, 75 bp, synthetic construct
  source 1..75: mol_type = other DNA
tcagcggtagccggcgcacagtcaggcaagacaacggttgagaataatgcgctcagcttcggtgatggttttgaa

SEQ ID NO: 132663 - DNA, 75 bp, synthetic construct
  source 1..75: mol_type = other DNA
ccctgacgaattccggtaccgggcgaatctacggcgatgctgttggtgtcagtgctgccacatttaataatctgg

SEQ ID NO: 132664 - DNA, 75 bp, synthetic construct
  source 1..75: mol_type = other DNA
tgcgtctgcgcgaagagtttggcgtatatgctgttgcttctggtcgcgtaaacgtggccgggatgacaccagata

SEQ ID NO: 132665 - DNA, 75 bp, synthetic construct
  source 1..75: mol_type = other DNA
gttaatacgttgcaggaaaaaggcgcaaaccgcgactttagctttatcatcaaacagaatggtatgttctctttc

SEQ ID NO: 132666 - DNA, 75 bp, synthetic construct
  source 1..75: mol_type = other DNA
ccggggggcactggcgcactacgcgtagctgccgatttcctggcaaaaaataccagcgttaagcgagtgtgggtg

SEQ ID NO: 132667 - DNA, 75 bp, synthetic construct
  source 1..75: mol_type = other DNA
acacagaaaggcagtacggtggggagtgttcacggtgatgtttcccttcaggcaggtaaccggttgaccgtcaac

SEQ ID NO: 132668 - DNA, 75 bp, synthetic construct
  source 1..75: mol_type = other DNA
tcagctgctgccggaacgggcaggataaaaacacagcagtctgtcagcaatacggagggacgaatggagtccgcc

SEQ ID NO: 132669 - DNA, 75 bp, synthetic construct
  source 1..75: mol_type = other DNA
gaagggacaggggctggatttaagcaacagccggatacagggacaacataccgggctggatgcaggcagcggaaa

SEQ ID NO: 132670 - DNA, 75 bp, synthetic construct
  source 1..75: mol_type = other DNA
gcctgctggcgatggccggacgggatatcagtctgaccaccaccacccgtacggcacagcgcgacgccggacaga

SEQ ID NO: 132671 - DNA, 75 bp, synthetic construct
  source 1..75: mol_type = other DNA
atcaggaacggcgataagacattagccactgctaatgagctgattaagctggaaaatgcagataaacgtagtgat

SEQ ID NO: 132672 - DNA, 75 bp, synthetic construct
  source 1..75: mol_type = other DNA
gctggaagcgcagacaatacacatcacgacgcaggaccttgataaccaggagggcagtattctggcagacagggc

SEQ ID NO: 132673 - DNA, 75 bp, synthetic construct
  source 1..75: mol_type = other DNA
gatatcgacttccgtcagctgagtcgtcatacctggaccgtgcgcgcactggcttccattgaagacttcaacgaa

SEQ ID NO: 132674 - DNA, 75 bp, synthetic construct
  source 1..75: mol_type = other DNA
gcaaccagacgctggacgaatgccttgatgtcatcatcgagtccgcccactcacgtttcccggtgattagcgaag

SEQ ID NO: 132675 - DNA, 75 bp, synthetic construct
  source 1..75: mol_type = other DNA
ggtagctcgctggcattaacgggttcgccagtcggcgcaatgaaagtatttttgattttctatatcgcctgcgta

SEQ ID NO: 132676 - DNA, 75 bp, synthetic construct
  source 1..75: mol_type = other DNA
ctgtgggcgacatgctgctcgacagtgtacggggcgttgtggacaacgtctctggtctgattcgcagtggttccg

SEQ ID NO: 132677 - DNA, 75 bp, synthetic construct
  source 1..75: mol_type = other DNA
tggaggcatggaataaatatcgggtattgttgaatcgtgttgatacatcacgttgctggaggcatggaataaata

SEQ ID NO: 132678 - DNA, 75 bp, synthetic construct
  source 1..75: mol_type = other DNA
tttgggctaatcccatttttggttggttgcttcatttttgccgtggttgctttatggctgcactggcgacatcgt

SEQ ID NO: 132679 - DNA, 75 bp, synthetic construct
  source 1..75: mol_type = other DNA
ttttgatgtctccctgacaggcttcatcccgacagaaattgatgaactgttgacggatgttttgcccggtagtgc

SEQ ID NO: 132680 - DNA, 75 bp, synthetic construct
  source 1..75: mol_type = other DNA
ctgtaccagcgtactggtagtaaccttcagaaggtcgatatacgtaggtaccgggccgttttctgtgctcaggga

SEQ ID NO: 132681 - DNA, 75 bp, synthetic construct
  source 1..75: mol_type = other DNA
tgaactgtacgacgatacgaaaactcaggagctgatcagccggatacgttcggcgtcccttgaacccgccagtaa

SEQ ID NO: 132682 - DNA, 75 bp, synthetic construct
  source 1..75: mol_type = other DNA
caccgtgcgtggtgatgggcgtacagcgctgcacgaactttcagtacgttaccctgaacagcttacgattgagcg

SEQ ID NO: 132683 - DNA, 75 bp, synthetic construct
  source 1..75: mol_type = other DNA
tggcaggtatcagccaggtgttttgcgatccacacgtaggcgtttccctgatggccgatgcagtactctcggtga

SEQ ID NO: 132684 - DNA, 75 bp, synthetic construct
  source 1..75: mol_type = other DNA
atgtccctgaggaggggtattattacggaccaaatgagatagttaagaaattccagatacatcatgtagttgcta

SEQ ID NO: 132685 - DNA, 75 bp, synthetic construct
  source 1..75: mol_type = other DNA
gcatacacaactgaacggcgcagtgattgcgtccacggcaacggcagataaaaaccggctggataccggcacact

SEQ ID NO: 132686 - DNA, 75 bp, synthetic construct
  source 1..75: mol_type = other DNA
gggtccatgagcggttcggcgagtgtgagcctcagccgggataaaatgcacagtaaccacgacagtgtacaggag

SEQ ID NO: 132687 - DNA, 75 bp, synthetic construct
  source 1..75: mol_type = other DNA
ggatgaataccataaagtgaccggcagcagcgggatgttatcgaaaaccaccacaaccacgcatgatgtcactga

SEQ ID NO: 132688 - DNA, 75 bp, synthetic construct
  source 1..75: mol_type = other DNA
ttctacctcctcgtctgcggatcagggattgggcaaacttttagtgcctggcgcatcaggacgaaccgcagtttg

SEQ ID NO: 132689 - DNA, 75 bp, synthetic construct
  source 1..75: mol_type = other DNA
ccggacagcatacgcaactgaacggtgcggtgattgcgtccacggcaacggcagataaaaacaggctggataccg

SEQ ID NO: 132690 - DNA, 75 bp, synthetic construct
  source 1..75: mol_type = other DNA
gcgtgggtatcagcactggcggcagcatcggtggccagttcgcgggaaatatggccaacaatctgctggttggtg

SEQ ID NO: 132691 - DNA, 75 bp, synthetic construct
  source 1..75: mol_type = other DNA
aacagattcgagccagccgagacgagaacggaaaacaatctgataagttgcatctgttcctttctgaaattggtg

SEQ ID NO: 132692 - DNA, 75 bp, synthetic construct
  source 1..75: mol_type = other DNA
tccttctcatgataaactgagcaatcaggctctgggtatttcggaaacgagccgggatggaactaaggttgctat

SEQ ID NO: 132693 - DNA, 75 bp, synthetic construct
  source 1..75: mol_type = other DNA
agacagagataatcttaagtcggcaatggattattatcttaatacgttacgacgttatggagaactgaaaggcgg

SEQ ID NO: 132694 - DNA, 75 bp, synthetic construct
  source 1..75: mol_type = other DNA
tctggatggataccacagtgatgaagagcagtttaaggcattaatggatgccggcattgcatttggtaagcagta

SEQ ID NO: 132695 - DNA, 75 bp, synthetic construct
  source 1..75: mol_type = other DNA
gcgtaaggccggataaattctatgttgagtactctataaatggcggaaggccggtatctgaaacgtttaaaaatg

SEQ ID NO: 132696 - DNA, 75 bp, synthetic construct
  source 1..75: mol_type = other DNA
aaagtttattcaggggaaaactatttctcagtatattgggcatgaattaagggcaaaacttgaaaatcctcttat

SEQ ID NO: 132697 - DNA, 75 bp, synthetic construct
  source 1..75: mol_type = other DNA
aaaaacctgctcccgcgtcttgaaacggccctacgtaccacccgacgctggtcgctggcagattttcattctctg

SEQ ID NO: 132698 - DNA, 75 bp, synthetic construct
  source 1..75: mol_type = other DNA
agcgattaatatggggcgtgtatccggcaaatgaaccgcgtcgtttactcaacgcctttcgtgtggccgcagagg

SEQ ID NO: 132699 - DNA, 75 bp, synthetic construct
  source 1..75: mol_type = other DNA
ataaatccgtcacttttgccgaacttgatgtgtttgatttgagtgaggcattaagcgcacctgacgtcattttcc

SEQ ID NO: 132700 - DNA, 75 bp, synthetic construct
  source 1..75: mol_type = other DNA
ctgatttctggcatccggcaatgtggtccaggccgcgacttatcactaataatcagcctgttaccgatgacgctc

SEQ ID NO: 132701 - DNA, 75 bp, synthetic construct
  source 1..75: mol_type = other DNA
atttgcccagctttttgccgattacgaaattataccgccacttcgccagttgacacggcgcacggtgctgctcac

SEQ ID NO: 132702 - DNA, 75 bp, synthetic construct
  source 1..75: mol_type = other DNA
gtaccacccgacgctggtcgctggcagattttcatactctgtttgttaatcatccctttacccgcctggttaccc

SEQ ID NO: 132703 - DNA, 75 bp, synthetic construct
  source 1..75: mol_type = other DNA
ggtaataacctcagtattcaggccaccggctccggcgtgaagggcgtggatggtgacctgacgatacagggcagt

SEQ ID NO: 132704 - DNA, 75 bp, synthetic construct
  source 1..75: mol_type = other DNA
cggacgggacatgacgtcacaggcggcatcgctgtcagctcagaaaggcctggccctgatggcgggtcatgacgt

SEQ ID NO: 132705 - DNA, 75 bp, synthetic construct
  source 1..75: mol_type = other DNA
agcggtacagggactggccggcggtaatctgagtgcagccctggcaggtggtgcagcaccgtatctggctgaagt

SEQ ID NO: 132706 - DNA, 75 bp, synthetic construct
  source 1..75: mol_type = other DNA
gcgtgagcgtgtggacttaggggtacagaccctgaataaccggacgcacagcctgatttacagtgcaggtgatat

SEQ ID NO: 132707 - DNA, 75 bp, synthetic construct
  source 1..75: mol_type = other DNA
gtccggtgccggcatgacgattgtggcagacaaactgcttaatgataagagtcaggttgttgcaggcggcctgct

SEQ ID NO: 132708 - DNA, 75 bp, synthetic construct
  source 1..75: mol_type = other DNA
cgtttatgtggataacgattccagtaactcactgaaaaaactgcatacaccggaaggcgccagagataaattcac

SEQ ID NO: 132709 - DNA, 75 bp, synthetic construct
  source 1..75: mol_type = other DNA
ccaaggagcatggtgctgatgttctctcctgtagtgaaaatccttccggtgaagcctgtaagcgggggcaggctg

SEQ ID NO: 132710 - DNA, 75 bp, synthetic construct
  source 1..75: mol_type = other DNA
cggcacactggacagcactgccggtgtgcttttgtcgggagatgctctgtccctgactgcaggcgtggttaacaa

SEQ ID NO: 132711 - DNA, 75 bp, synthetic construct
  source 1..75: mol_type = other DNA
gcacagggaaataacgcccttgccggtgccgcaggcgctgccaccggcgagatggtgggaatgattgccacacag

SEQ ID NO: 132712 - DNA, 75 bp, synthetic construct
  source 1..75: mol_type = other DNA
acgcggtacgctgaacagcctgcaggaactgactgtcagtaccggagcaatggataaccggggcgggaccgtggg

SEQ ID NO: 132713 - DNA, 75 bp, synthetic construct
  source 1..75: mol_type = other DNA
ttcagctgctgccggaacgggcaggataaaaacacagcaggctgtcagcaatacggagggacgaatggagtccgc

SEQ ID NO: 132714 - DNA, 75 bp, synthetic construct
  source 1..75: mol_type = other DNA
gcaggccggtgatgtggaaaacgtcagtgtcagcggagagcgccatgttacggactcagggacatccacgtatta

SEQ ID NO: 132715 - DNA, 75 bp, synthetic construct
  source 1..75: mol_type = other DNA
taaagttgagaataattctcagtcattcaagttaaccgcatcggatgtattgagcatgaatgacaattcaacgct

SEQ ID NO: 132716 - DNA, 75 bp, synthetic construct
  source 1..75: mol_type = other DNA
caacccatcctctttttgctattgcccatcgtgctttttatccgtatggcgctcaatgcgctggatggcatgatg

SEQ ID NO: 132717 - DNA, 75 bp, synthetic construct
  source 1..75: mol_type = other DNA
ggctggccgttgccatttatccacagtggatgcaatggaataatcttttatggagcattgcttcaattctgcttc

SEQ ID NO: 132718 - DNA, 75 bp, synthetic construct
  source 1..75: mol_type = other DNA
tgacccaaacctgtttgttgacggtatctccagcaaagattattccgccttgttgaacgacccgaatacaccgct

SEQ ID NO: 132719 - DNA, 75 bp, synthetic construct
  source 1..75: mol_type = other DNA
aaggctataagcgtcgttactatccttacggttcggcgttgacccacgtcatcggctatgtgtcgaaaatcaacg

SEQ ID NO: 132720 - DNA, 75 bp, synthetic construct
  source 1..75: mol_type = other DNA
accacattatgcttggcgataacaacaccgatttgcctgcggaaaacccggctgttgcagcagcggaggaccact

SEQ ID NO: 132721 - DNA, 75 bp, synthetic construct
  source 1..75: mol_type = other DNA
ctatatttttctccaagaaacaaagaggtggtcgcggggttggcctttatctctgcaaacaaaatttagcggtga

SEQ ID NO: 132722 - DNA, 75 bp, synthetic construct
  source 1..75: mol_type = other DNA
aggggaaaaagtcccagccgggcaaaccgggaaagaatgagtaacctccgccgctggctccatgatgcccggcag

SEQ ID NO: 132723 - DNA, 75 bp, synthetic construct
  source 1..75: mol_type = other DNA
ttgacgtaaattgtgcggcttgtgtcagcatccacggcaacagcatggaaccggtattaccagatggcgctgtcg

SEQ ID NO: 132724 - DNA, 75 bp, synthetic construct
  source 1..75: mol_type = other DNA
tcgcgccaggcgctggatgagttaggcgtatgtttcctctttgcaccgaaatatcacaccggatttcgccatgca

SEQ ID NO: 132725 - DNA, 75 bp, synthetic construct
  source 1..75: mol_type = other DNA
gccagcaactgaaaacccgcaccctgttcaatgtgctggggccattgattaacccggcgcatccgccgctggcgt

SEQ ID NO: 132726 - DNA, 75 bp, synthetic construct
  source 1..75: mol_type = other DNA
ctgtgggctgaaagtggcgaaacacggcaaccgtagcgtctccagtaaatctggttcgtccgatctgctggcggc

SEQ ID NO: 132727 - DNA, 75 bp, synthetic construct
  source 1..75: mol_type = other DNA
gcatacttatacgttatacagcagtgtaagtggcgcaaatgtgtatattgataacaatattattgatgcgaatgg

SEQ ID NO: 132728 - DNA, 75 bp, synthetic construct
  source 1..75: mol_type = other DNA
agggctatattaacggcggggaaggcagtgataccctggttctgacaggtaccatttctgtcaatctagcggccg

SEQ ID NO: 132729 - DNA, 75 bp, synthetic construct
  source 1..75: mol_type = other DNA
tcaaaaactgatgtgttaccaacagtgagtattagcgttgagacaacatcaacagatgtcaatggtgatggtttt

SEQ ID NO: 132730 - DNA, 75 bp, synthetic construct
  source 1..75: mol_type = other DNA
ggatatgcacggttcagtgaatatcgatgacgccgtattcttctttggcaaagaaaatgactggagagtcaaagt

SEQ ID NO: 132731 - DNA, 75 bp, synthetic construct
  source 1..75: mol_type = other DNA
atgaaaaaatcgacattatctttagccatcggtttattattggcatgtagtaccggattggcaaaaacacagcat

SEQ ID NO: 132732 - DNA, 75 bp, synthetic construct
  source 1..75: mol_type = other DNA
gaaatgctggttggttcacgacggatatcccaggacatcagcacccgtgatgagggcggtgacgggaaagtggtg

SEQ ID NO: 132733 - DNA, 75 bp, synthetic construct
  source 1..75: mol_type = other DNA
gttggtatcggtcagggttactggacagcgaccccaatccagatgagtaaggcactgatgatcctgattaatgac

SEQ ID NO: 132734 - DNA, 75 bp, synthetic construct
  source 1..75: mol_type = other DNA
tttacgtgaccacaaactgatgaccgcctttgcgccatacaacaatccgcaagtggctgtcgccatgattctgga

SEQ ID NO: 132735 - DNA, 75 bp, synthetic construct
  source 1..75: mol_type = other DNA
acaggtgccatgggtacaaccgcatgaaccgcccgtcggcgatattcattccggttactgggagctggcgaaaga

SEQ ID NO: 132736 - DNA, 75 bp, synthetic construct
  source 1..75: mol_type = other DNA
gtaacgatacttttactatggatggtatgaatactgcattacgtgttatgtatgcgggtagttatatctttactg

SEQ ID NO: 132737 - DNA, 75 bp, synthetic construct
  source 1..75: mol_type = other DNA
catccgcaacaggtgttatttatgatggtaatgccatttcattacgtaatctggacggtgattttacactgaaat

SEQ ID NO: 132738 - DNA, 75 bp, synthetic construct
  source 1..75: mol_type = other DNA
ttgaagatgaaaaaggtggtaagcacaccgtgacgctggagaaaggggataacggctggacatccagtgatccga

SEQ ID NO: 132739 - DNA, 75 bp, synthetic construct
  source 1..75: mol_type = other DNA
ccgcaagaagcaaccagcatgatggctttctgcattaacgggaagtcgaaatcgctcagtgagttgttcatgact

SEQ ID NO: 132740 - DNA, 75 bp, synthetic construct
  source 1..75: mol_type = other DNA
tctacagaaataactggcgctgatggtgggcctgttcgttatgccgatatgtcagaagagttacttgaagagaaa

SEQ ID NO: 132741 - DNA, 75 bp, synthetic construct
  source 1..75: mol_type = other DNA
cttgcttcgctgaaatctggacttttaaatgtcttaattactgattttgatacggccattaaacttctggattaa

SEQ ID NO: 132742 - DNA, 75 bp, synthetic construct
  source 1..75: mol_type = other DNA
atggcaaacatcagcttcttctttccgaaacagaagcagggtggcgcgctgggtctgaatgggggtctgggcaac

SEQ ID NO: 132743 - DNA, 75 bp, synthetic construct
  source 1..75: mol_type = other DNA
tggggtgtgagtgaggaggattaccggcgttatcagtcactgatgtccggcccccgggggatacagtctcccgga

SEQ ID NO: 132744 - DNA, 75 bp, synthetic construct
  source 1..75: mol_type = other DNA
aacaagagctactcaccgtgggacccaatcgagaaagacgagatgaaccgggtgtttatcttcgggaaagttatt

SEQ ID NO: 132745 - DNA, 75 bp, synthetic construct
  source 1..75: mol_type = other DNA
gacccactggcttccactctctccatacggcgactcaagggaggactctcaaccattcacccgctcagcactgaa

SEQ ID NO: 132746 - DNA, 75 bp, synthetic construct
  source 1..75: mol_type = other DNA
tgatgaacagaacaaaacggcgtctcaggccggacaggcagaatcgcttaacaatccggtactgactgcagcggt

SEQ ID NO: 132747 - DNA, 75 bp, synthetic construct
  source 1..75: mol_type = other DNA
cggtaaagagtttgccgatgccatgctgggactggtgaatacccgtttcttttttcgatcgccatccagcactga

SEQ ID NO: 132748 - DNA, 75 bp, synthetic construct
  source 1..75: mol_type = other DNA
tcacaccgtccgttataccgccaccagtccggcgcgctttcgacaggcatggatacatcctccctgtcacaccct

SEQ ID NO: 132749 - DNA, 75 bp, synthetic construct
  source 1..75: mol_type = other DNA
tcatcagtcagtggttacaggtgagattacgttctccctctgcggacagcccgtggttttttccttcacgtaacg

SEQ ID NO: 132750 - DNA, 75 bp, synthetic construct
  source 1..75: mol_type = other DNA
tgcggcatgcctgtggctttgctctcgctgaacggggaaatgacacccgcctgatacaggattacctcggacaca

SEQ ID NO: 132751 - DNA, 75 bp, synthetic construct
  source 1..75: mol_type = other DNA
taacatgatgctggaaaatccttcaccagagctgctcacggtgttgatccgtgagctgaccgggaggggacgatg

SEQ ID NO: 132752 - DNA, 75 bp, synthetic construct
  source 1..75: mol_type = other DNA
gttactttgtcgctgtcgcagaagaattgcattttggtcgcgctgctgcccggttgaatatctcgcaaccgccgc

SEQ ID NO: 132753 - DNA, 75 bp, synthetic construct
  source 1..75: mol_type = other DNA
catcctttggccaataaatcgaatgtaacgctggcggaactggcaaaagaaccctttgttttttttgatccgcac

SEQ ID NO: 132754 - DNA, 75 bp, synthetic construct
  source 1..75: mol_type = other DNA
atggtggaactggcatcacaacccggagcttgtgttgcacagattgcacgagaaaatggcgtcaatgataatgtt

SEQ ID NO: 132755 - DNA, 75 bp, synthetic construct
  source 1..75: mol_type = other DNA
atggtggaactggcatcacaacctggagcttgtgttgcacagattgcacgtgaaaatggcgtaaatgataatgtt

SEQ ID NO: 132756 - DNA, 75 bp, synthetic construct
  source 1..75: mol_type = other DNA
tttcatttttgccgggttttacaggcaaatcagacgagaataaccggacggatataattgtggtgcttcaggctc

SEQ ID NO: 132757 - DNA, 75 bp, synthetic construct
  source 1..75: mol_type = other DNA
cgccgggatggtacagggaacagcacagcgccggcaggcattgtttgtgcaggcggaaaactgtcgcgcgtgtga

SEQ ID NO: 132758 - DNA, 75 bp, synthetic construct
  source 1..75: mol_type = other DNA
ggcgctggctgcgttttggtgagggacagatgccggtggtactgcagcagggggcagacggatggcgcgtggctg

SEQ ID NO: 132759 - DNA, 75 bp, synthetic construct
  source 1..75: mol_type = other DNA
gagctgttgattcgccagtatgaatttattcagtcgtttttaggcagcgaagcagattttctctatcaggaataa

SEQ ID NO: 132760 - DNA, 75 bp, synthetic construct
  source 1..75: mol_type = other DNA
tgtggttggtctggccgaaacatcatgaacaaagtccggctgcgcgtaactttcgtattcatctgctgaatgctc

SEQ ID NO: 132761 - DNA, 75 bp, synthetic construct
  source 1..75: mol_type = other DNA
gacgctcgatatggggttgttacgaaacaccgtgttgccggagacgctggatcacgcggttattgtgcatgaacc

SEQ ID NO: 132762 - DNA, 75 bp, synthetic construct
  source 1..75: mol_type = other DNA
ctgtttgcgtgaatggccatgttctttcatcaatcaaaacagaaacggcgacagtcttcgattgcctttgcattg

SEQ ID NO: 132763 - DNA, 75 bp, synthetic construct
  source 1..75: mol_type = other DNA
tgaaacgcaaattaaacaggcaaaaagctttgaaaaagagctgagccagtttttaacgcaactcagaaatgatat

SEQ ID NO: 132764 - DNA, 75 bp, synthetic construct
  source 1..75: mol_type = other DNA
attttgcgtaccgcagtgcgccgtttattaggtctggatctgatatccaaactgcgtaatgacttaatgattttt

SEQ ID NO: 132765 - DNA, 75 bp, synthetic construct
  source 1..75: mol_type = other DNA
acgtctggattcacaacatcgggataaactgattaaccattatttcccatttgccagccatcaagtggtgttatt

SEQ ID NO: 132766 - DNA, 75 bp, synthetic construct
  source 1..75: mol_type = other DNA
gcttcagcgtttactgggtaagaaaaccatggaagttgagatcctcgaagcagcggtggagtatgcacaatcgcg

SEQ ID NO: 132767 - DNA, 75 bp, synthetic construct
  source 1..75: mol_type = other DNA
taaaacgacgctgaaaaatccttcaccagagctgctcacagtgttgctccgtgaactgagcgggaggggacaatg

SEQ ID NO: 132768 - DNA, 75 bp, synthetic construct
  source 1..75: mol_type = other DNA
aaagttgatgctttattgaaagataaggaacgtctggaaaaagcactgcgtcaggaatgtgatgggccgctacct

SEQ ID NO: 132769 - DNA, 75 bp, synthetic construct
  source 1..75: mol_type = other DNA
aaacatttaatactgcaagaaatgtggcaaatgaactgcggttaatgagagaacagatagaaatatacaataaaa

SEQ ID NO: 132770 - DNA, 75 bp, synthetic construct
  source 1..75: mol_type = other DNA
cgtgccccggaagacgagcagttaatggatctctttgcagcattacgcgagctcgaccataagcgtgaaaaacag

SEQ ID NO: 132771 - DNA, 75 bp, synthetic construct
  source 1..75: mol_type = other DNA
ttatgagattgtgtttaatgcgcatactaaatcatctgcgctgaagcctggctatttctgggaattaacaaagga

SEQ ID NO: 132772 - DNA, 75 bp, synthetic construct
  source 1..75: mol_type = other DNA
atgatatttctcatgcttacgagatagtatttaacacgcatactaaatcatcagcgttgaagcccggttatttct

SEQ ID NO: 132773 - DNA, 75 bp, synthetic construct
  source 1..75: mol_type = other DNA
tgtgtttaatgcacatactaagtcatcaacgctgaagcctggttatttctgggaattaactaaggaggctatctg

SEQ ID NO: 132774 - DNA, 75 bp, synthetic construct
  source 1..75: mol_type = other DNA
aaattgattaatcactacttccctgaagccagtcatcaggttgtgttgctttctaccgatactgaagtagatgaa

SEQ ID NO: 132775 - DNA, 75 bp, synthetic construct
  source 1..75: mol_type = other DNA
ctgtgtgcaatggttaattgaccagggggttttgtttgatacccacgttcaaccgaatggcgaagaaagctacca

SEQ ID NO: 132776 - DNA, 75 bp, synthetic construct
  source 1..75: mol_type = other DNA
cagtaaactacctgttcaaaacgccgggcggttcgctgtatcacagcggcgactcccactactccaactactatg

SEQ ID NO: 132777 - DNA, 75 bp, synthetic construct
  source 1..75: mol_type = other DNA
gcgtcgatttctggtgcggtactggtaaacaaagtcacggcaacccgctgatgaaacagggtcaccagatgcagc

SEQ ID NO: 132778 - DNA, 75 bp, synthetic construct
  source 1..75: mol_type = other DNA
ccattttttctgcggtgtcatatcgtcagaaaaagaaaggtattcactcctacaacgcgttgttgcgcacgctgc

SEQ ID NO: 132779 - DNA, 75 bp, synthetic construct
  source 1..75: mol_type = other DNA
gcacagcaggcgtatcgccagccgtgagctggccgacgagttcaccggcctgattgctgagctggaaactgaccg

SEQ ID NO: 132780 - DNA, 75 bp, synthetic construct
  source 1..75: mol_type = other DNA
gcgggtttaacctgtacgacatttgagaacggcgcggaggtactggaggcgctggcgagcaaaacgccggatgtg

SEQ ID NO: 132781 - DNA, 75 bp, synthetic construct
  source 1..75: mol_type = other DNA
caagaagcccgaaatcttccccctcatcgtcaaagccgttttctggcgtccagaggtttactcgcagaactgatg

SEQ ID NO: 132782 - DNA, 75 bp, synthetic construct
  source 1..75: mol_type = other DNA
ttgcccgagggattttaacggaaggacatctgatttctgttcgtctcccctcccagtgtcatcaagaagcccgaa

SEQ ID NO: 132783 - DNA, 75 bp, synthetic construct
  source 1..75: mol_type = other DNA
aagcgttatgcgacgcggaggacgtgctggtgtggtccgtggcggtcacgcccgcgattgaaaagctcagtgtct

SEQ ID NO: 132784 - DNA, 75 bp, synthetic construct
  source 1..75: mol_type = other DNA
cagtggaaagatctgggctcgatggcaggcgtcggcagcattcttctggtggtcatcatctggctgctcaaccag

SEQ ID NO: 132785 - DNA, 75 bp, synthetic construct
  source 1..75: mol_type = other DNA
gcgcaggatgcagaaaccaaagcggttgaactgaccgtgcgggcgaaagcagaaaaagaagccgcagagatgcag

SEQ ID NO: 132786 - DNA, 75 bp, synthetic construct
  source 1..75: mol_type = other DNA
aatacagcatcatcagtcgaacaatgacgaatattcgttcactacgcatgtatgtacgcggagtttattttgagc

SEQ ID NO: 132787 - DNA, 75 bp, synthetic construct
  source 1..75: mol_type = other DNA
aaatggccacggcattccgtggccaaattgtccgccactgggcgcttcgttatcccggaacgcaatccgaagcag

SEQ ID NO: 132788 - DNA, 75 bp, synthetic construct
  source 1..75: mol_type = other DNA
atgataagacgcgtcagcgtcgcatcaggcatctgcgcacggtgtcggatgcggcgcgagcgccttatccgacct

SEQ ID NO: 132789 - DNA, 75 bp, synthetic construct
  source 1..75: mol_type = other DNA
agagagaacgacaaagaagttgtttctatgatgattcaggaaatgaacaatgaacgagaaaaaaatgttaactga

SEQ ID NO: 132790 - DNA, 75 bp, synthetic construct
  source 1..75: mol_type = other DNA
gtgaggatcctcggcgcggcggttgacggcgacattccggcgaacctggtgctctcccttcttgggttgggcgtg

SEQ ID NO: 132791 - DNA, 75 bp, synthetic construct
  source 1..75: mol_type = other DNA
cctgagcaaagcggttctggtgaaagcggcaatggttctcgcggtgttcacggcgattgtcgcggcggttaacgt

SEQ ID NO: 132792 - DNA, 75 bp, synthetic construct
  source 1..75: mol_type = other DNA
taactgccataagaaaattggtttgcgctatccgttgaccgaattattaaccgctttctcctttttacttgcgtg

SEQ ID NO: 132793 - DNA, 75 bp, synthetic construct
  source 1..75: mol_type = other DNA
cttctatagagttgaataatcctctcttcagatatgctactttaagaaactctcttcttcctcaaattaaaacat

SEQ ID NO: 132794 - DNA, 75 bp, synthetic construct
  source 1..75: mol_type = other DNA
tcagcatgcttatccctctggctaatgttcttggctgtgatccaatgtggttactgactggtgcttataaacaaa

SEQ ID NO: 132795 - DNA, 75 bp, synthetic construct
  source 1..75: mol_type = other DNA
tacactgttggaagacggtacttcgttgtataacgacggcggttatcacggtcgcgacatggagcagaaaaagaa

SEQ ID NO: 132796 - DNA, 75 bp, synthetic construct
  source 1..75: mol_type = other DNA
aaaactttttctaagtctgcgactttaggaaaaacgaaagcaacggtgaaaactgttgccgatcttgtttttcat

SEQ ID NO: 132797 - DNA, 75 bp, synthetic construct
  source 1..75: mol_type = other DNA
ggtagaaaatacacgaaaaacaattgttgaacatatacaaaaaggtgcggtaaattatatttcagaagtggtaac

SEQ ID NO: 132798 - DNA, 75 bp, synthetic construct
  source 1..75: mol_type = other DNA
aaaaatggctatgaagaatatgataatttatatgtatcctctgaacatcgagtaaaaaaacatagtggtgaactt

SEQ ID NO: 132799 - DNA, 75 bp, synthetic construct
  source 1..75: mol_type = other DNA
gaatatattccggcgcttaatgccacgccggaacatatcgaaatgatggctaatcttgttgccgcgtatcgctaa

SEQ ID NO: 132800 - DNA, 75 bp, synthetic construct
  source 1..75: mol_type = other DNA
acagacgcgtggttgatacctcacggctgttgtggtggccgttgctgcgcggcgtgattttgccgctgcgctcgc

SEQ ID NO: 132801 - DNA, 75 bp, synthetic construct
  source 1..75: mol_type = other DNA
cgcgtgtggcgaagctgtatgcttctgtctggatggaaggtggctcgccgctgatggtttacagccgccagcaac

SEQ ID NO: 132802 - DNA, 75 bp, synthetic construct
  source 1..75: mol_type = other DNA
ctggctgggttttgccgtgcaggataccactacgccatacagcgtattcatcatcatttctctgctgtgcggctt

SEQ ID NO: 132803 - DNA, 75 bp, synthetic construct
  source 1..75: mol_type = other DNA
ctatgatgcggcacatgattgccagcggtgaaaatagtggcgaactcgacagcatgctggaacgggccgccgaca

SEQ ID NO: 132804 - DNA, 75 bp, synthetic construct
  source 1..75: mol_type = other DNA
cgccacttcaggatgctgtagatctggagatcgcaacggaggaagaaacctcattgctggaagcctggaaaaaat

SEQ ID NO: 132805 - DNA, 75 bp, synthetic construct
  source 1..75: mol_type = other DNA
atgcattttgatgtttttcagcaatatccagcggtgatgcccattctggcaaccgttggaggattaatcatcggc

SEQ ID NO: 132806 - DNA, 75 bp, synthetic construct
  source 1..75: mol_type = other DNA
cggacatttaacccagctgcgcgacggctcccaggtcgtcactctcaaccagggaacgcgcttcgaaggcactgc

SEQ ID NO: 132807 - DNA, 75 bp, synthetic construct
  source 1..75: mol_type = other DNA
cggacatttaactcagttgcgggatggctctcaggtggtgactctcaatcagggaacgcgtttcgaaggcactgc

SEQ ID NO: 132808 - DNA, 75 bp, synthetic construct
  source 1..75: mol_type = other DNA
gttcgtgcttcttttgccaaacatggcgaaccagatttacttttactctcttatcacggtattccccagcgttat

SEQ ID NO: 132809 - DNA, 75 bp, synthetic construct
  source 1..75: mol_type = other DNA
atgagcagaattaaatctggttatccagggaatggggaatacccgaagccatatttacctgtaacagtgaccact

SEQ ID NO: 132810 - DNA, 75 bp, synthetic construct
  source 1..75: mol_type = other DNA
ttgataaagatgaatgggtatgccctgacaataaatcattctatctgcctgaaaagtaccgtccagaaactggat

SEQ ID NO: 132811 - DNA, 75 bp, synthetic construct
  source 1..75: mol_type = other DNA
attatgaacgtcagttatcaaaattaattcaagccgaacgacgtaaacagggaattagcccgattaaaaatatca

SEQ ID NO: 132812 - DNA, 75 bp, synthetic construct
  source 1..75: mol_type = other DNA
ctgagtgtcgcactcggcgtttacctcactgcgggaatatccggagggcatcttaatccggcagtcactatcgca

SEQ ID NO: 132813 - DNA, 75 bp, synthetic construct
  source 1..75: mol_type = other DNA
atcgagaaagagatcatgcgcgcaccggagcagtacctctggatccaccgtcgctttaaaacgcgcccggtggga

SEQ ID NO: 132814 - DNA, 75 bp, synthetic construct
  source 1..75: mol_type = other DNA
ggctaatcacgagattaaaaccttagattttgccgaaggtaaatataccatcgtaataactttggaagaagaact

SEQ ID NO: 132815 - DNA, 75 bp, synthetic construct
  source 1..75: mol_type = other DNA
aaattaattcaagccgaacgacgtaaacagggaattagcccgattaaaaatattaaattacgtcttacgcgataa

SEQ ID NO: 132816 - DNA, 75 bp, synthetic construct
  source 1..75: mol_type = other DNA
atgagtttagaactaattcccttagtaattcgtaaaggcgaaaaaatcacgctggcgaatgaagagggtgtaaca

SEQ ID NO: 132817 - DNA, 75 bp, synthetic construct
  source 1..75: mol_type = other DNA
tcttactccgtctttatccacccagactactgtcagtgccagctcctgcaagttggagctccgtcacggcaacat

SEQ ID NO: 132818 - DNA, 75 bp, synthetic construct
  source 1..75: mol_type = other DNA
gacttgttcgcaccttcccttgtgttgcacagattgcacgtgaaaatggcgtcaatgataatgttattttcaaat

SEQ ID NO: 132819 - DNA, 75 bp, synthetic construct
  source 1..75: mol_type = other DNA
tcttactccgtctttatccacccagactagtgtcagtgccagcgcctgcaaggtggagttccgtcacggtaacat

SEQ ID NO: 132820 - DNA, 75 bp, synthetic construct
  source 1..75: mol_type = other DNA
tatgtcctttcccgtctctctggcgcagccatgttgaccgtaacgatggtaagaaaagcggattacagcggatat

SEQ ID NO: 132821 - DNA, 75 bp, synthetic construct
  source 1..75: mol_type = other DNA
atcctgttctctgctttctcggcacgcgtattggcgcaatggcgcgaccattcctgaaacgtcgtgaatctatcg

SEQ ID NO: 132822 - DNA, 75 bp, synthetic construct
  source 1..75: mol_type = other DNA
gcgcagagtttaaacgcgaatccgctcaactggttgttgaccagaactacacggtggcagatgccgccaaagcta

SEQ ID NO: 132823 - DNA, 75 bp, synthetic construct
  source 1..75: mol_type = other DNA
aagatgtgattgagcggattagttcggcgtatggtgtcagcacgcaaaaggctttggcggaagttcttggcgtcc

SEQ ID NO: 132824 - DNA, 75 bp, synthetic construct
  source 1..75: mol_type = other DNA
gcacttgggtcaggcgtgactttttcccgggcgatgtggtggtgacctgcgcacttgacactggcgtttcgttgg

SEQ ID NO: 132825 - DNA, 75 bp, synthetic construct
  source 1..75: mol_type = other DNA
ggcgtataggtgcatcaaatggcgtgttagagcgcgtaatgtcagcctatggcgtcaagatgcaaaaggatttag

SEQ ID NO: 132826 - DNA, 75 bp, synthetic construct
  source 1..75: mol_type = other DNA
aacttgatgatgcggttttcttctttggtcaggagaacgactggaaggtgaaagtggggcgttttgaggcgtacg

SEQ ID NO: 132827 - DNA, 75 bp, synthetic construct
  source 1..75: mol_type = other DNA
agaactttaatatttatctcggcgcttattactcctttctcgacagcgacgacaagctgagtcagggggatgatg

SEQ ID NO: 132828 - DNA, 75 bp, synthetic construct
  source 1..75: mol_type = other DNA
tcaaataagtctgccgagtttgaatgcagcattacagatatcacaccagtaggtgctgtaattttcacattggaa

SEQ ID NO: 132829 - DNA, 75 bp, synthetic construct
  source 1..75: mol_type = other DNA
caatatggggaacaagtactgatgtctctgcaatttggtcttcgcaatgtggtgttggttatctttggggggctg

SEQ ID NO: 132830 - DNA, 75 bp, synthetic construct
  source 1..75: mol_type = other DNA
cgacagtatcaggtgatactggtggtggtctgtttgtggccgatttcacagattctacttctgcagatgataacg

SEQ ID NO: 132831 - DNA, 75 bp, synthetic construct
  source 1..75: mol_type = other DNA
tcgtaataactttggaagaagaactggtatcaatgcaggaattaactgttttaccagtattcgccaaacaaagca

SEQ ID NO: 132832 - DNA, 75 bp, synthetic construct
  source 1..75: mol_type = other DNA
gttttcgttgagtgtgctcttgatactggagctgacctgcgatggctaattaatggtgagcttgcaaatgcaaga

SEQ ID NO: 132833 - DNA, 75 bp, synthetic construct
  source 1..75: mol_type = other DNA
ggcgtgttagtgcaacgaacggcgtattggaacgcttaatgtcagcctatggggtcaagatgcaaaaggatttgg

SEQ ID NO: 132834 - DNA, 75 bp, synthetic construct
  source 1..75: mol_type = other DNA
cgccgtttaccggtatgtccatggggtctgttgctggtgccttcagtggttttgcgcaggttggtactgaaacaa

SEQ ID NO: 132835 - DNA, 75 bp, synthetic construct
  source 1..75: mol_type = other DNA
agacttatcacactgataacctggccagacccactcaggttgaagcaactcttagcgcaaatgtgaaagaccgga

SEQ ID NO: 132836 - DNA, 75 bp, synthetic construct
  source 1..75: mol_type = other DNA
gtgagtaaccgttattgggtgatctccttccataaaaatacgcacaatctaacggttcgctctgtgccaaaaaca

SEQ ID NO: 132837 - DNA, 75 bp, synthetic construct
  source 1..75: mol_type = other DNA
gatggcgataacgcatgggcattaagcgaaagctggtgcggcactattcagtggatttgtccgagtccgtatcgg

SEQ ID NO: 132838 - DNA, 75 bp, synthetic construct
  source 1..75: mol_type = other DNA
ctgattaaagaagctacccgacaggacgtcgcggtaacggtgctggaaacagaaacgggtcgctactctgacaca

SEQ ID NO: 132839 - DNA, 75 bp, synthetic construct
  source 1..75: mol_type = other DNA
ttgcattaacaaatggcctgagttttgacaaaaattttaccgtcactattcctatatttgtaaacaatggtcaga

SEQ ID NO: 132840 - DNA, 75 bp, synthetic construct
  source 1..75: mol_type = other DNA
ttcagacaaggggtgtcagaaaggattgcattaacaaatggcctgagttttgacaaaaattttaccgtcactatt

SEQ ID NO: 132841 - DNA, 75 bp, synthetic construct
  source 1..75: mol_type = other DNA
gcatcaaatccgcttaatagtaactcattttttgggttcattcgatgtggtggctggagtgacgttcgcgatgtg

SEQ ID NO: 132842 - DNA, 75 bp, synthetic construct
  source 1..75: mol_type = other DNA
ggcttttcagaaagcatcagcgagtatggaaaccggcggtgacatgtccagcatggggtcagttgtcagcagtgg

SEQ ID NO: 132843 - DNA, 75 bp, synthetic construct
  source 1..75: mol_type = other DNA
attgagtccgctgcatcgcgtttgttctggacgctggttgtgatttcgatggtctggacattcggcatgatggct

SEQ ID NO: 132844 - DNA, 75 bp, synthetic construct
  source 1..75: mol_type = other DNA
atgcttaagcgattccagataaccgcacgcgctgtaaatcatcaaggccacgttattgatattcggcaaaacgtg

SEQ ID NO: 132845 - DNA, 75 bp, synthetic construct
  source 1..75: mol_type = other DNA
ctcatattcttattgaatccttagatgatgcaaaggttaatcttacaccggtcatccattcgatgttggtgactt

SEQ ID NO: 132846 - DNA, 75 bp, synthetic construct
  source 1..75: mol_type = other DNA
gagcaacaccgggcgttgctggaatctgttcagttacgaatattctggtttagcgccgaactggccagcgaaggt

SEQ ID NO: 132847 - DNA, 75 bp, synthetic construct
  source 1..75: mol_type = other DNA
aacatgtcaataaaactgactcggcggtacgcgccacgcatctggcaacagggattagcgtgaaggttcagtcag

SEQ ID NO: 132848 - DNA, 75 bp, synthetic construct
  source 1..75: mol_type = other DNA
gacggaatattgcttggcgggcttggcattagtggtggcagtgttgagcaagacatggatattgcccaaagcgca

SEQ ID NO: 132849 - DNA, 75 bp, synthetic construct
  source 1..75: mol_type = other DNA
ccacacaccagcattgaaggaacgcacaatgccgctcacttttcaggatcttcaccagctcattcgtagtgcggc

SEQ ID NO: 132850 - DNA, 75 bp, synthetic construct
  source 1..75: mol_type = other DNA
aatgttttgctgcactatatcaaccgactttccgattgcctgtatgccctcgcccgcgtggaagacaacgttgct

SEQ ID NO: 132851 - DNA, 75 bp, synthetic construct
  source 1..75: mol_type = other DNA
atatgcaaggcaaagtcgtcacttttggtggcggcttccccctctggcgtgacggaaaattgcttggcgggcttg

SEQ ID NO: 132852 - DNA, 75 bp, synthetic construct
  source 1..75: mol_type = other DNA
gacgtctggttgaactgacaacggaaaccaccgtccggaatgttttgctgcactatatcaaccgactttccgatt

SEQ ID NO: 132853 - DNA, 75 bp, synthetic construct
  source 1..75: mol_type = other DNA
gctggaaaacgcgatcgatagcgcaatgaacgccgtccccccagttcacagcttcattctgcctggtcgatgtga

SEQ ID NO: 132854 - DNA, 75 bp, synthetic construct
  source 1..75: mol_type = other DNA
agattatcggggttttcacttttctggctcctgtaaatccacatcagaaccagttccctgccaccttatggcgtg

SEQ ID NO: 132855 - DNA, 75 bp, synthetic construct
  source 1..75: mol_type = other DNA
tcctgcacttacaatgcgcagaaggagtgagcacagaaagaagtcttgaacttttccgggcatataactatactc

SEQ ID NO: 132856 - DNA, 75 bp, synthetic construct
  source 1..75: mol_type = other DNA
gcggtcctgacggaacaatggttgttggcggattccatgctcaatttagcggtaattacgtcacacaattcgccg

SEQ ID NO: 132857 - DNA, 75 bp, synthetic construct
  source 1..75: mol_type = other DNA
gcttcattctgccaggacgttgtgaagctgcgagccgcatgcatttcgcccgtacggtggcccgacgggctgaaa

SEQ ID NO: 132858 - DNA, 75 bp, synthetic construct
  source 1..75: mol_type = other DNA
tttccgcaaggtggaaaactggtttggcgattatgcgcaacgcttccagagtgaaagccgcgtgttattgcgtca

SEQ ID NO: 132859 - DNA, 75 bp, synthetic construct
  source 1..75: mol_type = other DNA
ctgaggcggaagccctgggtgtaccgccagatcttattgaggatatcctgcgtcgggtgatgcgggagtcctact

SEQ ID NO: 132860 - DNA, 75 bp, synthetic construct
  source 1..75: mol_type = other DNA
gcatctgggttaacttcctgaaaaaaccttctaacaaggacacgcttgatattccactggtcagcgcacctgaag

SEQ ID NO: 132861 - DNA, 75 bp, synthetic construct
  source 1..75: mol_type = other DNA
attaaggggtatttgtctgaacaatgggagtcgttttacttatatcctgagcttgttattagaggactgaataag

SEQ ID NO: 132862 - DNA, 75 bp, synthetic construct
  source 1..75: mol_type = other DNA
tatacatatttttttccaggtaaaaaatataaactcaacagattcttacaaagaaagataatagcaccgaagatt

SEQ ID NO: 132863 - DNA, 75 bp, synthetic construct
  source 1..75: mol_type = other DNA
caacccctgccagaaaatgaacctcatcctccgttctggaagctgatgccttattacgaatttgataaaccagca

SEQ ID NO: 132864 - DNA, 75 bp, synthetic construct
  source 1..75: mol_type = other DNA
tggctgatgcaaacaaagaagcagggaaaaataagcagtctgtttttcatggaaagttaaccggcaatatcagtt

SEQ ID NO: 132865 - DNA, 75 bp, synthetic construct
  source 1..75: mol_type = other DNA
ccgccacattcatgcacatcagctataacaacttcatcactgaagttaacaacctgaacaaacgcatgggcgatt

SEQ ID NO: 132866 - DNA, 75 bp, synthetic construct
  source 1..75: mol_type = other DNA
tcaacagccatccggagctgcataacaaaatcgctcaaattgtgattatgggcggcgcgatgggactcggtaact

SEQ ID NO: 132867 - DNA, 75 bp, synthetic construct
  source 1..75: mol_type = other DNA
gatgcggtttttcacgtcttaaaatatgttaagacgattgataaaactaaaagcaggaaaacagtaagaaaattg

SEQ ID NO: 132868 - DNA, 75 bp, synthetic construct
  source 1..75: mol_type = other DNA
ggcggtctggtggcgtggccgatggtgtcgaatatcgaaatcagttttttacgtctgccgcttaatcccaacatc

SEQ ID NO: 132869 - DNA, 75 bp, synthetic construct
  source 1..75: mol_type = other DNA
atgcaccatcgcctggctgttgaaaccggagttgtttaccactgttgagcgctgggttggcgtggaaacacaggg

SEQ ID NO: 132870 - DNA, 75 bp, synthetic construct
  source 1..75: mol_type = other DNA
atgcaccatcgcctggctgttaaaaccggagttgtttaccactgttgagcgctgggttggcgtggaaacacaagg

SEQ ID NO: 132871 - DNA, 75 bp, synthetic construct
  source 1..75: mol_type = other DNA
ataaaccgaatgccactgtaatggtcgatgttgatcgtcagggctttgttgatttactggctgaacggcttaaat

SEQ ID NO: 132872 - DNA, 75 bp, synthetic construct
  source 1..75: mol_type = other DNA
gaaacgccagggcttggcgataaaatcgaactgcgcctttctgactggatcacccattttgcgggaaaaaaaatc

SEQ ID NO: 132873 - DNA, 75 bp, synthetic construct
  source 1..75: mol_type = other DNA
cacccattttgcaggtaaaaaaatcagcggtgctgacgacgcacactgggcggtgaagaaagatggtggtgattt

SEQ ID NO: 132874 - DNA, 75 bp, synthetic construct
  source 1..75: mol_type = other DNA
ggaagcctcggtttcccgaatgctcgctacctgcgcgatttcattgcgagaaggagagctgagtatggccgtcat

SEQ ID NO: 132875 - DNA, 75 bp, synthetic construct
  source 1..75: mol_type = other DNA
gtgtccgttgacccgaaataccgggatgcatactccacgcatatcccggcggtaattctggccgtgaacaataac

SEQ ID NO: 132876 - DNA, 75 bp, synthetic construct
  source 1..75: mol_type = other DNA
actctgacacgctgcgttcggcgctgatttctctggatggcgacaacgcatgggcgttaagcgaaagttggtgcg

SEQ ID NO: 132877 - DNA, 75 bp, synthetic construct
  source 1..75: mol_type = other DNA
actcctcgcgccgtggtaaatgcggttaaacgcgccgggttatacgcccagacgttaccgacacagatttctcaa

SEQ ID NO: 132878 - DNA, 75 bp, synthetic construct
  source 1..75: mol_type = other DNA
gcagtaataaattatctcgatcgcagctcgctgtcggtagcgaatttaaccattcgggaagaacttgggttaagc

SEQ ID NO: 132879 - DNA, 75 bp, synthetic construct
  source 1..75: mol_type = other DNA
gttcgctgtcggtagcaaatgtaactattcgtggagagctggggttaaacgccaccgagatgggcgctttactct

SEQ ID NO: 132880 - DNA, 75 bp, synthetic construct
  source 1..75: mol_type = other DNA
tgctgacaggtacacccaccgaaagcggcgatatagagctttcagtactctggtcatgcgcttcgcacgacgaat

SEQ ID NO: 132881 - DNA, 75 bp, synthetic construct
  source 1..75: mol_type = other DNA
gtaaggactacgtcgtgaaggcagacaaacttgaacagtttgactttatgttgtggaagcggtcgttagacttgt

SEQ ID NO: 132882 - DNA, 75 bp, synthetic construct
  source 1..75: mol_type = other DNA
gtaaggactacgtcgtgaaggcagacaaactcgaacagtttgattttatgttgtggaagcggtcgttagacttgt

SEQ ID NO: 132883 - DNA, 75 bp, synthetic construct
  source 1..75: mol_type = other DNA
aaaaccgactcggcggtacgcgccacgcatctggcatccggtattagcgtgaaggttcagtcagagcgcagccag

SEQ ID NO: 132884 - DNA, 75 bp, synthetic construct
  source 1..75: mol_type = other DNA
agttcgacttaaatcttcttgtcatatttgagtgtatttatcagcatttaagcattagcaaggctgctgaatcac

SEQ ID NO: 132885 - DNA, 75 bp, synthetic construct
  source 1..75: mol_type = other DNA
aagattttcagatggaaatagaagcgattcttacaaaccgaaaaatagcattccgtagctcttcactgtttacta

SEQ ID NO: 132886 - DNA, 75 bp, synthetic construct
  source 1..75: mol_type = other DNA
atgttacaatcgcggggctatcagccatcacatttgatgcaaaaaaatattttctatgctattaacgatagcaga

SEQ ID NO: 132887 - DNA, 75 bp, synthetic construct
  source 1..75: mol_type = other DNA
ttctgcttgatccggactttgtcgacctgtctctggtgtgttatcgacaggtgcagacagtggacgaagataatt

SEQ ID NO: 132888 - DNA, 75 bp, synthetic construct
  source 1..75: mol_type = other DNA
atggcttataaacacattctcatcgcggtcgacctctccccggaaagcaaagttctggtagagaaagcagtctct

SEQ ID NO: 132889 - DNA, 75 bp, synthetic construct
  source 1..75: mol_type = other DNA
attgcatacaattcgcaatactctaatttgtagtaataagcatccgcgaattactgacaatagcacttatgaaca

SEQ ID NO: 132890 - DNA, 75 bp, synthetic construct
  source 1..75: mol_type = other DNA
aatccgatggacctgatgttctccatccttttattcatccgtggtaatgaggaaagtcagactaagcgcaatcgt

SEQ ID NO: 132891 - DNA, 75 bp, synthetic construct
  source 1..75: mol_type = other DNA
aaaacttgtttgtactggaatacatcgatggaaagacccagagagttgtaatagaaaattcaagaggaacgagga

SEQ ID NO: 132892 - DNA, 75 bp, synthetic construct
  source 1..75: mol_type = other DNA
aactatcaatgataggcagattctggagagtaacgggcttgttttgcatccatgtttagacatgctgacagataa

SEQ ID NO: 132893 - DNA, 75 bp, synthetic construct
  source 1..75: mol_type = other DNA
gaacagcgtagccccggtagtcgggtacagggcagcggccaggcagctttacgaccccggcgggcgactgaagcg

SEQ ID NO: 132894 - DNA, 75 bp, synthetic construct
  source 1..75: mol_type = other DNA
taagaaacaccagaagccggttccggccctgaaccaaccgggtggcatcgttgaaaaagaagccgctattcaggt

SEQ ID NO: 132895 - DNA, 75 bp, synthetic construct
  source 1..75: mol_type = other DNA
agataaaggtaaacgcggtaaagttaagtatgtcctgtctttcggcaaggtcattgttgaaggtatcaacctggt

SEQ ID NO: 132896 - DNA, 75 bp, synthetic construct
  source 1..75: mol_type = other DNA
cacagcccacctcatttacacaggatgactgggagaacaggacgttcagctttggttcgctcgtgttaaaagata

SEQ ID NO: 132897 - DNA, 75 bp, synthetic construct
  source 1..75: mol_type = other DNA
gtgagccgttacgctcctacacctgaagttatggctattggccaactcaatatttctggcaatgtcacaccagcg

SEQ ID NO: 132898 - DNA, 75 bp, synthetic construct
  source 1..75: mol_type = other DNA
ggaggtgggcggcaaagacaggtcgatgttctgtctggccttggtgccatgtctgacaaattcggtaaatccagc

SEQ ID NO: 132899 - DNA, 75 bp, synthetic construct
  source 1..75: mol_type = other DNA
gcagccagacgcgaggacccgtacttcaaagccagttacgacaacgtggactacagccagatcccgacaggattc

SEQ ID NO: 132900 - DNA, 75 bp, synthetic construct
  source 1..75: mol_type = other DNA
tagtcggttttaacgggggaacatcatcgttcacgacactgacaacagataatctggacgcggttcagtcagcat

SEQ ID NO: 132901 - DNA, 75 bp, synthetic construct
  source 1..75: mol_type = other DNA
acagtcgggtatttatcgacaaaaaagatggccagggaacagcctttacccttgaagaaggcacatctgttgcaa

SEQ ID NO: 132902 - DNA, 75 bp, synthetic construct
  source 1..75: mol_type = other DNA
gtattctcgatattttcggattgtggcgtagggatacatggatcattggcaatggaaataatgcaattgaagctt

SEQ ID NO: 132903 - DNA, 75 bp, synthetic construct
  source 1..75: mol_type = other DNA
gaccgctcgctggaagcccggcgcatggcggcagggcaggttattggcggcgcaatcctggtggttaccaccttc

SEQ ID NO: 132904 - DNA, 75 bp, synthetic construct
  source 1..75: mol_type = other DNA
cttcaatttgtgggtaacacgccgtgtgcaaacggtggatgcggacgggatcggcagcgacagcgaagttaaaaa

SEQ ID NO: 132905 - DNA, 75 bp, synthetic construct
  source 1..75: mol_type = other DNA
atcgtcactttgaagacttctggcaacagccagccgctcccggaggtgggcgacagcgacaggtcgatgtcctgg

SEQ ID NO: 132906 - DNA, 75 bp, synthetic construct
  source 1..75: mol_type = other DNA
cctgcggtatctgcagccagacgcgaggacccgtacttcaaagccagttacgacaacgtggactacagccagatc

SEQ ID NO: 132907 - DNA, 75 bp, synthetic construct
  source 1..75: mol_type = other DNA
aatgctcgatggtgtgaaatgcagcaatattttgtttgtcgggatcaacccacaggcaattgctgccatcaccac

SEQ ID NO: 132908 - DNA, 75 bp, synthetic construct
  source 1..75: mol_type = other DNA
acgatggatacgctggtggcgctgggtactggcgtggcatggctctattcaatgagcgttaacctgtggccgcag

SEQ ID NO: 132909 - DNA, 75 bp, synthetic construct
  source 1..75: mol_type = other DNA
gatgattatcggtctgattaatctcggccatatgctggaagcgcgcgcacgtcagcgttcttctaaggcgctgga

SEQ ID NO: 132910 - DNA, 75 bp, synthetic construct
  source 1..75: mol_type = other DNA
agcacctcagcaaaactgtttactgcaaaggtggcagtgatggcggttcaaaggcccaggcacgcgcaactgaaa

SEQ ID NO: 132911 - DNA, 75 bp, synthetic construct
  source 1..75: mol_type = other DNA
cggtattttatggccgttcaccggaaccttgcttaacccggtggttgccggggcagccatggcactctcgtcgat

SEQ ID NO: 132912 - DNA, 75 bp, synthetic construct
  source 1..75: mol_type = other DNA
ggtgattgccaccacggtgctgattatcgcctgcccgtgtgcgctggggctggcaacgccgatgtcgattatttc

SEQ ID NO: 132913 - DNA, 75 bp, synthetic construct
  source 1..75: mol_type = other DNA
gtctgggggatgattggcgataacatgatggtcaccgctgacaaccgcagcttgtggttggttatcggcctgata

SEQ ID NO: 132914 - DNA, 75 bp, synthetic construct
  source 1..75: mol_type = other DNA
gtatctggtccacgatccgtcactactggcctgaacgagctgggaaaattgctcagtatgaaccacggcagcctg

SEQ ID NO: 132915 - DNA, 75 bp, synthetic construct
  source 1..75: mol_type = other DNA
tggtgctcatcagccttgaagattgatgttggccgcagagctctcaacaaccaggatcgcttcaaagggaagaag

SEQ ID NO: 132916 - DNA, 75 bp, synthetic construct
  source 1..75: mol_type = other DNA
atgtgattgcggcagggctacagtttttcgtgtgaagaaagaaatgcttgccagtattagcggcatcaaacgctg

SEQ ID NO: 132917 - DNA, 75 bp, synthetic construct
  source 1..75: mol_type = other DNA
ccaacaacgtcagccaattgtatcaacagcaggcggcagcatctgcggctaatgcgaataaaccatcaggatttc

SEQ ID NO: 132918 - DNA, 75 bp, synthetic construct
  source 1..75: mol_type = other DNA
agcgcgttcgcaatgatctgcgcttccgtgaactgactgtgctacgcgttgagcgcatcagcgccggttttcagc

SEQ ID NO: 132919 - DNA, 75 bp, synthetic construct
  source 1..75: mol_type = other DNA
tgccgaaggccctttctcacgcgaacaggctgttgccgtcaaaacagcttaccgcaatgtgtttactgaagatga

SEQ ID NO: 132920 - DNA, 75 bp, synthetic construct
  source 1..75: mol_type = other DNA
agaacatctcgattctgtcttacctggctaaccactttaacgcgccgattatcgcgtggatggctccgattatcg

SEQ ID NO: 132921 - DNA, 75 bp, synthetic construct
  source 1..75: mol_type = other DNA
agcttcatgtctcaccagctgggtatgacgccgccgccgcgtgcgattctgtccctgatcctgatcgtgggtatg

SEQ ID NO: 132922 - DNA, 75 bp, synthetic construct
  source 1..75: mol_type = other DNA
cgtggcaatcaccaacacggttgaaagcttcatgtctcaccagctgggtatgacgccgccgccgcgtgcgattct

SEQ ID NO: 132923 - DNA, 75 bp, synthetic construct
  source 1..75: mol_type = other DNA
atgctgggtctttacggcacggcaatcggcgcgggcgtgctgttcctgccaatcaacgccggtgttggcggtatg

SEQ ID NO: 132924 - DNA, 75 bp, synthetic construct
  source 1..75: mol_type = other DNA
tccctcagtggagcggtgcggcgctggaaacgctgtcctttagctctgccgcttcaaccggtaagggtctgtgga

SEQ ID NO: 132925 - DNA, 75 bp, synthetic construct
  source 1..75: mol_type = other DNA
ctgtccggtaaaaacccgggcgaagacatcacggaagtcgttgaagaacacttcggcgtgggcgcaggtaaactg

SEQ ID NO: 132926 - DNA, 75 bp, synthetic construct
  source 1..75: mol_type = other DNA
gttcggtgcttacgtactgcgtatgaaccgcgcgctgttattcggcgcaatgatgggagcacgtacttgcgctcc

SEQ ID NO: 132927 - DNA, 75 bp, synthetic construct
  source 1..75: mol_type = other DNA
cgtaacgggattctggcaaatccagacggtgatgctgtgctacaaatgggcgatgaaatagcgttggtaggctat

SEQ ID NO: 132928 - DNA, 75 bp, synthetic construct
  source 1..75: mol_type = other DNA
tttggtgtgctggtgcgtgacgccgacgcgctgcaacgcgccagtacgctcgacaccgtggtgttcgataaaacc

SEQ ID NO: 132929 - DNA, 75 bp, synthetic construct
  source 1..75: mol_type = other DNA
gtggaatacggtgatgaataatctcaagccgtatgcagaagtcggattgcctgctttacaacaactacaaggact

SEQ ID NO: 132930 - DNA, 75 bp, synthetic construct
  source 1..75: mol_type = other DNA
ctaccgcgtcggcccggaactggtcgcctgggccgacggcaaaaacttgcgtgaactgggtatttatcgacaaac

SEQ ID NO: 132931 - DNA, 75 bp, synthetic construct
  source 1..75: mol_type = other DNA
caatccaactgggtaattccattggcgttttagtcgtatcactgttattaggtcaacaacatttcagtattaaca

SEQ ID NO: 132932 - DNA, 75 bp, synthetic construct
  source 1..75: mol_type = other DNA
ggggaattacagttatgagattgatgtgacgggtattccgatggagtacatcgacagtcaggggaaccctcttgt

SEQ ID NO: 132933 - DNA, 75 bp, synthetic construct
  source 1..75: mol_type = other DNA
aatgatctgagcgtagggagcaataagactcccggcagcatcaaagttaacggaactgatggtaaggaggctgtg

SEQ ID NO: 132934 - DNA, 75 bp, synthetic construct
  source 1..75: mol_type = other DNA
tgacggtctttcttttgagggtgatgacggaaaggttattcataaaaaactgaatgaaaaactgaccatcaaagg

SEQ ID NO: 132935 - DNA, 75 bp, synthetic construct
  source 1..75: mol_type = other DNA
attatcactcaggtggccagcggactgaacgggaaacaactgtctgaagctgacggcgacacactgacaaatgca

SEQ ID NO: 132936 - DNA, 75 bp, synthetic construct
  source 1..75: mol_type = other DNA
tttccccgggatatcctgggcagatcgcgttgatgttcctgtatatgttgaagaatctctggggccaaactggca

SEQ ID NO: 132937 - DNA, 75 bp, synthetic construct
  source 1..75: mol_type = other DNA
ctggcatctgcagccagagttgctggcggtgataatgttgtctggaaagacggaaaagcaacgctgtcacctgac

SEQ ID NO: 132938 - DNA, 75 bp, synthetic construct
  source 1..75: mol_type = other DNA
cgctaaacgccgcgagcgccagcaagaaaccgccgtcgctacgatgaagcgcttccgctggcaggcgattgtcgc

SEQ ID NO: 132939 - DNA, 75 bp, synthetic construct
  source 1..75: mol_type = other DNA
aattccagaaaattggatatgagattgaatattatagtttatatcattattttcttctgcagcataattccagta

SEQ ID NO: 132940 - DNA, 75 bp, synthetic construct
  source 1..75: mol_type = other DNA
ctatctgagatcccatctttttatttatcatttggactaacacctaaacaaggaggtgcattgggtaatatgagt

SEQ ID NO: 132941 - DNA, 75 bp, synthetic construct
  source 1..75: mol_type = other DNA
actccccgcgcggtggttaatgcggtaaaacgcgccggattgtacgctcagacgttaccggcacaactttctcaa

SEQ ID NO: 132942 - DNA, 75 bp, synthetic construct
  source 1..75: mol_type = other DNA
ttgctgaacaggccagtctgcaacaagaggcattatttgatcaggtgctgccagccgaacgctataacaatgcgc

SEQ ID NO: 132943 - DNA, 75 bp, synthetic construct
  source 1..75: mol_type = other DNA
gcatcgcaaggggcaacgcctgtgctgctggcggttgacgggaaagcggtagccctgctggctgttacgcgatcc

SEQ ID NO: 132944 - DNA, 75 bp, synthetic construct
  source 1..75: mol_type = other DNA
gctttcaatgtctcctgagcaaatcagggcactccgtgagcgcgagcacttgtcacaacccgtctttgccagata

SEQ ID NO: 132945 - DNA, 75 bp, synthetic construct
  source 1..75: mol_type = other DNA
atgagtaaaaattaccgcagtgatgcacttgcatctgtacatgaaatgatggagtcactccatgatatcggtgca

SEQ ID NO: 132946 - DNA, 75 bp, synthetic construct
  source 1..75: mol_type = other DNA
gccggtaatgtctccggaaaggatccgtgcactgcgcgaacgagagcatctgtctcaacctgtttttgccagata

SEQ ID NO: 132947 - DNA, 75 bp, synthetic construct
  source 1..75: mol_type = other DNA
gatacgggtggactggcactgctgctccatcttatcgatctggcgaaaaagcagggcaacaatgtgacgcttcag

SEQ ID NO: 132948 - DNA, 75 bp, synthetic construct
  source 1..75: mol_type = other DNA
agacgggtgacacgctggcgttatccggagagctggatcaggacgttctgctaccgctttgggaaatgcgtgagg

SEQ ID NO: 132949 - DNA, 75 bp, synthetic construct
  source 1..75: mol_type = other DNA
tggcgtttctgatatctggcggtatcagcgcatcaacggatgaagaaattctactggcgtcgataaccgcgccag

SEQ ID NO: 132950 - DNA, 75 bp, synthetic construct
  source 1..75: mol_type = other DNA
gaagagcggcatcacagatgtggaaagtgcggacggactggatgtcatgatgctggcagctgagcaaatgaatat

SEQ ID NO: 132951 - DNA, 75 bp, synthetic construct
  source 1..75: mol_type = other DNA
ttttactttggactttccagtgtggatgtggcagcgcgccgtcgcattgccggtattgatgttcgcccgggacgt

SEQ ID NO: 132952 - DNA, 75 bp, synthetic construct
  source 1..75: mol_type = other DNA
gaaggccggcatcacggatgtggagagtgcggacggactggatgtcatgatgctggctgcggagcagatgaatat

SEQ ID NO: 132953 - DNA, 75 bp, synthetic construct
  source 1..75: mol_type = other DNA
ttatggaactgaaatccggcaatatccgccgttgtgaggcgatggggttaaccctggaagagattcaggaactta

SEQ ID NO: 132954 - DNA, 75 bp, synthetic construct
  source 1..75: mol_type = other DNA
ggacgcctgcggctgaatttaatatttacgttgacccggaagctgcagaaattgtcttccagtcaggaattccgg

SEQ ID NO: 132955 - DNA, 75 bp, synthetic construct
  source 1..75: mol_type = other DNA
ggggggatcgattgaactcatggcgttttattttggcctttccagtgtggacgttgcagcacggcgccgtatttc

SEQ ID NO: 132956 - DNA, 75 bp, synthetic construct
  source 1..75: mol_type = other DNA
atgagtcaaacatcaaccttgaaaggccagtgcattgctgaattcctagggaccgggttgttgatttttttcggt

SEQ ID NO: 132957 - DNA, 75 bp, synthetic construct
  source 1..75: mol_type = other DNA
ccagcgcgtgacttcggtccgaaagtctttgcctggctggcgggctggggcaatgtcgcctttaccggcggcaga

SEQ ID NO: 132958 - DNA, 75 bp, synthetic construct
  source 1..75: mol_type = other DNA
ccgcaggggtttccggcgcgcatcttaatcccgctgtcaccattgcattgtggctgtttgcctgtttcgacaagc

SEQ ID NO: 132959 - DNA, 75 bp, synthetic construct
  source 1..75: mol_type = other DNA
acgcgctgcaacgcgccagtacgctcgataccgtagtgttcgataaaaccgggacgctgaccgaagggaagccgc

SEQ ID NO: 132960 - DNA, 75 bp, synthetic construct
  source 1..75: mol_type = other DNA
gtcgaagcgagaaaaatctggagggcgtcaaaccacaactggttgccgttgttcgcagagccatggaattaacgg

SEQ ID NO: 132961 - DNA, 75 bp, synthetic construct
  source 1..75: mol_type = other DNA
gtacgccgtgcgctggcgttgtcggacgtcgattttggtattaccgaaggtttacgcacgaaagaacgtcagaaa

SEQ ID NO: 132962 - DNA, 75 bp, synthetic construct
  source 1..75: mol_type = other DNA
aaaagaatctggagggcgttaaaccacagctggttgctgtcgttcgccgtgcgctggagctgacggaggttgatt

SEQ ID NO: 132963 - DNA, 75 bp, synthetic construct
  source 1..75: mol_type = other DNA
cggtgatgcggtggatgttgtggcctacgttggcagccaggtgtcatgggactggcctctgtacgagaaaatcgc

SEQ ID NO: 132964 - DNA, 75 bp, synthetic construct
  source 1..75: mol_type = other DNA
gccggagcgagaaaaatctggaaggcgtcaaaccacagctggttgctgtagttcgccgcgcccttgaactgtcgg

SEQ ID NO: 132965 - DNA, 75 bp, synthetic construct
  source 1..75: mol_type = other DNA
ttgcggtcattggcgcatctatgggcccattgacgggctttgccatgaacccagcgcgtgacttcggtccgaaag

SEQ ID NO: 132966 - DNA, 75 bp, synthetic construct
  source 1..75: mol_type = other DNA
gcggctttagtttacgggctttactacaatttatttttcgacttcgagcagactcatcacattgttcgcggcagc

SEQ ID NO: 132967 - DNA, 75 bp, synthetic construct
  source 1..75: mol_type = other DNA
cctgcgcagtaagtatcgccagaaacagctggttgcggaagggaaaagccagaccatgaacagccgtcacctgac

SEQ ID NO: 132968 - DNA, 75 bp, synthetic construct
  source 1..75: mol_type = other DNA
agttttttgaatgtggtgatctggcgctaccccatcatgattcgccaacaaatggcggagtttcagggggaaacg

SEQ ID NO: 132969 - DNA, 75 bp, synthetic construct
  source 1..75: mol_type = other DNA
gtggccactctttgccatgtgttcggggttcatcgcagcagctacaaatactggaaaaatcgtcctgaaaagcca

SEQ ID NO: 132970 - DNA, 75 bp, synthetic construct
  source 1..75: mol_type = other DNA
tggtgcattagctggtggctcagctcttgcattgattcgacaattggggagtagaaaggttatttctgttactcg

SEQ ID NO: 132971 - DNA, 75 bp, synthetic construct
  source 1..75: mol_type = other DNA
tttagaagatgagttgaatttaaaaaaagagaagttgagtatatacatgaacgaattaagagtaaacaagatact

SEQ ID NO: 132972 - DNA, 75 bp, synthetic construct
  source 1..75: mol_type = other DNA
attgcggcatgggcgcagcagagcccgctcacgctacaagatgcagttaccggcgtcctggtggggtttatcgct

SEQ ID NO: 132973 - DNA, 75 bp, synthetic construct
  source 1..75: mol_type = other DNA
gatgtttttactcagggcgtattgtggacgggactgattgcggcatgggcgcagcagagtccgctcacgctacaa

SEQ ID NO: 132974 - DNA, 75 bp, synthetic construct
  source 1..75: mol_type = other DNA
tgcgttcgctgaatccgctgtatccgccgatccctatgaatccagaatcaaaaatcttaggcgtggtagtggatg

SEQ ID NO: 132975 - DNA, 75 bp, synthetic construct
  source 1..75: mol_type = other DNA
attattgatggaggtcaaaggcttttacgttcgctcaatccgctgtatccgccaatccctatgaatccagaatca

SEQ ID NO: 132976 - DNA, 75 bp, synthetic construct
  source 1..75: mol_type = other DNA
tatcggtctgattaatctcggtcatatgctggaagcgcgcgcacgtcagcgttcttcaaaggcgctggagaaatt

SEQ ID NO: 132977 - DNA, 75 bp, synthetic construct
  source 1..75: mol_type = other DNA
tcttctatgatgccgaagatgaagaattagcacagcataagattgatgcaaaaacactaagtttatcaatagggt

SEQ ID NO: 132978 - DNA, 75 bp, synthetic construct
  source 1..75: mol_type = other DNA
cggatcatgcgggcgcttggtcgtcggcagtttacggtcacacatgatgggatggttattgatgattcactttct

SEQ ID NO: 132979 - DNA, 75 bp, synthetic construct
  source 1..75: mol_type = other DNA
tacgttctctcaatcctctgtatccgccaatccctatgaatccagaatctaaaatcataggcgtggtagtggatg

SEQ ID NO: 132980 - DNA, 75 bp, synthetic construct
  source 1..75: mol_type = other DNA
ttaaaaccaacgcaagatgttctcagtgcaaaaaaagatggttataaaataccaggggttttagagtccaattat

SEQ ID NO: 132981 - DNA, 75 bp, synthetic construct
  source 1..75: mol_type = other DNA
atgggggttatggaattgctttcaccctatattgatgaggtaaaatctcgtatagaaaatattgaatccgttggt

SEQ ID NO: 132982 - DNA, 75 bp, synthetic construct
  source 1..75: mol_type = other DNA
ggagattttgaagatggtggagcgggtcgcgggactggagacaaatttcaggcaacaaaaaacccatcaaccttg

SEQ ID NO: 132983 - DNA, 75 bp, synthetic construct
  source 1..75: mol_type = other DNA
gcgtgacgataccggcgaagtgcaggcggttgagctggttgtacgtgggcgccataaagaggtggatgctggcga

SEQ ID NO: 132984 - DNA, 75 bp, synthetic construct
  source 1..75: mol_type = other DNA
atgcgaagctgacgatcgccggtgaggtgctctatgaggtcgatgttatcaatatggtcgaaatttgtgatggtg

SEQ ID NO: 132985 - DNA, 75 bp, synthetic construct
  source 1..75: mol_type = other DNA
aatgcctggtgcagttgatgtggatctgggactggatgacagtgcactggatacagaattttccattggtggtac

SEQ ID NO: 132986 - DNA, 75 bp, synthetic construct
  source 1..75: mol_type = other DNA
ggagattttgcagatggtggcgcaattggcagggcaggagataaacttcaggcaacaaaaaacccatcaaccttg

SEQ ID NO: 132987 - DNA, 75 bp, synthetic construct
  source 1..75: mol_type = other DNA
cgtttagccgttttacgcagacgatgtcgcggcaatatcaggctttttttgatgatgtcaatgacgcccccagcg

SEQ ID NO: 132988 - DNA, 75 bp, synthetic construct
  source 1..75: mol_type = other DNA
tgggcatcacgtaagatttacaaatttgccggagttattgaggaatgtgaagcagctcagattgagatgacacat

SEQ ID NO: 132989 - DNA, 75 bp, synthetic construct
  source 1..75: mol_type = other DNA
ggcgagaaaaaattatccaggccacgctggaggcggtgaaactttacggaatacatgccgttacgcaccgcaaaa

SEQ ID NO: 132990 - DNA, 75 bp, synthetic construct
  source 1..75: mol_type = other DNA
ggatattttgcagatggtggcgcaattggcagggcaggagataaaattcaggcaacaaaaaacccaccaaccttg

SEQ ID NO: 132991 - DNA, 75 bp, synthetic construct
  source 1..75: mol_type = other DNA
atgcgtcgcgctaacgatccgcaacggcgagaaaagattatccaggccacgctggaggcggtgaaactttacgga

SEQ ID NO: 132992 - DNA, 75 bp, synthetic construct
  source 1..75: mol_type = other DNA
tcttaataacttgcgggcggcaaacctggcgtttgtcatggagcggcgcgatcacgccggcggtgatggtcaacc

SEQ ID NO: 132993 - DNA, 75 bp, synthetic construct
  source 1..75: mol_type = other DNA
gaacggtaatactgctggcaacacggccgtggtaattaaccccattacgggtattggtgagccgacatctacagg

SEQ ID NO: 132994 - DNA, 75 bp, synthetic construct
  source 1..75: mol_type = other DNA
atgccaaagttggtggatattttaataacctgcgggcggcaaatcaggcatttgtgatggagcgacgcgatcacg

SEQ ID NO: 132995 - DNA, 75 bp, synthetic construct
  source 1..75: mol_type = other DNA
ctaaccatgcgcgcgtgtcacaatcgcagggtgatgatattcagacgcggctgggtttacacagcgaatggcgta

SEQ ID NO: 132996 - DNA, 75 bp, synthetic construct
  source 1..75: mol_type = other DNA
cgtaccgcctttcatgtcacgccaacgttagatctgaattattatcacgatccccattcggcggaaattaaagaa

SEQ ID NO: 132997 - DNA, 75 bp, synthetic construct
  source 1..75: mol_type = other DNA
atacgcctggtttaacaatgatgtttccgaacccggcgacggcacagatcattaccattcatcagggatcgtcgc

SEQ ID NO: 132998 - DNA, 75 bp, synthetic construct
  source 1..75: mol_type = other DNA
gctgttggatgaaaaacataaaggtaaaaataattggaattcggtttttgtagctgggttaattcgacctgatgt

SEQ ID NO: 132999 - DNA, 75 bp, synthetic construct
  source 1..75: mol_type = other DNA
cgatgacagaatgcatgatttatcggatgcgttttgtattgtcggtccccagtcgcaggcaaggaagattagcgg

SEQ ID NO: 133000 - DNA, 75 bp, synthetic construct
  source 1..75: mol_type = other DNA
ttgttcagtcattcgctcctgatgcggtgacggcggttgtacagcctgctatccgttacgttgaaattgataacg

SEQ ID NO: 133001 - DNA, 75 bp, synthetic construct
  source 1..75: mol_type = other DNA
tcgacagtaacgttgcagggggctatggcggagcaatttattctgcgggaacaaacgatgccggtgatgtggatt

SEQ ID NO: 133002 - DNA, 75 bp, synthetic construct
  source 1..75: mol_type = other DNA
cagatcctgatcccacgccggatcccgacccaacccccgaccctgaacctacgcctgcttaccagccggtgttga

SEQ ID NO: 133003 - DNA, 75 bp, synthetic construct
  source 1..75: mol_type = other DNA
ggcaagccaattgatgatacgcacactcatggcggtgttcagcgcggtggaagcaataccgatggggtaaactga

SEQ ID NO: 133004 - DNA, 75 bp, synthetic construct
  source 1..75: mol_type = other DNA
gtctggctggaaaattaaagctgacagtgaaaatggtgggaaagttgagggggataataaagaggagctaattaa

SEQ ID NO: 133005 - DNA, 75 bp, synthetic construct
  source 1..75: mol_type = other DNA
ccaaggcgactattaacttagcaaatggtaactctgttgagtattctggttttgctggagataacccttcctcgg

SEQ ID NO: 133006 - DNA, 75 bp, synthetic construct
  source 1..75: mol_type = other DNA
agtgttcagctgaatggaaaaggaaataacggaagtgtaatgctctcatccgaagataataagctgacattgtca

SEQ ID NO: 133007 - DNA, 75 bp, synthetic construct
  source 1..75: mol_type = other DNA
aaaatgccgccagtgtggcagacctgaaaacggcaattgatggtgtgtccaccagtatgcagggtgcaggtttcg

SEQ ID NO: 133008 - DNA, 75 bp, synthetic construct
  source 1..75: mol_type = other DNA
ctaatggtgataacaatatatcaataggttctggttctcatgatcgtgctgtaaaaaaaatagatagcgcagtca

SEQ ID NO: 133009 - DNA, 75 bp, synthetic construct
  source 1..75: mol_type = other DNA
agtcagtggcaccgggtgtgttgtctgcgaattcaacggatgccgtcaatggcagtcagttgcatgcaactaacc

SEQ ID NO: 133010 - DNA, 75 bp, synthetic construct
  source 1..75: mol_type = other DNA
ctgcgagatgttacgtatcatgtatctgctgccggagatgcgggcatttacgactacactaactcacgctggcta

SEQ ID NO: 133011 - DNA, 75 bp, synthetic construct
  source 1..75: mol_type = other DNA
gaactgaccgccagtggtacggcgcagtcggcggtgcgagtggaggaaggcacgctgaaaggtgatgttgcggat

SEQ ID NO: 133012 - DNA, 75 bp, synthetic construct
  source 1..75: mol_type = other DNA
tattgtggtggaagacggggcgattctctccttaaccggtaatgctgatgacctggcggcgatgcagaacgatcc

SEQ ID NO: 133013 - DNA, 75 bp, synthetic construct
  source 1..75: mol_type = other DNA
ttggtggtgatgatcttaccccattaaaaggacggaaatatggtgaggtcacaatccctgataattatgatgcat

SEQ ID NO: 133014 - DNA, 75 bp, synthetic construct
  source 1..75: mol_type = other DNA
tcgtaatgaagcaacttttgaatttgaaattgccgattttgtgagggatatgcaaacagttgcgtgtgacggtac

SEQ ID NO: 133015 - DNA, 75 bp, synthetic construct
  source 1..75: mol_type = other DNA
tgaagtgctcggcgctgtgcgcccgttcaagacgaacacatactcatgtggaaccagcacacgcttgtggacaac

SEQ ID NO: 133016 - DNA, 75 bp, synthetic construct
  source 1..75: mol_type = other DNA
ggtgatttttattcagagatggatggtattagatacaatgtcttaaagcaatataccgaagcgcactggaaagct

SEQ ID NO: 133017 - DNA, 75 bp, synthetic construct
  source 1..75: mol_type = other DNA
aaagaacttaatgagataaatacaggtctttatgtatcaacttatcaggccgctggaaaatctgttagacggctt

SEQ ID NO: 133018 - DNA, 75 bp, synthetic construct
  source 1..75: mol_type = other DNA
caaatataagtactgatgctattaatggtagccaattatatgcgatagcgaagacactacaagatgatcttgaag

SEQ ID NO: 133019 - DNA, 75 bp, synthetic construct
  source 1..75: mol_type = other DNA
gatgcttttgatatgggcgcattcgggctggatgaaaaccttaccatccgcatctccggcggcgtcagccgtagc

SEQ ID NO: 133020 - DNA, 75 bp, synthetic construct
  source 1..75: mol_type = other DNA
aaaggctgtttttcatttacctgaaacaattaatcgtgttattaaaataattagaaaagtaaagaataataaagc

SEQ ID NO: 133021 - DNA, 75 bp, synthetic construct
  source 1..75: mol_type = other DNA
aattgcgtggtatgtatcattaatgcaacaccctggattaatatctcctaccgccatggaaagggttatgcaagt

SEQ ID NO: 133022 - DNA, 75 bp, synthetic construct
  source 1..75: mol_type = other DNA
cagtatgcagggagctgttttcgcactgaaagactctaagggacaggaagtgaaacagtctcttgggcaggcgat

SEQ ID NO: 133023 - DNA, 75 bp, synthetic construct
  source 1..75: mol_type = other DNA
gtagggagcaataatactgccggcagcatcaaggttaatggggttgatggtaaggaggctgtgagtctgaatggt

SEQ ID NO: 133024 - DNA, 75 bp, synthetic construct
  source 1..75: mol_type = other DNA
gtgtttctattgcactggcaataactcctgttgctgtgactttcgcagaaaaaaacgatactcatcttgaggtcg

SEQ ID NO: 133025 - DNA, 75 bp, synthetic construct
  source 1..75: mol_type = other DNA
ggctgggagtattgttattggttctcaaagtaaagctgaaggtcacttatctacagtgttcggtgcactcagtaa

SEQ ID NO: 133026 - DNA, 75 bp, synthetic construct
  source 1..75: mol_type = other DNA
ttccggcgtgaaagacggggtgaatgaccaggatgccgttaacgtttcacaacttaaccgtgaaatcagtcaggc

SEQ ID NO: 133027 - DNA, 75 bp, synthetic construct
  source 1..75: mol_type = other DNA
tgatggaagcattgttttaggtgctatgagttcggcagaagggggattatctcttacactaggcgctcttagtca

SEQ ID NO: 133028 - DNA, 75 bp, synthetic construct
  source 1..75: mol_type = other DNA
atcggatgtacgctcgacacgtttcatattatcagtgccaaggtttgaaaatataataaatagcaccccacaatc

SEQ ID NO: 133029 - DNA, 75 bp, synthetic construct
  source 1..75: mol_type = other DNA
tgctgtccctgctggcgcaacttatcagatcacctcttatccggcccaaaactactcttgtggctcaggggtatt

SEQ ID NO: 133030 - DNA, 75 bp, synthetic construct
  source 1..75: mol_type = other DNA
caaacggcacaaaatactgatcagcagacaaaaccgcgtcctgaacaaccaccgctaatgtcaaaaagcggtttt

SEQ ID NO: 133031 - DNA, 75 bp, synthetic construct
  source 1..75: mol_type = other DNA
ttcactgcacatgcgatagctacacgaaacaatgacgctcccgctcttgttgaagaagtctatagcttctttcgt

SEQ ID NO: 133032 - DNA, 75 bp, synthetic construct
  source 1..75: mol_type = other DNA
tgcagtacggtgaggacgacctgacgtttgtttcacgcctgctgtcagaggtgggtatctggttccgctttgcca

SEQ ID NO: 133033 - DNA, 75 bp, synthetic construct
  source 1..75: mol_type = other DNA
cagagcggctatgagcgcggactgacgctgccgcttcgccatccttctgggctgtttgatggtgaaacggaagcc

SEQ ID NO: 133034 - DNA, 75 bp, synthetic construct
  source 1..75: mol_type = other DNA
gttcctcaggattataaaaaagcggcggaatattataagaacggtgataaaaataatgatattacggcgcagtac

SEQ ID NO: 133035 - DNA, 75 bp, synthetic construct
  source 1..75: mol_type = other DNA
ttgccgagcttgagtccaccctttgccgggtgttaaccgatgttattcgccccattgagcaacaagtcaaaatgg

SEQ ID NO: 133036 - DNA, 75 bp, synthetic construct
  source 1..75: mol_type = other DNA
aaaaaccgtctgtccgtattcacggaatagccagaaaaagagctgccgaagctcgcaaaatggctgtagctgcgt

SEQ ID NO: 133037 - DNA, 75 bp, synthetic construct
  source 1..75: mol_type = other DNA
aaatcgatctaaaaaaacgctatggcaaatggttcctgattatccttgcttgccagcttttaataatgaatggtg

SEQ ID NO: 133038 - DNA, 75 bp, synthetic construct
  source 1..75: mol_type = other DNA
ccgtatttcgtatcgataatccatcaacaccacaagaaaaagaaatcgaagtaacttcaggcgatgcaaaccaac

SEQ ID NO: 133039 - DNA, 75 bp, synthetic construct
  source 1..75: mol_type = other DNA
agggtttcgtcctgggtttcattttcctgtttttcacggcgcagttccccacttcaacactcgccagctgttcag

SEQ ID NO: 133040 - DNA, 75 bp, synthetic construct
  source 1..75: mol_type = other DNA
ggcgtagttccccacttcaacacccgccagctgttcagtgaagtcatttcgcgccaggcagcaacggatgagcag

SEQ ID NO: 133041 - DNA, 75 bp, synthetic construct
  source 1..75: mol_type = other DNA
tcctgcgcgagcggcaccagatgcgcggtcaggacttcgtgtttaacctcaaaagcgaatacccggcccgcgaac

SEQ ID NO: 133042 - DNA, 75 bp, synthetic construct
  source 1..75: mol_type = other DNA
atgacgccaccgggggcgataaaaccacctacggcgaagcctatcactatgccgacaacttcctgcaaaaaggcg

SEQ ID NO: 133043 - DNA, 75 bp, synthetic construct
  source 1..75: mol_type = other DNA
cgcgcctgactcgttccgcctgtcttggcgaaatgaataaagaatatattctgctggcgcgcgccaaaggggcca

SEQ ID NO: 133044 - DNA, 75 bp, synthetic construct
  source 1..75: mol_type = other DNA
aaatcctgcgcgagcggcaccagatgcgcggtcaggacttcgtgtttaacctcaaaagcgaatacccggcccgcg

SEQ ID NO: 133045 - DNA, 75 bp, synthetic construct
  source 1..75: mol_type = other DNA
gaatacccggcccgcgaacaggtgatgcagtatggcgaggacgacctgacgtttgtctcacgcctgctgtcggaa

SEQ ID NO: 133046 - DNA, 75 bp, synthetic construct
  source 1..75: mol_type = other DNA
acgccggagtcggtactgatgcaggacggcgcattaagcctgacggcaccgccggtacagggaatgccggtgcag

SEQ ID NO: 133047 - DNA, 75 bp, synthetic construct
  source 1..75: mol_type = other DNA
atgaatgagagcgaagtgaagagacctgtacgacggggaaggccaaaaatcgcgggacttgatgagcgtaaaaaa

SEQ ID NO: 133048 - DNA, 75 bp, synthetic construct
  source 1..75: mol_type = other DNA
tttatgaggtattcagtaataagaaggaaattttttctgaagtaattaaagaatataaaaccctgttcctcgatc

SEQ ID NO: 133049 - DNA, 75 bp, synthetic construct
  source 1..75: mol_type = other DNA
cctctcctcgtcacaggacgaagcccgttacgaagtgcgccttgaaccccgtatggcgctgcttacccgcagccg

SEQ ID NO: 133050 - DNA, 75 bp, synthetic construct
  source 1..75: mol_type = other DNA
tgccgggatgcagtggatcccactggtaccagaacagaacaatattttgccttactccgctcgtctgaagtcaac

SEQ ID NO: 133051 - DNA, 75 bp, synthetic construct
  source 1..75: mol_type = other DNA
gctcgtttgaagtcaactcagaagtccgtcaatcctggactggtgagcgcttcggcaacctttacccttgaattt

SEQ ID NO: 133052 - DNA, 75 bp, synthetic construct
  source 1..75: mol_type = other DNA
attggacgcaaatatgcgtccggtgaaactgaatgaccttcatgccgggatgcagtggatcccactggtaccaga

SEQ ID NO: 133053 - DNA, 75 bp, synthetic construct
  source 1..75: mol_type = other DNA
atgttctattctcgcaatattaaaatctcagattttactctgaaatcaaaacagcctttcttcaaggcgcaatct

SEQ ID NO: 133054 - DNA, 75 bp, synthetic construct
  source 1..75: mol_type = other DNA
gtgaatttcttctcactactgaaaacatcgattggaacatcgcccagattggcaagatgaaatttgaattagtgg

SEQ ID NO: 133055 - DNA, 75 bp, synthetic construct
  source 1..75: mol_type = other DNA
acagcctttcttcaaggcgcaatctatttctggtaagttccagcgtcgctttactggtattcatttttatgaagc

SEQ ID NO: 133056 - DNA, 75 bp, synthetic construct
  source 1..75: mol_type = other DNA
agtgaccggcgggcggttgaatcggagcaggcgcttgcgcatgttgattcgctggcatcggctgtcccgctggga

SEQ ID NO: 133057 - DNA, 75 bp, synthetic construct
  source 1..75: mol_type = other DNA
agtgcggattctgggcactttcttcagtcagccagtggatattcctgatgaagagggatatgagacggggcagaa

SEQ ID NO: 133058 - DNA, 75 bp, synthetic construct
  source 1..75: mol_type = other DNA
tattgccgggtgggggctggcgaaagcgattggcgtcatgctcttcgacgcgccgcttaattttgcctggattgt

SEQ ID NO: 133059 - DNA, 75 bp, synthetic construct
  source 1..75: mol_type = other DNA
cggataccgagaccgctcgcaggatattggaaagcgttggcgaaagggactgcacctgcgataccacctctgcca

SEQ ID NO: 133060 - DNA, 75 bp, synthetic construct
  source 1..75: mol_type = other DNA
ccggcgtggtcgtatacgttcagcctgggtgacttcgttggcgacaaggggcgcgggctgcaagtggtcgagggt

SEQ ID NO: 133061 - DNA, 75 bp, synthetic construct
  source 1..75: mol_type = other DNA
atgaaagtcaaattcttgcatgatcacggttatccgtcactgaaacaggttgttggtaaggtggttaacgtcgtt

SEQ ID NO: 133062 - DNA, 75 bp, synthetic construct
  source 1..75: mol_type = other DNA
agatcagctttaacttcttccacagcgaagacgtggttcgtcacccggtggtggcgcgtatcgttaacgcctatg

SEQ ID NO: 133063 - DNA, 75 bp, synthetic construct
  source 1..75: mol_type = other DNA
cgccaatattctcgaccatgacattaccttcggcgttggcccggcgggtacgggtaaaacctacctggcagtggc

SEQ ID NO: 133064 - DNA, 75 bp, synthetic construct
  source 1..75: mol_type = other DNA
gcaaaagaaggaactggtaatggagcgtttacaactggcccgtcaactcttatcagtgaatacggcagttgagcg

SEQ ID NO: 133065 - DNA, 75 bp, synthetic construct
  source 1..75: mol_type = other DNA
tagtcgacgtagacgaaatattaatgacatgatctcagaaatgtcatttaaattaaaaaagaatcaggttataaa

SEQ ID NO: 133066 - DNA, 75 bp, synthetic construct
  source 1..75: mol_type = other DNA
gaactctcatcgcatctgctgttttattttcctttaattcaacagccgcgacttcatattttgaagcccgcaatg

SEQ ID NO: 133067 - DNA, 75 bp, synthetic construct
  source 1..75: mol_type = other DNA
accggtaaatgagatgcttacgggagcgggcatccttcaaacccagacatcgatagcaaatgatgcctctaaccc

SEQ ID NO: 133068 - DNA, 75 bp, synthetic construct
  source 1..75: mol_type = other DNA
atatagcctcgatgctttgtgaacagccccccatgcgaacacaccagatttcttcatccggatacttatctgccg

SEQ ID NO: 133069 - DNA, 75 bp, synthetic construct
  source 1..75: mol_type = other DNA
cacaccagatttcttcatccggatacgtatctgccgataaactgcacaaactctataagacaaatttggaagacg

SEQ ID NO: 133070 - DNA, 75 bp, synthetic construct
  source 1..75: mol_type = other DNA
attttcactgatgccatagataataaacctgctgggaaattatgcttaaaaatctgtaactcctgcagccaaaat

SEQ ID NO: 133071 - DNA, 75 bp, synthetic construct
  source 1..75: mol_type = other DNA
cccgtgattatgggccgccatacctgggaatccatcggtcgtccgctgccaggacgcaaaaatattatcctcagc

SEQ ID NO: 133072 - DNA, 75 bp, synthetic construct
  source 1..75: mol_type = other DNA
tctaaagcggttatcaccggcgatgtcacgcagattgacctgccgcgcaacaccaagtcaggcctgcgtcatgcc

SEQ ID NO: 133073 - DNA, 75 bp, synthetic construct
  source 1..75: mol_type = other DNA
tcgtcaacaacaatgatcccacctataaaagcgagcatacggacacgctcgtctataacccagaaggggcgctaa

SEQ ID NO: 133074 - DNA, 75 bp, synthetic construct
  source 1..75: mol_type = other DNA
agcttgaaatcatttactgaccaggccggtgcaaacatcgcgaatagcgtaggggcgaaacatggaattaattcg

SEQ ID NO: 133075 - DNA, 75 bp, synthetic construct
  source 1..75: mol_type = other DNA
aaggagcagcatttacctcttcagccatgagcgcagcaagtaacacattccagcaggccttcaaccagatgagtg

SEQ ID NO: 133076 - DNA, 75 bp, synthetic construct
  source 1..75: mol_type = other DNA
atttcgtcaacgtcattcagggcgatgcaacgctaaatcaggcgttaattaaagataagcgtactgaaaatctct

SEQ ID NO: 133077 - DNA, 75 bp, synthetic construct
  source 1..75: mol_type = other DNA
ccggagagcagcggcagctatggcttcgtccgtctggaggtgacctgctcagaacagaggttgccggtatgtctg

SEQ ID NO: 133078 - DNA, 75 bp, synthetic construct
  source 1..75: mol_type = other DNA
gtggatgcacagaatggcgccaccacagaagaaggtgcgtttgccctgagtcgcccgcttcaggccggcgccttt

SEQ ID NO: 133079 - DNA, 75 bp, synthetic construct
  source 1..75: mol_type = other DNA
ccggtaacgttccataaactgaccaccaccaacctcactggtcagggcggcaccatcaatatgcgtgttcgcctt

SEQ ID NO: 133080 - DNA, 75 bp, synthetic construct
  source 1..75: mol_type = other DNA
cttcagtaaaattcatcttgatgcgtcaatgtcctgcgcgggggatcctataccgttagccccagaaacggttgc

SEQ ID NO: 133081 - DNA, 75 bp, synthetic construct
  source 1..75: mol_type = other DNA
tactggccgcatagtcggattaaaaatagcgtcgaaacgatgatggtgaatctggaaggcgtggacatcccactg

SEQ ID NO: 133082 - DNA, 75 bp, synthetic construct
  source 1..75: mol_type = other DNA
taccattagcgccagaaacggttgctgaacgtgctgccgtgctttgtcaggtggcggaaagtgtggcgacagatt

SEQ ID NO: 133083 - DNA, 75 bp, synthetic construct
  source 1..75: mol_type = other DNA
tccatcactggacgaacaaaaacgaatcgtatctcttctcgataaattcgacaccctgactaactccatcaccga

SEQ ID NO: 133084 - DNA, 75 bp, synthetic construct
  source 1..75: mol_type = other DNA
aagtccccctgtacgcctccatgctgacacaggcaatggactatgaccggattctggcaggctcccgcagccatc

SEQ ID NO: 133085 - DNA, 75 bp, synthetic construct
  source 1..75: mol_type = other DNA
tcatttacacaggaggtgaccagacggtacacggagaggcacataacacccgactggagggagggaaccagtatg

SEQ ID NO: 133086 - DNA, 75 bp, synthetic construct
  source 1..75: mol_type = other DNA
cagtctgaaatcgttcggattctggacgcattcagcgcccttacagcagagcttacagcagagcttaccatgcga

SEQ ID NO: 133087 - DNA, 75 bp, synthetic construct
  source 1..75: mol_type = other DNA
ttaaaataccttttcagaacaaacaagatgcgtaaagaaataagcaaaacggcgagtggcgtcacacgctttaac

SEQ ID NO: 133088 - DNA, 75 bp, synthetic construct
  source 1..75: mol_type = other DNA
ctctaaaggtactaaagtaattgatgtatctgcatctgatatggcgaaaattactatcccaatcccctgcccgaa

SEQ ID NO: 133089 - DNA, 75 bp, synthetic construct
  source 1..75: mol_type = other DNA
aaccgtgacagcgatgaagactggtacctgcgcagtgaacatgcgtatcgttctgaagtcccccggtatgcctcc

SEQ ID NO: 133090 - DNA, 75 bp, synthetic construct
  source 1..75: mol_type = other DNA
aaccgtgacagcgatgaagactggtacctgcgcagtgaatatgcttatcgttctgaagtcccccagtatgcctcc

SEQ ID NO: 133091 - DNA, 75 bp, synthetic construct
  source 1..75: mol_type = other DNA
aaccgtgacagcgatgaagactggtacctgcgcagtgaatatgcatatcgttctgaagtccccctgtatgcctcc

SEQ ID NO: 133092 - DNA, 75 bp, synthetic construct
  source 1..75: mol_type = other DNA
cggaatggcacgtcactggacctgcaggccggactggaagcccgtgtccgggaaaatatcaccctgggcgttcag

SEQ ID NO: 133093 - DNA, 75 bp, synthetic construct
  source 1..75: mol_type = other DNA
aaccgtgacagcgatgaagactggtacctgcgcagtgaagatgcgtatcgttctgaagtccccccgtatgcctcc

SEQ ID NO: 133094 - DNA, 75 bp, synthetic construct
  source 1..75: mol_type = other DNA
aaccgtgacagcgatgaagactggtacctgcgcagtgaagatgcctatcgttctgaagtcccccggtatgcctcc

SEQ ID NO: 133095 - DNA, 75 bp, synthetic construct
  source 1..75: mol_type = other DNA
aggcaaactgcaggtgaacgccggtggtacagccacgaatgtcaccctgaagcagggcggcgtactggtcaccag

SEQ ID NO: 133096 - DNA, 75 bp, synthetic construct
  source 1..75: mol_type = other DNA
gaacgggctggcggtgaacaccacgctgaataacagaggcgagcagtgggttcatgagggcggggttgccaccgg

SEQ ID NO: 133097 - DNA, 75 bp, synthetic construct
  source 1..75: mol_type = other DNA
tggcaccatcagcctgcgtgtacgcccggatatggcgcagaacaatgctgacagactggtcattgacggtggcag

SEQ ID NO: 133098 - DNA, 75 bp, synthetic construct
  source 1..75: mol_type = other DNA
ctggcccgctcacggagaaaatgcgccggtgtggcggttgctctgtctcttgctgctgtcacgtcagtcccggca

SEQ ID NO: 133099 - DNA, 75 bp, synthetic construct
  source 1..75: mol_type = other DNA
aattgctggatggggttgaggttgagtggttgccattggggaaactaggtgaattagttcgtggaaatggattgc

SEQ ID NO: 133100 - DNA, 75 bp, synthetic construct
  source 1..75: mol_type = other DNA
tgccactgttgaggggaccaatgccagcggtaagttcagtattgatggcatatctggtcaggccagcggcctgct

SEQ ID NO: 133101 - DNA, 75 bp, synthetic construct
  source 1..75: mol_type = other DNA
ggtgcacggagaggcacataatacccggctggagggagggaaccagtatgtgcataaggacgggctggcactgaa

SEQ ID NO: 133102 - DNA, 75 bp, synthetic construct
  source 1..75: mol_type = other DNA
atttaacggtgcaaaactggtatggatgctgaaaggcagtccgctcaccgtgaccggcgcagtcatcattgtatt

SEQ ID NO: 133103 - DNA, 75 bp, synthetic construct
  source 1..75: mol_type = other DNA
tgaccggcgcagtcatcattgtattaatgctactgatgatgattttttcaccgtggctggcgacgcatgatccca

SEQ ID NO: 133104 - DNA, 75 bp, synthetic construct
  source 1..75: mol_type = other DNA
gccggtgaactggtgggtacagccttccgttatccgcaccttcagctcccggggtgatatgcgtgtggggacctc

SEQ ID NO: 133105 - DNA, 75 bp, synthetic construct
  source 1..75: mol_type = other DNA
agcctgcgtgtacgcccggatatggcgcagaacaatgctgacagactggtcattgacggtggcagggcaaccgga

SEQ ID NO: 133106 - DNA, 75 bp, synthetic construct
  source 1..75: mol_type = other DNA
aaccgtctggggaatttctccgtggaaaatggcatggcagataacgtcgttctggaaaatggcggacgtctggat

SEQ ID NO: 133107 - DNA, 75 bp, synthetic construct
  source 1..75: mol_type = other DNA
gccatcacgccggagtcggtactgatgcaggacggcgcattaagcctgacggcaccgccggtacagggaatgccg

SEQ ID NO: 133108 - DNA, 75 bp, synthetic construct
  source 1..75: mol_type = other DNA
atgggtattcagaatttcgatcattcacaccacaagctcaaaattcgtggcctgcaaagtccggtggatgtgctg

SEQ ID NO: 133109 - DNA, 75 bp, synthetic construct
  source 1..75: mol_type = other DNA
atgacgccaccgggggcgataacaccacctatggcgaagcctaccactacgctgacaacttcctgcaaaaaggcg

SEQ ID NO: 133110 - DNA, 75 bp, synthetic construct
  source 1..75: mol_type = other DNA
gtctcttgccaccgccacttcagtcccggccctggctgctgacagtgttgtacaggcaggggaaatcgtgaacgg

SEQ ID NO: 133111 - DNA, 75 bp, synthetic construct
  source 1..75: mol_type = other DNA
atccggtgtgcttggcggacgcgcagacgccatcatcatgcgcatcatggacattatgctgtcgattccttcgtt

SEQ ID NO: 133112 - DNA, 75 bp, synthetic construct
  source 1..75: mol_type = other DNA
tgggtacagccgcagccggcagtaacatgacgttctcaccgtcccggaatggcacgtcactggacctgcaggccg

SEQ ID NO: 133113 - DNA, 75 bp, synthetic construct
  source 1..75: mol_type = other DNA
attcgtcatcctactttcacctctgtttctggcatgggtgtgggtcacgcccggctatgttaaagatatcagtaa

SEQ ID NO: 133114 - DNA, 75 bp, synthetic construct
  source 1..75: mol_type = other DNA
ggtacagccttctgttatccgcaccttcagctcccggggagacatgagcatgggtacagccgcagccggcagtaa

SEQ ID NO: 133115 - DNA, 75 bp, synthetic construct
  source 1..75: mol_type = other DNA
gaactgtgcggcgtagcgcccggaggagtattgccggtatcagagcaatggcatccactgttgattgaggcgtta

SEQ ID NO: 133116 - DNA, 75 bp, synthetic construct
  source 1..75: mol_type = other DNA
ggcttattttgcctgttaattatgctgctaaagctttctgaatataagcatgggttaacgacaattaagtctttg

SEQ ID NO: 133117 - DNA, 75 bp, synthetic construct
  source 1..75: mol_type = other DNA
tgtggcacagggaacccgccacagcatgaaagcatcatcggacaataacgacttccgcgcccggggctggggctg

SEQ ID NO: 133118 - DNA, 75 bp, synthetic construct
  source 1..75: mol_type = other DNA
gatcgcaacctattcccagcatctggtggaaagcgcacctcatggcgcggatgttgtttttgctccccaggtcag

SEQ ID NO: 133119 - DNA, 75 bp, synthetic construct
  source 1..75: mol_type = other DNA
ggcaaccggcaaaacctggcttgcgtttacaaatgtcggaaacagtaacctcggggtggcaacctccggacaggg

SEQ ID NO: 133120 - DNA, 75 bp, synthetic construct
  source 1..75: mol_type = other DNA
ggcaccatcagcctgcgtgtacgcccggatatggcacagaacaatgctgacagactggtcattgacggcggcagg

SEQ ID NO: 133121 - DNA, 75 bp, synthetic construct
  source 1..75: mol_type = other DNA
ccatgacatggaggggttagttacacaaaaattcaatactccccagtctggtttaacaatgaacaatctaactca

SEQ ID NO: 133122 - DNA, 75 bp, synthetic construct
  source 1..75: mol_type = other DNA
gagatagagcaaacaggaatgtggtctttggatggccgttgtgaggaaaaacctatattaagaaaaaggatgcat

SEQ ID NO: 133123 - DNA, 75 bp, synthetic construct
  source 1..75: mol_type = other DNA
agcggtaagttcagtattgatggtatctccggtcaggccagcggcctgctgctggaaaatggcggcagctttacg

SEQ ID NO: 133124 - DNA, 75 bp, synthetic construct
  source 1..75: mol_type = other DNA
ctgcgtaaggcgctaccgtggttacaggcacaactgccgcagctgaaagttattaccgtcaacattcagccggta

SEQ ID NO: 133125 - DNA, 75 bp, synthetic construct
  source 1..75: mol_type = other DNA
gcggcatgatgctgcgttttgtgctgcgctcggaaaccaagctggcgcaactgcgtaaggcgctaccgtggctac

SEQ ID NO: 133126 - DNA, 75 bp, synthetic construct
  source 1..75: mol_type = other DNA
acgccaaagcccacttgcactctggcaggcacattatgtcaaagacaagttgatggcgagccatccagggctggt

SEQ ID NO: 133127 - DNA, 75 bp, synthetic construct
  source 1..75: mol_type = other DNA
tgttttcattttccggggccgcagcggcagtcaggttaaactgctgtggtccaccggcgatggactgtgtctgct

SEQ ID NO: 133128 - DNA, 75 bp, synthetic construct
  source 1..75: mol_type = other DNA
gtttcttccagactaatccggcggtcgccagccagctgtacgctaccgcgcgcgactgggtacgacagctgccgg

SEQ ID NO: 133129 - DNA, 75 bp, synthetic construct
  source 1..75: mol_type = other DNA
cattgcctgtgcaaagcagtcagccgctgaactgggcttaacgcgtttgcaatttcaggcgctggactccactca

SEQ ID NO: 133130 - DNA, 75 bp, synthetic construct
  source 1..75: mol_type = other DNA
aagacgatcccatgtccggccatgttttcattttccggggccgcagcggtagtcaggttaaactgctgtggtcca

SEQ ID NO: 133131 - DNA, 75 bp, synthetic construct
  source 1..75: mol_type = other DNA
ccgattacctgccacagcggcggattatgcatcgggcgacgattcttggggataaaccgttttatcgggcggggt

SEQ ID NO: 133132 - DNA, 75 bp, synthetic construct
  source 1..75: mol_type = other DNA
cgctggcccagcgttttggcgaactgcatattcaccctgtttaccctcatgccgaaggggttgaggagattatcg

SEQ ID NO: 133133 - DNA, 75 bp, synthetic construct
  source 1..75: mol_type = other DNA
atcccatgtccggccatgttttcattttccggggccgcagcggcagtcaggttaaactgctgtggtccaccggtg

SEQ ID NO: 133134 - DNA, 75 bp, synthetic construct
  source 1..75: mol_type = other DNA
aaatttggctggttgccagtatcaccgatatgagaaatggcttcaacggcctggctgcgaaagtacagacggcgc

SEQ ID NO: 133135 - DNA, 75 bp, synthetic construct
  source 1..75: mol_type = other DNA
ttcattttccggggccgcagcggcagtcaggttaaactgctgtggtccaccggtgacggactgtgcctcctgacc

SEQ ID NO: 133136 - DNA, 75 bp, synthetic construct
  source 1..75: mol_type = other DNA
ggcgcgaaaatcaatcttaacggcggaggcagtccgggagacgtgatcctgccgatgcgcccggtgatcctgaaa

SEQ ID NO: 133137 - DNA, 75 bp, synthetic construct
  source 1..75: mol_type = other DNA
attgatttcacgtttgaatggaaagggctgaagaaattatgcatggcagtctcatttcgctcaataatagcagaa

SEQ ID NO: 133138 - DNA, 75 bp, synthetic construct
  source 1..75: mol_type = other DNA
gttaaagagcagatcaccgtaatggctttcaacggagccggaattcgtgataccgccagaacactgaaggtcggc

SEQ ID NO: 133139 - DNA, 75 bp, synthetic construct
  source 1..75: mol_type = other DNA
gcgggtttaacgagctgcgctttgaggacgccacggacaaggaagaaatctacctgcacgcccagaaaaatatgc

SEQ ID NO: 133140 - DNA, 75 bp, synthetic construct
  source 1..75: mol_type = other DNA
gggacgaagacgcagatgacgatacggtcgaagacctataaaggaagcgggtttaacgagctgcggtttgaggac

SEQ ID NO: 133141 - DNA, 75 bp, synthetic construct
  source 1..75: mol_type = other DNA
agggggccacgaccagagtatcacggtggcgaacgaccggtgcatcacggtacgtaatgaccagacgctgcaggt

SEQ ID NO: 133142 - DNA, 75 bp, synthetic construct
  source 1..75: mol_type = other DNA
caaaatggccgagagcgaactatttattttcattctcatcaattaagacacctattaaataccatagctcaaaga

SEQ ID NO: 133143 - DNA, 75 bp, synthetic construct
  source 1..75: mol_type = other DNA
ggcagtcaggtaaaattgctgtggtctaccggcgacaggctgtgtctgctgaccaaacggctggagcgtggtcgc

SEQ ID NO: 133144 - DNA, 75 bp, synthetic construct
  source 1..75: mol_type = other DNA
acggcctggcggcaaaggtgcagacgacgctgaaagacgatccgatgtcaggtcacgtttttatcttccgtgggc

SEQ ID NO: 133145 - DNA, 75 bp, synthetic construct
  source 1..75: mol_type = other DNA
cctttaatggtgccggggttcgcgataccgctaggacactgaaaattgatattaacaccgtcatccggactttaa

SEQ ID NO: 133146 - DNA, 75 bp, synthetic construct
  source 1..75: mol_type = other DNA
catgcccggtttcgttgccgtgactgccaccgcgtcttccagctcacttatacttatgaagcccgcaagcccggg

SEQ ID NO: 133147 - DNA, 75 bp, synthetic construct
  source 1..75: mol_type = other DNA
ccggagaaacgcagacggcgtaccacacaggaaaagatcgcaattgttcagcagagctttgaaccggggatgacg

SEQ ID NO: 133148 - DNA, 75 bp, synthetic construct
  source 1..75: mol_type = other DNA
atgccaccacgaaccccaaaagcctgccgtgttcgcggctgccgccataccacaactgacccgtcaggctattgc

SEQ ID NO: 133149 - DNA, 75 bp, synthetic construct
  source 1..75: mol_type = other DNA
gttgtgcctgcgtgccggtgtggtgcgcgaggcgaaaaccgttgaccacatcatccctaaagcgcatggcggcac

SEQ ID NO: 133150 - DNA, 75 bp, synthetic construct
  source 1..75: mol_type = other DNA
tgatgcagactgcaatctgcagagcctgtgctggccatgtcataaggcgaagacggcccgtgaacgactgaagtg

SEQ ID NO: 133151 - DNA, 75 bp, synthetic construct
  source 1..75: mol_type = other DNA
tgggacgttatccgcgcgcgtgtgctgaagcgtgacaaaggcctgtgccagttgtgcctgcgtgccggtgtggta

SEQ ID NO: 133152 - DNA, 75 bp, synthetic construct
  source 1..75: mol_type = other DNA
agacgcagacagcaacctgcagagtctgtgctggccctgccataaggcgaagacggcccgtgaacggctaaagtg

SEQ ID NO: 133153 - DNA, 75 bp, synthetic construct
  source 1..75: mol_type = other DNA
ccaccagcgtggctatggttcgaaatgggatgccatacgtgcgcgcatactgaagcgtgataatcatctgtgtca

SEQ ID NO: 133154 - DNA, 75 bp, synthetic construct
  source 1..75: mol_type = other DNA
atgccatcactaatcccacgtgcctgccgtaagcgtggatgtgcaggtacaaccacagacagttcgggttactgc

SEQ ID NO: 133155 - DNA, 75 bp, synthetic construct
  source 1..75: mol_type = other DNA
gccgtgttcgcggctgccgcaataccacgactgacccgtcaggctactgcgaaagccacaaaagcgaaggctgga

SEQ ID NO: 133156 - DNA, 75 bp, synthetic construct
  source 1..75: mol_type = other DNA
tgggatgccatacgtgcgcgcataatgaagcgtgataatcatctgtgtcagaactgcctgcgcaatgggagagcc

SEQ ID NO: 133157 - DNA, 75 bp, synthetic construct
  source 1..75: mol_type = other DNA
acaccagcgcggttatggttcgaaatgggatgttatccgtgaacgtgtgctcaagcgtgacaaaggcctgtgtca

SEQ ID NO: 133158 - DNA, 75 bp, synthetic construct
  source 1..75: mol_type = other DNA
attttaaccctataaataatcaaggtaataaagtgcctcctcgtatcccgaaagcctgccgtgctcgaggttgcc

SEQ ID NO: 133159 - DNA, 75 bp, synthetic construct
  source 1..75: mol_type = other DNA
caccacagacccgtcaggctactgcgaaagccacaaaagcgaaggctggaagcaatacaagccaggccagtcccg

SEQ ID NO: 133160 - DNA, 75 bp, synthetic construct
  source 1..75: mol_type = other DNA
gaagcaatggcgaaaaaactggcgaaaggtattgaggtgaaacctggcgaaattgtcattccgtttactgattaa

SEQ ID NO: 133161 - DNA, 75 bp, synthetic construct
  source 1..75: mol_type = other DNA
aaccatgaaactgaagctgaaagcactgcctgtgtttgataaagaaaaaggcgctatcttcctgaaagagatgga

SEQ ID NO: 133162 - DNA, 75 bp, synthetic construct
  source 1..75: mol_type = other DNA
gaaaaaatgcaaacggtgatgcaaacgttgcttccctatttgaaccaggcattacgcaattactttaaccagcaa

SEQ ID NO: 133163 - DNA, 75 bp, synthetic construct
  source 1..75: mol_type = other DNA
tgctacatccggtggtgcgaacgcatccggtgaccggtaaacaggcgctgtttgtgaatgaaggttttaccacac

SEQ ID NO: 133164 - DNA, 75 bp, synthetic construct
  source 1..75: mol_type = other DNA
atgagtgaacgtctgagcattaccccgctgggatcgtatattggcgcacaaatttcgggtgccgacctgacgcgt

SEQ ID NO: 133165 - DNA, 75 bp, synthetic construct
  source 1..75: mol_type = other DNA
gcgatcaccccgcagcagcagcgcgcgctggccctgcgctttggcgatctgcatatccaccccgtctatccgcat

SEQ ID NO: 133166 - DNA, 75 bp, synthetic construct
  source 1..75: mol_type = other DNA
agtggaaagtttcctcaagctgatgccgcactggctgacccactcgtttgaaatcatgggcgggattctcccggc

SEQ ID NO: 133167 - DNA, 75 bp, synthetic construct
  source 1..75: mol_type = other DNA
gacactgacggtcatgtttttattgctgaaggcggtaacgattatgacggcgcgaaatgctgggtagctatgcca

SEQ ID NO: 133168 - DNA, 75 bp, synthetic construct
  source 1..75: mol_type = other DNA
cgtgaggcgaaaaccgttgaccacatcatccctaaagcgcatggcggcactgatgccgactgtaatctgcagagt

SEQ ID NO: 133169 - DNA, 75 bp, synthetic construct
  source 1..75: mol_type = other DNA
ggttaaactgctgtggtccaccggtgacggactgtgcctcctgaccaaacggctggagcgtgggcgcttcgcctg

SEQ ID NO: 133170 - DNA, 75 bp, synthetic construct
  source 1..75: mol_type = other DNA
ttgctatcctttacagtgcttatttcgataatgcaaaactatctaaaacagtacttgataggtttaagtcttggc

SEQ ID NO: 133171 - DNA, 75 bp, synthetic construct
  source 1..75: mol_type = other DNA
gcgttcgtgcaacttgctcgtcaggggaccacctgctgtatgatcccacatctgcaaatcgagaaagaactggcc

SEQ ID NO: 133172 - DNA, 75 bp, synthetic construct
  source 1..75: mol_type = other DNA
aaaccgcaggagagcggtatccaggccattgcggaagccgtgcgcaaacgcaacgatctgttgtttatcgtcgtt

SEQ ID NO: 133173 - DNA, 75 bp, synthetic construct
  source 1..75: mol_type = other DNA
cgctgattaccacgttgggaaatctgatagaaaacgcgctggaggcattagggccggaacccggtggcgaaatta

SEQ ID NO: 133174 - DNA, 75 bp, synthetic construct
  source 1..75: mol_type = other DNA
cgccgacatataatagagcatatactctagatcggttatataattctttagtaacacaagactctgaaaaattcg

SEQ ID NO: 133175 - DNA, 75 bp, synthetic construct
  source 1..75: mol_type = other DNA
gattttgacagccgcctgaatgaataccggaaaaataacggcctgctgccggataaaccagtatttgagatcgaa

SEQ ID NO: 133176 - DNA, 75 bp, synthetic construct
  source 1..75: mol_type = other DNA
accggaaaaataacggcctgctacctgataaaccagtatttgagattgaaaaacttaacgaggaaacggtgttag

SEQ ID NO: 133177 - DNA, 75 bp, synthetic construct
  source 1..75: mol_type = other DNA
accggaaaaataacggcctgctgccggataaaccagtatttgagatcgaaaaacttaacggtgaaacggggttgg

SEQ ID NO: 133178 - DNA, 75 bp, synthetic construct
  source 1..75: mol_type = other DNA
aaccgtgagcgtcgtctgctgcgtaacattgaacgcaccatgaagctgaccattccggaagtagaactgccgaac

SEQ ID NO: 133179 - DNA, 75 bp, synthetic construct
  source 1..75: mol_type = other DNA
cgtggtttcggtggcgagcgtcgtgaaggcggtcgtaacttcagcggtgaacgccgtgaaggtggtcgtggtgat

SEQ ID NO: 133180 - DNA, 75 bp, synthetic construct
  source 1..75: mol_type = other DNA
tactgggcgatgcacagccgcatactggcggagagcgtcgtggcggtggtcgtggtttcagtggcgagcgtcgtg

SEQ ID NO: 133181 - DNA, 75 bp, synthetic construct
  source 1..75: mol_type = other DNA
gatgaaaaatttgttccagaattatatatttggaataaaataactgacaaggcgaagattcgatttaacataagc

SEQ ID NO: 133182 - DNA, 75 bp, synthetic construct
  source 1..75: mol_type = other DNA
ccctgacagattaccaacaggcagctcaggagcggctggaaacctccgagggacgccgcgagttttggcgagcaa

SEQ ID NO: 133183 - DNA, 75 bp, synthetic construct
  source 1..75: mol_type = other DNA
gaattccgtgaccgtgatgaccgtggtccgcgcgatcgtaacgaccgtggcccgcgtggcgaccgtgaagatcgt

SEQ ID NO: 133184 - DNA, 75 bp, synthetic construct
  source 1..75: mol_type = other DNA
acaggtaatgaagccctttgatgctttcagggctgagttggccgaatcacatcgggttaaccaggctgtttggcg

SEQ ID NO: 133185 - DNA, 75 bp, synthetic construct
  source 1..75: mol_type = other DNA
gcgtgctgcaggtgatgcgctatacccagcagcatggtagtgatgaattgattttgccgcccctgacggaagcat

SEQ ID NO: 133186 - DNA, 75 bp, synthetic construct
  source 1..75: mol_type = other DNA
gcgtactggaagtgatgcgctatacccagcagcatgagagcgatgaattgattttgccgccgctggcggaagcat

SEQ ID NO: 133187 - DNA, 75 bp, synthetic construct
  source 1..75: mol_type = other DNA
ggcaatcattgccgtcagtcgtgaaccgcttatcgtctatagtgccatgatgtttgctatcctgggtctgcgtac

SEQ ID NO: 133188 - DNA, 75 bp, synthetic construct
  source 1..75: mol_type = other DNA
attaatgcaccgaccgccgtggtgccaattcgcaccatccataatattgcgctgaacccaaacttcggtggcgaa

SEQ ID NO: 133189 - DNA, 75 bp, synthetic construct
  source 1..75: mol_type = other DNA
ttacgcgcttttcatacccggattactgcattactggcaaaacaaaaagaacttatttggtccgcggaagtaaaa

SEQ ID NO: 133190 - DNA, 75 bp, synthetic construct
  source 1..75: mol_type = other DNA
tcaatggtctatatgatgaaacagaagttaagcggtcgcgatatcgactacagctggaataaccttgtgaaagag

SEQ ID NO: 133191 - DNA, 75 bp, synthetic construct
  source 1..75: mol_type = other DNA
agacaagcagcatttcgtatagataacacgctgggtagctttattgccagtgctcctttcagtcagtttgacagg

SEQ ID NO: 133192 - DNA, 75 bp, synthetic construct
  source 1..75: mol_type = other DNA
acgcaacttactgaaggcgagttgattgttgaagctggcggaagagccgaaaataccgtggtcacgggggctggc

SEQ ID NO: 133193 - DNA, 75 bp, synthetic construct
  source 1..75: mol_type = other DNA
cggtgattggcgatattgatagcggaatttatgtcaaacctgaccttcccgaagcgtatcgacaatatttactgc

SEQ ID NO: 133194 - DNA, 75 bp, synthetic construct
  source 1..75: mol_type = other DNA
tttgctgaaagggaaggcgttaaacgatgcggtgcaccgcgcggggttgcgcgtactggaagtgatgcgctatac

SEQ ID NO: 133195 - DNA, 75 bp, synthetic construct
  source 1..75: mol_type = other DNA
atgcgctgcgtaagttacgtgcggtgactacgggctatatggggacagcgtcacaaattagaatccttgccgaat

SEQ ID NO: 133196 - DNA, 75 bp, synthetic construct
  source 1..75: mol_type = other DNA
atagccagaactgcacacaacgtacatccagggcgttattatactttctctacgcaaacagaagaaacgaccgga

SEQ ID NO: 133197 - DNA, 75 bp, synthetic construct
  source 1..75: mol_type = other DNA
acttgtcgccagcaatatggggacaatagccagaactgcacacaacgtacatccagggcgttattatactttctc

SEQ ID NO: 133198 - DNA, 75 bp, synthetic construct
  source 1..75: mol_type = other DNA
caggccgggaaacatgtcgctgatgcgcaacaaattaagagcgcctgccagacactggcggataacgtacagcag

SEQ ID NO: 133199 - DNA, 75 bp, synthetic construct
  source 1..75: mol_type = other DNA
gctgcgacgatggaaccccagaccgatatccgtgaccgcacacctggcaggctggcagtgtcaggcatgtatgga

SEQ ID NO: 133200 - DNA, 75 bp, synthetic construct
  source 1..75: mol_type = other DNA
aactgctcgctgcactggttgactcgtcaccggaagccctggacacgctgaacgagctggcagcggcgctgggca

SEQ ID NO: 133201 - DNA, 75 bp, synthetic construct
  source 1..75: mol_type = other DNA
ccaatgatcgtgaaagggcagaggcggtagcggaggcagcaacaaacgcagcgaactctgctcttgacagtaaaa

SEQ ID NO: 133202 - DNA, 75 bp, synthetic construct
  source 1..75: mol_type = other DNA
gcaaaatggccccgccgaatttcttaaatgggtatttgaggtcacaccagggcgttatgcggtaacgcagtatgg

SEQ ID NO: 133203 - DNA, 75 bp, synthetic construct
  source 1..75: mol_type = other DNA
tattagctttggtggatgggtaactctgagtaatattataggccctttaatggggtttattgatcgttttgctgt

SEQ ID NO: 133204 - DNA, 75 bp, synthetic construct
  source 1..75: mol_type = other DNA
ctcaccgcaggttgtgattggcggtgccggtgaatacaacttccccggtcgttacaaggcgctttcgggcctggg

SEQ ID NO: 133205 - DNA, 75 bp, synthetic construct
  source 1..75: mol_type = other DNA
gtacgctgaacgactttctgactgcccttgatgaaggcgacctcaaacccgacgtggtgaaacgctttgaggaaa

SEQ ID NO: 133206 - DNA, 75 bp, synthetic construct
  source 1..75: mol_type = other DNA
agtcagacacaacgcgcaaattcaaaacgctgctgtgttttaaccagtattacgaaggtgagcacagtattcatc

SEQ ID NO: 133207 - DNA, 75 bp, synthetic construct
  source 1..75: mol_type = other DNA
tggcgataaagaaatcaaaattggcagtggagatgttgtgccggggtcacgacttggcacggtaaatatcagttg

SEQ ID NO: 133208 - DNA, 75 bp, synthetic construct
  source 1..75: mol_type = other DNA
tcacaaacgcgctggcaggcaaacaaccgcttaatgacgtcttaacggcaatcagcgcactgacgcaacgggcag

SEQ ID NO: 133209 - DNA, 75 bp, synthetic construct
  source 1..75: mol_type = other DNA
agcgccactggacagtccggccttcaccggcaccccaaccaccccaaccccaccggatgatgccgccggtctgga

SEQ ID NO: 133210 - DNA, 75 bp, synthetic construct
  source 1..75: mol_type = other DNA
tggtaaataccgttgttcgcttgtctgagcaggtggtcagtgacagggagagagcagaaacagctgctgatgatg

SEQ ID NO: 133211 - DNA, 75 bp, synthetic construct
  source 1..75: mol_type = other DNA
tttaatgcagttgcaagcataagagaaaatcttggggtcagattttctgatttctttaacatatcaagtagtgca

SEQ ID NO: 133212 - DNA, 75 bp, synthetic construct
  source 1..75: mol_type = other DNA
tggatgttgcttatgttcttattacaactcattccttatcatttgtcagtgatgagccaagtaagatcattgagt

SEQ ID NO: 133213 - DNA, 75 bp, synthetic construct
  source 1..75: mol_type = other DNA
agtgcaagataataaaaaaactaacttattaaatttcttcctggaaaaatgtcgtgttcaacctatatgcggttg

SEQ ID NO: 133214 - DNA, 75 bp, synthetic construct
  source 1..75: mol_type = other DNA
cttccccggtcgttatatggcactttctgggtcacgcagtaatcacggtagaaaacttggctatattggtctttt

SEQ ID NO: 133215 - DNA, 75 bp, synthetic construct
  source 1..75: mol_type = other DNA
acctttttttaagtacgtatgtacctaccggagatggatggcttactgactgggagaacctgaaggttgatgagg

SEQ ID NO: 133216 - DNA, 75 bp, synthetic construct
  source 1..75: mol_type = other DNA
gctgtcgctaccgggcgcttttggctttggtaaggcattcagtaacacagaagccctgacatttaacgggcaggc

SEQ ID NO: 133217 - DNA, 75 bp, synthetic construct
  source 1..75: mol_type = other DNA
caatattggcctgggtgatgtggtgcaggggtcacaactgggcggagttaatctttcgtgcttaatatcttctcc

SEQ ID NO: 133218 - DNA, 75 bp, synthetic construct
  source 1..75: mol_type = other DNA
ccaaccccaccggacgatgctgccggtctggaaacagcgaacgcggcatttgttcgcaaactgcttgctgcgctg

SEQ ID NO: 133219 - DNA, 75 bp, synthetic construct
  source 1..75: mol_type = other DNA
ccgagtgcaggagctacagggtacacttttccggggcgttatatggcgttatccggggtcagggactcttacgga

SEQ ID NO: 133220 - DNA, 75 bp, synthetic construct
  source 1..75: mol_type = other DNA
gtcacgaacccgtgattggcattatgggtaaaagcggggccggtaaatcctcactctgtaccctggcagtatctg

SEQ ID NO: 133221 - DNA, 75 bp, synthetic construct
  source 1..75: mol_type = other DNA
ttaatgctgacacttgagctgaaagatggcgaaaaattgcaggcgaaggccagcgatttagtctcccgcaaaaat

SEQ ID NO: 133222 - DNA, 75 bp, synthetic construct
  source 1..75: mol_type = other DNA
ttggccttgataccgttggtgatctatccgactttcttgatgcgtctgcaggtgctgagggtaaaccactgatgc

SEQ ID NO: 133223 - DNA, 75 bp, synthetic construct
  source 1..75: mol_type = other DNA
ggttgtagtattttgattaaaaagtataactcaagttattataaaaaattactacggcaaattgtcaacaaaaaa

SEQ ID NO: 133224 - DNA, 75 bp, synthetic construct
  source 1..75: mol_type = other DNA
cacagatattccggcgatggcacgaaaactggctgcccgctttgattatgtgtttgttgatacgccaggaatgaa

SEQ ID NO: 133225 - DNA, 75 bp, synthetic construct
  source 1..75: mol_type = other DNA
aatccatcagacagtgaagcgtcagaactgcgcaaacaacttaatgatgatcctgactggcttcctgttccccgt

SEQ ID NO: 133226 - DNA, 75 bp, synthetic construct
  source 1..75: mol_type = other DNA
ctatcaattgtgatgattacgataatcttgagctcgcctgccagcatcacctgttgttgacgctggagctgaaag

SEQ ID NO: 133227 - DNA, 75 bp, synthetic construct
  source 1..75: mol_type = other DNA
caaagccagacttttggcgtcgcctgggacgatcctgccaccaccgcaccagatgcgtttcgctttgatatttgt

SEQ ID NO: 133228 - DNA, 75 bp, synthetic construct
  source 1..75: mol_type = other DNA
atgaaatggttatatctctctgtcctgcttttattcagtcacacatcaatcgcatctgtgatgaataataatcat

SEQ ID NO: 133229 - DNA, 75 bp, synthetic construct
  source 1..75: mol_type = other DNA
gatggaaagagatctcccatccacaaacactattcacacgtcaaaaaggcgatggatggactgtagttccccaaa

SEQ ID NO: 133230 - DNA, 75 bp, synthetic construct
  source 1..75: mol_type = other DNA
tcaggcaggcactctttaatggggctcctaatattggtgaggctttgtatcgtacaggatatggctttcctacaa

SEQ ID NO: 133231 - DNA, 75 bp, synthetic construct
  source 1..75: mol_type = other DNA
aagagaaataaaacaccccaggccattgctattcatatgtggtccatatcaatcagaaatggtgattcgctaacc

SEQ ID NO: 133232 - DNA, 75 bp, synthetic construct
  source 1..75: mol_type = other DNA
tgcatattcctgagctgaaaaagcttggagtcattaaagacaaaaatgacctgcttaataatccctgcctgaata

SEQ ID NO: 133233 - DNA, 75 bp, synthetic construct
  source 1..75: mol_type = other DNA
ggagcttaaccgtcgcttgtttatctggggcgacaccgttgtcgagtgcgtgcttaacaaactctgcccgtcgca

SEQ ID NO: 133234 - DNA, 75 bp, synthetic construct
  source 1..75: mol_type = other DNA
ggtattttcaatattcctgcgcacatgattaatgacctcgaaaaagccaccttctccaatatttctgcgcaggcg

SEQ ID NO: 133235 - DNA, 75 bp, synthetic construct
  source 1..75: mol_type = other DNA
cctcactggatcccggtacagcgtattgtcgatcaggcaaaagggcagtgtctggggcgtgacggaattaatctt

SEQ ID NO: 133236 - DNA, 75 bp, synthetic construct
  source 1..75: mol_type = other DNA
ctgaagcagcgtcatgtgctggggtggggcaatggttatacgtgggtgaaacgtaatcgtcgtggcgaggttacc

SEQ ID NO: 133237 - DNA, 75 bp, synthetic construct
  source 1..75: mol_type = other DNA
gaaaaagtggcgataaaatcccgcgcaccgatctgcttaacggcccgaccggtgcaggtaagtcatttctggcac

SEQ ID NO: 133238 - DNA, 75 bp, synthetic construct
  source 1..75: mol_type = other DNA
gagattgaactgcataacccgtgggatttcgaagaggtttacgcctgcctgcatgatttcgcccgtggttacgag

SEQ ID NO: 133239 - DNA, 75 bp, synthetic construct
  source 1..75: mol_type = other DNA
ttgtgacatataatcccgaacttaaaaatctgaatgcactgattactgaactaaaggagcaaaattgttacgttg

SEQ ID NO: 133240 - DNA, 75 bp, synthetic construct
  source 1..75: mol_type = other DNA
ggattgacccggacatccgtgcactggtggccgcgatgaacgttcacggatttcgtacatatgcgtcctgtcagg

SEQ ID NO: 133241 - DNA, 75 bp, synthetic construct
  source 1..75: mol_type = other DNA
atgggtaaactaacactgctgttgctggctattctggtctggctacagtattcgatgtggttcggtaagaacggt

SEQ ID NO: 133242 - DNA, 75 bp, synthetic construct
  source 1..75: mol_type = other DNA
gaccggctggcaaaacagcgcggcgttctgctgacgtctgacggcgcaggtaacctgattatcacccgcgcctct

SEQ ID NO: 133243 - DNA, 75 bp, synthetic construct
  source 1..75: mol_type = other DNA
gggtgaaacggggtttgaactgctagaccgtctggcaaaacagcgaggtgttctgttgacgtctgacggagcggg

SEQ ID NO: 133244 - DNA, 75 bp, synthetic construct
  source 1..75: mol_type = other DNA
gattaacataccaattcactcgccagtacgtcgttattatcgagtaagaaatgcatttcttttgcttagaaaaaa

SEQ ID NO: 133245 - DNA, 75 bp, synthetic construct
  source 1..75: mol_type = other DNA
gggcagactgcaggtgaacgccggtggtaaagcgactgatgtcacccagaacacgggcagcgcactggttaccag

SEQ ID NO: 133246 - DNA, 75 bp, synthetic construct
  source 1..75: mol_type = other DNA
ggtgattaaccgggatggttaccagaccattaaacatggcggactggcaaccggaaccatcgtcaacaccggcgc

SEQ ID NO: 133247 - DNA, 75 bp, synthetic construct
  source 1..75: mol_type = other DNA
aggaaagctgcaggtgaatgccggcggtaaagcgtctgatgtcacccagaacacgggaggtgcactggttaccag

SEQ ID NO: 133248 - DNA, 75 bp, synthetic construct
  source 1..75: mol_type = other DNA
gacctgaccggaaaactcacacagagtgaggatgagggacttgtcatcctctggtactacgatgaatcggaccgt

SEQ ID NO: 133249 - DNA, 75 bp, synthetic construct
  source 1..75: mol_type = other DNA
gcccgttttgaaaaagaaaaccctggcatcaccgttaagcaagtgcccgtggaagaagatgcctataacactaag

SEQ ID NO: 133250 - DNA, 75 bp, synthetic construct
  source 1..75: mol_type = other DNA
ttttggttcaagcacttactgggactaaggatggagtttcgctcacagacccttgtaccggtgaagtaatttctg

SEQ ID NO: 133251 - DNA, 75 bp, synthetic construct
  source 1..75: mol_type = other DNA
tcaccctgggcgttcaggccggttatgtccacagcgtcagcggcagcagcgctgaaggttataacggtcaggcca

SEQ ID NO: 133252 - DNA, 75 bp, synthetic construct
  source 1..75: mol_type = other DNA
tcaccctgggcgttcaggccggttatgaccacagcgtcagcggcagcagcgctgaaggatataacggtcaggcca

SEQ ID NO: 133253 - DNA, 75 bp, synthetic construct
  source 1..75: mol_type = other DNA
tcaccctgggcgttcaggctggttatgcccacagcgtcagcggcagcagcgctgaaggttataacggtcaggcca

SEQ ID NO: 133254 - DNA, 75 bp, synthetic construct
  source 1..75: mol_type = other DNA
atccaggggaataagctgcaggccggtgcctttaactactccctcaaccgggacagtgatgagagctggtatctg

SEQ ID NO: 133255 - DNA, 75 bp, synthetic construct
  source 1..75: mol_type = other DNA
tcaccctgggcgttcaggcgggttatgcccacagcgtcagcggcagcagcgctgaagggtataacggtcaggcca

SEQ ID NO: 133256 - DNA, 75 bp, synthetic construct
  source 1..75: mol_type = other DNA
tcaccctgggcgttcaggccggttatggccacagcgtcagcggcagcagcgctgaagggtataacggtcaggcca

SEQ ID NO: 133257 - DNA, 75 bp, synthetic construct
  source 1..75: mol_type = other DNA
gggggggggggggtggttcgctttttgacaagcagagccttaccccgcgagctcagacgtactggtatcatccgc

SEQ ID NO: 133258 - DNA, 75 bp, synthetic construct
  source 1..75: mol_type = other DNA
cggtacaaaaaccgaagcactttccgggaaaagatgcagaaaccaactataagctgggtacgcagcttccttatc

SEQ ID NO: 133259 - DNA, 75 bp, synthetic construct
  source 1..75: mol_type = other DNA
aaaacattccccaaaacccccgaaggcaaggctgcggagaccaactataaactcggcacccagctgccatacttg

SEQ ID NO: 133260 - DNA, 75 bp, synthetic construct
  source 1..75: mol_type = other DNA
cctaagaattgatttttatacaaaagacaacgacttcacaaagggactaagcgttctttcagaggtaaacaaacg

SEQ ID NO: 133261 - DNA, 75 bp, synthetic construct
  source 1..75: mol_type = other DNA
catcccctggcaaataacccgaatgtaacgctggctgaactggcgaaagaacccttcgtcttttttgatccgcac

SEQ ID NO: 133262 - DNA, 75 bp, synthetic construct
  source 1..75: mol_type = other DNA
gttactttgttgctgttgcggaagagctgcatttcgggcgcgccgctgcccgcctgaatatttcgcaaccaccgc

SEQ ID NO: 133263 - DNA, 75 bp, synthetic construct
  source 1..75: mol_type = other DNA
ccgatcagacctttgccgatgatctccagcagctgctgcactgcggcaaaagtttccgcgtttacagcaacccgg

SEQ ID NO: 133264 - DNA, 75 bp, synthetic construct
  source 1..75: mol_type = other DNA
acggcagaaagcgcagagtatggttggttgcagatctcgaccaattcgcagcccggtttctgtaaggggcaaatg

SEQ ID NO: 133265 - DNA, 75 bp, synthetic construct
  source 1..75: mol_type = other DNA
ccgcgctcactacgctgatgcacgcacttattgatattgaatgcacggcagagcttgcgcagggagaagaacaga

SEQ ID NO: 133266 - DNA, 75 bp, synthetic construct
  source 1..75: mol_type = other DNA
attgataaatgcatactgtgctgtgaatggtagcatactattatatattgataatgaaaatattcttctcaaaat

SEQ ID NO: 133267 - DNA, 75 bp, synthetic construct
  source 1..75: mol_type = other DNA
gaagggcttgcgatcgaacggggcgaccttttctatgcatgtccgcgagccagcgtcttttatggcacggcgctc

SEQ ID NO: 133268 - DNA, 75 bp, synthetic construct
  source 1..75: mol_type = other DNA
cacagcaaagcaagccaacgcaagcagagcaatccatggctgattatgaaagcagtataatgcttgaagtacctt

SEQ ID NO: 133269 - DNA, 75 bp, synthetic construct
  source 1..75: mol_type = other DNA
tcgccggatcggcgttaactgcccagtcccagcgcctgaacgtggcggccagtaatctggcgaatgctgatagcg

SEQ ID NO: 133270 - DNA, 75 bp, synthetic construct
  source 1..75: mol_type = other DNA
aatcaaccactgatttaactccattttttaattacctgaaagaaaaaatatttttattacaacaatatcatttgc

SEQ ID NO: 133271 - DNA, 75 bp, synthetic construct
  source 1..75: mol_type = other DNA
ggcgcagtgatgattacattacggcgctttgcgactggatgtgcgtgttgcatgaacaggggctgattgatgcag

SEQ ID NO: 133272 - DNA, 75 bp, synthetic construct
  source 1..75: mol_type = other DNA
agcggttgaactgaccgtgcgggcgaaagcagaaaaagaagccgcagagatgcaggcggcggcgatcgttgagtt

SEQ ID NO: 133273 - DNA, 75 bp, synthetic construct
  source 1..75: mol_type = other DNA
cagaagcgcaacgtgcgctgaacgacgctatcaacgtactttctgacgagcaaaccagccttaaattcaaactgg

SEQ ID NO: 133274 - DNA, 75 bp, synthetic construct
  source 1..75: mol_type = other DNA
cgctgaacgacgctatcaacgtactttctgacgagcaaaccagccttaaattcaaactggcgctattacagtcgt

SEQ ID NO: 133275 - DNA, 75 bp, synthetic construct
  source 1..75: mol_type = other DNA
ggggatgctggacttccaggcgatggggatcccggttgtcgattatggcaacaacatccgccaggtggccttcaa

SEQ ID NO: 133276 - DNA, 75 bp, synthetic construct
  source 1..75: mol_type = other DNA
tcggcaaaccgttccgcgatctcggtgaagtcagtggcgactcttgccaggcctctaatcaggactctccgccga

SEQ ID NO: 133277 - DNA, 75 bp, synthetic construct
  source 1..75: mol_type = other DNA
gccaatgcggttttactgcatagctgtgaagtcaccagcggtacgccaggctgctatcgtcaggctgtatgtatc

SEQ ID NO: 133278 - DNA, 75 bp, synthetic construct
  source 1..75: mol_type = other DNA
tcagtacgcttgaaatcaaatcgggttatggcttaacgctggaagatgaagcacgttgtttacgcgtgatccgcc

SEQ ID NO: 133279 - DNA, 75 bp, synthetic construct
  source 1..75: mol_type = other DNA
atggatttgcagggcagggtggtcacgccgggactggtggattgtcatagccacgcggtgtttggcggcgaccgg

SEQ ID NO: 133280 - DNA, 75 bp, synthetic construct
  source 1..75: mol_type = other DNA
gctgttgggcaatgcggcggaaattgttcctgaactggtgaaacgtgcacgtcagggggcgatcaagccggatct

SEQ ID NO: 133281 - DNA, 75 bp, synthetic construct
  source 1..75: mol_type = other DNA
tggctccaggcgaaaagtggccgggaagtgacgatgggtgagtttaccgcatccttaaccgcaacgtttgagtac

SEQ ID NO: 133282 - DNA, 75 bp, synthetic construct
  source 1..75: mol_type = other DNA
cctccggggcgcagggggtggggattggtatggaaaaaaccgacggaacggcggtgcccatcaacaacaccagcg

SEQ ID NO: 133283 - DNA, 75 bp, synthetic construct
  source 1..75: mol_type = other DNA
atgaataccgtttgtacccattgtcaggccatcaaccgcattcccgacgaacggattgacgatgcggcaaaatgc

SEQ ID NO: 133284 - DNA, 75 bp, synthetic construct
  source 1..75: mol_type = other DNA
gatcatcaaagtcttcgatttcttcgaagcctgggcggaggaacgtaacatcacattgaagttcaacggggtgca

SEQ ID NO: 133285 - DNA, 75 bp, synthetic construct
  source 1..75: mol_type = other DNA
ctgcaacaaatcagcaccacactgagccgtatactccagtccccggcagatccggatgaaaaaaaagtaagcaaa

SEQ ID NO: 133286 - DNA, 75 bp, synthetic construct
  source 1..75: mol_type = other DNA
tttctaatgccctgcgttatacgccacccagtgaggctattgtagtgcgctgccagacggtcaatcatcaggtgc

SEQ ID NO: 133287 - DNA, 75 bp, synthetic construct
  source 1..75: mol_type = other DNA
tcggctacgcgctgttagctggcctgctgctgacgggtagcactcgtaccctggccgtggacaataacctgcatt

SEQ ID NO: 133288 - DNA, 75 bp, synthetic construct
  source 1..75: mol_type = other DNA
aggttaaaacccgtactgccgaacagaatgcacgtattgcggcttttgaagctgaacgtcgtcgtgaagcacgag

SEQ ID NO: 133289 - DNA, 75 bp, synthetic construct
  source 1..75: mol_type = other DNA
ggcaccgcttattgactctctcctcaatgaaatcggcgtttcaggcggttcgctggcggcattgacttcaccatt

SEQ ID NO: 133290 - DNA, 75 bp, synthetic construct
  source 1..75: mol_type = other DNA
caatcatgattttcaaaaacggtcaggttgtcgacatgcttaatggcgcagtaccaaaagcacctttcgatagct

SEQ ID NO: 133291 - DNA, 75 bp, synthetic construct
  source 1..75: mol_type = other DNA
aacggaagacagcgaactgcccggatttctggctatagacgcctcatcgtcagcgtccggggtcgggattggtat

SEQ ID NO: 133292 - DNA, 75 bp, synthetic construct
  source 1..75: mol_type = other DNA
ttcagagcctggctacaggcgaaaagcggccgtgatgtgacgataggtgatttcaccgccagcctgacagctacg

SEQ ID NO: 133293 - DNA, 75 bp, synthetic construct
  source 1..75: mol_type = other DNA
tcggggtatcgatgtgactcaacagataatcaagtcaatcttacaacacaacgtctttatagcgagcctgacaga

SEQ ID NO: 133294 - DNA, 75 bp, synthetic construct
  source 1..75: mol_type = other DNA
caataaattcagttgctctttatggagcatatcaaacatcagaaacaacgcaagatagaaaagttattctactag

SEQ ID NO: 133295 - DNA, 75 bp, synthetic construct
  source 1..75: mol_type = other DNA
gaaaaattacaagagcttgaggaaaaaatcaaacatcaggataatataatcgcatcggaaaaaacatttaatatc

SEQ ID NO: 133296 - DNA, 75 bp, synthetic construct
  source 1..75: mol_type = other DNA
atggacatgcattcaggaacctttaacccacaggatttcgcctggcaaggcttaacgctgacacccgcagcggcg

SEQ ID NO: 133297 - DNA, 75 bp, synthetic construct
  source 1..75: mol_type = other DNA
gcgggctttggctatgtgctcgacagtgttagcgagccggacaaagacgatctgctgtttgaacacgacggcgcg

SEQ ID NO: 133298 - DNA, 75 bp, synthetic construct
  source 1..75: mol_type = other DNA
aggatttaaaccattgcgttctgctggctggaatcatacaactgttggtaaaactctaagttcagttgctttata

SEQ ID NO: 133299 - DNA, 75 bp, synthetic construct
  source 1..75: mol_type = other DNA
attccaactatgtgggcgatatttttggcgcaccgctggcgatggaagcattaatggccttcttcctcgaatcca

SEQ ID NO: 133300 - DNA, 75 bp, synthetic construct
  source 1..75: mol_type = other DNA
gcaaaccagttacaaatggcgcgaactgaagcaacgtcacatccttggctggggaaatgggtatacctgggtgaa

SEQ ID NO: 133301 - DNA, 75 bp, synthetic construct
  source 1..75: mol_type = other DNA
atctatgtcctgtcttccagccttgcccagatgccgttgcatgttatgcgcaggcacaatgggaaggttgagccc

SEQ ID NO: 133302 - DNA, 75 bp, synthetic construct
  source 1..75: mol_type = other DNA
aatcgctagaccgattaagtcgaagaggtattgatgttacccaacaaatcattaagtcaattctgcaaaaaaacg

SEQ ID NO: 133303 - DNA, 75 bp, synthetic construct
  source 1..75: mol_type = other DNA
tttggcacactggcgataatcggcgcgctgcaacttggagacagttctgcttatgaagtcgcacgcgttcagccg

SEQ ID NO: 133304 - DNA, 75 bp, synthetic construct
  source 1..75: mol_type = other DNA
gatgcagaaatatgcccgtctggggccgagcggatgcagagtgaacaaccgacgcagcaacaggggtaaaggaga

SEQ ID NO: 133305 - DNA, 75 bp, synthetic construct
  source 1..75: mol_type = other DNA
cgattattcatccctgtcttgcggtggtgtcgcggcgtcatatggatggatgggtgccggtatttacccagggcg

SEQ ID NO: 133306 - DNA, 75 bp, synthetic construct
  source 1..75: mol_type = other DNA
tgaggaatcagggctgtactataaccgtcaccggtactacgatccgttgcaggggcggtatattactcaggaccc

SEQ ID NO: 133307 - DNA, 75 bp, synthetic construct
  source 1..75: mol_type = other DNA
ccatggatgtatcagcgccaacaccaagttcgatgaatgaaagcacggcgaagggaatctttaaatatttaaaag

SEQ ID NO: 133308 - DNA, 75 bp, synthetic construct
  source 1..75: mol_type = other DNA
tgaaaccggtgtttgaaaccctgcttccgcgtatcgctgaggaactgtcttctctgaccgaagaggacaccaatg

SEQ ID NO: 133309 - DNA, 75 bp, synthetic construct
  source 1..75: mol_type = other DNA
cgattattcatccctgtcttgcggtggtgtcgcggcgtcatatggatggatgggtgccggtattcaacagcggtc

SEQ ID NO: 133310 - DNA, 75 bp, synthetic construct
  source 1..75: mol_type = other DNA
aaacttctgccggtactggcgggaatgatgtcagatttcgggagcattcgctctcgtttgcctgctgacggcaaa

SEQ ID NO: 133311 - DNA, 75 bp, synthetic construct
  source 1..75: mol_type = other DNA
gggatgcttgtctttaagtgttccatatatgcttttgcaattgcaacactacttgaattcatctttgcttcaata

SEQ ID NO: 133312 - DNA, 75 bp, synthetic construct
  source 1..75: mol_type = other DNA
gggggcgcatgagtatacagtttgtgaaggaattgcgtagccgtgagccggatcactattaccgcgcaggaatac

SEQ ID NO: 133313 - DNA, 75 bp, synthetic construct
  source 1..75: mol_type = other DNA
gcgggctttggctatgtgctcgatagcgtcagcgagccggacaaagacgatctgctttttgaacacgacggcgcg

SEQ ID NO: 133314 - DNA, 75 bp, synthetic construct
  source 1..75: mol_type = other DNA
ttaccgttattgcgctggtcctcaccctgttcgttatcgggctgatatttgcccgcctgtaccgtcgggcatcgg

SEQ ID NO: 133315 - DNA, 75 bp, synthetic construct
  source 1..75: mol_type = other DNA
tgtggaaaccacccgccagactgcagaggccggccgtaccaaacaggttgccctgattgctgctgctcaggaagc

SEQ ID NO: 133316 - DNA, 75 bp, synthetic construct
  source 1..75: mol_type = other DNA
gactacgggtggaatgacaacggcgacctggtgcgcatcagcggcccgcgacagacgcgggaatacggctacagt

SEQ ID NO: 133317 - DNA, 75 bp, synthetic construct
  source 1..75: mol_type = other DNA
accggcgatattgttaacgcaggggagattcgctttgataatcagacgacaccggatgccgcgctgagccgtgct

SEQ ID NO: 133318 - DNA, 75 bp, synthetic construct
  source 1..75: mol_type = other DNA
ggtgataccgggcagtttgttcgcggggatgccgtacgtaccactatcaataaaaatggtcgtcagattgtggct

SEQ ID NO: 133319 - DNA, 75 bp, synthetic construct
  source 1..75: mol_type = other DNA
gccggtgaactggtgggtacagccttctgttatccgcaccttcagctcccggggggacatgagcatgggtacagc

SEQ ID NO: 133320 - DNA, 75 bp, synthetic construct
  source 1..75: mol_type = other DNA
agggaacccgccacagcatgaaagcatcatcggacaataacgacttccgcgcccggggctggggctggctgggct

SEQ ID NO: 133321 - DNA, 75 bp, synthetic construct
  source 1..75: mol_type = other DNA
ggcagtgcacaacatgtgcgtgccggtttccgtctgggcagccacaacgatatgagctttggtgaaggcacctca

SEQ ID NO: 133322 - DNA, 75 bp, synthetic construct
  source 1..75: mol_type = other DNA
gcaatacctctgaccagctggtgattaatggtggtcaggcaaccggcaaaacctggcttgcgtttacaaatgtcg

SEQ ID NO: 133323 - DNA, 75 bp, synthetic construct
  source 1..75: mol_type = other DNA
accctgggcgttcaggccggttatgcccacagtgtcagcggcaacagcgctgaaggctataacggtcaggccacg

SEQ ID NO: 133324 - DNA, 75 bp, synthetic construct
  source 1..75: mol_type = other DNA
tcaccttctgcgcggacgcttcccaacttaaaaactcgaaaccggatccggaaatctttctcgctgcctgtgccg

SEQ ID NO: 133325 - DNA, 75 bp, synthetic construct
  source 1..75: mol_type = other DNA
gagtccctgcggcgcattctgcaacacgggggcaaagagggcgactttaacgtgcaagagcgggcgcaactggcg

SEQ ID NO: 133326 - DNA, 75 bp, synthetic construct
  source 1..75: mol_type = other DNA
tgtacatggctacgcactggataccacactgaacggcggtaaccagtatgtgcacaacggcggtacagcctctga

SEQ ID NO: 133327 - DNA, 75 bp, synthetic construct
  source 1..75: mol_type = other DNA
agagcaccttgacgagatttatcaggtgtttggaccatatactgcttaccaactggagcaaatgactcatcagga

SEQ ID NO: 133328 - DNA, 75 bp, synthetic construct
  source 1..75: mol_type = other DNA
ccttcagtatcactgacaatctgatgctggagccacaactgcagtacacctggcagggactctccctggatgacg

SEQ ID NO: 133329 - DNA, 75 bp, synthetic construct
  source 1..75: mol_type = other DNA
tttgattttcacgaatttatttattaatatggggttggctcaaactttgtgggttttaaatgagggtaaatcaag

SEQ ID NO: 133330 - DNA, 75 bp, synthetic construct
  source 1..75: mol_type = other DNA
cactgttgttaacagtgacggctggcagattatcaaggaaggtggtctggcggatttcaccaccgttaaccagaa

SEQ ID NO: 133331 - DNA, 75 bp, synthetic construct
  source 1..75: mol_type = other DNA
ccgtctggagggtgacctgctcagaacagaggttgccggtatgtctctgacgacaggggtgtatggtgccgcagg

SEQ ID NO: 133332 - DNA, 75 bp, synthetic construct
  source 1..75: mol_type = other DNA
gcttatcgtgctgaagtccccctgtatgcctccatgctgacacaggcaatggactatgaccggattctggcaggc

SEQ ID NO: 133333 - DNA, 75 bp, synthetic construct
  source 1..75: mol_type = other DNA
caaaaatggccggcaggttatctggtcttcggggatggcacgggacaccctcatttacgccggcggtgaccagac

SEQ ID NO: 133334 - DNA, 75 bp, synthetic construct
  source 1..75: mol_type = other DNA
aacacccgactggagggagggaaccagtatgtgcacaagtatggacttgcactgaacacggtaattaacgagggg

SEQ ID NO: 133335 - DNA, 75 bp, synthetic construct
  source 1..75: mol_type = other DNA
agggaacaacagagccacacgtcagaaacttccatcagccggatctgcggcactgtaacccttcacctgccggta

SEQ ID NO: 133336 - DNA, 75 bp, synthetic construct
  source 1..75: mol_type = other DNA
ctgaacggcggtgagcagtgggtacatgaaggcgggattgcaacgggtactgtcattaatgagaagggctggcag

SEQ ID NO: 133337 - DNA, 75 bp, synthetic construct
  source 1..75: mol_type = other DNA
aatggcacgtcactggacctgcaggccggactggaagcccgtgtccgggaaaatatcaccctgggcgttcaggcc

SEQ ID NO: 133338 - DNA, 75 bp, synthetic construct
  source 1..75: mol_type = other DNA
tgcccttcagtatcactgacaacctgatgctggtgcgtattttcatgaaaggagatcactcaataacttccatcg

SEQ ID NO: 133339 - DNA, 75 bp, synthetic construct
  source 1..75: mol_type = other DNA
gcggcgttagcggtagatcgcgttatcggcatggaaaacgccatgccgtggaatctgcctgccgatctcgcctgg

SEQ ID NO: 133340 - DNA, 75 bp, synthetic construct
  source 1..75: mol_type = other DNA
cgtccgtctggagggtgacctgctcagaacagaggttgccggtatgtctgtgaccgcgggggtatatggtgctgc

SEQ ID NO: 133341 - DNA, 75 bp, synthetic construct
  source 1..75: mol_type = other DNA
atgacaaccagattgtcctcggtacggccaacggaatgaccatcagtaccggtctggagtatggggcggataacg

SEQ ID NO: 133342 - DNA, 75 bp, synthetic construct
  source 1..75: mol_type = other DNA
gccgatctcgcttggtttaaacgcaacaccttaaataaacctgtgattatgggacgccatacctgggaatccatt

SEQ ID NO: 133343 - DNA, 75 bp, synthetic construct
  source 1..75: mol_type = other DNA
aaagcgcaaaaactgtatctgacgcatatcgacgcggaagtggaaggcgacacccatttcccggattacgagccg

SEQ ID NO: 133344 - DNA, 75 bp, synthetic construct
  source 1..75: mol_type = other DNA
catatcgacgcagaagtggaaggcgacacccatttcccggattacgagccggatgactgggaatcggtattcagc

SEQ ID NO: 133345 - DNA, 75 bp, synthetic construct
  source 1..75: mol_type = other DNA
ctgggcgttcaggccggttatgcccacagcgtcagcggcagcagcgctgaaggctataacggtcaggccacgctg

SEQ ID NO: 133346 - DNA, 75 bp, synthetic construct
  source 1..75: mol_type = other DNA
agcgcggcacagccctgaagctgaccggcagcacagtgctgaacggtgccattgaccccacgaatgtcaccctga

SEQ ID NO: 133347 - DNA, 75 bp, synthetic construct
  source 1..75: mol_type = other DNA
catgacgttctcaccctcacagaatggcacatcactggacctgcaggccggactggaagcccgtgtccgggaaaa

SEQ ID NO: 133348 - DNA, 75 bp, synthetic construct
  source 1..75: mol_type = other DNA
atgaaagcgtcatcggacaataacgacttccgcgcccggggccggggctggctgggctcactggaaaccggtctg

SEQ ID NO: 133349 - DNA, 75 bp, synthetic construct
  source 1..75: mol_type = other DNA
gtgaagttcgggcatggcagtgcacaacatgtgcgtgccggtttccgtctgggcagccacaacgatatgaccttt

SEQ ID NO: 133350 - DNA, 75 bp, synthetic construct
  source 1..75: mol_type = other DNA
tggtcttcgggggtatcccgggacactctcatttacacaggcggtgaccagacggtacacggagaggcacataac

SEQ ID NO: 133351 - DNA, 75 bp, synthetic construct
  source 1..75: mol_type = other DNA
cacaacgatatgaactttggtaaaggcacctcatcccgtgacaccctgcgcgacagtgccaaacacagtgtgcgt

SEQ ID NO: 133352 - DNA, 75 bp, synthetic construct
  source 1..75: mol_type = other DNA
acgtcaccactatatcgattcaggttatgaagaagggttttattcgtacacaccagttcttctccagaaaggggc

SEQ ID NO: 133353 - DNA, 75 bp, synthetic construct
  source 1..75: mol_type = other DNA
caggccggggcctttaactacaccctcaaccgggacagtgatgagagctggtatctgcgcagtgaaaatgcttat

SEQ ID NO: 133354 - DNA, 75 bp, synthetic construct
  source 1..75: mol_type = other DNA
acgggggtaaagagggcgattttaacccacaggaacgggcgcaactggcgtatcgcaaaaatctgctttacgtcc

SEQ ID NO: 133355 - DNA, 75 bp, synthetic construct
  source 1..75: mol_type = other DNA
tatcgcaaaaatctgctctacgtccactcactgcgcgaactgacggttaatgccgttctgccggggatccggcct

SEQ ID NO: 133356 - DNA, 75 bp, synthetic construct
  source 1..75: mol_type = other DNA
tagcggattacctgctttgctttgctcaagagcatggggatgttatgacgccgctgaaactgcaaaaaatggtgt

SEQ ID NO: 133357 - DNA, 75 bp, synthetic construct
  source 1..75: mol_type = other DNA
tgatcagtatctgacggagcgctacaaccgggttgagcaggaaaatggggaaatgcgagacacctttaaaccgtt

SEQ ID NO: 133358 - DNA, 75 bp, synthetic construct
  source 1..75: mol_type = other DNA
tgagtgaactgccggtgaactggtgggtacagccttctgttatccgcactttcagctctcggggtgacatgagca

SEQ ID NO: 133359 - DNA, 75 bp, synthetic construct
  source 1..75: mol_type = other DNA
ccggtgtggcggttgcgctgtctcttgctgctgtcacatcagtcccggcactggctgctgacaaggttgtacagg

SEQ ID NO: 133360 - DNA, 75 bp, synthetic construct
  source 1..75: mol_type = other DNA
caaggttacggacagacacggcgcgtgccgttgttacaaattgatgattttgagttgagtgaatcctctgccatt

SEQ ID NO: 133361 - DNA, 75 bp, synthetic construct
  source 1..75: mol_type = other DNA
ttgcaggaaaaaggcctgtcgtttcatatcaagaccatcgacctcgacagcggtgaacatttgcagccgacgtgg

SEQ ID NO: 133362 - DNA, 75 bp, synthetic construct
  source 1..75: mol_type = other DNA
ctggctgctgacacggttgtacaggcgggggaaaccgtgaacgacggaacactgacaaatcatgacaaccagatt

SEQ ID NO: 133363 - DNA, 75 bp, synthetic construct
  source 1..75: mol_type = other DNA
tgaccaccagtaacctcaccggccagggcggcaccatcaatatgcgtgtcagccttgatggcagtaatgcctcag

SEQ ID NO: 133364 - DNA, 75 bp, synthetic construct
  source 1..75: mol_type = other DNA
aacaccactgtcggacatcgtggaacactgacgctggctgccgggggaagtctgagtggcagaacacagctcagt

SEQ ID NO: 133365 - DNA, 75 bp, synthetic construct
  source 1..75: mol_type = other DNA
tctggaatccggcggtcgtctggatgtactggagagccattcagcacagaataccctggtggatgacggcggtac

SEQ ID NO: 133366 - DNA, 75 bp, synthetic construct
  source 1..75: mol_type = other DNA
aaaccgccaccaaagaatcttccgaaagatgggtgaaaacctcgtccctgcgtactgatggctttgtgcgcaata

SEQ ID NO: 133367 - DNA, 75 bp, synthetic construct
  source 1..75: mol_type = other DNA
agctcagcggggttacatgctgacgatggcggaagaagaacgtgctcatgttgaatgtgccgacctgatgaatga

SEQ ID NO: 133368 - DNA, 75 bp, synthetic construct
  source 1..75: mol_type = other DNA
gtatttgaatattcctcgtcagtcccttgtgtgctttttttagatgaatttgatgcgctcgcatcagcccgcggg

SEQ ID NO: 133369 - DNA, 75 bp, synthetic construct
  source 1..75: mol_type = other DNA
ccgtatccatgggaaatggcggtgtactgctggccgattccggcgccgctgtcagtggtacccggagcgacggaa

SEQ ID NO: 133370 - DNA, 75 bp, synthetic construct
  source 1..75: mol_type = other DNA
atcagtgccggaggcggacagagccttcagggacgggcagtgaacaccacgctgaatggtggcgaacagtggatg

SEQ ID NO: 133371 - DNA, 75 bp, synthetic construct
  source 1..75: mol_type = other DNA
gttcaggccggttatgcccacagcgtcagcggcagcagcgctgaaggttataacggtcaggccacgctgaatgtg

SEQ ID NO: 133372 - DNA, 75 bp, synthetic construct
  source 1..75: mol_type = other DNA
tcagtgccggtggaggacagaatctgcgcgggcaggcttccggtacagtccttaacggcggtgagcaatggatac

SEQ ID NO: 133373 - DNA, 75 bp, synthetic construct
  source 1..75: mol_type = other DNA
cacagtgtgagtgaactgccggtgaactggtgggtacagccttctgttatccgcaccttcagctcccggggtgac

SEQ ID NO: 133374 - DNA, 75 bp, synthetic construct
  source 1..75: mol_type = other DNA
ataaaccgccttggagcattctcggttgtggagggtaaagctgataatgtcgtactggaaaatggcggacgcctg

SEQ ID NO: 133375 - DNA, 75 bp, synthetic construct
  source 1..75: mol_type = other DNA
cggcaggcaagtttccgtattttacggggaatgatgtcgccagcttggcaaccctgacaaaagtcgggcgggata

SEQ ID NO: 133376 - DNA, 75 bp, synthetic construct
  source 1..75: mol_type = other DNA
gcactgaccggaacgccaacaacaccaactgcgcgacagggaacgaataatacccaaatcgcaagcacggctttc

SEQ ID NO: 133377 - DNA, 75 bp, synthetic construct
  source 1..75: mol_type = other DNA
ataatcagacgacaccggatgccgtgctgagccgtgctgttgcaaaaggcgactccccggtaacgttccataaac

SEQ ID NO: 133378 - DNA, 75 bp, synthetic construct
  source 1..75: mol_type = other DNA
tcaccctgggcgttcaggcaggttatgcccacagcgtcagcggcagcagcgctgaaggatataacggtcaggcca

SEQ ID NO: 133379 - DNA, 75 bp, synthetic construct
  source 1..75: mol_type = other DNA
ccaacttatacagcaaataaaccaacaggcctgacagatggaactgtatatgtaatttacagttcgcacattaaa

SEQ ID NO: 133380 - DNA, 75 bp, synthetic construct
  source 1..75: mol_type = other DNA
gtaacaatgccacaagccagttccgtggtttacataagcctgattggtggcgcagggtataacgttggctacccg

SEQ ID NO: 133381 - DNA, 75 bp, synthetic construct
  source 1..75: mol_type = other DNA
cggacaataacgacttccgcgcccggggctggggctggctgggctcactggaaaccggtctgcccttcagtatca

SEQ ID NO: 133382 - DNA, 75 bp, synthetic construct
  source 1..75: mol_type = other DNA
gcttttttattcaccctctgtaaggaaaagctgatgaaacgacatctgaacaccagctacaggctggtatggaat

SEQ ID NO: 133383 - DNA, 75 bp, synthetic construct
  source 1..75: mol_type = other DNA
gtgtcaccatgacatccggtggtgccctgattgcagacagtggtgccactgttgaggggaccaatgccagcggta

SEQ ID NO: 133384 - DNA, 75 bp, synthetic construct
  source 1..75: mol_type = other DNA
ggcatgcgctggataccacactgaatggcggttaccagtatgtgcacagggacggacttgcgctgaacacggtaa

SEQ ID NO: 133385 - DNA, 75 bp, synthetic construct
  source 1..75: mol_type = other DNA
cctggcagtgtctgccggtggtaaggcgacaggtgtcaccatgacatccggtggtgccctgattgcagacagtgg

SEQ ID NO: 133386 - DNA, 75 bp, synthetic construct
  source 1..75: mol_type = other DNA
gccggcggcgaccagactgtacatggtcacgcactggataccacgctgaatggggggtaccagtatgtgcacaac

SEQ ID NO: 133387 - DNA, 75 bp, synthetic construct
  source 1..75: mol_type = other DNA
tatcaagacagatttaggtccagcttctcaggaagtggatctgattatttcagtggaaggcgtacagcagaagta

SEQ ID NO: 133388 - DNA, 75 bp, synthetic construct
  source 1..75: mol_type = other DNA
tcaggggcaggcagtgaacaccactctgaacggcggtgagcagtgggtacatgaaggcgggattgcaacggttac

SEQ ID NO: 133389 - DNA, 75 bp, synthetic construct
  source 1..75: mol_type = other DNA
ttatgtgaagttcgggcatggcagtgcacaacatgtgcgtgccggtttccgtctgggcagccacaacgatatgag

SEQ ID NO: 133390 - DNA, 75 bp, synthetic construct
  source 1..75: mol_type = other DNA
tcaccctgggcgttcaggccggttatgtccacagcgtcaacggcagcagcgctgaaggttatagcggtcaggcca

SEQ ID NO: 133391 - DNA, 75 bp, synthetic construct
  source 1..75: mol_type = other DNA
aggtcagcacgcctttgttaatttccgcatccagcaccttggctatagctggttatacggcacctttaaagattt

SEQ ID NO: 133392 - DNA, 75 bp, synthetic construct
  source 1..75: mol_type = other DNA
atgttctctgccggttcagcggttgccgccgattacaaaattgacaaagaaggtcagcacgcctttgttaatttc

SEQ ID NO: 133393 - DNA, 75 bp, synthetic construct
  source 1..75: mol_type = other DNA
aaatggtcgtcaggtcgtgctggaggggggaacagccagtgatacggttattcgtgacggcggggggcagagcct

SEQ ID NO: 133394 - DNA, 75 bp, synthetic construct
  source 1..75: mol_type = other DNA
acaaaccgtctggggaatttcacggtggaaaacggtaaggctgacggtgttgttctggaatccggcggtcgtctg

SEQ ID NO: 133395 - DNA, 75 bp, synthetic construct
  source 1..75: mol_type = other DNA
ggttatgtgaagttagggcatggcagtgcacaacatgtgcgtgccggtttccgtctgggcagccacaacgatatg

SEQ ID NO: 133396 - DNA, 75 bp, synthetic construct
  source 1..75: mol_type = other DNA
cagtatacctggcagggactctccctggatgacggccaggataacgccggttatgtgaagttcgggcatggcagt

SEQ ID NO: 133397 - DNA, 75 bp, synthetic construct
  source 1..75: mol_type = other DNA
aagttcgggcatggcagtacacaacatgtgcgtgccggcttccgtctgggcagccacaacgatatgacctttggc

SEQ ID NO: 133398 - DNA, 75 bp, synthetic construct
  source 1..75: mol_type = other DNA
tcagggtggcaccatcaatatgcgtgttcgccttgatggcagcaatgcctctgaccagctggtgattaatggtgg

SEQ ID NO: 133399 - DNA, 75 bp, synthetic construct
  source 1..75: mol_type = other DNA
gatagaaaacgcgctggaagcattagggccggaacccggtggcgaaattagcgtaacattgcactaccgtcacgg

SEQ ID NO: 133400 - DNA, 75 bp, synthetic construct
  source 1..75: mol_type = other DNA
atgtcgctatcaatcgcggttttctggcgcaggctttacgcgtatttacccccatctacgatgaaaatcataaac

SEQ ID NO: 133401 - DNA, 75 bp, synthetic construct
  source 1..75: mol_type = other DNA
gcagaacacagctcagtaaaggtgccagcatggtactgaatggcgatgtggtcagtaccggcgatattgttaacg

SEQ ID NO: 133402 - DNA, 75 bp, synthetic construct
  source 1..75: mol_type = other DNA
gtgggtacagccttctgttatccgtaccttcagttcccggggagacatgagcatgggtacagccgcagccggcag

SEQ ID NO: 133403 - DNA, 75 bp, synthetic construct
  source 1..75: mol_type = other DNA
aaaactgaagtacgtaaactgatgcagcgactcgacggtctggtcaactatgctgacgcacttcgtgaacgatcc

SEQ ID NO: 133404 - DNA, 75 bp, synthetic construct
  source 1..75: mol_type = other DNA
gcgcaagaactgcttaattatcacaaatcccaggatgacgaaaagctatcgacactgagtcaggcatggtcgcag

SEQ ID NO: 133405 - DNA, 75 bp, synthetic construct
  source 1..75: mol_type = other DNA
ggaatggcacgtcactggacctgcaggccggactggaagcccgtgtccgggaaaatatcaccctgggcgttcagg

SEQ ID NO: 133406 - DNA, 75 bp, synthetic construct
  source 1..75: mol_type = other DNA
cagattgtcaaaaacgggggtgtggccgggaataccaccgttaatcagaaaggcaaactgcaggtgaacgccggt

SEQ ID NO: 133407 - DNA, 75 bp, synthetic construct
  source 1..75: mol_type = other DNA
gcggggtactgctggccgattccggtgccgctgtcagtggtacccggagcgacggaaaggcattccgtatcggag

SEQ ID NO: 133408 - DNA, 75 bp, synthetic construct
  source 1..75: mol_type = other DNA
ctggctgccgggggaagtctgagtggcagaacacagctcagtaaaggtgccagcatggtactgaatggcgatgtg

SEQ ID NO: 133409 - DNA, 75 bp, synthetic construct
  source 1..75: mol_type = other DNA
ccgtcagctcccggggtgacatgagcatgggtacagccgccgccggcagtaacatgacgttctcaccgtcccgga

SEQ ID NO: 133410 - DNA, 75 bp, synthetic construct
  source 1..75: mol_type = other DNA
gcaaccgtcaccggtagcaaccgtctgggcaatttcgcggtggaaaacggtaaggctgacggtgttgttctggag

SEQ ID NO: 133411 - DNA, 75 bp, synthetic construct
  source 1..75: mol_type = other DNA
aatgaaatccccgtggttctgaattattacggttacggtggcggggaagttttgcccgcaggcgtagctgtagcc

SEQ ID NO: 133412 - DNA, 75 bp, synthetic construct
  source 1..75: mol_type = other DNA
ccctgagccagtggcgggagtggcggccacgtataccctgaccgtaactggcgcagcaactgagagcggcacagt

SEQ ID NO: 133413 - DNA, 75 bp, synthetic construct
  source 1..75: mol_type = other DNA
ctggtagccagtcgtaccgcgcgcaacgcggtatttatccgcaatgatccggcccgtccgacacaaaccggcgaa

SEQ ID NO: 133414 - DNA, 75 bp, synthetic construct
  source 1..75: mol_type = other DNA
cacacgcgccgccgtacgcctgactgacggcacgctcggctacggcgcgacaaacagcatgctgaacgctgcgcg

SEQ ID NO: 133415 - DNA, 75 bp, synthetic construct
  source 1..75: mol_type = other DNA
atggttctggtggtggtgaaattctgcctgcgggacttcaggtcgtgacggaagccggaactgcaggtagtggag

SEQ ID NO: 133416 - DNA, 75 bp, synthetic construct
  source 1..75: mol_type = other DNA
caacgatgccgccattgaggttaacagcctggtgctgatgccgtcggcagattatgcccgtcagatttgtggggc

SEQ ID NO: 133417 - DNA, 75 bp, synthetic construct
  source 1..75: mol_type = other DNA
gacgcaaaaatcctccatcgccagccgaaatatctcgggccgttggttatgattgggccgtttagtgagcatggc

SEQ ID NO: 133418 - DNA, 75 bp, synthetic construct
  source 1..75: mol_type = other DNA
gcgctggcattcgcactgctgccgctggcggcggcctgtgcgcgtacgccattatcaaattttaacgttggcgcg

SEQ ID NO: 133419 - DNA, 75 bp, synthetic construct
  source 1..75: mol_type = other DNA
gcgcgggcgggtcaatggtttggcgaaacgttaattgccgatgatgccttgcgggcgtcgttaaatggtcatctg

SEQ ID NO: 133420 - DNA, 75 bp, synthetic construct
  source 1..75: mol_type = other DNA
gatgatgccttgcgggcgtcgttaaatggtcatctggaacaagccgcacaccgcgttgcgcctgagttttccgca

SEQ ID NO: 133421 - DNA, 75 bp, synthetic construct
  source 1..75: mol_type = other DNA
gtttagtgaaaaccatatcaccattatctcgcaagaatttcataaccaacgcgccatctggctggcaaaacagta

SEQ ID NO: 133422 - DNA, 75 bp, synthetic construct
  source 1..75: mol_type = other DNA
ccttgatcgctaaaggcgtaccggcaaaagtgatcttctgcgactatgccggattctcaacgcttgattcggtgg

SEQ ID NO: 133423 - DNA, 75 bp, synthetic construct
  source 1..75: mol_type = other DNA
tggcattcattttgtataacaaaactgatttaaaaagcgtcacttttgaagccatttggaaacaagagagcatga

SEQ ID NO: 133424 - DNA, 75 bp, synthetic construct
  source 1..75: mol_type = other DNA
atccatctgattccgatatcagaacagcgatgatatctgctaaaattgagaacgctaactacttagcgcagtatg

SEQ ID NO: 133425 - DNA, 75 bp, synthetic construct
  source 1..75: mol_type = other DNA
cagggagcgaatttgcgaatgcctgctcagtcatcgccagctgcagtccacacccctgcaggttcgttatccgca

SEQ ID NO: 133426 - DNA, 75 bp, synthetic construct
  source 1..75: mol_type = other DNA
ttctccgtatttgtttttctcgccggactcttaaaattggctgtttattgttgcttatagcaggagcaacccttt

SEQ ID NO: 133427 - DNA, 75 bp, synthetic construct
  source 1..75: mol_type = other DNA
ttgcttgtagcaggcgcgacggtttttatcagcgatcgggcgatggtcaacgccagccagcaactaacatggagc

SEQ ID NO: 133428 - DNA, 75 bp, synthetic construct
  source 1..75: mol_type = other DNA
atttcgcaagaatttcataaccaacgcgccatctggctggcaaaacaatacggcatcgatgctatcgggtttaac

SEQ ID NO: 133429 - DNA, 75 bp, synthetic construct
  source 1..75: mol_type = other DNA
cacgctgtcagaactggtgaccgcaggtgaccagtttaaccagcagcacattaccctggcgggatacgaaaaaga

SEQ ID NO: 133430 - DNA, 75 bp, synthetic construct
  source 1..75: mol_type = other DNA
gcgacggggaccgccggaacgggcgctccggttctcaccggcgcggtggctgcaatggcggatgagccgtttgat

SEQ ID NO: 133431 - DNA, 75 bp, synthetic construct
  source 1..75: mol_type = other DNA
agcactggatgtccgtgctggcgcacagccaaccggctgaactggctaaccgccttaaagcgctaaacatcacca

SEQ ID NO: 133432 - DNA, 75 bp, synthetic construct
  source 1..75: mol_type = other DNA
acgtcacgatgattgccagcagtatccaggatgccatcaatgccgttccgaccctgccgtttacggcttcatctt

SEQ ID NO: 133433 - DNA, 75 bp, synthetic construct
  source 1..75: mol_type = other DNA
catgcaggcacatgatgtctgcgtaacaacaatgacaacgttactggctccctggaatatccgccctgccgtctt

SEQ ID NO: 133434 - DNA, 75 bp, synthetic construct
  source 1..75: mol_type = other DNA
acgcgccgtcacgctcactccggcacaggcagaatttctgataacagggaaaatattgccctctgtattattcag

SEQ ID NO: 133435 - DNA, 75 bp, synthetic construct
  source 1..75: mol_type = other DNA
ctcggggcagaaattggtgggctaaatgcttttatctatcgagtgggggcggctaaacccagcaacctgataggt

SEQ ID NO: 133436 - DNA, 75 bp, synthetic construct
  source 1..75: mol_type = other DNA
ggcgtgatgccaacaaagacggcgtttttcagcagtcggaaaaactaaccgatgaagagatgactcagtacgact

SEQ ID NO: 133437 - DNA, 75 bp, synthetic construct
  source 1..75: mol_type = other DNA
agaaaagggcactgtcaccctctccagtaccttacccggcacctatcgctggaaagcaaaagctgcgccctacga

SEQ ID NO: 133438 - DNA, 75 bp, synthetic construct
  source 1..75: mol_type = other DNA
cgtgatgatgcgggtaatactcttttaccggatccgccgactctggtactgagcaccaagcgccagtggcacgga

SEQ ID NO: 133439 - DNA, 75 bp, synthetic construct
  source 1..75: mol_type = other DNA
gcgcctgatgaatcaccgcactatgcgaagtgctgacgtaacgcaggggtatttacattttggtgctgatgaact

SEQ ID NO: 133440 - DNA, 75 bp, synthetic construct
  source 1..75: mol_type = other DNA
ggcggctaaacccagcaacctgataggtaaagataaagaaccgttgccgctcaacaacacttatcgatttgtttt

SEQ ID NO: 133441 - DNA, 75 bp, synthetic construct
  source 1..75: mol_type = other DNA
aatggatcttggggccaatggctggcaaaccttccgctacgtagtgttgccgaatctcagttcggcgttactggc

SEQ ID NO: 133442 - DNA, 75 bp, synthetic construct
  source 1..75: mol_type = other DNA
gtcacttaaagtggcagcgctggcgacattaatcgcgctggtgttagggacgctggcagctgccgcgctgtggcg

SEQ ID NO: 133443 - DNA, 75 bp, synthetic construct
  source 1..75: mol_type = other DNA
gttgacgggcgtaacgcctgcggaagccatccatatggcgtcgctgcatccggcgcgaatgctgggtgttgatgg

SEQ ID NO: 133444 - DNA, 75 bp, synthetic construct
  source 1..75: mol_type = other DNA
gcgaaaaacaatgctgcccgcacgttggttatgccggttatcaaagagaataccctgacagagggtaacaataac

SEQ ID NO: 133445 - DNA, 75 bp, synthetic construct
  source 1..75: mol_type = other DNA
atgatgcaaaccgtgaatgaacggctgcgtgatgaatcaattgctcatgcagtctggatagacgggttaaaactg

SEQ ID NO: 133446 - DNA, 75 bp, synthetic construct
  source 1..75: mol_type = other DNA
gttgatgatttactcattgataacgccgctcgttatctgctgaaagactggaaaggggttggagagctgatagat

SEQ ID NO: 133447 - DNA, 75 bp, synthetic construct
  source 1..75: mol_type = other DNA
gcgctgatccacgccgcaacaatggtaaccgcgggtgtctacctgatcgcccgtacccacggtctgttcctgatg

SEQ ID NO: 133448 - DNA, 75 bp, synthetic construct
  source 1..75: mol_type = other DNA
cactggtgtgggtttcctgatccacatgtacgcctcctggtacatgcgcggtgaagagggctactctcgcttctt

SEQ ID NO: 133449 - DNA, 75 bp, synthetic construct
  source 1..75: mol_type = other DNA
cactgctggcttcttcagtaaggatgagatcctcgcgggtgcgatggcgaatggtcatatcaatctgatggtggc

SEQ ID NO: 133450 - DNA, 75 bp, synthetic construct
  source 1..75: mol_type = other DNA
tctccagtttatccgtgtcaacggtacgctggttggcggttgtattggacttattttgtatttgctgtcgcagct

SEQ ID NO: 133451 - DNA, 75 bp, synthetic construct
  source 1..75: mol_type = other DNA
tgctgctcgatacgctgatcgcacagttgatcgcccttctccagcgcgataaatcgcgcaagtttatcgcccagc

SEQ ID NO: 133452 - DNA, 75 bp, synthetic construct
  source 1..75: mol_type = other DNA
gatttcttcgctaacggcgagcaggcttacagccagccgctgtggacgtggatgtcggtaggcgactttaacatc

SEQ ID NO: 133453 - DNA, 75 bp, synthetic construct
  source 1..75: mol_type = other DNA
atgtttctaaactatttcgcgttgggagtgctgatcttcgtctttctggtgattttttatggaatcatcgcgata

SEQ ID NO: 133454 - DNA, 75 bp, synthetic construct
  source 1..75: mol_type = other DNA
tatgagtggtaatgttaattgtaaaaatgtttatggtggagttaaaacattatctggaaacatatataaagaatg

SEQ ID NO: 133455 - DNA, 75 bp, synthetic construct
  source 1..75: mol_type = other DNA
aacggtttgcaattggccaaagccttatcagtgcatccaacgctgataaatggtttatcgcgcggcatcaaatta

SEQ ID NO: 133456 - DNA, 75 bp, synthetic construct
  source 1..75: mol_type = other DNA
gcaaagcatgaggattttcgcgacaagtacgcgaaggcaactgaggcacgagctgattctattttcgaagagata

SEQ ID NO: 133457 - DNA, 75 bp, synthetic construct
  source 1..75: mol_type = other DNA
ccgtttacctggtacattgtggcggcggtgatttacctggtgatcaccctgctcagtcagtacattctcaaacgc

SEQ ID NO: 133458 - DNA, 75 bp, synthetic construct
  source 1..75: mol_type = other DNA
cgccgcactttctgaccgaatttccaggctggagcaccaactcgccgccgagaaaaagactgattattccacgtt

SEQ ID NO: 133459 - DNA, 75 bp, synthetic construct
  source 1..75: mol_type = other DNA
ttataattcacaagggacgctgtctgctgaagagactaaacaactggaggaagtgaaaaaagagcgggctgatat

SEQ ID NO: 133460 - DNA, 75 bp, synthetic construct
  source 1..75: mol_type = other DNA
aattgtccgtaaaatggcagagaacaaacctgacctgccggacggcaaaacagagcaggctgtcagggatattgc

SEQ ID NO: 133461 - DNA, 75 bp, synthetic construct
  source 1..75: mol_type = other DNA
acggctatcagtcatcagaagtccgcacttcacacgccggcacagcaggccattcatcttgcccttccggtggtg

SEQ ID NO: 133462 - DNA, 75 bp, synthetic construct
  source 1..75: mol_type = other DNA
gtttcacgttgtcgtctcaacggaggcgcattatagggatcccaattttttgcacaagtacttttttgatctttt

SEQ ID NO: 133463 - DNA, 75 bp, synthetic construct
  source 1..75: mol_type = other DNA
agagtcaaccctgaatttcaggatttttctctttgttgttacgactatcttgtgaagtgtttcacgttgtcgtct

SEQ ID NO: 133464 - DNA, 75 bp, synthetic construct
  source 1..75: mol_type = other DNA
gtgcgatggcaatgacggggataccgtccgtacccgggaaaaagatctcatttggtatggccatggccggatacc

SEQ ID NO: 133465 - DNA, 75 bp, synthetic construct
  source 1..75: mol_type = other DNA
gtcgtttgctgcagaaggaaccggttttactgaactgggaggggaaatcaatgcgcagataaaacgcggtgactg

SEQ ID NO: 133466 - DNA, 75 bp, synthetic construct
  source 1..75: mol_type = other DNA
tattcctttccgtctggatacagctgcggcagccaatgtcacacttcgcgcctggcctatcagtattaccggtca

SEQ ID NO: 133467 - DNA, 75 bp, synthetic construct
  source 1..75: mol_type = other DNA
ccgggtgattcgccccgcccaggagcgggcagagcaacatattgacctggcctatgccatcaccgctcacggtgc

SEQ ID NO: 133468 - DNA, 75 bp, synthetic construct
  source 1..75: mol_type = other DNA
atgccgggcgtaccggtggaggccttttccagtcgttcacaggctatcagagaggccgtcggggaaggggcctca

SEQ ID NO: 133469 - DNA, 75 bp, synthetic construct
  source 1..75: mol_type = other DNA
attataaatatatgcaattaaatgattatctattaggtgcgatgagtctggttgatagtgtgatggatattcagt

SEQ ID NO: 133470 - DNA, 75 bp, synthetic construct
  source 1..75: mol_type = other DNA
gaggggaatatcctgtttgcctttgcagtggcggcacaggtgctgacgtggtgtgaaacgcgcagtgggtggcgt

SEQ ID NO: 133471 - DNA, 75 bp, synthetic construct
  source 1..75: mol_type = other DNA
tccgggtggggaccggcgaccggatgcgcttcacgaagagtgaccgggagcgcggttatgtggccaacagcgtct

SEQ ID NO: 133472 - DNA, 75 bp, synthetic construct
  source 1..75: mol_type = other DNA
ttgaaatcccgggatgtggcggcactggatacgcgaaaatccaaacagcacgtcgatcctgaagtcagaatggct

SEQ ID NO: 133473 - DNA, 75 bp, synthetic construct
  source 1..75: mol_type = other DNA
tccggggcgcaaatatccgcagccgtatgtggccctgccggcctttgaccgtaacggcaggtcagctggtatctg

SEQ ID NO: 133474 - DNA, 75 bp, synthetic construct
  source 1..75: mol_type = other DNA
gcaacatattgacctggcctatgccatcaccgcccacggtgcgcagggggcaagtgaaacctttgccatcgcgct

SEQ ID NO: 133475 - DNA, 75 bp, synthetic construct
  source 1..75: mol_type = other DNA
ggggtatgccggtgtgggtaagaccacacagttccgggcggtgatgtcagccgtgaacatgctgccggcgagtga

SEQ ID NO: 133476 - DNA, 75 bp, synthetic construct
  source 1..75: mol_type = other DNA
aggtaaccggaaactgatggccggctttgagtcagcctacgtggccctgtcgcgtatgaagcagcatgtgcaggt

SEQ ID NO: 133477 - DNA, 75 bp, synthetic construct
  source 1..75: mol_type = other DNA
aacccggatgcccttgccctggtggataatgtgtatcaccggattgccggtatcagtaaggatgacgggctgata

SEQ ID NO: 133478 - DNA, 75 bp, synthetic construct
  source 1..75: mol_type = other DNA
aacgtacaggtcctgataaccgacagcgggcagcgaaccggtacaggcagtgcgctgatggccatgaaggatgcc

SEQ ID NO: 133479 - DNA, 75 bp, synthetic construct
  source 1..75: mol_type = other DNA
tcctgataaccgacagcgggcagcgaaccggtacaggcagtgcactgatggccatgaaggatgccggggtgaaca

SEQ ID NO: 133480 - DNA, 75 bp, synthetic construct
  source 1..75: mol_type = other DNA
gcataacggcgagtggaagacactgagcagtgacaaagtggggaaaaccggattttccgagaacgtgctcgctaa

SEQ ID NO: 133481 - DNA, 75 bp, synthetic construct
  source 1..75: mol_type = other DNA
gcataaccgtcctttcgaagccatcattcaggaagtgatcagcggcggacacgatttggtgctaaaaatggcgca

SEQ ID NO: 133482 - DNA, 75 bp, synthetic construct
  source 1..75: mol_type = other DNA
gcagggcagccgtaacggagaaagcctgctggctgataatatgcaggatggcgtccggattgcccgtgataatcc

SEQ ID NO: 133483 - DNA, 75 bp, synthetic construct
  source 1..75: mol_type = other DNA
tctgcttttttccagaccagtgtccgtgtctggcctcagtatggtcgtgtggaaattcgtggtgtgcttaaaacc

SEQ ID NO: 133484 - DNA, 75 bp, synthetic construct
  source 1..75: mol_type = other DNA
tttcagtcagtgttatgtctgatgccgttcagtcagacccgtcgaatcctgccccgcaggttttgtctgtaaatt

SEQ ID NO: 133485 - DNA, 75 bp, synthetic construct
  source 1..75: mol_type = other DNA
aagcgcccgttaccgtaccggttgttggcagtgatgaacaattccccgtgcgccgcgtttactgcgtcgggcgta

SEQ ID NO: 133486 - DNA, 75 bp, synthetic construct
  source 1..75: mol_type = other DNA
aaaatactattgctgacattctcacataccttggtttgggagaagcggcaacgaggaacgtcggaacggataccg

SEQ ID NO: 133487 - DNA, 75 bp, synthetic construct
  source 1..75: mol_type = other DNA
ggtgatcggtttgatcaacggcctgattatcgcctatctcaacgtgacgccgttcattaccacgctcggcacgat

SEQ ID NO: 133488 - DNA, 75 bp, synthetic construct
  source 1..75: mol_type = other DNA
tgccgtggcgtttgtctgggtgctgtggaacaaaacccgtttcggcaagaatatttttgctattggcggcaaccc

SEQ ID NO: 133489 - DNA, 75 bp, synthetic construct
  source 1..75: mol_type = other DNA
tttcatcagaaactgtcgatgcctcacatcaggcgcttctgcaatatattcgtccgggggcacagaaccagatga

SEQ ID NO: 133490 - DNA, 75 bp, synthetic construct
  source 1..75: mol_type = other DNA
ccattcttcttctgcaaaccggcggatgccgttgttccggttgccgctggtgaaacgctggcgctgccgtatccg

SEQ ID NO: 133491 - DNA, 75 bp, synthetic construct
  source 1..75: mol_type = other DNA
tgtgtatgtgggacgtacccgcgtgcaggcaccggtgactaacggcgataacgtcacgatgattgccagcagtat

SEQ ID NO: 133492 - DNA, 75 bp, synthetic construct
  source 1..75: mol_type = other DNA
ttggcccggtggtgaaaggcgatgtgatcacgggcaacgtcgagggtttaacccctatcgcggtgaagattgtct

SEQ ID NO: 133493 - DNA, 75 bp, synthetic construct
  source 1..75: mol_type = other DNA
gccgatcgcgccgctgcacaaagccagcgaaaccggcggtattgataacgcgccaatctggttacaggttaacgg

SEQ ID NO: 133494 - DNA, 75 bp, synthetic construct
  source 1..75: mol_type = other DNA
gggacttgttcgcaccttcccttacgatccgttggttacacctgtttataccattagttttggtggccgggttga

SEQ ID NO: 133495 - DNA, 75 bp, synthetic construct
  source 1..75: mol_type = other DNA
agctgcgggacgtggcggcaggccgagccgttcttcgtcaggcggggctgtccggaggagacagtcctgcacggt

SEQ ID NO: 133496 - DNA, 75 bp, synthetic construct
  source 1..75: mol_type = other DNA
gctatcggacggacagcagacccgggtgattcgccccggccaggagcgggcagagcaacatattgacctggccta

SEQ ID NO: 133497 - DNA, 75 bp, synthetic construct
  source 1..75: mol_type = other DNA
ttgcaacggatcgaaatgctaatgttatgtcgcaggaggaatgggaagcgttgcctgcgcttttatccggattta

SEQ ID NO: 133498 - DNA, 75 bp, synthetic construct
  source 1..75: mol_type = other DNA
atccgggaggccgtcggtgaagacgcctcgctgaaatcccgggatgtggcggcactggatacgcgtaaatccaaa

SEQ ID NO: 133499 - DNA, 75 bp, synthetic construct
  source 1..75: mol_type = other DNA
tacgccgatcacgcctaacgatctcaatagcgttattcctttccgtctggatgcagctgcggcagccaatgtcac

SEQ ID NO: 133500 - DNA, 75 bp, synthetic construct
  source 1..75: mol_type = other DNA
aactgcgggacgtggcggcaggccgtgccgttctccgccaggcgggacttgccgggggagacagccctgcacggt

SEQ ID NO: 133501 - DNA, 75 bp, synthetic construct
  source 1..75: mol_type = other DNA
tttcggagtcagtcgtcgttgggcaaaaaattgacaatataagtctggatgaattcgcaaaggcattaaaaagtg

SEQ ID NO: 133502 - DNA, 75 bp, synthetic construct
  source 1..75: mol_type = other DNA
atttatcagtcagttgaaagcaaaaacgaatttccaggtcgtcggtttaaccatgaagtgctattcccctttgtg

SEQ ID NO: 133503 - DNA, 75 bp, synthetic construct
  source 1..75: mol_type = other DNA
gcgccagacgggacactggagcagtggggaacagcaattggggacgcatcaggcaggaagactgtaatttttcca

SEQ ID NO: 133504 - DNA, 75 bp, synthetic construct
  source 1..75: mol_type = other DNA
taaagcttataatttcaatattgaaaaaacagactttgttgtcatccatattcccgatcagattggcgatgctat

SEQ ID NO: 133505 - DNA, 75 bp, synthetic construct
  source 1..75: mol_type = other DNA
gcaaagaacataacacagcaatacggtacgccggatctttgcattgaggggatgcgtaaaaagaacctgaaaacg

SEQ ID NO: 133506 - DNA, 75 bp, synthetic construct
  source 1..75: mol_type = other DNA
attgcagaaaatctaatagcaaaaattcaaagtgaaacagatattccaatagtgatcgtttatggacccaaaggg

SEQ ID NO: 133507 - DNA, 75 bp, synthetic construct
  source 1..75: mol_type = other DNA
tggttaagttatccaggattcgtaccacaagtggggaataacgcagacagtgtcgcatttgttaatcaactggaa

SEQ ID NO: 133508 - DNA, 75 bp, synthetic construct
  source 1..75: mol_type = other DNA
taccacgggcagggcagaagccaccatccttgcagatattgcccatcagttctggcatattccccatgaaaaaat

SEQ ID NO: 133509 - DNA, 75 bp, synthetic construct
  source 1..75: mol_type = other DNA
cgatggcgacgttccgccgtatgaccggggacaaccccgatgcaccacgctggttaagttatccgggatttatac

SEQ ID NO: 133510 - DNA, 75 bp, synthetic construct
  source 1..75: mol_type = other DNA
attcttaacgaagaaccatctccggccgtcagtgaggaagtcagaaatatcccgtgggaagggaaaagcaaaccg

SEQ ID NO: 133511 - DNA, 75 bp, synthetic construct
  source 1..75: mol_type = other DNA
caggaccccaccatgcagcggcgcacgatggcgacgttccgccgtatgaccggggacaatcccgatgcaccacgc

SEQ ID NO: 133512 - DNA, 75 bp, synthetic construct
  source 1..75: mol_type = other DNA
tccggcagaagtcatccaggcatggcaaacgctgaaacacgatgcggtgctcatcgaggcgatggaaagtcgctc

SEQ ID NO: 133513 - DNA, 75 bp, synthetic construct
  source 1..75: mol_type = other DNA
cctgtcgggaaagccaggcgccagtttatggaggcgcagggcgttaaacagctactgtggggcaaccgtattcgc

SEQ ID NO: 133514 - DNA, 75 bp, synthetic construct
  source 1..75: mol_type = other DNA
ccatctggcgcaaattccactcggtcagccgattcattttgtccagtgttcactggaagaggcactgaaagcgcg

SEQ ID NO: 133515 - DNA, 75 bp, synthetic construct
  source 1..75: mol_type = other DNA
atcagccactgcggcgcactggatatgcccgcgttacgcattgctaacctactggtgggtaatgacgccaatgcc

SEQ ID NO: 133516 - DNA, 75 bp, synthetic construct
  source 1..75: mol_type = other DNA
acggcggagcagctggtaaagctgttactggtaatgctccaacttggactaaagttggggcaatttacggcgctc

SEQ ID NO: 133517 - DNA, 75 bp, synthetic construct
  source 1..75: mol_type = other DNA
ttaataatggcatcggtacacgcttgcgtattacgaataatggtgcaatcgctggaggtggcggcggcggtggcg

SEQ ID NO: 133518 - DNA, 75 bp, synthetic construct
  source 1..75: mol_type = other DNA
gaggcactgaaagcgcggcaagatcagcaacgttatttcgaacaattagcgtggcggctgcacaatgaaaattga

SEQ ID NO: 133519 - DNA, 75 bp, synthetic construct
  source 1..75: mol_type = other DNA
gcagtagcgcaagagcagcaatcagggcgtcaggtatttatggatttcaatcgcaatcctgaagcggtgccgggt

SEQ ID NO: 133520 - DNA, 75 bp, synthetic construct
  source 1..75: mol_type = other DNA
tgaattgcatctctctctggacgatacctgcgtgtggtttaacatcgataatcgtcagctcaaagcccggcgcaa

SEQ ID NO: 133521 - DNA, 75 bp, synthetic construct
  source 1..75: mol_type = other DNA
ccggggtgatggaagcctttgagctcgacatttatgcatcagaatataacgagctcgcctttaccctgcacaaac

SEQ ID NO: 133522 - DNA, 75 bp, synthetic construct
  source 1..75: mol_type = other DNA
atgagccagcttgatgacaccctccttgatgcgctcacacacgtcacttttccaaagggttttgtgtcagcagag

SEQ ID NO: 133523 - DNA, 75 bp, synthetic construct
  source 1..75: mol_type = other DNA
gtctggcgcgttttattggttgcacacaaaagcggtctgttaatggggacattgcacaactggcagcctcgccgt

SEQ ID NO: 133524 - DNA, 75 bp, synthetic construct
  source 1..75: mol_type = other DNA
gtcgccaggtttttatggatttcaatcgcaatcctgaaacagtgctaggtgatttgccgttctcattagagcgac

SEQ ID NO: 133525 - DNA, 75 bp, synthetic construct
  source 1..75: mol_type = other DNA
aagcgacgattgagcgtcaggggaaatatggctgggaacctgaaacagtcttcgagcctgtgtttgttgccgtag

SEQ ID NO: 133526 - DNA, 75 bp, synthetic construct
  source 1..75: mol_type = other DNA
aactgccgaagccagcggcaggtacccgtcctttaaaggtgttcgtctacgactcaggcgaggataaaccgttta

SEQ ID NO: 133527 - DNA, 75 bp, synthetic construct
  source 1..75: mol_type = other DNA
cactgcgcacaaaaataaagccaccatggatctgctgtataacgatgtcctcacgctgggtaagatttttggcaa

SEQ ID NO: 133528 - DNA, 75 bp, synthetic construct
  source 1..75: mol_type = other DNA
taactggcgtttatctcaatagctttaccctggatatgctcaggagcggtgaaagcagcaagtgttcgatttttg

SEQ ID NO: 133529 - DNA, 75 bp, synthetic construct
  source 1..75: mol_type = other DNA
atattgatcgcaaattgctggatgcgattgatcttattaatgaacgatcgaagagagaccctgctcaatacgaaa

SEQ ID NO: 133530 - DNA, 75 bp, synthetic construct
  source 1..75: mol_type = other DNA
ctgccgatacatctattctggtgctcaatgcggtagaaggagaacggagcaacagcatcagccagcaggataatg

SEQ ID NO: 133531 - DNA, 75 bp, synthetic construct
  source 1..75: mol_type = other DNA
cttctggcctggctggaggaccattttgccgatgaggtgaattgggatgccgtggcggatcaattttctctttca

SEQ ID NO: 133532 - DNA, 75 bp, synthetic construct
  source 1..75: mol_type = other DNA
ccctgctgttgagtgaatttgcccagcaacacggtttaaccatcaaccacgcaggcgaagttgctgaattattta

SEQ ID NO: 133533 - DNA, 75 bp, synthetic construct
  source 1..75: mol_type = other DNA
tggacgacgacgttcgcgcgtatctggaaaataacgacgctctggcaccatcgcccatcgaacgcctgcaacgaa

SEQ ID NO: 133534 - DNA, 75 bp, synthetic construct
  source 1..75: mol_type = other DNA
gtttatgtggcggcatatgtctcttacttcggctgccgtattaacacaattgacgcattatattaatgcaggtgg

SEQ ID NO: 133535 - DNA, 75 bp, synthetic construct
  source 1..75: mol_type = other DNA
tacctcgcttattcctggctcgaaaatgaaaaaggggagaaaagcgatgatcttctggtcgccctgccgccaata

SEQ ID NO: 133536 - DNA, 75 bp, synthetic construct
  source 1..75: mol_type = other DNA
ggttggctcgggaagtggataacggagaaaaaggcgatctcggcgttaaggggccggtggagaaaatcagtgagc

SEQ ID NO: 133537 - DNA, 75 bp, synthetic construct
  source 1..75: mol_type = other DNA
tgttccgtggcatcccggaaggaatgaacttggggcagggagttaaagctattcaggcgctcgcggccaaaaaag

SEQ ID NO: 133538 - DNA, 75 bp, synthetic construct
  source 1..75: mol_type = other DNA
cacgctggcgagctcccgaactgccgctgttacaaagaaatcgtcttccccaaccctcattcttatctcgcctga

SEQ ID NO: 133539 - DNA, 75 bp, synthetic construct
  source 1..75: mol_type = other DNA
ggcgacgtccggcattctcatcgagagatggaagggaagtttgtcgaatggggccgacctccaacgcttgacggc

SEQ ID NO: 133540 - DNA, 75 bp, synthetic construct
  source 1..75: mol_type = other DNA
atgcaatccatcatcgccgaacaggtcaagtacatcaaatctctgcctctcgaggccgcagacagggtgtacgac

SEQ ID NO: 133541 - DNA, 75 bp, synthetic construct
  source 1..75: mol_type = other DNA
attcgcagcggcgtgttgaaacactatccatcggttctgcattcggaggatgccattgaagggccgctggcgttt

SEQ ID NO: 133542 - DNA, 75 bp, synthetic construct
  source 1..75: mol_type = other DNA
tgacgatccgcaattacgcgtcgccattattaccggtgccggagagaaattcttttccgcaggctgggatttaaa

SEQ ID NO: 133543 - DNA, 75 bp, synthetic construct
  source 1..75: mol_type = other DNA
gatgctgactttggcccgggtggttttgcgggattaaccgaaattttcaatctcgacaaaccggttatcgcagct

SEQ ID NO: 133544 - DNA, 75 bp, synthetic construct
  source 1..75: mol_type = other DNA
ccggacggaaacgcaactttaggcatagactgtgaagggaaatctgtgtccaggtcggtcattgccagaattgag

SEQ ID NO: 133545 - DNA, 75 bp, synthetic construct
  source 1..75: mol_type = other DNA
cctgatcacctgtttcggacccgaaccagggataaaatgcactggggaccatatggtcaccttgtgcgggaggtc

SEQ ID NO: 133546 - DNA, 75 bp, synthetic construct
  source 1..75: mol_type = other DNA
agcttcgccctgccggaagccaaactgggtattgtcccggacagcggcggcgtgctgcgtctgccgaagatcctg

SEQ ID NO: 133547 - DNA, 75 bp, synthetic construct
  source 1..75: mol_type = other DNA
attttcaataatgtagccaatgtcatggattctcagaaggttcatctttcgggaatgcgtttttataatatttcg

SEQ ID NO: 133548 - DNA, 75 bp, synthetic construct
  source 1..75: mol_type = other DNA
gaggcagatgatattttcggtgagctaagctctggtaagaatgcaccgaaaacggggggaggggcgaaagggaac

SEQ ID NO: 133549 - DNA, 75 bp, synthetic construct
  source 1..75: mol_type = other DNA
aaaaagcggctgctgaaaaggcagcagctgataagaaagcagcggcagaaaaagccgccgcagacaaaaaagcgg

SEQ ID NO: 133550 - DNA, 75 bp, synthetic construct
  source 1..75: mol_type = other DNA
tattgatacactgaacctgaatctcctcatcgagatccttcagggtaaggggtactccgaagaatacattctcgc

SEQ ID NO: 133551 - DNA, 75 bp, synthetic construct
  source 1..75: mol_type = other DNA
atgacgctgaaaattggacctatcggaaaactgatcgttgtatgtagccagaagggtggaatcgttaaatcgcag

SEQ ID NO: 133552 - DNA, 75 bp, synthetic construct
  source 1..75: mol_type = other DNA
ttctgatccctaccctgctggagaagcaggcccgtaatgcagttggtaaacagcttacttatatgcagaaaatta

SEQ ID NO: 133553 - DNA, 75 bp, synthetic construct
  source 1..75: mol_type = other DNA
tagtgcggcagggccggggaatcgaccagctggcgtcatgccgcaaaccaagagcattgcggtcaaatgtacgaa

SEQ ID NO: 133554 - DNA, 75 bp, synthetic construct
  source 1..75: mol_type = other DNA
tagacagcgacagctatcagttactgaaatccgcagacgtcaatatctccgccctggtgaacagggccatgcaga

SEQ ID NO: 133555 - DNA, 75 bp, synthetic construct
  source 1..75: mol_type = other DNA
tggtgatggatttagacgtgacggatagctttggcgatgatacggatggcaaaggaaatgtgctcccggaagata

SEQ ID NO: 133556 - DNA, 75 bp, synthetic construct
  source 1..75: mol_type = other DNA
tttcattgttgagaacagtgatatttatatcaactgttaataataagaaggtttatgttgattttattctaaaag

SEQ ID NO: 133557 - DNA, 75 bp, synthetic construct
  source 1..75: mol_type = other DNA
taacgtataatccagttctaagtatattggatgatctaataggaaagataaaaaaagcaaaatacaatttagaga

SEQ ID NO: 133558 - DNA, 75 bp, synthetic construct
  source 1..75: mol_type = other DNA
tagacagcgacagttatcagttactgaaatccgcggacgtcaatatatcccgtctggtgaacacggccatgcaga

SEQ ID NO: 133559 - DNA, 75 bp, synthetic construct
  source 1..75: mol_type = other DNA
acttggcaagccgctcccggatgatttcacgtttgagtttaacccgctctggcaaatgtctgatgtcgatcgctc

SEQ ID NO: 133560 - DNA, 75 bp, synthetic construct
  source 1..75: mol_type = other DNA
gtgtttctggaatccccaggctccatcaccatggaagtccacgacgttccggcgattgttgccgccgtgcgcaat

SEQ ID NO: 133561 - DNA, 75 bp, synthetic construct
  source 1..75: mol_type = other DNA
cgctggttaaacaaatggagttagttcgccagtaccagacgaacgagggtatgtccctgtttgattcggaggacg

SEQ ID NO: 133562 - DNA, 75 bp, synthetic construct
  source 1..75: mol_type = other DNA
gtgcatttttagatgcgcctgttattagccagattctggctattatcctcatcatcgttttgattttgcttttaa

SEQ ID NO: 133563 - DNA, 75 bp, synthetic construct
  source 1..75: mol_type = other DNA
taaggatctggaggggcaagttgagcttgatgcggccttcaccttctcatgccaggccgagatgattatttttga

SEQ ID NO: 133564 - DNA, 75 bp, synthetic construct
  source 1..75: mol_type = other DNA
cggcctggcgcatccatcacagccgcctgattcgcttcgatggcgtcacgctgccattccagcagaagatgaccg

SEQ ID NO: 133565 - DNA, 75 bp, synthetic construct
  source 1..75: mol_type = other DNA
atcctgcatttcccctttgccccctgtccgttcgttcccatgcttcctaggcccaacgccacaaactcccgccat

SEQ ID NO: 133566 - DNA, 75 bp, synthetic construct
  source 1..75: mol_type = other DNA
cgcattacggatcttggctaaggaattaaccggggagcaattcaaggtcttaatgctgatgcttgcagatctgga

SEQ ID NO: 133567 - DNA, 75 bp, synthetic construct
  source 1..75: mol_type = other DNA
ggtctgacggagagggctttccctgacggcttaccttatgagatagaacgcgaacctttaagtaacagttttaca

SEQ ID NO: 133568 - DNA, 75 bp, synthetic construct
  source 1..75: mol_type = other DNA
gccgacattataaccagtctggaatgctcagagccgacattaacccgggccctcaaagagctacgcgagtcatat

SEQ ID NO: 133569 - DNA, 75 bp, synthetic construct
  source 1..75: mol_type = other DNA
acaagctctgggagatgtcggacaccgaccgggcgacgatggcgagtaacgtggccaccgccctggcgaccgccg

SEQ ID NO: 133570 - DNA, 75 bp, synthetic construct
  source 1..75: mol_type = other DNA
aactggatcgcatcaaagaggggcagtttaagggagtgatgagccttgaccgctggatggttaacccgagttatt

SEQ ID NO: 133571 - DNA, 75 bp, synthetic construct
  source 1..75: mol_type = other DNA
ggctatttacccaataattagatcgctggaatcacataaaataaaacatttattaattgtcacatctacaattaa

SEQ ID NO: 133572 - DNA, 75 bp, synthetic construct
  source 1..75: mol_type = other DNA
ctgaaaatttgcactcagcggctatcatcggcgaagtggtaggtaaaaaacgagagatgcaggcgcgtctggaac

SEQ ID NO: 133573 - DNA, 75 bp, synthetic construct
  source 1..75: mol_type = other DNA
aggattgtagagagaattcactctttgcaatacagactatcgacgaagcgatagcgataatggctgaaagcggaa

SEQ ID NO: 133574 - DNA, 75 bp, synthetic construct
  source 1..75: mol_type = other DNA
aatgggcgtacagtttgcgctgatgtgggcggtactggcgtttttgctcaactacgttcccaatatcggcgcggt

SEQ ID NO: 133575 - DNA, 75 bp, synthetic construct
  source 1..75: mol_type = other DNA
cacatcgcgggattacaccgcgcacttaaaggcgtttcgcactatcttgcattgaagacgctactcagtttatga

SEQ ID NO: 133576 - DNA, 75 bp, synthetic construct
  source 1..75: mol_type = other DNA
atgtcgttagtgtcaatttttagacgcattgcattcagttattatgattattcatgtgcaaatattaatattgca

SEQ ID NO: 133577 - DNA, 75 bp, synthetic construct
  source 1..75: mol_type = other DNA
aaaatggtgtctatccagttgccatttatcagtatttattggctaaacagggaggcaacaaattattggtataca

SEQ ID NO: 133578 - DNA, 75 bp, synthetic construct
  source 1..75: mol_type = other DNA
gaagcagaagttgagcaagcggtaccgtcaactgatgacgatatcactgaagaggaaacagatacccccgccaac

SEQ ID NO: 133579 - DNA, 75 bp, synthetic construct
  source 1..75: mol_type = other DNA
aaattcaggcacgaatgtctgaccatgcgggatttatttgccatgccgataaagtccgacgcgccactcgtgatg

SEQ ID NO: 133580 - DNA, 75 bp, synthetic construct
  source 1..75: mol_type = other DNA
agaattgtagagagaattcactctttactatacagactatcgacgaggcgatagccatcatgactgaaagtggaa

SEQ ID NO: 133581 - DNA, 75 bp, synthetic construct
  source 1..75: mol_type = other DNA
ggaggcaacaaattattggtatacatgcgccagagcagcatttaacgaccctgactggtttgtgaaaaaccacca

SEQ ID NO: 133582 - DNA, 75 bp, synthetic construct
  source 1..75: mol_type = other DNA
aaacagagaaataaacgctgactacactgtaaaatcgatggcggggataatcagagcacaattacaggctcttga

SEQ ID NO: 133583 - DNA, 75 bp, synthetic construct
  source 1..75: mol_type = other DNA
agcgaaataattttattgttctggaatataaagaaaaagaccctctcgacgttacgctctggctaaaggctgatt

SEQ ID NO: 133584 - DNA, 75 bp, synthetic construct
  source 1..75: mol_type = other DNA
gaagcggtacagaaatttggtgcccaaaaagaggatggcgtgcaggggtatggattacgtgtggtttacagcaag

SEQ ID NO: 133585 - DNA, 75 bp, synthetic construct
  source 1..75: mol_type = other DNA
ccagcagtcggaaaaactgacggaagaagaaatggcgcaatacgactaccagtgggaatttaccggacacagcgt

SEQ ID NO: 133586 - DNA, 75 bp, synthetic construct
  source 1..75: mol_type = other DNA
cgtgagtgaagaaagccagcagtggcttgcgcagtgcgggctgacggcggagcagatggccgcgcagctggaggc

SEQ ID NO: 133587 - DNA, 75 bp, synthetic construct
  source 1..75: mol_type = other DNA
gggtgaattgtcgccgcgcgaccaggcgctggtaaccgatatgtgggaacatctgtttcagcaggcttcacagca

SEQ ID NO: 133588 - DNA, 75 bp, synthetic construct
  source 1..75: mol_type = other DNA
cggggactttccgttggaaagtgaaggcggaaccgtatagcgactcgaactttgtggatgttacttttaccaaca

SEQ ID NO: 133589 - DNA, 75 bp, synthetic construct
  source 1..75: mol_type = other DNA
gaaaccaccaaaggcggtagcaaactggcgatcttactggggccgggcagaccgaaaagtcggttaccgggatga

SEQ ID NO: 133590 - DNA, 75 bp, synthetic construct
  source 1..75: mol_type = other DNA
ttgaataatccacagattcacatcgccggactacaccgcgccttaaaaggtgtttcgcattatctggcgttaaag

SEQ ID NO: 133591 - DNA, 75 bp, synthetic construct
  source 1..75: mol_type = other DNA
tgggccatcggctggggatgtccaccctggtggtatttctttcattgctgatttggggatggctgctcggtccgg

SEQ ID NO: 133592 - DNA, 75 bp, synthetic construct
  source 1..75: mol_type = other DNA
tgcctatattgaaaaagagggcaatgccctgatgcaggatctggaggaagaaggttatctggtcggtcttgagaa

SEQ ID NO: 133593 - DNA, 75 bp, synthetic construct
  source 1..75: mol_type = other DNA
gtttatggacaggcgtaatcgtctggctggggctggcgctaatgggcgtacagtttgcgctgatgtgggcagtac

SEQ ID NO: 133594 - DNA, 75 bp, synthetic construct
  source 1..75: mol_type = other DNA
gtttgaagtgcgccacgtcccttacaaaatgcgttttgcgttgaataatccacagattcacatcgccggactaca

SEQ ID NO: 133595 - DNA, 75 bp, synthetic construct
  source 1..75: mol_type = other DNA
gcagcctaaccccgcacctcaatgggtatgttgcgtgccgtcgcgtaatcatcctgaactggtaccggattttgc

SEQ ID NO: 133596 - DNA, 75 bp, synthetic construct
  source 1..75: mol_type = other DNA
ccatcagtgcagcactttctccgttctttgcctggtatttgcggtatcctgatgaggagattaatgaaggtatat

SEQ ID NO: 133597 - DNA, 75 bp, synthetic construct
  source 1..75: mol_type = other DNA
gaaaaggtcattccgttacttgatctcgtattgctcgacatcaaaaccttttatagtgaacgacataaggaattt

SEQ ID NO: 133598 - DNA, 75 bp, synthetic construct
  source 1..75: mol_type = other DNA
ctggcaccgtatttaatatacaaaaattctccttacatgatggtccgggcatacgcacaattgtattcctgaaag

SEQ ID NO: 133599 - DNA, 75 bp, synthetic construct
  source 1..75: mol_type = other DNA
ggctatcaactggtactacaaacaccagtctttcaggttgctgcgcgatggcaaaatttcacggggggaatatga

SEQ ID NO: 133600 - DNA, 75 bp, synthetic construct
  source 1..75: mol_type = other DNA
atgacgcttgaacgaatcagcgcctttattacttactgcatcgccgtgctgctggcatggttgggcgatctgtcg

SEQ ID NO: 133601 - DNA, 75 bp, synthetic construct
  source 1..75: mol_type = other DNA
aaaggaatgttaatacgctcaatcagaatgatataaataattctgttaataatgccaatgtgcacgaaaatgaat

SEQ ID NO: 133602 - DNA, 75 bp, synthetic construct
  source 1..75: mol_type = other DNA
ctcgcccacaggatgccttagcgatggttcgccagggggtaaaaataggtaccctgaatattggcggcatggcct

SEQ ID NO: 133603 - DNA, 75 bp, synthetic construct
  source 1..75: mol_type = other DNA
ccgcagggctgcgctgattatgctttttatacccatataatcaaaagtttaaaacccgataacggtcgtgctgct

SEQ ID NO: 133604 - DNA, 75 bp, synthetic construct
  source 1..75: mol_type = other DNA
taaacaggtcattgaatccgacatcatcgaagcggtgattggtttggggccgaacctgttttacaactcgccaat

SEQ ID NO: 133605 - DNA, 75 bp, synthetic construct
  source 1..75: mol_type = other DNA
aagtcgtagatgaaatcacacattacatgtctatttatcacactcaaaaattctcaaaacattatgaaataaata

SEQ ID NO: 133606 - DNA, 75 bp, synthetic construct
  source 1..75: mol_type = other DNA
ttctctttttggtgactataaagtcagaagtgggataattgaatcagcaatgatatctcgtatctcaactcccat

SEQ ID NO: 133607 - DNA, 75 bp, synthetic construct
  source 1..75: mol_type = other DNA
cattaagcgacgtttcagagtttttagaaagagttcagaaaggtcagcaaatatctatcaatgacattaaaattg

SEQ ID NO: 133608 - DNA, 75 bp, synthetic construct
  source 1..75: mol_type = other DNA
aggatatgggttaagtactttagctaaagttctggatcatacaaatttgaaatccgtactatcttatgcgaaaaa

SEQ ID NO: 133609 - DNA, 75 bp, synthetic construct
  source 1..75: mol_type = other DNA
tcacttgtaaaagaaactcttgcatataccgctgtacattttagctctgcttatacgagaaagttctactttgcc

SEQ ID NO: 133610 - DNA, 75 bp, synthetic construct
  source 1..75: mol_type = other DNA
gtggtcagaagtgctacgtattcataaggatcgccataactttccgatcgctgattggggaaaagaggaatattc

SEQ ID NO: 133611 - DNA, 75 bp, synthetic construct
  source 1..75: mol_type = other DNA
agagtgaggtaggagatatattaactgaagaggaattaaacaatttacccctatttattgatccttattttttta

SEQ ID NO: 133612 - DNA, 75 bp, synthetic construct
  source 1..75: mol_type = other DNA
ttaaattaaatttctcatattttgaaagaaacattaatgctatcttattagcatctataaaagagacccttgcct

SEQ ID NO: 133613 - DNA, 75 bp, synthetic construct
  source 1..75: mol_type = other DNA
atttaatctcaaaatggaaagtcgcaaaacccaggacaactacggcctataatgaaaggcaaaaatacttaaggc

SEQ ID NO: 133614 - DNA, 75 bp, synthetic construct
  source 1..75: mol_type = other DNA
ggtgactacctgactgaagaaatgagtctggcagaaattaaagctgtggaagcaacgagcaaggcaaagaatgga

SEQ ID NO: 133615 - DNA, 75 bp, synthetic construct
  source 1..75: mol_type = other DNA
ttactgcacagttaagacgccggcaggtgattatctaacggaagagatgagtctggctgaaattgaggctgtaag

SEQ ID NO: 133616 - DNA, 75 bp, synthetic construct
  source 1..75: mol_type = other DNA
gatattgatgcaacttcaaggggacttgaacctaattatgctctaataaaaaaactcgcagcggaatgccgaatg

SEQ ID NO: 133617 - DNA, 75 bp, synthetic construct
  source 1..75: mol_type = other DNA
tataacaatcattcgcgccaccgaattgaagatcgccgtccctcaacgtactccgatccaggccagtcgaatggg

SEQ ID NO: 133618 - DNA, 75 bp, synthetic construct
  source 1..75: mol_type = other DNA
ctggaaaaacgtattttcgctgacgcggcgttagcactgcgttatgacgagaaagacggccccgcaccaatcgcc

SEQ ID NO: 133619 - DNA, 75 bp, synthetic construct
  source 1..75: mol_type = other DNA
cgccagcaaatactggcctaaagcccagcgactggataatgccattcacctgcttaacgaagatgagggtatgca

SEQ ID NO: 133620 - DNA, 75 bp, synthetic construct
  source 1..75: mol_type = other DNA
acaggaaaatcacggagtgatgtgcaacaacgcattcaacagtttcacagccaggaatttttaaactcactccgg

SEQ ID NO: 133621 - DNA, 75 bp, synthetic construct
  source 1..75: mol_type = other DNA
ccgcagcaaagacctcaccccgaaaaaatccaggctgctggctgacaccatttcggctgtttatctcgatggcta

SEQ ID NO: 133622 - DNA, 75 bp, synthetic construct
  source 1..75: mol_type = other DNA
cgcactgcatctcgttgcaaccggtcgcagaaactcctgactcctggaaatgggatctgaacaccattcccgtgc

SEQ ID NO: 133623 - DNA, 75 bp, synthetic construct
  source 1..75: mol_type = other DNA
tgctggggttgatcccgacgctgtttatcgtctcggtgctggtgtttttatttgtccatatgttgcctggcgatc

SEQ ID NO: 133624 - DNA, 75 bp, synthetic construct
  source 1..75: mol_type = other DNA
gcaagctttatgacgccaccattaaccactatccatcaaccgaaagatgaactgggggagctggcgattgatgta

SEQ ID NO: 133625 - DNA, 75 bp, synthetic construct
  source 1..75: mol_type = other DNA
accagatggttgatatggcatttattgttcgttttacaggtatgactgataaatggttttataaattgattcagg

SEQ ID NO: 133626 - DNA, 75 bp, synthetic construct
  source 1..75: mol_type = other DNA
agttcaatgtttgacgaccacccagcatccgccgaacgcgcccaacatattcgcgatcgtatgagcgcggatgga

SEQ ID NO: 133627 - DNA, 75 bp, synthetic construct
  source 1..75: mol_type = other DNA
ttgggtgatatcgcagaaggcgctattaatgctaaatactcccgtgataaagagtccgaagcagatgatttctcc

SEQ ID NO: 133628 - DNA, 75 bp, synthetic construct
  source 1..75: mol_type = other DNA
atgaactgggccacgtcgcgttgggtcactcgctggctgaaatgaaagcttcttatgcgatcgttgccgcacgcg

SEQ ID NO: 133629 - DNA, 75 bp, synthetic construct
  source 1..75: mol_type = other DNA
ggttctccacccgcatgatcactaccggagtttgcgagccgtctaaatacccctggcagaaattaagggtggatt

SEQ ID NO: 133630 - DNA, 75 bp, synthetic construct
  source 1..75: mol_type = other DNA
tgaaacacatggctgtccagttcaaaacccacaatcaccagaaactttattcttatctctcaggctacaaccaca

SEQ ID NO: 133631 - DNA, 75 bp, synthetic construct
  source 1..75: mol_type = other DNA
cgattttctggcctggtcggcggcgaatcagattcagaaatttgattgcgtggtgatgaaccctccttttgctga

SEQ ID NO: 133632 - DNA, 75 bp, synthetic construct
  source 1..75: mol_type = other DNA
tacaagcagtatatcttcccgttgctgttttacaaacgcctgtcagatgtctatctggaagaatataacgaagcg

SEQ ID NO: 133633 - DNA, 75 bp, synthetic construct
  source 1..75: mol_type = other DNA
agacaatagcacgcgttaaaaatccattaccggcccccgccgaatgccatttttgtggtgggaatgtacggattg

SEQ ID NO: 133634 - DNA, 75 bp, synthetic construct
  source 1..75: mol_type = other DNA
tgcgcaggtgaaaaccctgagcgatcaggcatgtcaggagatggacagcaaggcgacgattgcgccagccaatag

SEQ ID NO: 133635 - DNA, 75 bp, synthetic construct
  source 1..75: mol_type = other DNA
tagccgtttgcaattacaaaaacagactaagaaactatttgagaacctcgcgcagttaggttatgaggtgaaaaa

SEQ ID NO: 133636 - DNA, 75 bp, synthetic construct
  source 1..75: mol_type = other DNA
gaagcctgatactggtcgcgcagctatgctctggccaaatggagttctcttcagagaaagtgagaaacagctcag

SEQ ID NO: 133637 - DNA, 75 bp, synthetic construct
  source 1..75: mol_type = other DNA
gtgaacctgctgacttccgctatcgcccgtatgaatatgtttctgcacgatattgaagagtttgatgtgctgcgc

SEQ ID NO: 133638 - DNA, 75 bp, synthetic construct
  source 1..75: mol_type = other DNA
atgatctggcagcctgagttcacagataaaacactctccaggaaacccggggcggttcacactgttaatggtcgg

SEQ ID NO: 133639 - DNA, 75 bp, synthetic construct
  source 1..75: mol_type = other DNA
gacgtggatttgcccctatatttccagacatctgttatcacttaacccattacaagcccgctgccgcagatattc

SEQ ID NO: 133640 - DNA, 75 bp, synthetic construct
  source 1..75: mol_type = other DNA
aatgcgtgattacccggtgattcaggcggaaattctgcttttctcgctggaatttattcttatcaacttagtggt

SEQ ID NO: 133641 - DNA, 75 bp, synthetic construct
  source 1..75: mol_type = other DNA
aagactatcacttatttaagtgatactggttgtctggagattcagggggccagtctacaacctggttctgcatct

SEQ ID NO: 133642 - DNA, 75 bp, synthetic construct
  source 1..75: mol_type = other DNA
tgacaatacgggttattacaaaaatgaaggtagtgccgaaaatattcagatagagctgagggatgatcaggaggc

SEQ ID NO: 133643 - DNA, 75 bp, synthetic construct
  source 1..75: mol_type = other DNA
aaaaaatggcgatagcaaaacggttattgttgatgagatcactcgtaatgcacagtttccacttaaggcaagagc

SEQ ID NO: 133644 - DNA, 75 bp, synthetic construct
  source 1..75: mol_type = other DNA
cagacctctacctgcagcaactcaagctggcccaccgcacagaaaaaacgccggatcactgggatcaacgggcgg

SEQ ID NO: 133645 - DNA, 75 bp, synthetic construct
  source 1..75: mol_type = other DNA
cagacctctatcttcagcaactcaaactggcccaccgcacagaaaagacgccggatcactgggatcaacgggcag

SEQ ID NO: 133646 - DNA, 75 bp, synthetic construct
  source 1..75: mol_type = other DNA
atatctttgcgctcaacgtcctgtatcagatgggaatttatgctcacgttgattttatccgtggacaaaattgcc

SEQ ID NO: 133647 - DNA, 75 bp, synthetic construct
  source 1..75: mol_type = other DNA
cggctcgttatggctcatcgcgtctgccgggtaagccgctactcgatattgtcggcaaaccgatgatccagcatg

SEQ ID NO: 133648 - DNA, 75 bp, synthetic construct
  source 1..75: mol_type = other DNA
ggttgccgcaaccggtccgggcgtcgacaccccggcatgccttgaaaaggtgcgtgccctgatggcgcaagaact

SEQ ID NO: 133649 - DNA, 75 bp, synthetic construct
  source 1..75: mol_type = other DNA
atcctgcatcgcactggccgcgttcgaatgtttgcgcccctgactaaccactcactcagctttatcactctcgcc

SEQ ID NO: 133650 - DNA, 75 bp, synthetic construct
  source 1..75: mol_type = other DNA
ggagaaagcgcctatctgacaggaaaagggttcgccggatacccggcctctctgaccggaagcgtacagcatatc

SEQ ID NO: 133651 - DNA, 75 bp, synthetic construct
  source 1..75: mol_type = other DNA
gaaggccgactggaatgatttccatcgggagcacggtattacccgcgcccgtgatgcctttcgtaacggtctggt

SEQ ID NO: 133652 - DNA, 75 bp, synthetic construct
  source 1..75: mol_type = other DNA
cgactgctggaatgggaagatacgtggggtgagtgtcgccgctgggcgatgccgatggaaatgctgagcggcagt

SEQ ID NO: 133653 - DNA, 75 bp, synthetic construct
  source 1..75: mol_type = other DNA
gcaaaacagcattcgcctgccagaaatagggcttaaacgtgtgtaccagttcaatacacaggtactgggaagcgc

SEQ ID NO: 133654 - DNA, 75 bp, synthetic construct
  source 1..75: mol_type = other DNA
actgaaggatggatcgtggcggctgtcgctgccaccaatttactgaaggtgacggagcagatccgaaaacgctgg

SEQ ID NO: 133655 - DNA, 75 bp, synthetic construct
  source 1..75: mol_type = other DNA
cagcttatcaatcctgacggggataaaagtctgctgcccggtagccagctgtctggcgcattcattgccctgacc

SEQ ID NO: 133656 - DNA, 75 bp, synthetic construct
  source 1..75: mol_type = other DNA
taatgatacgctagagttagataaacgactggcggagatgtcgtttaataccacgccagagcagcgtctgctggt

SEQ ID NO: 133657 - DNA, 75 bp, synthetic construct
  source 1..75: mol_type = other DNA
cgtcaaaaaatacccgtgtagatttttttattaaaaaacgaggaatattgccaggaactatagatgaagagcatt

SEQ ID NO: 133658 - DNA, 75 bp, synthetic construct
  source 1..75: mol_type = other DNA
caggttagccgcatgttctcagcgccgaccgccattcgcgtgctgaaaaaattccctaccgctgaaattcgcaaa

SEQ ID NO: 133659 - DNA, 75 bp, synthetic construct
  source 1..75: mol_type = other DNA
cacgcgtgctggcagccattgacgcgcgaatgggcgaagtttactgggccgaatatcagcgcgatgaaaacggcg

SEQ ID NO: 133660 - DNA, 75 bp, synthetic construct
  source 1..75: mol_type = other DNA
tttactgggccgaatatcagcgtgatgaaaacggtatctggcacggtgaagaaaccgaagccgtactcaaacccg

SEQ ID NO: 133661 - DNA, 75 bp, synthetic construct
  source 1..75: mol_type = other DNA
cgatttttgaatatggtctttatagccgccatagtgcggcgcatccaccgcgctatggcgatcaaattgaggagc

SEQ ID NO: 133662 - DNA, 75 bp, synthetic construct
  source 1..75: mol_type = other DNA
catcatgacgcgcaacgatcatgaatccggcaccgatcggctggtcgaggtgatgcatacggtggaagcagatat

SEQ ID NO: 133663 - DNA, 75 bp, synthetic construct
  source 1..75: mol_type = other DNA
ccgtgcaggcatttggcgggaaagccatcatgacgcgcaacgatcatgaatccggcaccgatcggctggtcgagg

SEQ ID NO: 133664 - DNA, 75 bp, synthetic construct
  source 1..75: mol_type = other DNA
tgcaaaactacagccagttaccggagtccatgccggagcaggcggaatcactggagcagctacggttgatgaacg

SEQ ID NO: 133665 - DNA, 75 bp, synthetic construct
  source 1..75: mol_type = other DNA
tgcccgttggttttgtgaaggccgaaccaacttgtgtcataacgccatcgaccgctggctggagaaacagccaga

SEQ ID NO: 133666 - DNA, 75 bp, synthetic construct
  source 1..75: mol_type = other DNA
tgcaaaactacagccagttaccggagtccatgccagagcaggcagaatcactggagcagctgcggttgatgagcg

SEQ ID NO: 133667 - DNA, 75 bp, synthetic construct
  source 1..75: mol_type = other DNA
cgatcccgcgttgccggtggcaacgctatgccacgcgatttctgccgcagaagcggctgagccaagcacggtaaa

SEQ ID NO: 133668 - DNA, 75 bp, synthetic construct
  source 1..75: mol_type = other DNA
gctcgggtattgcgcttattgttggattattcagcaaccgcagtcataatttctggcctgtattatccggtttcc

SEQ ID NO: 133669 - DNA, 75 bp, synthetic construct
  source 1..75: mol_type = other DNA
aaaggaatgttcatacgctcaatcagaatgatataaataattctgttaatagtgccaatgtacccgaaaatgaat

SEQ ID NO: 133670 - DNA, 75 bp, synthetic construct
  source 1..75: mol_type = other DNA
ctggattctggaagtcattcggcgtgattctggttttcccgagtcgcatatcctgacgcttccggaactgtgctg

SEQ ID NO: 133671 - DNA, 75 bp, synthetic construct
  source 1..75: mol_type = other DNA
tttctgtaacgctggtttccacactagtgggaattgaactgatatttagcgccgctagcctgttcagcttcgcca

SEQ ID NO: 133672 - DNA, 75 bp, synthetic construct
  source 1..75: mol_type = other DNA
cgtgctggatatcgtcattgcctggatcttccttggcgcaacgccaatggtttctgtgacattggtgtcaaccct

SEQ ID NO: 133673 - DNA, 75 bp, synthetic construct
  source 1..75: mol_type = other DNA
taaaaagcaccgcagagcgatccagtttattgccgtgctgctgtttatcgtcggtttgttatgtatcagtttccc

SEQ ID NO: 133674 - DNA, 75 bp, synthetic construct
  source 1..75: mol_type = other DNA
gcggtgatcggtcacgaaatggggcacgtggcattaggccatgtgaaaaaaggaatgcaggtggcacttggtaca

SEQ ID NO: 133675 - DNA, 75 bp, synthetic construct
  source 1..75: mol_type = other DNA
aaacagtgacgacattgcacttggattggttgatgatttgataatcataaaaaagcttactaaagaattaataac

SEQ ID NO: 133676 - DNA, 75 bp, synthetic construct
  source 1..75: mol_type = other DNA
atgttgaaagtttaaagtattttataataaaacattatgagttaaataatgaattcatagatcaagaaatgctgg

SEQ ID NO: 133677 - DNA, 75 bp, synthetic construct
  source 1..75: mol_type = other DNA
tacctacagggttattgcgctaactcaactgaaaagatgtacgaaaagatgatgccagagatcaggaaattgaac

SEQ ID NO: 133678 - DNA, 75 bp, synthetic construct
  source 1..75: mol_type = other DNA
gcggtgatcggtcacgaaatggggcacgtggcgttaggccatgtgaagaaagggatgcaggtggcgcttggtaca

SEQ ID NO: 133679 - DNA, 75 bp, synthetic construct
  source 1..75: mol_type = other DNA
agctcaatgtttgacgaccatccagcatccgcggagcgcgcccagcatattcgcgaccgtatgagcgctgatggg

SEQ ID NO: 133680 - DNA, 75 bp, synthetic construct
  source 1..75: mol_type = other DNA
atgcgtatttttctcttacttctgatgctatgcagttttcaggtattcgctgaacgattgccttcagtgaatgac

SEQ ID NO: 133681 - DNA, 75 bp, synthetic construct
  source 1..75: mol_type = other DNA
aataaagatattgcattcatctcaacaattattgggttaattgatcattttatcggcccaataaccattgctggc

SEQ ID NO: 133682 - DNA, 75 bp, synthetic construct
  source 1..75: mol_type = other DNA
tgctatgcggttttcccgtatccgctgaacaaacatcttctgtaaccgacttaaccgggatgttaacgacagaag

SEQ ID NO: 133683 - DNA, 66 bp, synthetic construct
  source 1..66: mol_type = other DNA
atgacggcagggttcaactttaataactatgcagcaggtttttgttccgctaccccggcgttaagg

SEQ ID NO: 133684 - DNA, 75 bp, synthetic construct
  source 1..75: mol_type = other DNA
cagataaggggtacagcttctttgcgcagacagctaaccctgtgatcaattgtgcaatgtggtctgaacgtctaa

SEQ ID NO: 133685 - DNA, 75 bp, synthetic construct
  source 1..75: mol_type = other DNA
tagttaatagcattaatcccgtttaccttgtagattcaatttgcggctcaggaaagagtcaccgccttatagaat

SEQ ID NO: 133686 - DNA, 75 bp, synthetic construct
  source 1..75: mol_type = other DNA
atgatggtcaccagcggtgagcatcacggcacactgcaatctttccgtacgctttcagaaaccggtatcgacatt

SEQ ID NO: 133687 - DNA, 75 bp, synthetic construct
  source 1..75: mol_type = other DNA
tggctggtgcggtggtttaaccacgctggtggaaattgccgcaatcgccaaatccagggggcaactggtggtgcc

SEQ ID NO: 133688 - DNA, 75 bp, synthetic construct
  source 1..75: mol_type = other DNA
cggaattgaaagcatcgcacagtttacccatatcaaagcgaaccttagccctttggatgctttagccaatcatct

SEQ ID NO: 133689 - DNA, 75 bp, synthetic construct
  source 1..75: mol_type = other DNA
tatttactggcaatcttaaactgggttccagtgcaaaaaataacaaaaaaacggggagtcgtgctgctcattctc

SEQ ID NO: 133690 - DNA, 75 bp, synthetic construct
  source 1..75: mol_type = other DNA
taacgccttccggttattattgcgggaacgctccggcacctccgctgcgtttcgtgccgccgttgcgcgtgaaat

SEQ ID NO: 133691 - DNA, 75 bp, synthetic construct
  source 1..75: mol_type = other DNA
aatcagatatcagtgagagcagaaagagcaggtataaacctgttaacgcttccacaggacaataaccacccgaca

SEQ ID NO: 133692 - DNA, 75 bp, synthetic construct
  source 1..75: mol_type = other DNA
tcgcgcaacggcatattcatatgtctccgcttgatgccctgatttatggcgttacacatggtgataaggtggcgg

SEQ ID NO: 133693 - DNA, 75 bp, synthetic construct
  source 1..75: mol_type = other DNA
tgaacgtctgcgaaagctgggctttaccgtggtggtgctggatagcaaagagcttactgaagtattaccgcgagc

SEQ ID NO: 133694 - DNA, 75 bp, synthetic construct
  source 1..75: mol_type = other DNA
gaatgtaaatctcccggcaagccaccacggcctgaccagttgcgcgaacatgaacgtctgcgaaagctgggcttt

SEQ ID NO: 133695 - DNA, 75 bp, synthetic construct
  source 1..75: mol_type = other DNA
cccatgacactgtatgaagccattgtccgcgactataccggcaggacaccggaagcacgggagcagacgctgatt

SEQ ID NO: 133696 - DNA, 75 bp, synthetic construct
  source 1..75: mol_type = other DNA
gccccggtcaggagcaggcagaacaacatattgatctggcctatgccatcactgctcacggtgcacagggggcga

SEQ ID NO: 133697 - DNA, 75 bp, synthetic construct
  source 1..75: mol_type = other DNA
tgttcagtacggcgcgggagctgcgggatgtggcggcaggccgtgccgttcttcgtcaggcggggctggccgggg

SEQ ID NO: 133698 - DNA, 75 bp, synthetic construct
  source 1..75: mol_type = other DNA
agcaaaaaatacactcttggtgcggtgaatagcgtgattcagcgcgcttcttcgctggttttcgacagcgtggaa

SEQ ID NO: 133699 - DNA, 75 bp, synthetic construct
  source 1..75: mol_type = other DNA
atgatctcactcccatcaggtccccgtatctggctcgttgccggcgttaccgatatgcgtaaatccttcaacgga

SEQ ID NO: 133700 - DNA, 75 bp, synthetic construct
  source 1..75: mol_type = other DNA
cgcctggtgatgccacagatgtggcgtcatgcgttgcctggcctcggtaaccagtggctggtactgctaaaagat

SEQ ID NO: 133701 - DNA, 75 bp, synthetic construct
  source 1..75: mol_type = other DNA
cacgcgccgaccagttgcgcgagcacgagcggctgcgcgagctgggctttaccgtggtggtgctggatagcaaaa

SEQ ID NO: 133702 - DNA, 75 bp, synthetic construct
  source 1..75: mol_type = other DNA
agtgaaaaaggctggcggggtcgcctttaagttcgtgtcacccggtcgccgctcggtaccggatcgcattgtcct

SEQ ID NO: 133703 - DNA, 75 bp, synthetic construct
  source 1..75: mol_type = other DNA
aaatcaccacgcgactgatcgatactgctcccactattccggtcggtgtttctaatcgtcatgtgcatctgtcgc

SEQ ID NO: 133704 - DNA, 75 bp, synthetic construct
  source 1..75: mol_type = other DNA
gcacgccacacgcgcattcaggcgttctacgaggctctggagcggccaccagtcggtcacgcgaccatcgaagca

SEQ ID NO: 133705 - DNA, 75 bp, synthetic construct
  source 1..75: mol_type = other DNA
gctgcttttccccgattcaaaaagcggggacagaatgatgcatttcgctacccgcagggcgttaagctcgattag

SEQ ID NO: 133706 - DNA, 75 bp, synthetic construct
  source 1..75: mol_type = other DNA
gttgagtggaaaaacgccactgaaacgcaatggcttaaagattcgccctcacagccattgcaacagtcactgaaa

SEQ ID NO: 133707 - DNA, 75 bp, synthetic construct
  source 1..75: mol_type = other DNA
acatattgacctggcctatgccatcaccgcccacggtgcgcagggggcaagtgaaacctttgccattgcgcttga

SEQ ID NO: 133708 - DNA, 75 bp, synthetic construct
  source 1..75: mol_type = other DNA
aacttttcctgggtattatctttactaccccagccgcaagcagcatccgccagcttttgcgttgttgatcgatgc

SEQ ID NO: 133709 - DNA, 75 bp, synthetic construct
  source 1..75: mol_type = other DNA
ttcaggttttacaggagtggtgtccaactatcttcgaggctctgaatctccatcagaaaaaactacacaatacga

SEQ ID NO: 133710 - DNA, 75 bp, synthetic construct
  source 1..75: mol_type = other DNA
aaatggcagagaacaaacctgacctgccggatggcaaaacagagcaggctgtcagggagattgccgggcaggagc

SEQ ID NO: 133711 - DNA, 75 bp, synthetic construct
  source 1..75: mol_type = other DNA
aaacagaaccgggtgaccgtacatccggagaaaagtgtcccccggacggccggttacagcgatgcggtcagtgtt

SEQ ID NO: 133712 - DNA, 75 bp, synthetic construct
  source 1..75: mol_type = other DNA
gccgcagtgctgccgatgtggtcatcatgaaggagattgtgcgtcagacgccggaactggcgggaggcggtatac

SEQ ID NO: 133713 - DNA, 75 bp, synthetic construct
  source 1..75: mol_type = other DNA
aaatggcttcctggctggttgagtggaaaaatgccactgaaacgcaatggcttaaagattcacccagtcacagcc

SEQ ID NO: 133714 - DNA, 75 bp, synthetic construct
  source 1..75: mol_type = other DNA
tgtttgtcgccgcaagacagtttaggcacccgtagtacagccatagtcattgccctcaatgtcggcgctcattac

SEQ ID NO: 133715 - DNA, 75 bp, synthetic construct
  source 1..75: mol_type = other DNA
caggagcgacttcagcagatggagcgggatatggtccgtgacctgcagaaagagaaaaccctgggcggagactga

SEQ ID NO: 133716 - DNA, 75 bp, synthetic construct
  source 1..75: mol_type = other DNA
cggcaggacaccggaagcacgggagcagacgctgattgtcacgcacctgaatgaggaccggcgcgtactgaacag

SEQ ID NO: 133717 - DNA, 75 bp, synthetic construct
  source 1..75: mol_type = other DNA
aaatgccggtggcagacggcgagcgactgagggtgacagggaaaattcccggactccgcgtctccggcggtgacc

SEQ ID NO: 133718 - DNA, 75 bp, synthetic construct
  source 1..75: mol_type = other DNA
ctggcctatgccatcaccgcccacggtgcgcagggggcgagtgaaacctttgccatcgcgcttgaaggcacggaa

SEQ ID NO: 133719 - DNA, 75 bp, synthetic construct
  source 1..75: mol_type = other DNA
cagcggggatgcacagttcgtggccctgcagggcagccgtaacggagagagcctgctggctgataatatgcagga

SEQ ID NO: 133720 - DNA, 75 bp, synthetic construct
  source 1..75: mol_type = other DNA
gtcgtttgctgcagaaggaaccagttttactgaactgggagctggggaaagagcaggtcatggtgcctgtcctga

SEQ ID NO: 133721 - DNA, 75 bp, synthetic construct
  source 1..75: mol_type = other DNA
ggatgcgcagttcgtggccctgcagggcagccgtaacggcgagagcctgctggcggataacatgcaggatggcgt

SEQ ID NO: 133722 - DNA, 75 bp, synthetic construct
  source 1..75: mol_type = other DNA
catcgtcccggctacgacctgaccttctccgcccccaaaagtgtctccatgatggccatgctcgggggggacaaa

SEQ ID NO: 133723 - DNA, 75 bp, synthetic construct
  source 1..75: mol_type = other DNA
tgaccctgcgggatgcgcagggcgaaacgcaggtggtgcgtatttcctccctggacagcagctggtcgctgttcc

SEQ ID NO: 133724 - DNA, 75 bp, synthetic construct
  source 1..75: mol_type = other DNA
tcacgtacacggacgtgctggccagaacggtcggcatactgccgccggaaaatggtgtgattgaacgggcacgcg

SEQ ID NO: 133725 - DNA, 75 bp, synthetic construct
  source 1..75: mol_type = other DNA
cccgggtgattcgccccgctcaggagcgggcagagcaacatattgaccttgcctatgccatcaccgctcacggtg

SEQ ID NO: 133726 - DNA, 75 bp, synthetic construct
  source 1..75: mol_type = other DNA
accggggcgcaaatatccgcagccgtatgtggcactgccggcgtttgaccgtaacggcaagtcagcaggtatctg

SEQ ID NO: 133727 - DNA, 75 bp, synthetic construct
  source 1..75: mol_type = other DNA
acgaagagtgaccgggagcgcggttatgtggccaacagcgtctggacggtgacagcggtttccggtgacagtgtc

SEQ ID NO: 133728 - DNA, 75 bp, synthetic construct
  source 1..75: mol_type = other DNA
ccgggcactcagtcgtgacatcatgaaacagacccgggtgaccgtacatccggagaaaagtgtcccccggacggc

SEQ ID NO: 133729 - DNA, 75 bp, synthetic construct
  source 1..75: mol_type = other DNA
atgccgggcgtaccggtggaggccttttccggacgctcgcaggctatccgggcggccgtcggggaggacgcctcg

SEQ ID NO: 133730 - DNA, 75 bp, synthetic construct
  source 1..75: mol_type = other DNA
accaggtggaaacggtgggtagtaaccagattatcaaagtgggatcaaaccaggttgaaaaggtggggatcattc

SEQ ID NO: 133731 - DNA, 75 bp, synthetic construct
  source 1..75: mol_type = other DNA
ctgcaggatgcggaaggtaacacgcggctgatttcgccccgggaggcggtggctgaaggcgtcacactgtacacc

SEQ ID NO: 133732 - DNA, 75 bp, synthetic construct
  source 1..75: mol_type = other DNA
cggtccgtgaggttgtccgggaaaacctgctgcaggagcgactgcagcagatggagcgggatatggttcgtgacc

SEQ ID NO: 133733 - DNA, 75 bp, synthetic construct
  source 1..75: mol_type = other DNA
gagacagccctgcacggtttattgcaccgggacgtaaatatccgcagccgtatgtggcactgccggcgtttgacc

SEQ ID NO: 133734 - DNA, 75 bp, synthetic construct
  source 1..75: mol_type = other DNA
gaatcgccggtgaaggtcgtccgtggaatcccggtgccatcaccggcggtcgcgtgtggggggatattccggaca

SEQ ID NO: 133735 - DNA, 75 bp, synthetic construct
  source 1..75: mol_type = other DNA
agggggcaagtgaaacctttgccattgcgcttgaaggcacggaaggtaaccggaaacagatggccggctttgagt

SEQ ID NO: 133736 - DNA, 75 bp, synthetic construct
  source 1..75: mol_type = other DNA
tggaatcccggtgccatcaccggtggtcgcgtgtggggggatatcccggataacagcgtccagccgggggccgga

SEQ ID NO: 133737 - DNA, 75 bp, synthetic construct
  source 1..75: mol_type = other DNA
ggtgcgtatttcctcgctggacagcagctggtcgctgttccggctggaaaaaatgctggtggcagacggcgagcg

SEQ ID NO: 133738 - DNA, 75 bp, synthetic construct
  source 1..75: mol_type = other DNA
tcatggtgcctgtcctgaacacagcgaatatacgtgacggagaactgcgtcgtctctccacctgggagaataacc

SEQ ID NO: 133739 - DNA, 75 bp, synthetic construct
  source 1..75: mol_type = other DNA
gacggtcagcagacccgggtgattcgccccggtcaggagcgggcagagcaacatattgacctggcctatgccatc

SEQ ID NO: 133740 - DNA, 75 bp, synthetic construct
  source 1..75: mol_type = other DNA
cgccagcttgagtacaagcagctctggcgtggtggtcaggtgcttgctgttccgccagcgtacacaagccagcgt

SEQ ID NO: 133741 - DNA, 75 bp, synthetic construct
  source 1..75: mol_type = other DNA
gcgcgggcaagttgccctcaagttgccctcatgttggggctaagttgggggcggtgaaaccgcctgtaagccgtg

SEQ ID NO: 133742 - DNA, 75 bp, synthetic construct
  source 1..75: mol_type = other DNA
cacctgaaagccgccgtctccttagtcgccgtggttcaggcgcaggggcgacaactggttaagaaagggaaggac

SEQ ID NO: 133743 - DNA, 75 bp, synthetic construct
  source 1..75: mol_type = other DNA
tgtcgatattgttgaaggacgttttgatgccgggatacgtctgggtgaaactgtcgataacgatatgattgcagt

SEQ ID NO: 133744 - DNA, 75 bp, synthetic construct
  source 1..75: mol_type = other DNA
tgtcgatattgttgaaggacgttttgatgccgggatacgtctgggtgaaactgtagataaagatatgattgcagt

SEQ ID NO: 133745 - DNA, 75 bp, synthetic construct
  source 1..75: mol_type = other DNA
tgccgggatccgtctgggcgaaagcgtggataaggacatgattgcggtacgaattgggccggacatgagaatggc

SEQ ID NO: 133746 - DNA, 75 bp, synthetic construct
  source 1..75: mol_type = other DNA
tatgaaatgcgccgccagcttgagtacaagcagctctggcgtggcggtcaggtgcttgctgttccgccagcgtat

SEQ ID NO: 133747 - DNA, 75 bp, synthetic construct
  source 1..75: mol_type = other DNA
tccggtggctgacgtcgtgggtgcggagagtatcgcgccgcaggccagcgcggagcctgcacacctgacttcatt

SEQ ID NO: 133748 - DNA, 75 bp, synthetic construct
  source 1..75: mol_type = other DNA
gccgggttccgcaatgtcacggcggcttacggggtgaacggcttcaccgatgagatgctggcggcgttccgggca

SEQ ID NO: 133749 - DNA, 75 bp, synthetic construct
  source 1..75: mol_type = other DNA
ctgttcccggcagccaggaaaacatcacatcgtaacagtaatacgccggaaagccgcccgacaccccatgacggt

SEQ ID NO: 133750 - DNA, 75 bp, synthetic construct
  source 1..75: mol_type = other DNA
gtgatgctgatgctgaccaccaccgcgatcgacgttgacgaggaactgttaaaccgctgcctggtgctgacggtg

SEQ ID NO: 133751 - DNA, 75 bp, synthetic construct
  source 1..75: mol_type = other DNA
gtggagttctaccaccacacgctgctgaacgcgccggaagcggtggcgtatctggaaaagcgccgtcttaaccat

SEQ ID NO: 133752 - DNA, 75 bp, synthetic construct
  source 1..75: mol_type = other DNA
agcatggcgtcggtcggtgaatggtctgggggagcatttgcaggcatgggtgcggtattgctatgggtatgacct

SEQ ID NO: 133753 - DNA, 75 bp, synthetic construct
  source 1..75: mol_type = other DNA
tgtaaatgaagatcatccaccagtcagagtaccacgcgaaaacattgaaaaaatccattacgtggcggggatcgc

SEQ ID NO: 133754 - DNA, 75 bp, synthetic construct
  source 1..75: mol_type = other DNA
gattatataaagtcaggagagcttattcaggttttgcaggactggtgcccatctttccccggatattacctctac

SEQ ID NO: 133755 - DNA, 75 bp, synthetic construct
  source 1..75: mol_type = other DNA
gcaactactgtaagtaatggaacggttgctcttcatttagctttgttagcgttaggtatatcggaaggagatgaa

SEQ ID NO: 133756 - DNA, 75 bp, synthetic construct
  source 1..75: mol_type = other DNA
ttcccattatcgtatcgcgggcattagcgatattaagtcgaagggggatggtgcaatttttctgccgttctggtt

SEQ ID NO: 133757 - DNA, 75 bp, synthetic construct
  source 1..75: mol_type = other DNA
acatataaacgggttgatggtgagcagtttgtaaaactattcacggcaaatatagcattaacctttgatttatca

SEQ ID NO: 133758 - DNA, 75 bp, synthetic construct
  source 1..75: mol_type = other DNA
tgtcgatattgttgaaggccgttttgatgccgggatacgtctgggtgaaactgtagataacgatatgattgcagt

SEQ ID NO: 133759 - DNA, 75 bp, synthetic construct
  source 1..75: mol_type = other DNA
tgtcgatattgttgaaggtcgttttgatgccgggatacgtctgggtgaaactgttgataaggatatgattgcagt

SEQ ID NO: 133760 - DNA, 75 bp, synthetic construct
  source 1..75: mol_type = other DNA
tgtcgatattgttgaaggacgttttgatgccgggatacgtctgggtgaaactgtggataaggatatgattgcagt

SEQ ID NO: 133761 - DNA, 75 bp, synthetic construct
  source 1..75: mol_type = other DNA
caaatctttcttgtggtggcaagagagcgaagttttaccaaagcagcgggcaaactcggcgtctctcagtctgca

SEQ ID NO: 133762 - DNA, 75 bp, synthetic construct
  source 1..75: mol_type = other DNA
taaggttgatgggcagctgacgtgtagtccattgccagaaagaattgatgccgcgttatcagggtttgggatcgc

SEQ ID NO: 133763 - DNA, 75 bp, synthetic construct
  source 1..75: mol_type = other DNA
tgtcgatattgttgaagggcgttttgatgccgggatacgtctgggtgaaactgtagataaggatatgattgcagt

SEQ ID NO: 133764 - DNA, 75 bp, synthetic construct
  source 1..75: mol_type = other DNA
acttgatggctactcagcaaatgatattaaagagatcatagcattacatcaaaacaggtatacgttcaaaaatgc

SEQ ID NO: 133765 - DNA, 75 bp, synthetic construct
  source 1..75: mol_type = other DNA
tcactcgggcattttgctgttaataggtaaaaaccccgttaactattacaagaccgtctggcaagtacttacctt

SEQ ID NO: 133766 - DNA, 75 bp, synthetic construct
  source 1..75: mol_type = other DNA
gtatgtcctgactgaaacgaatacgacccgctccgagtttgatcgctacggtaaggcgaaaaagatagaattttc

SEQ ID NO: 133767 - DNA, 75 bp, synthetic construct
  source 1..75: mol_type = other DNA
gtatgtcctgaccggaacgaatacgacccgttccgagtttgatcgctacggtaaggcgaaaaagatagaattttc

SEQ ID NO: 133768 - DNA, 75 bp, synthetic construct
  source 1..75: mol_type = other DNA
cattggtatgcgcctgcagaccgacccgaccgtgatttacgggatgggagagcgttataatggcaaactttctcg

SEQ ID NO: 133769 - DNA, 75 bp, synthetic construct
  source 1..75: mol_type = other DNA
ctggaaaacccggagtggattgaaggttggttctggccagacacctggatgtataccgccaataccaccgatgtc

SEQ ID NO: 133770 - DNA, 75 bp, synthetic construct
  source 1..75: mol_type = other DNA
ctctattcttaatgttatgaataaactcattgaacttcgacgcgccaaaatgttggcactctctttgctgcttat

SEQ ID NO: 133771 - DNA, 75 bp, synthetic construct
  source 1..75: mol_type = other DNA
gtcagcctttccgtctgcagcagacgcgcagtgctgccgatgtggccatcatgaaggagattgtgcgtcagacgc

SEQ ID NO: 133772 - DNA, 75 bp, synthetic construct
  source 1..75: mol_type = other DNA
gatggccatgttaggtggcgataagcgcctgattgatgcacataatcaggccgtggattttgctgttcgtcaggt

SEQ ID NO: 133773 - DNA, 75 bp, synthetic construct
  source 1..75: mol_type = other DNA
atgggtatcgatcccttctcattgcaattcctcgctactcttttacctgccatcgcgcttggctcaataggggta

SEQ ID NO: 133774 - DNA, 75 bp, synthetic construct
  source 1..75: mol_type = other DNA
tatcgcccagcagattgtccgctggctggagagtgaacacccgctaaaagccaaaattttgcctaccgaatggct

SEQ ID NO: 133775 - DNA, 75 bp, synthetic construct
  source 1..75: mol_type = other DNA
ccctgagagaaaaacaaaaaaacgacccggaaaggggggcgggagccgatgccgtaaaaagctatctgaaagaag

SEQ ID NO: 133776 - DNA, 75 bp, synthetic construct
  source 1..75: mol_type = other DNA
ttgtttttggtctgaaaattctttgtgtagatgaatttccgggttttactttagatgactacgaagaccttgaat

SEQ ID NO: 133777 - DNA, 75 bp, synthetic construct
  source 1..75: mol_type = other DNA
aaccgggttaatacgctatagcttacttctgccctacgccaaacagcggcgcgtaacgactgaacgtctgttttt

SEQ ID NO: 133778 - DNA, 75 bp, synthetic construct
  source 1..75: mol_type = other DNA
ttgtgctgaaaaattcccgggtttcaatcttgacgattacgatgatcttgagtttgtccctagaccgtatctcga

SEQ ID NO: 133779 - DNA, 75 bp, synthetic construct
  source 1..75: mol_type = other DNA
cgggcaggcgagaagatccgcgccaggcttaagaccgcaggtatcatgcgcgagtccgggcatgaacacttcacc

SEQ ID NO: 133780 - DNA, 75 bp, synthetic construct
  source 1..75: mol_type = other DNA
tgctggcggcgaatgaaaaaagttacatcactcagcttcaccagaacgcgcagcggctgctgcgcccgctcaacg

SEQ ID NO: 133781 - DNA, 75 bp, synthetic construct
  source 1..75: mol_type = other DNA
ggaagaacgcttacagtacagtgccatgaccgggcagagcctgttctaccttggtgaaactaacctgcaacacaa

SEQ ID NO: 133782 - DNA, 75 bp, synthetic construct
  source 1..75: mol_type = other DNA
cccggtataaaactttcaccacaggcaggaagaggcacaacgcccccatccggccagtcggtaaaccggtgcctg

SEQ ID NO: 133783 - DNA, 75 bp, synthetic construct
  source 1..75: mol_type = other DNA
tttgttgtaataccactaccacctgatgccattttgatcagtaaagaagcgcacatggattctgttagccacttc

SEQ ID NO: 133784 - DNA, 75 bp, synthetic construct
  source 1..75: mol_type = other DNA
tttttcagctcagtacactgccacatcagcagttacagcagagccggggctggcgccatgtcagcaatgagcgta

SEQ ID NO: 133785 - DNA, 75 bp, synthetic construct
  source 1..75: mol_type = other DNA
aatggctgcggcgattcggcatagtaaaaactacagtctgaacactatgcgagatgcagcaattctgggactgac

SEQ ID NO: 133786 - DNA, 75 bp, synthetic construct
  source 1..75: mol_type = other DNA
cgtggcgaagcggctttgccaaccattacgccgaccgacttgcgccacaacgtggggcattcactggctatgcaa

SEQ ID NO: 133787 - DNA, 75 bp, synthetic construct
  source 1..75: mol_type = other DNA
gaagccgctgctatgcccactttcgtcaggataaaatcagcaaccaattaatcaaatatatttgcttccattatg

SEQ ID NO: 133788 - DNA, 75 bp, synthetic construct
  source 1..75: mol_type = other DNA
ttcaatcgcaatcctgaaacagtgccaggtgatttgccgttctcattagagcgactggacgacgacgttcgcgcg

SEQ ID NO: 133789 - DNA, 75 bp, synthetic construct
  source 1..75: mol_type = other DNA
tgatgcaggagaaagcccgtctggaagcgctgttgccagagggctggaagaaggattacaccactttctttacgc

SEQ ID NO: 133790 - DNA, 75 bp, synthetic construct
  source 1..75: mol_type = other DNA
gaaggccagctggtcggacgcgcccgcccaccttattaaacgtgccattaccgaaaccgaaatgcgcaccgacag

SEQ ID NO: 133791 - DNA, 75 bp, synthetic construct
  source 1..75: mol_type = other DNA
atgtcagtaaccgagtctaaagcaaaaacccccgcgaaaaccagcaaaaaagcagttaaacctgccgaagccgca

SEQ ID NO: 133792 - DNA, 75 bp, synthetic construct
  source 1..75: mol_type = other DNA
cttccaccactggcttaatgaagttgatggtttaactgaaatcgcggtaaatcggcctgatgaactgtttgttaa

SEQ ID NO: 133793 - DNA, 75 bp, synthetic construct
  source 1..75: mol_type = other DNA
gtcttgtagtaatatataaagaaaaaatcttcgcgtctggaactattagatctctccttcattctttttctgaat

SEQ ID NO: 133794 - DNA, 75 bp, synthetic construct
  source 1..75: mol_type = other DNA
aggtacgtgaggatttattcagcgccctggagggggacggtacggcggacagcgtgctggttgagcgtctggtgc

SEQ ID NO: 133795 - DNA, 75 bp, synthetic construct
  source 1..75: mol_type = other DNA
cggtcagaaactacggtgacgaccgcgaacattatctgctgttaccagagccggaggcacagtacaccactgacg

SEQ ID NO: 133796 - DNA, 75 bp, synthetic construct
  source 1..75: mol_type = other DNA
ggcagcactgatgcagcaaccggacaaatctctggcactgctggcatggacgctctgcctgaatgtgtttgacag

SEQ ID NO: 133797 - DNA, 75 bp, synthetic construct
  source 1..75: mol_type = other DNA
agttgccgaacaatccagcggcgaacaagaggaagagaatttaatccgcctggatacgcggcatctttttgatgc

SEQ ID NO: 133798 - DNA, 75 bp, synthetic construct
  source 1..75: mol_type = other DNA
cggtggccctgatggtatggcggctgtgcagttgtgttttcgattactgcaacaccacccgtcatccgttcgtga

SEQ ID NO: 133799 - DNA, 75 bp, synthetic construct
  source 1..75: mol_type = other DNA
tggtcagtctgtatgacggtgagctttacgtccagcgtggggtacagaagaagcctcagaacgaggagagcggaa

SEQ ID NO: 133800 - DNA, 75 bp, synthetic construct
  source 1..75: mol_type = other DNA
tggtcgtcgccttgccgcactgcaactgttgctcagtgaacagcgcatcgatgccgggtatctggttatcgtcaa

SEQ ID NO: 133801 - DNA, 75 bp, synthetic construct
  source 1..75: mol_type = other DNA
acccatgagtgagaacacggtgaacaaggctctacgagtgatgggctatgacacgaaaacggaagtctgtgggca

SEQ ID NO: 133802 - DNA, 75 bp, synthetic construct
  source 1..75: mol_type = other DNA
atggctctgagtgatgtgaaagttcgttcggctaagcctgaagcaaaagcctataaacttactgacggtgaaggc

SEQ ID NO: 133803 - DNA, 75 bp, synthetic construct
  source 1..75: mol_type = other DNA
tgcggttgctacggcgaaaagacagcaccgtgcagctcttgaactgaaccgtatacctgaattacttcatcgcat

SEQ ID NO: 133804 - DNA, 75 bp, synthetic construct
  source 1..75: mol_type = other DNA
gcgaactaccgcgattatgcggtttgccgttcagagcggcttaatcgattacaacccagcacaagagattgccgg

SEQ ID NO: 133805 - DNA, 75 bp, synthetic construct
  source 1..75: mol_type = other DNA
atgaatgggaaccgagagcttatttttgtaggtgatcacgatccgcgtaaacccatgagtgagaatacggtgaac

SEQ ID NO: 133806 - DNA, 75 bp, synthetic construct
  source 1..75: mol_type = other DNA
gtacggccaagcctgaagaaaaagcctataagcttaccgatggtgatggcatggttttgctggttcaccctaacg

SEQ ID NO: 133807 - DNA, 75 bp, synthetic construct
  source 1..75: mol_type = other DNA
gtcagaaggggaaagtagcactgtcagctccgcttctcttttacgttctggttttcgtatgaacccggacagaat

SEQ ID NO: 133808 - DNA, 75 bp, synthetic construct
  source 1..75: mol_type = other DNA
ggtaaaacaacctttgcaaatgcctgtcttcagtacataccccatcatttacgatgtatttcaatcgaagataca

SEQ ID NO: 133809 - DNA, 75 bp, synthetic construct
  source 1..75: mol_type = other DNA
ggaagataaccgatttgcatcgggcatttattatcgtgatattcattttcaggaatactttgaaaaactgaagga

SEQ ID NO: 133810 - DNA, 75 bp, synthetic construct
  source 1..75: mol_type = other DNA
cgataccaggagagcgtgagccgctggaaggtgttaaacattcgcagcgtggttcaaagatgcggacacctcatc

SEQ ID NO: 133811 - DNA, 75 bp, synthetic construct
  source 1..75: mol_type = other DNA
cgatcactattccggaaggccattaacccgatttgctgtcgaactcatgttgttggttttcatccgttcaagcga

SEQ ID NO: 133812 - DNA, 75 bp, synthetic construct
  source 1..75: mol_type = other DNA
atatcatttatgacatagttaatgattattttagtcaatggctaaacaattctgatggactcactgaaatagccg

SEQ ID NO: 133813 - DNA, 75 bp, synthetic construct
  source 1..75: mol_type = other DNA
ccgaggctttatcgtctggtacggcaattatcatcgtgacgatccagactttcccgcatgtgctcaaggctattc

SEQ ID NO: 133814 - DNA, 75 bp, synthetic construct
  source 1..75: mol_type = other DNA
attatgaaaaaattctggctgataatggtatgcctgttactgaagaacaggccagagcagaatttgaagctatcg

SEQ ID NO: 133815 - DNA, 75 bp, synthetic construct
  source 1..75: mol_type = other DNA
ctgaacatgcactttgtttctaatgtcgatgggactcacatcgcggaagtgttgaaaaaagtaaacccggaaacg

SEQ ID NO: 133816 - DNA, 75 bp, synthetic construct
  source 1..75: mol_type = other DNA
ttgcttaaccagaagttcaccgaaatcaatatgaacccaggcctgaaaggccgggatatgcgcaaagcgtttgat

SEQ ID NO: 133817 - DNA, 75 bp, synthetic construct
  source 1..75: mol_type = other DNA
gtcgggcaaatctaactctatcgcctggacggcccatcagctttcccgcctgtatgatgaaaatggcgagaagca

SEQ ID NO: 133818 - DNA, 75 bp, synthetic construct
  source 1..75: mol_type = other DNA
ccgaaactggtcgccatgtacgttgataaaaaactcaagggcgtggattgtattcagacactatcccgtcttaat

SEQ ID NO: 133819 - DNA, 75 bp, synthetic construct
  source 1..75: mol_type = other DNA
cccgcaaccagtttaatctggtggggaattaccactctgacgctatctaccgcagcatgattgccagcgtgctgg

SEQ ID NO: 133820 - DNA, 75 bp, synthetic construct
  source 1..75: mol_type = other DNA
gcagcggggatgtgtatacagtctgcagaatgacttatccggcgtgccggatagtttcagttacagtcttgcgac

SEQ ID NO: 133821 - DNA, 75 bp, synthetic construct
  source 1..75: mol_type = other DNA
cagtgggctgatgtcatgcgtgaatgccgggagaccggggcaggtgccagggagcgactgcggacagcattactg

SEQ ID NO: 133822 - DNA, 75 bp, synthetic construct
  source 1..75: mol_type = other DNA
gtttttctaagttctccgcaaccttcgacgatcagatgctggtggattactccaaaaaccgcatcactgaagaga

SEQ ID NO: 133823 - DNA, 75 bp, synthetic construct
  source 1..75: mol_type = other DNA
actccatcctgctgcgtgaaatcactccgttcagcctgggtgcgttgattgcgctgtatgagcacaaaatcttta

SEQ ID NO: 133824 - DNA, 75 bp, synthetic construct
  source 1..75: mol_type = other DNA
gacaagcatttctccaccacgcctgccgagaaaaacctgcctgtcctgctggcgctgattggcatctggtacaac

SEQ ID NO: 133825 - DNA, 75 bp, synthetic construct
  source 1..75: mol_type = other DNA
tatcgatcagggcgcttctggtgtggatatggggcgtaatattttccagtctgaccatccggtggcgatgatgaa

SEQ ID NO: 133826 - DNA, 75 bp, synthetic construct
  source 1..75: mol_type = other DNA
cgaaaacgagaataattatcacttacagcaagaatcgaatctgatctattatggtgcttgctattatgtgccggc

SEQ ID NO: 133827 - DNA, 75 bp, synthetic construct
  source 1..75: mol_type = other DNA
atgacgaagaagaacggaaacgccttaaaccggaaaattttcataaatagcgaaaacccgcgaggtcgccgcccc

SEQ ID NO: 133828 - DNA, 75 bp, synthetic construct
  source 1..75: mol_type = other DNA
catactcaggctcgctacagcttgccggatgtcattaaagtctttcgcgaacttttcccggaagtgcgactcgag

SEQ ID NO: 133829 - DNA, 75 bp, synthetic construct
  source 1..75: mol_type = other DNA
cagaggtcattaaagcttttcgcgaacttttcccggaggttcggctcgagctaatccaggggacgccacaggaaa

SEQ ID NO: 133830 - DNA, 75 bp, synthetic construct
  source 1..75: mol_type = other DNA
caatctgacagaggtcgcgaatatgctctttacctcacagtcaggtgtcagccgtcatattcgagagctggagga

SEQ ID NO: 133831 - DNA, 75 bp, synthetic construct
  source 1..75: mol_type = other DNA
tcactatcgcttatcgaaaatccatgaacaagatttacgcttacaggaagaaacgcctgactatacgctggatgc

SEQ ID NO: 133832 - DNA, 75 bp, synthetic construct
  source 1..75: mol_type = other DNA
tttgcagaaacgggcgtgaaagccaaaaaatggcgcatcgacctggtgctgtttatcaacggcctgccaattgcc

SEQ ID NO: 133833 - DNA, 75 bp, synthetic construct
  source 1..75: mol_type = other DNA
ttaacctgcaaaacgacatcatcgcgcagatgatagaaaaaggctggattgtcggcaaaggtgatggctacgacc

SEQ ID NO: 133834 - DNA, 75 bp, synthetic construct
  source 1..75: mol_type = other DNA
ataatgcttttcttatttcgggtaaattttacgatagtcaaggtattgttaatcttgaattaattaagaatgagt

SEQ ID NO: 133835 - DNA, 75 bp, synthetic construct
  source 1..75: mol_type = other DNA
acatggaactggacttcggtaagaagggagaggagcgcattcgtgagatgcgagggcataacgttattgagcttg

SEQ ID NO: 133836 - DNA, 75 bp, synthetic construct
  source 1..75: mol_type = other DNA
acacccagtcgctacaatggccaacgtaaggttgttggtatccccgactgggctaactatgttgttacggaaaac

SEQ ID NO: 133837 - DNA, 75 bp, synthetic construct
  source 1..75: mol_type = other DNA
tggcgcgatcctccacggcgagatccctctacgctggcggctgctggcgatccttggaaatcccccggcgctgaa

SEQ ID NO: 133838 - DNA, 75 bp, synthetic construct
  source 1..75: mol_type = other DNA
aatcttcgggctgggtatggtggtgtttgggggataccgcattcttaacgccctgattgctgaagccgaaaaaga

SEQ ID NO: 133839 - DNA, 75 bp, synthetic construct
  source 1..75: mol_type = other DNA
tgaatacggacaatgttatgaatgtatatgactactgtaagtatttaattgatgtaaagacttctgctatcaatt

SEQ ID NO: 133840 - DNA, 75 bp, synthetic construct
  source 1..75: mol_type = other DNA
tgaaaactggcaggacgtttctgcacgcttactggcatatgaaaatgcggtgcgcaaaatgccggagtggcaggt

SEQ ID NO: 133841 - DNA, 75 bp, synthetic construct
  source 1..75: mol_type = other DNA
atggataattttcttgccctgaccttaacgggcaaaaaaccagccatgagtgagagggaaagcaacggtattcgc

SEQ ID NO: 133842 - DNA, 75 bp, synthetic construct
  source 1..75: mol_type = other DNA
ctgggacgagaaatttctgacgtggctgggtgcggcggggctggaggcactggtgttccatcaggagcctggtgg

SEQ ID NO: 133843 - DNA, 75 bp, synthetic construct
  source 1..75: mol_type = other DNA
actcttcactttttgttgcttacatgggctgtcttggatggggaagtgcttatttctatggatgggggacttcct

SEQ ID NO: 133844 - DNA, 75 bp, synthetic construct
  source 1..75: mol_type = other DNA
actcttcactttttgttgcttacatggggtgtcttgggtggggaagtgcttacttctatggctggggtacttcct

SEQ ID NO: 133845 - DNA, 75 bp, synthetic construct
  source 1..75: mol_type = other DNA
aatcgtacagtaatgggagttctacattcgttatacttaatagcgggcagattgatgacttcaaaattaatgtag

SEQ ID NO: 133846 - DNA, 75 bp, synthetic construct
  source 1..75: mol_type = other DNA
attccacctgttctggagttttcggtaattcatcagcatgttgagccagatgtactgattttctgcattcttgct

SEQ ID NO: 133847 - DNA, 75 bp, synthetic construct
  source 1..75: mol_type = other DNA
aatcgtacaggaacgggagtacgaagttcgttataatcaatagcggacatatcggtgactttgagattaatgtag

SEQ ID NO: 133848 - DNA, 75 bp, synthetic construct
  source 1..75: mol_type = other DNA
gccttaataattacgctgcttgccagctcgggcggcaggcttgtctcagttaaatgtatttcggaggtttcgttt

SEQ ID NO: 133849 - DNA, 75 bp, synthetic construct
  source 1..75: mol_type = other DNA
cgatggccgagcacttccgctccgatccgacctatgcagcggagttgcttgccgaagtccgccgcgacggcaccc

SEQ ID NO: 133850 - DNA, 75 bp, synthetic construct
  source 1..75: mol_type = other DNA
atgtttgcaaggtgcgtttattctgacactgtgtgctttactgttggggaattatatagcgttgaccttcttaac

SEQ ID NO: 133851 - DNA, 75 bp, synthetic construct
  source 1..75: mol_type = other DNA
ggcaacgattatgcgttgatagctgcggaaatagttgctcgtgatctttgtgttcgtgatgacgaagatgaggac

SEQ ID NO: 133852 - DNA, 75 bp, synthetic construct
  source 1..75: mol_type = other DNA
tgatggctgagtgcttccgcgctgatccgcactatgcagcagagctgctggccgaggtccgccgcgagggcaatc

SEQ ID NO: 133853 - DNA, 75 bp, synthetic construct
  source 1..75: mol_type = other DNA
cggacgagctggcaattctgttgcggcagatgcatgaggcgttcggggacgattgcacgcgttccggctctgcaa

SEQ ID NO: 133854 - DNA, 75 bp, synthetic construct
  source 1..75: mol_type = other DNA
cgatggccgagcacttccgcgctgatcctacctatgcagcggagctgctggccgaagtccgccgcgacggcaatc

SEQ ID NO: 133855 - DNA, 75 bp, synthetic construct
  source 1..75: mol_type = other DNA
tttcaaatttactgctcaacttaaaggtggcaatactcctggtgacttccagactgcagcagctttcgctgttac

SEQ ID NO: 133856 - DNA, 75 bp, synthetic construct
  source 1..75: mol_type = other DNA
cggtgacccaggtcgcccggttattcggggtaacgcgctggagtatcttcaaatggatgcaacgtataccggatt

SEQ ID NO: 133857 - DNA, 75 bp, synthetic construct
  source 1..75: mol_type = other DNA
tttctgcagagcgttttttccaccgcgagctaattagaaagctaattgaaaagaaaactcaaataaactcaaata

SEQ ID NO: 133858 - DNA, 75 bp, synthetic construct
  source 1..75: mol_type = other DNA
actcctcctggtatgtcgcgggaaatgttggagcaagccgtcagagaggggtattcagagcgagatgtcgtaagg

SEQ ID NO: 133859 - DNA, 75 bp, synthetic construct
  source 1..75: mol_type = other DNA
caattgcaatgaccatggctgcaggttctgcaatggctaatacaggagatgttaaatttttcggcaacgtatctg

SEQ ID NO: 133860 - DNA, 75 bp, synthetic construct
  source 1..75: mol_type = other DNA
caattgcaatgaccatgactgcaggttctgcaatggcgtctcagggcgatgttaagttctttggtaacgtatcag

SEQ ID NO: 133861 - DNA, 75 bp, synthetic construct
  source 1..75: mol_type = other DNA
atgaatgagaatcgagagctgatttttgtgggcgatcacgatccgcgtaaaccgatgagtgagaatacggttaac

SEQ ID NO: 133862 - DNA, 75 bp, synthetic construct
  source 1..75: mol_type = other DNA
ggggtatgacacaaccaaggaagtctgtggccatggattccgggcgatggcgtgcagtgcattgattgaatccgg

SEQ ID NO: 133863 - DNA, 75 bp, synthetic construct
  source 1..75: mol_type = other DNA
aatttgaatcaaggctcatgcaactcattggattagctagaaactcaataatctatttatcattagctatctatt

SEQ ID NO: 133864 - DNA, 75 bp, synthetic construct
  source 1..75: mol_type = other DNA
agagcaggaagcgataacgtttgaagtggttgcccgagaatggcatgcaagtaatcaaaagtggtcggcatcgca

SEQ ID NO: 133865 - DNA, 75 bp, synthetic construct
  source 1..75: mol_type = other DNA
aacatctgggggagaggaggttgatgttgcagtggtgggcggattatctggatgcgaatcgggagaagggggtga

SEQ ID NO: 133866 - DNA, 75 bp, synthetic construct
  source 1..75: mol_type = other DNA
cgattccgggcgagcgtgagccactggaaggagttaagcattctcaacgtggttcgaagatgcgtactccacatc

SEQ ID NO: 133867 - DNA, 75 bp, synthetic construct
  source 1..75: mol_type = other DNA
gagcgaagctcttacttttgaatctgttgccagggactggcataaggcttgtaaaaggaaatggtcagattccca

SEQ ID NO: 133868 - DNA, 75 bp, synthetic construct
  source 1..75: mol_type = other DNA
atggcttttggtgtttaccctgaaacatcgttagctgatgcgaggcagaaaagggaagaggctaggaggcttgtt

SEQ ID NO: 133869 - DNA, 75 bp, synthetic construct
  source 1..75: mol_type = other DNA
gcaatggtggggggattttatcgacgcaaacattcacgaggttgtttctccttttgactacgccagagtcaataa

SEQ ID NO: 133870 - DNA, 75 bp, synthetic construct
  source 1..75: mol_type = other DNA
tgcttatttttattcgatccagtgagctgcgttttgctcgctggtcagaaatcgattttgaaacgtcaatgtgga

SEQ ID NO: 133871 - DNA, 75 bp, synthetic construct
  source 1..75: mol_type = other DNA
caagagatgctgttgagcgtcagatgagccaccaagaacgtaatactgttcgtgcggcctacatacataaagctg

SEQ ID NO: 133872 - DNA, 75 bp, synthetic construct
  source 1..75: mol_type = other DNA
gccttaatcgaatcaggaaaatggtcaagggatgctgttgaacggcagatgagccaccaagagcgaaactccgtt

SEQ ID NO: 133873 - DNA, 75 bp, synthetic construct
  source 1..75: mol_type = other DNA
ccagagtgtggcagaagtgccggataccccggagaaccggaaaattgacctgagcgggcgctggggttttgacgg

SEQ ID NO: 133874 - DNA, 75 bp, synthetic construct
  source 1..75: mol_type = other DNA
tttcgccggatacgctgaaagtggtttataacagtgcaggggttatcactgatatcagcagggacgtacaggcgc

SEQ ID NO: 133875 - DNA, 75 bp, synthetic construct
  source 1..75: mol_type = other DNA
tagggactaatcggcagaaaatggttgatgaactggggcactgggaggaatggcgttcacgtgctgaacaaattc

SEQ ID NO: 133876 - DNA, 75 bp, synthetic construct
  source 1..75: mol_type = other DNA
tgtcgatgctgtggccagtgggacagagtgtggtggaggttgaggatacagaagaaaaccgcaaagctgatatct

SEQ ID NO: 133877 - DNA, 75 bp, synthetic construct
  source 1..75: mol_type = other DNA
aaagcggggaaactgccggaggcgtttttctggacggatgcggaaaacaatgatgtgccggtgacagcagaagag

SEQ ID NO: 133878 - DNA, 75 bp, synthetic construct
  source 1..75: mol_type = other DNA
ggaaatccacgtccggcagcgcaccatgaagaaagagctggaaaagctgaccagtgcggatgagatactggcata

SEQ ID NO: 133879 - DNA, 75 bp, synthetic construct
  source 1..75: mol_type = other DNA
cttccgaacaatggcctgtagttcattgatcgaatcaggtttgtggtctcgtgatgctgttgaacgtcagatgag

SEQ ID NO: 133880 - DNA, 75 bp, synthetic construct
  source 1..75: mol_type = other DNA
cgtccggcgctggagttaaggcgtatccctgagttgcttgagaaaatagacagctataccggcaggccgttaacc

SEQ ID NO: 133881 - DNA, 75 bp, synthetic construct
  source 1..75: mol_type = other DNA
ggacggtgttaaacattcacagcgtggttcaaagatgcggaagccccatcttgttcccttatcgcgtcaggcctt

SEQ ID NO: 133882 - DNA, 75 bp, synthetic construct
  source 1..75: mol_type = other DNA
ataaaaaaaacacttatggcatatgttttttatttgatgactacatctatattaataatattaattggtccttta

SEQ ID NO: 133883 - DNA, 75 bp, synthetic construct
  source 1..75: mol_type = other DNA
gaggcgcaaaagccggacaccgccagctaccgcacctttaacgaattctttgtccgtccgctgcgtgacgaagta

SEQ ID NO: 133884 - DNA, 75 bp, synthetic construct
  source 1..75: mol_type = other DNA
tggagtgaaacattcccatagaggctcaaaaatgggtaatgactccaacttattgatagtgttttatgttcagat

SEQ ID NO: 133885 - DNA, 75 bp, synthetic construct
  source 1..75: mol_type = other DNA
gaggccacccggttattgctgcagtacagtcagcaacaggcacaggtggaagggcagattgctgctgcaagacag

SEQ ID NO: 133886 - DNA, 75 bp, synthetic construct
  source 1..75: mol_type = other DNA
cgcctccgtccatgcgcagacggtggagaagaacgcacaggctcatgaacgcatggcccgcgaggtggagaaaac

SEQ ID NO: 133887 - DNA, 75 bp, synthetic construct
  source 1..75: mol_type = other DNA
gtggtgctgacggtaagctgggggttgtggcggatattggtggttcaggtatggcgatgttttccccgcagtaca

SEQ ID NO: 133888 - DNA, 75 bp, synthetic construct
  source 1..75: mol_type = other DNA
tgcggatgccgcaacctatggtcagttagagcgctatcgtattgcagaagagaatgcccgtattcagggtgatgc

SEQ ID NO: 133889 - DNA, 75 bp, synthetic construct
  source 1..75: mol_type = other DNA
ctgtttggtgctctgaccgcaaacgcggcggggatgccgtatgagcagttgctgactgcacggatcctggcaccg

SEQ ID NO: 133890 - DNA, 75 bp, synthetic construct
  source 1..75: mol_type = other DNA
catatccgggaatggtatcacgcaacatgcggcagccggtgcgctggcacaggtggtgggcagtggggcatttca

SEQ ID NO: 133891 - DNA, 75 bp, synthetic construct
  source 1..75: mol_type = other DNA
gtgagtattgatgatgtcaggaacatgatacagaggtaccgcgatgcggaaatggcggtactggagggaaaatct

SEQ ID NO: 133892 - DNA, 75 bp, synthetic construct
  source 1..75: mol_type = other DNA
atgatgcgctattggaatttaattgctctgttattctctgtgctatcaataacatccattgctgatgatacaacg

SEQ ID NO: 133893 - DNA, 75 bp, synthetic construct
  source 1..75: mol_type = other DNA
gcagcaacttttctttattgcttcaacaagccagagcagaagcgcaggccgatgcggcgactacattctcatctc

SEQ ID NO: 133894 - DNA, 75 bp, synthetic construct
  source 1..75: mol_type = other DNA
aagagcgcgctcagcgtcagcaacatgacctggatatcgccacggtgggtatgggtgatcagcagcggcagcgat

SEQ ID NO: 133895 - DNA, 75 bp, synthetic construct
  source 1..75: mol_type = other DNA
gcaggggcggcaggagtgggagcgccgccttgtggctctgaccgcgcggcgacgggggaatccggggtataaact

SEQ ID NO: 133896 - DNA, 75 bp, synthetic construct
  source 1..75: mol_type = other DNA
tacagtttcagaagatgccagtttatataagctggaagatggctcggtagaggggcttgcactcacgatttttga

SEQ ID NO: 133897 - DNA, 75 bp, synthetic construct
  source 1..75: mol_type = other DNA
cactacagatggcgctaaaacaacctttagatgccagtgaactggcggcgttatcggcatatatccagcaaaaat

SEQ ID NO: 133898 - DNA, 75 bp, synthetic construct
  source 1..75: mol_type = other DNA
agagcacaatacgctcaagcaactggtcacaaaactcgcggcagccacgggggaacccagtaaacagatctggca

SEQ ID NO: 133899 - DNA, 75 bp, synthetic construct
  source 1..75: mol_type = other DNA
atggctgatttagatgacatcaaagatggtaaggatttccataccgatacgccgcaacgaaatatcccgttcaca

SEQ ID NO: 133900 - DNA, 75 bp, synthetic construct
  source 1..75: mol_type = other DNA
gaagcctgtctctgagtggcctgcatcatggcggcgctacctcagtggatttgatcttgcggaaatgttcgaagg

SEQ ID NO: 133901 - DNA, 75 bp, synthetic construct
  source 1..75: mol_type = other DNA
gatttaacctcgctgaaatgtttgaggggcgaggagatgacagagaaatggtcgggatccttaaaaagattaagt

SEQ ID NO: 133902 - DNA, 75 bp, synthetic construct
  source 1..75: mol_type = other DNA
tctggcgcaacgtctgctggccgcgcaaaaaagccattctgcccgccagcttttagcgcaattaggggagtattt

SEQ ID NO: 133903 - DNA, 75 bp, synthetic construct
  source 1..75: mol_type = other DNA
aaatcaatcactcagcgcaatcgcacaaaaataatttgcaatattgcttgactcgcttttttgtcatggcgtatc

SEQ ID NO: 133904 - DNA, 75 bp, synthetic construct
  source 1..75: mol_type = other DNA
actcgcttttttgtcatggcgtatcgtttgcccgcacctcataaaacaggtgccgggtttgacagcctgaataaa

SEQ ID NO: 133905 - DNA, 75 bp, synthetic construct
  source 1..75: mol_type = other DNA
actcgcttttttgtcatggcgtatcgtttgcccgcacctcataaagcgggtgccgggtttagcagcctgaatacc

SEQ ID NO: 133906 - DNA, 75 bp, synthetic construct
  source 1..75: mol_type = other DNA
gggggatgcagtcccgactgtcgcgcatttttaatcctgagactggaagaacggtcatgctcgcgtttgaccacg

SEQ ID NO: 133907 - DNA, 75 bp, synthetic construct
  source 1..75: mol_type = other DNA
ttgctgctcgcggcgctggtggcgctgtgggtgatgcggcgcaaaagcgcggttcccggggagacgataaaaaat

SEQ ID NO: 133908 - DNA, 75 bp, synthetic construct
  source 1..75: mol_type = other DNA
ggttaaccggcaacttattgatcgacagaaacaatcgcactaaagctcacggcactattgcggaagtcgtgaatc

SEQ ID NO: 133909 - DNA, 75 bp, synthetic construct
  source 1..75: mol_type = other DNA
gtgatatcgcagacagattaaattatcagaaaatggctcaggtagtggatggagttacaaccttgttatacaaca

SEQ ID NO: 133910 - DNA, 75 bp, synthetic construct
  source 1..75: mol_type = other DNA
ctggatcgactgctccaccactcaaccacactgaacatcaaaggagaaagctaccgattaaaggaaaaacgcaaa

SEQ ID NO: 133911 - DNA, 75 bp, synthetic construct
  source 1..75: mol_type = other DNA
ggctgctacatcactcaaccacgctgaatatcaaaggagagagttaccggttaaaagagaaacgtaaagcaggag

SEQ ID NO: 133912 - DNA, 75 bp, synthetic construct
  source 1..75: mol_type = other DNA
taaaaaatatgaaacctggtacatcgaagatggtgatttttcttctctccgcatctgcgcgaaagtgctggtaag

SEQ ID NO: 133913 - DNA, 75 bp, synthetic construct
  source 1..75: mol_type = other DNA
aatcttgaagcaagtaatttattagatacaataaaatcaaagattattttatttgatactgatcaaacaaaattc

SEQ ID NO: 133914 - DNA, 75 bp, synthetic construct
  source 1..75: mol_type = other DNA
attgatttctctgatcaccttaattattggcaacacgatattcccgccgtaatgattactgacaccgctttttat

SEQ ID NO: 133915 - DNA, 75 bp, synthetic construct
  source 1..75: mol_type = other DNA
cgctactggcaggaactggaagtggctcagggtgactggaaaaacggtgccatgcgggcgtttaagaattttacg

SEQ ID NO: 133916 - DNA, 75 bp, synthetic construct
  source 1..75: mol_type = other DNA
aatggagcaggccggaaaagccacgcagtctctggggctgaaaagtgcggcagcccggcgggagctgggggtgtt

SEQ ID NO: 133917 - DNA, 75 bp, synthetic construct
  source 1..75: mol_type = other DNA
cgtttctgggatgcggccatgaatattggtcgtgaagactcgctggatgaacagatttccgctttacaggagaaa

SEQ ID NO: 133918 - DNA, 75 bp, synthetic construct
  source 1..75: mol_type = other DNA
acgttttgtctcgctatatgggcaacaacatctgaatagtgttgtacagtggttcaaaaaagctggggaagaatt

SEQ ID NO: 133919 - DNA, 75 bp, synthetic construct
  source 1..75: mol_type = other DNA
gaatattggtcgtgaagactcgctggatgaacagattgccgctttacaggagaaagtgtcgcgggcgaaaagact

SEQ ID NO: 133920 - DNA, 75 bp, synthetic construct
  source 1..75: mol_type = other DNA
gtgtgatgggggaagctggacctgaagccattctgccactgcgtcgtggtgctgacggtaagctgggggttgtgg

SEQ ID NO: 133921 - DNA, 75 bp, synthetic construct
  source 1..75: mol_type = other DNA
gtaactccgatgcaaaaggtatctggaaccacggttctccgctgtttatggaaatcgaaccgcgtttctccatcg

SEQ ID NO: 133922 - DNA, 75 bp, synthetic construct
  source 1..75: mol_type = other DNA
gggcgatgacagcggttatgcgaacaacggtattaaaacacgtaccaataactctattgcgtccagccatattct

SEQ ID NO: 133923 - DNA, 75 bp, synthetic construct
  source 1..75: mol_type = other DNA
gcggatgcgccggtattcttcggcggtaactccgatgcaaaaggtatctggaaccacggttctccgctgtttatg

SEQ ID NO: 133924 - DNA, 75 bp, synthetic construct
  source 1..75: mol_type = other DNA
atgcatacagtttctgaaaatcagtgcggtaaatacgcattactactgcaacaggccagaaccgaagcacaggcc

SEQ ID NO: 133925 - DNA, 75 bp, synthetic construct
  source 1..75: mol_type = other DNA
atgaaaaaaacattactggcagccggtgcggtactggcgctctcttcgtcttttactgtcaacgcagctgaaaat

SEQ ID NO: 133926 - DNA, 75 bp, synthetic construct
  source 1..75: mol_type = other DNA
ttgcgcctttttcactcccgcaagggattttcaaacagtggcatacatataaaaaaaacattactggcagccggt

SEQ ID NO: 133927 - DNA, 75 bp, synthetic construct
  source 1..75: mol_type = other DNA
gcgggtgaagcaggcgcggcagctccggcggctaaacaggaagcggctccggcagcggcccctgcaccagcagct

SEQ ID NO: 133928 - DNA, 75 bp, synthetic construct
  source 1..75: mol_type = other DNA
ggacggggtattcaaacttattttatctaaaatattttacagtggattttataaaagtagataagatgtttaccc

SEQ ID NO: 133929 - DNA, 75 bp, synthetic construct
  source 1..75: mol_type = other DNA
agaccagtgtcttcagctcccaccgaggggcatatcgccggattgcgcgtgaccaggtcagtccgttctttgatg

SEQ ID NO: 133930 - DNA, 75 bp, synthetic construct
  source 1..75: mol_type = other DNA
gatcgaagctccctgccagctacgaagtaaatgccgtatcgtttgatcactataacggcgtggcaactgtctatt

SEQ ID NO: 133931 - DNA, 75 bp, synthetic construct
  source 1..75: mol_type = other DNA
ttaacgttccggatatcggcggtgacgaagttgaagtgactgaagggatggggaaagggggggacaaagttgccc

SEQ ID NO: 133932 - DNA, 75 bp, synthetic construct
  source 1..75: mol_type = other DNA
atctgttcaattccctcatcaaagaacattcaaaaatcttctgttcgtgaaaaaaaacggaaatttcctccggta

SEQ ID NO: 133933 - DNA, 75 bp, synthetic construct
  source 1..75: mol_type = other DNA
atggagctaaaaatctggcaggctatcgacgtagttgataatgaattatctatgtttgccactgacggaaagcgc

SEQ ID NO: 133934 - DNA, 75 bp, synthetic construct
  source 1..75: mol_type = other DNA
aacccgtacagcaaagtcagaagtaaggcgctcaaggctgacagctaatgagtatgtcgagatttaccatgcagc

SEQ ID NO: 133935 - DNA, 75 bp, synthetic construct
  source 1..75: mol_type = other DNA
aaggtaaagcagcttccgcaaaattaatcaggtcaacccttgttgacgtttttcgtgaagcaatagccgaggggc

SEQ ID NO: 133936 - DNA, 75 bp, synthetic construct
  source 1..75: mol_type = other DNA
tacggtccacaacataaatggaatgaggatgccaaaaagaatgcagatattctgtttggtgcatcagaacaatct

SEQ ID NO: 133937 - DNA, 75 bp, synthetic construct
  source 1..75: mol_type = other DNA
cagacgctgaaagctacgacggcaatgctatctatatcgctaaccaccagaacaactatgacatggtgacagcat

SEQ ID NO: 133938 - DNA, 75 bp, synthetic construct
  source 1..75: mol_type = other DNA
taatatttttgtcttctgctgcttatgctgatatcaatctgtatggacctggtggcccgcatacagccttgctcg

SEQ ID NO: 133939 - DNA, 75 bp, synthetic construct
  source 1..75: mol_type = other DNA
catcacgatccgctttccccgaaaacagtatcaaagtattttacaaaggcgagaaatgcatctggactctcattt

SEQ ID NO: 133940 - DNA, 75 bp, synthetic construct
  source 1..75: mol_type = other DNA
agtttgctcaacgtcttctcgggcataaatcagattcaatggcggcgcggtatagggacagccgagggagagaat

SEQ ID NO: 133941 - DNA, 75 bp, synthetic construct
  source 1..75: mol_type = other DNA
gatttggccgtcgttacagggcagagagtcggcgatttgtgcagaatgaaatggtcagacataaacgacaaccat

SEQ ID NO: 133942 - DNA, 75 bp, synthetic construct
  source 1..75: mol_type = other DNA
gatagcaatcactgaagcaatacaggccaatattgagttactctcagacagcggacgcaaatcactaatagacag

SEQ ID NO: 133943 - DNA, 75 bp, synthetic construct
  source 1..75: mol_type = other DNA
agtttggattaggccgagacaggcgaatcgcaatcactgaagctatacaggccaacattgagttgctatccgaga

SEQ ID NO: 133944 - DNA, 75 bp, synthetic construct
  source 1..75: mol_type = other DNA
tatcacggtatttaacaaaggcgcgaaatgcatccgggatctcgtttgatggagacccaccgacatttcatgaac

SEQ ID NO: 133945 - DNA, 75 bp, synthetic construct
  source 1..75: mol_type = other DNA
cagttaccacacggacgccgtctaccggggacttatcgccagcgtggcaggcctgagcatcgaccggatctactt

SEQ ID NO: 133946 - DNA, 75 bp, synthetic construct
  source 1..75: mol_type = other DNA
cggcgcttatcacaccgatgctgtttaccggggattaattgccggcgttgccggcatcagtgccgaccgcatcta

SEQ ID NO: 133947 - DNA, 75 bp, synthetic construct
  source 1..75: mol_type = other DNA
gggccaggaatgagtcaccgcgactgatgcgccagtgggaagatgtcatgcgtgaatgccgtgataccggagcag

SEQ ID NO: 133948 - DNA, 75 bp, synthetic construct
  source 1..75: mol_type = other DNA
tgaacatgaagcgccgaggggacccggtaccgccaacgcgtatctgttgctggacagcggggtggcttcttcgcc

SEQ ID NO: 133949 - DNA, 75 bp, synthetic construct
  source 1..75: mol_type = other DNA
tgcgccgggatattaccgcattctgccggttgccgttgacggtatcagccacgtggccagcgaagaaaactggct

SEQ ID NO: 133950 - DNA, 75 bp, synthetic construct
  source 1..75: mol_type = other DNA
cagacagaacgcattaacgggcgagtgtatgagctggccaccactgaggatgtggtgatcacttccggtgcggcc

SEQ ID NO: 133951 - DNA, 75 bp, synthetic construct
  source 1..75: mol_type = other DNA
tggggcgctactttaaggatgccggctatcacacctgttacatcggcaaatggcatctcgacggtcatgactatt

SEQ ID NO: 133952 - DNA, 75 bp, synthetic construct
  source 1..75: mol_type = other DNA
aatcaagggattggcgatacggatattcgtgccggaatgatcggtgaaataggtgtctcaccgacatttaccgaa

SEQ ID NO: 133953 - DNA, 75 bp, synthetic construct
  source 1..75: mol_type = other DNA
ttcggccctcaggcaaagtggaatgaagaggcccggaagaaggccgatataatctttggggcatccgagcagtct

SEQ ID NO: 133954 - DNA, 75 bp, synthetic construct
  source 1..75: mol_type = other DNA
cgatacgcttggcgcgttgcaggctaaaggactgccgttaggtgtagtcaccaataaaccgacgccgtttgttgc

SEQ ID NO: 133955 - DNA, 75 bp, synthetic construct
  source 1..75: mol_type = other DNA
gatgtaatttatcagtctataaatgaccttctgcccgcattagggcttccgcatagcgaaaatcaggaatcgaaa

SEQ ID NO: 133956 - DNA, 75 bp, synthetic construct
  source 1..75: mol_type = other DNA
tctggataacctgggctgactgggcagccagtaatccaggaattggtgatgtcgtggaaatagcgccagactacg

SEQ ID NO: 133957 - DNA, 75 bp, synthetic construct
  source 1..75: mol_type = other DNA
atgatgcgtttcaccgattattccacgccaacaggtttcgtgacggcttactggaacccgccgacgctcaatggc

SEQ ID NO: 133958 - DNA, 75 bp, synthetic construct
  source 1..75: mol_type = other DNA
tcgccgcattacctctctctatttcaccttcctggggcgcggatttttattaccgccagcaggagaagaaaggca

SEQ ID NO: 133959 - DNA, 75 bp, synthetic construct
  source 1..75: mol_type = other DNA
aggagctagaaatgtactgggattcattagtagatcattttattgaaattacacacagcatccgtcagggagcga

SEQ ID NO: 133960 - DNA, 75 bp, synthetic construct
  source 1..75: mol_type = other DNA
aaccgccgacgatgatcaccgatttcgaaccgggtactattaacgttttggaaccggggcaagatattaagacgg

SEQ ID NO: 133961 - DNA, 75 bp, synthetic construct
  source 1..75: mol_type = other DNA
ctttaaatgcattgctttgcgctggggtagtgctgaccctgatgttttatcgtcgaggcgattcgcgacatcgac

SEQ ID NO: 133962 - DNA, 75 bp, synthetic construct
  source 1..75: mol_type = other DNA
ccgctggcgtatctgtgcggtatttacccgtactcatcatggggcactatcggggccaacattattttcctctct

SEQ ID NO: 133963 - DNA, 75 bp, synthetic construct
  source 1..75: mol_type = other DNA
taaatccggtcttccgggcaggtttgcaggcagcgctgccgcgcagcaggttacgggagcggcaggaacgctggc

SEQ ID NO: 133964 - DNA, 75 bp, synthetic construct
  source 1..75: mol_type = other DNA
ccccgccagccgctgttgctgcccgggccacgaccactgccattacctgcaccacgccctgtgccggcattaccc

SEQ ID NO: 133965 - DNA, 75 bp, synthetic construct
  source 1..75: mol_type = other DNA
cgctggtatgggttgaccagaatattgtcagcctgaaaaaactggctgctgttctggtgtccgtctggcttgcca

SEQ ID NO: 133966 - DNA, 75 bp, synthetic construct
  source 1..75: mol_type = other DNA
ggcctgaaatccattctgacggtattcagaacgctgtcagaacagtcaaaaggtgcacaggccagtgcgatgaac

SEQ ID NO: 133967 - DNA, 75 bp, synthetic construct
  source 1..75: mol_type = other DNA
gacgcactggcagaaaacattggtcagaaatttctgaccacgttcagaacggtaaaaatcgcggcgcaggaatta

SEQ ID NO: 133968 - DNA, 75 bp, synthetic construct
  source 1..75: mol_type = other DNA
agcaaatcacagcggcggatgccaacctgctgaccggttacggtattaacgtttaccagacgctggcggatgcac

SEQ ID NO: 133969 - DNA, 75 bp, synthetic construct
  source 1..75: mol_type = other DNA
agcgatcgctgggcgctggcgctggaagatggcaaattactggctgccgtcaaccagacgctggtgagttttgac

SEQ ID NO: 133970 - DNA, 75 bp, synthetic construct
  source 1..75: mol_type = other DNA
acgctggtgagttttgaccatccgctgactgacggcgacgaagtagctttcttcccgccggtaaccggaggttaa

SEQ ID NO: 133971 - DNA, 75 bp, synthetic construct
  source 1..75: mol_type = other DNA
aggtgcgcgagttggtgggaacagatgcaaccgaagtggctgcggatttcccaaccgttgaagcgttacgccagc

SEQ ID NO: 133972 - DNA, 75 bp, synthetic construct
  source 1..75: mol_type = other DNA
catcacgaaccgctttccccgaaaacagtatctaagtattttacaaaggcgagaaatgcatctggactctcattt

SEQ ID NO: 133973 - DNA, 75 bp, synthetic construct
  source 1..75: mol_type = other DNA
attggcctagacattaccttcccgaaagagggaatagcgccaggggtgcaggagactgccgatgccgtcgctcat

SEQ ID NO: 133974 - DNA, 75 bp, synthetic construct
  source 1..75: mol_type = other DNA
ttgtgttaggtgaaatgggcgtctcgccaaataaagtctctctcgcacactcggatccgtcaggaaaagacgtgg

SEQ ID NO: 133975 - DNA, 75 bp, synthetic construct
  source 1..75: mol_type = other DNA
ccggaaggggcaacgatcaagagtatccaagctactcaatcaggcgatgatttcaaatcctttaacgatgcgatg

SEQ ID NO: 133976 - DNA, 75 bp, synthetic construct
  source 1..75: mol_type = other DNA
catattatcgataacactactattattcgtccgcgttttgaatccgtcgatccaattaaagacgtaaacgccgag

SEQ ID NO: 133977 - DNA, 75 bp, synthetic construct
  source 1..75: mol_type = other DNA
aggcggtagaaactccagttaaaactaatcaccgccagcaacaaccaaaaattttcatcgacaaacaagtagaaa

SEQ ID NO: 133978 - DNA, 75 bp, synthetic construct
  source 1..75: mol_type = other DNA
ttcgcgtactcaccgaaccggcaggggaaacccccggggcaacacctcataagcgctaacttaaggggtgaacca

SEQ ID NO: 133979 - DNA, 75 bp, synthetic construct
  source 1..75: mol_type = other DNA
ttgagtcaggctgttacgcaactgcttgagagggactggcgggctcagcctaagcacaaagcgagttggcagcgc

SEQ ID NO: 133980 - DNA, 75 bp, synthetic construct
  source 1..75: mol_type = other DNA
tttactagcgtatcaatgggcttaggcgtgtttaaacagggcttgactggtgatacttcccagatcaactacagc

SEQ ID NO: 133981 - DNA, 75 bp, synthetic construct
  source 1..75: mol_type = other DNA
ctgcagctcgagaaaatctggccgaaaaacggctgggacgagaagacgatcagcttcgctggcagagaatggtat

SEQ ID NO: 133982 - DNA, 75 bp, synthetic construct
  source 1..75: mol_type = other DNA
gccatcgcaacccacggttgctttttgagtcgctgctcacgttagccatcacgctgacgttaagctggctttcta

SEQ ID NO: 133983 - DNA, 75 bp, synthetic construct
  source 1..75: mol_type = other DNA
gacagttacgcgcctgctatcgcgctttcgggggggatagtgaaacgtatcgcactgcaaccgccgcattttcgt

SEQ ID NO: 133984 - DNA, 75 bp, synthetic construct
  source 1..75: mol_type = other DNA
cgccagcgcccatcagcgccgaaattcgcaaggtacatcagtatctgaccttttcggtgaataccccggcacagc

SEQ ID NO: 133985 - DNA, 75 bp, synthetic construct
  source 1..75: mol_type = other DNA
ccaacgtgcagggtaatttgatggatgagatgctgattacgattattcaggggcacgctcagcgactcgggatga

SEQ ID NO: 133986 - DNA, 75 bp, synthetic construct
  source 1..75: mol_type = other DNA
cctctaccaccacggttattacatctgattattccggcagaagcgattttagatcacgcagaaagcgtgcaaaaa

SEQ ID NO: 133987 - DNA, 75 bp, synthetic construct
  source 1..75: mol_type = other DNA
caaacgtactgaacacataaacaaacgcctgatggaacgcattacactggctaatgaagcgggcgggattggtat

SEQ ID NO: 133988 - DNA, 75 bp, synthetic construct
  source 1..75: mol_type = other DNA
aaacaactcttgcaggccgttaatttgcttcaggcgcagcacttcgtcgctgtccattcccagctctttgccaat

SEQ ID NO: 133989 - DNA, 75 bp, synthetic construct
  source 1..75: mol_type = other DNA
ccatcatctgcaacggcaatatgatattgaactggcggagaaacttgcgcttgccagcctcacccaggacgttaa

SEQ ID NO: 133990 - DNA, 75 bp, synthetic construct
  source 1..75: mol_type = other DNA
ctgaccagtttgctcggcaacggaacatcggctctcgccagtgccactctctgtggcgcagcggcgttgtttatt

SEQ ID NO: 133991 - DNA, 75 bp, synthetic construct
  source 1..75: mol_type = other DNA
gcaggctggagattttaccctgcgaaggtacttactttttactggtagattacagcgccgtttctacaatggatg

SEQ ID NO: 133992 - DNA, 75 bp, synthetic construct
  source 1..75: mol_type = other DNA
tgcactgcaaccaccgcattttcgcgttgactggcaggaatttgccgcattgttaagcgagcgcacccgactggt

SEQ ID NO: 133993 - DNA, 75 bp, synthetic construct
  source 1..75: mol_type = other DNA
acggaagcgctgtacgcagcgattactgcattggtgcgcaatggcgatgaagtgatttgctttgatcccagctat

SEQ ID NO: 133994 - DNA, 75 bp, synthetic construct
  source 1..75: mol_type = other DNA
tgaaagacggtattcgccatatccgcgccctcgccaaccgggtactgaataaagaaggcgaagtcgaacgcctgc

SEQ ID NO: 133995 - DNA, 75 bp, synthetic construct
  source 1..75: mol_type = other DNA
gttatgcgccaacgtgcagggtaatttgatggatgagatgctgattacgattattcaggggcacgctcagcgact

SEQ ID NO: 133996 - DNA, 75 bp, synthetic construct
  source 1..75: mol_type = other DNA
gctcaatctcgcccttgatcgccgggtattgcatgaatttttccaacaggcagcaaacgcagttgccagtaaagg

SEQ ID NO: 133997 - DNA, 75 bp, synthetic construct
  source 1..75: mol_type = other DNA
atgagcagtttccagttcgagcaaataggcattattcgctcgccctataaagaaaaattcgccgttccacgccag

SEQ ID NO: 133998 - DNA, 75 bp, synthetic construct
  source 1..75: mol_type = other DNA
cggtggcggccattgtggcgctgggcgtctccatggcacccggtgaactgagaacctcacgggaagcacagataa

SEQ ID NO: 133999 - DNA, 75 bp, synthetic construct
  source 1..75: mol_type = other DNA
ttacgaaccacagcaagccacggcacatagcgagcgggcagtcatgccgcctgatgaacaatggctgatgattaa

SEQ ID NO: 134000 - DNA, 75 bp, synthetic construct
  source 1..75: mol_type = other DNA
actggcgtcgttgatgctcagtatgttgcgctccagcgatgtgctggcgcgactcggcggtgatgaatttggtct

SEQ ID NO: 134001 - DNA, 75 bp, synthetic construct
  source 1..75: mol_type = other DNA
aaaattacctttatgaatccggttgccgagaagatgagcggctggacacaagaagaggcgttgggcgttccacta

SEQ ID NO: 134002 - DNA, 75 bp, synthetic construct
  source 1..75: mol_type = other DNA
gtacgcatcagcgacatgcactggtgtttatcgatcttgatcgctttaaagcggtgaatgacagcgccgggcacg

SEQ ID NO: 134003 - DNA, 75 bp, synthetic construct
  source 1..75: mol_type = other DNA
tggtgaatgaactgcttgagcagctggaaaatagccctctaccaccacggttattacatctgattattccggcag

SEQ ID NO: 134004 - DNA, 75 bp, synthetic construct
  source 1..75: mol_type = other DNA
aatatggcagattacctgctacttgatggtgagttatgcgccaacgtgcagggtaatttgatggatgagatgctg

SEQ ID NO: 134005 - DNA, 75 bp, synthetic construct
  source 1..75: mol_type = other DNA
tgccacctgtattgggcggcgtgctggttgtcttgctggttccagacgacgatccacttaaagcatttctgatct

SEQ ID NO: 134006 - DNA, 75 bp, synthetic construct
  source 1..75: mol_type = other DNA
gttaacgtgaacctggaactgcagcagagcagccagaatcaggttgattccagctccatcttcaacggcattgaa

SEQ ID NO: 134007 - DNA, 75 bp, synthetic construct
  source 1..75: mol_type = other DNA
gagacagtaacttccgggattgtctctgcgctgggacgtagcggcctgaacgctgaaaactacgaaaacttcatc

SEQ ID NO: 134008 - DNA, 75 bp, synthetic construct
  source 1..75: mol_type = other DNA
tcctccgctgcaaaagcgggcattaaagcgggtgatgtgatcacctcactgaacggtaagccaatcagcagcttt

SEQ ID NO: 134009 - DNA, 75 bp, synthetic construct
  source 1..75: mol_type = other DNA
taggggggcgatgattgaccccgatccgtcagtattaaaacctgaaccgtcagataaaagatcttcttgtccgga

SEQ ID NO: 134010 - DNA, 75 bp, synthetic construct
  source 1..75: mol_type = other DNA
gcctggggcgttcgcctgtacagcgttgtgtgaatcacatttctgaaccggacaccgaaattccaccgggcttca

SEQ ID NO: 134011 - DNA, 75 bp, synthetic construct
  source 1..75: mol_type = other DNA
ggtaatggcgggagccaacaacagaaatttatggcgctgggctctggcgttatcattgatgccgataaaggctat

SEQ ID NO: 134012 - DNA, 75 bp, synthetic construct
  source 1..75: mol_type = other DNA
atgaactggttatccgcctggggcgttcgcctgcgcagcgttgcgtgaatcacatttctgaaccggacactgaaa

SEQ ID NO: 134013 - DNA, 75 bp, synthetic construct
  source 1..75: mol_type = other DNA
gacttcgaacgtctgatggaaggcgctaagctgctgaaatgttcagagtttggtgacgcgatcatcaagaacatg

SEQ ID NO: 134014 - DNA, 75 bp, synthetic construct
  source 1..75: mol_type = other DNA
atgttacgccatatgggctggactgaagccgcagacctgattgttaaaggtatggaaggcgcaatcaatgcgaag

SEQ ID NO: 134015 - DNA, 75 bp, synthetic construct
  source 1..75: mol_type = other DNA
atgagcagcaagcttcatggtcttgtctgggaagggtgtgccttcaccggcatgatcttatccagggtggcagta

SEQ ID NO: 134016 - DNA, 75 bp, synthetic construct
  source 1..75: mol_type = other DNA
atcaaaacatgatccgtcagataaaaaaccttctcgtccggacgcttcgcaaccggacacgcagacggatgaaca

SEQ ID NO: 134017 - DNA, 75 bp, synthetic construct
  source 1..75: mol_type = other DNA
cccgcgcagcgttgcgtaaatcacatttctgaaccggacactgaaataccgcctggattcaggggggacgtggca

SEQ ID NO: 134018 - DNA, 75 bp, synthetic construct
  source 1..75: mol_type = other DNA
gtgtggatcactattgcaccgttcgtgacaggtagttacagcctgaccgttgacgacacggtgtttgcgatggtt

SEQ ID NO: 134019 - DNA, 75 bp, synthetic construct
  source 1..75: mol_type = other DNA
gtgaagtggggatcaaggatgtgcggactttacggatccttggcgcaaaaatgtgctggttgcgactacgtcagc

SEQ ID NO: 134020 - DNA, 75 bp, synthetic construct
  source 1..75: mol_type = other DNA
taaaacctgatccgtcagataaaagatcttcttgtccggacgcttcgcaaccggacccgcagacggctgaacaga

SEQ ID NO: 134021 - DNA, 75 bp, synthetic construct
  source 1..75: mol_type = other DNA
tggcggcacctttatggggacgacctcgctggtgatgaccatcgcccgccagcttagcgtgccgggaaatcttaa

SEQ ID NO: 134022 - DNA, 75 bp, synthetic construct
  source 1..75: mol_type = other DNA
gcggttttcgtcctacattagatcatttttatagtaaggatgactttcctcaccttgcattggtaattaacaatt

SEQ ID NO: 134023 - DNA, 75 bp, synthetic construct
  source 1..75: mol_type = other DNA
aggatgtacgggcgttacgtatacttggggcaaaaatgtgttggttgcgactgcggcagcaaaacagtctggtga

SEQ ID NO: 134024 - DNA, 75 bp, synthetic construct
  source 1..75: mol_type = other DNA
aaaattcaattcttctattgaagaagtagcatatagcattattaaagacttgcgagctactggttacgcagttta

SEQ ID NO: 134025 - DNA, 75 bp, synthetic construct
  source 1..75: mol_type = other DNA
tagaaatgaaaactgtttgtgaactaatcatatcaagagatgatatgaaagataaaattcaagacagaattcaaa

SEQ ID NO: 134026 - DNA, 75 bp, synthetic construct
  source 1..75: mol_type = other DNA
cggatgctggatggcagaactcacagacaaatttgtgaaatgtttgggcgtctccagcgggattcgttctgggta

SEQ ID NO: 134027 - DNA, 75 bp, synthetic construct
  source 1..75: mol_type = other DNA
caaattctgaggggtcaaccattgataaaaaacagccgattaggggggcgatgattgaccccgatccgtcagtat

SEQ ID NO: 134028 - DNA, 75 bp, synthetic construct
  source 1..75: mol_type = other DNA
gctggttattcgtctggggcgttcgcctgtacagcgttgcgtgaatcacatttctgaaccggataccgaaattcc

SEQ ID NO: 134029 - DNA, 75 bp, synthetic construct
  source 1..75: mol_type = other DNA
gccagcgatgatggcgagatcactagaccgaaagaacccaactggacagcatgggccaatgacgttcgcacaatg

SEQ ID NO: 134030 - DNA, 75 bp, synthetic construct
  source 1..75: mol_type = other DNA
tgacgatgcccgtctggaactggccgctgacttttgcggcctgtttctgatgactgacaaacaagcggcgctgcc

SEQ ID NO: 134031 - DNA, 75 bp, synthetic construct
  source 1..75: mol_type = other DNA
actgaatccccgattatctatcgcgacgaaagtatgcgtacagcctgctctcccgacggtttatgcagtgacggc

SEQ ID NO: 134032 - DNA, 75 bp, synthetic construct
  source 1..75: mol_type = other DNA
atgtctcagccagcgaaagttttgctgctgtatgtccatccggaatctcaggactcggtggcaaaccgggttctg

SEQ ID NO: 134033 - DNA, 75 bp, synthetic construct
  source 1..75: mol_type = other DNA
attatttactgggcgagacggcaaagcgcacaggagctggcgagtcacgccagagcctacggtgactggctggca

SEQ ID NO: 134034 - DNA, 75 bp, synthetic construct
  source 1..75: mol_type = other DNA
ttgcgtgtggatcaagacaaacttgaacaggatcttaccgacgcaggatttgatcgagaagatatctacaatgcc

SEQ ID NO: 134035 - DNA, 75 bp, synthetic construct
  source 1..75: mol_type = other DNA
tggaagaattgctgatgcatatggcactcttgcaagagcagcagtgaaacctcagcagtatattgaaagaacagg

SEQ ID NO: 134036 - DNA, 75 bp, synthetic construct
  source 1..75: mol_type = other DNA
gccgtaaaagcaatacgtgatacagtcggaaacgaagagtttcagcgcttagcgagggctggtattgtggcatcg

SEQ ID NO: 134037 - DNA, 75 bp, synthetic construct
  source 1..75: mol_type = other DNA
gtgaaatacagtcgaaattccactcagcacttgatgaacttggtgctgaggctggctctgcatcagaaaaaagtg

SEQ ID NO: 134038 - DNA, 75 bp, synthetic construct
  source 1..75: mol_type = other DNA
cttggtggtgcagcactgaattctgctaatgatgtttccaggatggcaaagtcaggtgctgggcgtcagtcaatt

SEQ ID NO: 134039 - DNA, 75 bp, synthetic construct
  source 1..75: mol_type = other DNA
gagtgctcgcgctggataccgctgagttcgacctggaagacctgaaatgggtaatcctgatggtgttgttcaata

SEQ ID NO: 134040 - DNA, 75 bp, synthetic construct
  source 1..75: mol_type = other DNA
ggtgattaagctcctgcatcagtgcggagagaatggcgaagatcgcgtggcgggggctattctcgcaaccggttc

SEQ ID NO: 134041 - DNA, 75 bp, synthetic construct
  source 1..75: mol_type = other DNA
ttgatgcactgacgcacgttactttcccaaagggttttgcacaggcagaacccgcatgggttgtcacggtagacg

SEQ ID NO: 134042 - DNA, 75 bp, synthetic construct
  source 1..75: mol_type = other DNA
gcaatatcaaccgcagccgcaggatgccattttgcagcattcggtggtggcgaatcagttaacgctgttgaaata

SEQ ID NO: 134043 - DNA, 75 bp, synthetic construct
  source 1..75: mol_type = other DNA
ttcaccaaactggcagaggcactggcgagcggtggggcgatggatcacgacaccgcttatgttgaagcggtaggt

SEQ ID NO: 134044 - DNA, 75 bp, synthetic construct
  source 1..75: mol_type = other DNA
cgccggatttatttgtcatgccgataaagttcgtcacgccgcccgtgacgccctgctgttaagtgagtttgtgca

SEQ ID NO: 134045 - DNA, 75 bp, synthetic construct
  source 1..75: mol_type = other DNA
gatttgccattctcattagatcgactggacgacgacgttcgcgcatatctggaaaataacaacgctctggcgcca

SEQ ID NO: 134046 - DNA, 75 bp, synthetic construct
  source 1..75: mol_type = other DNA
atggcgcgggaaggggagttgagtctgaactatcgcgataacgatcagtaccgttattactcagcttcagtgcaa

SEQ ID NO: 134047 - DNA, 75 bp, synthetic construct
  source 1..75: mol_type = other DNA
cagcggtaacgtgaaaaatccgctctgttcagccagtgataaatattgctatcgcgataacagctacaaacaggc

SEQ ID NO: 134048 - DNA, 75 bp, synthetic construct
  source 1..75: mol_type = other DNA
aagccaactacttccagcatctgggcaacggcttctacggtcaggtctacggcggctatctcgaaaccatgtttg

SEQ ID NO: 134049 - DNA, 75 bp, synthetic construct
  source 1..75: mol_type = other DNA
cgctgcgcctgaaactggagtatgaaggtaataattatcagcaggattttgccgggaagctggagcaaaaaagta

SEQ ID NO: 134050 - DNA, 75 bp, synthetic construct
  source 1..75: mol_type = other DNA
gtatgcatcggcctacaaacaggacgagcaagagattaaacgcttgttagttgaggcagggatggaaaccagtgg

SEQ ID NO: 134051 - DNA, 75 bp, synthetic construct
  source 1..75: mol_type = other DNA
tagatagcacacggcatgaattgagcctcgcacagcagtcaaatgactcactctcccagcaactggctgaacgta

SEQ ID NO: 134052 - DNA, 75 bp, synthetic construct
  source 1..75: mol_type = other DNA
aggttttgcgcaagtattcgtgctgaaagagggcgtcgctggctgggctggcgagaacttgcctctggtgcgcgg

SEQ ID NO: 134053 - DNA, 75 bp, synthetic construct
  source 1..75: mol_type = other DNA
gcagcccgtcacacagcaaacgttgtttgagttaggttcggtcagcaaaacatttacgggtgtgctcggtggcga

SEQ ID NO: 134054 - DNA, 75 bp, synthetic construct
  source 1..75: mol_type = other DNA
ttcatgtttcgccaggggcgttagatgctgaaacttatggtgtgaagtcgaccattgaagatatggcctgctggg

SEQ ID NO: 134055 - DNA, 75 bp, synthetic construct
  source 1..75: mol_type = other DNA
cagaaaaagagctgggtatcgtgatgctggctaacaaaaactatcccaatccagcgagagtcgccgccgcctggc

SEQ ID NO: 134056 - DNA, 75 bp, synthetic construct
  source 1..75: mol_type = other DNA
ccatgagctggtggttactggcgattctgtatggcctggcgggttttggttatatcatcgtcgccacctacctgc

SEQ ID NO: 134057 - DNA, 75 bp, synthetic construct
  source 1..75: mol_type = other DNA
agcgaatttaccgcactggggatcgtgggcgctactttgctgacgggcaagtcgcctttttggggcgcaacgata

SEQ ID NO: 134058 - DNA, 75 bp, synthetic construct
  source 1..75: mol_type = other DNA
ggtatgtcgctggtagagctgaaagaggttgtttgccataaagacagcgtgattctgaagctcggcagtctggat

SEQ ID NO: 134059 - DNA, 75 bp, synthetic construct
  source 1..75: mol_type = other DNA
acaatgttggtgagcttgagaagcacaaagacaaaccggttatcgtggtagacggttctggcatgcagtgccagg

SEQ ID NO: 134060 - DNA, 75 bp, synthetic construct
  source 1..75: mol_type = other DNA
tggttttgcgcaagtattcgtgctgaaagaaggcgtcgctggctgggctggcgaaaacttgcctttggtgcgcgg

SEQ ID NO: 134061 - DNA, 75 bp, synthetic construct
  source 1..75: mol_type = other DNA
gccgtcatcccatactgagtatcgcctggatcgcgttactggtggcggttcttgtgactacgtttaagagcctga

SEQ ID NO: 134062 - DNA, 75 bp, synthetic construct
  source 1..75: mol_type = other DNA
attctactaatagtgattactattcaggcttttatcatacagatgtattaattcccggagaactgactcaggact

SEQ ID NO: 134063 - DNA, 75 bp, synthetic construct
  source 1..75: mol_type = other DNA
tagagaacggattatcttcaaagaacgagctcttaaaggggaagtaagtgctcatcttatctactttatacatca

SEQ ID NO: 134064 - DNA, 75 bp, synthetic construct
  source 1..75: mol_type = other DNA
tcgcgcccataacccatgggggctggcaattgtgactgcgcccaatgtggtactggcaacgggcggaccgggcga

SEQ ID NO: 134065 - DNA, 75 bp, synthetic construct
  source 1..75: mol_type = other DNA
gattaatgcaatcagccaggggcttggtggccccaaggttttggatgatgtttatcgccctgtcgatcgaccgac

SEQ ID NO: 134066 - DNA, 75 bp, synthetic construct
  source 1..75: mol_type = other DNA
cgcgcatcatatgaacattgcggagctggtgtcgcgcacgcaacctgctgaaaatgaacgggctgcgcagttgca

SEQ ID NO: 134067 - DNA, 75 bp, synthetic construct
  source 1..75: mol_type = other DNA
atcgcttacaggggcaaattttaaaacgcaccaccgatcgcgaactgttatctcacggtttgttaccaggtgtgg

SEQ ID NO: 134068 - DNA, 75 bp, synthetic construct
  source 1..75: mol_type = other DNA
cgctaccgcgggcaacggcgacaacttcgccaaactggcagaggcactggcgagcggtggggcgatggatcacga

SEQ ID NO: 134069 - DNA, 75 bp, synthetic construct
  source 1..75: mol_type = other DNA
attgtgatgctggctaacaaaaactatccaaacccggtgagagtcgccgccgcctggcagatcctcaacgctttg

SEQ ID NO: 134070 - DNA, 75 bp, synthetic construct
  source 1..75: mol_type = other DNA
tgcgccgcactttccgccccccaacagctcaacgatattgtgcatcgcgcaattaatccgcttatagagcaacaa

SEQ ID NO: 134071 - DNA, 75 bp, synthetic construct
  source 1..75: mol_type = other DNA
gcagcaggattacgtgcggcagttgaacttaaacgccgccagcaaaatgtgctgatcgctaccgccgggttatat

SEQ ID NO: 134072 - DNA, 75 bp, synthetic construct
  source 1..75: mol_type = other DNA
aaccaatctgaccgaaagccagtttggtataggcacgccgcgcagcacgtttccgtggaatttgtccggcaccta

SEQ ID NO: 134073 - DNA, 75 bp, synthetic construct
  source 1..75: mol_type = other DNA
tggcgctggaggaaggcctgacgctaaccaatctgaccgaaagccagtttggtataggcacgccgcgcagcacgt

SEQ ID NO: 134074 - DNA, 75 bp, synthetic construct
  source 1..75: mol_type = other DNA
cacgccttaacgacacctctattggcattgagctggaaaaccgaggctggcaaaaatcgtcgggggtgaaatatt

SEQ ID NO: 134075 - DNA, 75 bp, synthetic construct
  source 1..75: mol_type = other DNA
tatcagccagttaggtaaaatcgaagaagataaaatcctgcaagccaaaggccacaactacagcctcgaagccct

SEQ ID NO: 134076 - DNA, 75 bp, synthetic construct
  source 1..75: mol_type = other DNA
gctggcaggcaactatctgatggcggacctgttccgcaacggtacgtttgtgaccacttacctctccccgcgtga

SEQ ID NO: 134077 - DNA, 75 bp, synthetic construct
  source 1..75: mol_type = other DNA
ccgtgacctggacaatattctgaaagcgccgctggatgcgctgacgcatgcggggttgctaatggacgatgagct

SEQ ID NO: 134078 - DNA, 75 bp, synthetic construct
  source 1..75: mol_type = other DNA
cggggttgctaatggacgatgagcagtttgatgaaatcaatattgtacgtggtcagccagtatctggtggacggc

SEQ ID NO: 134079 - DNA, 75 bp, synthetic construct
  source 1..75: mol_type = other DNA
agcaactggcgcagcaggggattggtgcctggccggatgcgcagcgggttaacttttaccttgccggcgcgcgcc

SEQ ID NO: 134080 - DNA, 75 bp, synthetic construct
  source 1..75: mol_type = other DNA
atgggattccaacgaagtattctaaaacgcgtaaaattgaaatatctgcttccttactggaaagtctgaaggaat

SEQ ID NO: 134081 - DNA, 75 bp, synthetic construct
  source 1..75: mol_type = other DNA
ccggggcagaccagcctgtgggggctggtactcagcctgcccgcggacaccggctacccggacccgcgcggggag

SEQ ID NO: 134082 - DNA, 75 bp, synthetic construct
  source 1..75: mol_type = other DNA
tgccttacccgccaacggtgaacacctactggcgacgtcgtggcagcacatattttgtatcaaaagccggtgagc

SEQ ID NO: 134083 - DNA, 75 bp, synthetic construct
  source 1..75: mol_type = other DNA
cgatgcgctggaatttgatgctggcgctgaacaaggcgcggccctataccagcaatgaacggtttttactggcgg

SEQ ID NO: 134084 - DNA, 75 bp, synthetic construct
  source 1..75: mol_type = other DNA
ttgcagagccaccggataagcgtcgtcgtgacctggacaatatcctgaaagcaccactggatgcgctgacgcatg

SEQ ID NO: 134085 - DNA, 75 bp, synthetic construct
  source 1..75: mol_type = other DNA
gcgacgtcgtggcagcacatattttgtatcaaaagccggggagcgttatcgccgggcagtggcgtttattgttcg

SEQ ID NO: 134086 - DNA, 75 bp, synthetic construct
  source 1..75: mol_type = other DNA
tttcggtaagaaatatctgccggaaagtccgaatcaatacgccagtaaagaaaattcacaggaagcgcatgaagc

SEQ ID NO: 134087 - DNA, 75 bp, synthetic construct
  source 1..75: mol_type = other DNA
tgcttatttcgtgctgcgtgacggcgctgcgggtgttttcctggctgccaacactttcccgaaatcgcgtgaaac

SEQ ID NO: 134088 - DNA, 75 bp, synthetic construct
  source 1..75: mol_type = other DNA
ttgccgagccaccggataagcgccgccgtgacctggacaacattctgaaagcgccgctggatgcgctgacgcatg

SEQ ID NO: 134089 - DNA, 75 bp, synthetic construct
  source 1..75: mol_type = other DNA
aatcgcgtgaaacgcgtgcgccactggtggaagagctttatcgcttccgcgaccgtctgccggaaaaactgcgtt

SEQ ID NO: 134090 - DNA, 75 bp, synthetic construct
  source 1..75: mol_type = other DNA
tcgtccgtctacctatgcgtcgatcatttcgaccattcaggatcgtggctatgtgcgagtagaaaatcgtcgttt

SEQ ID NO: 134091 - DNA, 75 bp, synthetic construct
  source 1..75: mol_type = other DNA
tttaacaaaccgggtgagctgaatattgatcgtgttaatgcccagcaggcgcgtcgctttatggaccgcgtggtg

SEQ ID NO: 134092 - DNA, 75 bp, synthetic construct
  source 1..75: mol_type = other DNA
gtgattgcagagccaccggataagcgccgccgcgatctggacaatatcctgaaggcaccactggatgcgctgacg

SEQ ID NO: 134093 - DNA, 75 bp, synthetic construct
  source 1..75: mol_type = other DNA
tccggaaggctggcaataaaaattattgcagagccaccggataagcgccgtcgtgacctggacaatatcctgaag

SEQ ID NO: 134094 - DNA, 75 bp, synthetic construct
  source 1..75: mol_type = other DNA
atgaacgaatatcagtttgtgcttccatatccgccgtcgctgaacacctactggcgaagacggggaagccaatac

SEQ ID NO: 134095 - DNA, 75 bp, synthetic construct
  source 1..75: mol_type = other DNA
ttgatgaaatcaatatcgttcgtggtcagccagtatctggtggacgtctgggggtgaagatttaccccataatgc

SEQ ID NO: 134096 - DNA, 75 bp, synthetic construct
  source 1..75: mol_type = other DNA
cctcatcgtcaggtatggatccgcgcaaatggtagcgtgccagatgatctgcgcgttcatcagtacttactcggt

SEQ ID NO: 134097 - DNA, 75 bp, synthetic construct
  source 1..75: mol_type = other DNA
gcaacagcttcagcgcccgccgggttgctgctattcaaaacggtaaaccgattttctatatgacggcctctttcc

SEQ ID NO: 134098 - DNA, 75 bp, synthetic construct
  source 1..75: mol_type = other DNA
cggttcggtcaatgtgatgagcgaactgcccggcagaaccgttccttatgaagttgccgagatacgcccacaggt

SEQ ID NO: 134099 - DNA, 75 bp, synthetic construct
  source 1..75: mol_type = other DNA
gtttgcaacgcattcgtccgggtatcaaagcacgtgcaatttcctccagccaggaaaacgccagcaccgaatcga

SEQ ID NO: 134100 - DNA, 75 bp, synthetic construct
  source 1..75: mol_type = other DNA
ctgaactccgccaaaggctcgctggcgaaagcgctctctaccgccagcaatgcccgcatcacctttaaccgccag

SEQ ID NO: 134101 - DNA, 75 bp, synthetic construct
  source 1..75: mol_type = other DNA
tgatgctcaaagaattaaacttcgtaatgaattacgtgttcactcttgagacttggtattcatttttcgtcttgc

SEQ ID NO: 134102 - DNA, 75 bp, synthetic construct
  source 1..75: mol_type = other DNA
atgaacagaaaaagaatactgttaataccgttgttattctgcggcgcgatgctcaccgcctgcgatgacaaatcg

SEQ ID NO: 134103 - DNA, 75 bp, synthetic construct
  source 1..75: mol_type = other DNA
ggcgatcgggtgatcgtttccggtttgcaacgcattcgtccgggtatcaaagcacgagcaatttcctccagccag

SEQ ID NO: 134104 - DNA, 75 bp, synthetic construct
  source 1..75: mol_type = other DNA
gttcatcatgggcttctcgattgtcatctttgaaggttcgctggtgcaggcgggtctgcgtggcaacggtccgga

SEQ ID NO: 134105 - DNA, 75 bp, synthetic construct
  source 1..75: mol_type = other DNA
atggtgaacatgtcaagagattacgccaaaaaactgaaggcgatcagaaatgcggaaaaacttacgcaagctcag

SEQ ID NO: 134106 - DNA, 75 bp, synthetic construct
  source 1..75: mol_type = other DNA
gataatcagctggtgcagcttcacttggagaaggtctggccggaaaaaaaatggagtgagaagacggtgaacttt

SEQ ID NO: 134107 - DNA, 75 bp, synthetic construct
  source 1..75: mol_type = other DNA
gtcgccagtgggcaaatcaaacaggttcagggcagtacgccagtacagctcaatctggaaaatggtaaacgttac

SEQ ID NO: 134108 - DNA, 75 bp, synthetic construct
  source 1..75: mol_type = other DNA
acgtcggtcgctactggaacctgccgtacttctacattccgggtcacttcaacgtgaactcggtactgttcgaga

SEQ ID NO: 134109 - DNA, 75 bp, synthetic construct
  source 1..75: mol_type = other DNA
aacgtgaactcggtactgttcgagacggcggtctgtatgactatctacatcggcgtgatggctctggagtttgct

SEQ ID NO: 134110 - DNA, 75 bp, synthetic construct
  source 1..75: mol_type = other DNA
aaattattgcagagccaccggataagcgccgccgcgacctggacaatatcctgaaggcaccactggatgcgctga

SEQ ID NO: 134111 - DNA, 75 bp, synthetic construct
  source 1..75: mol_type = other DNA
ggctataaagattttaaagatttgccttacgcctgctctttatgctcggcctgtgacagcgtttgtccggtgcgt

SEQ ID NO: 134112 - DNA, 75 bp, synthetic construct
  source 1..75: mol_type = other DNA
atggccctgaagagtttcatctggttattgttgataacggacgctccgaggtgctggcctctgaatttcgtgatg

SEQ ID NO: 134113 - DNA, 75 bp, synthetic construct
  source 1..75: mol_type = other DNA
atgcgtatagagtttgttttgccttacccgccgacggtgaacacctactggcgacgtcatggcagcacatatttt

SEQ ID NO: 134114 - DNA, 75 bp, synthetic construct
  source 1..75: mol_type = other DNA
attctggaagcccgctacgccattgaagccagcaccgcatggcatgcggcaatgcgcgccacacctggcgacaaa

SEQ ID NO: 134115 - DNA, 75 bp, synthetic construct
  source 1..75: mol_type = other DNA
tgccttactcgccgacggtgaacacttactggcgacgccgtggcagcacatattttgtatcaaaagccggggagc

SEQ ID NO: 134116 - DNA, 75 bp, synthetic construct
  source 1..75: mol_type = other DNA
cactcttgagacttggtattcattttcgtcttgcgacgttaagaatccgtatcttcgagtgcccacacagattgt

SEQ ID NO: 134117 - DNA, 75 bp, synthetic construct
  source 1..75: mol_type = other DNA
acttcgtaatgaattacgtgttcactcctgagacttggtattcatttttcgtcttgcgacgtcaagaatccgtat

SEQ ID NO: 134118 - DNA, 75 bp, synthetic construct
  source 1..75: mol_type = other DNA
ccgcgaagatttcctcagtgctgaaatcggtattaccggctgtaatttcgcggtggcagaaaccggttcggtatg

SEQ ID NO: 134119 - DNA, 75 bp, synthetic construct
  source 1..75: mol_type = other DNA
cggctacaaggttaagccagcgggaagaatgaacgcatttttcaatatttcaaaaaagggattatgtgctgctat

SEQ ID NO: 134120 - DNA, 75 bp, synthetic construct
  source 1..75: mol_type = other DNA
gggccagcagttgcggccagtgatgctgataatgagccgaaaaccgacgcgcagccagagcaaccagacccggct

SEQ ID NO: 134121 - DNA, 75 bp, synthetic construct
  source 1..75: mol_type = other DNA
gaaaaagagatggaacaggcgggactgcgtccctcactaatggtagattgcagccacggtaattccaataaagat

SEQ ID NO: 134122 - DNA, 75 bp, synthetic construct
  source 1..75: mol_type = other DNA
atattcataaaggaggagcgctgaccgctcagggagggctgtttacaagtggaagcattgatattggtgacgctt

SEQ ID NO: 134123 - DNA, 75 bp, synthetic construct
  source 1..75: mol_type = other DNA
aacggagagatcaaactcaacacactgaaacagaaagcatcccctctcagggtatttgatgaacgttttggtacc

SEQ ID NO: 134124 - DNA, 75 bp, synthetic construct
  source 1..75: mol_type = other DNA
atgggacaaattttcaggaaggtattgatcgatgttttccgggaggctcaacaaacgggtgatgtcccgccaggc

SEQ ID NO: 134125 - DNA, 75 bp, synthetic construct
  source 1..75: mol_type = other DNA
ttttgacgtagaagccggcctgcaaatcgcgcgtaaattgctgcttgaactggtgagcatggggctgccgctggc

SEQ ID NO: 134126 - DNA, 75 bp, synthetic construct
  source 1..75: mol_type = other DNA
cgcgatcctcgtctgctggtggtgtgtggaccttgctccatccatgatcctgaagcggctctggaatatgctcgt

SEQ ID NO: 134127 - DNA, 75 bp, synthetic construct
  source 1..75: mol_type = other DNA
aggagccgcatccagacgatttatcagccggggagcttcacaccactcatcagagttgaaactgccaccggtgaa

SEQ ID NO: 134128 - DNA, 75 bp, synthetic construct
  source 1..75: mol_type = other DNA
aaatgtgaagttaacactggcaataaaaatatatttattttatacaccgttccaagtctatctgtatatgttcct

SEQ ID NO: 134129 - DNA, 75 bp, synthetic construct
  source 1..75: mol_type = other DNA
gtatatatgatccttcaccagtcgaaaaaatttactctttaaaaataaaaaattgtagaattaacattgacaata

SEQ ID NO: 134130 - DNA, 75 bp, synthetic construct
  source 1..75: mol_type = other DNA
ttttgacaaaagaaataacaaagtttactggcgttacaggcatcccataacaggaaaaaatcacggtctcggcag

SEQ ID NO: 134131 - DNA, 75 bp, synthetic construct
  source 1..75: mol_type = other DNA
tttccatttttctgaataattacagaaaaattcaacaggaaagatatgaaaacggagagatcaaactcaacacgc

SEQ ID NO: 134132 - DNA, 75 bp, synthetic construct
  source 1..75: mol_type = other DNA
cacactatccgctatgataggtccagataaatttgattctatagatagcaccgcatatgacgccttaaataaaat

SEQ ID NO: 134133 - DNA, 75 bp, synthetic construct
  source 1..75: mol_type = other DNA
caacaacagacccgtaaacatctttgtggatgaggctgctgaggtgatcaacgacccattcattcagcttctgaa

SEQ ID NO: 134134 - DNA, 75 bp, synthetic construct
  source 1..75: mol_type = other DNA
gatttcgcaggccattctccgtggtgaggccgtaataatcatagacccgaaaggggataaagagatgcgggacaa

SEQ ID NO: 134135 - DNA, 75 bp, synthetic construct
  source 1..75: mol_type = other DNA
aaaagataaaaaaacccctcaagagggcgatgtttatgtcattattaacagtcaactgacgctggcagaagattt

SEQ ID NO: 134136 - DNA, 75 bp, synthetic construct
  source 1..75: mol_type = other DNA
atgggttggactgaagccgcagacctgattgttaaaggtatggaaggcgcgatcaacgcgaagactgtaacctat

SEQ ID NO: 134137 - DNA, 75 bp, synthetic construct
  source 1..75: mol_type = other DNA
ttcgaacgtctgatggaaggcgctaaattgctgaaatgtagcgagtttggtgatgcgatcatcaagaacatgtaa

SEQ ID NO: 134138 - DNA, 75 bp, synthetic construct
  source 1..75: mol_type = other DNA
gaagtctggctggagaacacccagccgatgctgtcgcacattaacgtcggcacgggcgttgactgcactatccgc

SEQ ID NO: 134139 - DNA, 75 bp, synthetic construct
  source 1..75: mol_type = other DNA
ggattacaactggcgtgctaatggcacccccccctctttccatgagcaaagatctttatcagaaagattgttcag

SEQ ID NO: 134140 - DNA, 75 bp, synthetic construct
  source 1..75: mol_type = other DNA
gttaagccagcaacgttaacagttgcatttaaaaaagcgcgggattctgtagattacaactggtgccctaatggt

SEQ ID NO: 134141 - DNA, 75 bp, synthetic construct
  source 1..75: mol_type = other DNA
gacataacagaatgggacaaattttcaggaaagtactgatcgatgttttccgggaagctcagcaaacgggcgatg

SEQ ID NO: 134142 - DNA, 75 bp, synthetic construct
  source 1..75: mol_type = other DNA
tgataatgaaagagaaaaggagttacgtgcacgaccaaatgtaatgtttgaatttggttatttcgtagggaaatt

SEQ ID NO: 134143 - DNA, 75 bp, synthetic construct
  source 1..75: mol_type = other DNA
gcaggaacagacctgaatcaggccgttgatatggcaaagaataataaactgacatcaagtgcacaggcttcatat

SEQ ID NO: 134144 - DNA, 75 bp, synthetic construct
  source 1..75: mol_type = other DNA
cgtctttcggatatttgcaaaatgcagttttcggatatccgggatggttaccttcatgtcgaacagcaaaaaaca

SEQ ID NO: 134145 - DNA, 75 bp, synthetic construct
  source 1..75: mol_type = other DNA
tttacagcactttccaggaaaataatctgcgtttttcgcaaaatgcgccactggatatgtataccgagatgaata

SEQ ID NO: 134146 - DNA, 75 bp, synthetic construct
  source 1..75: mol_type = other DNA
tttcgctcatgatattcgcgtcattcgtctgccgcgtcacggtggctcttgcccgatagctatggcgctctcctg

SEQ ID NO: 134147 - DNA, 75 bp, synthetic construct
  source 1..75: mol_type = other DNA
tgcagaggtctcggcaaagggaatattacccaactgtcaggacacaggcacagcaacgattgttgccagcaaggg

SEQ ID NO: 134148 - DNA, 75 bp, synthetic construct
  source 1..75: mol_type = other DNA
ggatgtatctggtgccgcccgttttttcgcaactgactgaacagcatcaggcggtcattaacgccatttttgccg

SEQ ID NO: 134149 - DNA, 75 bp, synthetic construct
  source 1..75: mol_type = other DNA
aagatcaggcacgccgcgcacgcattacccgtctgcccggtgaccataatgagcatccgagggagaaaaacgcat

SEQ ID NO: 134150 - DNA, 75 bp, synthetic construct
  source 1..75: mol_type = other DNA
taccacatcgcctttgtcgtcggagggctttcagccgatcaaaccttaaaagttgccaagctggcctctacgaaa

SEQ ID NO: 134151 - DNA, 75 bp, synthetic construct
  source 1..75: mol_type = other DNA
caaccgaccttgaccgcgaaggggaagctattgcatggcacctgcgggaagtgattgggggtgatgatgcgcgct

SEQ ID NO: 134152 - DNA, 75 bp, synthetic construct
  source 1..75: mol_type = other DNA
gcaatatgtctcttcggaaaaagacggaaaggcgactggctggtcagcattttatgttgatggcaaatgggttga

SEQ ID NO: 134153 - DNA, 75 bp, synthetic construct
  source 1..75: mol_type = other DNA
tcggaaaaagacggaaaggcaactggctggtcagcattttatgttgatggcaaatgggttgaagggaaaaaataa

SEQ ID NO: 134154 - DNA, 75 bp, synthetic construct
  source 1..75: mol_type = other DNA
atccgtttttgcaagataaagacggtacagaatataaattaattagcgatcaacatattatggtaacgaagttag

SEQ ID NO: 134155 - DNA, 75 bp, synthetic construct
  source 1..75: mol_type = other DNA
tgatattgagctggaaaaagtgttgctcgaggccagtcagcaatttggtattggtgcgcaatttgggggtaaata

SEQ ID NO: 134156 - DNA, 75 bp, synthetic construct
  source 1..75: mol_type = other DNA
ctatgcggaaaaaatgggcgaaatcgtcaccgatcgcctggaagaaaatttccgcgagttaatgaactacgactt

SEQ ID NO: 134157 - DNA, 75 bp, synthetic construct
  source 1..75: mol_type = other DNA
ttactggcgacgccgtggcagcacatattttgtatcaaaagccggggagcgttatcgccgggcagtggcgcttat

SEQ ID NO: 134158 - DNA, 75 bp, synthetic construct
  source 1..75: mol_type = other DNA
accaaatcacgactccgcatcaaagttatcgcagacgttccagactcccgccgccgcgacctcgacaacatcctg

SEQ ID NO: 134159 - DNA, 75 bp, synthetic construct
  source 1..75: mol_type = other DNA
acccgacgacggtggacacctactggcgacgccgtggtagcacatattttgtatcaaaagccgatgagcgttatc

SEQ ID NO: 134160 - DNA, 75 bp, synthetic construct
  source 1..75: mol_type = other DNA
gtttgatgaaattaatattgtgcgcggtcagctcgttccaggtgggcggctgggcgtgaagatttacgaaataat

SEQ ID NO: 134161 - DNA, 75 bp, synthetic construct
  source 1..75: mol_type = other DNA
gtttgatgaaattaatattgtgcgcggtctgcctgttcctggtggtcgactggggataaaaatcacagagctgga

SEQ ID NO: 134162 - DNA, 75 bp, synthetic construct
  source 1..75: mol_type = other DNA
tcgtgacctggacaatatcctgaaggcaccactggatgtactgacgcatgcggggctgctcatagacgacgagca

SEQ ID NO: 134163 - DNA, 75 bp, synthetic construct
  source 1..75: mol_type = other DNA
ttgcagagccaccggataagcgtcgtcgtgacctggacaatattctgaaagcaccgctggatgcgctgacgcacg

SEQ ID NO: 134164 - DNA, 75 bp, synthetic construct
  source 1..75: mol_type = other DNA
gtttgatgaaatcaagattgtgctcggtcagctcgttcctggtgggaggctggatgtgaagatttacgaaatcag

SEQ ID NO: 134165 - DNA, 75 bp, synthetic construct
  source 1..75: mol_type = other DNA
atgcgtatagagtttgttttgccttatccgccgacggtgaatacttactggcgacgccgtggcagcacatatttt

SEQ ID NO: 134166 - DNA, 75 bp, synthetic construct
  source 1..75: mol_type = other DNA
tattttgtatcaaaagccggtgagcgttatcgccgggatgtggcgcttattgttcgccagcagcggctgaaatta

SEQ ID NO: 134167 - DNA, 75 bp, synthetic construct
  source 1..75: mol_type = other DNA
aatctgtccggaaggctggcgataaaggttatcgcagagccgccggataagcgccgtcgtgatctggacaatatt

SEQ ID NO: 134168 - DNA, 75 bp, synthetic construct
  source 1..75: mol_type = other DNA
gtttgatgaaatcaatattgtacgtggccagccagtatctggtggacgtctgggggtgaagatttaccccataat

SEQ ID NO: 134169 - DNA, 75 bp, synthetic construct
  source 1..75: mol_type = other DNA
acttccctgactgacataaacgctctggcttacggacgtggccctggtagctttaccggcgtgcgcatcggtatt

SEQ ID NO: 134170 - DNA, 75 bp, synthetic construct
  source 1..75: mol_type = other DNA
tttactttcaggtcctgacagcgatagccattggtattctccttggccatttctatcctgaaataggcgagcaaa

SEQ ID NO: 134171 - DNA, 75 bp, synthetic construct
  source 1..75: mol_type = other DNA
atggaaaagatcgcagagcttgagacacgaataaacaagctgagtgatgaagttgaaggcctgatctcgttactc

SEQ ID NO: 134172 - DNA, 75 bp, synthetic construct
  source 1..75: mol_type = other DNA
caccctcaacactggcgcacggggcttaccccttctggtctggtgagctgttcaacaaggggcgcgccagtgccg

SEQ ID NO: 134173 - DNA, 75 bp, synthetic construct
  source 1..75: mol_type = other DNA
atgcgctgttttactggtacgacaatcacgccacaacagccagaaaagagcatgaatatttaataaaacgatttg

SEQ ID NO: 134174 - DNA, 75 bp, synthetic construct
  source 1..75: mol_type = other DNA
ggttttgaacataatgtggttgaacagttgcttgggcacacattaggcggtgttgccggggtttataacagaagc

SEQ ID NO: 134175 - DNA, 75 bp, synthetic construct
  source 1..75: mol_type = other DNA
tcagtaccatcgcgctgattattggtcttatcatcgttaacgtcgtgcagcctggtgccggaatgaacgtcgatc

SEQ ID NO: 134176 - DNA, 75 bp, synthetic construct
  source 1..75: mol_type = other DNA
agccgaagcgtcgcggtggtcgcaacgtcttttatgtgggttcccgtcaggaaatggcgctggaatacatcgccg

SEQ ID NO: 134177 - DNA, 75 bp, synthetic construct
  source 1..75: mol_type = other DNA
atcactacggagtgcccgtcagagtcattcgttgggagccggaaacacaacgggttatctacctccgtgaaggct

SEQ ID NO: 134178 - DNA, 75 bp, synthetic construct
  source 1..75: mol_type = other DNA
cagggtggctatgtttgcagggatccctgtttttgcacttctttttttggttgttattggctgtattttgacatt

SEQ ID NO: 134179 - DNA, 75 bp, synthetic construct
  source 1..75: mol_type = other DNA
ctctgcgacgatggccagtggcggcagattgtcaccattgaggacgcccttgccggtggctgcaccctgttcgac

SEQ ID NO: 134180 - DNA, 75 bp, synthetic construct
  source 1..75: mol_type = other DNA
tatgtcgatgaaatattctggatcccgaattttcagaaactgcgcaaagtcgcctcgggcatggcctcgcaaaag

SEQ ID NO: 134181 - DNA, 75 bp, synthetic construct
  source 1..75: mol_type = other DNA
aacacaacgggttatctacctccgcgaaggctatgagcatgagtgcttcagtccgctcgaacagtttcgtcgtaa

SEQ ID NO: 134182 - DNA, 75 bp, synthetic construct
  source 1..75: mol_type = other DNA
gcagggacaaaatgtgacgctgactctgccgaaaggtgtgaccagcaagacggggaatacggtaacaaccgatgc

SEQ ID NO: 134183 - DNA, 75 bp, synthetic construct
  source 1..75: mol_type = other DNA
ctgactcaccttctacctctatggcgaaaagagttaaaagtaccagagagagagcatgtcgctcagaaaaggatt

SEQ ID NO: 134184 - DNA, 75 bp, synthetic construct
  source 1..75: mol_type = other DNA
agggcggcagcctgaccattatcgcgacggcgcttatcgataccggttctaaaatggacgaagttatctacgaag

SEQ ID NO: 134185 - DNA, 75 bp, synthetic construct
  source 1..75: mol_type = other DNA
ggcgggaatatgtgggtcgacattcagacgccggaaggggtgacggagaaggattatcagttcctgccgtcgaaa

SEQ ID NO: 134186 - DNA, 75 bp, synthetic construct
  source 1..75: mol_type = other DNA
gggagaacacaatatttccgcttcggtgaatggtgctcagaagacggtcacggtgaaatttaacgcggatgccag

SEQ ID NO: 134187 - DNA, 75 bp, synthetic construct
  source 1..75: mol_type = other DNA
acaaccaatgcggcagggaaagtggacattgagcttatgtcaacggttgcgggagaacacaatatttccgcttcg

SEQ ID NO: 134188 - DNA, 75 bp, synthetic construct
  source 1..75: mol_type = other DNA
aatcgacgcaatggaattcctcattaacaagctcgcgatgaccaagacgaatgacgatttctttgagatgatgaa

SEQ ID NO: 134189 - DNA, 75 bp, synthetic construct
  source 1..75: mol_type = other DNA
agtttaaaggtacaggtaacatggaactgcacctttctcgtaagatcgcagaaaaacgcgtcttcccggctatcg

SEQ ID NO: 134190 - DNA, 75 bp, synthetic construct
  source 1..75: mol_type = other DNA
aatcggtcgtggtcaacgtggtctgattgtggcgccgccgaaagcgggtaaaaccatgctgctgcagaatatcgc

SEQ ID NO: 134191 - DNA, 75 bp, synthetic construct
  source 1..75: mol_type = other DNA
aacggttctactgaagatttaactgctcgcgtactggatctggcatcacctatcggtcgtggtcagcgtggtctg

SEQ ID NO: 134192 - DNA, 75 bp, synthetic construct
  source 1..75: mol_type = other DNA
gtaaaatcattcacccgatgggtgaaatcgatgcaatggagttcctcatcaataaactggcgatgaccaagacca

SEQ ID NO: 134193 - DNA, 75 bp, synthetic construct
  source 1..75: mol_type = other DNA
gcaaaattattcacccgatgggcgaaatcgatgccatggagttcctcattaataaactggcgatgaccaagacca

SEQ ID NO: 134194 - DNA, 75 bp, synthetic construct
  source 1..75: mol_type = other DNA
ttttcctttccgccagcaaggcacaggcccacgtctttaagcagtacatcatcgacttcgctaaagaagtggagg

SEQ ID NO: 134195 - DNA, 75 bp, synthetic construct
  source 1..75: mol_type = other DNA
tcaaaaaactgactgaacagtacaacgtgacatacatcggtatcgactcaaccggcgtcggtcatggggtttacg

SEQ ID NO: 134196 - DNA, 75 bp, synthetic construct
  source 1..75: mol_type = other DNA
tggtgggaagccggaaaaaccaaccgcatccgcaacctgctgaagtcacgccagatcggcgcgaccttttacttt

SEQ ID NO: 134197 - DNA, 75 bp, synthetic construct
  source 1..75: mol_type = other DNA
ttcaacaagggacgctcagacaagagcgagcgcgtcgatatcgatatcagtcacgcagcactcgcgaagggtgtc

SEQ ID NO: 134198 - DNA, 75 bp, synthetic construct
  source 1..75: mol_type = other DNA
aggcctacgacattatcagtcaccgccgtctggagtttgacgccgggcacaccgacattgcgcagtcattcatgg

SEQ ID NO: 134199 - DNA, 75 bp, synthetic construct
  source 1..75: mol_type = other DNA
gcacaccgacattgcgcaatcatttatggcaatccgtcgcgctaccaccgccagcggcaaccgcccgacctatga

SEQ ID NO: 134200 - DNA, 75 bp, synthetic construct
  source 1..75: mol_type = other DNA
ttgtctacaaccccaacgttaaaaacgccctggtactcaaggcctacgacattattagccaccgccgcctggagt

SEQ ID NO: 134201 - DNA, 75 bp, synthetic construct
  source 1..75: mol_type = other DNA
gttctggtccggtgcgctgttcaaccgagggcgcaataaagccgataagatggacatcgacctgtcccacagcaa

SEQ ID NO: 134202 - DNA, 75 bp, synthetic construct
  source 1..75: mol_type = other DNA
catgtggggtgccagcgtgcgcatcatatcgacacataacggcgtcgataacctgtttaaccagtacattcagga

SEQ ID NO: 134203 - DNA, 75 bp, synthetic construct
  source 1..75: mol_type = other DNA
catgtgtgaatttgttgacgacaaggcgtcggtgttcccgttcgaggagctgcaacgttgcatggtcgacacgct

SEQ ID NO: 134204 - DNA, 75 bp, synthetic construct
  source 1..75: mol_type = other DNA
cgacaaacctatttttccacgccatccagcctgacccacagtgcttatccgttctggtccggtgcgctgttcaac

SEQ ID NO: 134205 - DNA, 75 bp, synthetic construct
  source 1..75: mol_type = other DNA
ccgatctggcctgggcaacaatgcacgcactgtttaacgaaccactgcagggcgagtccgccaataccagcaata

SEQ ID NO: 134206 - DNA, 75 bp, synthetic construct
  source 1..75: mol_type = other DNA
tggattggttacgacccgtcacaccgtggcgacagcgccggatgcgtggtgctggcaccgccggtggtggccggt

SEQ ID NO: 134207 - DNA, 75 bp, synthetic construct
  source 1..75: mol_type = other DNA
gccacctatgaggccagccgcagcgaggaagccagccacgccgacctcgcctgggcgaccatgcacgccctgtta

SEQ ID NO: 134208 - DNA, 75 bp, synthetic construct
  source 1..75: mol_type = other DNA
cacctgcgctcgacctatttctccaccccgtccacgctggcgcacgacgcctacccgttctggtcaggtgaactg

SEQ ID NO: 134209 - DNA, 75 bp, synthetic construct
  source 1..75: mol_type = other DNA
agtttgacactaataacgcgatgaacagggtggctatgtttgcagggatccctgtttttgcacttctttttttgg

SEQ ID NO: 134210 - DNA, 75 bp, synthetic construct
  source 1..75: mol_type = other DNA
catgcggtaggggaagatagcgcaccggtgccttttgttattcatttacaggaatgtagcacggtggtgagtgaa

SEQ ID NO: 134211 - DNA, 75 bp, synthetic construct
  source 1..75: mol_type = other DNA
gtgtgggtgtggcgtttcacggtatcgcggatggtaaaaatccggatgtgctttccgtgggagaggggccaggga

SEQ ID NO: 134212 - DNA, 75 bp, synthetic construct
  source 1..75: mol_type = other DNA
gctgatgagtcagttacgtttgcaaggcttcgataccctggttttgcaatggacccgttacggcgatgcattcac

SEQ ID NO: 134213 - DNA, 75 bp, synthetic construct
  source 1..75: mol_type = other DNA
attgttagcaaaacgttcatcatgcgacaaagatatgctctatttctctctgcgttatttgcccgccgcacatgg

SEQ ID NO: 134214 - DNA, 75 bp, synthetic construct
  source 1..75: mol_type = other DNA
tgcaacgctgcatggtcgacagcctcgagaaatgggaggactacacgccatttgccgaccggcctttcggtcacc

SEQ ID NO: 134215 - DNA, 75 bp, synthetic construct
  source 1..75: mol_type = other DNA
tgtgtggtactggctccgccgctggttgccggtggcaagttccgcatccttgagcgtcaccagtggaaagggatg

SEQ ID NO: 134216 - DNA, 75 bp, synthetic construct
  source 1..75: mol_type = other DNA
tggcaaccgcaaaatcgtgacagtcaggtcaccgacgcccaatggcaggggctgatgagccagctacgtttgcag

SEQ ID NO: 134217 - DNA, 75 bp, synthetic construct
  source 1..75: mol_type = other DNA
gcaagccagattatggagcgccgcgcctggcgtaacgccggatggctggtacatcagcgcggaaattgacgacct

SEQ ID NO: 134218 - DNA, 75 bp, synthetic construct
  source 1..75: mol_type = other DNA
attataacaaattaaacacgacagaacttgactgtaataaaatgttggccattattgcctataagaatattttcc

SEQ ID NO: 134219 - DNA, 75 bp, synthetic construct
  source 1..75: mol_type = other DNA
gtttatcacacattttgatggtggtggtattctcaagttgttcaatgaaagatttctacaagggatgtctttata

SEQ ID NO: 134220 - DNA, 75 bp, synthetic construct
  source 1..75: mol_type = other DNA
atgacgaatgtgaagggagtcaaagagtggcatacagcaacaaattttttgatgctgtatggttttgagattaaa

SEQ ID NO: 134221 - DNA, 75 bp, synthetic construct
  source 1..75: mol_type = other DNA
tactctcaggtcgttaatgactatattttagaaaataattttaaaccagatgaacttctaatcttgacgtcatct

SEQ ID NO: 134222 - DNA, 75 bp, synthetic construct
  source 1..75: mol_type = other DNA
actcaagaaccccaaactggtcgttgcccgccttcgagaagtggattttgaacaggaagaggcgcttaattttga

SEQ ID NO: 134223 - DNA, 75 bp, synthetic construct
  source 1..75: mol_type = other DNA
tctagaaacaaaagacttaaagaagtaataactagagaaaacattgatgaaatatttaaactcacctataccaat

SEQ ID NO: 134224 - DNA, 75 bp, synthetic construct
  source 1..75: mol_type = other DNA
atgcaaatacctcgcatgtcacttcgccagctagcctggtccggcgctgttttacttctggtcagcacactattg

SEQ ID NO: 134225 - DNA, 75 bp, synthetic construct
  source 1..75: mol_type = other DNA
gacggtttttcaatctggcatcaccttgacgctcatggcattcctttcaaaagtatcacccccaaaaacgacact

SEQ ID NO: 134226 - DNA, 75 bp, synthetic construct
  source 1..75: mol_type = other DNA
gatgtacgccgtactcagcctgttttttggcgatccggatatgcatccggcggatttcagtctgcttgcgccagc

SEQ ID NO: 134227 - DNA, 75 bp, synthetic construct
  source 1..75: mol_type = other DNA
gtcttcgacggcgagctgaattttgccctcagactggcgcgagagatggggaggcctgactggcgcgccatgctt

SEQ ID NO: 134228 - DNA, 75 bp, synthetic construct
  source 1..75: mol_type = other DNA
atatgccgactggcgacatttttaccgcacgcattattttcaggatacccaactggatatgcatttttccgggct

SEQ ID NO: 134229 - DNA, 75 bp, synthetic construct
  source 1..75: mol_type = other DNA
ggatgtcagcgaggatgatgttgcattaatgatggcttcagcggggatttccggaggtgtgagatatgtcccagc

SEQ ID NO: 134230 - DNA, 75 bp, synthetic construct
  source 1..75: mol_type = other DNA
cggtgatgtttatcgtctggatcggcagtttgctgaccaccgttattagcatcgcgatagcaagcggcgcgatgc

SEQ ID NO: 134231 - DNA, 75 bp, synthetic construct
  source 1..75: mol_type = other DNA
tttaacgattctctggatataatcactggctacggctcaggcacgaaaaaagtaaccattgatggtgaagaaaaa

SEQ ID NO: 134232 - DNA, 75 bp, synthetic construct
  source 1..75: mol_type = other DNA
aaaagcgcgacaagtttgtcagtaactccggcggcaagcccggcaattccggctggaactaaatatagcatcctg

SEQ ID NO: 134233 - DNA, 75 bp, synthetic construct
  source 1..75: mol_type = other DNA
cggcgtctgctttttacagcaggaagaggccatcgacagccatcgcaaactcagccattacttcagcgacgttgg

SEQ ID NO: 134234 - DNA, 75 bp, synthetic construct
  source 1..75: mol_type = other DNA
tattttattgcttcttgcagtcattattctggctgcatgtcaggcaaactatatccgggatgttcagggcgggac

SEQ ID NO: 134235 - DNA, 75 bp, synthetic construct
  source 1..75: mol_type = other DNA
cgccgtaacttatggatttacggtctgggtgggctactggtgccgtttatcggtatcaaagtgattgatttacta

SEQ ID NO: 134236 - DNA, 75 bp, synthetic construct
  source 1..75: mol_type = other DNA
gaggagtttgtaaacgctccgattggtgattacttctacctgactcacggtaatcagggtgtatacctgcttggt

SEQ ID NO: 134237 - DNA, 75 bp, synthetic construct
  source 1..75: mol_type = other DNA
acaggttggtaacggtaatacgcaaaacatccacaatgtatttaatcaattacttcagcagatcgagaaatcttc

SEQ ID NO: 134238 - DNA, 75 bp, synthetic construct
  source 1..75: mol_type = other DNA
aggaacaggagcaactgacagccctcagaaaattacgaataaagttaaatcgtattcaaccggaaaatgcaccag

SEQ ID NO: 134239 - DNA, 75 bp, synthetic construct
  source 1..75: mol_type = other DNA
taatcttggatatgccattgttaatacgcggtctttattggttgaaatcaccggtgtagctgccgacaggctcac

SEQ ID NO: 134240 - DNA, 75 bp, synthetic construct
  source 1..75: mol_type = other DNA
taatcagggtgtatacctgcttggtcagttcaccggcccagtcaattacttcacaaagcatagtgatggttggat

SEQ ID NO: 134241 - DNA, 75 bp, synthetic construct
  source 1..75: mol_type = other DNA
atggtgtcgagaaatggtggacacctaatcacaactctacctttgttaaggttccgcaccacgaatatgatttat

SEQ ID NO: 134242 - DNA, 75 bp, synthetic construct
  source 1..75: mol_type = other DNA
aatgcagacgcaagggcatcaaatgacgcagagctgctggggtacgggcagggtgagcggatccgtgaacggatg

SEQ ID NO: 134243 - DNA, 75 bp, synthetic construct
  source 1..75: mol_type = other DNA
acgggcggcgctgacagagcagaaccggctgattgatgaacaggccagtcgggtgaaatccctgcaggaaaaaat

SEQ ID NO: 134244 - DNA, 75 bp, synthetic construct
  source 1..75: mol_type = other DNA
gtgaatgcccgtctgaaacaggcgtcgcagtcatcggatgaatttgcgtcatcacagaaagtgctgatggatatc

SEQ ID NO: 134245 - DNA, 75 bp, synthetic construct
  source 1..75: mol_type = other DNA
ttgccaatggcgatattggttttaacttcactgacggcaatctgattaagaagatttttgttgataagctcacgc

SEQ ID NO: 134246 - DNA, 75 bp, synthetic construct
  source 1..75: mol_type = other DNA
agcgtgcggactggcagaaagggctgcagagggattcagtaactgggtggataatgcgtccgattacgcctcaca

SEQ ID NO: 134247 - DNA, 75 bp, synthetic construct
  source 1..75: mol_type = other DNA
gaactgaaaaccctgacggagatgcagaagcaggaactgctgcgtaacgcggccctgattgaccagcaaaaaatc

SEQ ID NO: 134248 - DNA, 75 bp, synthetic construct
  source 1..75: mol_type = other DNA
ctgaagccattatgccactgacccgggcggcggatggctcgctgggagtacgcgcggtgggaagtatgaacggca

SEQ ID NO: 134249 - DNA, 75 bp, synthetic construct
  source 1..75: mol_type = other DNA
cagagcagaaccggctgattgatgaacaggccagtcgggtgaaatccctgcaggaaaaaatcgcaggatatcagt

SEQ ID NO: 134250 - DNA, 75 bp, synthetic construct
  source 1..75: mol_type = other DNA
gcctggtgtctatacgttcacatttaacgccctgacctatggcgggtacgaaatgaagccagtgacggtgaccat

SEQ ID NO: 134251 - DNA, 75 bp, synthetic construct
  source 1..75: mol_type = other DNA
agagaccctgaagaatgataatgtggctgcgcgtgcatcaaatgaagccgaactgctgggatacgggcagggaga

SEQ ID NO: 134252 - DNA, 75 bp, synthetic construct
  source 1..75: mol_type = other DNA
tcaaaagttcttatgaatgccgcgattgtcaacggaattaagacggcggcaaacggtatgtccggtgcgggagga

SEQ ID NO: 134253 - DNA, 75 bp, synthetic construct
  source 1..75: mol_type = other DNA
ggctgtcggaatgaccggtgcgtttgccggtgcctttgccaccggacacctgatttcactggcggatgagtggag

SEQ ID NO: 134254 - DNA, 75 bp, synthetic construct
  source 1..75: mol_type = other DNA
tatcgtctgcggatgtggcggatgtcatggtggatgatgccgcattaatgatggcttcagcggggattccgggag

SEQ ID NO: 134255 - DNA, 75 bp, synthetic construct
  source 1..75: mol_type = other DNA
tatgccgactggcgacgtttttactgcacgcattattttcaggatacccaactggacgctcatttttccgggctg

SEQ ID NO: 134256 - DNA, 75 bp, synthetic construct
  source 1..75: mol_type = other DNA
cgcacgcattattttcaggatacccaactggatatgcatttttccgggctgacgtacgctgtactcagcctgttt

SEQ ID NO: 134257 - DNA, 75 bp, synthetic construct
  source 1..75: mol_type = other DNA
aactggatatgcatttttccgggctgacgtacaccgtactcagcctgtttttttgcgatccggatatgtatccct

SEQ ID NO: 134258 - DNA, 75 bp, synthetic construct
  source 1..75: mol_type = other DNA
ccggacgaggaagatatgctgatgcagaaagcggcaggacttgccggaggcgtccggttcggtggggacggaagg

SEQ ID NO: 134259 - DNA, 75 bp, synthetic construct
  source 1..75: mol_type = other DNA
tttggctgggttgtctcaagcatcacatttttcttgggataaatgttattcagcaacaaaaaaaatctataaaga

SEQ ID NO: 134260 - DNA, 75 bp, synthetic construct
  source 1..75: mol_type = other DNA
ttgcggatgaaagtcaggtctgcatcgcggagaaatcccgacgcaccggtcttacctgggcggaagccgggcgta

SEQ ID NO: 134261 - DNA, 75 bp, synthetic construct
  source 1..75: mol_type = other DNA
ctgttgaaggatagcgacgtgacgctgactgccagctcggaaaatttagttctggatcctaaagggacggcgaaa

SEQ ID NO: 134262 - DNA, 75 bp, synthetic construct
  source 1..75: mol_type = other DNA
agaacggcgaaaaaatcgcgtgttcaggcgcgtgaagctcgggcggcggtagaagaaaataaaaaggcacagctt

SEQ ID NO: 134263 - DNA, 75 bp, synthetic construct
  source 1..75: mol_type = other DNA
ggatgaggacaaaatgctgatgcagaaagcggcaggacttgccggaggcgtccggttcggtggggacggagggcg

SEQ ID NO: 134264 - DNA, 75 bp, synthetic construct
  source 1..75: mol_type = other DNA
agaaatgtaatgattcaacatacatcaactagaaatgctgtctttcacaatgcggctctgatgaatgctattctg

SEQ ID NO: 134265 - DNA, 75 bp, synthetic construct
  source 1..75: mol_type = other DNA
caggagatggcgctggaatatatttctgcctgcgcgctgttctcccgtgcctttaaccagctggcagatgctgat

SEQ ID NO: 134266 - DNA, 75 bp, synthetic construct
  source 1..75: mol_type = other DNA
agcgcagaaaaaaacgcttttacagaatgcggcactcattgaccagaaaaagattcgtgagcagcttgctgctta

SEQ ID NO: 134267 - DNA, 75 bp, synthetic construct
  source 1..75: mol_type = other DNA
aataactcactggatgcatggcgaaataaccaggcaaataaacccaaagcgcataaaaagaccgaagcggaaaaa

SEQ ID NO: 134268 - DNA, 75 bp, synthetic construct
  source 1..75: mol_type = other DNA
ggcactgagtatggcgggagcatttgccggggtttttgccaccgggcatctgatttcccttgccgatgagtggaa

SEQ ID NO: 134269 - DNA, 75 bp, synthetic construct
  source 1..75: mol_type = other DNA
cgtcatcacagaaagtgctgatggatatcagtcagcggacaggcacggcattttcggataatgcggccctgtttg

SEQ ID NO: 134270 - DNA, 75 bp, synthetic construct
  source 1..75: mol_type = other DNA
cagaacgtgagctggccctgtcccgactgaagggggaggaaaaagagcgtgcccggctggggtatgcggcggatg

SEQ ID NO: 134271 - DNA, 75 bp, synthetic construct
  source 1..75: mol_type = other DNA
cgattacgcctctcaggcagcacagctggcaacggaggggatttcaggactggtgaataacatcacggagatgct

SEQ ID NO: 134272 - DNA, 75 bp, synthetic construct
  source 1..75: mol_type = other DNA
cagagcgtgagctggccctgtcccgactgaagggggacgaaaaagagcggggccgtctggggtatgcggcggatg

SEQ ID NO: 134273 - DNA, 75 bp, synthetic construct
  source 1..75: mol_type = other DNA
cagagcgtgagctggccctgtcccgactgaatggggacgaaaaagagcggggccggctggggtatgcggcggatg

SEQ ID NO: 134274 - DNA, 75 bp, synthetic construct
  source 1..75: mol_type = other DNA
cagagcgtgagctggccctgtcctgactgaagggggacgaaaaagagcggggccgcctggggtatgcggcggatg

SEQ ID NO: 134275 - DNA, 75 bp, synthetic construct
  source 1..75: mol_type = other DNA
cgagcttcatgcggatccgctggcgttcgaagaaaagcatggttctcaggttgatttaatttttcgttttcttga

SEQ ID NO: 134276 - DNA, 75 bp, synthetic construct
  source 1..75: mol_type = other DNA
cagagcgtgagctggccctgtccggactgaacggggacgaaaaagagcggggccgtctggggtatgcggcggatg

SEQ ID NO: 134277 - DNA, 75 bp, synthetic construct
  source 1..75: mol_type = other DNA
cagagcgtgagctggccctgtccggactgaatggggacgaaaaagagcggggccgcctggggtatgcggcggatg

SEQ ID NO: 134278 - DNA, 75 bp, synthetic construct
  source 1..75: mol_type = other DNA
caacgtccggtcgttgctgtcattcgtcatgccgatgccgccacgaaactggcgcaacaaggcgtacaggttttt

SEQ ID NO: 134279 - DNA, 75 bp, synthetic construct
  source 1..75: mol_type = other DNA
ggggtgacaaaaacgctctccggcatgctgaacggtgttgccggacagattgataatgtggcaacagccgtgggc

SEQ ID NO: 134280 - DNA, 75 bp, synthetic construct
  source 1..75: mol_type = other DNA
atatccagaatggatatacaacggccagcctgtccatgttttctgatttaacggggcagtccgcagagttactga

SEQ ID NO: 134281 - DNA, 75 bp, synthetic construct
  source 1..75: mol_type = other DNA
tagtcgcagccgcctgtcgcgctgcgggtccggatgcgcttgtcatctcatcaatgggtggcgcacaggattatc

SEQ ID NO: 134282 - DNA, 75 bp, synthetic construct
  source 1..75: mol_type = other DNA
ggccgaaaaagcaggcatcacacgcatgattctggtgacgtcactgggctgtggcgatagctggccatttttatc

SEQ ID NO: 134283 - DNA, 75 bp, synthetic construct
  source 1..75: mol_type = other DNA
caacgtccggtcgtcgctgtcgttcgccgtgcagacgctgcggctcaactggcgcaacaaggtgtgcaggttttt

SEQ ID NO: 134284 - DNA, 75 bp, synthetic construct
  source 1..75: mol_type = other DNA
gaaggccatggcggataacggaaagttgaccgccgataaggttgttcctgcactgattagtcagcttggggcatt

SEQ ID NO: 134285 - DNA, 75 bp, synthetic construct
  source 1..75: mol_type = other DNA
tgtggccaatgccgcactggtacagtcgaatcaggcggtggcggcctcgaggaaggcgctggagaatgccacgtc

SEQ ID NO: 134286 - DNA, 75 bp, synthetic construct
  source 1..75: mol_type = other DNA
ggtactttggcaatatggccgcaggcgtgggaaaggccaccacagagctgatcgcggcgaagtccgggacggttg

SEQ ID NO: 134287 - DNA, 75 bp, synthetic construct
  source 1..75: mol_type = other DNA
agccttgtcagggcagaatgctgaactggcgaaaataaaataccgtattagccagggtgatctttctgccatttc

SEQ ID NO: 134288 - DNA, 75 bp, synthetic construct
  source 1..75: mol_type = other DNA
gctggacaaccgataacggttttatgattaaccgtatgacgttggtaaaaactgtcaccgaagggcttgcagaag

SEQ ID NO: 134289 - DNA, 75 bp, synthetic construct
  source 1..75: mol_type = other DNA
ttacccgtaatattgcggccagaacagcggcacagacaacgctgaataatgttacgtcagtggggagccgtctgt

SEQ ID NO: 134290 - DNA, 75 bp, synthetic construct
  source 1..75: mol_type = other DNA
ttatccctgaaagctatagacatgagtgctacattaggtttgccgggaaggcagacagccttatggatgaactta

SEQ ID NO: 134291 - DNA, 75 bp, synthetic construct
  source 1..75: mol_type = other DNA
tccgcggctctggcgaaacagagaatcgttatagcaaagatcatccaccagcagccctctatgctgtgcttgaga

SEQ ID NO: 134292 - DNA, 75 bp, synthetic construct
  source 1..75: mol_type = other DNA
aattccatcattatcgtgcatttcattactggctaccgctaattggcttttttaccggagcgaggataaatgaat

SEQ ID NO: 134293 - DNA, 75 bp, synthetic construct
  source 1..75: mol_type = other DNA
cgggctggacaaccgataacggttttatgattaaccacatgacgtcggtaaaaactgtcacagaagggcttgcag

SEQ ID NO: 134294 - DNA, 75 bp, synthetic construct
  source 1..75: mol_type = other DNA
actgaaaggggaagaaaaagagcgtgtccgactggggtatgcggcggatgacctcggttttgtgggtgatccgta

SEQ ID NO: 134295 - DNA, 75 bp, synthetic construct
  source 1..75: mol_type = other DNA
gaaaaccaagattttattttgctccccaaaacgggggagcaaagaaaaggtagaggcggtcacaaccgcaaggac

SEQ ID NO: 134296 - DNA, 75 bp, synthetic construct
  source 1..75: mol_type = other DNA
atttttttctgttcccaatgtacgaattaatatacggaaatatcgggatattcctgttgaaacgccgtatgcgcc

SEQ ID NO: 134297 - DNA, 75 bp, synthetic construct
  source 1..75: mol_type = other DNA
gcttccgcccatattcaggaagagttcggcattacgaaagcggaaatgggctatgtattttcggccttcgcctga

SEQ ID NO: 134298 - DNA, 75 bp, synthetic construct
  source 1..75: mol_type = other DNA
ggtcgtcactatttcgctaatccagaagcgcgtagtctggcgctgggcttctaccacaagctttcggcattgtgt

SEQ ID NO: 134299 - DNA, 75 bp, synthetic construct
  source 1..75: mol_type = other DNA
cttgtgaagttgaggccatccaggagattgcggataattatggcttaagagttatttatgatgctgcacatgcat

SEQ ID NO: 134300 - DNA, 75 bp, synthetic construct
  source 1..75: mol_type = other DNA
cttgtgaagtagaggctatccaggagattgcagataattacggcttaagagttatttatgatgctgctcatgcat

SEQ ID NO: 134301 - DNA, 75 bp, synthetic construct
  source 1..75: mol_type = other DNA
caacaaagtactttgcttaccaatttatgcagatcttgatttagacattgtgagagttatagcgagagtaatagg

SEQ ID NO: 134302 - DNA, 75 bp, synthetic construct
  source 1..75: mol_type = other DNA
tgaacagaaatattgctgccagaaccgccgcccagaatgggctgaacagtacaacggcggtgggctcacgtctga

SEQ ID NO: 134303 - DNA, 75 bp, synthetic construct
  source 1..75: mol_type = other DNA
gacgcagattgccacggcgcgggcaagggcagccgtgtaccgtgcacagcaggcagtggcggcagcccgcgggac

SEQ ID NO: 134304 - DNA, 75 bp, synthetic construct
  source 1..75: mol_type = other DNA
cacgcagattgccacggcgcgggcaagagcagccgtgtaccgtgcgcagcaggcagtggcggcagcccgcgggac

SEQ ID NO: 134305 - DNA, 75 bp, synthetic construct
  source 1..75: mol_type = other DNA
cagagcgtgagctggccctgtcctgactgaacggggacgaaaaagagcggggccggctggggtatgcggcggatg

SEQ ID NO: 134306 - DNA, 75 bp, synthetic construct
  source 1..75: mol_type = other DNA
tgaacagaaatattgctgccagaagcgccgcccagaatgcgctgaacagtacaacggcggtgggctcacgtctga

SEQ ID NO: 134307 - DNA, 75 bp, synthetic construct
  source 1..75: mol_type = other DNA
tgaacagaaatattgctgccagaaccgcggcccagaatgcgctgaacagtacaacggcggtgggctcacgtctga

SEQ ID NO: 134308 - DNA, 75 bp, synthetic construct
  source 1..75: mol_type = other DNA
ggaagattgccataacgccacagttaacctttggtggtgcacaactggttgatatcgatgccaatcagccactgg

SEQ ID NO: 134309 - DNA, 75 bp, synthetic construct
  source 1..75: mol_type = other DNA
aggcagcagatgctgtcgtttccactatggacgggctggtatcaaatatttccgatgcactggccgggaatgttg

SEQ ID NO: 134310 - DNA, 75 bp, synthetic construct
  source 1..75: mol_type = other DNA
cgtttgagcagaaaaataacgagctgctgagacagtatcaggccggagaaattgaagaagccctgtggaaacagg

SEQ ID NO: 134311 - DNA, 75 bp, synthetic construct
  source 1..75: mol_type = other DNA
tacgcagattgccacggcgcgggcaagtgcagccgtgtaccgtgcccagcaggcagtggcggcagcccgcgggac

SEQ ID NO: 134312 - DNA, 75 bp, synthetic construct
  source 1..75: mol_type = other DNA
aacgcagattgccacggcgcgggcaagcgcagccgtgtaccgtgcgcagcaggcagtggcggcagcccgcgggac

SEQ ID NO: 134313 - DNA, 75 bp, synthetic construct
  source 1..75: mol_type = other DNA
tggtaattacggcgtttgttgcccgtcgcttactgcgctttcgtcatatgctcgcctgtcgtcgtcgcgggttaa

SEQ ID NO: 134314 - DNA, 75 bp, synthetic construct
  source 1..75: mol_type = other DNA
acaatgcacgcactctttaacgaaccgctgcagggcgagtccgccaataccagcaatattgtggagattttttga

SEQ ID NO: 134315 - DNA, 75 bp, synthetic construct
  source 1..75: mol_type = other DNA
cacggggacaaaatttgccggcaggattgtcagcgagggtagtacggccagaacgctgaaaagcgccgccggtga

SEQ ID NO: 134316 - DNA, 75 bp, synthetic construct
  source 1..75: mol_type = other DNA
cggtgaactgtttaaccggggacgcgccagcgccgccgaacgcgtggaaatcgacgtcagtcataacgcccttgc

SEQ ID NO: 134317 - DNA, 75 bp, synthetic construct
  source 1..75: mol_type = other DNA
ttcccggtggcaagttccgcatccttgagcgtcaccagtggaaagggatggattttgcgacacaggccgaggcta

SEQ ID NO: 134318 - DNA, 75 bp, synthetic construct
  source 1..75: mol_type = other DNA
gaccgactttcatgcactggcgctacgcccgtttggctggcgcgaagtgtggatcggttatgacccggcaaaagg

SEQ ID NO: 134319 - DNA, 75 bp, synthetic construct
  source 1..75: mol_type = other DNA
aggcccgcgccgtcagccggaaaagaacgttttcaccgatgaacagattgagaagctggaagaaatcttccattc

SEQ ID NO: 134320 - DNA, 75 bp, synthetic construct
  source 1..75: mol_type = other DNA
gtcgatgctgccccagaacgtccaggggggggaatggcagtcccgcgccatcgcgatgaacaaggctctggtgtc

SEQ ID NO: 134321 - DNA, 75 bp, synthetic construct
  source 1..75: mol_type = other DNA
tgatactgtggcaactgccgccggtgctctggttgccgtcggggtagcccgatattttggcaatatggcgtcttc

SEQ ID NO: 134322 - DNA, 75 bp, synthetic construct
  source 1..75: mol_type = other DNA
cgcgttattcgtgcgctggctgcgggaatgggtgttgcccgtaaggatctgaaggccatggcggatgacggcaaa

SEQ ID NO: 134323 - DNA, 75 bp, synthetic construct
  source 1..75: mol_type = other DNA
gacgaggccatcgaaaagctggagcagattttctttgagcagtctttcgaatatcagttgcactggtatcgcgcc

SEQ ID NO: 134324 - DNA, 75 bp, synthetic construct
  source 1..75: mol_type = other DNA
tcactgtcacagcagaagccttacggttcaggcaaatacagagagaatttcgtctggcactgtctgaaactgctc

SEQ ID NO: 134325 - DNA, 75 bp, synthetic construct
  source 1..75: mol_type = other DNA
taactggcgacaggccagttataaaaataaacaatacattatgggaaagtaatacagcagcagcgtttctgaaca

SEQ ID NO: 134326 - DNA, 75 bp, synthetic construct
  source 1..75: mol_type = other DNA
agtcgcaccgaggaagccagtcacgccgatctcgcctgggcaaccatgcacgtattaatcaatgagccgctgacc

SEQ ID NO: 134327 - DNA, 75 bp, synthetic construct
  source 1..75: mol_type = other DNA
agattgtcaccatcgaggacgcactcgccgggggatgcaccctgtttaatctggatcagctgaaacaggaaaaca

SEQ ID NO: 134328 - DNA, 75 bp, synthetic construct
  source 1..75: mol_type = other DNA
gtcctgtctgggttggctacgacccgtcacacaccggcgacagtgccgggtgcgtcgtactcgcaccgccggtgg

SEQ ID NO: 134329 - DNA, 75 bp, synthetic construct
  source 1..75: mol_type = other DNA
cacgtctttaaacagtacatcatcgactttgccaaagaagtggaggtggagctgaaaggcgatccgatggtgctt

SEQ ID NO: 134330 - DNA, 75 bp, synthetic construct
  source 1..75: mol_type = other DNA
tcgacgccaccggtaacggcggctatctggcagaagccgcactgctggcctttggcccggacatcatcgactgcg

SEQ ID NO: 134331 - DNA, 75 bp, synthetic construct
  source 1..75: mol_type = other DNA
gctgctgtactttcagggataccgcgtcgcccgcattgctgaaatgctgggcgagaaagttgcaaccgttcatag

SEQ ID NO: 134332 - DNA, 75 bp, synthetic construct
  source 1..75: mol_type = other DNA
atttaaaaccgcttttagaggcgttaaatccccgttcccgcttcagcttcggggaagactttgcccgcaccggag

SEQ ID NO: 134333 - DNA, 75 bp, synthetic construct
  source 1..75: mol_type = other DNA
attcttgggataaacctaaaataacacgtctaattgaggatatttgtcatgggttcacaacgctcataagccgag

SEQ ID NO: 134334 - DNA, 75 bp, synthetic construct
  source 1..75: mol_type = other DNA
atgatcctcctgaaagtgaacaagagaatagcagtaaatataagccactatctgaaggccggaaaacagtatatg

SEQ ID NO: 134335 - DNA, 75 bp, synthetic construct
  source 1..75: mol_type = other DNA
gacccagctcatcatcaaaccgcagaaaaccggcggtgacttcaaggaaattgacctgctgggacgccagattga

SEQ ID NO: 134336 - DNA, 75 bp, synthetic construct
  source 1..75: mol_type = other DNA
ggagcgccatcagtggaaaggcatggacttcgcgactcaggccgaatccatccgccagctcaccgaaaaatacaa

SEQ ID NO: 134337 - DNA, 75 bp, synthetic construct
  source 1..75: mol_type = other DNA
ccgaacgcgtggaaatcgacgtcagtcataacgcccttgccggtgggcttctctgtgcggacggccagtggcgac

SEQ ID NO: 134338 - DNA, 75 bp, synthetic construct
  source 1..75: mol_type = other DNA
atgcagacgcaagggcatcaaatgacgcagagctgctggggtacgggcagggtgagcggatccgtgaacggatga

SEQ ID NO: 134339 - DNA, 75 bp, synthetic construct
  source 1..75: mol_type = other DNA
taattcggtcaatgaaagtggggaccggatcattcgcgcactggctgcaggcatgggcgtggcccgtaaggatct

SEQ ID NO: 134340 - DNA, 75 bp, synthetic construct
  source 1..75: mol_type = other DNA
gcgtgcggactggcagaaagggctgcaggagggattcagtaactgggtggataatgcgtccgattacgcctcaca

SEQ ID NO: 134341 - DNA, 75 bp, synthetic construct
  source 1..75: mol_type = other DNA
cttatgaatgccgcgattgtcaacggaattaagacggcggcaaacggtatgtccggtgcgggaggatttattggc

SEQ ID NO: 134342 - DNA, 75 bp, synthetic construct
  source 1..75: mol_type = other DNA
agggactggtgaatgtaccgttacggctgccacaggccaccctggatgataaacagcagagtgccctgacaaaaa

SEQ ID NO: 134343 - DNA, 75 bp, synthetic construct
  source 1..75: mol_type = other DNA
tggaatggcgcaactgggcctcatcagtgctgcaggaaatctcaaaagttcttatgaatgccgcgattgtcaacg

SEQ ID NO: 134344 - DNA, 75 bp, synthetic construct
  source 1..75: mol_type = other DNA
cggcaaatctgagtgcttacagtaacaccattgtggataccccgacgtattttgcttttgcgaaaggtgccgggc

SEQ ID NO: 134345 - DNA, 75 bp, synthetic construct
  source 1..75: mol_type = other DNA
ctcactcaaatgcagggcaaagcgcaatccattcaggatgtgcttgccgggctggaggagcgacgggtggcgttg

SEQ ID NO: 134346 - DNA, 75 bp, synthetic construct
  source 1..75: mol_type = other DNA
cgcagttgctgggatatggtgaaggctcacggatgcgtgaacgactccaggaaatgtggagtatccggcatgagt

SEQ ID NO: 134347 - DNA, 75 bp, synthetic construct
  source 1..75: mol_type = other DNA
attccagtcggagatccagcgggcgtcccgtatgggcagtgaatattaccggaccctgcagaatggcgggcgtca

SEQ ID NO: 134348 - DNA, 75 bp, synthetic construct
  source 1..75: mol_type = other DNA
tcaaaagttcttatgaatgcggccattgtcaacggaattaagacggcggcaaacggtatgtccggtgcgggagga

SEQ ID NO: 134349 - DNA, 75 bp, synthetic construct
  source 1..75: mol_type = other DNA
gaaggcaatggcggatgatggaaagctgaccgccgataaggttgttcctgcactgattagtcagcttggtacgct

SEQ ID NO: 134350 - DNA, 75 bp, synthetic construct
  source 1..75: mol_type = other DNA
tcgtcaacactgctacctcgctgaaaccggtgcggcagttgcttgatgcggcgttaaaaatcgaccaccgtcgca

SEQ ID NO: 134351 - DNA, 75 bp, synthetic construct
  source 1..75: mol_type = other DNA
tgctgcggtgtgccactcatcgccaacggttttaccgataaagcgcgtaaacaggcaatcactaacgtggaatcg

SEQ ID NO: 134352 - DNA, 75 bp, synthetic construct
  source 1..75: mol_type = other DNA
gaatatccggaagtgttgaatgtcgacaacaaaggcttacgcgatcatatcgaactggcaacccgctggctgtgg

SEQ ID NO: 134353 - DNA, 75 bp, synthetic construct
  source 1..75: mol_type = other DNA
gccggggtttttgccaccgggcatctgatttcccttgccgatgagtggaattcagtcaatgcccgtctgaaacag

SEQ ID NO: 134354 - DNA, 75 bp, synthetic construct
  source 1..75: mol_type = other DNA
aaatcactctccgggacaatgtcgggagcggggggatggattggtagtgttggcgactggctttccggtgcagta

SEQ ID NO: 134355 - DNA, 75 bp, synthetic construct
  source 1..75: mol_type = other DNA
cgactgcgaaacctgcaaatggcaaatagagatgtccaccagcaaacgttgtgaacatcccattacgctgctggc

SEQ ID NO: 134356 - DNA, 75 bp, synthetic construct
  source 1..75: mol_type = other DNA
agcactggcaggacagaatactgaactggctaagatgaaataccaggtcagccagggcgaattatcaaccttatc

SEQ ID NO: 134357 - DNA, 75 bp, synthetic construct
  source 1..75: mol_type = other DNA
atcacatcagtattcagaataaagggagcaatggcgagatagatacgcagtcagccagggggctggtggatctga

SEQ ID NO: 134358 - DNA, 75 bp, synthetic construct
  source 1..75: mol_type = other DNA
accttggtctggtgggggatacgtatcaggaggcgaggcagcgttacatccgtaattcgatggaagcctggcgca

SEQ ID NO: 134359 - DNA, 75 bp, synthetic construct
  source 1..75: mol_type = other DNA
acggctttaccgataaagcacgtaaacaggcaattacgaatgtagagtcgatccgcgaagctgtgggagtaaaag

SEQ ID NO: 134360 - DNA, 75 bp, synthetic construct
  source 1..75: mol_type = other DNA
tttataaagggcaaggagttttgttgtgaatctgacaaatatcgctttaataagataataccgtatcttttgggt

SEQ ID NO: 134361 - DNA, 75 bp, synthetic construct
  source 1..75: mol_type = other DNA
gcgctggcgaaggaactcaactgcccggtgctggcgctgtcacagcttaatcgggcgctggagtcgcgccttaac

SEQ ID NO: 134362 - DNA, 75 bp, synthetic construct
  source 1..75: mol_type = other DNA
atctgatcatttttgagaacgccgcatttggtcgcgtaatggcgctggatggcgtagtacaaaccaccgagcgcg

SEQ ID NO: 134363 - DNA, 75 bp, synthetic construct
  source 1..75: mol_type = other DNA
gaagggaataccgaggtggatgaaagtaagctgccggaagtaacgaaatggtggaaggataatgtcggtacgcag

SEQ ID NO: 134364 - DNA, 75 bp, synthetic construct
  source 1..75: mol_type = other DNA
aaggatgataaggccaaagcgatggcgacctcaggtcagaagctggcacagcagattggctctggtaaagaacgt

SEQ ID NO: 134365 - DNA, 75 bp, synthetic construct
  source 1..75: mol_type = other DNA
gcaaactgccggaagtgacgaaatggtggaaagataatgtcggcacgcaggatgagtctgtgtatacccgcaata

SEQ ID NO: 134366 - DNA, 75 bp, synthetic construct
  source 1..75: mol_type = other DNA
gcgaagacgcgcgctccaagatggtgcgcggcgtcaacgtgctcgccaacgccgtgaaggcgaccctcggcccga

SEQ ID NO: 134367 - DNA, 75 bp, synthetic construct
  source 1..75: mol_type = other DNA
tgccgcgactgtttactgcctgtcgagagatcggtgctggaatgaaccaggtaaaccgtatcgttgaaaccatca

SEQ ID NO: 134368 - DNA, 75 bp, synthetic construct
  source 1..75: mol_type = other DNA
gataaattgctcaccgggtttgatgaaccgaagaataccgtgctgtatatcgacaaacctcttaagtcccataat

SEQ ID NO: 134369 - DNA, 75 bp, synthetic construct
  source 1..75: mol_type = other DNA
ttcgccggaacgtctgctggagatgacccgcttcttcaccctgtttgataaaaagaccgggaaaattgtcgcccg

SEQ ID NO: 134370 - DNA, 75 bp, synthetic construct
  source 1..75: mol_type = other DNA
tatacgtggcccctacgccagctccggcttaccgtgcacatccatatgtccgtcaccttgccagcgtaggcgaag

SEQ ID NO: 134371 - DNA, 75 bp, synthetic construct
  source 1..75: mol_type = other DNA
agttgttggccatcaaaacactgtcgatggacatgaatgcgggctatataagagcagcgcgtatccatttaccca

SEQ ID NO: 134372 - DNA, 75 bp, synthetic construct
  source 1..75: mol_type = other DNA
ctatcagcaggtgttcgggattaaaaggctgctggaacgcataagcacccgcagaccggacgggggcagagaagg

SEQ ID NO: 134373 - DNA, 75 bp, synthetic construct
  source 1..75: mol_type = other DNA
tcgactgaacaaattcatgcgttgtttgatcatcgtccttcagccgatctcgactggtaccaacagttaatcgcc

SEQ ID NO: 134374 - DNA, 75 bp, synthetic construct
  source 1..75: mol_type = other DNA
agacgttcaggtgcaggataagtggacgaagctggcttttgaagtggacaacattatcgtcaaagcggtggcaga

SEQ ID NO: 134375 - DNA, 75 bp, synthetic construct
  source 1..75: mol_type = other DNA
tcttatcccgtcgctgcggtgatctttctggccagtattatggtgccaacgttaaagatgatcgccattgcgtgg

SEQ ID NO: 134376 - DNA, 75 bp, synthetic construct
  source 1..75: mol_type = other DNA
acgccatcgccaccggggcaatactggtgacgaataatgtgagagagtttgagcgggtaccgggtcttgtgctgg

SEQ ID NO: 134377 - DNA, 75 bp, synthetic construct
  source 1..75: mol_type = other DNA
gtcacgtacagttgattgacgcgttctgcgcccggctcgatgccgtcctgccctgggaccgcaccgcggtggatg

SEQ ID NO: 134378 - DNA, 75 bp, synthetic construct
  source 1..75: mol_type = other DNA
ctgtgttgggatgccaaaggacatggcaagcgcgacagtgaaagaatgcatttgatttatgaagttgttgagttt

SEQ ID NO: 134379 - DNA, 75 bp, synthetic construct
  source 1..75: mol_type = other DNA
agcatattctgtgctcgcagtgtgacatgctggtggctttacccagccttgagcatggtcagaaagcggcatgtc

SEQ ID NO: 134380 - DNA, 75 bp, synthetic construct
  source 1..75: mol_type = other DNA
acttaggacgggtgctttttcaacttaaaacctggggaatggcggagattttcctcgctggtgtactggtgagtt

SEQ ID NO: 134381 - DNA, 75 bp, synthetic construct
  source 1..75: mol_type = other DNA
acgccatcgcggcgggcgccatcctggtgacgaataatacaagagagtttgagcgggttccgggcctgatactgg

SEQ ID NO: 134382 - DNA, 75 bp, synthetic construct
  source 1..75: mol_type = other DNA
ccgaacgacacggccattgccgggcacgccatcgccgccggtgccgtgctggtgacgaataatacgcgggaattt

SEQ ID NO: 134383 - DNA, 75 bp, synthetic construct
  source 1..75: mol_type = other DNA
ccggcatgaacccgatggacctgaagcgcggcatcgaccaggcggtgaaggccgcggtcggcgaactgaagtcgc

SEQ ID NO: 134384 - DNA, 75 bp, synthetic construct
  source 1..75: mol_type = other DNA
tctcggccattacttactctgaaatgcgcttcggtgccaccggcccgaaggcctccccgcgtcacgtgcaactgg

SEQ ID NO: 134385 - DNA, 75 bp, synthetic construct
  source 1..75: mol_type = other DNA
atgaagaaaacctggatgctcgacactaacatctgctcgttcatcatgcgcgagcagccggcagcggtgctgaag

SEQ ID NO: 134386 - DNA, 75 bp, synthetic construct
  source 1..75: mol_type = other DNA
taaagaaaatccttcgaaggattcgaactgtattttattttaaatatcgctttaaaggtgctaaatatggcgttg

SEQ ID NO: 134387 - DNA, 75 bp, synthetic construct
  source 1..75: mol_type = other DNA
acaaaaggtcagacacagtaaaaaagactgggtaatcaccccaccagagaaaacacgtctattgcaaaagatggg

SEQ ID NO: 134388 - DNA, 75 bp, synthetic construct
  source 1..75: mol_type = other DNA
tatgcttggtttagtgacgccggtgtagttaatcagtttaagatgagctctggcgagtatctcatattggttttg

SEQ ID NO: 134389 - DNA, 75 bp, synthetic construct
  source 1..75: mol_type = other DNA
tttattgaccatgtctgcaacttagcagttcagcacgttggtagtaatgagatggaagcaaaactacttgaattc

SEQ ID NO: 134390 - DNA, 75 bp, synthetic construct
  source 1..75: mol_type = other DNA
tggtcccgcgtgaagggatgcaggtgagtgaaaaaccgtcggtggcgagggtacggtttggtgacggttatgaac

SEQ ID NO: 134391 - DNA, 75 bp, synthetic construct
  source 1..75: mol_type = other DNA
agcgctgggatcagtactgggcagcattactataagccacgccggtatcgtgtataccggtatcagcggtgcgat

SEQ ID NO: 134392 - DNA, 75 bp, synthetic construct
  source 1..75: mol_type = other DNA
catagcggctctggaagttcgggaggtagttttaacggtggtggtaatggtggccatgataatagtagtggttca

SEQ ID NO: 134393 - DNA, 75 bp, synthetic construct
  source 1..75: mol_type = other DNA
agctgcgccagtttgccatgagcatcagcggttcggtgattttcggcagtaacggggaaatgcgaatcctgtctt

SEQ ID NO: 134394 - DNA, 75 bp, synthetic construct
  source 1..75: mol_type = other DNA
agcagattaaaggattatgataagaaagaagaattgccgctgaaatttttacaaaagcagattttatattatcaa

SEQ ID NO: 134395 - DNA, 75 bp, synthetic construct
  source 1..75: mol_type = other DNA
ctttctctccaaagattgcaccttttttgtacgatcttaaaaatgaatttacgcaaatgaatgttttcgcaatgg

SEQ ID NO: 134396 - DNA, 75 bp, synthetic construct
  source 1..75: mol_type = other DNA
ggacggtgagggtggtgtgccgggagtggagtattacggataacgccaggtacagcgatttcagttgtatgatgg

SEQ ID NO: 134397 - DNA, 75 bp, synthetic construct
  source 1..75: mol_type = other DNA
gggacaggcggcacgctatgtaaccggcggttcgttctatgcccgcacaggaaacaaaaatatccagctgatatc

SEQ ID NO: 134398 - DNA, 75 bp, synthetic construct
  source 1..75: mol_type = other DNA
caggcggcaaaagcgatggtcgacagcgtggcgtcgctgtggggggaaagtcagcagaacgtctgccagtctgtc

SEQ ID NO: 134399 - DNA, 75 bp, synthetic construct
  source 1..75: mol_type = other DNA
acctccctgttgaaagccgacgccaggcaaaaggaacccgcttcctgtggcagtacagtgataagtggatgactg

SEQ ID NO: 134400 - DNA, 75 bp, synthetic construct
  source 1..75: mol_type = other DNA
atagtgttgtaacaaaaaatgtccctgaatatgaaatatgggctgggattcccgctgtaaagatcaaagacagat

SEQ ID NO: 134401 - DNA, 75 bp, synthetic construct
  source 1..75: mol_type = other DNA
atacgttcacaaagtatatcaaagttaacattatatcacaggttaaataccatcgctggttatttatcgtggtta

SEQ ID NO: 134402 - DNA, 75 bp, synthetic construct
  source 1..75: mol_type = other DNA
atgacattagtagaagccgatgttccccgcgttatgtgcccggagcatggctgccagactctgcctgtaccgtgg

SEQ ID NO: 134403 - DNA, 75 bp, synthetic construct
  source 1..75: mol_type = other DNA
gggctgtgttttattcacacttataatggcatattcccagccatcgtttgcactgttgtgcagaaataaccagac

SEQ ID NO: 134404 - DNA, 75 bp, synthetic construct
  source 1..75: mol_type = other DNA
ttatgttaataagttttccaccatggggcaggaggcaggggagagaaatttcacctggcgtttctatgcaacgaa

SEQ ID NO: 134405 - DNA, 75 bp, synthetic construct
  source 1..75: mol_type = other DNA
ggaattacagcgtcgcgtcaacgataaagagctgatgataaccgccgcattgccgggcagtggcgaatggggaac

SEQ ID NO: 134406 - DNA, 75 bp, synthetic construct
  source 1..75: mol_type = other DNA
gtggcatggtggttaccgtgcctttttgtggcgaccgccgaaacataaccggacggtgagggtggtgtgccgtga

SEQ ID NO: 134407 - DNA, 75 bp, synthetic construct
  source 1..75: mol_type = other DNA
tttcgggtgacggatgaaccaacccggcgctggctggatgaatttttatcgtggcatggtggttaccgtgctttt

SEQ ID NO: 134408 - DNA, 75 bp, synthetic construct
  source 1..75: mol_type = other DNA
aagacgtttcaggcggtgttccgggtgacggatgagtcaacccggcgctggctggatgaatttttatcctggcat

SEQ ID NO: 134409 - DNA, 75 bp, synthetic construct
  source 1..75: mol_type = other DNA
aattcatgctcgtgaagtcagcttcgcggggcagaaagacaaacatgcctttacggaacagtggttatgcgcgcg

SEQ ID NO: 134410 - DNA, 75 bp, synthetic construct
  source 1..75: mol_type = other DNA
aattacaagctttactggtgcgcgaaaaagttgaagccgcgcgcagagcgatgctgctgtatccgcaacaattaa

SEQ ID NO: 134411 - DNA, 75 bp, synthetic construct
  source 1..75: mol_type = other DNA
gtgatggtagttcattgtctaacctggatattgaaggcaaagtcgaagatattgttctgcaattatcaccaatga

SEQ ID NO: 134412 - DNA, 75 bp, synthetic construct
  source 1..75: mol_type = other DNA
gctatgtgtcgggcgtcgctggctggatcgtctggtgaccggcctgcaacgtattcaccgtttgctgggataaca

SEQ ID NO: 134413 - DNA, 75 bp, synthetic construct
  source 1..75: mol_type = other DNA
gggccgatttcccggtgctttcgcgtgaggtgaacggtttgccgctggcttatctcgacagcgccgccagtgcgc

SEQ ID NO: 134414 - DNA, 75 bp, synthetic construct
  source 1..75: mol_type = other DNA
ctggcatcggtcaatattgatggccctacgctcatcgccctgcgtcagcaaccaaaaatcctgcgccagattgag

SEQ ID NO: 134415 - DNA, 75 bp, synthetic construct
  source 1..75: mol_type = other DNA
aaccgctgtatccggaagataccccggacgaagaagcaatggtcaagggccgtctcaataaagtatctgttggca

SEQ ID NO: 134416 - DNA, 75 bp, synthetic construct
  source 1..75: mol_type = other DNA
tggtggacatctatatcatcatatacatgagttagattgtgttcagcatttacttggagaaataccagagacggt

SEQ ID NO: 134417 - DNA, 75 bp, synthetic construct
  source 1..75: mol_type = other DNA
cagcaaaaaatcgctaccgacttcatcgctgattttgccgaaggcaggatggtgtctctcggcgagtttggcgac

SEQ ID NO: 134418 - DNA, 75 bp, synthetic construct
  source 1..75: mol_type = other DNA
gatggcaacactgatggaatgcgatgaaaacaatcagccgctggcaggcgcatatatcgaccgctccgggctgga

SEQ ID NO: 134419 - DNA, 75 bp, synthetic construct
  source 1..75: mol_type = other DNA
tattattcatgatgtcaggagctaatgcagctactggtcctagcgtaaataatcaaacacttggtgtgtcagtaa

SEQ ID NO: 134420 - DNA, 75 bp, synthetic construct
  source 1..75: mol_type = other DNA
gcatggcgcaaaagtactggtggatggcgctcaggcggtgatgcatcatccggtggacgttcaggcgctggattg

SEQ ID NO: 134421 - DNA, 75 bp, synthetic construct
  source 1..75: mol_type = other DNA
tgaagccgggttctatcgtcacggctatgcggcggtgcatcgcggtattcatacgttgagcgcccaggcgaccga

SEQ ID NO: 134422 - DNA, 75 bp, synthetic construct
  source 1..75: mol_type = other DNA
taaaggtcgccgtggctggggcaaagaggcgctggaacgatatgcgccagagtatgccaacaccttcagactgca

SEQ ID NO: 134423 - DNA, 75 bp, synthetic construct
  source 1..75: mol_type = other DNA
ggaaagcctacttataatgttggtaatgcatactattgccatgaaggtttatcaataaaaataaaaaatcctgaa

SEQ ID NO: 134424 - DNA, 75 bp, synthetic construct
  source 1..75: mol_type = other DNA
gatgtgctcaacagacgtttactgttggaaacaaaccgacagcagtaacaccaaaggaaaccatcacccatcatt

SEQ ID NO: 134425 - DNA, 75 bp, synthetic construct
  source 1..75: mol_type = other DNA
cgttatctctgcgtgaaagacaagtattgcgcatgctggcacaaggtgatgagtactctcaaatatcacataatc

SEQ ID NO: 134426 - DNA, 75 bp, synthetic construct
  source 1..75: mol_type = other DNA
cgaaggtttgataaagaaaactatatgccgccagctctaagcggtaattcacattactatgatggtaaatcttta

SEQ ID NO: 134427 - DNA, 75 bp, synthetic construct
  source 1..75: mol_type = other DNA
ctaattatattgagatcgtagatccgaagacaaaatcaaaaacaactaatgcgacatatattgatttcgagaata

SEQ ID NO: 134428 - DNA, 75 bp, synthetic construct
  source 1..75: mol_type = other DNA
atatgcagcccgcaaaggccgccatgaaagaagtcgtaactcgtattattggcgtctgtggtagtgaaggaaaaa

SEQ ID NO: 134429 - DNA, 75 bp, synthetic construct
  source 1..75: mol_type = other DNA
atatgcagccggcaaaggccgccatgaaggaagttgtaacccgcattattggcgtctgtggcagtgaaggaaaaa

SEQ ID NO: 134430 - DNA, 75 bp, synthetic construct
  source 1..75: mol_type = other DNA
tgggaagtttaatttcgttagtacaatcgctggctcgcgagtacaacctgccgttagtcctgcatctcgaccatc

SEQ ID NO: 134431 - DNA, 75 bp, synthetic construct
  source 1..75: mol_type = other DNA
gggcgatatctccggccttcgccctgcccgccctgtttgcgatcaatgtgcaggtcggctgcgacttcgtgcctg

SEQ ID NO: 134432 - DNA, 75 bp, synthetic construct
  source 1..75: mol_type = other DNA
atgaaaaaaagcaccgttcttaattctgatatttcatcgatgatctcccgtctgggacataccgatacgctggtg

SEQ ID NO: 134433 - DNA, 75 bp, synthetic construct
  source 1..75: mol_type = other DNA
gtcgaggcggccattatcgcggaagagatcaaacaccataatccgcaactccacgaaacgttgctcactcacctt

SEQ ID NO: 134434 - DNA, 75 bp, synthetic construct
  source 1..75: mol_type = other DNA
gactttaaactggtgctcaacctcttcaccagtgatgaactttacgatcgccgtaatgacccaaatgaaatgcat

SEQ ID NO: 134435 - DNA, 75 bp, synthetic construct
  source 1..75: mol_type = other DNA
atgcgtttaaatcacgttatggttggcgctacggggtctggtaaaactaccttcatgaaagctatagcagacctt

SEQ ID NO: 134436 - DNA, 75 bp, synthetic construct
  source 1..75: mol_type = other DNA
gaaattttaatcagcgagtcagcttgggaagaaatgacctgcttattcgcaccttccctaaagcaagccatggag

SEQ ID NO: 134437 - DNA, 75 bp, synthetic construct
  source 1..75: mol_type = other DNA
tcagcccagctggaaacgatcaaaacgaaagctggtgaaacgttcggtgaggaaaaagaagccatctttgaaggg

SEQ ID NO: 134438 - DNA, 75 bp, synthetic construct
  source 1..75: mol_type = other DNA
cgggtatcgctttcggtaaagctctgcttctgaaagaagacgaaattgtcattgaccggaaaaaaatttctgccg

SEQ ID NO: 134439 - DNA, 75 bp, synthetic construct
  source 1..75: mol_type = other DNA
tcgctttccaaaacctataaaaataggtcggatgtcacgatggcgcgctgctgattattataagtggcgagatgg

SEQ ID NO: 134440 - DNA, 75 bp, synthetic construct
  source 1..75: mol_type = other DNA
atctacgcaacgttaatccctgataatcatgtaattttatctatcgaggcattcattgaatatcttgaaaggctc

SEQ ID NO: 134441 - DNA, 75 bp, synthetic construct
  source 1..75: mol_type = other DNA
taaggtggcgctgcgtaccgccggcacgcccatcggaccaaacgacactgccatcgccgggcatgccattgccgc

SEQ ID NO: 134442 - DNA, 75 bp, synthetic construct
  source 1..75: mol_type = other DNA
ccctggtgtttattttgtgtgctgcaactgcgcgctttccagtgtgttgatcgtcgctggctatgggatgatatc

SEQ ID NO: 134443 - DNA, 75 bp, synthetic construct
  source 1..75: mol_type = other DNA
cgtgatcacattctggaaccctctgtcggcaccggggccatgtgtgacgattcgggataccgcaccggggtccat

SEQ ID NO: 134444 - DNA, 75 bp, synthetic construct
  source 1..75: mol_type = other DNA
tccggctgatgcgcgcaaggctggataacgccgcgccggttgctgaaatccgggctgaatctcaggtttttgtga

SEQ ID NO: 134445 - DNA, 75 bp, synthetic construct
  source 1..75: mol_type = other DNA
atgaataaaattaaaagcagaatgaaatcatcatttaaaatatcaggcaatcattctgaatggaaagataaaaaa

SEQ ID NO: 134446 - DNA, 75 bp, synthetic construct
  source 1..75: mol_type = other DNA
ttatccatgggcatgatggagaagcaaaagagaaaactgctcgctttatagaaaaactaggacttgaggcaataa

SEQ ID NO: 134447 - DNA, 75 bp, synthetic construct
  source 1..75: mol_type = other DNA
accgggattgttgttgaatgtcaggatgaacgttcacaacataaaaacaaagcgaaggcactttctgtacttggt

SEQ ID NO: 134448 - DNA, 75 bp, synthetic construct
  source 1..75: mol_type = other DNA
gcaggggcgtattcatacttctgcttgtaccgttgcggtaatgccagaactgcctgacgcagaactgccggacat

SEQ ID NO: 134449 - DNA, 75 bp, synthetic construct
  source 1..75: mol_type = other DNA
tgccgaccagagcgggaaaatcaccgctatctcacatgaaagctggtccggaaacctgcccggcggcacgccgga

SEQ ID NO: 134450 - DNA, 75 bp, synthetic construct
  source 1..75: mol_type = other DNA
gcgatttttacgaagggggttcatcatcattgctgacgcatcaggtgaaaaagtgtgtccagagcggcatcaaag

SEQ ID NO: 134451 - DNA, 75 bp, synthetic construct
  source 1..75: mol_type = other DNA
tgtttactgacgttactgctggtgctgattctggttaccgtttcaggcgtcagtgtatttgtactgttgcagtag

SEQ ID NO: 134452 - DNA, 75 bp, synthetic construct
  source 1..75: mol_type = other DNA
acaaacaggaactgcgcgacgaaggtaaagcgtttgacgagtcaattgaaatcggcgtaatggtggaaacaccag

SEQ ID NO: 134453 - DNA, 75 bp, synthetic construct
  source 1..75: mol_type = other DNA
tgatatgatttcacacctttaccaaccaatgtcaccgtccgtgctgaacttgatcaagcaagttattgatgcttc

SEQ ID NO: 134454 - DNA, 75 bp, synthetic construct
  source 1..75: mol_type = other DNA
agctggagcaggaaatcatagccctgattaaagataaacatatgacagctgacgcagctgctcatgaagttatcg

SEQ ID NO: 134455 - DNA, 75 bp, synthetic construct
  source 1..75: mol_type = other DNA
aaattcgaatctggcggtcatcgcgtgcagcgtgttcctgctacggaatcgcagggtcgtattcatacttctgct

SEQ ID NO: 134456 - DNA, 75 bp, synthetic construct
  source 1..75: mol_type = other DNA
ctctgccgtcaaccaagccccgatcacgggtgaaagcctcccggtcgaaaaatcccccggtgattcggtgttcgc

SEQ ID NO: 134457 - DNA, 75 bp, synthetic construct
  source 1..75: mol_type = other DNA
cgtgcggctgacgtacgtgatataggtaagcgcctgctgcgcaacatcctgggcctgaagattatcgacctgagc

SEQ ID NO: 134458 - DNA, 75 bp, synthetic construct
  source 1..75: mol_type = other DNA
tgagagtatatcgtatctgactatcatacaaatggtagcgatgattttgccctttttaacgtatccttatttaat

SEQ ID NO: 134459 - DNA, 75 bp, synthetic construct
  source 1..75: mol_type = other DNA
ttttaaaacgctaaaaggttatctggtaaaaggcaggcagatcctggatggacaggaactgcaggacagccgtta

SEQ ID NO: 134460 - DNA, 75 bp, synthetic construct
  source 1..75: mol_type = other DNA
tttttatgagtttacgaaagcagcaggcatcccgtcagacaaaaaagatgatattcaggcatcgtttgaacgcct

SEQ ID NO: 134461 - DNA, 75 bp, synthetic construct
  source 1..75: mol_type = other DNA
accttcacggtaaaccacaaggcaccgggctgctgaaagctaacccggaagattttgtggtggtggaagatttag

SEQ ID NO: 134462 - DNA, 75 bp, synthetic construct
  source 1..75: mol_type = other DNA
accatcgggtacggtccgaattaatgcgagccagcatgccattgataaagtgcttctgccgaagctggcggtgtt

SEQ ID NO: 134463 - DNA, 75 bp, synthetic construct
  source 1..75: mol_type = other DNA
gattcttatatttctattagtgaagtcgccttcaaattattattttgtttctcttataactggcggggcttattt

SEQ ID NO: 134464 - DNA, 75 bp, synthetic construct
  source 1..75: mol_type = other DNA
atgcagtaatggcagcacaaagcgatctggtggaagtcgtctacaccctgcgtcaggtggtgtgcgtaaaaggat

SEQ ID NO: 134465 - DNA, 75 bp, synthetic construct
  source 1..75: mol_type = other DNA
ccgacaacgccgataaaatcagcgatgactggaaagccttcgaccgtgccgtcgacagccactccggggtaccgc

SEQ ID NO: 134466 - DNA, 75 bp, synthetic construct
  source 1..75: mol_type = other DNA
ctgggatgccttcgaccgcgcggtcgacagcaattacggtgttgaccaggcagcggcaaacctgaaacagcgcct

SEQ ID NO: 134467 - DNA, 75 bp, synthetic construct
  source 1..75: mol_type = other DNA
cgcgaaaagttttatcgtccgtgggctgggaaatgaagaatcattttgctcatgcagccacggtgccgggcgggt

SEQ ID NO: 134468 - DNA, 75 bp, synthetic construct
  source 1..75: mol_type = other DNA
attggctgtggaatgaacgcgctgcgtaccgcgttaacggcggcagacctgcctgaaaacctggcagagctgcgt

SEQ ID NO: 134469 - DNA, 75 bp, synthetic construct
  source 1..75: mol_type = other DNA
gccggaaaacctggcggagctgcgtcaggcaattgaaactgccgtgccgcacgggcgtactaccgggcgttgtaa

SEQ ID NO: 134470 - DNA, 75 bp, synthetic construct
  source 1..75: mol_type = other DNA
tggatttacggtctgggtgggctgctggtgccgtttattggtatcaaagtcattgatttactgctgaccgtttgc

SEQ ID NO: 134471 - DNA, 75 bp, synthetic construct
  source 1..75: mol_type = other DNA
cattagcggctggctgtgggtcaccgtactgttcgctaatttcgccgaggcgctggcagaaggccgcagtaaagc

SEQ ID NO: 134472 - DNA, 75 bp, synthetic construct
  source 1..75: mol_type = other DNA
cgaagcgacaccggaggccaagctggcattgatccgtcagtatcaggcggaaggccgtttggtagcgatgaccgg

SEQ ID NO: 134473 - DNA, 75 bp, synthetic construct
  source 1..75: mol_type = other DNA
tgtcgctgacacaagcaggcgagcagctctaccagaagacggcatctggatttgaaatgttagatcttgggcttg

SEQ ID NO: 134474 - DNA, 75 bp, synthetic construct
  source 1..75: mol_type = other DNA
atggcgaaaagggagaactacaacgagctgtacctgtttatgcaggtggtgcgggaaggcagctttaccgcagcg

SEQ ID NO: 134475 - DNA, 75 bp, synthetic construct
  source 1..75: mol_type = other DNA
gcgaatggagggattgtttctctattaccctcatcgcaacgtctcccccgccctgcggatggtcattgatacatt

SEQ ID NO: 134476 - DNA, 75 bp, synthetic construct
  source 1..75: mol_type = other DNA
atgatgaaagtaactgcaaacggtaagacatttaccttccctgatggtacgagcacggaagatattggcaccgcc

SEQ ID NO: 134477 - DNA, 75 bp, synthetic construct
  source 1..75: mol_type = other DNA
tccctgcatcgcttaccagttcggcgacggcagtctgtatgcctgggaactcaatcaggacggtaaaaagatcac

SEQ ID NO: 134478 - DNA, 75 bp, synthetic construct
  source 1..75: mol_type = other DNA
accatcgggtacggtccgtattaatgccagccagcacgccattgacaaagtactgctgccgaagctggcggtgtt

SEQ ID NO: 134479 - DNA, 75 bp, synthetic construct
  source 1..75: mol_type = other DNA
attaaccagcattgctagccacatatcacataatgaaaatcatgtgggcgaggtctggaaaagtaaacctttaac

SEQ ID NO: 134480 - DNA, 75 bp, synthetic construct
  source 1..75: mol_type = other DNA
aagcaggaacaccagcctatgaaagagcgctaaataatgctgcaaatgcgatacgccctatactctcaagccaaa

SEQ ID NO: 134481 - DNA, 75 bp, synthetic construct
  source 1..75: mol_type = other DNA
aagctggaacgccggcttatgaaagagcgctaaataatgctgcaaatgcgatacgccctatacttgcaagccaga

SEQ ID NO: 134482 - DNA, 75 bp, synthetic construct
  source 1..75: mol_type = other DNA
atggcgaccataaaggatgtagcccgactggcaggcgtttcagtcgccaccgtttcccgcgtcattaataattca

SEQ ID NO: 134483 - DNA, 75 bp, synthetic construct
  source 1..75: mol_type = other DNA
agcagtgggcaactggtctgaagtatgatgcaaacaacgtctacctggcggctaactacggcgaaactcgtaacg

SEQ ID NO: 134484 - DNA, 75 bp, synthetic construct
  source 1..75: mol_type = other DNA
gtctgaaattcgctgacgttggttctattgattacggtcgtaactacggtgtggtttatgatgcactgggctaca

SEQ ID NO: 134485 - DNA, 75 bp, synthetic construct
  source 1..75: mol_type = other DNA
ggctgatgaaacgccggaaggtcgcagtattgtgatcctcgccaagcagcgttttaacctgcgcgagcgcgatgt

SEQ ID NO: 134486 - DNA, 75 bp, synthetic construct
  source 1..75: mol_type = other DNA
gcaatggtgaaagcggtcgaacaggtggcttatcacaccggtaattttttattgattggcaacggttaccacaac

SEQ ID NO: 134487 - DNA, 75 bp, synthetic construct
  source 1..75: mol_type = other DNA
cgtctttagtccaacgctggtacgtcgccattcagtttcaacaccgtcactggaggcaagtcataacgcctccag

SEQ ID NO: 134488 - DNA, 75 bp, synthetic construct
  source 1..75: mol_type = other DNA
gtaaaaaagggcgcattgaggtctgctttcgcaacaatccggcggcagatttcctgccgccgtgttgcccgttaa

SEQ ID NO: 134489 - DNA, 75 bp, synthetic construct
  source 1..75: mol_type = other DNA
atgccatctgcaacacaaactgcccgactggaagcaaggatcagcacagaactgcatgctatgctgaaacgcgct

SEQ ID NO: 134490 - DNA, 75 bp, synthetic construct
  source 1..75: mol_type = other DNA
aatccggcagtccatacggcagcttttgccttacctcagtatctgcaagacgcactggcttcacagccgtcctaa

SEQ ID NO: 134491 - DNA, 75 bp, synthetic construct
  source 1..75: mol_type = other DNA
gttgcacaataccagttcgatttcggtctgcgtccgtccatcgcttacaccaaatctaaagcgaaagacgtagaa

SEQ ID NO: 134492 - DNA, 75 bp, synthetic construct
  source 1..75: mol_type = other DNA
gggtactgcaaacgctgcagaaatctataacaaagatggcaacaaactggatctgtacggcaaggctgttggtct

SEQ ID NO: 134493 - DNA, 75 bp, synthetic construct
  source 1..75: mol_type = other DNA
cggcgacggtgttggcggctccatcagctacgaattcgaaggctttggtatcgttggtgcttatggtgctgctga

SEQ ID NO: 134494 - DNA, 75 bp, synthetic construct
  source 1..75: mol_type = other DNA
ccggaagcgccttcaccgctggcgttggtatctctccatttgacgtcgtacatatcgatgtttccggcctggtag

SEQ ID NO: 134495 - DNA, 75 bp, synthetic construct
  source 1..75: mol_type = other DNA
tcttctgccgtctgttggggcacaagttgctgatcctgatgatgtatcaaataaagctgatgatgttaaagatga

SEQ ID NO: 134496 - DNA, 75 bp, synthetic construct
  source 1..75: mol_type = other DNA
tcagaaattatgacagcagcgccttcaaaggcgaccgctaccacaacacgaaaaatggcatcaacgccgacatcg

SEQ ID NO: 134497 - DNA, 75 bp, synthetic construct
  source 1..75: mol_type = other DNA
tgactggaaggccttcgacagcgccatcgacagtaaccacggtgttcctgaggctgccgcacgcctgaaagaacg

SEQ ID NO: 134498 - DNA, 75 bp, synthetic construct
  source 1..75: mol_type = other DNA
atgatgatgaatatgcacattacccgaactctcatcgcatctgctgttttattttcctttaattcaacagccgcg

SEQ ID NO: 134499 - DNA, 75 bp, synthetic construct
  source 1..75: mol_type = other DNA
tgccgagattaatgcctggaactggatgcaggtgcgtgcgggttaccgccagaacatggcttccggagaaggcaa

SEQ ID NO: 134500 - DNA, 75 bp, synthetic construct
  source 1..75: mol_type = other DNA
tcgttcggcaatcgaagatggggtagtggagccacacgagcagacagcaattaatgatgaattgtatctgtcaat

SEQ ID NO: 134501 - DNA, 75 bp, synthetic construct
  source 1..75: mol_type = other DNA
cctgccaacctacagaagaatcattaatgccgattgtgagccgccttgatgcagaaaatcgttgtccactggaag

SEQ ID NO: 134502 - DNA, 75 bp, synthetic construct
  source 1..75: mol_type = other DNA
gcaggccaacagtctgaaaggtgtaaaaaaaaccgcctttgcccgcaaactgcgtgagccgaaatatggcgctgc

SEQ ID NO: 134503 - DNA, 75 bp, synthetic construct
  source 1..75: mol_type = other DNA
agctgcgtaaaatgggcattaaaacggtgatgattaccggcgataaccgcctgactgccgccgcgatagctgcgg

SEQ ID NO: 134504 - DNA, 75 bp, synthetic construct
  source 1..75: mol_type = other DNA
tcgctgaaaagagtgacgcccgcgagtgtgcagctccgggcgccttggcgaacaactcttcgagtatggagaaat

SEQ ID NO: 134505 - DNA, 75 bp, synthetic construct
  source 1..75: mol_type = other DNA
agaagtgacctttttcatggtttaaatatagctccaaatgaagatggctatcatcttgctggttttcctgatggg

SEQ ID NO: 134506 - DNA, 75 bp, synthetic construct
  source 1..75: mol_type = other DNA
gaatattttgctgaaaaatgaggtttgcttacatggacggataacacgaaatcctgcaaattggcaaaatgtaag

SEQ ID NO: 134507 - DNA, 75 bp, synthetic construct
  source 1..75: mol_type = other DNA
tatcaacatattcgctcaattttttatcaccagatgatgtgaggaaagaagaacttaaggcatcacaaggtgata

SEQ ID NO: 134508 - DNA, 75 bp, synthetic construct
  source 1..75: mol_type = other DNA
tttgtcgccagtcctgattttatccggataaacgggacccgtgtgctttcagaaaatgatgtcagggggctgatg

SEQ ID NO: 134509 - DNA, 75 bp, synthetic construct
  source 1..75: mol_type = other DNA
ttcatgctccagcacggaccatgccgttgatggaaccgctacgtcaggcggcagaaaaactggctcaggcgcagg

SEQ ID NO: 134510 - DNA, 75 bp, synthetic construct
  source 1..75: mol_type = other DNA
tggttgggtagatgatgctcagaacgttgatgaactgaacattactctgaacaacggtagtaagtgggttggctc

SEQ ID NO: 134511 - DNA, 75 bp, synthetic construct
  source 1..75: mol_type = other DNA
cgctccatcggcgtcagcggtgtcccggtctttgtgatgaacgaaaaatacgctatcagcggtgctcagagcgca

SEQ ID NO: 134512 - DNA, 75 bp, synthetic construct
  source 1..75: mol_type = other DNA
gttcctgtgtacggcgaatggtcattcgctggtgacaaggagtgctacgaaggagtggtaaggctgacgaaagac

SEQ ID NO: 134513 - DNA, 75 bp, synthetic construct
  source 1..75: mol_type = other DNA
ctacgtcgctgagtattacgaggtagaagagaagaaagagaaagtcttcatctaccgcgacccgctgacaggtga

SEQ ID NO: 134514 - DNA, 75 bp, synthetic construct
  source 1..75: mol_type = other DNA
caatatcgcggacaattcgatgttgttcgcccggtggtcaggaagctggtcgcagagatgcgccggaaccctatc

SEQ ID NO: 134515 - DNA, 75 bp, synthetic construct
  source 1..75: mol_type = other DNA
tcgctggtgacaaggagtgctacgagggcgtggtaaggctgacgaaagacggtcaacgccttcgtaacatgatca

SEQ ID NO: 134516 - DNA, 75 bp, synthetic construct
  source 1..75: mol_type = other DNA
agaccagactcattcacaacgcatggacttcgcgaatcttatgcgtcaagttcaaatcccctccggcggagtagc

SEQ ID NO: 134517 - DNA, 75 bp, synthetic construct
  source 1..75: mol_type = other DNA
agcagagcgcaaggtgaagcgtcggcgtgtgtataagtcgatcatcacctgcacgcagatactgaaagaccgcga

SEQ ID NO: 134518 - DNA, 75 bp, synthetic construct
  source 1..75: mol_type = other DNA
agacaaccattaaaagccgcagcgttgatgttggcgtggtcgaaagcgctacgcttgctgatgatttaacgcatg

SEQ ID NO: 134519 - DNA, 75 bp, synthetic construct
  source 1..75: mol_type = other DNA
accgcaagggaacgccagaagcagaagtttctggagggattttttattgatgttgcctctattcccggcgttggt

SEQ ID NO: 134520 - DNA, 75 bp, synthetic construct
  source 1..75: mol_type = other DNA
gtgaaatcaactatatataccgcagctggcgattgcgtgacgccaggtcatgaattaggcaaaggcggcgaaggc

SEQ ID NO: 134521 - DNA, 75 bp, synthetic construct
  source 1..75: mol_type = other DNA
ctagtgacgattgcagcactgtggctggccggatgcagctccggcgaaattaataaaaactattaccagttacct

SEQ ID NO: 134522 - DNA, 75 bp, synthetic construct
  source 1..75: mol_type = other DNA
gtgtggagatgggctcattgacaacgctgcttagtggcggtgtcagctttgatgtgccggaaggtctggatttag

SEQ ID NO: 134523 - DNA, 75 bp, synthetic construct
  source 1..75: mol_type = other DNA
agaccactattaaaagccgtagtgttgatgtcggcgtggttgaaagcgccacactggctgatgatttgacgcacg

SEQ ID NO: 134524 - DNA, 75 bp, synthetic construct
  source 1..75: mol_type = other DNA
ccacgatcgattccgctgtcgatgttaccgggcgatgttgaagccatgtttcagcaggcattcacggaaagtggc

SEQ ID NO: 134525 - DNA, 75 bp, synthetic construct
  source 1..75: mol_type = other DNA
aaagcagaaatccagcaacgccgtgaggcgtttaatcgcgcgaaaatggactatgaccatttagtcagccagatc

SEQ ID NO: 134526 - DNA, 75 bp, synthetic construct
  source 1..75: mol_type = other DNA
gaaggcgcggtttatgatatcgaggagtttgtcgatagcgtcgccaagatttatcacacgccgccacccgcctta

SEQ ID NO: 134527 - DNA, 75 bp, synthetic construct
  source 1..75: mol_type = other DNA
ctatgaccatttagtccgccagatccagcaggtaggcggcctggaaggttttatcgccaaacggacgatgctacg

SEQ ID NO: 134528 - DNA, 75 bp, synthetic construct
  source 1..75: mol_type = other DNA
tattgatgttgcctctattcccggcgttggccctgcgcgtaaagcggcgttacggtcttttggtattgaaacagc

SEQ ID NO: 134529 - DNA, 75 bp, synthetic construct
  source 1..75: mol_type = other DNA
atgcgctggagacggatattgcccattttcgttatgcctacgcgtcagacaatcagagacgtggcttaaaaccgc

SEQ ID NO: 134530 - DNA, 75 bp, synthetic construct
  source 1..75: mol_type = other DNA
aattgttacgcgccggcgaccatgagcaggcactttctgtactgacagagcattcagatgaattctcaccttgct

SEQ ID NO: 134531 - DNA, 75 bp, synthetic construct
  source 1..75: mol_type = other DNA
acggcatcaggttacgatgcgacggctggaatgttccaggaaggcacagaagccaccggagccgccggataactt

SEQ ID NO: 134532 - DNA, 75 bp, synthetic construct
  source 1..75: mol_type = other DNA
aaaaagggaaaccacttacagaagtttattatgaggtagatagtacattaagttctggcagtctaataccaaaaa

SEQ ID NO: 134533 - DNA, 75 bp, synthetic construct
  source 1..75: mol_type = other DNA
tgacgatggcggcggtgtttatcgcccaggccaccaacagtgagatggatatcgtccaccaaatcacgctgttag

SEQ ID NO: 134534 - DNA, 75 bp, synthetic construct
  source 1..75: mol_type = other DNA
ctattatgcaacatatcacccattatggagagaacatccggaagtattgctgtttataaactggctatacaatca

SEQ ID NO: 134535 - DNA, 75 bp, synthetic construct
  source 1..75: mol_type = other DNA
ctcaggcgccttgcccgacaggagaatgactttattgatgtacacgcttacctggcatacgtatttctggagcag

SEQ ID NO: 134536 - DNA, 75 bp, synthetic construct
  source 1..75: mol_type = other DNA
cagcattgatgcggagagtgaggccgagcgtcttatggaaacccgaaacggtccggttctggtggcctcaccggc

SEQ ID NO: 134537 - DNA, 75 bp, synthetic construct
  source 1..75: mol_type = other DNA
tggcaaccgccacgctgtggccgttttccgcgtggggcggcaacgcggtcagcgtaacggtactggtggcgctac

SEQ ID NO: 134538 - DNA, 75 bp, synthetic construct
  source 1..75: mol_type = other DNA
acaccattatggaaacgttgatacgcaataatggcaaagtggtcagcaaagattcgttaatgctccaactctatc

SEQ ID NO: 134539 - DNA, 75 bp, synthetic construct
  source 1..75: mol_type = other DNA
agatacggtttaagatttttttcagcaaaagggtatgaaggcaatataaaatggattccaactttaatgatacct

SEQ ID NO: 134540 - DNA, 75 bp, synthetic construct
  source 1..75: mol_type = other DNA
taggtataggattactcagtcttggactggttatgattcttcactggaaggccattctagattgcctgatatcaa

SEQ ID NO: 134541 - DNA, 75 bp, synthetic construct
  source 1..75: mol_type = other DNA
aagtgctggatgtgtctggtcgtcagcatactcacgacgcgccacgcagcaatcgtaacgatgcaattgatgtta

SEQ ID NO: 134542 - DNA, 75 bp, synthetic construct
  source 1..75: mol_type = other DNA
aggtgaaaggtctggctcgcgcattccgccgcaatctgattctgggcgactccagcaccaacaccaaagcgttcg

SEQ ID NO: 134543 - DNA, 75 bp, synthetic construct
  source 1..75: mol_type = other DNA
ccgtcgcaatctgattgttggcgactccaccactaacaacaaggcgtttgacggcattccacgcctgatgcacgc

SEQ ID NO: 134544 - DNA, 75 bp, synthetic construct
  source 1..75: mol_type = other DNA
acctttctgaagagaacggcgttactggtctgtatggcggcgacaacgcaggtatcgttgttgaaaacattggta

SEQ ID NO: 134545 - DNA, 75 bp, synthetic construct
  source 1..75: mol_type = other DNA
ttgtatttatttcttttatcccagcaactacacaggcagagagaacaccgaacgaagaaaaaaaagttattggtt

SEQ ID NO: 134546 - DNA, 75 bp, synthetic construct
  source 1..75: mol_type = other DNA
acggtattccgaagctgatgcatgacgatcagaagatcgacatctccggcgcatccatgactttctctatgttcg

SEQ ID NO: 134547 - DNA, 75 bp, synthetic construct
  source 1..75: mol_type = other DNA
gcgaagctgcgcattctggctggcgacgttgacgtcgacaaattcctggctaccactatggctgataccaacaac

SEQ ID NO: 134548 - DNA, 75 bp, synthetic construct
  source 1..75: mol_type = other DNA
gcgagccttcagtgtactgaaagagcatgctgatgaattttcaccttactggtatgaactcggtctcctgcattt

SEQ ID NO: 134549 - DNA, 75 bp, synthetic construct
  source 1..75: mol_type = other DNA
tggtgctggtattgggttcaatcgctaaagcgactggtttcagtatcttcaaatttattcgctacatccgtgaag

SEQ ID NO: 134550 - DNA, 75 bp, synthetic construct
  source 1..75: mol_type = other DNA
tttatcgtgctggcggcgacgctttcagccgtgggtcatttaccggtggctggtctggcgctgatcctcggcatc

SEQ ID NO: 134551 - DNA, 75 bp, synthetic construct
  source 1..75: mol_type = other DNA
tggggctgggcgtagggctcaccatcactccgcaagagttaggaaggtattccctttcgcattcaacacattccg

SEQ ID NO: 134552 - DNA, 75 bp, synthetic construct
  source 1..75: mol_type = other DNA
agacactttctgaggaaattgtacagaaatgcagaaatatgaacggtgaatatatctggccctggatattgccct

SEQ ID NO: 134553 - DNA, 75 bp, synthetic construct
  source 1..75: mol_type = other DNA
attcctctgtgctgcatgaacgagcagaaatcattaaatgcgccgaaatgctgatgcaggaagatgatttcgaaa

SEQ ID NO: 134554 - DNA, 75 bp, synthetic construct
  source 1..75: mol_type = other DNA
acgaaacagtgcgtcgctatgggcatgagagtggtgagatttggcaccggatgcagaaaaatctgccgggtgatt

SEQ ID NO: 134555 - DNA, 75 bp, synthetic construct
  source 1..75: mol_type = other DNA
ggctgggtggtggggcattcgtatatcgtctacgcgccgctgctggcggggatggcgaccattgtttacgaagga

SEQ ID NO: 134556 - DNA, 75 bp, synthetic construct
  source 1..75: mol_type = other DNA
ggtctggacgacaggccgacacgtctgggaagccccggcgtgccgatgtatggatacaacgtgcagttgctcaat

SEQ ID NO: 134557 - DNA, 75 bp, synthetic construct
  source 1..75: mol_type = other DNA
cagcgtgacgtcggcggttatgcggtggcgctggcgacctcaatggacaccatttttggtggcaaagcgggcggt

SEQ ID NO: 134558 - DNA, 75 bp, synthetic construct
  source 1..75: mol_type = other DNA
ccagactgaaacgggccacggtcagaaatccgaatgcaaaaattatcgttaaccgcggtgatcttccagtgatta

SEQ ID NO: 134559 - DNA, 75 bp, synthetic construct
  source 1..75: mol_type = other DNA
gtgcgagcagagcgtgagcaactgaaggtggaactggcgaagctggaagttgagatggcagggtatttgaaggag

SEQ ID NO: 134560 - DNA, 75 bp, synthetic construct
  source 1..75: mol_type = other DNA
accgctttgtgaagacgtactggtcgctgttttcccgtccggtgtatgccacctttgactggggcatccgcgatg

SEQ ID NO: 134561 - DNA, 75 bp, synthetic construct
  source 1..75: mol_type = other DNA
tgcctcgcacagcgtggcggcgcgaattgatgatgctaaaccggtgctgattgtctcggctgatgccggagcgcg

SEQ ID NO: 134562 - DNA, 75 bp, synthetic construct
  source 1..75: mol_type = other DNA
aggcgattatggcgctggtggacagccagattggcaactttggccgcccggcgcacgtctggtttgtctcgcaat

SEQ ID NO: 134563 - DNA, 75 bp, synthetic construct
  source 1..75: mol_type = other DNA
aggcgcagcatcagccgcgccacgttttgctggtggatcgcgggctggcgaaaatggcgcgcgttaccggacggg

SEQ ID NO: 134564 - DNA, 75 bp, synthetic construct
  source 1..75: mol_type = other DNA
cacgatctctcgtcgctggaagtgctctatctggcaggagaaccgctggacgagccgaccgccagttgggtgagc

SEQ ID NO: 134565 - DNA, 75 bp, synthetic construct
  source 1..75: mol_type = other DNA
acctttgactggggcatccgcgatgctgacggttatcactttattctcgggcgtactgacgatgtgattaacgtt

SEQ ID NO: 134566 - DNA, 75 bp, synthetic construct
  source 1..75: mol_type = other DNA
tatccggcgtgaacgcctgcccggagaactggcatacgcgctgaaacaacaactgaggattgcgataaaacgatg

SEQ ID NO: 134567 - DNA, 75 bp, synthetic construct
  source 1..75: mol_type = other DNA
accatatggcggaagtgtacctgactcagccgatgcagattgtggcgggcagccaggcagggagcaaatggatga

SEQ ID NO: 134568 - DNA, 75 bp, synthetic construct
  source 1..75: mol_type = other DNA
cggttcgtagccgagtactctatccagctgagctacggatgcatcgggaaacttactttactgcagattttttga

SEQ ID NO: 134569 - DNA, 75 bp, synthetic construct
  source 1..75: mol_type = other DNA
ccgagaaaacttgttaaagagcgatccagactgaaacgggctacggtcagaaatccgaacgcaaaaattatcgtt

SEQ ID NO: 134570 - DNA, 75 bp, synthetic construct
  source 1..75: mol_type = other DNA
tacttaaagccggtcagcatcggtatcagcgggcattcattcagcgattaaaaaacggtcgctggcatgtcatgc

SEQ ID NO: 134571 - DNA, 75 bp, synthetic construct
  source 1..75: mol_type = other DNA
gcaatggccattaaccgcgtggccacaacggcgattaatcagtcttcgtcacaggttgcccgggagaccagggtg

SEQ ID NO: 134572 - DNA, 75 bp, synthetic construct
  source 1..75: mol_type = other DNA
aaatccgaatgcaaaaattatcgttaaccgcggtgatctccctgtgattaagctggggatcagaatgctggggcg

SEQ ID NO: 134573 - DNA, 75 bp, synthetic construct
  source 1..75: mol_type = other DNA
aatcagatgttacggccgagtcggtattctttatgaagcgtcggcaggtgttaaaagcactgggcatcagcgcgg

SEQ ID NO: 134574 - DNA, 75 bp, synthetic construct
  source 1..75: mol_type = other DNA
gatatcagcgctgcagccctctctttaccaaacgccgcccatgcggatgtgcttagctggtttaaagggaacgat

SEQ ID NO: 134575 - DNA, 75 bp, synthetic construct
  source 1..75: mol_type = other DNA
tggtaaaccctggcagtcgtatgaaacagcgcaaattgcggttgatctgcgcttcttccagtttgtaccagggga

SEQ ID NO: 134576 - DNA, 75 bp, synthetic construct
  source 1..75: mol_type = other DNA
gcagggcaacccacccggacaggtaacggttaatcggctggttttgtcccaagatgacgtaaacaaggacgcttc

SEQ ID NO: 134577 - DNA, 75 bp, synthetic construct
  source 1..75: mol_type = other DNA
caactggagcgtcggcaccgtattcgtaccatggtatttgatgtggccgcgcagggcaacccacccggacaggta

SEQ ID NO: 134578 - DNA, 75 bp, synthetic construct
  source 1..75: mol_type = other DNA
gtgcagcccgctcaggctgaacgctgggagatactggacggcggcaagcgctatattttccatctgcgtagcggt

SEQ ID NO: 134579 - DNA, 75 bp, synthetic construct
  source 1..75: mol_type = other DNA
gatgttgcatcgctgggtgtgaaggctaccgatgaccgcactcttgaagtcacgcttgagcagcccgttccctgg

SEQ ID NO: 134580 - DNA, 75 bp, synthetic construct
  source 1..75: mol_type = other DNA
ggtatggatagacagtgaaggcaaagtgcaacccgctcaggccgaatcatgggaggtggcagatagcggcaaacg

SEQ ID NO: 134581 - DNA, 75 bp, synthetic construct
  source 1..75: mol_type = other DNA
ataccagttttgttcggccgggagagataacagatatcgaaactcgcccgcatggaagtcagtttatgtggtctg

SEQ ID NO: 134582 - DNA, 75 bp, synthetic construct
  source 1..75: mol_type = other DNA
ggtgagtttgtgggtaatgtaaacccaactgatatgaaaaaagttaaagcctggaacggacagtacctggacttc

SEQ ID NO: 134583 - DNA, 75 bp, synthetic construct
  source 1..75: mol_type = other DNA
atcccaaaggcactttgtctagcttcatctatcctgcaatgtacggtgcgtatggtttcacttattctgatgaca

SEQ ID NO: 134584 - DNA, 75 bp, synthetic construct
  source 1..75: mol_type = other DNA
ccggacggtaaccggtggccagcccgtaaaaaacgtgtattccgtgtccaggcaggtgtggtgttcatctggaac

SEQ ID NO: 134585 - DNA, 75 bp, synthetic construct
  source 1..75: mol_type = other DNA
cgccgtaaaaccccgtccttcagggcggggatatacggcataagcgctaacttaagggttgaaccatctgaagaa

SEQ ID NO: 134586 - DNA, 75 bp, synthetic construct
  source 1..75: mol_type = other DNA
ccctgggcaccacggaaacgtcagattcagcgggtacaacagggtattaagtttctctggcaacctccggcagcg

SEQ ID NO: 134587 - DNA, 75 bp, synthetic construct
  source 1..75: mol_type = other DNA
gacatcgacggcgcactggttggcggtgcttctctgaaagctgacgctttcgcagtgatcgttaaagctgcagaa

SEQ ID NO: 134588 - DNA, 75 bp, synthetic construct
  source 1..75: mol_type = other DNA
gttggcggtgcttctctgaaagctgacgccttcgcagtgatcgttaaagctgcagaagcggctaaacaggcttaa

SEQ ID NO: 134589 - DNA, 75 bp, synthetic construct
  source 1..75: mol_type = other DNA
atgcaacacgaactacaacctgattcactggttgatttgaaattcatcatggctgatactggctttggtaaaacc

SEQ ID NO: 134590 - DNA, 75 bp, synthetic construct
  source 1..75: mol_type = other DNA
ttcagggcgttacgcactcattctctcgtttgggaaatgcgattactccccccattattgttgcattagtggcat

SEQ ID NO: 134591 - DNA, 75 bp, synthetic construct
  source 1..75: mol_type = other DNA
tctgcttttgcttatacctatgcagtttttcaaatcatcggtggctggttcgttgatcgacttggctcacgccgc

SEQ ID NO: 134592 - DNA, 75 bp, synthetic construct
  source 1..75: mol_type = other DNA
gtcattcttttcagctttatctccgtactatttctgctcgtcccggttataaatactgactcgttgctcattatg

SEQ ID NO: 134593 - DNA, 75 bp, synthetic construct
  source 1..75: mol_type = other DNA
ccatcctcttcctgctgactccggcagaagatatggccaaacttcagcaacttgttgccctgctggtacgcttcg

SEQ ID NO: 134594 - DNA, 75 bp, synthetic construct
  source 1..75: mol_type = other DNA
aagccaactacgcctatttacgcggtgaagtggaactggttcgtctgccggatgcagaaggccgtatcgctgccg

SEQ ID NO: 134595 - DNA, 75 bp, synthetic construct
  source 1..75: mol_type = other DNA
gggatgcgacgtataatgatgcttccagcttcctgaacacgctcaaaagcgatagtgaagaaaacgtcggtcact

SEQ ID NO: 134596 - DNA, 75 bp, synthetic construct
  source 1..75: mol_type = other DNA
gctataaaatatgcatataaccagaagaagaaaaataaatataatactgttacgaatattaaaaaacctcagagt

SEQ ID NO: 134597 - DNA, 75 bp, synthetic construct
  source 1..75: mol_type = other DNA
atattgagtttattcttgatagaataaacagctgggaaggagatataacttgggttgggatttgtgactcacttg

SEQ ID NO: 134598 - DNA, 75 bp, synthetic construct
  source 1..75: mol_type = other DNA
cccgtgtggatgaaacctttgaggccatccgcgacagcctgaatcagcaggccatcaataacatcgccagaaagc

SEQ ID NO: 134599 - DNA, 75 bp, synthetic construct
  source 1..75: mol_type = other DNA
gactgaaacgggcgacggtcagaaatccgaatgccagaattatcgttaaccgcggtgatctccctgtgattaagc

SEQ ID NO: 134600 - DNA, 75 bp, synthetic construct
  source 1..75: mol_type = other DNA
ctggcatgttatgcaacgtctgccagaagccaggtatgcgaagggcaatgacgataagggaaggaaaaagcgtaa

SEQ ID NO: 134601 - DNA, 75 bp, synthetic construct
  source 1..75: mol_type = other DNA
actgaaacaggcgtttgatgagaatgttgaccgtatccggcgtgaacgtctgcccggagaactggcatacgcgct

SEQ ID NO: 134602 - DNA, 75 bp, synthetic construct
  source 1..75: mol_type = other DNA
ttattcagcgattaaaaaatggtcgctggcatgtcatgcaacgtcttccccaggccagatatgaggagggcaatg

SEQ ID NO: 134603 - DNA, 75 bp, synthetic construct
  source 1..75: mol_type = other DNA
cagcatcgttatcagcgggcatttatccagcgattaaataatgggcgctggcatgttatgcaacgtcttccccag

SEQ ID NO: 134604 - DNA, 75 bp, synthetic construct
  source 1..75: mol_type = other DNA
cagcagatgaacgaactgctggcagaatacctgctggaaaacccaaccgacgcgaaaatcgtggttggcaaaatt

SEQ ID NO: 134605 - DNA, 75 bp, synthetic construct
  source 1..75: mol_type = other DNA
ctctgtctctgtacaggatgacgggcgcggcattccgaccggtattcacccggaagagggcgtatcggcggcgga

SEQ ID NO: 134606 - DNA, 75 bp, synthetic construct
  source 1..75: mol_type = other DNA
agatacttttaaaatcggcatttcatgtggtccattggcacggtttaaagggctacaagtgaatcccgattttgc

SEQ ID NO: 134607 - DNA, 75 bp, synthetic construct
  source 1..75: mol_type = other DNA
ggcaaattccgctgtatcgatgctgaaagtgcctataagtctattcactggccgagcattattttgatcgttggg

SEQ ID NO: 134608 - DNA, 75 bp, synthetic construct
  source 1..75: mol_type = other DNA
cgatggtttggtccgtaccggtgttgccaccgtaatgggaacatggctggtcaaagttgcgggcaacagtgaaat

SEQ ID NO: 134609 - DNA, 75 bp, synthetic construct
  source 1..75: mol_type = other DNA
gccgagcattattttgattgtcgggatgatgccgtttgctgtggcattgcaaaaaaccggtggcgttgcgttagt

SEQ ID NO: 134610 - DNA, 75 bp, synthetic construct
  source 1..75: mol_type = other DNA
gcgatccgaaaggtgtccagccaatttacgcgcctgcgccagtggtgcgtgcgtcggtgttgaaagagtatccgc

SEQ ID NO: 134611 - DNA, 75 bp, synthetic construct
  source 1..75: mol_type = other DNA
aacgtttcctgggatgctctgaacgcagcatacagtgaacatcccgagtggttttcagggcttgtctccggggat

SEQ ID NO: 134612 - DNA, 75 bp, synthetic construct
  source 1..75: mol_type = other DNA
ggcaccccatgccattttctgtctggtgctaatggtggcgttaatgctgaccgatgaaattcctaatcctgttgc

SEQ ID NO: 134613 - DNA, 75 bp, synthetic construct
  source 1..75: mol_type = other DNA
gcggcagtgtgctgattgtggggaaaagacggatcccggacgcctttatcacccggctggctaacggacgctggc

SEQ ID NO: 134614 - DNA, 75 bp, synthetic construct
  source 1..75: mol_type = other DNA
ccacagcatttaaacagaatattgaacgtatccggcgtgaacgcctgccagaagaactgtcatacgcgctgaaac

SEQ ID NO: 134615 - DNA, 75 bp, synthetic construct
  source 1..75: mol_type = other DNA
gaatgagtggctggcagagagaggttatgccggactggcggataaccggaatcgcctggcagaagttgttacccg

SEQ ID NO: 134616 - DNA, 75 bp, synthetic construct
  source 1..75: mol_type = other DNA
ttaccgcgccgttttacaaatcgtcgcgcaggaagaaggttttccgctgacagaaggggtttttgtttcttatcc

SEQ ID NO: 134617 - DNA, 75 bp, synthetic construct
  source 1..75: mol_type = other DNA
catgcacaaacattggccgcagcagaattatcccgacaaaattttattaatctgatttgcggatttttacgcaaa

SEQ ID NO: 134618 - DNA, 75 bp, synthetic construct
  source 1..75: mol_type = other DNA
acgccatgtacaccacgtcgctaccagtgcatcacgtagtaacagtcgctataacctgaacgagacgcacgcaac

SEQ ID NO: 134619 - DNA, 75 bp, synthetic construct
  source 1..75: mol_type = other DNA
ctaccccgtaaaacaaatcggcgaacacgcctggctgattgagaaagctggaatcgtggtccacaaatgcccgcg

SEQ ID NO: 134620 - DNA, 75 bp, synthetic construct
  source 1..75: mol_type = other DNA
ctctcgctacagcctgagcgaaacacacgccacacctgatggccatcccgtaaaacaaattggtgaacacacctg

SEQ ID NO: 134621 - DNA, 75 bp, synthetic construct
  source 1..75: mol_type = other DNA
tcgtatgatgcaccgatggcgctggatagcgatattcgccagcgcttagagctgctgatttcgcgttttccgcta

SEQ ID NO: 134622 - DNA, 75 bp, synthetic construct
  source 1..75: mol_type = other DNA
ccaaaccgcgactaaccggcagggaatttcatgatgtgcgaaaaatcatcagccagcaggtttcttattacgaca

SEQ ID NO: 134623 - DNA, 75 bp, synthetic construct
  source 1..75: mol_type = other DNA
atcggcgagcatgcctggctgattgagaaagccgggatcgtggtccacaaatgcccacgcaatccgtttaccgga

SEQ ID NO: 134624 - DNA, 75 bp, synthetic construct
  source 1..75: mol_type = other DNA
ggcagagcggtggctgtggtatttggtggctttactctggcgatggcaatcggcgtaccgctgagtacatggttg

SEQ ID NO: 134625 - DNA, 75 bp, synthetic construct
  source 1..75: mol_type = other DNA
taccctgcggtggtgttcgatgatcgggaagtggtgtacggcaccaccgatgtggcacaggctgaacgactcagg

SEQ ID NO: 134626 - DNA, 75 bp, synthetic construct
  source 1..75: mol_type = other DNA
agtttggacaggatttcacattgtacgaagcacttcgcacggttgatcgtctgcttcgcgggcaaagttttatta

SEQ ID NO: 134627 - DNA, 75 bp, synthetic construct
  source 1..75: mol_type = other DNA
gtgaactgttattacgtgcatccgctattgacggagtgactccggcgggtaaaaacggagccgacgaagccactt

SEQ ID NO: 134628 - DNA, 75 bp, synthetic construct
  source 1..75: mol_type = other DNA
tggctgattaatgatgccggaattgtcattcaccggggcgcacgcaacccgattaccgggaatacctgttactcc

SEQ ID NO: 134629 - DNA, 75 bp, synthetic construct
  source 1..75: mol_type = other DNA
agctggggatcagaatgctggggcgtcgtccggacagcatactcaaagccggtcagcatcgttatcagcgggcat

SEQ ID NO: 134630 - DNA, 75 bp, synthetic construct
  source 1..75: mol_type = other DNA
accatcatggcggcggaagtgcccttcctggcggctacccataaagcatttccgcgtatttttgcccggcagaat

SEQ ID NO: 134631 - DNA, 75 bp, synthetic construct
  source 1..75: mol_type = other DNA
aataaacgtgatgttggcaaagcgacactgctggcggttctctccgctctgggcgtttatttattggtcactctg

SEQ ID NO: 134632 - DNA, 75 bp, synthetic construct
  source 1..75: mol_type = other DNA
tcctggcggccacacataaagcattcccgcgcatttttgctcgccagaatgcgcaagctgcgccgtctgcctcac

SEQ ID NO: 134633 - DNA, 75 bp, synthetic construct
  source 1..75: mol_type = other DNA
gcgccaccggtgacgatgcgcgtgaaggcctgattgcggtcgtttccgtgaaagtgccggacccgaaattctcct

SEQ ID NO: 134634 - DNA, 75 bp, synthetic construct
  source 1..75: mol_type = other DNA
tcctggcagctacccataaggcattcccgcgtatttttgcgcgccagaatgcacaagcagcgccgtctgcctcgc

SEQ ID NO: 134635 - DNA, 75 bp, synthetic construct
  source 1..75: mol_type = other DNA
cgtttgcggcgcgtacttaagctggaccatcatggcagcagaagttccgttcctggcagccactcataaagcatt

SEQ ID NO: 134636 - DNA, 75 bp, synthetic construct
  source 1..75: mol_type = other DNA
caggccattaagacgaaagatgaggatgcactggcaaaactcatcgacgaagcgccggatatgccgtctgatggc

SEQ ID NO: 134637 - DNA, 75 bp, synthetic construct
  source 1..75: mol_type = other DNA
ggtgacagcctgaaatcgttcggtgtggatgatttctacaaagcgcctaaggcaactgtcgacgcggtgtttact

SEQ ID NO: 134638 - DNA, 75 bp, synthetic construct
  source 1..75: mol_type = other DNA
tactgccttacctgaaggtaatcgcactactacggatgaaggcgatccgaacaaagaaaaaaccggcacgggtga

SEQ ID NO: 134639 - DNA, 75 bp, synthetic construct
  source 1..75: mol_type = other DNA
ttattgctggcctttgccatgctgatcctcacgcgcattcgtcccgaacttgacggcggtatctttacctatgcc

SEQ ID NO: 134640 - DNA, 75 bp, synthetic construct
  source 1..75: mol_type = other DNA
ccaggcgctgcgcacaggcgacagcctgaaggcgtttggcatttccgacttcgccaaagcgccgaaggccactgt

SEQ ID NO: 134641 - DNA, 75 bp, synthetic construct
  source 1..75: mol_type = other DNA
cggcgcgctggaactgaacaaagccaaaaatcggatcaccccgccatctggcaaaccaactggtgatcgcgctcg

SEQ ID NO: 134642 - DNA, 75 bp, synthetic construct
  source 1..75: mol_type = other DNA
tatctgcaacgttattttctgcagtatctgcgcaggccacagataatcttcagtttagagggaatctgattattc

SEQ ID NO: 134643 - DNA, 75 bp, synthetic construct
  source 1..75: mol_type = other DNA
ctccaggcactccagacggaaagcctgatggtggcagatgatccgatcgccccacgcgtttcccggcccgtagcc

SEQ ID NO: 134644 - DNA, 75 bp, synthetic construct
  source 1..75: mol_type = other DNA
aagtgtttctgcatgacggtgtagctgttacctatgacgagcggatggcgaccccggaaacgattgtaatgaacc

SEQ ID NO: 134645 - DNA, 75 bp, synthetic construct
  source 1..75: mol_type = other DNA
atcccaacagtgaaatttcaaaactgctgcgccagaaaaccacttaccgctacaagctggcgctgggaaccaagc

SEQ ID NO: 134646 - DNA, 75 bp, synthetic construct
  source 1..75: mol_type = other DNA
agagtgcaaacgagtttctgcaattaatgggcttatcaagcggcggcagacaatacaagacgttgcgcgaacaaa

SEQ ID NO: 134647 - DNA, 75 bp, synthetic construct
  source 1..75: mol_type = other DNA
agaagcaactgaaaactgtcgaagcatcggcactaataaagcaagaccccccaaaagggaacgacctggccttta

SEQ ID NO: 134648 - DNA, 75 bp, synthetic construct
  source 1..75: mol_type = other DNA
cggtggatgggcagactatcaggcagagttcggtaaacttggtccttttcgcaaaaagagtcaactgcgtatcac

SEQ ID NO: 134649 - DNA, 75 bp, synthetic construct
  source 1..75: mol_type = other DNA
ttgctgaaattatcaaacagactaccccggacggtgcgggacgtgtggccgcccatgccgtggtaaatgccgcac

SEQ ID NO: 134650 - DNA, 75 bp, synthetic construct
  source 1..75: mol_type = other DNA
actttaacctgctgccggacaccattaaaaccctgccgccggtaaagctggatgagaaaacgcagtttatcggtg

SEQ ID NO: 134651 - DNA, 75 bp, synthetic construct
  source 1..75: mol_type = other DNA
gcgaaaacggcggtgatattggccatacgccggaatgtcactggcaggtacaggaccgggcgggaagcattgctg

SEQ ID NO: 134652 - DNA, 75 bp, synthetic construct
  source 1..75: mol_type = other DNA
acactgacatgtactctcgaattatcagaagcgctaacgcctgaagtctatgatgacgaaatttatatgcatgcg

SEQ ID NO: 134653 - DNA, 75 bp, synthetic construct
  source 1..75: mol_type = other DNA
cgccttagccatctgaaactgctggatttgtaccatcattacctgacagaagagatgcagaaaaaactgcaaaaa

SEQ ID NO: 134654 - DNA, 75 bp, synthetic construct
  source 1..75: mol_type = other DNA
ccggcgatcgggaggctagtgccgctgtccctcctgtgcctgaaagcaccgtgacacctgcacatcctttgcctg

SEQ ID NO: 134655 - DNA, 75 bp, synthetic construct
  source 1..75: mol_type = other DNA
aatatattgaaaattttcattttgtatttaatgcggtatgttcattaagaccgtcagggatagaaggagcatatt

SEQ ID NO: 134656 - DNA, 75 bp, synthetic construct
  source 1..75: mol_type = other DNA
ttccgttttatgcgaggcgttcaaatcaaacaatcaatcagatttagcgtctgccctatttgaaaattatattga

SEQ ID NO: 134657 - DNA, 75 bp, synthetic construct
  source 1..75: mol_type = other DNA
ccaccgaaatcatattggctgtgtaatgttattgccagccgacacttctgttagttggtttatgaacggcgtgga

SEQ ID NO: 134658 - DNA, 75 bp, synthetic construct
  source 1..75: mol_type = other DNA
tcgtcgcggatgtggcggcaaacaaggcaaacgcattaatcccgcgatatataaccgaagaaatggacacgctcc

SEQ ID NO: 134659 - DNA, 75 bp, synthetic construct
  source 1..75: mol_type = other DNA
gcctggtgagtatgtctggatgaatccgccatattctaatccggggccattcgttgataaagcggcgcttgaaca

SEQ ID NO: 134660 - DNA, 75 bp, synthetic construct
  source 1..75: mol_type = other DNA
catcagcacctgcaggactggctgtacgtaaaaacaacaaaaacaaaagacctcgtacaaaacaggaggggacca

SEQ ID NO: 134661 - DNA, 75 bp, synthetic construct
  source 1..75: mol_type = other DNA
agcgtgccagcggcagccactgccgctggcacaagggcagcagctcccgccatcagcatctacaggactggctat

SEQ ID NO: 134662 - DNA, 75 bp, synthetic construct
  source 1..75: mol_type = other DNA
atctgcaggcaggtaagctgcccgcctgtgttgaggcatgtccaacgaaagcgctgacttttggcaacctggacg

SEQ ID NO: 134663 - DNA, 75 bp, synthetic construct
  source 1..75: mol_type = other DNA
caattgaacgctttcattttatgtttaatgctatttgttcattgcgaccatcaggtattgaaagtgcgtatgcta

SEQ ID NO: 134664 - DNA, 75 bp, synthetic construct
  source 1..75: mol_type = other DNA
aagtggaaaaaaggcgacattgatgcttcagcgttcattgatgagctactttcagatgccgagatatatgtgaaa

SEQ ID NO: 134665 - DNA, 75 bp, synthetic construct
  source 1..75: mol_type = other DNA
ttgtccgcgacttaaagaaaattaactcacctttaaactatttcatagagaaatctacacttgatgctgaacttg

SEQ ID NO: 134666 - DNA, 75 bp, synthetic construct
  source 1..75: mol_type = other DNA
gttttgccaaataccgctggtgtccaaacattatcggtccgcaaagcggcggcgcagtgaaagatctgccggtgc

SEQ ID NO: 134667 - DNA, 75 bp, synthetic construct
  source 1..75: mol_type = other DNA
aggctacagagcaggcacaggctacagagcaggcacagaccacagagcaggcacagaccacagagcaagcacagg

SEQ ID NO: 134668 - DNA, 75 bp, synthetic construct
  source 1..75: mol_type = other DNA
tcgaaagggagaagactgaatccgatttgcttaatcacggattcactcgtgaaatggcagaagatgtacttggaa

SEQ ID NO: 134669 - DNA, 75 bp, synthetic construct
  source 1..75: mol_type = other DNA
accgctgtccgatccggcaagtaatggggggatcaatactccgtttatggatctgccgcccatttatgccagccc

SEQ ID NO: 134670 - DNA, 75 bp, synthetic construct
  source 1..75: mol_type = other DNA
gggaaaagatgcagaaaccaactataagctgggtacgcagcttccttatctcttcatcatcaatcggttagcgca

SEQ ID NO: 134671 - DNA, 75 bp, synthetic construct
  source 1..75: mol_type = other DNA
ttacgccaccgcgctcgacgtaatgtttgccgaaggtaaaagcccggtacatctggcggctcccgccgccgtcag

SEQ ID NO: 134672 - DNA, 75 bp, synthetic construct
  source 1..75: mol_type = other DNA
gagcgtcttaactcactgaatttatctgaaaaaacattacgaaatactatcaggtttgagcgtggcaagctgtat

SEQ ID NO: 134673 - DNA, 75 bp, synthetic construct
  source 1..75: mol_type = other DNA
aactcgaaaaccatatgccgcgtgcgtttactgaagcgcaagccgaagcaatggtgacgattgtcttcagtgcgg

SEQ ID NO: 134674 - DNA, 75 bp, synthetic construct
  source 1..75: mol_type = other DNA
gtggaagccgcatttagccaattaagtgctgaacgcagcttcgccagcctgagtttgcgtgaagtggcgcgagaa

SEQ ID NO: 134675 - DNA, 75 bp, synthetic construct
  source 1..75: mol_type = other DNA
cactggaaaaacaccttctgaagttttaacgggggaccaaacatcggctcgtgttccggtaattacaggtatcca

SEQ ID NO: 134676 - DNA, 75 bp, synthetic construct
  source 1..75: mol_type = other DNA
aaatagccaggagtccgaatccagaatagagaaaggtgatgcattgaaggaacaggccaccgaacaggcgcaggc

SEQ ID NO: 134677 - DNA, 75 bp, synthetic construct
  source 1..75: mol_type = other DNA
cgcggagcaagcacaggtcgcagagcaagcacaggtcgcagagcaagcacaggtcgcagagcaggcacaggtcgc

SEQ ID NO: 134678 - DNA, 75 bp, synthetic construct
  source 1..75: mol_type = other DNA
ggaaattaacttcagagctgttgtgggacagactgatatctcggctgcaactggaaaagccgcgactacgaatga

SEQ ID NO: 134679 - DNA, 75 bp, synthetic construct
  source 1..75: mol_type = other DNA
tccggtagtatccttatctcaagagataataagctggtggagaacttcatcgacactcttgaaaactggcgtgac

SEQ ID NO: 134680 - DNA, 75 bp, synthetic construct
  source 1..75: mol_type = other DNA
gtaaagatggtatcaagattgatgactcaattattaccaactttaaagcctctaaagatgttactatctctaacg

SEQ ID NO: 134681 - DNA, 75 bp, synthetic construct
  source 1..75: mol_type = other DNA
atgaccgcgcgcttctttcgcgtctgcacgatggtggtgctgttcagcctcaccctgacaggctgcgaaacagtg

SEQ ID NO: 134682 - DNA, 75 bp, synthetic construct
  source 1..75: mol_type = other DNA
atttctccgacgaccaggccactgaatggaagcaaatagagacggtggaaggaacgggccaccactaccgcctgc

SEQ ID NO: 134683 - DNA, 75 bp, synthetic construct
  source 1..75: mol_type = other DNA
ttctacggttgaacaatggcgagaccagaagcaaatcatcactattgtttgtagagatggaatagctatcactga

SEQ ID NO: 134684 - DNA, 75 bp, synthetic construct
  source 1..75: mol_type = other DNA
gtaaagacgggattaaaattgatgattccattattacaagttttaaagcctctaaagatgttggtatttcaaatg

SEQ ID NO: 134685 - DNA, 75 bp, synthetic construct
  source 1..75: mol_type = other DNA
gcgatcgtaatgacgacgtctctgcggcagaaatggcgcaacgccaccttgcggtcacccccttactgcgcggtc

SEQ ID NO: 134686 - DNA, 75 bp, synthetic construct
  source 1..75: mol_type = other DNA
tacagccattattacgaagaactggcctccgatcgccagcaggggtttgagatgctgtttaacgaggtctacgcc

SEQ ID NO: 134687 - DNA, 75 bp, synthetic construct
  source 1..75: mol_type = other DNA
gttactgactacctgcggacttagctacattggcacgccctgtgaggatgacggagaaacgctggggttacacgg

SEQ ID NO: 134688 - DNA, 75 bp, synthetic construct
  source 1..75: mol_type = other DNA
ataataagctggtggaaaacttcatcgacactctggaaaactggcgtgaccagaagcagattatttctgtcatct

SEQ ID NO: 134689 - DNA, 75 bp, synthetic construct
  source 1..75: mol_type = other DNA
atgtttgacacaaagcaaattagatactcaggtaaagatggtatctatttccacttaagagataatgtagatgcc

SEQ ID NO: 134690 - DNA, 75 bp, synthetic construct
  source 1..75: mol_type = other DNA
gggtttttctgagtttgaacggctgacagcacagggggttgatttcaggacggcgcaggaagcgggattagtgca

SEQ ID NO: 134691 - DNA, 75 bp, synthetic construct
  source 1..75: mol_type = other DNA
attcaggctctgcgaaaagccatgtctgatgttagccaggggagacctgtagacgttgccagcattgttgagtct

SEQ ID NO: 134692 - DNA, 75 bp, synthetic construct
  source 1..75: mol_type = other DNA
gcgcagccgcagttacctctcttcagggattctctgaatttgagcgcctgtccgctcagggtgttgatttcagga

SEQ ID NO: 134693 - DNA, 75 bp, synthetic construct
  source 1..75: mol_type = other DNA
tccacgtcagcaggaagctctggcgctttccgatgagctgattgccgagctgaaagcccacgacgttatcgttat

SEQ ID NO: 134694 - DNA, 75 bp, synthetic construct
  source 1..75: mol_type = other DNA
tggtcaccggtaaaaaagccatcgttatcaccagccgcggtgggatccataaagatggcccaacggatctggtga

SEQ ID NO: 134695 - DNA, 75 bp, synthetic construct
  source 1..75: mol_type = other DNA
gggatcgcgtacggcccggaaatggcagcgaaagcgcagtctgacgcgaaagcagccatcgacagtattgttgct

SEQ ID NO: 134696 - DNA, 75 bp, synthetic construct
  source 1..75: mol_type = other DNA
gcaagcagagagaacgaacaggcaatacaggattccagcctctttgatgtggctgtctcgtgtttcttgagaggg

SEQ ID NO: 134697 - DNA, 75 bp, synthetic construct
  source 1..75: mol_type = other DNA
atgatgaaggaaacccgcagtcgcgaagcgctcgggaagtgctggacgaagcaagcagagagaacgaacaggcaa

SEQ ID NO: 134698 - DNA, 75 bp, synthetic construct
  source 1..75: mol_type = other DNA
atggagacgtttcactggaaagtacgtccggatatgaatgtcgtatcagagccaaaggtagtgacagtgaagctt

SEQ ID NO: 134699 - DNA, 75 bp, synthetic construct
  source 1..75: mol_type = other DNA
cagaagacctatttacagtcaaaggcagcgataagaacctccagccactgattgaagaggttgggcgatcctaca

SEQ ID NO: 134700 - DNA, 75 bp, synthetic construct
  source 1..75: mol_type = other DNA
gagagtattgtcctgcctgctaatgacgatgagtgggggcgtggcgctggctacacttgcctggggaggacacgc

SEQ ID NO: 134701 - DNA, 75 bp, synthetic construct
  source 1..75: mol_type = other DNA
cccgcgtcagcaggaagctctggctctttccgatgagctgattgccgagctgaaagcccatgacgttatcgtaat

SEQ ID NO: 134702 - DNA, 75 bp, synthetic construct
  source 1..75: mol_type = other DNA
agacaggctgacagaggttcaattcccatcaaccaagatgaaaagaactcaagacgcacagtaaatctcttcgct

SEQ ID NO: 134703 - DNA, 75 bp, synthetic construct
  source 1..75: mol_type = other DNA
ttgacctgcccctgccatctgccgattctcgccgccgtgctggccgggacgaccgccggtgccttccttggcgag

SEQ ID NO: 134704 - DNA, 75 bp, synthetic construct
  source 1..75: mol_type = other DNA
cctggctgcaaatccgattccggtactggatggcgaactggttggcgctctgcgtccgagcgatgcgccgctgac

SEQ ID NO: 134705 - DNA, 75 bp, synthetic construct
  source 1..75: mol_type = other DNA
gggatataagaagagctttgtttccgatgggcagacctggaaagaaagtgacgtggtgaatacccgcgaagcgcg

SEQ ID NO: 134706 - DNA, 75 bp, synthetic construct
  source 1..75: mol_type = other DNA
taatttgttatataacaggattggtgaatttgttggtagtgttagcccaggggaaatgaaaaaagtaaaagcttg

SEQ ID NO: 134707 - DNA, 75 bp, synthetic construct
  source 1..75: mol_type = other DNA
caggggagaacagccatccttatgtggttgctcaattggctgcgcataatagccgtggtaattacgcgaatggaa

SEQ ID NO: 134708 - DNA, 75 bp, synthetic construct
  source 1..75: mol_type = other DNA
tcccggcaaaaggccgccgggatgtaagggacaacgccgtttcgcaaaccgcgcttcacgtcgttgcggcgggtg

SEQ ID NO: 134709 - DNA, 75 bp, synthetic construct
  source 1..75: mol_type = other DNA
gggtgaaatgtacatcccgcaaaactttttgcccaaaagcaggcaaaaacttttgcggtctgcccccggacagtc

SEQ ID NO: 134710 - DNA, 75 bp, synthetic construct
  source 1..75: mol_type = other DNA
gccacgtcaacaggaagcgctggcgctgtctgatgaactgattgctgaactgaaagcccacgatgtgattgttat

SEQ ID NO: 134711 - DNA, 75 bp, synthetic construct
  source 1..75: mol_type = other DNA
tcattcttcgctttgtgggcaaaagatcctgtctggcttttctggtcactctacagctttattccgctgtatttt

SEQ ID NO: 134712 - DNA, 75 bp, synthetic construct
  source 1..75: mol_type = other DNA
gctttggttgggcttttccacgcacgttctcccagaaaaatatgctgatttaaataaccagattgtgtctgtttt

SEQ ID NO: 134713 - DNA, 75 bp, synthetic construct
  source 1..75: mol_type = other DNA
cgttggtcggggactatacgctctataccgtacagcgtccggtgactattactctgctgggtgcggtttctgggg

SEQ ID NO: 134714 - DNA, 75 bp, synthetic construct
  source 1..75: mol_type = other DNA
ggtggttggtacactatttcatcgcgactggagtcggattcgccttttacgtaggtcagttagtcgtaaaactgc

SEQ ID NO: 134715 - DNA, 75 bp, synthetic construct
  source 1..75: mol_type = other DNA
ggtggttggccacctatttcttagcggccggagtcgcattcgccttttacgtaggtcagttagtcgtaaaactgt

SEQ ID NO: 134716 - DNA, 75 bp, synthetic construct
  source 1..75: mol_type = other DNA
tctccggaacgacacggagcgatgactggtattatgaaggcacaaattgactggataccattatctgaaggtgct

SEQ ID NO: 134717 - DNA, 75 bp, synthetic construct
  source 1..75: mol_type = other DNA
atgaatacaaaaaagagtttatttatttacgtgattttcttgatgatgtatttaaagttgttgatgctaatattt

SEQ ID NO: 134718 - DNA, 75 bp, synthetic construct
  source 1..75: mol_type = other DNA
aaccagattattacctatgatgcttaccatatggcggaagtgtacctgactcagcgacgcagattgtggcgggca

SEQ ID NO: 134719 - DNA, 75 bp, synthetic construct
  source 1..75: mol_type = other DNA
ttgatgcctgccatacgttgaagcgggttcaaacgccagaaccagcgatattagcagcggagaatacgccattat

SEQ ID NO: 134720 - DNA, 75 bp, synthetic construct
  source 1..75: mol_type = other DNA
aacgcaatgtagaggggcttgaaggggccagagaaattattctggccgagctgacgaagcgggtgcaccagattt

SEQ ID NO: 134721 - DNA, 75 bp, synthetic construct
  source 1..75: mol_type = other DNA
aaaggaattttgatggtctgcccggtgcaaaagatatcattctgggcgagttaactaagagggttcaccggatct

SEQ ID NO: 134722 - DNA, 75 bp, synthetic construct
  source 1..75: mol_type = other DNA
tggaagcgtctgcaaaacttataaccactgccagatacgggaaagagcgactcgtcaaactgtctgcaatggaca

SEQ ID NO: 134723 - DNA, 75 bp, synthetic construct
  source 1..75: mol_type = other DNA
ctgatttatttgatgctgcaataactgagcaaaaaatggggataccgacaatatctcacccccctcgtatactaa

SEQ ID NO: 134724 - DNA, 75 bp, synthetic construct
  source 1..75: mol_type = other DNA
cttggacgctggatgaggatgttcactatccctaatcagtcatcagtagccaaagcctggcaggaattcgatgag

SEQ ID NO: 134725 - DNA, 75 bp, synthetic construct
  source 1..75: mol_type = other DNA
gtgaaatttactctgctgacaagaggtagttcagcttatctcgtcgatcgctacagcgaacgtaaagagtctgca

SEQ ID NO: 134726 - DNA, 75 bp, synthetic construct
  source 1..75: mol_type = other DNA
tcttcccttcagatgttggtcagaagccggttgatatcgttaacgcggcgctgaaagaagccaaactgaaattct

SEQ ID NO: 134727 - DNA, 75 bp, synthetic construct
  source 1..75: mol_type = other DNA
aaggtgccggtaaaacaaccagcgttggtaaactcggtaagttcctgcgcgagaagcacaagaagaaagtactgg

SEQ ID NO: 134728 - DNA, 75 bp, synthetic construct
  source 1..75: mol_type = other DNA
ccagatgaaaaatatgggcggcatggccagcttgatgggcaaactgccgggcatggggcagatcccggataacgt

SEQ ID NO: 134729 - DNA, 75 bp, synthetic construct
  source 1..75: mol_type = other DNA
cgtccgcgcatttcagtggacgccaccttatgactggaagccgatcagggtggtttgtcgtaaatggtcggcaag

SEQ ID NO: 134730 - DNA, 75 bp, synthetic construct
  source 1..75: mol_type = other DNA
ttaataccaacgaacagcgatataaagcatattccgttgataataaaagaattatcgaacttaaagaaaataatc

SEQ ID NO: 134731 - DNA, 75 bp, synthetic construct
  source 1..75: mol_type = other DNA
gcgcattctcggcatgggcgacgtactgtcactgatcgaagatattgaaagcaaagttgaccgcgcgcaggcaga

SEQ ID NO: 134732 - DNA, 75 bp, synthetic construct
  source 1..75: mol_type = other DNA
aatttagagagcttgtaaacggaataactgacaaagcaaggacgtactcaaatgcacaacaattaagggcggtaa

SEQ ID NO: 134733 - DNA, 75 bp, synthetic construct
  source 1..75: mol_type = other DNA
aaccagggcgcgattactactgagcttgaaaaacgaggttttacctcccgacaggccgcatctattgagcttgtc

SEQ ID NO: 134734 - DNA, 75 bp, synthetic construct
  source 1..75: mol_type = other DNA
tgaatctggaatgtgctgactcttctgaaaataacgaggcgcaaggaagcaatattgaacataaagagttgcgta

SEQ ID NO: 134735 - DNA, 75 bp, synthetic construct
  source 1..75: mol_type = other DNA
atggaagcgatcatcaactcgatgacgctgaaagagcgtgctaagccagaaattatcaaaggttcgcgtaaacgc

SEQ ID NO: 134736 - DNA, 75 bp, synthetic construct
  source 1..75: mol_type = other DNA
agatcccggataatgttaagtcgcagatggacgataaagtgctggggcgtatggaagccatcatcaactcgatga

SEQ ID NO: 134737 - DNA, 75 bp, synthetic construct
  source 1..75: mol_type = other DNA
gccgttcggctgattggtcagttagtaatactgggttaaccggatacattgaaggctataacgactgtttacagg

SEQ ID NO: 134738 - DNA, 75 bp, synthetic construct
  source 1..75: mol_type = other DNA
agtcgttatctgaaagagggcggcaccttcaaactggcagcctcggcagagtttatcgaacgcgccgatgcctta

SEQ ID NO: 134739 - DNA, 75 bp, synthetic construct
  source 1..75: mol_type = other DNA
tccatcagtctgattcaactgaaattgcaggccggacgtaaactgacgcaggcagaaacaacccgccttaacgct

SEQ ID NO: 134740 - DNA, 75 bp, synthetic construct
  source 1..75: mol_type = other DNA
aaggatgccggggtgaacacatatcgctggcagggcggagaacagcgaccggcaaccatcatcagtgaaccggac

SEQ ID NO: 134741 - DNA, 75 bp, synthetic construct
  source 1..75: mol_type = other DNA
ccgctttccgccatttcatcatcactgattggcgtggcgttttttgccagcactcccgctttgcgtttttccttt

SEQ ID NO: 134742 - DNA, 75 bp, synthetic construct
  source 1..75: mol_type = other DNA
gttatgcaatctgccgatctgtagattttaactcatgggaatatgtgccagaccatcgcggtgaaatcgtcttta

SEQ ID NO: 134743 - DNA, 75 bp, synthetic construct
  source 1..75: mol_type = other DNA
tatgcccgcctgttccactggtattgaccctggcgaaaacattccgggaaaagtagcagtatttacgggtaaggg

SEQ ID NO: 134744 - DNA, 75 bp, synthetic construct
  source 1..75: mol_type = other DNA
gaaaatacaaccactatcgtcccgttaacgccatacgataaatgggatggtgagaaatgggtgacggataccgag

SEQ ID NO: 134745 - DNA, 75 bp, synthetic construct
  source 1..75: mol_type = other DNA
gctgatttcgccccgggaggcggtggctgaaggtgtcacactgtacacaccagacaaaatccgggtggggaccgg

SEQ ID NO: 134746 - DNA, 75 bp, synthetic construct
  source 1..75: mol_type = other DNA
gtgaaacggaacgccgcgcagatgaaattgtccgtaaaatggcagagaacaaacctgacctgccggatggcaaaa

SEQ ID NO: 134747 - DNA, 75 bp, synthetic construct
  source 1..75: mol_type = other DNA
gctgaagaggccatccgccgtgaaacggaacgccgcgcagatgaaattgtccgtaaaatggcagagaacaaacct

SEQ ID NO: 134748 - DNA, 75 bp, synthetic construct
  source 1..75: mol_type = other DNA
gctgcagggcagtgttgataaggatgtctttacccgtcttctggaggggaaactgccggacggagcggatttaag

SEQ ID NO: 134749 - DNA, 75 bp, synthetic construct
  source 1..75: mol_type = other DNA
cagggctggacggatgccattaacaatgccgtacagaaaggaactgcccacgatgtgctggagccgaaaccggac

SEQ ID NO: 134750 - DNA, 75 bp, synthetic construct
  source 1..75: mol_type = other DNA
tcagtaaggatgacgggctgataaccctgcaggatgcggaaggtaacacgcggctgatttcgccccgggaggcgg

SEQ ID NO: 134751 - DNA, 75 bp, synthetic construct
  source 1..75: mol_type = other DNA
gctgaacccagctcaacctcatttattaaccgcaccagacatctggctgcttaccgatctgactgaggattcaac

SEQ ID NO: 134752 - DNA, 75 bp, synthetic construct
  source 1..75: mol_type = other DNA
cagtgcaggccgtcgtgaagctatcagcagcattaactctgtaacacgactgatggcgttggccgctgtttcatt

SEQ ID NO: 134753 - DNA, 75 bp, synthetic construct
  source 1..75: mol_type = other DNA
gccgcattatgtcatgagtgcaaccgcagagatcgggcgtgttgctgcaggtgcggtatccggcgatgtaaaaac

SEQ ID NO: 134754 - DNA, 75 bp, synthetic construct
  source 1..75: mol_type = other DNA
gtggcggctcaccttgggctggcagtgacaattgttggcattgcctttagccagaactatagcgttgagcgtgat

SEQ ID NO: 134755 - DNA, 75 bp, synthetic construct
  source 1..75: mol_type = other DNA
atgagcgaacaacaggagatgatgacacccgtcccggcagataaacccacaacgcgccggcgttcacttctgcga

SEQ ID NO: 134756 - DNA, 75 bp, synthetic construct
  source 1..75: mol_type = other DNA
aaaaggacgtatccggaacgaaaggagcctctccggtggtacagaaaactgcccgccctgcaacggcacgttcag

SEQ ID NO: 134757 - DNA, 75 bp, synthetic construct
  source 1..75: mol_type = other DNA
gcgaagctggcagaacgtgcaggaatgaatgttcagacactgcgaaacaaactcaacccagatcaaccgcatcag

SEQ ID NO: 134758 - DNA, 75 bp, synthetic construct
  source 1..75: mol_type = other DNA
gcaggcccgtttacaggttaatcctgcgatggcaagtgcagttgatactgtaaccggcctcggtgcttcattcgg

SEQ ID NO: 134759 - DNA, 75 bp, synthetic construct
  source 1..75: mol_type = other DNA
ttgttgacccatggttggagcgaattaccaaccggaagtctattttctccatgagcaaggaggatctggagacta

SEQ ID NO: 134760 - DNA, 75 bp, synthetic construct
  source 1..75: mol_type = other DNA
tgcattcgcgttgcgccacaacctggtgcaactggcagaacgtgctggcatgaatgtgcagattctgcgaaacaa

SEQ ID NO: 134761 - DNA, 75 bp, synthetic construct
  source 1..75: mol_type = other DNA
gcaggcacgtctacaggcgaatccagcaatggcaagtgcggtggataccgtgactggccttggtgcttcattcgg

SEQ ID NO: 134762 - DNA, 75 bp, synthetic construct
  source 1..75: mol_type = other DNA
gcgaagctggcagccagcgccggaatgaacgtccagactctgcgcaacaagctgaacccggaccagcctcatcag

SEQ ID NO: 134763 - DNA, 75 bp, synthetic construct
  source 1..75: mol_type = other DNA
gatgctcctgattcatataaagctggttatgcaatctgccgttctgcagattttaactcatgggtatatgtgcca

SEQ ID NO: 134764 - DNA, 75 bp, synthetic construct
  source 1..75: mol_type = other DNA
acaccgaaacgggagatgccaaagaaatcacagcaccgggcgactatcccgaaaatacaaccactatcgccccgt

SEQ ID NO: 134765 - DNA, 75 bp, synthetic construct
  source 1..75: mol_type = other DNA
tgagaaatgggtgaccgatattgaggcacagcatagcgccgcagtagacgcggcagaagcgcatcgccaatcgcg

SEQ ID NO: 134766 - DNA, 75 bp, synthetic construct
  source 1..75: mol_type = other DNA
agtctgattcaactgaaattacaggccgggcggaagctgatgcagacagaaaacacccgacttaacgctgtgctg

SEQ ID NO: 134767 - DNA, 75 bp, synthetic construct
  source 1..75: mol_type = other DNA
tattacggtttataactatgatggtgaaacgcgggaatatatttccacatcaactgaatatcttgctgtgggtgt

SEQ ID NO: 134768 - DNA, 75 bp, synthetic construct
  source 1..75: mol_type = other DNA
caactgaatatcttgcagtgggtgtcggtattccagcatattcctgtttagacgctcctggtacatctaaggctg

SEQ ID NO: 134769 - DNA, 75 bp, synthetic construct
  source 1..75: mol_type = other DNA
ccgggcggaagctgacgcaggcagaaaccacccgacttaacgccgtgctggattacattgacgcggtgacggcaa

SEQ ID NO: 134770 - DNA, 75 bp, synthetic construct
  source 1..75: mol_type = other DNA
gattacattgacgcggtgacggcaacagataccggcaccgcgccggatgtcatctggcctgaactgccggaggcg

SEQ ID NO: 134771 - DNA, 75 bp, synthetic construct
  source 1..75: mol_type = other DNA
atagcaccgaaacaggagaatcaaaagaaatcacagttccgggtgattaccctgaaaatacaaccactatcgccc

SEQ ID NO: 134772 - DNA, 75 bp, synthetic construct
  source 1..75: mol_type = other DNA
gttatgctatctgccgttcgatggatttaaactcatgggaatatgtgccagaccatcgcggtgaaattgtctata

SEQ ID NO: 134773 - DNA, 75 bp, synthetic construct
  source 1..75: mol_type = other DNA
attaccgtttataactatgacagtgagacacgggagtatatttctgcatcaattgaatatcttgctgtgggtgtc

SEQ ID NO: 134774 - DNA, 75 bp, synthetic construct
  source 1..75: mol_type = other DNA
cggtattccggcatgttcctgtcttgatgcacctggcatacataaggttggttatgcaatctgtcgttctgtgaa

SEQ ID NO: 134775 - DNA, 75 bp, synthetic construct
  source 1..75: mol_type = other DNA
ccggattgcccgtgataatcctgacagtggtgtggtggtaagaatcgccggtgaaggtcgcccgtggaatcccgg

SEQ ID NO: 134776 - DNA, 75 bp, synthetic construct
  source 1..75: mol_type = other DNA
ctccgtcaggcggggcttgccgggggagacagtcctgcgcgctttattgctccggggcgcaaatatccgcagccg

SEQ ID NO: 134777 - DNA, 75 bp, synthetic construct
  source 1..75: mol_type = other DNA
aaggcagcggggatgcgcagttcgtggccctgcagggcagccgtaacggagaaagcctgctggctgataatatgc

SEQ ID NO: 134778 - DNA, 75 bp, synthetic construct
  source 1..75: mol_type = other DNA
acagcagctggtcgctgttccggccggaaaaaatgccggtggcagacggcgagcgtctgagggtgacagggaaaa

SEQ ID NO: 134779 - DNA, 75 bp, synthetic construct
  source 1..75: mol_type = other DNA
actgtatgaagccattgtccgcgactataccggcaggacaccggaagcacgggagcagacgctgattgtcacgca

SEQ ID NO: 134780 - DNA, 75 bp, synthetic construct
  source 1..75: mol_type = other DNA
gatcgtgagaaggggctgttcacgtccgggattcatgtgctcaatgagctgtcagtccgggcactcagtcgtgac

SEQ ID NO: 134781 - DNA, 75 bp, synthetic construct
  source 1..75: mol_type = other DNA
gttatgcaatctgccgttctgcagattttaactcatgggaatatgtaccagaccatcgcggtgaaattgtctata

SEQ ID NO: 134782 - DNA, 75 bp, synthetic construct
  source 1..75: mol_type = other DNA
aactcatcaccacaaaggcgggagatattaccgtttataattatgatggtgaaacacgggaatatatttccacat

SEQ ID NO: 134783 - DNA, 75 bp, synthetic construct
  source 1..75: mol_type = other DNA
gatgccccaggcgcatacaaagctggttatgcaatctgccgttctgcagattttaactcatgggaatatgtgcca

SEQ ID NO: 134784 - DNA, 75 bp, synthetic construct
  source 1..75: mol_type = other DNA
gctggcaggggggagagcagcgaccggcaaccatcatcagtgagccggaccgtaatgtccgctatgcccggctgg

SEQ ID NO: 134785 - DNA, 75 bp, synthetic construct
  source 1..75: mol_type = other DNA
gctggcaggggggagaacagcggccggccaccatcatcagtgaaccggaccgtaatgtccgctatgcccggctgg

SEQ ID NO: 134786 - DNA, 75 bp, synthetic construct
  source 1..75: mol_type = other DNA
cgcagatgaaattgtcagaaaaatggcagagaacaaacctgacctgccggacggcaaaacagagctggctgtcag

SEQ ID NO: 134787 - DNA, 75 bp, synthetic construct
  source 1..75: mol_type = other DNA
tctgcccgacccgtccggtcagtatgccaacatgttcaatcacatcatggatcgggcgctgctgacgcacctcaa

SEQ ID NO: 134788 - DNA, 75 bp, synthetic construct
  source 1..75: mol_type = other DNA
tccggacacgctaagcatcatccattgtcacgaggtgggtgccgatcagttgctcaatatggtttatgactcaag

SEQ ID NO: 134789 - DNA, 75 bp, synthetic construct
  source 1..75: mol_type = other DNA
gaaaacaagagctgggattactggggaagtgcctcggcaggcattaccggagcgctggctcctgggcgtaatgta

SEQ ID NO: 134790 - DNA, 75 bp, synthetic construct
  source 1..75: mol_type = other DNA
ctttggggaccgtgaaaccagctactggtcggtaccacaaggatcatgccatgaatggattcaatcactgaccac

SEQ ID NO: 134791 - DNA, 75 bp, synthetic construct
  source 1..75: mol_type = other DNA
atgagtaagctgattgtcccgcagtggcccctgccaaaaggtgttgcggcctgtagctctactcgtatcggcggc

SEQ ID NO: 134792 - DNA, 75 bp, synthetic construct
  source 1..75: mol_type = other DNA
taacccggatcacgttgaggagaatcgcaagcgactttttgctgcgggcaatttgccttctaaaccggtctggct

SEQ ID NO: 134793 - DNA, 75 bp, synthetic construct
  source 1..75: mol_type = other DNA
tatcgtatggtgataatatttcaggagtggcgaataaaaccgaagatttcactgttgtggcacaataccagttcg

SEQ ID NO: 134794 - DNA, 75 bp, synthetic construct
  source 1..75: mol_type = other DNA
ctttcatccagtactgatattagtaaaaaacatgatgacggatatattgaaaaattcgttgaagtaggggcttct

SEQ ID NO: 134795 - DNA, 75 bp, synthetic construct
  source 1..75: mol_type = other DNA
gtatttgtcgcctattatgtgttgggtatacgtcaacatatgagcatggggacgatgctcacacatacggaaaat

SEQ ID NO: 134796 - DNA, 75 bp, synthetic construct
  source 1..75: mol_type = other DNA
ccaccggacagcatacgcaactgaacggtgcggtgattgcgtccacggcaacggcagataaaaacaggctggata

SEQ ID NO: 134797 - DNA, 75 bp, synthetic construct
  source 1..75: mol_type = other DNA
cacatgcaaatcagacgctctcccccatctttgacagggaaaaagagcagcagcgactgcagcaggcgcaactca

SEQ ID NO: 134798 - DNA, 75 bp, synthetic construct
  source 1..75: mol_type = other DNA
atgcgttatgtcactgaatttaccgcagcgatgccagaagctgccgaagctcattttctcgcgcgtttgagtgtc

SEQ ID NO: 134799 - DNA, 75 bp, synthetic construct
  source 1..75: mol_type = other DNA
tcagtgagcagacgaaacaatggctggcagcttcgcccgacggcaaagttgcaccggttgcgcaaatcggtgagg

SEQ ID NO: 134800 - DNA, 75 bp, synthetic construct
  source 1..75: mol_type = other DNA
aaactggcgcagtgctggcagtcacataacgccccggaactggcacaggctaccgatgatctttttgccctgtac

SEQ ID NO: 134801 - DNA, 75 bp, synthetic construct
  source 1..75: mol_type = other DNA
gtcatacaggagagtaatgacgatattcaggctgcgcgggcgtgttttgatgaacatgggctagaggccgcctta

SEQ ID NO: 134802 - DNA, 75 bp, synthetic construct
  source 1..75: mol_type = other DNA
gtggcggccattttatgtgaacgccagccggattcaccgcagggctaccgtctgcgccgccatgcgctttggcag

SEQ ID NO: 134803 - DNA, 75 bp, synthetic construct
  source 1..75: mol_type = other DNA
gctgttcaggttggctggagaaatgatggttattgactgggagccgtctttacttacgcagctcgaacaaaaatt

SEQ ID NO: 134804 - DNA, 75 bp, synthetic construct
  source 1..75: mol_type = other DNA
ctttgccagccaggtcattaaacgctttgaaacaggtattgaaggcttttcacagaacgccgccacagcgcagcg

SEQ ID NO: 134805 - DNA, 75 bp, synthetic construct
  source 1..75: mol_type = other DNA
cgctaaatggtgtcttgataaattaccaagtgattgtcagattgtcggtgaagatggcaattattatctggttag

SEQ ID NO: 134806 - DNA, 75 bp, synthetic construct
  source 1..75: mol_type = other DNA
attgaaagaacaacccaacaaaccaaaacgaatcaaatcatccacctctaagcaaaataacagaatcagaagaat

SEQ ID NO: 134807 - DNA, 75 bp, synthetic construct
  source 1..75: mol_type = other DNA
ggcattgttgctgagtcactgagtcctcactggattattgaaaatctccgcactattgctgatggcaacgataaa

SEQ ID NO: 134808 - DNA, 75 bp, synthetic construct
  source 1..75: mol_type = other DNA
aagtccgggcgctttttgcccgaggagatttgcatacggacttgccttccattcgttgcgtgggttatcgccaga

SEQ ID NO: 134809 - DNA, 75 bp, synthetic construct
  source 1..75: mol_type = other DNA
tcgatcaacgtgccgttagtggtttcacaaacgcctgccgccgatggtgccaccgtcactatgaccgtacagaac

SEQ ID NO: 134810 - DNA, 75 bp, synthetic construct
  source 1..75: mol_type = other DNA
gatggttcgtctgctcaacaaaaaaattaacccggtatggctgattttcgccctgtttggcttagggattatcgg

SEQ ID NO: 134811 - DNA, 75 bp, synthetic construct
  source 1..75: mol_type = other DNA
aaaccgcagcagctgtacagaccgatgaagaattacaggcggccagggcgtgcttcgatgagaacgggctggaaa

SEQ ID NO: 134812 - DNA, 75 bp, synthetic construct
  source 1..75: mol_type = other DNA
agcagatctgtaccggatatgtcaccgcacaccgctgccgctcagcctcctgttgcagccactccaatcccgcag

SEQ ID NO: 134813 - DNA, 75 bp, synthetic construct
  source 1..75: mol_type = other DNA
agaccgtcccggttgtacagaccgatgaagaattacaggcggccaaggcgtgcttcgatgaaaacgggctggaag

SEQ ID NO: 134814 - DNA, 75 bp, synthetic construct
  source 1..75: mol_type = other DNA
cgatttctggcgggttcctgctgctggcgattaccggtccgggcgcgtatagcatcgaccgcctgctgaataaaa

SEQ ID NO: 134815 - DNA, 75 bp, synthetic construct
  source 1..75: mol_type = other DNA
acgaaacagtgcgtcgctatgggcatgagagcggcgagatttggcaccggatgcagaaaaatctgccgggtgatt

SEQ ID NO: 134816 - DNA, 75 bp, synthetic construct
  source 1..75: mol_type = other DNA
ttaatgtgtttattcctgagtatgtttttggaggtaatgttattaagcaacatcatatttacttacctgttaatg

SEQ ID NO: 134817 - DNA, 75 bp, synthetic construct
  source 1..75: mol_type = other DNA
agcagcattaactctgtaacacgactgatggcgttggctgctgtttcattgcaggcccgcttacaggctaaccct

SEQ ID NO: 134818 - DNA, 75 bp, synthetic construct
  source 1..75: mol_type = other DNA
atgcgacgaaagacgctaaatcgctggcagggcatatcaaggaagcgacggccagccttctgtcctggggtggta

SEQ ID NO: 134819 - DNA, 75 bp, synthetic construct
  source 1..75: mol_type = other DNA
agaaatcccccccgtcggaataaattcatctgccatcgaaaaacatatccccgaagcaccagcccggaagaagaa

SEQ ID NO: 134820 - DNA, 75 bp, synthetic construct
  source 1..75: mol_type = other DNA
aaattggcataagcaatgatatttcggcatttctggcagaaagcccggatacagaactgtccatggacgaatggt

SEQ ID NO: 134821 - DNA, 75 bp, synthetic construct
  source 1..75: mol_type = other DNA
tctgtgcagtgtcctgcatcacctcccgccgcgtatatctgcagcggacctctgtcgccggcgtccctcgttatg

SEQ ID NO: 134822 - DNA, 75 bp, synthetic construct
  source 1..75: mol_type = other DNA
gcagagattgggcgtgttgctgctggtgcggtatctggtgatgtgaaaaccagcgcaggtcgtcgtgatgctatc

SEQ ID NO: 134823 - DNA, 75 bp, synthetic construct
  source 1..75: mol_type = other DNA
agaaagcacaggacatcagcaaacgcctgtatccgatattgaaggaactgaactcatcatacgcgagcaagctgt

SEQ ID NO: 134824 - DNA, 75 bp, synthetic construct
  source 1..75: mol_type = other DNA
cattatcagccgactgatggccggagaatctctgtcactaaaaacactgtcagatgaatttggcgttacagaacg

SEQ ID NO: 134825 - DNA, 75 bp, synthetic construct
  source 1..75: mol_type = other DNA
gtgtttgtcgcctattatgtgttgggtatacgtcagcatatgagcatggggacgatgctcacacatacggaaaat

SEQ ID NO: 134826 - DNA, 75 bp, synthetic construct
  source 1..75: mol_type = other DNA
tgaaacatttaaatactatacgacagcgacatttatcgcttcggtcatcgctctggcgggcacattcctgctgtc

SEQ ID NO: 134827 - DNA, 75 bp, synthetic construct
  source 1..75: mol_type = other DNA
tgctggccagcttcttcgtgggaacgatgatgggtatggggccactggatatggtaaatgctattgaaagtggaa

SEQ ID NO: 134828 - DNA, 75 bp, synthetic construct
  source 1..75: mol_type = other DNA
ccctatcactgccatgtttatcgccgtgtttgtcgcctattatgtgttgggtatacgtcagcatatgagcatggg

SEQ ID NO: 134829 - DNA, 75 bp, synthetic construct
  source 1..75: mol_type = other DNA
tacaatggccagagtttacaatatcgcttggttcttttttgattattgcttctgtctttgtgaatgggagatgtt

SEQ ID NO: 134830 - DNA, 75 bp, synthetic construct
  source 1..75: mol_type = other DNA
ttgctgtcggtgcgtaccaatatttcaactatttttattcgcaccgcgtttcgtcagcatcccgataaagcgcag

SEQ ID NO: 134831 - DNA, 75 bp, synthetic construct
  source 1..75: mol_type = other DNA
tactggtagcacgcattttaatgccgattctgttcattaccgcaggctggggcaaaatcaccggttacgcaggta

SEQ ID NO: 134832 - DNA, 75 bp, synthetic construct
  source 1..75: mol_type = other DNA
ttgagcgggttggttttgtcactgagttgccaaaaaaataataacgaaatacgctatatacaagcatcagcattg

SEQ ID NO: 134833 - DNA, 75 bp, synthetic construct
  source 1..75: mol_type = other DNA
acagaaatggccggtacagtctcagacgacagagcagcccaggtgcgatccctgaaatgctttcttttatacaga

SEQ ID NO: 134834 - DNA, 75 bp, synthetic construct
  source 1..75: mol_type = other DNA
atccacagtctggtcgctgaagagcgttttatctccgccctgccacatttctctttcatccataaacttatcaac

SEQ ID NO: 134835 - DNA, 75 bp, synthetic construct
  source 1..75: mol_type = other DNA
ctcaaccgtgtgttgcgcgagcagtcctgctcccgaatacggcggatcctgcttcgtctgccgggggaacatggc

SEQ ID NO: 134836 - DNA, 75 bp, synthetic construct
  source 1..75: mol_type = other DNA
cgttacctcgccggtaatccctggtatcccgtagcaggccagctcagaaagcacagttcagcagattcccccgca

SEQ ID NO: 134837 - DNA, 75 bp, synthetic construct
  source 1..75: mol_type = other DNA
tatgaatccagtaaacgagatgtgcggattgaaggcgcgggtatcttaggtggtatgaactatcgggtcagcgaa

SEQ ID NO: 134838 - DNA, 75 bp, synthetic construct
  source 1..75: mol_type = other DNA
ttgatatgggcgttcagtgatttcgcccgcgatcgtcgtggtgtgcgcgatccggaagcccgttacctcgccggt

SEQ ID NO: 134839 - DNA, 75 bp, synthetic construct
  source 1..75: mol_type = other DNA
atgaatgctatcccttatttcgactatagcatggcgcccttctggccatcttatcagaacaaagtcatcggcgtc

SEQ ID NO: 134840 - DNA, 75 bp, synthetic construct
  source 1..75: mol_type = other DNA
caggaatatttcgacggccctgagctggaccggttgattctggatgcctggagcaacgtactgggcttcgcgtca

SEQ ID NO: 134841 - DNA, 75 bp, synthetic construct
  source 1..75: mol_type = other DNA
gcggacggaacgtgatggagacacagcactaccgggatttactgcgggctgacaatgaacgtggtgctgcagaag

SEQ ID NO: 134842 - DNA, 75 bp, synthetic construct
  source 1..75: mol_type = other DNA
atggctaagcaagactattacgagattttaggcgtttccaaatcagcggaagagcgtgaaatcaaaaaggcctac

SEQ ID NO: 134843 - DNA, 75 bp, synthetic construct
  source 1..75: mol_type = other DNA
tgagcgttgggaacgagccgacaaggaaaacccggagacgaagtatgaactgaatctctacatcgagggcaaccg

SEQ ID NO: 134844 - DNA, 75 bp, synthetic construct
  source 1..75: mol_type = other DNA
gatgtctgccgggaggccggtatctctgaagccacctactacaactggaagtccagatacggcggcatggaagct

SEQ ID NO: 134845 - DNA, 75 bp, synthetic construct
  source 1..75: mol_type = other DNA
tagatgatagtaataatggccgtatagccgacttggtagcacttcaggatgtggtagctagaaatgcccaactcg

SEQ ID NO: 134846 - DNA, 75 bp, synthetic construct
  source 1..75: mol_type = other DNA
atccgggcggcggtcctccgtaaacagaatgaaatgcagcaacgctacggcatacaacaggaaagttatccatga

SEQ ID NO: 134847 - DNA, 75 bp, synthetic construct
  source 1..75: mol_type = other DNA
ttccgccgttactggcgtttaacgcccatgacgggctggtacagcgtctggacacgctgctgttgcagctacggg

SEQ ID NO: 134848 - DNA, 75 bp, synthetic construct
  source 1..75: mol_type = other DNA
ctggatgcctggagtaacgtgctgggcttcgcgtcaccaggtgaagcaaagccgtaccagaagcagatcacccgg

SEQ ID NO: 134849 - DNA, 75 bp, synthetic construct
  source 1..75: mol_type = other DNA
atagcatggcacccttctggccatcttatcagaacaaaatcgttggcgttctcaatcgtgcgctgcgtgaacagt

SEQ ID NO: 134850 - DNA, 75 bp, synthetic construct
  source 1..75: mol_type = other DNA
ccgggtgaagcaaagccgtatcagaagcagatcacccgggatgtagtactggacagtcgttcgccggactgcgaa

SEQ ID NO: 134851 - DNA, 75 bp, synthetic construct
  source 1..75: mol_type = other DNA
ggacagtcgttcaccggactgtgaaaacatcctcaaagagttgatatgggcgttcagtgatttcgcccgcgatcg

SEQ ID NO: 134852 - DNA, 75 bp, synthetic construct
  source 1..75: mol_type = other DNA
aactggacacaggatgagggctatattccgccgttactggcgtttaatgctcatgacgggttggtacagcgtctg

SEQ ID NO: 134853 - DNA, 75 bp, synthetic construct
  source 1..75: mol_type = other DNA
ttatcagagcaaagtcatcggcgttcttgagcgtgcgctgcgtgaacagtcctgctcccgggtacggcggatcct

SEQ ID NO: 134854 - DNA, 75 bp, synthetic construct
  source 1..75: mol_type = other DNA
ccgtggcgtgtgcgatccggaagcgcgtcacctcgccggtaatccctggtatcccggagcaacagaacggcgctg

SEQ ID NO: 134855 - DNA, 75 bp, synthetic construct
  source 1..75: mol_type = other DNA
cgtcagtgcgctgatgaatgcgaaacccggacgcgacctttgctggctcctgacccgtcatcctgaaaagccgga

SEQ ID NO: 134856 - DNA, 75 bp, synthetic construct
  source 1..75: mol_type = other DNA
tgacccgtcatcctgaaaagccggaataccacgtggtgctgtgcgtcagacaggagtatttcgatggccctgaac

SEQ ID NO: 134857 - DNA, 75 bp, synthetic construct
  source 1..75: mol_type = other DNA
gcttcgtctgccgtgggaatatgacaacgccttcagttgcagaaagacctggttaggcatggattttatcgaaac

SEQ ID NO: 134858 - DNA, 75 bp, synthetic construct
  source 1..75: mol_type = other DNA
ccctcgatggtcgcgtcaaactgaaagtgcctggagaaacccagaccggtaagctgttccgcatgcgtggtaaag

SEQ ID NO: 134859 - DNA, 75 bp, synthetic construct
  source 1..75: mol_type = other DNA
aatttttgacgagatctggcaggagggtatgaagccggaagactggaaagacgaaatgctgagacgtgccgttta

SEQ ID NO: 134860 - DNA, 75 bp, synthetic construct
  source 1..75: mol_type = other DNA
tgataatttcggcatcgacggcacggagttcctgaacgacaaagacgtgcgcagcccgctcaccttctacctgct

SEQ ID NO: 134861 - DNA, 75 bp, synthetic construct
  source 1..75: mol_type = other DNA
cgcgtcacccgcacgccgttttatgacgtgctgggcggcacggatattttcccttccaccgacattggccaggtc

SEQ ID NO: 134862 - DNA, 75 bp, synthetic construct
  source 1..75: mol_type = other DNA
gactcccttctttacgccccctgcgattatgtgatcacgcagtcttacacctgcatgtcacgcgaggaagcgaaa

SEQ ID NO: 134863 - DNA, 75 bp, synthetic construct
  source 1..75: mol_type = other DNA
tctggacttccgtcgctctcctgttcttacttcctgtgcaatttctggtgatgaagtcccttaccagaaatgaac

SEQ ID NO: 134864 - DNA, 75 bp, synthetic construct
  source 1..75: mol_type = other DNA
cccttgctttctttgctgaaccagctgctggaggcaagcctgccttcccgtgtggtcttcattgaactgaaacaa

SEQ ID NO: 134865 - DNA, 75 bp, synthetic construct
  source 1..75: mol_type = other DNA
tcaacacgtctcttacccggtttaccgccacaccacttggtttaatcacacgcaataacagaccttactccacgc

SEQ ID NO: 134866 - DNA, 75 bp, synthetic construct
  source 1..75: mol_type = other DNA
aggaaaacgcgacaaagccccgtggggtgacgcgatggcactggtgcgaaccccgtcaggtgatggctactatct

SEQ ID NO: 134867 - DNA, 75 bp, synthetic construct
  source 1..75: mol_type = other DNA
cacggcgtaccgacggtgaataaagtccagttgggaaccacgccggtggtgcgcggcgcgatcacttctggcgag

SEQ ID NO: 134868 - DNA, 75 bp, synthetic construct
  source 1..75: mol_type = other DNA
tctggaagtggttagcagataaagagttctcaaaactcgcgctcaacatgttgaaagtcattcgtaaattaaacg

SEQ ID NO: 134869 - DNA, 75 bp, synthetic construct
  source 1..75: mol_type = other DNA
gagacggcaaaccgctcgatcctcgcgatgaggaacgcattagccaggccgtaaacaccatcatgctggattacc

SEQ ID NO: 134870 - DNA, 75 bp, synthetic construct
  source 1..75: mol_type = other DNA
gatgaaaaccaggtcatacgcgacacaaacagcctggccgagccgttaaaagacctgggtattctggtcactcta

SEQ ID NO: 134871 - DNA, 75 bp, synthetic construct
  source 1..75: mol_type = other DNA
aaatcagtaacgcgctgaacaacatcgggataacgcctgttccggcagaaatatcgctttcagcggcgtatatgg

SEQ ID NO: 134872 - DNA, 75 bp, synthetic construct
  source 1..75: mol_type = other DNA
catcatggtgtattccccgtctctggaaagcctggttgctgatacgaacgaaatcagtaacgcgctgaacaacat

SEQ ID NO: 134873 - DNA, 75 bp, synthetic construct
  source 1..75: mol_type = other DNA
actgcacatgggagttgatgggaacgccgttcgactgtgagtcagacgaaacactccagttcgggacgaaccagt

SEQ ID NO: 134874 - DNA, 75 bp, synthetic construct
  source 1..75: mol_type = other DNA
cacctcctgataatacattttcatatataacggcatttttaaatacatataaaaattatacctacctgctctgga

SEQ ID NO: 134875 - DNA, 75 bp, synthetic construct
  source 1..75: mol_type = other DNA
tgatatctcatccagatttaaactttacagttcgctcgtaaagcagaaaaatgcgacagaagatgttgttttaat

SEQ ID NO: 134876 - DNA, 75 bp, synthetic construct
  source 1..75: mol_type = other DNA
aaaaatcagttcaagcgcggcgataccaagcgttttgccgctcgtgtcacgctcgacctgtcgggtatcggcaga

SEQ ID NO: 134877 - DNA, 75 bp, synthetic construct
  source 1..75: mol_type = other DNA
attcactccatcgaatttccggtaacgcatacgctgacaccatcagcgaactctattacacctctctggggaaac

SEQ ID NO: 134878 - DNA, 75 bp, synthetic construct
  source 1..75: mol_type = other DNA
catcgacggaacggagttcctggacgatgcaagcgtatgtgcgccaatctcgttttatctgctgtaccgcattac

SEQ ID NO: 134879 - DNA, 75 bp, synthetic construct
  source 1..75: mol_type = other DNA
gcataacacactggcagataaggacgaattcaacgagaagaacccggccagtacctgcatcctcggtacgaacgg

SEQ ID NO: 134880 - DNA, 75 bp, synthetic construct
  source 1..75: mol_type = other DNA
catcatggtgtattccccgtcgctggaaagcctggttgctgatactaacgaaatcagtaacgcgctgaacaacat

SEQ ID NO: 134881 - DNA, 75 bp, synthetic construct
  source 1..75: mol_type = other DNA
ggcgctgggtggccgttactggcgggttatcagtggtgagcctacagggtggaacccgttctcgctgccggcaac

SEQ ID NO: 134882 - DNA, 75 bp, synthetic construct
  source 1..75: mol_type = other DNA
atgacgtttctggaaatcatgcagcagaaatacgggcgcgaagacagcttctccccggatgccagaaccaaacgg

SEQ ID NO: 134883 - DNA, 75 bp, synthetic construct
  source 1..75: mol_type = other DNA
cccgttgtgggatgacgtggcaatgcctggggacttataatgcgggttttgcaatggataaccaaaaaaagcgac

SEQ ID NO: 134884 - DNA, 75 bp, synthetic construct
  source 1..75: mol_type = other DNA
taacgccatacgataaatgggatggtgaaaaatgggtgacagatactgaggcacaacacggtgccgcagtagaag

SEQ ID NO: 134885 - DNA, 75 bp, synthetic construct
  source 1..75: mol_type = other DNA
aatcacagctccgggtgattatcctgaaaatacaaccactatcgccccgttaacgccatacgataaatggaatgg

SEQ ID NO: 134886 - DNA, 75 bp, synthetic construct
  source 1..75: mol_type = other DNA
gatgctcctgactcatataaagctggttatgtaatctgccgttctgcagattttaactcatgggtatatgtgcca

SEQ ID NO: 134887 - DNA, 75 bp, synthetic construct
  source 1..75: mol_type = other DNA
aacaacccggcttaacgctgtgctggattacattgacgcggtgacggcaacagataccagcaccgcgcctgatgt

SEQ ID NO: 134888 - DNA, 75 bp, synthetic construct
  source 1..75: mol_type = other DNA
aaccacgcagcttaactccgtgctagattatatagacgagctgaacgcgatggatttaaccacggcaccagatct

SEQ ID NO: 134889 - DNA, 75 bp, synthetic construct
  source 1..75: mol_type = other DNA
atcttcatattcatgcagaagatactctcctgcctttctatcttggggaaaaggacgatgtcacttatgcaataa

SEQ ID NO: 134890 - DNA, 75 bp, synthetic construct
  source 1..75: mol_type = other DNA
cgtttacaaaacctcagtttctgttcatcttgctcaggatctggctctgaaggggctacgtgttttgctcgtgga

SEQ ID NO: 134891 - DNA, 75 bp, synthetic construct
  source 1..75: mol_type = other DNA
cttaccaaatacagtaataacaatggttcgcagtcaccgtggatggaagagcaaattcgggatgcgtggggaagt

SEQ ID NO: 134892 - DNA, 75 bp, synthetic construct
  source 1..75: mol_type = other DNA
taacgccatacgatgaatgggatggcgagaaatgggtgacagatactgaggcacagcacagcgccgcagtagacg

SEQ ID NO: 134893 - DNA, 75 bp, synthetic construct
  source 1..75: mol_type = other DNA
cagcagaagcacagcgccagtcgctgatggatactgcaatggcttccatcaatctgattcaactgaaattacagg

SEQ ID NO: 134894 - DNA, 75 bp, synthetic construct
  source 1..75: mol_type = other DNA
tctcctgcctttctatcttggggaaaaggacgatgtcacttatgcaataaagcccacttgctggcctgggcttga

SEQ ID NO: 134895 - DNA, 75 bp, synthetic construct
  source 1..75: mol_type = other DNA
cggcattccggtatgctcctgtttagatgctcctgactcatataaagctggttatgcaatctgccgttctgcaga

SEQ ID NO: 134896 - DNA, 75 bp, synthetic construct
  source 1..75: mol_type = other DNA
caaatgaatatcttgccgttggtgtcggcattccggcatgttcctgtttagatgcccctggcacacataaggctg

SEQ ID NO: 134897 - DNA, 75 bp, synthetic construct
  source 1..75: mol_type = other DNA
gattacattgacgcggtgacggaaacaaataccagcaccgcgcctgatattatttggcctgcttttcctgagact

SEQ ID NO: 134898 - DNA, 75 bp, synthetic construct
  source 1..75: mol_type = other DNA
taagaaatgggtgaccgatactgaggcacagcatagcgccgcagtagacgcggcagaagcacagcgtcagtcact

SEQ ID NO: 134899 - DNA, 75 bp, synthetic construct
  source 1..75: mol_type = other DNA
gattgatgcagcaatggcttccattagtctgattcagctgaaattacaggccggacggaagttgacgctggcaga

SEQ ID NO: 134900 - DNA, 75 bp, synthetic construct
  source 1..75: mol_type = other DNA
gaaacacgggagtatatttctgcatcaactgaatatcttgctgtgggtgtcggtatccctgcatattcctgttta

SEQ ID NO: 134901 - DNA, 75 bp, synthetic construct
  source 1..75: mol_type = other DNA
gctgtgctggattacattgacgcggtgacggcaacagataccagcacagcgccggatgtcatctggcctgaattg

SEQ ID NO: 134902 - DNA, 75 bp, synthetic construct
  source 1..75: mol_type = other DNA
cgctgggccgcagggtggcaaaacgggtgtggcggcgtgaacgggacctgacgggctggatgtcgctgtcacgga

SEQ ID NO: 134903 - DNA, 75 bp, synthetic construct
  source 1..75: mol_type = other DNA
ccatgttaaaaaaacgtggaataataaaagatgaacgagatttgttagataacccctgtctgaacattaaaatag

SEQ ID NO: 134904 - DNA, 75 bp, synthetic construct
  source 1..75: mol_type = other DNA
tgagaaatgggtaacagatatcgaggcacagcatagcgccgcagtagatgcagcagaagtacagcgccagttgct

SEQ ID NO: 134905 - DNA, 75 bp, synthetic construct
  source 1..75: mol_type = other DNA
cacctgcttaacgaagatgaaggtatgcatcaggaaccagttatgccgcacaaatcagaggaagatatccgcgaa

SEQ ID NO: 134906 - DNA, 75 bp, synthetic construct
  source 1..75: mol_type = other DNA
gcacagcatagcgccgcagtagaagcggcagaagcacagcgccagtcgctgattgatgctgcaatggcttccatc

SEQ ID NO: 134907 - DNA, 75 bp, synthetic construct
  source 1..75: mol_type = other DNA
atgatagattacttggtgcactattagacctggccaataatgatcttgctagagaaaagatttgggtggaaatta

SEQ ID NO: 134908 - DNA, 75 bp, synthetic construct
  source 1..75: mol_type = other DNA
gatccgtatgagaaccgtttttgaacaggcaattgatcaacgttcttcaaccggcgcctggcgtaacgccctttc

SEQ ID NO: 134909 - DNA, 75 bp, synthetic construct
  source 1..75: mol_type = other DNA
ttgtgccgctgacgttattgttgttgctacacctgcagaattatttgattacgcttctgttctacagtttttcac

SEQ ID NO: 134910 - DNA, 75 bp, synthetic construct
  source 1..75: mol_type = other DNA
tccttccggtgtttctgcctttgccagtctggtttataacatgctcccccatccgaaaattacagaaatactgga

SEQ ID NO: 134911 - DNA, 75 bp, synthetic construct
  source 1..75: mol_type = other DNA
acgcgcagtgctttttgctgcgtcacaagaagagcttcagcgaaatgataaaagtgttgaaaaagtaacgaaaat

SEQ ID NO: 134912 - DNA, 75 bp, synthetic construct
  source 1..75: mol_type = other DNA
gcgtcaagtctgtccgcggtggcgcacagggtgatttgctgtgccgcgttgtcgtcgaaacacctgtaggcctga

SEQ ID NO: 134913 - DNA, 75 bp, synthetic construct
  source 1..75: mol_type = other DNA
ggcggaaccaaccagtaacgcgaaatacgtcgccttcgaaaccatttatgcgccggaacagatgccaggccagca

SEQ ID NO: 134914 - DNA, 75 bp, synthetic construct
  source 1..75: mol_type = other DNA
agcagatcacccgggatgtggtgctggacagttgttcaccggactgcgaagagagactcaaagagctgatatggg

SEQ ID NO: 134915 - DNA, 75 bp, synthetic construct
  source 1..75: mol_type = other DNA
cccggacgtgatctctgctggcttctgacccgtcatcctgaaaagccggaataccatgtggtgctgtgcgtcaga

SEQ ID NO: 134916 - DNA, 75 bp, synthetic construct
  source 1..75: mol_type = other DNA
acctgactttgaaatgagaggaagaattgaacgtcgtgctggttataccatagatcaaatcaacagtatgcgagc

SEQ ID NO: 134917 - DNA, 75 bp, synthetic construct
  source 1..75: mol_type = other DNA
cagtttttcacaatgcttctcgatctattggaaagcgttgacctaggtggatttgagccaaccgttcgcttactt

SEQ ID NO: 134918 - DNA, 75 bp, synthetic construct
  source 1..75: mol_type = other DNA
gcgcaccggtgcggctgattgtgccgtggaaatatggctttaaagggattaaatcgattgtcagcattaagctga

SEQ ID NO: 134919 - DNA, 75 bp, synthetic construct
  source 1..75: mol_type = other DNA
gcgaaagaagagggtttccctctgacggagggcgtgttcgtctcgtatccggggccgaatttcgaactgcggcgg

SEQ ID NO: 134920 - DNA, 75 bp, synthetic construct
  source 1..75: mol_type = other DNA
ccaggcttataaaccagatttcacaccacgagtggcttttattttaggttccgggctgggcgcgctggccgatca

SEQ ID NO: 134921 - DNA, 75 bp, synthetic construct
  source 1..75: mol_type = other DNA
caagacttataaacctgatttcacgccacgagtggcctttattttaggttccgggctcggcgcgctggccgatca

SEQ ID NO: 134922 - DNA, 75 bp, synthetic construct
  source 1..75: mol_type = other DNA
tgcaatatgccaaaaaaatatatattgtatataccaggcttaatgaactagacaatcgtaaggctttagcaaaat

SEQ ID NO: 134923 - DNA, 75 bp, synthetic construct
  source 1..75: mol_type = other DNA
gattacattgacgcggtggcggcaacagataccagcaccgcgccggatgtcatctggcctgaactgccggaggcg

SEQ ID NO: 134924 - DNA, 75 bp, synthetic construct
  source 1..75: mol_type = other DNA
agattattgccacgaaggcagggaatattaccgtctataactatgatggtgaaatacgggaatatatttccactt

SEQ ID NO: 134925 - DNA, 75 bp, synthetic construct
  source 1..75: mol_type = other DNA
atggctcttgccggtgagctgccggatgttgatatttcagataaaggagtgaaaatcactccgctggagaacggg

SEQ ID NO: 134926 - DNA, 75 bp, synthetic construct
  source 1..75: mol_type = other DNA
ttattcatggaaaggccgaacgctatccggggcttcagtccgtcatatcaacaaccagcctgaatatcaaagaca

SEQ ID NO: 134927 - DNA, 75 bp, synthetic construct
  source 1..75: mol_type = other DNA
acggacactgtttatgctggactggtttcgagatcctggtttgcgacgacgtgtacaagctgggctgaataaagg

SEQ ID NO: 134928 - DNA, 75 bp, synthetic construct
  source 1..75: mol_type = other DNA
tggtattgaaaaagtatctgaacttaatgaactaaaagcacccagcgaaaatttaagcatttattggaaaaatgt

SEQ ID NO: 134929 - DNA, 75 bp, synthetic construct
  source 1..75: mol_type = other DNA
ttgattgatattattatagccatgctttctctttcgtatgtttgcctttccgggaaggcaagaaatatttttgtt

SEQ ID NO: 134930 - DNA, 75 bp, synthetic construct
  source 1..75: mol_type = other DNA
tatgctatcacttttgtttattgtctttatgttgtcggtgctgagtgtatggcaaccggaggtagtgcatccaat

SEQ ID NO: 134931 - DNA, 75 bp, synthetic construct
  source 1..75: mol_type = other DNA
gcatttatttgttttataaggatttcactcatgaaaactgtttctcagaacacctgtacactttctgcttccgta

SEQ ID NO: 134932 - DNA, 75 bp, synthetic construct
  source 1..75: mol_type = other DNA
ggggaaatgtggtggagaaagttattgaaggggcttacgaggtggtgggcgtgtttgaccggatagaggagaagc

SEQ ID NO: 134933 - DNA, 75 bp, synthetic construct
  source 1..75: mol_type = other DNA
aaatgtggtggagaaagttatggaaggggcttacgaggtggtgggtgtgtttgaccggatggaggataagcgtga

SEQ ID NO: 134934 - DNA, 75 bp, synthetic construct
  source 1..75: mol_type = other DNA
atttatatatatctacaaagtttagttgcgagaagtgacgtatttatagttttgacttcaacatgtattggtgtg

SEQ ID NO: 134935 - DNA, 75 bp, synthetic construct
  source 1..75: mol_type = other DNA
tattaactactttgctaggaatgctgatagttttattataggtcgatatatgtcgattgtggtgttgggaagtta

SEQ ID NO: 134936 - DNA, 75 bp, synthetic construct
  source 1..75: mol_type = other DNA
atggtgacgaacatcagcccgtcactatcgccgacattctgacaccgcgacgccgggaggattacggtaaggacc

SEQ ID NO: 134937 - DNA, 75 bp, synthetic construct
  source 1..75: mol_type = other DNA
tttgagcggattgaggaaaagcgtgatgccatgcagtcgctgattctgccgccaccggcacgccaggcgctggca

SEQ ID NO: 134938 - DNA, 75 bp, synthetic construct
  source 1..75: mol_type = other DNA
cttaatctcgggctgacggcaggtaaagtgtggtacgacaccccaaccgatgattataacggtctgcaacttgca

SEQ ID NO: 134939 - DNA, 75 bp, synthetic construct
  source 1..75: mol_type = other DNA
ggtggggttctcatccccctggacacaaagctgcgccaagcaaaccacatctttgagtcggacattatccagctc

SEQ ID NO: 134940 - DNA, 75 bp, synthetic construct
  source 1..75: mol_type = other DNA
aaatgtggtggagaaagttatcgaaggggcttacgaggtggtgggtgtgtttgaccggatcgaggataagcgtga

SEQ ID NO: 134941 - DNA, 75 bp, synthetic construct
  source 1..75: mol_type = other DNA
aaatgtggtggagaaagttattgaaggggcttacgaggtggtgggtgtgtttgaccggattgaggataagcgtga

SEQ ID NO: 134942 - DNA, 75 bp, synthetic construct
  source 1..75: mol_type = other DNA
aaatgtggtggagaaagttatagaaggggcttacgaggtggtgggtgtgtttgaccggatagaggataagcgtga

SEQ ID NO: 134943 - DNA, 75 bp, synthetic construct
  source 1..75: mol_type = other DNA
gcgcagcaaattttatccgtcgcgaccgccctttaacccgtgaggagctgtttcgcgtggtgcccagtgtgttca

SEQ ID NO: 134944 - DNA, 75 bp, synthetic construct
  source 1..75: mol_type = other DNA
tttttgaccgggtggaggagaagcgggatgccatgcaatcgctgctattaccacctcccgctcagcaggcactgg

SEQ ID NO: 134945 - DNA, 75 bp, synthetic construct
  source 1..75: mol_type = other DNA
gaccggccatcaggtgccggaaatcattcttctcaacagccatgacggctcatcaagctaccagatgctgccggg

SEQ ID NO: 134946 - DNA, 75 bp, synthetic construct
  source 1..75: mol_type = other DNA
atgcgattagccagccgctttggccgtataaaccagatacgccgtgaccggcctctgacccacgaagaactgatg

SEQ ID NO: 134947 - DNA, 75 bp, synthetic construct
  source 1..75: mol_type = other DNA
ggcggacggcaaaaggtggtcgcacgcacacccgcgccattcaaggcatcgacggcgatatcaaactcaaccgcg

SEQ ID NO: 134948 - DNA, 75 bp, synthetic construct
  source 1..75: mol_type = other DNA
atatccctgctgggcagcctacagcgagaaggcttccagccattctttgcctgtcagacccgggtacgtgacccg

SEQ ID NO: 134949 - DNA, 75 bp, synthetic construct
  source 1..75: mol_type = other DNA
tcaccggcagaacaacgggcgttcgcaggagcggcgctggaatatcgttatgaagaagaacataagcccgtgact

SEQ ID NO: 134950 - DNA, 75 bp, synthetic construct
  source 1..75: mol_type = other DNA
tttcatggcaaaaggtcgaactgatgtattattaaagcttggcattataggtgcttttttacaagtttcatcttt

SEQ ID NO: 134951 - DNA, 75 bp, synthetic construct
  source 1..75: mol_type = other DNA
tttcatggcaaaaaacaaaacaagaactcttctatatttaggcatattcggtacattacttcagttgacgtcatt

SEQ ID NO: 134952 - DNA, 75 bp, synthetic construct
  source 1..75: mol_type = other DNA
tcgcagttgctgaccccacgtcgccgggaggactacagcgatgacctgtggaccgtctaccagcgcgtgcaggag

SEQ ID NO: 134953 - DNA, 75 bp, synthetic construct
  source 1..75: mol_type = other DNA
gaaccagcccgtaacgccctggcgaatgccgcgctgaagtatcgctttggtgaagaccaccagccggtcacggta

SEQ ID NO: 134954 - DNA, 75 bp, synthetic construct
  source 1..75: mol_type = other DNA
ccgcacccgtgccgttaccggcatcgatggagatgtgaagctcaatcgcgccctgtgggtgatggcagaaaacat

SEQ ID NO: 134955 - DNA, 75 bp, synthetic construct
  source 1..75: mol_type = other DNA
gggaggattacggtaaggacctgtggagtgcttatcagaccatccaggagaatatgctgaaaggcgggatttccg

SEQ ID NO: 134956 - DNA, 75 bp, synthetic construct
  source 1..75: mol_type = other DNA
gcaagcagttcaagccgaaagcttgggaaaagatggattacccgcagctgaaaacggcaattcatgactataccc

SEQ ID NO: 134957 - DNA, 75 bp, synthetic construct
  source 1..75: mol_type = other DNA
acgatggattatgggagatgggttcttgccgataatctgtactcacatgattgtggtcgtgggaaaattcaagat

SEQ ID NO: 134958 - DNA, 75 bp, synthetic construct
  source 1..75: mol_type = other DNA
aacgcatacccgcgccgtgcgtggtatcgacggagatgtgaagctcaaccgggctctctgggtgatggctgaagc

SEQ ID NO: 134959 - DNA, 75 bp, synthetic construct
  source 1..75: mol_type = other DNA
gtggaccacataccagcgtattcaggagaacctgattaagggcgggctcagtggtcggagtgcaaaaggcgggcg

SEQ ID NO: 134960 - DNA, 75 bp, synthetic construct
  source 1..75: mol_type = other DNA
ccgccacttgcacaacaggctctggcacaggctgcactgacgtaccgtttcggtgaggaccaccagccggtgaca

SEQ ID NO: 134961 - DNA, 75 bp, synthetic construct
  source 1..75: mol_type = other DNA
gtcgcagtgccagaggaaaacgtatccatacccgtaccattcacagcatcgacaccgacattaagctcaaccggg

SEQ ID NO: 134962 - DNA, 75 bp, synthetic construct
  source 1..75: mol_type = other DNA
atgaaaaaaagcaaaaaaattaaaacaatgaaccatcaaaataatagcgggatacataatcaaccagactattac

SEQ ID NO: 134963 - DNA, 75 bp, synthetic construct
  source 1..75: mol_type = other DNA
ttgcagcgcacagggtgagctgtgggaataccgccacgacgccagcggcagacgaacagagaaacgctgcgaccg

SEQ ID NO: 134964 - DNA, 75 bp, synthetic construct
  source 1..75: mol_type = other DNA
tccgctgacacacgaagaactgatgcactatgtgcccgggattttcggggaagatcaacacacttcccgcagcca

SEQ ID NO: 134965 - DNA, 75 bp, synthetic construct
  source 1..75: mol_type = other DNA
aatggtgtttattcttgacacgaaccctcgtgtttgtaataaattatccagggaaataatatctttagcgcaaaa

SEQ ID NO: 134966 - DNA, 75 bp, synthetic construct
  source 1..75: mol_type = other DNA
tggagtgcttatcagaccattcaggagaatatgctgaaaggcggaatttcaggtcgcagcgctaaaggaaaacgt

SEQ ID NO: 134967 - DNA, 75 bp, synthetic construct
  source 1..75: mol_type = other DNA
tggtccattcacatcaacacaaatcagaggcattccttatgcaacctctacgtttcttgataacggtaatgaggg

SEQ ID NO: 134968 - DNA, 75 bp, synthetic construct
  source 1..75: mol_type = other DNA
aaacgtggtggacagggtgattgaaggtgcttacgaggtggtgggcgtttttgaccggattgaggagaagcgtga

SEQ ID NO: 134969 - DNA, 75 bp, synthetic construct
  source 1..75: mol_type = other DNA
acgatcagaataatcagcgcaaggatccgatcgctattctgaaagagaacggcgtcaactatgtccgcctccgtc

SEQ ID NO: 134970 - DNA, 75 bp, synthetic construct
  source 1..75: mol_type = other DNA
cctggcaaatactcgtccgaacccaatgctcaatggtcaccaggagtggcttgacggcctgattctggctgcaaa

SEQ ID NO: 134971 - DNA, 75 bp, synthetic construct
  source 1..75: mol_type = other DNA
gggagcagcaagcagtgaagacttactcgcagtcatcggtcgtcagggatacaccgcgcgtcacgtggtgattac

SEQ ID NO: 134972 - DNA, 75 bp, synthetic construct
  source 1..75: mol_type = other DNA
gagtcattgcactgcagccgattagccaaaaggatgatgccacacgtttgtgcattgaaacctgcattgcgcgta

SEQ ID NO: 134973 - DNA, 75 bp, synthetic construct
  source 1..75: mol_type = other DNA
ggcagcattgaagtaaaaatgcatccgctctccatcaaacgcgcagtggcaaatatggtggtgaacgccgcccgt

SEQ ID NO: 134974 - DNA, 75 bp, synthetic construct
  source 1..75: mol_type = other DNA
tcatgacctgcgcacgccgctgacgcgtattcgcctggcaacggagatgatgagtgagcaggatggctacctggc

SEQ ID NO: 134975 - DNA, 75 bp, synthetic construct
  source 1..75: mol_type = other DNA
attctgacaccacgacgccgggaggattacggtaaggacctgtggagtgcttatcagaccattcaggagaatatg

SEQ ID NO: 134976 - DNA, 75 bp, synthetic construct
  source 1..75: mol_type = other DNA
aacatcgacaccgatattaagctcaaccgcgcattgtgggtaatggcagaaacgctgctggagagcctgcgctga

SEQ ID NO: 134977 - DNA, 75 bp, synthetic construct
  source 1..75: mol_type = other DNA
acgacgccgggaggattacggtaaggacctgtggagtgcttatcagaccattcaggagaatatgctgaaaggcgg

SEQ ID NO: 134978 - DNA, 75 bp, synthetic construct
  source 1..75: mol_type = other DNA
tgcagcgtatcatcgataaccataacgggatgctggagctcggcaccagcgagcgaggcgggctttccattcgcg

SEQ ID NO: 134979 - DNA, 75 bp, synthetic construct
  source 1..75: mol_type = other DNA
ggtgcttacgaggtggtgggtgtgtttgaccggattgaggaaaagcgtgatgccatgcagtcgctggttctgccg

SEQ ID NO: 134980 - DNA, 75 bp, synthetic construct
  source 1..75: mol_type = other DNA
tgccatgcagtcgctgctcttaccgccaccggcacgtcaggcactggctcaggcggcactgacttaccgttatgg

SEQ ID NO: 134981 - DNA, 75 bp, synthetic construct
  source 1..75: mol_type = other DNA
cagcacaacaggcactggctaaagcggcgctgacgtaccgttttggtgaagatcatcaacctgttaccgaaacac

SEQ ID NO: 134982 - DNA, 75 bp, synthetic construct
  source 1..75: mol_type = other DNA
aagataaacacacgtcccgaagtaagcactatacgtacatccccaccatcaccgtgctggaaagtctgcagcggg

SEQ ID NO: 134983 - DNA, 75 bp, synthetic construct
  source 1..75: mol_type = other DNA
atgctgaaaggcgggatttccggccgcagtgcaaaaggaaaacgtatccatacccgggccattcacaacatcgac

SEQ ID NO: 134984 - DNA, 75 bp, synthetic construct
  source 1..75: mol_type = other DNA
tgtttgaccggatagaggagaagcttgatgccatgcagtcgctggtcctgccgccaccggcacgccaggcgctgg

SEQ ID NO: 134985 - DNA, 75 bp, synthetic construct
  source 1..75: mol_type = other DNA
taaagtgcaaaagggcacaccgcttctcgacctgaccattcccgactgggtggaagcgcagagtgagtatttact

SEQ ID NO: 134986 - DNA, 75 bp, synthetic construct
  source 1..75: mol_type = other DNA
tacccgtgccattcacagcatcgacaccgacattaagctcaaccgcgcattgtgggtgatggctgaaacgctgct

SEQ ID NO: 134987 - DNA, 75 bp, synthetic construct
  source 1..75: mol_type = other DNA
tgacgaacatcagccagtcaccaccgctgacattctgacgccgcgacgccgggaggattacggtaaggacctgtg

SEQ ID NO: 134988 - DNA, 75 bp, synthetic construct
  source 1..75: mol_type = other DNA
gtcgcagcgctaaaggaaaacgtatccatacccgtgccattcacagcattgacactgacattaagctcaatcgtg

SEQ ID NO: 134989 - DNA, 75 bp, synthetic construct
  source 1..75: mol_type = other DNA
gtctggaagtcgacaacgccgacgaggcgctaaaaccgggcatgaacgcctggttgcaactcaataccgccagcg

SEQ ID NO: 134990 - DNA, 75 bp, synthetic construct
  source 1..75: mol_type = other DNA
ccggagtccatcgcctggctggtgaaagatgcctcgcagtttacgctcaccgttccggcgcgaccggataaaacg

SEQ ID NO: 134991 - DNA, 75 bp, synthetic construct
  source 1..75: mol_type = other DNA
gagaaacacacgtcccgaagccagaactatacgtacatccccaccatcaccgtactggaaaatctgcagcgggaa

SEQ ID NO: 134992 - DNA, 75 bp, synthetic construct
  source 1..75: mol_type = other DNA
ggccgtcggagatacaccaaacacatgctgcgtctgcggcgggccggagagataaacggacaacatgtccctgaa

SEQ ID NO: 134993 - DNA, 75 bp, synthetic construct
  source 1..75: mol_type = other DNA
gggaaatgtggtggagaaagttatcgaaggggcttacgaggtggtgggggtttttgaccggatagaggagaagcg

SEQ ID NO: 134994 - DNA, 75 bp, synthetic construct
  source 1..75: mol_type = other DNA
tgccattcacagcattgacactgacattaagctcaaccgcgcattgtgggtgatggcggaaaccctgctggagag

SEQ ID NO: 134995 - DNA, 75 bp, synthetic construct
  source 1..75: mol_type = other DNA
gccgacattctgacgccgcgacgccgggaggattacggtaaggacctgtggagtgcttatcagaccattcaggag

SEQ ID NO: 134996 - DNA, 75 bp, synthetic construct
  source 1..75: mol_type = other DNA
agtattttcggtgaagaccggcatacttcccgcagtaaacgatatgcgtacattcccaccatcaccgtactggaa

SEQ ID NO: 134997 - DNA, 75 bp, synthetic construct
  source 1..75: mol_type = other DNA
agcattgacaccgacattaagctcaatcgcgcgttatgggtgatggcggaaacgttgctggagagcctgcgctga

SEQ ID NO: 134998 - DNA, 75 bp, synthetic construct
  source 1..75: mol_type = other DNA
tcgtcggcagcctaccctacatgcgtctgtggtcagtctctgggggaagtgcgtgttccgcaccggggaaatgtg

SEQ ID NO: 134999 - DNA, 75 bp, synthetic construct
  source 1..75: mol_type = other DNA
caattacagcgcaatctacagatgctggaaaaaatcgggcactttaaggcctctgaattattgttagtcggtgga

SEQ ID NO: 135000 - DNA, 75 bp, synthetic construct
  source 1..75: mol_type = other DNA
cgggccattcacagcatcgacaccgatattaaactcaaccgcgcattgtgggtgatggcagaaacgatgctggag

SEQ ID NO: 135001 - DNA, 75 bp, synthetic construct
  source 1..75: mol_type = other DNA
tgccatgcagtctctggttctgccgccaccggcacgtcaggcactggcacaggcggcgctgacttaccgttatgg

SEQ ID NO: 135002 - DNA, 75 bp, synthetic construct
  source 1..75: mol_type = other DNA
gagaagtccgggtgccacaccggggaaacgtggtggacagggtcatagaaggcgcttacgaagtggtgggcgtgt

SEQ ID NO: 135003 - DNA, 75 bp, synthetic construct
  source 1..75: mol_type = other DNA
agcaataattaattgtttaaacacaatgcaagataaaaatcactttaacttccaaaacccaatggagttggataa

SEQ ID NO: 135004 - DNA, 75 bp, synthetic construct
  source 1..75: mol_type = other DNA
ggtggctacagcgttatattcacccatagcattggcatcaactgttgagtatggtgagacagttgatggtgttgt

SEQ ID NO: 135005 - DNA, 75 bp, synthetic construct
  source 1..75: mol_type = other DNA
ggggcttacgaggtagtgggcgtgtttgaccggattgaggaaaagcgtgatgccatgcagtcgctgattctgccg

SEQ ID NO: 135006 - DNA, 75 bp, synthetic construct
  source 1..75: mol_type = other DNA
aaggctttcagccattcttcgcctgccagacccgtgtgcgcgacccgggccgccggggatacacaaacatatgct

SEQ ID NO: 135007 - DNA, 75 bp, synthetic construct
  source 1..75: mol_type = other DNA
ggcggcactgacttaccgttatggtgacgaacatcagcccgtcaccaccgccgacattctgacgccacgacgccg

SEQ ID NO: 135008 - DNA, 75 bp, synthetic construct
  source 1..75: mol_type = other DNA
agataaacggagagcatgtccctgaaattattctgctcaactctcatgacggtacctccagctaccagatgctgc

SEQ ID NO: 135009 - DNA, 75 bp, synthetic construct
  source 1..75: mol_type = other DNA
gaaaacctggttaaaggtggtctgtcggggcgaacgaccaaaggcaagcgtgcccatacccgagccgttaaaggt

SEQ ID NO: 135010 - DNA, 75 bp, synthetic construct
  source 1..75: mol_type = other DNA
ggcgaaccgctcaggggaaaagcagccgcactcgtgctgttaccggtattgatggcgatgtgaagcttaatcgtg

SEQ ID NO: 135011 - DNA, 75 bp, synthetic construct
  source 1..75: mol_type = other DNA
gaccgggcatcaggtaccggaaatcattctacttaacagccatgacggctcatcaagctaccagatgctgccggg

SEQ ID NO: 135012 - DNA, 75 bp, synthetic construct
  source 1..75: mol_type = other DNA
aggcggcactgacttaccgttatggtgatgaacatcagccgatcaccaccgctgacattctgacaccacgacgca

SEQ ID NO: 135013 - DNA, 75 bp, synthetic construct
  source 1..75: mol_type = other DNA
gagacgcagatactttccccacgccgctggcaggatgagagtaatgacctgtggactacttatcagcgcattcag

SEQ ID NO: 135014 - DNA, 75 bp, synthetic construct
  source 1..75: mol_type = other DNA
atgcttcgcctgcgtcgggccggacaactgaccgggcaacaggtaccggaaatcattctgcttaacagccatgac

SEQ ID NO: 135015 - DNA, 75 bp, synthetic construct
  source 1..75: mol_type = other DNA
tgccggggctatttcgaggcgtctgtaccaatggtctggtctgcggccagtcattcggagaagtgcgggtaccgc

SEQ ID NO: 135016 - DNA, 75 bp, synthetic construct
  source 1..75: mol_type = other DNA
atgcaccatgtaccgggtattttcggtgaagaccggcatacctcccgcagtgaacgctatacgtacatccccacc

SEQ ID NO: 135017 - DNA, 75 bp, synthetic construct
  source 1..75: mol_type = other DNA
tgcgtctgcggcgggccggagagataaacggagaacatttccctgaaattattctgctcaactctcatgacggta

SEQ ID NO: 135018 - DNA, 75 bp, synthetic construct
  source 1..75: mol_type = other DNA
ctgggggaagtgcgtgttccgcatcggggaaatgtggtggacagagtcattgaagggcttacgaggtggtgggcg

SEQ ID NO: 135019 - DNA, 75 bp, synthetic construct
  source 1..75: mol_type = other DNA
tccgctgacacacgaagaactgatgcaccatgtaccgagtatttttggggaaaaccgacatacttcccgcagtaa

SEQ ID NO: 135020 - DNA, 75 bp, synthetic construct
  source 1..75: mol_type = other DNA
tggtgacgaacatcggcccgtcaccaccgccgacattctgactccacgacgccgggaggattacggtaaggacct

SEQ ID NO: 135021 - DNA, 75 bp, synthetic construct
  source 1..75: mol_type = other DNA
ccccaccgcgcgatttacctttccgccgctctccaccgtgcgcatccattccgagatgatgggaagtcagggcgt

SEQ ID NO: 135022 - DNA, 75 bp, synthetic construct
  source 1..75: mol_type = other DNA
acgctatgcgtacattcccaccatcaccgtactggaaagcctgcagcgggaaggttttcagccattcttcgcctg

SEQ ID NO: 135023 - DNA, 75 bp, synthetic construct
  source 1..75: mol_type = other DNA
ccagacccgcgtacgtgacccgggccgccgggggtataccaaacacatgctgcgtctgcggcgtaccggagagat

SEQ ID NO: 135024 - DNA, 75 bp, synthetic construct
  source 1..75: mol_type = other DNA
ggcgggatttccggccgcagcgcaaaaggaaaacgtatccatacccgggccattcacagcatcgacaccgatatt

SEQ ID NO: 135025 - DNA, 75 bp, synthetic construct
  source 1..75: mol_type = other DNA
agccattcttcgcctgccagacccgtgtgcgcgacccgggccgccggggatacacaaaacacatgctgcgtctgc

SEQ ID NO: 135026 - DNA, 75 bp, synthetic construct
  source 1..75: mol_type = other DNA
cacaggcggcactgacttaccgttatggtgacgaacatcagccgccacaacagcggacatcctaacgcaacgacg

SEQ ID NO: 135027 - DNA, 75 bp, synthetic construct
  source 1..75: mol_type = other DNA
cttgcggggtatggggtggcggttagccaagaatggcctgaaggtatcattttctgcgttgttctgattgccagt

SEQ ID NO: 135028 - DNA, 75 bp, synthetic construct
  source 1..75: mol_type = other DNA
ccgttcgcgactggatgcgggataccggcgatattccccaaagctgttttgccgtgcagggatacggtgaaagcc

SEQ ID NO: 135029 - DNA, 75 bp, synthetic construct
  source 1..75: mol_type = other DNA
ggcatcatgctcacccaataagtgtgttgatatcagcgtcaataaacctgttgatgaaggaaatgttgacggctc

SEQ ID NO: 135030 - DNA, 75 bp, synthetic construct
  source 1..75: mol_type = other DNA
gtcgaaccagcggcatttatgttgtccgcattagcattccccaacgttttcgtcgatacgcaggacagtgtgaga

SEQ ID NO: 135031 - DNA, 75 bp, synthetic construct
  source 1..75: mol_type = other DNA
acatggttgaggttgtcgaaaagattgatttttctttgcccgagatagcgagattcaacattcctgatgggctgg

SEQ ID NO: 135032 - DNA, 75 bp, synthetic construct
  source 1..75: mol_type = other DNA
ggtcgattaaaacttgaaagagacagaagcaaatctttccactctttccggcattctgtttcaactttgcttaaa

SEQ ID NO: 135033 - DNA, 75 bp, synthetic construct
  source 1..75: mol_type = other DNA
ttttcaatatcgacatcgagacctgcagcggctgcggcggcgccatgaaagtcatcgcctgcattgaagacccta

SEQ ID NO: 135034 - DNA, 75 bp, synthetic construct
  source 1..75: mol_type = other DNA
tatagcgcaggtcgcctggatatccccgaacttctggattacgcccagtcatggcgggaaactgaacctgataat

SEQ ID NO: 135035 - DNA, 75 bp, synthetic construct
  source 1..75: mol_type = other DNA
tttgcaaactctgccgaccagtggtgatccgttcggtgacgggattggcaaggtagccgggtccagcctgcacgc

SEQ ID NO: 135036 - DNA, 75 bp, synthetic construct
  source 1..75: mol_type = other DNA
cggggtgttcgcacccaacagtcggcaccgggcgttggtcacgccggcaaaacggggcaggggcaacaaggtcag

SEQ ID NO: 135037 - DNA, 75 bp, synthetic construct
  source 1..75: mol_type = other DNA
aaacacctgccgatttcctgacgctggttaaaggtggggtcccggtgagtcgcattaacgttggcaacatgcact

SEQ ID NO: 135038 - DNA, 75 bp, synthetic construct
  source 1..75: mol_type = other DNA
cggccagggccgatgaacgcaagaagctcgaacggctgtgccggtacatcagccgcccggcggtatccgagaagc

SEQ ID NO: 135039 - DNA, 75 bp, synthetic construct
  source 1..75: mol_type = other DNA
agcggcatgcagacagataatgtggtgataatatcttcttcccggatatctgaaattgtcggctttctgtataag

SEQ ID NO: 135040 - DNA, 75 bp, synthetic construct
  source 1..75: mol_type = other DNA
caaactggcgcaactgctgcgttattccagcaatatcgccctgatgtgtggcagcggctgtgcggggcgcataaa

SEQ ID NO: 135041 - DNA, 75 bp, synthetic construct
  source 1..75: mol_type = other DNA
tcgccaaaacactcgaatcggcaggcgtgaaacgcatctggggagtcacgggcgactctctgaacggtcttagtg

SEQ ID NO: 135042 - DNA, 75 bp, synthetic construct
  source 1..75: mol_type = other DNA
ttgccgccgaaagtggctatgagcgggaaattgaaaccgcgctttaccccggcagcattgaagtgaaaatgcacc

SEQ ID NO: 135043 - DNA, 75 bp, synthetic construct
  source 1..75: mol_type = other DNA
gagtgtaacgccatcattgagcagttcatcgactacctgcgtaccgggcaggagatgccgatggaattggccgat

SEQ ID NO: 135044 - DNA, 75 bp, synthetic construct
  source 1..75: mol_type = other DNA
ttggcaggaggggatgcaagtatccctctcgggttaaatcacagcgtaggttcgtccgctcaacattagatagcc

SEQ ID NO: 135045 - DNA, 75 bp, synthetic construct
  source 1..75: mol_type = other DNA
tggaaggtctgaccggctttactatgtatggcaaaacggcaggcgttatcggtaccggtaaaatcggtgtggcga

SEQ ID NO: 135046 - DNA, 75 bp, synthetic construct
  source 1..75: mol_type = other DNA
ccacagcatactttagattgcctattaaacgctggtgtgtcagaacaagaagctgcatttcgaacgagtggtgat

SEQ ID NO: 135047 - DNA, 75 bp, synthetic construct
  source 1..75: mol_type = other DNA
ggtttgaggctggaactgttgaacgcaatgcgcaagggcgattccatcaatattgcccgtttaactatttgaagt

SEQ ID NO: 135048 - DNA, 75 bp, synthetic construct
  source 1..75: mol_type = other DNA
tatgcgtctgcttgcgttcgatccatacccaagtgcggcggcgctggaacttggtgtggagtatgttgatctgcc

SEQ ID NO: 135049 - DNA, 75 bp, synthetic construct
  source 1..75: mol_type = other DNA
gaaagtagtccgtgttccagcctacgatccggaagccgtcgctgaacacgctatcggtatgatgatgacgctgaa

SEQ ID NO: 135050 - DNA, 75 bp, synthetic construct
  source 1..75: mol_type = other DNA
attgattctcaggcagcaattgaagcgctgaaaaatcagaaaattggttcgttgggtatggacgtgtatgagaac

SEQ ID NO: 135051 - DNA, 75 bp, synthetic construct
  source 1..75: mol_type = other DNA
ccggtctggctgattctggaataccaacaaataccagacagcttgaacgaatcattgcacaagctcagatttgtg

SEQ ID NO: 135052 - DNA, 75 bp, synthetic construct
  source 1..75: mol_type = other DNA
gggataacgagcagtctggacatgcccgtctcggtgatccgcgtcgtacacgacgccttgtgtcactgacctctt

SEQ ID NO: 135053 - DNA, 75 bp, synthetic construct
  source 1..75: mol_type = other DNA
acactcacgcttgcacagacctgcggcgccctggccaccacagccaaaggtgcgatgaccgccttgccttatcag

SEQ ID NO: 135054 - DNA, 75 bp, synthetic construct
  source 1..75: mol_type = other DNA
agaaaaaactggagagacaattgcaggataagaagaatgaatattcgtcagtgacgaatgctcttaattctgctg

SEQ ID NO: 135055 - DNA, 75 bp, synthetic construct
  source 1..75: mol_type = other DNA
gatagggatgatatttttaatgctttagagtctattacttatgatgagtgggccaagcatctagaaaagatctct

SEQ ID NO: 135056 - DNA, 75 bp, synthetic construct
  source 1..75: mol_type = other DNA
gggatgcggtcgtagatctcttgccagaatcagacgggcggctactgccttgtcctggcggtgcgccagctaacg

SEQ ID NO: 135057 - DNA, 75 bp, synthetic construct
  source 1..75: mol_type = other DNA
caccgacagtcagccgatccactccgctgaattcccctccaaccaggtgttgtcggaaaaacgggcgacggaagt

SEQ ID NO: 135058 - DNA, 75 bp, synthetic construct
  source 1..75: mol_type = other DNA
gctgaattcccgtcgaatcaggtgttatcagaaaaacgtgcggcagaagtggcttcgttgctgacgtccggtggc

SEQ ID NO: 135059 - DNA, 75 bp, synthetic construct
  source 1..75: mol_type = other DNA
gtgaactttcccctggtcttgtcgaacattatcgcgccctactggaacgtgaagttcgccggtatcagacattat

SEQ ID NO: 135060 - DNA, 75 bp, synthetic construct
  source 1..75: mol_type = other DNA
cgatggcatgacagcaaacgcacaggtcgccccggttgggtagtcatgtgggatggctggttcagacttcaggat

SEQ ID NO: 135061 - DNA, 75 bp, synthetic construct
  source 1..75: mol_type = other DNA
ctttgaagataaatccaacgacgtgatccaggatgacgtattccgtcgcttgtctgcctgccacaacgtgttgtt

SEQ ID NO: 135062 - DNA, 75 bp, synthetic construct
  source 1..75: mol_type = other DNA
cgactttttttgccctttgcctttttgctcacatgttctttccggccttatcccctgattctgtggataacacta

SEQ ID NO: 135063 - DNA, 75 bp, synthetic construct
  source 1..75: mol_type = other DNA
agacgtgaacatgaccccgctgataagcggcgacgctttgtctggttgactgccgaaggcgaaaagatacttgct

SEQ ID NO: 135064 - DNA, 75 bp, synthetic construct
  source 1..75: mol_type = other DNA
ttgattgaagcggcagccagcactaaagcaacgctggcggaaatgctggcaagaatggaaaaccggggtctggtc

SEQ ID NO: 135065 - DNA, 75 bp, synthetic construct
  source 1..75: mol_type = other DNA
cattaaagcacctattgatggtgtcattactgcatttgacctgcgcaccggcatgaatatttcgaaagataaggt

SEQ ID NO: 135066 - DNA, 75 bp, synthetic construct
  source 1..75: mol_type = other DNA
gtggccaagacgggcgcggtcaccctgatccagcgttttggatcggcgctcaatctgaatgttcacttccacatg

SEQ ID NO: 135067 - DNA, 75 bp, synthetic construct
  source 1..75: mol_type = other DNA
caatcgtgtaccgcgccacactacctagcattgaagctatcgaggggcatctgcttgaactcccctactccgaga

SEQ ID NO: 135068 - DNA, 75 bp, synthetic construct
  source 1..75: mol_type = other DNA
aaacagaaacaatcaacatcagtgatatcaagaatggactgactacacgcctgaataactacatcaatggtgcag

SEQ ID NO: 135069 - DNA, 75 bp, synthetic construct
  source 1..75: mol_type = other DNA
acctatttcatggaacgtctacggcactaccggcagttaagcctccagttgccaaaagggagcgatccggcatat

SEQ ID NO: 135070 - DNA, 75 bp, synthetic construct
  source 1..75: mol_type = other DNA
ccgcgagcaaccagagaatctgcgcacctatttcatggaacggctacggcactaccggcagttaagcctccagtt

SEQ ID NO: 135071 - DNA, 75 bp, synthetic construct
  source 1..75: mol_type = other DNA
tttttaatgcgttagagtctgttaattatgatgagttatctaagaatttaacgaagatatcaaagtcgcttaaaa

SEQ ID NO: 135072 - DNA, 75 bp, synthetic construct
  source 1..75: mol_type = other DNA
atgcaatatttcaatgatctgctcgatttcagtgaccatccgcttatgcctccggcctctgcacaactgtttgca

SEQ ID NO: 135073 - DNA, 75 bp, synthetic construct
  source 1..75: mol_type = other DNA
gaaggcactgcaaaggcgcgactcctttttgaattaagtcgtcgtttcggcgtgtcaataagcacttttaaataa

SEQ ID NO: 135074 - DNA, 75 bp, synthetic construct
  source 1..75: mol_type = other DNA
atgcgctgtaaaacgctgactgctgcagcagcagtactattgatgttgaccgcacgctgttccactctggagcga

SEQ ID NO: 135075 - DNA, 75 bp, synthetic construct
  source 1..75: mol_type = other DNA
tggtgacgaacatcagccagtcaccaccgctgacattctgaccccccgacgcggggaggattacggtgaggacct

SEQ ID NO: 135076 - DNA, 75 bp, synthetic construct
  source 1..75: mol_type = other DNA
gggaagaccggcacacctcccgcagtgaacggtatgcgtacattcccaccatcaccgtcctggaaaatctgcagc

SEQ ID NO: 135077 - DNA, 75 bp, synthetic construct
  source 1..75: mol_type = other DNA
tcgtcaggcgtatgaggaggcgctacggattgcgcagtcgcctgctaaatctgtttggcaaccagaagaatatga

SEQ ID NO: 135078 - DNA, 75 bp, synthetic construct
  source 1..75: mol_type = other DNA
tggtgacgaacatcagccggtcaccaccgctgacattctgaccccgcgacgcagggaggattacggtgaggacct

SEQ ID NO: 135079 - DNA, 75 bp, synthetic construct
  source 1..75: mol_type = other DNA
tggtgacgaacatcagcccgtcaccaccgctgacattctgaccccacgacgcggggaggattacggtgaggacct

SEQ ID NO: 135080 - DNA, 75 bp, synthetic construct
  source 1..75: mol_type = other DNA
tggtgacgaacatcagcctgtcaccaccgctgacattctgacccctcgacgccgggaggattacggtgaggacct

SEQ ID NO: 135081 - DNA, 75 bp, synthetic construct
  source 1..75: mol_type = other DNA
ggaggggctgttatttgccatcaccacatcggggagcaacgttgtttcagcctgtaaacaacactatgactattg

SEQ ID NO: 135082 - DNA, 75 bp, synthetic construct
  source 1..75: mol_type = other DNA
ccactggcagcaaaagcggcaaccattgaaggtacaaacccgagtcttgccattgtggatgaatatcacctgcac

SEQ ID NO: 135083 - DNA, 75 bp, synthetic construct
  source 1..75: mol_type = other DNA
aaggcttccagccattcttcgcctgccagacccgtgtgcgcgacccgggccgtcggggatacacaaaacacatgc

SEQ ID NO: 135084 - DNA, 75 bp, synthetic construct
  source 1..75: mol_type = other DNA
gccgggaggattacggtaaggacctgtggagtgcttatcagaccatccaggagaatatgctgaaaggcgggattt

SEQ ID NO: 135085 - DNA, 75 bp, synthetic construct
  source 1..75: mol_type = other DNA
cccgataacggcgtttattccgcgcttgagctggggatgggcgcacgtcccgaagggctgttatttgctattacc

SEQ ID NO: 135086 - DNA, 75 bp, synthetic construct
  source 1..75: mol_type = other DNA
ggcacattccaggcagagcatgaggaatttgcatttgatatgagcgacagccacaaagagcggcttgcggcgttt

SEQ ID NO: 135087 - DNA, 75 bp, synthetic construct
  source 1..75: mol_type = other DNA
ttacttcaggttcgtctgccagaacgggggcgtctgtggccagtctctgggggaagtgcgtgttccacaccgggg

SEQ ID NO: 135088 - DNA, 75 bp, synthetic construct
  source 1..75: mol_type = other DNA
gtgagcagtgggaataccgccacgacgccagcggcagacgaacagagaaacgctgcgaccggaagaaaatccgtt

SEQ ID NO: 135089 - DNA, 75 bp, synthetic construct
  source 1..75: mol_type = other DNA
gagcgtggcggcactgatggcgtttggcacattccaggcagagcatgaggattttgaattcgatatgagcgatag

SEQ ID NO: 135090 - DNA, 75 bp, synthetic construct
  source 1..75: mol_type = other DNA
tgctgcgtctgcggcgggccggagagataaccggacaacatgtccctgaaattattctgctcaactcccatgacg

SEQ ID NO: 135091 - DNA, 75 bp, synthetic construct
  source 1..75: mol_type = other DNA
ttcgcctgccagacccgtgtgcgcgacccgggccgccggggatacaccaaacacatgctgcgtctgcggcgggcc

SEQ ID NO: 135092 - DNA, 75 bp, synthetic construct
  source 1..75: mol_type = other DNA
ccggtcgcagtgccagagggaaacgtatccatacccgtgccattcacagcatcgacaccgacattaagctcaacc

SEQ ID NO: 135093 - DNA, 75 bp, synthetic construct
  source 1..75: mol_type = other DNA
aaatgctaccttatatgaggtgtatcatgaagtgattcatgctaagcaatttgcgaaaattggacgagaagcata

SEQ ID NO: 135094 - DNA, 75 bp, synthetic construct
  source 1..75: mol_type = other DNA
gggaggattacggtaaggacctgtggagtacttatcagaccatccaggagaatatgctgaaaggcggaatttccg

SEQ ID NO: 135095 - DNA, 75 bp, synthetic construct
  source 1..75: mol_type = other DNA
gagaagtccgggtgccacaccggggaaacgtggtggacagtgtgattgaaggtgcttacgaggtggtgggggttt

SEQ ID NO: 135096 - DNA, 75 bp, synthetic construct
  source 1..75: mol_type = other DNA
gtcgcagtgccagaggaaaacgtatccatacccgggccattcacagcatcgataccgacattaagctcaaccgcg

SEQ ID NO: 135097 - DNA, 75 bp, synthetic construct
  source 1..75: mol_type = other DNA
ctggcacaggcggcactgacttaccgttatggtgacgaacatcagcccgtcaccaccgccgatattctgacgcca

SEQ ID NO: 135098 - DNA, 75 bp, synthetic construct
  source 1..75: mol_type = other DNA
tgccatgcagtcgctgattctgccgccaccggcacgccaggccctggcacaggcggcactgacttaccgttatgg

SEQ ID NO: 135099 - DNA, 75 bp, synthetic construct
  source 1..75: mol_type = other DNA
ccagaaggatgatgccacgcgtttgtgtattgaaacctgcattgcgcggaactggcgtttgtcgatgcaaacgca

SEQ ID NO: 135100 - DNA, 75 bp, synthetic construct
  source 1..75: mol_type = other DNA
atattttcgtgccatctgcaccaatggcttggtctgcggtcagtcgctgggagaagtccgggtgccccaccgggg

SEQ ID NO: 135101 - DNA, 75 bp, synthetic construct
  source 1..75: mol_type = other DNA
cggaactcacagatttcaacgctaaaatctcaatataaagagatcatgaaacttgatccttttaaccttgagaaa

SEQ ID NO: 135102 - DNA, 75 bp, synthetic construct
  source 1..75: mol_type = other DNA
cgaaaccagcggcactcatgaagtgcgttgcacaccgaatacctgggttaccgtgtcgccaaaaataaatatgcg

SEQ ID NO: 135103 - DNA, 75 bp, synthetic construct
  source 1..75: mol_type = other DNA
aacatccggttggacgcgtacgggatattgaagcactggatgaattgttggcgacgctgaccgatgataaaccgc

SEQ ID NO: 135104 - DNA, 75 bp, synthetic construct
  source 1..75: mol_type = other DNA
gcgctggaacgcgccaatgaaatcaaacatccggttgggcgtgtacgggatattgaagcactggatgaattgctg

SEQ ID NO: 135105 - DNA, 75 bp, synthetic construct
  source 1..75: mol_type = other DNA
tgcggtttgtacccgtgaaggatgagagccagcaggcgatgcaatgcctacaccgtaccagacagggttttatcg

SEQ ID NO: 135106 - DNA, 75 bp, synthetic construct
  source 1..75: mol_type = other DNA
atgttgtttctgaccagaaggaaactctgccagtacaggtcaggctgtgcattgatgatctattgacacatgtca

SEQ ID NO: 135107 - DNA, 75 bp, synthetic construct
  source 1..75: mol_type = other DNA
caccgaccgctacccgcaggttgaagtgccgggttttcgctttgatggcccgcaattggcaaaaaccacgggcgg

SEQ ID NO: 135108 - DNA, 75 bp, synthetic construct
  source 1..75: mol_type = other DNA
tggatctcggtctgaagggtaaagaaattgaagagcttcagctgcaaattgaacatttgaaacgccagcaacagg

SEQ ID NO: 135109 - DNA, 75 bp, synthetic construct
  source 1..75: mol_type = other DNA
aggttgggtagagttcttccatgaattgatctgtaaagagatggaaagccgtcgcccggaattggtccgtcgagt

SEQ ID NO: 135110 - DNA, 75 bp, synthetic construct
  source 1..75: mol_type = other DNA
gctgttctggttaaacccaaggtgtcgcgtgcagcactttctgaactcatcgcaggtttacctccctgtgtcatt

SEQ ID NO: 135111 - DNA, 75 bp, synthetic construct
  source 1..75: mol_type = other DNA
cgaaagcctgctggcagaactttgtgactactggcgcgagtatccctccactcaggcggatgctttaatgttgca

SEQ ID NO: 135112 - DNA, 75 bp, synthetic construct
  source 1..75: mol_type = other DNA
gtgaaggcgatcaacgccgcacgcatggctttacgccgcaccagtgctccgcgcgtctcgctggataaagtcatc

SEQ ID NO: 135113 - DNA, 75 bp, synthetic construct
  source 1..75: mol_type = other DNA
gggatgcagatccacgcgtataatggcgataaagttgtttacagcaaaacttattattccatcggcggcggtttt

SEQ ID NO: 135114 - DNA, 75 bp, synthetic construct
  source 1..75: mol_type = other DNA
atgcgataaaaacgggcgaaattccggcctgtaagcgcgtaaaacaggccgtggaaaggtacttttcagacctga

SEQ ID NO: 135115 - DNA, 75 bp, synthetic construct
  source 1..75: mol_type = other DNA
ctgttgacgcagcgaagctggaatccaccatccagaaagcgcggggggtaccgtcgcaatgggtggaaatgctca

SEQ ID NO: 135116 - DNA, 75 bp, synthetic construct
  source 1..75: mol_type = other DNA
tgcttctcttggtgttgctggtgctttgttgcaggctgtcattcgtaacccattgggggagccacatattttagg

SEQ ID NO: 135117 - DNA, 75 bp, synthetic construct
  source 1..75: mol_type = other DNA
gtggcgctatcggcgttcgtttcctcaataacggctgcaatcctgattcttgacgaacaaacgttgttggcgatg

SEQ ID NO: 135118 - DNA, 75 bp, synthetic construct
  source 1..75: mol_type = other DNA
taattttcctcgccttactgctggtgggatgcgtggtatatccagggattggtgcccgatttattgcaccacaaa

SEQ ID NO: 135119 - DNA, 75 bp, synthetic construct
  source 1..75: mol_type = other DNA
atcgtcgatgaagaacactttggtcaggatgccgccaacgaagtgagcgtgccgtatccgttcaaatctgccacc

SEQ ID NO: 135120 - DNA, 75 bp, synthetic construct
  source 1..75: mol_type = other DNA
gagacaatgtacgaaaccggtaaggacatgaatgccaagtaccgtgaaacctctcgtggcggtctggcaattaaa

SEQ ID NO: 135121 - DNA, 75 bp, synthetic construct
  source 1..75: mol_type = other DNA
gtgaaagcgattaatgccgcacgtatggctttacgccgcaccagcgcgccacgcgtctcactggataaagtcatt

SEQ ID NO: 135122 - DNA, 75 bp, synthetic construct
  source 1..75: mol_type = other DNA
aggacctgtggagtgcttatcagaccattcaggagaatatgctgaaaggcgggatttccggtcgcagtgcaaaag

SEQ ID NO: 135123 - DNA, 75 bp, synthetic construct
  source 1..75: mol_type = other DNA
aaaagcgggatttcatccactgaccgccgactgtcgctacaacctgacctttcgccaggcaggtaaagaagaata

SEQ ID NO: 135124 - DNA, 75 bp, synthetic construct
  source 1..75: mol_type = other DNA
ggcgcgaaactgtcgctgcatcaggataaagacgaaccggatctgcgcgcgccaattgtttctgtttctctgggc

SEQ ID NO: 135125 - DNA, 75 bp, synthetic construct
  source 1..75: mol_type = other DNA
gaaagtggggggtcatccactcaccaccgactgccgctacaacctgacattccgtcaggcaggtaaaaaagaata

SEQ ID NO: 135126 - DNA, 75 bp, synthetic construct
  source 1..75: mol_type = other DNA
ggtttacaggaaacggtaaacagggctggtaacgccgttcaaaagacaggcgataccttatccggtgggcttact

SEQ ID NO: 135127 - DNA, 75 bp, synthetic construct
  source 1..75: mol_type = other DNA
tgactcacgttatgtgagagatgtccgacttggtacacgtgttgttcagactatgcaaaaaggcgtgatgtatga

SEQ ID NO: 135128 - DNA, 75 bp, synthetic construct
  source 1..75: mol_type = other DNA
aacctcggtttacaggaaacggtaaacaaggctggtaacgccgtccaaaagacaggcgatatcttgtccggtggg

SEQ ID NO: 135129 - DNA, 75 bp, synthetic construct
  source 1..75: mol_type = other DNA
catacttcatgttgacaaactccggtgacaacatggggacttataacggattaaggccattatggattaataacg

SEQ ID NO: 135130 - DNA, 75 bp, synthetic construct
  source 1..75: mol_type = other DNA
catcatcaaagccgtgttcctggctgcgctcatcaagacaaaagggaacgtggtacaaattttcaagataacgag

SEQ ID NO: 135131 - DNA, 75 bp, synthetic construct
  source 1..75: mol_type = other DNA
ttccggcgtaacggatctcaacatcgaagatggggggggtggcttgcttatttcctgattgttgctgcggccagt

SEQ ID NO: 135132 - DNA, 75 bp, synthetic construct
  source 1..75: mol_type = other DNA
gctaaactgtcgctgcatcaggataaagacgaagcggatctacgcgcgccgattgtctctgtttctctgggatta

SEQ ID NO: 135133 - DNA, 75 bp, synthetic construct
  source 1..75: mol_type = other DNA
aaccctggcaggaaccgctggcgcctggcgcggtgatcctgcgccgttttgtttttaacgtcgcagaacagttga

SEQ ID NO: 135134 - DNA, 75 bp, synthetic construct
  source 1..75: mol_type = other DNA
caggataaagacgaaccggatctgcgcgcgccaattgtttctgtttctctgggcttacccgcgatttttcaattt

SEQ ID NO: 135135 - DNA, 75 bp, synthetic construct
  source 1..75: mol_type = other DNA
atgaacaagcagcagcaagccgtactcaacatggcaggattcataaaaagccagagcctgacactgctcgaaaag

SEQ ID NO: 135136 - DNA, 75 bp, synthetic construct
  source 1..75: mol_type = other DNA
tcgcggcgggatactgattctgccaactggtctgaatgggcgcaggtctatacgtcaaaagattccgttcccggc

SEQ ID NO: 135137 - DNA, 75 bp, synthetic construct
  source 1..75: mol_type = other DNA
cgctgatggcgggtaacgagcaggttggttttgacctggtgaaagcctgtaaagaggcttgcgcagcggcgaatg

SEQ ID NO: 135138 - DNA, 75 bp, synthetic construct
  source 1..75: mol_type = other DNA
catcgcagatgaactgttcggtgctgactgggctgatgcgcgtcactaccgctttggtgcttccagcctgctggc

SEQ ID NO: 135139 - DNA, 75 bp, synthetic construct
  source 1..75: mol_type = other DNA
atgaacaagcagcagcaagccgtactcaacatggcaggattcataaaaagccagagcctgacgctgctcgaaaaa

SEQ ID NO: 135140 - DNA, 75 bp, synthetic construct
  source 1..75: mol_type = other DNA
ggtgatgccgccgagaatgttattaccagtggtgtatccatcgtggacggtaagctggctggctcaaaagcattt

SEQ ID NO: 135141 - DNA, 75 bp, synthetic construct
  source 1..75: mol_type = other DNA
gataatatagctggcgtttattacagacccgttcaaaagtatataaatggcacctggtataatgtagcgagcgtt

SEQ ID NO: 135142 - DNA, 75 bp, synthetic construct
  source 1..75: mol_type = other DNA
gttaacgttgcgggtaatcagaatacatccggtaacgcggctacagcgaccaagttgcagacagcatgtactatc

SEQ ID NO: 135143 - DNA, 75 bp, synthetic construct
  source 1..75: mol_type = other DNA
cctgatgaatcttaaatgggatgctttgtctgttcttgttaaagcccttttcagcagtgaagtaaaaatatcgac

SEQ ID NO: 135144 - DNA, 75 bp, synthetic construct
  source 1..75: mol_type = other DNA
tgggcaaagattggatttaaaaatgatgccgacagcgatactgattcatacatgtggtttgaaacaggcgacaac

SEQ ID NO: 135145 - DNA, 75 bp, synthetic construct
  source 1..75: mol_type = other DNA
cgcggcgtgtttaacgtgccaagttttgttgccacgctgggtttatggagcgccctgcgcggaatggggctgttt

SEQ ID NO: 135146 - DNA, 75 bp, synthetic construct
  source 1..75: mol_type = other DNA
cagcggtgataccggactgcgcgatgtccagcgtctggctgaagccaacgactttcctcccgtcgatgaaaccaa

SEQ ID NO: 135147 - DNA, 75 bp, synthetic construct
  source 1..75: mol_type = other DNA
tggcagaagcgttcctcgaaaaaaatcccggcgcgaagatcatccacgatccgcgtctctcctggaacaccgttg

SEQ ID NO: 135148 - DNA, 75 bp, synthetic construct
  source 1..75: mol_type = other DNA
ggaaaacgctgggcgaactggtgcgcgaccggatggcagcgtttccggcaagcggtgagatcaacagcaaactgg

SEQ ID NO: 135149 - DNA, 75 bp, synthetic construct
  source 1..75: mol_type = other DNA
agaaaacgctgggcgaactggtacgcgaccggatggcagcgtttccggcaagcggtgagatcaacagcaaactgg

SEQ ID NO: 135150 - DNA, 75 bp, synthetic construct
  source 1..75: mol_type = other DNA
ccggcaccgaagagatctatttcgccacgttccatctcggcgtggatggcggcattgaagttaccgccagccata

SEQ ID NO: 135151 - DNA, 75 bp, synthetic construct
  source 1..75: mol_type = other DNA
accgaaccggtggtgcggttgaatgtagaatcgcgcggcgatattaaactcatgattatgaaaatagatgaaata

SEQ ID NO: 135152 - DNA, 75 bp, synthetic construct
  source 1..75: mol_type = other DNA
tgattcgccggatggtcagcaacatgtatgttctgcaaagctcgttgcagtggcaggcgtggcacgacaccttaa

SEQ ID NO: 135153 - DNA, 75 bp, synthetic construct
  source 1..75: mol_type = other DNA
gattaatgaccgctttggtcatcaggcgggcgaccgtgtgctttctcatgctgccgggttaattagcagttcctt

SEQ ID NO: 135154 - DNA, 75 bp, synthetic construct
  source 1..75: mol_type = other DNA
gcattgcattaaccctgctgtgggcgctctttaccaccatgttactcatctcctggtatgtgattcgccggatgg

SEQ ID NO: 135155 - DNA, 75 bp, synthetic construct
  source 1..75: mol_type = other DNA
aacgtggaatcgcgcggcgacaccccgctgatgcaggcgcgaacgcaggatattctggcgctgcttaagcagtag

SEQ ID NO: 135156 - DNA, 75 bp, synthetic construct
  source 1..75: mol_type = other DNA
tggtacgcgaaggggcttgcccgatcagcggcgataccggactgcgcgacgtccagcgtctggcagaagccaacg

SEQ ID NO: 135157 - DNA, 75 bp, synthetic construct
  source 1..75: mol_type = other DNA
atgatgaatcgagtaattccgctccctgatgagcaggcaacattagacctgggcgagcgggtagcgaaagcctgc

SEQ ID NO: 135158 - DNA, 75 bp, synthetic construct
  source 1..75: mol_type = other DNA
ttccggcgtaacggatctcaacatcgaagatggggtggttggcttgcttatttcctgattgttgctgcggccagt

SEQ ID NO: 135159 - DNA, 75 bp, synthetic construct
  source 1..75: mol_type = other DNA
ttattgccaatgcggttatctgttcaggtatagcgatccgcgtcggtacattccggcgtaatgggtcgcaacatc

SEQ ID NO: 135160 - DNA, 75 bp, synthetic construct
  source 1..75: mol_type = other DNA
tgcgtggttgttaccggcatggaaactctccactgtacgcacgcccgttcgcgaaggcatgacccgcgtgatgcg

SEQ ID NO: 135161 - DNA, 75 bp, synthetic construct
  source 1..75: mol_type = other DNA
attccagttcgtgtcgcttatgcaatctggttacatacgccaatggctgtggatttatctgaggtcattatcaac

SEQ ID NO: 135162 - DNA, 75 bp, synthetic construct
  source 1..75: mol_type = other DNA
cgaccgttatcgcaggggaagatgcgcagaaagatgttggcgaagcgaaatacaacccgttcgctgatttaaaag

SEQ ID NO: 135163 - DNA, 75 bp, synthetic construct
  source 1..75: mol_type = other DNA
ttgtctactccaatctgcgtgaacttaccgttcaccatatcgatcacgaccacaccaataacccggaagatggta

SEQ ID NO: 135164 - DNA, 75 bp, synthetic construct
  source 1..75: mol_type = other DNA
cctacgacattcgcggcaaattaggcgaagagctgaatgaagatattgcgtggcgtattggccgcgcctatggcg

SEQ ID NO: 135165 - DNA, 75 bp, synthetic construct
  source 1..75: mol_type = other DNA
tccacgatccgcgtctttcctggaacaccgttgatgtagtgactgccgcaggcggcaccccggtgatgtcgaaaa

SEQ ID NO: 135166 - DNA, 75 bp, synthetic construct
  source 1..75: mol_type = other DNA
acagagccagtattacgtttaaatgttgaatccaagaaggataaagatttaatggaagaaaagactaaggaatta

SEQ ID NO: 135167 - DNA, 75 bp, synthetic construct
  source 1..75: mol_type = other DNA
gatcaggaaaacagccgtatttttctgccgaaactgggctggatgcgctaccggaacagccgccaggtcacgggt

SEQ ID NO: 135168 - DNA, 75 bp, synthetic construct
  source 1..75: mol_type = other DNA
gaggcggtactccgtacagcgttgttaggaaagacagaagacgaatacgttgatttcttcctgtcagggctacgc

SEQ ID NO: 135169 - DNA, 75 bp, synthetic construct
  source 1..75: mol_type = other DNA
tttcatgtctcaagggagaacaggtattttgcttcttttaggcatccaaggaactatattaactgcggtatcatt

SEQ ID NO: 135170 - DNA, 75 bp, synthetic construct
  source 1..75: mol_type = other DNA
gggcagactgtcacagataatgtaatgcgttcacccagaactatttcaatcagtggtgtggttgtagttggtgaa

SEQ ID NO: 135171 - DNA, 75 bp, synthetic construct
  source 1..75: mol_type = other DNA
gtatcagtaaactcaagaggggtaaatatcggctcaggactgggtgctacagcaggagcaagtcaggcgtggact

SEQ ID NO: 135172 - DNA, 75 bp, synthetic construct
  source 1..75: mol_type = other DNA
gatgcgatggttgcgaatattgaaaatggcgctgctttccagtgggcaaatgacgcagaaaacacagccggtgat

SEQ ID NO: 135173 - DNA, 75 bp, synthetic construct
  source 1..75: mol_type = other DNA
atgatttactctaaccaaatcaaatatagtggcaaagatggtatctattttcaccttagagataatgtagatgcc

SEQ ID NO: 135174 - DNA, 75 bp, synthetic construct
  source 1..75: mol_type = other DNA
gcgggtaacgtgactactgaacgcaataacgcacctatgctgatgtgtcaggaactgtacagttactcagcgtct

SEQ ID NO: 135175 - DNA, 75 bp, synthetic construct
  source 1..75: mol_type = other DNA
acagtggtaaagatggcgtttactttcatctacaaggccagccagataatttcttgtcactatcagctactgaga

SEQ ID NO: 135176 - DNA, 75 bp, synthetic construct
  source 1..75: mol_type = other DNA
gttgacgtttactacggttacaacggtgattcgcgtaatattgcgacttttaatttaaaaataatgatgccatcc

SEQ ID NO: 135177 - DNA, 75 bp, synthetic construct
  source 1..75: mol_type = other DNA
tgcttgcggctctgttaggacaacaactgcaaccggttgataagcaaatgctgaataatttaaaaactaatgcta

SEQ ID NO: 135178 - DNA, 75 bp, synthetic construct
  source 1..75: mol_type = other DNA
cctattccggctatctcacacaaatacactactatcttgagatactgactcctgacggtgttgagtttggtgttt

SEQ ID NO: 135179 - DNA, 75 bp, synthetic construct
  source 1..75: mol_type = other DNA
tgctgattatgcttggtgggccaaacccggcggaagtgcgtgctggtctggatgcgatggttgcgcatattgaaa

SEQ ID NO: 135180 - DNA, 75 bp, synthetic construct
  source 1..75: mol_type = other DNA
tagcctgaaaataatgatgccatctggggtctacgttggagaatataagagtgaaggcattttatacggaggtga

SEQ ID NO: 135181 - DNA, 75 bp, synthetic construct
  source 1..75: mol_type = other DNA
agagattgaatcttacttttcttgtccatggttggttattatgaatgactctgaagcctctccagggggcgtgac

SEQ ID NO: 135182 - DNA, 75 bp, synthetic construct
  source 1..75: mol_type = other DNA
agattaacgttaagaaagtaatttctctacaaaattccagtttgaatgttccttatgagcagattatttacttgc

SEQ ID NO: 135183 - DNA, 75 bp, synthetic construct
  source 1..75: mol_type = other DNA
cctgcttcctgccatcattgcacaaaacgtctggcaccgttttccactttactggcagcgtctgacgttgctgtt

SEQ ID NO: 135184 - DNA, 75 bp, synthetic construct
  source 1..75: mol_type = other DNA
ttctcagatgccgctaatgcgcaagcttcaaaagtgcttaagtcgggtaatgctctacggaagtttagtgtgaat

SEQ ID NO: 135185 - DNA, 75 bp, synthetic construct
  source 1..75: mol_type = other DNA
gggctcagacaggcgcttgagcaggaagccgctgatctcatgtcagcggtgaccgcaatccgtaatattcacgag

SEQ ID NO: 135186 - DNA, 75 bp, synthetic construct
  source 1..75: mol_type = other DNA
ccgtcatcgacggcggcaacctggcccagaacatcatgacggccatcgagtcggtggcgcagacgctcaagcaga

SEQ ID NO: 135187 - DNA, 75 bp, synthetic construct
  source 1..75: mol_type = other DNA
gcattttatagtgagccttttatccgattgatattcggtgatgaatggtatctgacgggaatagtattaaaatgg

SEQ ID NO: 135188 - DNA, 75 bp, synthetic construct
  source 1..75: mol_type = other DNA
tcaattagtagagaacttcatcgacactcttgaaagctggcgtgaccagaagcaaattatttcggttatctgtaa

SEQ ID NO: 135189 - DNA, 75 bp, synthetic construct
  source 1..75: mol_type = other DNA
ccacttaagagataatgtagatgccttcttaaccttatcagcaactgaaaacatggaatttgacagccctatgca

SEQ ID NO: 135190 - DNA, 75 bp, synthetic construct
  source 1..75: mol_type = other DNA
gtaaagatggaattaaaattgatgactccattattacaagctttaaagcctctaaagatgttggtatttcaaacg

SEQ ID NO: 135191 - DNA, 75 bp, synthetic construct
  source 1..75: mol_type = other DNA
cggtggtgcaacttctaaaaagaacactggtaacgtgactactgaacgcaataacgcacctatgttgatgtgtca

SEQ ID NO: 135192 - DNA, 75 bp, synthetic construct
  source 1..75: mol_type = other DNA
tccggtagtatcctcatctcaagagataataagctggtggaaaacttcatcgacactctggaaagctggcgtgac

SEQ ID NO: 135193 - DNA, 75 bp, synthetic construct
  source 1..75: mol_type = other DNA
aagacggaatctattttcaccttagagataatgtagaatcttttcttgccttaacagctactgaacagatggact

SEQ ID NO: 135194 - DNA, 75 bp, synthetic construct
  source 1..75: mol_type = other DNA
ccacccacaaccaccccacacaaaatatatccggcgcctaaaaaacagaaaaagaacccactcatgccccccccc

SEQ ID NO: 135195 - DNA, 75 bp, synthetic construct
  source 1..75: mol_type = other DNA
ggcggtaaattgccaatgcacgcttctggtgtgggtaaagcctttttggcccaactaagtgaagaccaggtgacg

SEQ ID NO: 135196 - DNA, 75 bp, synthetic construct
  source 1..75: mol_type = other DNA
atgcttcatactaccaatcccgttatcaaacacaaagccggtttgctcaatctggctgaaaaactcagcaacgta

SEQ ID NO: 135197 - DNA, 75 bp, synthetic construct
  source 1..75: mol_type = other DNA
tgtggagacggagagtattggcccctatattggcccgcaggcgcgtaactcgacctgcccggtttcagtggccac

SEQ ID NO: 135198 - DNA, 75 bp, synthetic construct
  source 1..75: mol_type = other DNA
atgcctatacccacgcgacgctggtgtctcctgtgcatttaaaagaggacctcgcccagacgcgtaaacgtggct

SEQ ID NO: 135199 - DNA, 75 bp, synthetic construct
  source 1..75: mol_type = other DNA
ccaactgagcgaagaacaggtgacgaaactgctgcatcgcaaagggttacatgcctatacccacgcaacgctggt

SEQ ID NO: 135200 - DNA, 75 bp, synthetic construct
  source 1..75: mol_type = other DNA
actgaccgattaccgcaaccggaatgtcatcgccgtaccagacagtctgaccagccagctgctggcggcactgaa

SEQ ID NO: 135201 - DNA, 75 bp, synthetic construct
  source 1..75: mol_type = other DNA
agcggtggatgcattagccgggcagagcgcgaaattgctcaacggtattccgattgatgaagatgatttctttgg

SEQ ID NO: 135202 - DNA, 75 bp, synthetic construct
  source 1..75: mol_type = other DNA
tcggagggggcttaccatggtgagtattatcaggatggaaaggcgttgctggtacgacctgttccgaaccgcgta

SEQ ID NO: 135203 - DNA, 75 bp, synthetic construct
  source 1..75: mol_type = other DNA
atactgccgctttgtggcgcagatgatcaccttctccacctccggctgtgacagttcgaaagtgacggtcacacc

SEQ ID NO: 135204 - DNA, 75 bp, synthetic construct
  source 1..75: mol_type = other DNA
agcggtcgatgcgttagcggggcagagtgctaaattgctcaacggcattccgattgacgaagaagatttcttcgg

SEQ ID NO: 135205 - DNA, 75 bp, synthetic construct
  source 1..75: mol_type = other DNA
gaagcactgcgtccgctggcggcagaagaagcgcgtgatgcgtttgctcaaagcgaagatattgagctttctgaa

SEQ ID NO: 135206 - DNA, 75 bp, synthetic construct
  source 1..75: mol_type = other DNA
aacatcgatgtcaaactgccctgggcttgctgagtatgatcaaaaatcggataaaaccaagtgggattgttacga

SEQ ID NO: 135207 - DNA, 75 bp, synthetic construct
  source 1..75: mol_type = other DNA
gattgagaaaacgctcccgaccttcctgatggaaaacggcaggctttgcgacggcagccagatggatgaccgcgg

SEQ ID NO: 135208 - DNA, 75 bp, synthetic construct
  source 1..75: mol_type = other DNA
tcgtggtgaaggtgaataccagcagtcggcaaccgattgattctacgtgtcgttttcagtatgtattgaatgagt

SEQ ID NO: 135209 - DNA, 75 bp, synthetic construct
  source 1..75: mol_type = other DNA
tgttataatgcccctctcggtgtgtactatgacggtccggtgcacggttgcccgtggctgatttcgacgtatact

SEQ ID NO: 135210 - DNA, 75 bp, synthetic construct
  source 1..75: mol_type = other DNA
tggcaatttagacgtaataagctggaatggcccctcttcaattcccgcgccgactatttatctggatcattcgga

SEQ ID NO: 135211 - DNA, 75 bp, synthetic construct
  source 1..75: mol_type = other DNA
cctggggagtgtaggggctacctatgtcggccctaaagtccataactccacctgcccgtcaattccgctgacgac

SEQ ID NO: 135212 - DNA, 75 bp, synthetic construct
  source 1..75: mol_type = other DNA
atcaccgatagtggatgatgcctattgcccaggtatgaccgctggctggacttgtcatagacttcctgtgaatat

SEQ ID NO: 135213 - DNA, 75 bp, synthetic construct
  source 1..75: mol_type = other DNA
gcagagtgatggacgatcgaggtgcatactgccgctttgtggcgcaaatgatcaccttctccacctccggctgtg

SEQ ID NO: 135214 - DNA, 75 bp, synthetic construct
  source 1..75: mol_type = other DNA
agctacacgacatggtggtgcatgttgataccagcagccgccagcccattgattccacctgccgcttccagtaca

SEQ ID NO: 135215 - DNA, 75 bp, synthetic construct
  source 1..75: mol_type = other DNA
aaagtctacaatggtgaatatcagtctgatggtacgttccgcactggtacctatatgacgaataccgcctggaat

SEQ ID NO: 135216 - DNA, 75 bp, synthetic construct
  source 1..75: mol_type = other DNA
cccatcactgacaaacaactgcacgacatggtggtgcatgttgataccagcagccgccagcccattgattccacc

SEQ ID NO: 135217 - DNA, 75 bp, synthetic construct
  source 1..75: mol_type = other DNA
atgaaaaaaactaacttgctgtttcgtcttttgatcctgatggtttttatgctcggtagtcgggccgggatgggg

SEQ ID NO: 135218 - DNA, 75 bp, synthetic construct
  source 1..75: mol_type = other DNA
gaaggggcttacgaggtggtgggagtctttgaccggatggaggacaagcgtgatgccatgcagtcgctgctactg

SEQ ID NO: 135219 - DNA, 75 bp, synthetic construct
  source 1..75: mol_type = other DNA
aacggctgcgtctgtggccagtctctgggggaagtgcgtgttccgcaccggggaaatgtcgtggatacagtgatt

SEQ ID NO: 135220 - DNA, 75 bp, synthetic construct
  source 1..75: mol_type = other DNA
aacggctgcgtctgtggtcagtctctgggggaagtgcgtgttccgcaccggggaaatgtcgtggacacagtgatt

SEQ ID NO: 135221 - DNA, 75 bp, synthetic construct
  source 1..75: mol_type = other DNA
cgctgttgaaatccctggaaagctggttgcgtgaaaagatgaagaccctgttcttcggctctggccatggtggtg

SEQ ID NO: 135222 - DNA, 75 bp, synthetic construct
  source 1..75: mol_type = other DNA
atgtaaatcagatccgtcgggagcgcccactgacacgcgaagaactgatgtaccacgtcccggggattttcgggg

SEQ ID NO: 135223 - DNA, 75 bp, synthetic construct
  source 1..75: mol_type = other DNA
gaaggggcttacgaggtggtgggagtgtttgaccggatcgaggacaagcgtgatgccatgcagtcgctgctactg

SEQ ID NO: 135224 - DNA, 75 bp, synthetic construct
  source 1..75: mol_type = other DNA
cgcagaaccttatcgcattaaaactgtgcgtaacaaaggctatctttttgcgcctcatgcatgggatagtgacaa

SEQ ID NO: 135225 - DNA, 75 bp, synthetic construct
  source 1..75: mol_type = other DNA
atgaacactatcgtatttgtggaagatgatgcggaagtcggttcactgattgccgcgtacctggcaaaacatgat

SEQ ID NO: 135226 - DNA, 75 bp, synthetic construct
  source 1..75: mol_type = other DNA
ttacttcagattcgtctgccagaacggctgcgtctgcggccagtctctgggggaagtccgtgttccccaccgggg

SEQ ID NO: 135227 - DNA, 75 bp, synthetic construct
  source 1..75: mol_type = other DNA
cgtgccattcacagcatcgacaccgacattaagctcaaccgggcgttgtgggtgatggcagaaacactgctggag

SEQ ID NO: 135228 - DNA, 75 bp, synthetic construct
  source 1..75: mol_type = other DNA
gcgtgttccgcatcggggaaatgtggtggacagagtcattgaaggggcttacgaggtggtgggcgtgtttgaccg

SEQ ID NO: 135229 - DNA, 75 bp, synthetic construct
  source 1..75: mol_type = other DNA
ctcgatatcatgctaccaggcaaggacggcatgactgtctgtcgtgatttacgcactaaatggagcgggcctata

SEQ ID NO: 135230 - DNA, 75 bp, synthetic construct
  source 1..75: mol_type = other DNA
gcattttatagtaaaccttttgtaagtattgtttttggtgagcaatggcatattacaggtgatattcttaaatgg

SEQ ID NO: 135231 - DNA, 75 bp, synthetic construct
  source 1..75: mol_type = other DNA
attatctgtggcgtccgggcattgagctgggtcagccttcttctctggcagggtatggcatcgttgaaaatgagc

SEQ ID NO: 135232 - DNA, 75 bp, synthetic construct
  source 1..75: mol_type = other DNA
gcctttaccagtggcgacggcagcaaaaaaccaaaaggttttctggcttatgagtccactgatgaagatgacaag

SEQ ID NO: 135233 - DNA, 75 bp, synthetic construct
  source 1..75: mol_type = other DNA
cccgcaggctacccagaaaatgctggacgatgccttcttcaacgtggaggcctggatcaacagcgagctggcaac

SEQ ID NO: 135234 - DNA, 75 bp, synthetic construct
  source 1..75: mol_type = other DNA
cctggatcaacagcgagctggcaaccgaatttgccgaacaggaagaaattgcctttaccaccggcgatggcacca

SEQ ID NO: 135235 - DNA, 75 bp, synthetic construct
  source 1..75: mol_type = other DNA
acctcaaaactgggcctgattgaacctttcatgggggaaatctacggtaacccgcaggccacccagaaaatgctg

SEQ ID NO: 135236 - DNA, 75 bp, synthetic construct
  source 1..75: mol_type = other DNA
tgacttacggcatcgtcatcgaccgctcgatgattgccaatattattgataccactccggcagaaagttatgcgc

SEQ ID NO: 135237 - DNA, 75 bp, synthetic construct
  source 1..75: mol_type = other DNA
attctcaaccttgttgggattaaccggcgtcgagacgaagtattatcaggccgcggatgatattctgcagacctg

SEQ ID NO: 135238 - DNA, 75 bp, synthetic construct
  source 1..75: mol_type = other DNA
gcaataacaaagagctggtgaagtccttaagcccctctaacagcattgttgccagctggtcatggtactcccatc

SEQ ID NO: 135239 - DNA, 75 bp, synthetic construct
  source 1..75: mol_type = other DNA
gccagctggtcatggtactcccatcagcgactggcaaatctgccgctggtgcgaattggtgaagacgcccaccgc

SEQ ID NO: 135240 - DNA, 75 bp, synthetic construct
  source 1..75: mol_type = other DNA
catcatgacttatggcatcgtcatcgaccgttcgatgattgccaatatcattgataccacaccggcggaaagtta

SEQ ID NO: 135241 - DNA, 75 bp, synthetic construct
  source 1..75: mol_type = other DNA
tgatgacaccgcaaatgttattaacgctgggattcagcggcgtgcttgctgcgctgattgcctgctggataaaaa

SEQ ID NO: 135242 - DNA, 75 bp, synthetic construct
  source 1..75: mol_type = other DNA
tcgcgggctattccgccttcttcaccgcgctctctccagacgctcaggacgatatcatcgcccgtactgaacata

SEQ ID NO: 135243 - DNA, 75 bp, synthetic construct
  source 1..75: mol_type = other DNA
tgccgcactggcggatgacttcgacggcctgacgcacgagcagctgcgtcagcggctgattaacggtgcgccgaa

SEQ ID NO: 135244 - DNA, 75 bp, synthetic construct
  source 1..75: mol_type = other DNA
agacctatatcgacgagctgaagcagtaccataacccgcgctacggtcgtggcccgatcggcggcaactattatg

SEQ ID NO: 135245 - DNA, 75 bp, synthetic construct
  source 1..75: mol_type = other DNA
gcaacgccggacggacgtaaagcgcataccccgctggcagaaggcgcaagcccggcctccggtactgaccatctc

SEQ ID NO: 135246 - DNA, 75 bp, synthetic construct
  source 1..75: mol_type = other DNA
gcgaacacgccatcgaattgctgcatagctgctggttgaaattgctggaagtgaacaagatccgctccggctcac

SEQ ID NO: 135247 - DNA, 75 bp, synthetic construct
  source 1..75: mol_type = other DNA
tagcaggctattccgccttcttcaccgcgctctctcctgacgctcaggacgatatcatcgcccgtaccgaacata

SEQ ID NO: 135248 - DNA, 75 bp, synthetic construct
  source 1..75: mol_type = other DNA
cggcgctgacttaccgttatggtgatgaacatcaacccgtcaccactgccgacattctgacaccacgacgccggg

SEQ ID NO: 135249 - DNA, 75 bp, synthetic construct
  source 1..75: mol_type = other DNA
ttcacagcattgacactgacattaagctcaaccgcgcattgtgggtgatggcggaaaccctgctggagagcctgc

SEQ ID NO: 135250 - DNA, 75 bp, synthetic construct
  source 1..75: mol_type = other DNA
cccgggccattcacagcattgataccgacattaagctcaaccgtgcattgtgggtgatggcagaaacgatgctgg

SEQ ID NO: 135251 - DNA, 75 bp, synthetic construct
  source 1..75: mol_type = other DNA
cgggtacgtcatctatctccgctaacgtaccgtttggcgcgcagactatggcaacgccggacgggcgtaaagccc

SEQ ID NO: 135252 - DNA, 75 bp, synthetic construct
  source 1..75: mol_type = other DNA
ccgccaccggcacgccaggctctggcacaggcggcgctgacttaccgttatggtgatgaacatcagcccgtcacc

SEQ ID NO: 135253 - DNA, 75 bp, synthetic construct
  source 1..75: mol_type = other DNA
gatctactggcaagagtgaaattgagcaacgataaactgaaagatttacgtgagcgtaaagccagtctggaagct

SEQ ID NO: 135254 - DNA, 75 bp, synthetic construct
  source 1..75: mol_type = other DNA
atgcgaaccagatacgccgtgaccgtccgctgacacatgaagagctgatgcaccatgtgccggggattttcgggg

SEQ ID NO: 135255 - DNA, 75 bp, synthetic construct
  source 1..75: mol_type = other DNA
ctggacaacctatcagcgcattcaggagaacctgattaaaggtggtctgaacgggcgcaatgcgaaaggaggacg

SEQ ID NO: 135256 - DNA, 75 bp, synthetic construct
  source 1..75: mol_type = other DNA
cctccaccagcacaggcggcgctggcgcaagctgcgctgacgtatcgttttggcgaagagcatcagccggtgacg

SEQ ID NO: 135257 - DNA, 75 bp, synthetic construct
  source 1..75: mol_type = other DNA
cgtctgcggtcagtctctgggggaagtgcgtgttccacaccggggaaatgtggtggagaaagttatcgaaggggc

SEQ ID NO: 135258 - DNA, 75 bp, synthetic construct
  source 1..75: mol_type = other DNA
atcctgctgaactcccatgacggtacctccagctaccagatgctgccggattacttcaggttcgtctgccagaac

SEQ ID NO: 135259 - DNA, 75 bp, synthetic construct
  source 1..75: mol_type = other DNA
gtggaccacgtaccagcgaattcaggagaacctgattaagggtgggctcagtggccgtaatgccaaaggaggacg

SEQ ID NO: 135260 - DNA, 75 bp, synthetic construct
  source 1..75: mol_type = other DNA
ggcattgacggggacgtgaagcttaaccgtgcgctgtgggtgatggcagaaacactgctcacgcaactgcagtag

SEQ ID NO: 135261 - DNA, 75 bp, synthetic construct
  source 1..75: mol_type = other DNA
tgcgtctgcggcgggccggagagataaacggacaacatgtccctgaaattattctgctcaactcccatgacggta

SEQ ID NO: 135262 - DNA, 75 bp, synthetic construct
  source 1..75: mol_type = other DNA
gagcaacatttgtttggcagggctgcactgatggtcaggtatgaggatgagaataagaataagacaccagtgacg

SEQ ID NO: 135263 - DNA, 75 bp, synthetic construct
  source 1..75: mol_type = other DNA
gcgcggtcaaccttgtacgccgtgaccgcccgttaacccgcgaggaactggcgcactatgtgcccagcgtcttca

SEQ ID NO: 135264 - DNA, 75 bp, synthetic construct
  source 1..75: mol_type = other DNA
tgctgcgcctacgtcgggaggggcaaattaccggtaaacaggttccggaaattatcctgcttaactctcacgatg

SEQ ID NO: 135265 - DNA, 75 bp, synthetic construct
  source 1..75: mol_type = other DNA
tgttacgtctgcgccgggagggacaaattactggcaagcaagtcccagaaatcattctgctcaattctcatgacg

SEQ ID NO: 135266 - DNA, 75 bp, synthetic construct
  source 1..75: mol_type = other DNA
ctggattacccggaactgctcacgcattccggtccatcgatcctttcccccggcaatcattacataaacagataa

SEQ ID NO: 135267 - DNA, 75 bp, synthetic construct
  source 1..75: mol_type = other DNA
agatatttcctctggcgacggtattgccatggcctggcgtgctggttgccgggtcgccaatctcgaatttaatca

SEQ ID NO: 135268 - DNA, 75 bp, synthetic construct
  source 1..75: mol_type = other DNA
acgctcagctatcgttttttgctggtaacgactatgtcaccagacgcacccttgttgatgcagctcacgaagagg

SEQ ID NO: 135269 - DNA, 75 bp, synthetic construct
  source 1..75: mol_type = other DNA
tatggaaccgaaataaagaaaaggtggaaacctgccacgcaaaagcggtggtgctggcaaccggcggtgcgtcga

SEQ ID NO: 135270 - DNA, 75 bp, synthetic construct
  source 1..75: mol_type = other DNA
gtgatgtgttgattatcggtagtggcgctgccgggctttcactggcactacgtctggcagataagcatcatgtca

SEQ ID NO: 135271 - DNA, 75 bp, synthetic construct
  source 1..75: mol_type = other DNA
ggctggggatagatctcacgaaagaaccggtgccgattgtgcctgctgcacattatacctgcggtggtgtaatgg

SEQ ID NO: 135272 - DNA, 75 bp, synthetic construct
  source 1..75: mol_type = other DNA
ggatgctctttacaagcagctggaagccgcagagaagcgcatagcagaactggaagcacgggaaacaaaaccagc

SEQ ID NO: 135273 - DNA, 75 bp, synthetic construct
  source 1..75: mol_type = other DNA
ttgctggctaaatatcagattgaagcgtggcaacttatttttgaagtcaccgaaagtaatgctctgaccaatgtt

SEQ ID NO: 135274 - DNA, 75 bp, synthetic construct
  source 1..75: mol_type = other DNA
ctaatccagacgaactgatgatcgaagtcgatctctgctatgagctggacccgtatgaattaaaactggatgaga

SEQ ID NO: 135275 - DNA, 75 bp, synthetic construct
  source 1..75: mol_type = other DNA
gatattgacagcgtgggaagcttcaaggctgactacaaacgtcttaagggtgagattagtgcgcatatcgcctca

SEQ ID NO: 135276 - DNA, 75 bp, synthetic construct
  source 1..75: mol_type = other DNA
aaatagaaatcgcgatgaaggctattggtgtaccggttcagtggactaatggcgatgcagaaaagcgcatgactg

SEQ ID NO: 135277 - DNA, 75 bp, synthetic construct
  source 1..75: mol_type = other DNA
cgcattgcagaactggaagcacgggaaataaaaccagccaaaggtgaagttcttgtcgttgtctctggttttact

SEQ ID NO: 135278 - DNA, 75 bp, synthetic construct
  source 1..75: mol_type = other DNA
ttcgatcagacggttcagcttggtcaggttcgtacagaaaagctaaaagccgacggggataaaagtgctgctgtt

SEQ ID NO: 135279 - DNA, 75 bp, synthetic construct
  source 1..75: mol_type = other DNA
tattttcagctctgaccctgggtgttgcgacaagtgcgtctgccgcacctgctactgtcaatggtggtacagtcc

SEQ ID NO: 135280 - DNA, 75 bp, synthetic construct
  source 1..75: mol_type = other DNA
gcgtgacgccgaaatggcggcgctggatattgttttcccgcaatatggttttgcccaacacaaagggtatccaac

SEQ ID NO: 135281 - DNA, 75 bp, synthetic construct
  source 1..75: mol_type = other DNA
ctggtgctggattttggtagtcagcaagaagacaacaatgccgtgcttaaagcgcgtcaaatcactattaccgcc

SEQ ID NO: 135282 - DNA, 75 bp, synthetic construct
  source 1..75: mol_type = other DNA
aatactggcaataaccccggataaactggtgctggatttcggcagtcaagccgaagataacaacgctgtgttaaa

SEQ ID NO: 135283 - DNA, 75 bp, synthetic construct
  source 1..75: mol_type = other DNA
ggtttgtacaacgacgccgatatttccgcatctccgccccactccatccgccttatttttgccagaccaaactgg

SEQ ID NO: 135284 - DNA, 75 bp, synthetic construct
  source 1..75: mol_type = other DNA
agagccgggggctgcatttcacgctggattacccggagttgctcactcactctggcccatcgatcctttcccccg

SEQ ID NO: 135285 - DNA, 75 bp, synthetic construct
  source 1..75: mol_type = other DNA
ggaagataccttaattgctggtgccggaatttgcgatcgccatgcagttgaatttgttgccagcaatgcgcgttc

SEQ ID NO: 135286 - DNA, 75 bp, synthetic construct
  source 1..75: mol_type = other DNA
tgtcgcccgcgccattgaccatgaaatgaaacgcctcggcgcagattgtatgttccttgatatcagccataagcc

SEQ ID NO: 135287 - DNA, 75 bp, synthetic construct
  source 1..75: mol_type = other DNA
ggatgaaagccgcgttgagaaccctgacgaacgggtagtaattcagcataactggcacgagctacggctgtttat

SEQ ID NO: 135288 - DNA, 75 bp, synthetic construct
  source 1..75: mol_type = other DNA
tatcagtacaccaccaatccggatatttcttctggcgatggcattgctatggcgtggcgcgcaggctgccgggtt

SEQ ID NO: 135289 - DNA, 75 bp, synthetic construct
  source 1..75: mol_type = other DNA
ctggattacccacagctactcacgcattccggtccatcgatcctttcccccagcaatcattacataaacagataa

SEQ ID NO: 135290 - DNA, 75 bp, synthetic construct
  source 1..75: mol_type = other DNA
gcgaccttgaaaaagagctgcttgagctgaaacgtccggcaggtggtgcgcaaaataaactggccaccgagcata

SEQ ID NO: 135291 - DNA, 75 bp, synthetic construct
  source 1..75: mol_type = other DNA
tggtgatgcgccaggaagccactgtgatcaccctcggtggctcggattataaaaaactggtgaatctgggcagca

SEQ ID NO: 135292 - DNA, 75 bp, synthetic construct
  source 1..75: mol_type = other DNA
cggataacagtacgttacgtttccgcctgtatgatttgtcgttaggcggcatgggcgcattactggaaacagcaa

SEQ ID NO: 135293 - DNA, 75 bp, synthetic construct
  source 1..75: mol_type = other DNA
gctgaaacgtccggcaggtggtgcgcaaaataaactggccaccgagcataaagaggcgtttgtgggcttcctgcg

SEQ ID NO: 135294 - DNA, 75 bp, synthetic construct
  source 1..75: mol_type = other DNA
ttgactccagtaagatcgattcccgcacgtttttaaaccttatcttgaatccaggcgaggctgctactgactgcg

SEQ ID NO: 135295 - DNA, 75 bp, synthetic construct
  source 1..75: mol_type = other DNA
agaaaagtattgtcagccatgacaccggacatgcgttggtaaaagccgtacctggtagcgggaaaacaaccacac

SEQ ID NO: 135296 - DNA, 75 bp, synthetic construct
  source 1..75: mol_type = other DNA
gcaatgatgaagatggcggttatgccattccggaagaactggatcgcaccattctgacgctactgaaagatgagg

SEQ ID NO: 135297 - DNA, 75 bp, synthetic construct
  source 1..75: mol_type = other DNA
cgtgaccgctgatgcgatcattaaactgatttacaccctgcgtaaggcgcaccgcagcggcgcgaagttcatgat

SEQ ID NO: 135298 - DNA, 75 bp, synthetic construct
  source 1..75: mol_type = other DNA
aggaaaaaagcaagctggccgaacaggtggaaagcctgaacgggcaaatcagcgagctggagaacctgaaaagcg

SEQ ID NO: 135299 - DNA, 75 bp, synthetic construct
  source 1..75: mol_type = other DNA
gagcttgagcgtaaggcgctgcaggtgggcaatgatgaagatggtggttatgccattccggaagaactggatcgc

SEQ ID NO: 135300 - DNA, 75 bp, synthetic construct
  source 1..75: mol_type = other DNA
tcaaaactggggctgattgaaccctttatgggggaaatctacggcaacccgcaggccacccagaaaatgctcgat

SEQ ID NO: 135301 - DNA, 75 bp, synthetic construct
  source 1..75: mol_type = other DNA
cacggcttccggatgggtgggggaaacggatacgcgatcccagactgccacctccaaactggagctgattgaacc

SEQ ID NO: 135302 - DNA, 75 bp, synthetic construct
  source 1..75: mol_type = other DNA
cactggaaaatcataacaatctgttgacccaaaacgaggtattcacactccacggtcagcaatacaccattctgg

SEQ ID NO: 135303 - DNA, 75 bp, synthetic construct
  source 1..75: mol_type = other DNA
atcggtggcggcgaggtggctgtgacactggaaaatcataacaatctgttgacccaaaacgaggtattcacactc

SEQ ID NO: 135304 - DNA, 75 bp, synthetic construct
  source 1..75: mol_type = other DNA
tgaggtagccaattataacccaatatttgagggattatgcatttcaaatcatttaactcattataaatcattaaa

SEQ ID NO: 135305 - DNA, 75 bp, synthetic construct
  source 1..75: mol_type = other DNA
aggaagtctcagccctgctggttaagctgtttgaaatcgatccgcaggacatcaaacctgaagcgcgactgtacg

SEQ ID NO: 135306 - DNA, 75 bp, synthetic construct
  source 1..75: mol_type = other DNA
ttacaatattaaccgagccagataacgtagaacgtatgctttctttaaaaggcattacgtgtataaatatggtta

SEQ ID NO: 135307 - DNA, 75 bp, synthetic construct
  source 1..75: mol_type = other DNA
cgatatcactggagtacagtgggctgctgtcacaaagctatcaggacaacaggctcaatgccggtttgagctggc

SEQ ID NO: 135308 - DNA, 75 bp, synthetic construct
  source 1..75: mol_type = other DNA
ggatgcagagcaccggcagtacgttaagcccatgcgttatgatgcgagtattagtgaggtgttccctgacttcta

SEQ ID NO: 135309 - DNA, 75 bp, synthetic construct
  source 1..75: mol_type = other DNA
gaggtatctctgcacgagctcatcagatagtgcttatgctggtgagtgataactggatacctctggactcctcct

SEQ ID NO: 135310 - DNA, 75 bp, synthetic construct
  source 1..75: mol_type = other DNA
tggcaaaaaagcagccagactaaaagaagcttacattgcaaaatttaacgcaatggaagaagtactccacaaaca

SEQ ID NO: 135311 - DNA, 75 bp, synthetic construct
  source 1..75: mol_type = other DNA
ccttcttgactttcttgaggaagacatttggatttctgggataagtggaagacgctttaaatcgaattcaaagcg

SEQ ID NO: 135312 - DNA, 75 bp, synthetic construct
  source 1..75: mol_type = other DNA
ccaagtggctaaagatgtgtcgccatcggccttagctgcttcttctagctgcgctctgaagtcttccggtaatcg

SEQ ID NO: 135313 - DNA, 75 bp, synthetic construct
  source 1..75: mol_type = other DNA
aggtgatgttttttcggttgattcttcgttggtcattgtgtgcgcctgtaaagcaatgcgccggagtacctcaca

SEQ ID NO: 135314 - DNA, 75 bp, synthetic construct
  source 1..75: mol_type = other DNA
gctgaattcccgtccaaccaggtattgtcggaaaaacgggcggcggaagtggcttcactgctgacgtccggtggt

SEQ ID NO: 135315 - DNA, 75 bp, synthetic construct
  source 1..75: mol_type = other DNA
ccggcagctgttcagggtggcgtgtcacagacgtcggcagacggtgatgcggacgtgaaaatgctcatggccatg

SEQ ID NO: 135316 - DNA, 75 bp, synthetic construct
  source 1..75: mol_type = other DNA
acaggctatgacggcattgttgcctgtcttcagcaggcaatggcggatatctttgttcggggcgtactgctggat

SEQ ID NO: 135317 - DNA, 75 bp, synthetic construct
  source 1..75: mol_type = other DNA
gggttgatgcggcgcaccggatgtttgccgaaaaagtggcgatgtataccgggttgtctgtggatgcggtcacgg

SEQ ID NO: 135318 - DNA, 75 bp, synthetic construct
  source 1..75: mol_type = other DNA
agtggcgatgtttaccggtctgtctgttgatgccgtcacgggaacagaggccgccgtttttgaaggtcagtccgg

SEQ ID NO: 135319 - DNA, 75 bp, synthetic construct
  source 1..75: mol_type = other DNA
tcctggcggctgcaccactggcggatgccgggccctcacttcgtgatcagatcatggccctggatgaggcaaaag

SEQ ID NO: 135320 - DNA, 75 bp, synthetic construct
  source 1..75: mol_type = other DNA
acgcccgggctgtgctggctgcgggatcaggtaaggccgaaccggtctctgcatccacaaccgccctgtttgaac

SEQ ID NO: 135321 - DNA, 75 bp, synthetic construct
  source 1..75: mol_type = other DNA
ttgaagcgttgccggcagaggttcgccaggacatgcagcagcggattgatgcggcgcgccggatgtttgccgaaa

SEQ ID NO: 135322 - DNA, 75 bp, synthetic construct
  source 1..75: mol_type = other DNA
ctggtgcaccggctgggtggtatgcggccattttccggaatgacaggctatgacggcattgtcgcctgtcttcag

SEQ ID NO: 135323 - DNA, 75 bp, synthetic construct
  source 1..75: mol_type = other DNA
agccgatcgcattatggcgtgtgaagaggctaaaggtcgtgaacaactggcggcaacgctggcggcgatgccgga

SEQ ID NO: 135324 - DNA, 75 bp, synthetic construct
  source 1..75: mol_type = other DNA
gctggcgtcggcctgctcccgacggctggttacccagacatcccgtatcggctccattggcgtgatgatgagcca

SEQ ID NO: 135325 - DNA, 75 bp, synthetic construct
  source 1..75: mol_type = other DNA
gacattgacagtccgggcgggcaggccgccggcgcgtttgactgcgctgacatgatttaccgcctccgtcagcag

SEQ ID NO: 135326 - DNA, 75 bp, synthetic construct
  source 1..75: mol_type = other DNA
gaacatttcatggcgaatcattcaccggcagcggtgcggggtggcgtgtcacagacgtcagcagacggtgatgcg

SEQ ID NO: 135327 - DNA, 75 bp, synthetic construct
  source 1..75: mol_type = other DNA
gccgatggtatgcagctggaggttaccgattatatgactggtggtccgcgtccggtaaagagttaccaggtgaaa

SEQ ID NO: 135328 - DNA, 75 bp, synthetic construct
  source 1..75: mol_type = other DNA
gcggtgcagggtggcgtgccacagacgtcagcagacggtgatgcggacgtgaaaatgctcatggccatgccatga

SEQ ID NO: 135329 - DNA, 75 bp, synthetic construct
  source 1..75: mol_type = other DNA
acaggctatgacggcattgtcgcctgtcttcagcaggcaatggcggatagccaggtgcggggcgtattgctggac

SEQ ID NO: 135330 - DNA, 75 bp, synthetic construct
  source 1..75: mol_type = other DNA
gctggatcgtttgatggaaacagcacccggtgcactcccagcaggtagcgcatcttctgatgccgctgacgattt

SEQ ID NO: 135331 - DNA, 75 bp, synthetic construct
  source 1..75: mol_type = other DNA
acgcttgatgccggacaaatagccgaaccgctggcgctgtttggtgaggatgatgacatggatccccgtccatca

SEQ ID NO: 135332 - DNA, 75 bp, synthetic construct
  source 1..75: mol_type = other DNA
gcaaaaacattactggcagcggcaccggcaaccggcacggcaagttccggcgatcaaattattgcgttgccggaa

SEQ ID NO: 135333 - DNA, 75 bp, synthetic construct
  source 1..75: mol_type = other DNA
ctcgctgctgattgctaacgtcgcgattgctatttcggcggttggttacggcaccgaactgctcggcgcgagttt

SEQ ID NO: 135334 - DNA, 75 bp, synthetic construct
  source 1..75: mol_type = other DNA
agcattactgtgtggggggtaatcattccggtggtcggtctgtgcattatcggctggttctggtttagcccgacg

SEQ ID NO: 135335 - DNA, 75 bp, synthetic construct
  source 1..75: mol_type = other DNA
tgggcgtcgtgcagttaaccatactgacgatggtcaacatgatgggttccggcatcattatgctgccgaccaaac

SEQ ID NO: 135336 - DNA, 75 bp, synthetic construct
  source 1..75: mol_type = other DNA
aggaggcactatgccgcaattaactgcaacggaagctgccgcgcaggagaaccagcgagtgatggggatcctgac

SEQ ID NO: 135337 - DNA, 75 bp, synthetic construct
  source 1..75: mol_type = other DNA
gttttcttttgcgcgctggggcgcgagatgggggcagcaagtctttcggttccacaacagcaggtgcagcttgat

SEQ ID NO: 135338 - DNA, 75 bp, synthetic construct
  source 1..75: mol_type = other DNA
gcggttcactgcttggctggcagttcaccattgcccaggtgtttaaatcttcatctgatgaaggctacttcccta

SEQ ID NO: 135339 - DNA, 75 bp, synthetic construct
  source 1..75: mol_type = other DNA
aaaaacagaaagcagttgttagggctggcgctggagatggacccggagaataaattctccgggatgatgcagtaa

SEQ ID NO: 135340 - DNA, 75 bp, synthetic construct
  source 1..75: mol_type = other DNA
ttaagcagcaattgatgagtgaatctgcgtttaaggattgcttttcaacggatgtttcagccgatacgcggctgt

SEQ ID NO: 135341 - DNA, 75 bp, synthetic construct
  source 1..75: mol_type = other DNA
aggaaagatgagcacgaacctgatttttaaggagtgtcgccagagtgccacgatgaaacggatattggcggtata

SEQ ID NO: 135342 - DNA, 75 bp, synthetic construct
  source 1..75: mol_type = other DNA
acaggcgcaacagtaaccagcataaatcaggctgcggctaaaatggcgcggacaggaatcttagtcattgatggt

SEQ ID NO: 135343 - DNA, 75 bp, synthetic construct
  source 1..75: mol_type = other DNA
aaaacagaaagcagttgtcaggactggcgctggagatggagatggagatggacccggagaataaattctccggga

SEQ ID NO: 135344 - DNA, 75 bp, synthetic construct
  source 1..75: mol_type = other DNA
ttagtgaatcgcctggcagcatttatattactctcgcaggaaggtgatctttatcacgaaaaacatacccaggcg

SEQ ID NO: 135345 - DNA, 75 bp, synthetic construct
  source 1..75: mol_type = other DNA
atgacgaagacagcacaagcggtattccagatcctgacaagccagccgagtggatactctgtatcgctcgacaag

SEQ ID NO: 135346 - DNA, 75 bp, synthetic construct
  source 1..75: mol_type = other DNA
tttaaggagtgtcgccagagtgccgcgatgaaacgcgtattgagggtatataaaaggaacatcaatgggtacaca

SEQ ID NO: 135347 - DNA, 75 bp, synthetic construct
  source 1..75: mol_type = other DNA
ccgtggggcaaatatgactctatcgacgcgggcgaccgctaccaggtgaaacgcatcaccgtgaaaccgggcgaa

SEQ ID NO: 135348 - DNA, 75 bp, synthetic construct
  source 1..75: mol_type = other DNA
tggcttcttcgcgggataacgagtaacgagcgttatgtcgtgcgtgaagagaaggatcgtctcgtggcgaagcag

SEQ ID NO: 135349 - DNA, 75 bp, synthetic construct
  source 1..75: mol_type = other DNA
tccagatcctgacaagccagccggacaaatacaacatatccattgacaggctggcgcagctatccggtgtaagcc

SEQ ID NO: 135350 - DNA, 75 bp, synthetic construct
  source 1..75: mol_type = other DNA
atgccggtcatctggcgcaggccggagtggatatcacgctgatttatgccggggcgcataaggtggatggcaatc

SEQ ID NO: 135351 - DNA, 75 bp, synthetic construct
  source 1..75: mol_type = other DNA
cggatctggtgcgtccgattgcgtctatcagcaaattaatgaccgcgatggtcgtgctggatgcacgactgccgc

SEQ ID NO: 135352 - DNA, 75 bp, synthetic construct
  source 1..75: mol_type = other DNA
attctggccgcggcggcaccgcagcagccggtggcatccgcacagagtgaagccgatcgcattatggcgtgtgaa

SEQ ID NO: 135353 - DNA, 75 bp, synthetic construct
  source 1..75: mol_type = other DNA
tcatggcgaaccattcaccggctgcggtacagggtggcgtgccacagacgtcagcagacggtgatgcggacgtga

SEQ ID NO: 135354 - DNA, 75 bp, synthetic construct
  source 1..75: mol_type = other DNA
attgacagtccgggcgggcaggccgccggcgcgtttgactgcgctgacatgatttaccgactccgtcagcagaag

SEQ ID NO: 135355 - DNA, 75 bp, synthetic construct
  source 1..75: mol_type = other DNA
attacctggggactcataagaaattctgtgcgcaggacgttgccgcggtaacaggcgcaacggtaaccagcataa

SEQ ID NO: 135356 - DNA, 75 bp, synthetic construct
  source 1..75: mol_type = other DNA
atggcgaccttctctaatccgacgtatacgctgccgtttcgtaacactaaccatctggtgtaccgcgataactgg

SEQ ID NO: 135357 - DNA, 75 bp, synthetic construct
  source 1..75: mol_type = other DNA
ttagccttgctctgatgctggctgtaccttttgcgccgcaggccgttgcgaaaacggcagccgctaccacagcat

SEQ ID NO: 135358 - DNA, 75 bp, synthetic construct
  source 1..75: mol_type = other DNA
ggcgaaccattcaccggcagcggtacagggtggcgtggcacagacgtcagcagacggtgatgcggacgtgaaaat

SEQ ID NO: 135359 - DNA, 75 bp, synthetic construct
  source 1..75: mol_type = other DNA
ctgcgtgacgcctatatcgaccacctgctgggctacatcaacgtgcaaaacctgacgccgctgaagttggtggtg

SEQ ID NO: 135360 - DNA, 75 bp, synthetic construct
  source 1..75: mol_type = other DNA
actttcctcccgtcgatgaaaccaaacgcggtcgctatcagcaaatcaatctgcgtgacgcttacgttgatcacc

SEQ ID NO: 135361 - DNA, 75 bp, synthetic construct
  source 1..75: mol_type = other DNA
gatctgggtattgcatttgacggcgactttgaccgctgcttcctgttcgacaatcaggggcaatttattgaaggt

SEQ ID NO: 135362 - DNA, 75 bp, synthetic construct
  source 1..75: mol_type = other DNA
gccaaaatcatccacgatccgcgtctttcctggaacaccgtcgacgtggtgacggcggcaggcggcaccccggtg

SEQ ID NO: 135363 - DNA, 75 bp, synthetic construct
  source 1..75: mol_type = other DNA
tcaccggctgcggtccaggggggcgtgtcacaggcgtcagaagacggtgatgcggacgtgaaaatgctcatggcc

SEQ ID NO: 135364 - DNA, 75 bp, synthetic construct
  source 1..75: mol_type = other DNA
gcattgatgcggcgcgccggatgtttgctgaaaaagtggcgatgtataccggtttatctgtggatgcggttatgg

SEQ ID NO: 135365 - DNA, 75 bp, synthetic construct
  source 1..75: mol_type = other DNA
cagcggagataccggactgcgcgaggtccagcgtctggcagaagcgaacgactttccccccgtcgatgaaaccaa

SEQ ID NO: 135366 - DNA, 75 bp, synthetic construct
  source 1..75: mol_type = other DNA
cagcggagataccggactgcgcgacgtccagcgtctggcagaagccaacgactttccccccgtcgatgaaaccaa

SEQ ID NO: 135367 - DNA, 75 bp, synthetic construct
  source 1..75: mol_type = other DNA
cagcggagataccggactgcgcgatgtccagcgtctggcagaagctaacgactttccccccgtcgatgaaaccaa

SEQ ID NO: 135368 - DNA, 75 bp, synthetic construct
  source 1..75: mol_type = other DNA
tggtactgatggtgtaagtattgaatatagcgattggcggtttaacttgcgtacatctaatactgaaccagttgt

SEQ ID NO: 135369 - DNA, 75 bp, synthetic construct
  source 1..75: mol_type = other DNA
cagcggggataccggactgcgcgaggtccagcgtctggcagaagcaaacgactttccccccgtcgatgaaaccaa

SEQ ID NO: 135370 - DNA, 75 bp, synthetic construct
  source 1..75: mol_type = other DNA
cagcggcgataccggactgcgcgacgtccagcgtctggcagaagcaaacgactttccccccgtcgatgaaaccaa

SEQ ID NO: 135371 - DNA, 75 bp, synthetic construct
  source 1..75: mol_type = other DNA
atgccggaccctcactccgtgatcagatcatggctctggatgaggcaaaaggggctgaggcgcaggctgaaaaac

SEQ ID NO: 135372 - DNA, 75 bp, synthetic construct
  source 1..75: mol_type = other DNA
tgaccggcacgctggtgcaccgtctgggtggtatgcggccattttccggaatgacaggctatgacggcattgtcg

SEQ ID NO: 135373 - DNA, 75 bp, synthetic construct
  source 1..75: mol_type = other DNA
ccggcagcggtacagggtggcgtgccacagacgtcagcagatggtgatgcggacgtgaaaatgctcatggccatg

SEQ ID NO: 135374 - DNA, 75 bp, synthetic construct
  source 1..75: mol_type = other DNA
gattaaccgcgtcgaacagcactttagccgcgaggcgctggcggtggatcgcaccgatggcatcagcatgacctt

SEQ ID NO: 135375 - DNA, 75 bp, synthetic construct
  source 1..75: mol_type = other DNA
gaataacagagggttgatgtatggcaacacgagctggagaggttcatacgttgcaaaactgatccgtgatgagcg

SEQ ID NO: 135376 - DNA, 75 bp, synthetic construct
  source 1..75: mol_type = other DNA
gcttctggagcccgcctatgcgcgggttttcttttgcgcgctcgggcgcgagatgggcgcagcaagtctttcggt

SEQ ID NO: 135377 - DNA, 75 bp, synthetic construct
  source 1..75: mol_type = other DNA
aaagcggaaacattatgccactgaatgctatgggcaatgataacacggtttatcagatcccggcggaatccaatg

SEQ ID NO: 135378 - DNA, 75 bp, synthetic construct
  source 1..75: mol_type = other DNA
ggcggcaccccggtaatgtcgaaaaccggacacgcctttattaaagaacgtatgcgcaaggaagacgccatctac

SEQ ID NO: 135379 - DNA, 75 bp, synthetic construct
  source 1..75: mol_type = other DNA
tgccatctatggcggcgagatgagcgcccatcactattttcgtgattttgcttactgcgatagcgggatgatccc

SEQ ID NO: 135380 - DNA, 75 bp, synthetic construct
  source 1..75: mol_type = other DNA
cgtgaacaactggcggcaacgctggcggcgatgccggagatgacggtggaaaaagcccgcccgatcctggctgct

SEQ ID NO: 135381 - DNA, 75 bp, synthetic construct
  source 1..75: mol_type = other DNA
acatgccagaaaacggtcatgttatgcgtgacgttgtcacttcctatgcgcaagccattgatgtaaaactggcat

SEQ ID NO: 135382 - DNA, 75 bp, synthetic construct
  source 1..75: mol_type = other DNA
gtgccacttctgaactggttgtctttattctcaatgttcagtgcatcggatgatgtacgctactgcaggactata

SEQ ID NO: 135383 - DNA, 75 bp, synthetic construct
  source 1..75: mol_type = other DNA
tcgtttatcgaggggtactacattgtcggcctgctggcggaggcgttcctgcagaagcagccgggagcgaaaatc

SEQ ID NO: 135384 - DNA, 75 bp, synthetic construct
  source 1..75: mol_type = other DNA
attgtcggcctgctggctgaggcgttcctgcagaagcagccgggagcgaaaatcattcacgacccgcgcttgacg

SEQ ID NO: 135385 - DNA, 75 bp, synthetic construct
  source 1..75: mol_type = other DNA
tatggcgaatttctcaaaccgaaaaccattgtgttaggcggtgatgtccgcctcaccagcgaaaccttaaaactg

SEQ ID NO: 135386 - DNA, 75 bp, synthetic construct
  source 1..75: mol_type = other DNA
accgaaccggtggtgcgcctgaatgtggaatcgaaaggagatagtgaaatcgtaattaaaatgactaaatcgata

SEQ ID NO: 135387 - DNA, 75 bp, synthetic construct
  source 1..75: mol_type = other DNA
acttcccggcggtgaatgaagccaaacgcggtagttataagcaaatcaacttgcaaaaagagtacatcgaccact

SEQ ID NO: 135388 - DNA, 75 bp, synthetic construct
  source 1..75: mol_type = other DNA
agcaaagccctgaagctggcgttggcgaaaggactgcaggacgctggtgttgatgtgcttgatatcggcctttcc

SEQ ID NO: 135389 - DNA, 75 bp, synthetic construct
  source 1..75: mol_type = other DNA
cctatgatattcgcgggaaattaggcgaagaactgaatgaagatattgcctggcgcattgggcgtgcctatggcg

SEQ ID NO: 135390 - DNA, 75 bp, synthetic construct
  source 1..75: mol_type = other DNA
gactgtcactgggagaactgatccatgaccggatgctggcctacccggcgagcggagaaataaaccgtacgctgg

SEQ ID NO: 135391 - DNA, 75 bp, synthetic construct
  source 1..75: mol_type = other DNA
gcgaacggtcgtgaacaactggcggcaacgctggcggcgatgccggagatgacggtggaaaaagcccgcccgatc

SEQ ID NO: 135392 - DNA, 75 bp, synthetic construct
  source 1..75: mol_type = other DNA
gccgactggcgctttaacctgcgctcctccaacaccgaaccggtggtgcggttgaatgtggaatcacgcggtgat

SEQ ID NO: 135393 - DNA, 75 bp, synthetic construct
  source 1..75: mol_type = other DNA
gatccttccaaggaacattcacattattcaaaaatggatgaaggcggcgtttattatggcgacaatatcagtagt

SEQ ID NO: 135394 - DNA, 75 bp, synthetic construct
  source 1..75: mol_type = other DNA
caacacgccggacggcaatttccccaacggtattcctaacccgctgctgccggaatgccgcgacgacacccgcaa

SEQ ID NO: 135395 - DNA, 75 bp, synthetic construct
  source 1..75: mol_type = other DNA
ccggacacgcctttattaaagaacgtatgcgcaaggaagacgccatctacggtggcgaaatgagcgctcaccatt

SEQ ID NO: 135396 - DNA, 75 bp, synthetic construct
  source 1..75: mol_type = other DNA
cagcggcgataccggcctacgcgatgtccagcgcctggcagaagccaacgacttccctcccgtcgatgaaaccaa

SEQ ID NO: 135397 - DNA, 75 bp, synthetic construct
  source 1..75: mol_type = other DNA
gtcgccgaactggtgtgcctgaaaggaaaaacgctgggcgaactggtgcgcgaccggatggcagcatttccggca

SEQ ID NO: 135398 - DNA, 75 bp, synthetic construct
  source 1..75: mol_type = other DNA
cagcggagataccggactgcgcgaagtccagcgtctggcagaagcaaacgactttccccccgtcgatgaaaccaa

SEQ ID NO: 135399 - DNA, 75 bp, synthetic construct
  source 1..75: mol_type = other DNA
ggcaccgaagagatttatttcgccacgttccatctcggcgtggatggcggcattgaagttactgccagccataac

SEQ ID NO: 135400 - DNA, 75 bp, synthetic construct
  source 1..75: mol_type = other DNA
ggcaccgaagagatttatttcgccacgttccatctcggcgtggatggcggcatagaagttacagccagccataaa

SEQ ID NO: 135401 - DNA, 75 bp, synthetic construct
  source 1..75: mol_type = other DNA
aaggggatgatgcgcctgttaattgagcgcgatgatgctgcaagcgccgcaggtcggccctcattgctggatgac

SEQ ID NO: 135402 - DNA, 75 bp, synthetic construct
  source 1..75: mol_type = other DNA
tggatcgcaccgatggcatcagcatgacctttgccgactggcgctttaacctgcgcacctccaacaccgaaccgg

SEQ ID NO: 135403 - DNA, 75 bp, synthetic construct
  source 1..75: mol_type = other DNA
cgttccatctcggcgtggatggcggcattgaagttaccgccagccataacccgatggattataacggcatgaaac

SEQ ID NO: 135404 - DNA, 75 bp, synthetic construct
  source 1..75: mol_type = other DNA
gaaaaacgctgggcgaacttgtgcgtgaccggatggcagcttttccagcaagtggggaaattaatagcacgttgg

SEQ ID NO: 135405 - DNA, 75 bp, synthetic construct
  source 1..75: mol_type = other DNA
tggcgcattggtcgcgcttatggcgaatttctcaaaccgaaaaccattgtgttaggcggtgatgtccgcctcacc

SEQ ID NO: 135406 - DNA, 75 bp, synthetic construct
  source 1..75: mol_type = other DNA
cctggtggttttcacctgataaacgcagctgctgaaaggcgctggctgacgtcgtcaggtaaggctaattttatt

SEQ ID NO: 135407 - DNA, 75 bp, synthetic construct
  source 1..75: mol_type = other DNA
gaactggaaaagccacatcaccaactggtcagcacatacagtgagctgaaccggcagtatacggaactgctgagt

SEQ ID NO: 135408 - DNA, 75 bp, synthetic construct
  source 1..75: mol_type = other DNA
gacattatcaggggccatatcagctaaaaaatgatggctatgcggcaaagggcagggctctgaaacagcatgtga

SEQ ID NO: 135409 - DNA, 75 bp, synthetic construct
  source 1..75: mol_type = other DNA
cctgtgaaaaaccggcggatatgttgcgtcagataattactgccagcagccgtccaggcgatttggtcgcagatt

SEQ ID NO: 135410 - DNA, 75 bp, synthetic construct
  source 1..75: mol_type = other DNA
acggcaaaacagattgcagatgccacaggaaagaaaaacatggtgtcgcactggttcagtgccggtcagtggcag

SEQ ID NO: 135411 - DNA, 75 bp, synthetic construct
  source 1..75: mol_type = other DNA
aaccatattatctgggcgaagccgtccggacgctggaacgggtgcaataaggaaagtctgcgggcgtattttccg

SEQ ID NO: 135412 - DNA, 75 bp, synthetic construct
  source 1..75: mol_type = other DNA
gcgaaaaaccggcagaaatgctgcagcagataatcagcgcaagcagtcgtccgggagacctggttgcagattttt

SEQ ID NO: 135413 - DNA, 75 bp, synthetic construct
  source 1..75: mol_type = other DNA
ggaaagcctgcgggcgtatttcccggcaacagagcgcattctgtttgccgaacattatcaggggccatatcagcc

SEQ ID NO: 135414 - DNA, 75 bp, synthetic construct
  source 1..75: mol_type = other DNA
ttgaacaaacagttggtgaaatattggtgctgaacgataaattgcgaaatgcacaattagataagaacaggagct

SEQ ID NO: 135415 - DNA, 75 bp, synthetic construct
  source 1..75: mol_type = other DNA
gatgattacctgaaatggctggatcagtgtctggctcagttctggcgggtactgaaacctgccggaagtctctac

SEQ ID NO: 135416 - DNA, 75 bp, synthetic construct
  source 1..75: mol_type = other DNA
agcggcagagaagtttcaggaacaacaactggaacaaccacaccatcagctggtggcatcttatgattcactgaa

SEQ ID NO: 135417 - DNA, 75 bp, synthetic construct
  source 1..75: mol_type = other DNA
gatgcgtgaacgttttaatgtgttgaaccacattatctgggcgaagccgtccggacgctggaacgggtgcaataa

SEQ ID NO: 135418 - DNA, 75 bp, synthetic construct
  source 1..75: mol_type = other DNA
ttgccgaacgagggtgattacaacaaattgcaggcgttgtttgcgcgtgttgcggcagaaaaacatcagcgcggg

SEQ ID NO: 135419 - DNA, 75 bp, synthetic construct
  source 1..75: mol_type = other DNA
aaaggtgacgatgattacctgaaatggctggaccagtgtctggcgcaattctggcgggtactgaagcctgccgga

SEQ ID NO: 135420 - DNA, 75 bp, synthetic construct
  source 1..75: mol_type = other DNA
aagggggacgatgattatctgaaatggctggagcagtgtctggcgcagttctggcgggtactgaagcctgccgga

SEQ ID NO: 135421 - DNA, 75 bp, synthetic construct
  source 1..75: mol_type = other DNA
ggatgctcgtgccgaactgggtataacggcaaaacaaattgccgaagccacaggtaagaaaaatatggtttccca

SEQ ID NO: 135422 - DNA, 75 bp, synthetic construct
  source 1..75: mol_type = other DNA
atctgaaattacaggcgctgtttgcccgggtggcagaagagaagcatcagcgcggtgaactggaaaagccccacc

SEQ ID NO: 135423 - DNA, 75 bp, synthetic construct
  source 1..75: mol_type = other DNA
ccggacgctggaacgggggtaacaaggaaagcctgtgggcgtattttccggcccccgagcgcattctgttcgcgg

SEQ ID NO: 135424 - DNA, 75 bp, synthetic construct
  source 1..75: mol_type = other DNA
aaccatatcatctgggaaaagccgtccggacgctggaacgggggtaacaaggaaagcctgtgggcgtattttccg

SEQ ID NO: 135425 - DNA, 75 bp, synthetic construct
  source 1..75: mol_type = other DNA
gacgcataaaccggtgcagttctatcccgggaaacatccgtgcgaaaaaccggcagaaatgctgcagcagataat

SEQ ID NO: 135426 - DNA, 75 bp, synthetic construct
  source 1..75: mol_type = other DNA
aaccagtggaagggcgacgatgattacctgaagtggctggaccagtgtctggcgcagttctggcgggggctgaaa

SEQ ID NO: 135427 - DNA, 75 bp, synthetic construct
  source 1..75: mol_type = other DNA
gtgcagtactatccagggaaacatccgtgcgaaaaaccggcagaaatgttgcagcagataatcaacgcgagcagt

SEQ ID NO: 135428 - DNA, 75 bp, synthetic construct
  source 1..75: mol_type = other DNA
cgtgcgaaaaaccggcagaaatgctgcagcagataatcagcgctagcagtcgtccgggtgacctgattgcagatt

SEQ ID NO: 135429 - DNA, 75 bp, synthetic construct
  source 1..75: mol_type = other DNA
gaatataagcatctgcggcggtattttggcgtgacggtgcaggtgccgtataccgatgtgtggacgcataaaccg

SEQ ID NO: 135430 - DNA, 75 bp, synthetic construct
  source 1..75: mol_type = other DNA
ttggtatacttatatccacaaggtatctatggtggcgttactcttcttcagttattcttgatgagtttcctgaca

SEQ ID NO: 135431 - DNA, 75 bp, synthetic construct
  source 1..75: mol_type = other DNA
tgtcgcagctgataaagtcgacgccctgaaatctctggtggatacctatcaggagatcctgaaaaacgaactggc

SEQ ID NO: 135432 - DNA, 75 bp, synthetic construct
  source 1..75: mol_type = other DNA
gccattgtcgatgacgctggcacaatcctgctcaattccctgattgcgccccctcccggattgagtgcatggccg

SEQ ID NO: 135433 - DNA, 75 bp, synthetic construct
  source 1..75: mol_type = other DNA
gggcagagcaccacgctgaccgtggcattccagccggagggcgcaaccgacaagagcttccgtgcggtgtctgcg

SEQ ID NO: 135434 - DNA, 75 bp, synthetic construct
  source 1..75: mol_type = other DNA
cgccggccactgcaattaaggtgacaccgacatccggtacggtggcaaaagggaaaacaaccaccctgactgttt

SEQ ID NO: 135435 - DNA, 75 bp, synthetic construct
  source 1..75: mol_type = other DNA
gcttatgcaaacccgctgtcagacgatgagtggacgcgcctggcaaaaataaaggatctgacacccggcgagatg

SEQ ID NO: 135436 - DNA, 75 bp, synthetic construct
  source 1..75: mol_type = other DNA
ccgttcagccggaaggggcgacggataaaaccttccgcgccacgtcagcgaatcagaatttcgccaccattaccg

SEQ ID NO: 135437 - DNA, 75 bp, synthetic construct
  source 1..75: mol_type = other DNA
acggcccgctggaagtgctgctgaccatgaccgaagaagccggtatggatggtgcttttggcttacagagcaact

SEQ ID NO: 135438 - DNA, 75 bp, synthetic construct
  source 1..75: mol_type = other DNA
gatggcgaatgggttaaagcgcgcggcaccacgctgggtgcggataacggcattggtatggcctctgcgctggcg

SEQ ID NO: 135439 - DNA, 75 bp, synthetic construct
  source 1..75: mol_type = other DNA
catgaccgaagaagccggtatggacggtgcgttcggcttacagagcaactggttgcaggctgatattctgattaa

SEQ ID NO: 135440 - DNA, 75 bp, synthetic construct
  source 1..75: mol_type = other DNA
tttccgtatcagctgccgttccgtatacggatgtctggacgcacaggcctgtgcagtattatccgggcaaacatc

SEQ ID NO: 135441 - DNA, 75 bp, synthetic construct
  source 1..75: mol_type = other DNA
gcggcagataattacagccagcagtcgtccgggggaactggttgcagacttttttatgggatcgggggcgactat

SEQ ID NO: 135442 - DNA, 75 bp, synthetic construct
  source 1..75: mol_type = other DNA
ggcagaagagaagcatcagcggggtgaactggaaaagccccaccaccagctgctggagacgtatacttcactgaa

SEQ ID NO: 135443 - DNA, 75 bp, synthetic construct
  source 1..75: mol_type = other DNA
aaaggggatgaggattatcttcgctggcttgatatgtgcctcgcacaattctggcgagtgcttaaacctgccggc

SEQ ID NO: 135444 - DNA, 75 bp, synthetic construct
  source 1..75: mol_type = other DNA
aagggcgacgatgattacctgaagtggcaggaccagtgtctggcgcagttctggcgggtgctgaaacctgccgga

SEQ ID NO: 135445 - DNA, 75 bp, synthetic construct
  source 1..75: mol_type = other DNA
ggaaagcctgcgggcgtatttcccggcaacagagcgcattctgtttgctgaacattatcaggggccctaccagcc

SEQ ID NO: 135446 - DNA, 75 bp, synthetic construct
  source 1..75: mol_type = other DNA
gaactggaatggccacaccaccagctggtcagcacatacagtgaacttaaccggcaatatgccagcctgctggag

SEQ ID NO: 135447 - DNA, 75 bp, synthetic construct
  source 1..75: mol_type = other DNA
gcgctggcagatacgttggcctgccgcgctgtctggcagtatctgcataatccgacggaacgtgaacgcgtggat

SEQ ID NO: 135448 - DNA, 75 bp, synthetic construct
  source 1..75: mol_type = other DNA
atctctcgatacgctgcgccctcaaatcgaagctgctgtgcgcaaccgcgacgtagttatttacaacgcggcctt

SEQ ID NO: 135449 - DNA, 75 bp, synthetic construct
  source 1..75: mol_type = other DNA
atcccgggataatattctaaagagcttttttgaaatatctttcatctctctgaaaggttactgtaatatgatttt

SEQ ID NO: 135450 - DNA, 75 bp, synthetic construct
  source 1..75: mol_type = other DNA
ctgaaccggcagtatgcggaactacagagtgaatataagcatctgcggcggtattttggcgtgacggcgcaggtg

SEQ ID NO: 135451 - DNA, 75 bp, synthetic construct
  source 1..75: mol_type = other DNA
gcgattggtgttgagctggagaccgaacgttttgagcagacagtcagggaagttcaggatttaatcgtttggaac

SEQ ID NO: 135452 - DNA, 75 bp, synthetic construct
  source 1..75: mol_type = other DNA
catcggaaggtgagcaggtggtggtgctgagtctggcaggcaatctggaaaccgcgtttgcgctgcccgccatct

SEQ ID NO: 135453 - DNA, 75 bp, synthetic construct
  source 1..75: mol_type = other DNA
cgggagaactggctttgccgggtgaaaacgggcgacctcgaaaccaactggatcagctggctgacactgcgtgcc

SEQ ID NO: 135454 - DNA, 75 bp, synthetic construct
  source 1..75: mol_type = other DNA
accgcctttgcgttgcccgctgtctattcgaatcagttcgcgccaccatcgacgtcggcgaacgcttgcgtgaca

SEQ ID NO: 135455 - DNA, 75 bp, synthetic construct
  source 1..75: mol_type = other DNA
caatggtggcgttacccagggcggcggtgcgatgagttctaacgggattgtggttgatgcgcatcagcatactgg

SEQ ID NO: 135456 - DNA, 75 bp, synthetic construct
  source 1..75: mol_type = other DNA
agggcaaactggctgtgtcgggtgaaaactggcgacctcgaaaccaactggattaactggctgacattgcgcgcg

SEQ ID NO: 135457 - DNA, 75 bp, synthetic construct
  source 1..75: mol_type = other DNA
acagcctttgcgctgcccgccatctattcgaatcagttcgcaccaccgtcggcgtcggcggacgcctgtgtgaca

SEQ ID NO: 135458 - DNA, 75 bp, synthetic construct
  source 1..75: mol_type = other DNA
gcacgccacatcgaggaattccgctaccacgtgcaggacgcaatgtaccgcgaaggcgcaatgagggttactggt

SEQ ID NO: 135459 - DNA, 75 bp, synthetic construct
  source 1..75: mol_type = other DNA
tcgtgatatggcggatatggggattacggtacttgatgccgagcagtggcggaaactggagctgatgcgtgatag

SEQ ID NO: 135460 - DNA, 75 bp, synthetic construct
  source 1..75: mol_type = other DNA
ccgtgagcgaaagcattgattgtggtcggtatccggtacgcgtgttcgagctggatgcgccggatgtcgatgccg

SEQ ID NO: 135461 - DNA, 75 bp, synthetic construct
  source 1..75: mol_type = other DNA
gattaactggctgacgctgcgcgcgggcaaatcgcgcacctggtggaaaccgtctgtgggtgagcaggttgtgct

SEQ ID NO: 135462 - DNA, 75 bp, synthetic construct
  source 1..75: mol_type = other DNA
tcagcaacgaggactaccacgccggtgacggcgtgagtaagtcgcagctagatatggtggctaagaaccctgccc

SEQ ID NO: 135463 - DNA, 75 bp, synthetic construct
  source 1..75: mol_type = other DNA
atgaatactggcatctatttcgacatcagcaatgaggactaccacgccggtgacggcgtgagtaagtcgcaactg

SEQ ID NO: 135464 - DNA, 75 bp, synthetic construct
  source 1..75: mol_type = other DNA
gctatattcgtcgcggcgacgtttcccccggcgagcaagatacggtggcctttgaagtggcgcagtttgtcgaaa

SEQ ID NO: 135465 - DNA, 75 bp, synthetic construct
  source 1..75: mol_type = other DNA
gtcgcgggaacggcaaaagtcaccattgacggtgatatcaaactgcttggtgaaaacgagtccatttatattccg

SEQ ID NO: 135466 - DNA, 75 bp, synthetic construct
  source 1..75: mol_type = other DNA
atgccatgccatatgccgaagcgggcaagctggtgaccttcggcattgtgccggatctaccagaaaccggttatg

SEQ ID NO: 135467 - DNA, 75 bp, synthetic construct
  source 1..75: mol_type = other DNA
ggaacggcaaaagtcactatcgacggtgatatcaaactgcttggtgaaaacgagtccatttatattccgctgggg

SEQ ID NO: 135468 - DNA, 75 bp, synthetic construct
  source 1..75: mol_type = other DNA
tgtcgaaaaaccgaatctggaaaccgcgcaggcctatgtggcaagtggcgaatattactggaacagcggtatgtt

SEQ ID NO: 135469 - DNA, 75 bp, synthetic construct
  source 1..75: mol_type = other DNA
ttgcgttggcggcgctggcggcagaacgtcatagcccggacagcgatccgttaatgttggtcctggcggcagatc

SEQ ID NO: 135470 - DNA, 75 bp, synthetic construct
  source 1..75: mol_type = other DNA
gttattgcaccagcagatgaagatgaagatgaagatgaagatgaagatgaagatgaagatgaagatgaagatgag

SEQ ID NO: 135471 - DNA, 75 bp, synthetic construct
  source 1..75: mol_type = other DNA
atggaaacatcagcacgaaataaaatacagaatgtgcctgagggggtaatacacgaaaaagtaagagtgttgcta

SEQ ID NO: 135472 - DNA, 75 bp, synthetic construct
  source 1..75: mol_type = other DNA
catcggaaggtgagcaggtggtggtgctgagtctgggaggcaatctggaaactgcctttgcgttgcccgcagtct

SEQ ID NO: 135473 - DNA, 75 bp, synthetic construct
  source 1..75: mol_type = other DNA
gctaccaggtgaaacgcatcaccgtgaaaccgggcgaaggcttgtcggtacagatgcaccatcaccgcgcggaac

SEQ ID NO: 135474 - DNA, 75 bp, synthetic construct
  source 1..75: mol_type = other DNA
tggcctggtcaccaccgtcggggtgaaagatttggtggtagtgcagaccaaagatgcggtgctgattgccgaccg

SEQ ID NO: 135475 - DNA, 75 bp, synthetic construct
  source 1..75: mol_type = other DNA
ggtgcaggatgtgaaaaaagtggtcgagcagatcaaagctgatggtcgccatgagcatcgggtgcatcgcgaagt

SEQ ID NO: 135476 - DNA, 75 bp, synthetic construct
  source 1..75: mol_type = other DNA
atggcaacagataaccgctcactgatgatctgtgcccatcagaaggcattcagtcttgcaacacagttacctcct

SEQ ID NO: 135477 - DNA, 75 bp, synthetic construct
  source 1..75: mol_type = other DNA
ctggcgggtgttaaaacctgccggaagcctttacctgttctgtgggcatcgcctggcatctgatattgagatcat

SEQ ID NO: 135478 - DNA, 75 bp, synthetic construct
  source 1..75: mol_type = other DNA
aattgcaggcgttgtttgcgcgtgttgcggcagaaaagcatcagcgaggggaactggaaaagccacaccaccagc

SEQ ID NO: 135479 - DNA, 75 bp, synthetic construct
  source 1..75: mol_type = other DNA
cgggaaaactggctttgccgggtgaaaacaggcgagcttgaaaccaactggattagctggctgacgctgcgtgcc

SEQ ID NO: 135480 - DNA, 75 bp, synthetic construct
  source 1..75: mol_type = other DNA
caagtctgaggacggcaacgtgacggaatacccagacggcggctggtttgagtacgaccccgaaaccgggcgctg

SEQ ID NO: 135481 - DNA, 75 bp, synthetic construct
  source 1..75: mol_type = other DNA
cataggtgtagtcaccgaagtggaccgggaaaactggctttgtcgggtgaaaacggacgaccttgaaaccaactg

SEQ ID NO: 135482 - DNA, 75 bp, synthetic construct
  source 1..75: mol_type = other DNA
tttttatggggtcgggggcgacaataaaagcggcactgtcactgggacgcagggcgactggcgtggaactggaaa

SEQ ID NO: 135483 - DNA, 75 bp, synthetic construct
  source 1..75: mol_type = other DNA
cgtgcgaaaaaccggcagaaatgctgcagcagataatcagcgcgagcagtcgtccgggagacctggttgcagatt

SEQ ID NO: 135484 - DNA, 75 bp, synthetic construct
  source 1..75: mol_type = other DNA
gatgcgtgagcgctttaatgtgcttaaccatattatctgggctaagccgtccggacgctggaacgggtgcaacaa

SEQ ID NO: 135485 - DNA, 75 bp, synthetic construct
  source 1..75: mol_type = other DNA
actggtcagcacatacagtgaactgaaccagcagtatacggaactgcagagtgaatataagcatctgcggcggta

SEQ ID NO: 135486 - DNA, 75 bp, synthetic construct
  source 1..75: mol_type = other DNA
aacggtaaaagcggcgatggcactggggcgttgtgcgattggtgttgagctggagacaggacgttttgaacagac

SEQ ID NO: 135487 - DNA, 75 bp, synthetic construct
  source 1..75: mol_type = other DNA
gcagagtgaatataagcatctgcggcggtattttggcgtgacggcgcaggtgccgtacacggatgtgtggacgca

SEQ ID NO: 135488 - DNA, 75 bp, synthetic construct
  source 1..75: mol_type = other DNA
gtccgctgacaatatcaccgtgaaaaccagtgagtttgtactggaggctgaccgcacgcgtattaacagcgaagt

SEQ ID NO: 135489 - DNA, 75 bp, synthetic construct
  source 1..75: mol_type = other DNA
gaccgctgacaatatcaccgtgaaaaccagtgagtttgtactggaggctgaccgcacgcgaattaacagcgaagt

SEQ ID NO: 135490 - DNA, 75 bp, synthetic construct
  source 1..75: mol_type = other DNA
gaccgctgacaatatcaccatgaaaaccagtgagtttgtactggaggctgaccgcacgcggattaacagcgaagt

SEQ ID NO: 135491 - DNA, 75 bp, synthetic construct
  source 1..75: mol_type = other DNA
ggccgctgacaatatcaccgtgaaaaccagtgagtttgtactggaggctgaccgcacgcggattaacagcgaagt

SEQ ID NO: 135492 - DNA, 75 bp, synthetic construct
  source 1..75: mol_type = other DNA
gcccgctgacaatatcaccgtgaaaaccagtgagtttgtactggaggctgaccgcacgcgcattaacagcgaagt

SEQ ID NO: 135493 - DNA, 75 bp, synthetic construct
  source 1..75: mol_type = other DNA
gcccgctgacaatatcaccctgaaaaccagtgagtttgtactggaggctgaccgcacgcggattaacagcgaagt

SEQ ID NO: 135494 - DNA, 75 bp, synthetic construct
  source 1..75: mol_type = other DNA
ggtgagcaggtggtgctgctgagtctgggaggcaatctggaaaccgcctttgcgttgcccgctgtctattcgaat

SEQ ID NO: 135495 - DNA, 75 bp, synthetic construct
  source 1..75: mol_type = other DNA
ccatgaaaaccagtgagtttgtactggaagctgaccgcacgcgcattaacagcgaagttgtgatcaatggtggcg

SEQ ID NO: 135496 - DNA, 75 bp, synthetic construct
  source 1..75: mol_type = other DNA
tagaaaccaactggatcagctggctgaccctgcgtgccgggaatgcccggacatggtggcgaccatcggaaggtg

SEQ ID NO: 135497 - DNA, 75 bp, synthetic construct
  source 1..75: mol_type = other DNA
ggggcatcaaatcaatggtcattgagaccgctgacaagatcaccctgaaaaccagtgagtttgtactggaggctg

SEQ ID NO: 135498 - DNA, 75 bp, synthetic construct
  source 1..75: mol_type = other DNA
ggggcatcaaatcaatggtcattgagaccgctgacaagatcaccatgaaaaccagtgagtttgtcctggaggctg

SEQ ID NO: 135499 - DNA, 75 bp, synthetic construct
  source 1..75: mol_type = other DNA
ggggcatcaaatcaatggtcattgagaccgctgacaaaatcaccgtgaaaaccagtgagtttgtgctggaggctg

SEQ ID NO: 135500 - DNA, 75 bp, synthetic construct
  source 1..75: mol_type = other DNA
atgatcccgtggctgctggtcgccgaactggtgtgtctgaaaggaaaaacgctgggcgaactggtgcgcgaccgg

SEQ ID NO: 135501 - DNA, 75 bp, synthetic construct
  source 1..75: mol_type = other DNA
tgaagcctttgcccagcgggcgctggtggtagagattatggcggaaggaatgcgcaatccgcaggttgccgctat

SEQ ID NO: 135502 - DNA, 75 bp, synthetic construct
  source 1..75: mol_type = other DNA
aaagaagccttgattcaggcaattatcctccaggatcaggagagggcgctggcccgcttccgggaccctatcgaa

SEQ ID NO: 135503 - DNA, 75 bp, synthetic construct
  source 1..75: mol_type = other DNA
tagcccgaagagcaccatacttctcaagtgctttgattgcgttagtgggaatttatatgggttatcacggatggt

SEQ ID NO: 135504 - DNA, 75 bp, synthetic construct
  source 1..75: mol_type = other DNA
attgtgctggcatcgctggtcaacttctggctgaaaagcgaagcattgatgtgggcagttacctacatcggcgtg

SEQ ID NO: 135505 - DNA, 75 bp, synthetic construct
  source 1..75: mol_type = other DNA
acctctcgcttactgctggatttgacctatggcgtactggccgatatcgaagccgaagacctggcgtgtgaagcg

SEQ ID NO: 135506 - DNA, 75 bp, synthetic construct
  source 1..75: mol_type = other DNA
agagattttttcagaaaatggatttcacagtgcctcgatgaaagccatctgtaaatcttgcggcataagcccagg

SEQ ID NO: 135507 - DNA, 75 bp, synthetic construct
  source 1..75: mol_type = other DNA
caccggtgctcttaccggacaggataaccgcatcttattactgtcacagcctacacgcccaagcggctatttcta

SEQ ID NO: 135508 - DNA, 75 bp, synthetic construct
  source 1..75: mol_type = other DNA
tggactgtagtaccgaagggctttcgtctgggaagtgaagaagctctcgccggtgaacacgcagatcatcttctg

SEQ ID NO: 135509 - DNA, 75 bp, synthetic construct
  source 1..75: mol_type = other DNA
aagtgttgctggagaaagattggggctgggtagcgaccgctgacgtcggtaatggtcgcgacaaatcggtgctca

SEQ ID NO: 135510 - DNA, 75 bp, synthetic construct
  source 1..75: mol_type = other DNA
ctgctgtgcattcaggtcaaagcccttacattgggcgcggtactggtgttgtgcttcagcataggtctggcgata

SEQ ID NO: 135511 - DNA, 75 bp, synthetic construct
  source 1..75: mol_type = other DNA
tatcaggatgctcacgaaaaagcgcatgcgaacgacatcaaaaaacgttttgcgaatcgcagcgtaaccaccgga

SEQ ID NO: 135512 - DNA, 75 bp, synthetic construct
  source 1..75: mol_type = other DNA
ctggcacgccgtgccccatacttctcaagcgtactgatagccctggtcggcatttacatgggctaccatggctgg

SEQ ID NO: 135513 - DNA, 75 bp, synthetic construct
  source 1..75: mol_type = other DNA
ctcacaaagtgtgattcttgaggcactgttcggctcgggattaagccccgctcaggcacgggcattactgcaaca

SEQ ID NO: 135514 - DNA, 75 bp, synthetic construct
  source 1..75: mol_type = other DNA
ctgggtgctggttctggtgaatgccggtggtgagccgtttgcggtggttcaggtgcagcggcggtttgcaccgga

SEQ ID NO: 135515 - DNA, 75 bp, synthetic construct
  source 1..75: mol_type = other DNA
ttttccccgtccaggtccgtttcacgcctgcccacgaacgttttcacctggcgttatgttcaccgggtgatgtct

SEQ ID NO: 135516 - DNA, 75 bp, synthetic construct
  source 1..75: mol_type = other DNA
caaacggcgatatttgcgtcgctatcggctgggcgggcgatgtctggcaggcgtcaaaccgcgcgaaggaagcga

SEQ ID NO: 135517 - DNA, 75 bp, synthetic construct
  source 1..75: mol_type = other DNA
gcgcttgccgcgacacttgatgcgcagggatacagtgttaacgacatcatccatatcctgatggcagaaggaggt

SEQ ID NO: 135518 - DNA, 75 bp, synthetic construct
  source 1..75: mol_type = other DNA
gagtatggcagtgagttcgggggctttttccccgtccaggtccgtttcacgcctgcccacgaacgtttccacctg

SEQ ID NO: 135519 - DNA, 75 bp, synthetic construct
  source 1..75: mol_type = other DNA
gggtgagcagattgatacccgcgacacgtcgaacctgcgcaaatattccattcttggcgcgggtgatgctgccaa

SEQ ID NO: 135520 - DNA, 75 bp, synthetic construct
  source 1..75: mol_type = other DNA
atgagcctgtacggttacaccacgaagcgcgatctaagcggctttggcaatatgctgtttatggcgttaatcggc

SEQ ID NO: 135521 - DNA, 75 bp, synthetic construct
  source 1..75: mol_type = other DNA
gcgtcgaacctgcgcaaatattccattcttggcgcgttaaccttgtatctggacttcatcaacctgttcctgatg

SEQ ID NO: 135522 - DNA, 75 bp, synthetic construct
  source 1..75: mol_type = other DNA
ggagtggacgatacaagattttataagctagatagaaaattaaaaaataatttaaagttagctttgggatttgat

SEQ ID NO: 135523 - DNA, 75 bp, synthetic construct
  source 1..75: mol_type = other DNA
tccagtattttcattgtctacactgccgcctctattgccagtaccttcgttgtcaccgccgggatgttcggcgcg

SEQ ID NO: 135524 - DNA, 75 bp, synthetic construct
  source 1..75: mol_type = other DNA
ctgctattcactaaccgtgtcttcttaatcggtttgataatcgcgcaattagctctggttatcgtgttatcagcg

SEQ ID NO: 135525 - DNA, 75 bp, synthetic construct
  source 1..75: mol_type = other DNA
tttgatgatttacccagtcaggcatgtccttatgattatgctgtggctaagttgacgttgaatccgagctatatt

SEQ ID NO: 135526 - DNA, 75 bp, synthetic construct
  source 1..75: mol_type = other DNA
cctccggcaaaagacacaagcctggtttatggcgatacctattcctattttttcgacggtggtatcacaggttca

SEQ ID NO: 135527 - DNA, 75 bp, synthetic construct
  source 1..75: mol_type = other DNA
aagtcggacacccgataaatcttctgcgtatccaggatatttttaccagttctgtcaggttgctggttgatgcga

SEQ ID NO: 135528 - DNA, 75 bp, synthetic construct
  source 1..75: mol_type = other DNA
gtcgtggtcagtattttcgttaacccgatgcagtttgaccgcccggaagatctggcgcgctatccgcgcaccttg

SEQ ID NO: 135529 - DNA, 75 bp, synthetic construct
  source 1..75: mol_type = other DNA
agcaaagaagagctggaacagcacctggcgaacgtatgggaagtcatgcgcggcggtattgagcgcggtatttct

SEQ ID NO: 135530 - DNA, 75 bp, synthetic construct
  source 1..75: mol_type = other DNA
atgtcatcgactggatcaacatgtacgcgctggcggttagtgaagaaaacgcagctggcgggcgcgtggtaacgg

SEQ ID NO: 135531 - DNA, 75 bp, synthetic construct
  source 1..75: mol_type = other DNA
atgttattcacaatcattgccatttcaattagctaataccacatggctaatgatcaaagaaggttatgaaaaaaa

SEQ ID NO: 135532 - DNA, 75 bp, synthetic construct
  source 1..75: mol_type = other DNA
tcagaaagcatttgtagcccatcatgcgatgagagaagcgctgataaaaaaacaaaaataaagaatcgcataatc

SEQ ID NO: 135533 - DNA, 75 bp, synthetic construct
  source 1..75: mol_type = other DNA
ccatcggaacaggtacattagcggtaacaggcactgttgggacgtctacttgttcagtgacttttccacaaagtg

SEQ ID NO: 135534 - DNA, 75 bp, synthetic construct
  source 1..75: mol_type = other DNA
tgatccgtatgatgtggcttatgcgatttacaaatctgtaccggatatttcgaaactgaccaacgatgtaagcaa

SEQ ID NO: 135535 - DNA, 75 bp, synthetic construct
  source 1..75: mol_type = other DNA
tttggtgtgcagggaacaccggattgctttaaagctatgctcaaatcagtaagcggtgtgcgagaaaacctgatt

SEQ ID NO: 135536 - DNA, 75 bp, synthetic construct
  source 1..75: mol_type = other DNA
attggtgcgcgtccgtatatgggctttgatcaggtggcagaacaggagatcatggacgaaatcagaaaacgcttt

SEQ ID NO: 135537 - DNA, 75 bp, synthetic construct
  source 1..75: mol_type = other DNA
ccaccggcaaagagtttatgccgcgtgaaatcagtttgctgatcggtgaagagggaaacccactgagcagtcagg

SEQ ID NO: 135538 - DNA, 75 bp, synthetic construct
  source 1..75: mol_type = other DNA
gaaaagcattgcgcggttatcttgaacgcctaggtaatatgtcgctggctgaccgggttaaatacgccgatgctt

SEQ ID NO: 135539 - DNA, 75 bp, synthetic construct
  source 1..75: mol_type = other DNA
agaggcttcactaatgacagccagctacaaacactgtttaattatctgctgcaatgcggcgatacctcccgtttc

SEQ ID NO: 135540 - DNA, 75 bp, synthetic construct
  source 1..75: mol_type = other DNA
gtcgtcccttaccgcgatgttgctactaatttttatgatcctgttccccgacgcccgcgtcattattgttgcgaa

SEQ ID NO: 135541 - DNA, 75 bp, synthetic construct
  source 1..75: mol_type = other DNA
ttttacttaatgaagaagggaagatggcgatgatgcgcaaggagcacatgcggcaaaagctgaacatcaaatcac

SEQ ID NO: 135542 - DNA, 75 bp, synthetic construct
  source 1..75: mol_type = other DNA
tgagtccacgcagcaggacggcagttggacaagtgtgacctccggccatggtactggtaaatcggatatgacgag

SEQ ID NO: 135543 - DNA, 75 bp, synthetic construct
  source 1..75: mol_type = other DNA
atggttacacggacagaccaactactaagaaaagcgatgcgaggctatctggaatatctcggcaacatgccgcta

SEQ ID NO: 135544 - DNA, 75 bp, synthetic construct
  source 1..75: mol_type = other DNA
tcagcaagctgttcaatctggtccagccggacatcgcctgcttcggtgaaaaagattttcagcaactggcgctga

SEQ ID NO: 135545 - DNA, 75 bp, synthetic construct
  source 1..75: mol_type = other DNA
gtgttaattatcgaaaccctgccgttgctgcgtcagcaaattcgccgcctgcgaatggaaggcaaacgcgtggca

SEQ ID NO: 135546 - DNA, 75 bp, synthetic construct
  source 1..75: mol_type = other DNA
tccgcaacttgcccggcagttgtacaccgaagcttttccgttggtggatatcaccatcgtacctgacgatgagat

SEQ ID NO: 135547 - DNA, 75 bp, synthetic construct
  source 1..75: mol_type = other DNA
gcgcatgctggaacagggcattgatcgtgacctggtgctcgcggccacccagctaagcgaagccgatctggcagc

SEQ ID NO: 135548 - DNA, 75 bp, synthetic construct
  source 1..75: mol_type = other DNA
ctcacgaggtagcatgttaagcatgctacctgcctaccgccgacaatacaaggggttgggcgttatttatccaag

SEQ ID NO: 135549 - DNA, 75 bp, synthetic construct
  source 1..75: mol_type = other DNA
gaagccaccgtaaacaataacggcagcaccaccgttgacggcaaggattccacgggcaccgagataaacggtgac

SEQ ID NO: 135550 - DNA, 75 bp, synthetic construct
  source 1..75: mol_type = other DNA
gctcgttattacgggtgataatgccacagtaaacaacactggaaaaaccatcgtcgacggcacaggcgccaccgg

SEQ ID NO: 135551 - DNA, 75 bp, synthetic construct
  source 1..75: mol_type = other DNA
atggtcagggctcgaccggtaccgagatcgcgggtaataacgcggtggtgaatcaggacggtacactggatgtca

SEQ ID NO: 135552 - DNA, 75 bp, synthetic construct
  source 1..75: mol_type = other DNA
gattaacggtgatgaagccaccgtaaacaataacggcaataccaccgtagacggtcagggttcgaccggaactga

SEQ ID NO: 135553 - DNA, 75 bp, synthetic construct
  source 1..75: mol_type = other DNA
ttgatggtcagggctctacaggtaccgaaatcgcaggtaataacgcggtggtgaatcaggacggcacgctggacg

SEQ ID NO: 135554 - DNA, 75 bp, synthetic construct
  source 1..75: mol_type = other DNA
cggttaccgatccggattccatcggtattctgatcgacggtgataaagccatcgtcaacaatgacggcgacaacg

SEQ ID NO: 135555 - DNA, 75 bp, synthetic construct
  source 1..75: mol_type = other DNA
aattactgtgccgggggattaccctgaaaatacgaccacttttgccccattaacgccatacgataaatgggatgg

SEQ ID NO: 135556 - DNA, 75 bp, synthetic construct
  source 1..75: mol_type = other DNA
agaaatcacagttccgggtgattaccctgataatacaaccactatcgccccgttaacgccatacgataaatggga

SEQ ID NO: 135557 - DNA, 75 bp, synthetic construct
  source 1..75: mol_type = other DNA
agcttattgccacgaaggcggggaatattactgtctataactatgatggtgaaacacgggagtatatttctgcat

SEQ ID NO: 135558 - DNA, 75 bp, synthetic construct
  source 1..75: mol_type = other DNA
gttatccaggacggcgatctggatgtcagcggcggcggtcacggcattgatatcaccggtgacagcgcaacggtg

SEQ ID NO: 135559 - DNA, 75 bp, synthetic construct
  source 1..75: mol_type = other DNA
ttgacggcaaggattccaccggtacggaaatcaacggtaataacgggaaagtgattcaggacggcggtgatgctg

SEQ ID NO: 135560 - DNA, 75 bp, synthetic construct
  source 1..75: mol_type = other DNA
gatatctgaaaacaggcaccgcaaaaagcattggtctcaccccaacaagcctcggatattcatattcaggcacca

SEQ ID NO: 135561 - DNA, 75 bp, synthetic construct
  source 1..75: mol_type = other DNA
cagtttatatcatttggtcgtttatcctattacaagggattagatgtattacttgaagcattaaaaattttaaaa

SEQ ID NO: 135562 - DNA, 75 bp, synthetic construct
  source 1..75: mol_type = other DNA
atcagggaagcggtccggcagacctggacattaaacaagatgccggtgggacaggagcagaaaaggaaacagtcg

SEQ ID NO: 135563 - DNA, 75 bp, synthetic construct
  source 1..75: mol_type = other DNA
ggcaactggttggcaaactggaaacaccgggagtccgttgtttttgtccactgatgcacttgttttcatgggaca

SEQ ID NO: 135564 - DNA, 75 bp, synthetic construct
  source 1..75: mol_type = other DNA
gttcttctggcgcagccacgtttttacgcaaatcaggcgccgaagaaaaagatattcttgcatgtagcccccgaa

SEQ ID NO: 135565 - DNA, 75 bp, synthetic construct
  source 1..75: mol_type = other DNA
aaatatcggctctcgcgactgaatgccacgctatagcatctgagcttgatgttggcgatgaacgaaccgagatgt

SEQ ID NO: 135566 - DNA, 75 bp, synthetic construct
  source 1..75: mol_type = other DNA
agaaagcaaagctattgaaagaatgcttcacttcatgcacgggactttatcaaaagacgaaccgagaaaatattg

SEQ ID NO: 135567 - DNA, 75 bp, synthetic construct
  source 1..75: mol_type = other DNA
atgaaaaaggcttccgcgccgatgatattcagattcgcgatgccgacacattgctggaagtctctgaaaccagca

SEQ ID NO: 135568 - DNA, 75 bp, synthetic construct
  source 1..75: mol_type = other DNA
aacgtaaagtggatttagttttcgccccttcggtaaaagagatctacccgaacggtactgaaacccacacttacg

SEQ ID NO: 135569 - DNA, 75 bp, synthetic construct
  source 1..75: mol_type = other DNA
gtgttaattatcgaaaccctgccgctgctgcgtcagcaaattcgccgcctgcgtatggaaggcaagcgcgtggcg

SEQ ID NO: 135570 - DNA, 75 bp, synthetic construct
  source 1..75: mol_type = other DNA
gagctatggagcttaagtacattgataaggctaacagtgatttccgaaaaagatattattcatcctcgcaggagg

SEQ ID NO: 135571 - DNA, 75 bp, synthetic construct
  source 1..75: mol_type = other DNA
ttgtgaatcgtcaggatgagtttgccgccacgtgccgactgaagaactttggcgtggcaatcgcagaacctttct

SEQ ID NO: 135572 - DNA, 75 bp, synthetic construct
  source 1..75: mol_type = other DNA
aacgagcggtgattctggtagccgcctggcttggcgatgctcgcctgatcgacaacaaactggtcgaactggcgt

SEQ ID NO: 135573 - DNA, 75 bp, synthetic construct
  source 1..75: mol_type = other DNA
atgaaaactgaactgaccctgaatgtcctgcagaccatgaacgcacaggaatacgaagatatccgggctgccgga

SEQ ID NO: 135574 - DNA, 75 bp, synthetic construct
  source 1..75: mol_type = other DNA
acgccacgcagcccgctggacacgctggagagcgccatcggttttcacatgcgcgactggtggcagccgacaaaa

SEQ ID NO: 135575 - DNA, 75 bp, synthetic construct
  source 1..75: mol_type = other DNA
atgaaaactgaactgaccctggatgtattacagaccatgagcgcacaggaatatgaagatatccgggctgccgga

SEQ ID NO: 135576 - DNA, 75 bp, synthetic construct
  source 1..75: mol_type = other DNA
tgcagcccatgaacgcacaggaatatgaagatatccgggctgccggaagtgatgaacgccgtgagctgactcacg

SEQ ID NO: 135577 - DNA, 75 bp, synthetic construct
  source 1..75: mol_type = other DNA
tccaggccatgaacgcacaggaatatgaagatatccgggctgccggaagtgatgaacgccgtgagctgactcacg

SEQ ID NO: 135578 - DNA, 75 bp, synthetic construct
  source 1..75: mol_type = other DNA
ggcactggcggcgacactggatgcgcagggatacagcgttaacgacatcatccatatcctgatgacagaaggagg

SEQ ID NO: 135579 - DNA, 75 bp, synthetic construct
  source 1..75: mol_type = other DNA
gacaataaatttgctatgccctatatgtgggcgacgaccgggattggctataacgtcgataaagtcaaagcggta

SEQ ID NO: 135580 - DNA, 75 bp, synthetic construct
  source 1..75: mol_type = other DNA
caaacggcgatatctgcgtcgctattggctgggcgggcgatgtctggcaggcgtcaaaccgcgcgaaggaagcga

SEQ ID NO: 135581 - DNA, 75 bp, synthetic construct
  source 1..75: mol_type = other DNA
cggctaccgatctgctgttaaagctgcgcccgaacattcgttatttccattcatctcaatacattaacgacctgg

SEQ ID NO: 135582 - DNA, 75 bp, synthetic construct
  source 1..75: mol_type = other DNA
ccctgcagtccatgaacgcacaggaatatgaagatatccgtgctgcgggaagcgatgaacgccgtgagctgacac

SEQ ID NO: 135583 - DNA, 75 bp, synthetic construct
  source 1..75: mol_type = other DNA
ggcactggcggcgtcactggatgaacagggatacagcgtcagtgacatcatccatatcctgatggcggaaggtgg

SEQ ID NO: 135584 - DNA, 75 bp, synthetic construct
  source 1..75: mol_type = other DNA
aaagaaaccggtattaaagtcgtctacgatgttttcgactctaacgaagtactggaaggcaaattaatggcgggg

SEQ ID NO: 135585 - DNA, 75 bp, synthetic construct
  source 1..75: mol_type = other DNA
ctgacgcaggcacaacaagggcagggctggttctggcagcagaacagcgaggggcggtatgtggatgcgctgcgg

SEQ ID NO: 135586 - DNA, 75 bp, synthetic construct
  source 1..75: mol_type = other DNA
ggacgtaagccgcggatctcactcacgcgtgatacagaacatcccttatggccattatatctagttgccaaacaa

SEQ ID NO: 135587 - DNA, 75 bp, synthetic construct
  source 1..75: mol_type = other DNA
tacagaccatgaacgcacaggaatatgaagatatccgtgctgcgggaagcgatatgcgccgtaatctcactcacg

SEQ ID NO: 135588 - DNA, 75 bp, synthetic construct
  source 1..75: mol_type = other DNA
gaaaatacaaccactatagccccattaacgccatacgataaatgggatggtgagaaatgggtgaccgatactgag

SEQ ID NO: 135589 - DNA, 75 bp, synthetic construct
  source 1..75: mol_type = other DNA
agattttaactcatgggaatatgtgccagaccatcgcggtgaaacggtctatagcactgaaacaggagaatcaaa

SEQ ID NO: 135590 - DNA, 75 bp, synthetic construct
  source 1..75: mol_type = other DNA
cctgaaaacacgaccactatcgctccatttacgccatacgataaatgggatggtgagaaatgggtgaccgatact

SEQ ID NO: 135591 - DNA, 75 bp, synthetic construct
  source 1..75: mol_type = other DNA
ggttacgggtcgtgttttgcggtatcaaccctggtctttcatccgccggaactggttttccctttgctcatccgg

SEQ ID NO: 135592 - DNA, 75 bp, synthetic construct
  source 1..75: mol_type = other DNA
ggtgagccgtttgcggtggttcaggtacagcggcggtttgcaccggaagccgtcagccattcactggcactggcg

SEQ ID NO: 135593 - DNA, 75 bp, synthetic construct
  source 1..75: mol_type = other DNA
ggcgcttgccgcgacacttgatgcgcaggggtacagtgttaacgatatcatccatatcctgatggcagaaggagg

SEQ ID NO: 135594 - DNA, 75 bp, synthetic construct
  source 1..75: mol_type = other DNA
agctacacgcaggcgggcgtaagctgattgaaaaaattgaagattaccaaccacaagcgttggcgattctgggca

SEQ ID NO: 135595 - DNA, 75 bp, synthetic construct
  source 1..75: mol_type = other DNA
agatttgggtattgccgaatcccagcggtttaagtcgagtttctctggagaaactggttgaggcatatcgggagt

SEQ ID NO: 135596 - DNA, 75 bp, synthetic construct
  source 1..75: mol_type = other DNA
caaacgctcaccattggttcgacgcagatttgggtgttgccgaatcccagcggtttaagtcgcgtttcactggag

SEQ ID NO: 135597 - DNA, 75 bp, synthetic construct
  source 1..75: mol_type = other DNA
ataactccttttcgttgcctctgaatctgggcatcggtggcgcagtggcaaaactatccagtctggactggcaga

SEQ ID NO: 135598 - DNA, 75 bp, synthetic construct
  source 1..75: mol_type = other DNA
tggcgtaacagtagctcggctatagcttcatatgaacgcaattatccagaggaaggcggctttgctcaggggatg

SEQ ID NO: 135599 - DNA, 75 bp, synthetic construct
  source 1..75: mol_type = other DNA
cgcgacggctgctaaaaatttccctgaagacggtgcagtcggtgtactggaggtattcaatggcggtaattttgc

SEQ ID NO: 135600 - DNA, 75 bp, synthetic construct
  source 1..75: mol_type = other DNA
acggggcttggtattgtcggtgaagtcgatggtgatgacccggcagtattcagaccaatacaaaaatacatcaat

SEQ ID NO: 135601 - DNA, 75 bp, synthetic construct
  source 1..75: mol_type = other DNA
aacgccaaaggcagtaaaagcagcctatgacaatgctgaaaaacgtatgcagaaagaccagaacggtggcgatat

SEQ ID NO: 135602 - DNA, 75 bp, synthetic construct
  source 1..75: mol_type = other DNA
tgcggtgcgcaagttattcccggcaattatggtaattttgactcacgctatgtgagagatgtcagacttggcaca

SEQ ID NO: 135603 - DNA, 75 bp, synthetic construct
  source 1..75: mol_type = other DNA
tttatcctgtaagtgataacgaaagatacattgctatcgtagttttactaaaaattttattccccgcagatacac

SEQ ID NO: 135604 - DNA, 75 bp, synthetic construct
  source 1..75: mol_type = other DNA
atgaaacaatatgaagatggttataacgtgaatggatatagctgggaaaatgaaacaactgagcatttgttgact

SEQ ID NO: 135605 - DNA, 75 bp, synthetic construct
  source 1..75: mol_type = other DNA
ggtgctcggcggtatttgcggcgtgttgacgttgattggcggcgcaggactgctgtggcgcaggctgacaaatca

SEQ ID NO: 135606 - DNA, 75 bp, synthetic construct
  source 1..75: mol_type = other DNA
ttgtaaggataaatattctaaagatttacggtatatatttatggggaaagttgaatgccctcttgaatattatca

SEQ ID NO: 135607 - DNA, 75 bp, synthetic construct
  source 1..75: mol_type = other DNA
tcaaaaaacaatctcaaagccagtaaagtttgaaattgactttgtgatcaatgatttgaaatttaaatataaaat

SEQ ID NO: 135608 - DNA, 75 bp, synthetic construct
  source 1..75: mol_type = other DNA
ggtcctaatgcttcagggaagtcaaaccttctaaaggtgttttctgcattaaattatcttgttgaggatagcttt

SEQ ID NO: 135609 - DNA, 75 bp, synthetic construct
  source 1..75: mol_type = other DNA
tttgtgttttaggcacagcgctagctattcgtgtcgcattagggcacgtcactgttcaattaccagatgtctggt

SEQ ID NO: 135610 - DNA, 75 bp, synthetic construct
  source 1..75: mol_type = other DNA
tgcgggtatgctctcccctatgcaatcagcggtgaatggtcaattaggtcactggttacaggacggtaatgcatg

SEQ ID NO: 135611 - DNA, 75 bp, synthetic construct
  source 1..75: mol_type = other DNA
atcgtttttttctaaattcacttgtctgaatatgcttcgcctggttcgtgcagtgatcccggttgctgttctgat

SEQ ID NO: 135612 - DNA, 75 bp, synthetic construct
  source 1..75: mol_type = other DNA
gtgcttctgcgcccgtcaaaaagaagtcgtttttttctaaattcactcgtctgaatatgctctgcctgcttcgcg

SEQ ID NO: 135613 - DNA, 75 bp, synthetic construct
  source 1..75: mol_type = other DNA
atggacgccgttttaagtgttcagggggcttctgcgcccgtcaaaaagaaatcgtttttttccaaattcactcgt

SEQ ID NO: 135614 - DNA, 75 bp, synthetic construct
  source 1..75: mol_type = other DNA
attttggtcagaggtctggggttactgatgctgggagttgcttcaacagcgggccagttggatttgcccctatat

SEQ ID NO: 135615 - DNA, 75 bp, synthetic construct
  source 1..75: mol_type = other DNA
cgccgcacgattacagcaagacgagtaccaatcattgacgaagcccagacatggggcgcgaaacagacattcagt

SEQ ID NO: 135616 - DNA, 75 bp, synthetic construct
  source 1..75: mol_type = other DNA
acgggctttaaacaaaatggtgatggtaatctggatgtttatgctaatagcgtccatgttatgcgctttgtctcc

SEQ ID NO: 135617 - DNA, 75 bp, synthetic construct
  source 1..75: mol_type = other DNA
actggcaatgtttatatgcgtaatctttctggcacctggaatggctcagacggtccgtggatctactggcgtcag

SEQ ID NO: 135618 - DNA, 75 bp, synthetic construct
  source 1..75: mol_type = other DNA
tatattggaatagtaaggcggctttattttgttcaactgatttaaaatcgaaatcacaatcacctgcattaggtt

SEQ ID NO: 135619 - DNA, 75 bp, synthetic construct
  source 1..75: mol_type = other DNA
attcacagagcatggacatcgtcgctgataatatcagtaaactcaaagagctgtttccagaagcctttatcgaag

SEQ ID NO: 135620 - DNA, 75 bp, synthetic construct
  source 1..75: mol_type = other DNA
taccgtagtatttcactccgcacattcggagatatggagagctctagttcaagcttataccgaagcaggattcgc

SEQ ID NO: 135621 - DNA, 75 bp, synthetic construct
  source 1..75: mol_type = other DNA
ctggcagtcagcggcaccccggaaaatcagggaatatgcaccgcaggaccatgagcttcatcgtatcgcggatgc

SEQ ID NO: 135622 - DNA, 75 bp, synthetic construct
  source 1..75: mol_type = other DNA
atctcacctttagcactaccagttacagagaacttaagatgaaaacattacctgacacacacgtacgggaggcat

SEQ ID NO: 135623 - DNA, 75 bp, synthetic construct
  source 1..75: mol_type = other DNA
acccggaacagtccgactggtcaggctatgacagccgatgcggaagccgctgtcagcgaagccctgcgcgacctg

SEQ ID NO: 135624 - DNA, 75 bp, synthetic construct
  source 1..75: mol_type = other DNA
ataacgctgcatggggagtgcgaacattgtggtttgaactcgtcacaaaaatcgatatggatatacataaaaaga

SEQ ID NO: 135625 - DNA, 75 bp, synthetic construct
  source 1..75: mol_type = other DNA
ttaccgctgaacgtattagcgactacatgaccgaagcagttaatactgactctaaagccgttgcgaaaatgtttc

SEQ ID NO: 135626 - DNA, 75 bp, synthetic construct
  source 1..75: mol_type = other DNA
ttaccgctgaacgtattagcgactacatgactgaagcagttaatacagactctatagccgttgcggaaatgtatc

SEQ ID NO: 135627 - DNA, 75 bp, synthetic construct
  source 1..75: mol_type = other DNA
ttcgcgtctcgatcgtgaagccagcctgctgggtcacagtggttgccgtattggcggtaacgatctggatatcgc

SEQ ID NO: 135628 - DNA, 75 bp, synthetic construct
  source 1..75: mol_type = other DNA
accgaaccggtggtgcggttgaatgtggaatcacgcggtgatgtaaagctaatggaaaagaaaactaaagctctt

SEQ ID NO: 135629 - DNA, 75 bp, synthetic construct
  source 1..75: mol_type = other DNA
cattgaagttactgccagccataacccgatggattataacggcatgaagctggtgcgcgagggggcccgcccgat

SEQ ID NO: 135630 - DNA, 75 bp, synthetic construct
  source 1..75: mol_type = other DNA
gagcaaatgaaacaacacatgacagcattcttccaggagcaggccagactgataggcagcgtgaaaggcgtcggc

SEQ ID NO: 135631 - DNA, 75 bp, synthetic construct
  source 1..75: mol_type = other DNA
gtcgtcgtcagttgaaccatatgctggtcgctgagcgtaatcgtctctatccttctcatccccaaagcaggaaga

SEQ ID NO: 135632 - DNA, 75 bp, synthetic construct
  source 1..75: mol_type = other DNA
attccgattgcaggcggcgatgactttggctccgtcaccgccggactggcacgctgggcggaagtggtgtttcgt

SEQ ID NO: 135633 - DNA, 75 bp, synthetic construct
  source 1..75: mol_type = other DNA
accaagaagctggatggctcgctggtactggataaaattacgtggctgggggagacattacagactacagaattg

SEQ ID NO: 135634 - DNA, 75 bp, synthetic construct
  source 1..75: mol_type = other DNA
aggtaatgccgctgcaaccgatggtgaaatagtttttgatggcgagattttaaaatccgcttgtgaaatcaatga

SEQ ID NO: 135635 - DNA, 75 bp, synthetic construct
  source 1..75: mol_type = other DNA
cgactggcgattgcgcaaggcgcgggagcgcgatctggcggtgaactttgtcgtgcgtgaagaacacttgtggtc

SEQ ID NO: 135636 - DNA, 75 bp, synthetic construct
  source 1..75: mol_type = other DNA
ggtgctaggtggtatttgcggtgtgttgacgttgattggcggcgcaggactgctgtggcgcaggctgacaaatca

SEQ ID NO: 135637 - DNA, 75 bp, synthetic construct
  source 1..75: mol_type = other DNA
atgggctgcgcatgtggaggatgggattgcggcattaaggaattatcgtaacctaagagattttgcattaggatt

SEQ ID NO: 135638 - DNA, 75 bp, synthetic construct
  source 1..75: mol_type = other DNA
atgggctgcgcatgtggaagatgggattgcggcgttgcggaattatcgaaatttaaaagactttactttgaattt

SEQ ID NO: 135639 - DNA, 75 bp, synthetic construct
  source 1..75: mol_type = other DNA
gtatcctggctgagttacagcaaacggcaggtatagcacgttttaccccgcatgatatgcggcgcaccttcatca

SEQ ID NO: 135640 - DNA, 75 bp, synthetic construct
  source 1..75: mol_type = other DNA
gtccgccaactggcaggccacagcgacatatccacgacaacccgctatgactgtcgtggtgagagcatgaaagtc

SEQ ID NO: 135641 - DNA, 75 bp, synthetic construct
  source 1..75: mol_type = other DNA
acatatccacgacgacgcgctatgactatcgtggtgagggtatgaaagccaaagcatcacagagtttacggtgct

SEQ ID NO: 135642 - DNA, 75 bp, synthetic construct
  source 1..75: mol_type = other DNA
ccgggcgcagggggatgcaaagcttactccgacgatgtgccggtatcctccgtccgggggtgaaccccgacacct

SEQ ID NO: 135643 - DNA, 75 bp, synthetic construct
  source 1..75: mol_type = other DNA
aatgccgaaacgctggcacgtatccggtcagttaagcgcgtgagcggcgatattcagcgcaagggaagggcgctg

SEQ ID NO: 135644 - DNA, 75 bp, synthetic construct
  source 1..75: mol_type = other DNA
aggaagggcattagacaggcaggaaatccgggcgctgattcaggccgcaagacaacatccgcaaccggtacggcg

SEQ ID NO: 135645 - DNA, 75 bp, synthetic construct
  source 1..75: mol_type = other DNA
atgatcaagaagacaacggaaatcgatgccatcttgttaaatctcaataaggctatcgatgcccattaccaatgg

SEQ ID NO: 135646 - DNA, 75 bp, synthetic construct
  source 1..75: mol_type = other DNA
tcttgatgagtcctttgatcatcaattacgcaatgctgagccgttgaatctctatttaatattgctggatataga

SEQ ID NO: 135647 - DNA, 75 bp, synthetic construct
  source 1..75: mol_type = other DNA
acgtccgtttaaattacgcctcagcattctcactggcgatcgtcctgtactggttctgcgcattattcagctgga

SEQ ID NO: 135648 - DNA, 75 bp, synthetic construct
  source 1..75: mol_type = other DNA
attgatgaaccaggtcacgcagataacaccgccactctcaaactgaaaaagacagcaccgttctctgctctgttg

SEQ ID NO: 135649 - DNA, 75 bp, synthetic construct
  source 1..75: mol_type = other DNA
gcgttccgtttgaaggtctgaaagaacgttcttttaaattacgcctcagcattatcactggcgatcgtcctgtac

SEQ ID NO: 135650 - DNA, 75 bp, synthetic construct
  source 1..75: mol_type = other DNA
tccgtttccgtggtgcgctttccactgccagcatcgatgactttacccgttattctaaagatcttgcagatgaag

SEQ ID NO: 135651 - DNA, 75 bp, synthetic construct
  source 1..75: mol_type = other DNA
gaaaaatttaatttaaatcgcttccgtttccgtggtgcgctttccactgccagcatcgatgactttacccgttat

SEQ ID NO: 135652 - DNA, 75 bp, synthetic construct
  source 1..75: mol_type = other DNA
atcgatgccgataatatgcgagccgtcagtgtgcttaacctgggtactattgatgaaccaggtcacgcagataac

SEQ ID NO: 135653 - DNA, 75 bp, synthetic construct
  source 1..75: mol_type = other DNA
tcaggcaacaaaagcggctgcggctgtccgtaaaatcacgattgaagcaaaccagaccgctgattttgaagataa

SEQ ID NO: 135654 - DNA, 75 bp, synthetic construct
  source 1..75: mol_type = other DNA
agcggcaaacgctccctgatggagtctgtcgaagcgaaaaccaaagacattatgccagtggcatttgaatttaaa

SEQ ID NO: 135655 - DNA, 75 bp, synthetic construct
  source 1..75: mol_type = other DNA
gccaccctcaaactgaaaaagacagcaccgttttctgctctgttgtctgttaatggcgagcgtaactcccagaag

SEQ ID NO: 135656 - DNA, 75 bp, synthetic construct
  source 1..75: mol_type = other DNA
aagtaccataccgttttcagcacagtatcctgatggtagcgaaatgatgaagctggtgggttgggcgcaaagcat

SEQ ID NO: 135657 - DNA, 75 bp, synthetic construct
  source 1..75: mol_type = other DNA
ccaacaaatagtcgctgatgaaaaagcgggtaatgactccaacttattgatagtgttttatgttcagataatgcc

SEQ ID NO: 135658 - DNA, 75 bp, synthetic construct
  source 1..75: mol_type = other DNA
tgctttaacagtaatgttgaatgtactgcggatgaaatcagcgcactgcgtaaagctgaacagaacagctctgag

SEQ ID NO: 135659 - DNA, 75 bp, synthetic construct
  source 1..75: mol_type = other DNA
ctaaaaaagcgttactggcttccttcgtggctactgtcatgaccttaccggcgcaagccggtattccggtcatcg

SEQ ID NO: 135660 - DNA, 75 bp, synthetic construct
  source 1..75: mol_type = other DNA
aagcccgtaagaaagcaaacgatgctgtttttaaggctctcgatgaacagcagataatgctccaaagcgatgctg

SEQ ID NO: 135661 - DNA, 75 bp, synthetic construct
  source 1..75: mol_type = other DNA
caccattaagagcaattttagccgctaaaaaaaatctaactattttcctatccgcatctttgattgcgatagctg

SEQ ID NO: 135662 - DNA, 75 bp, synthetic construct
  source 1..75: mol_type = other DNA
cattactaagaacaattttagccgctaaaaagacgttactggtttctttcgtggcgtcaatcatggctttaccgg

SEQ ID NO: 135663 - DNA, 75 bp, synthetic construct
  source 1..75: mol_type = other DNA
caatacgctgagtattcaggatctggattttcagcatcagccctgcgatttctttgcacgtgttgtgatggtcct

SEQ ID NO: 135664 - DNA, 75 bp, synthetic construct
  source 1..75: mol_type = other DNA
tatccccggatgactggtcagcactggaagaggctgaatatcagctttactggctgcgtgcacttaccggtgggc

SEQ ID NO: 135665 - DNA, 75 bp, synthetic construct
  source 1..75: mol_type = other DNA
tccactgccagcatcgatgactttacccgttattctaaagatcttgcagatgaaggcacccgctgctttatcgat

SEQ ID NO: 135666 - DNA, 75 bp, synthetic construct
  source 1..75: mol_type = other DNA
tgcagatgaaatcagcgcactgcgtaaagcagaacagaacagctctgaggcgcgtaaaaaggccaatgacgccgt

SEQ ID NO: 135667 - DNA, 75 bp, synthetic construct
  source 1..75: mol_type = other DNA
cttaagccagaagaggagcgtcacctgctggatacgcgctgcggaatcaccatgctggttgaacgaccgaccgtt

SEQ ID NO: 135668 - DNA, 75 bp, synthetic construct
  source 1..75: mol_type = other DNA
aaaaagtaatatccgggccatatgaagaatatggaaaatggtggatagatgtcgaatacatttcatggggtgttc

SEQ ID NO: 135669 - DNA, 75 bp, synthetic construct
  source 1..75: mol_type = other DNA
gtacatgatgaccaaaaatgttaagttcctcgccggttttgccattatctccgtgtttattaccgtgggtatggc

SEQ ID NO: 135670 - DNA, 75 bp, synthetic construct
  source 1..75: mol_type = other DNA
aacgcttgaagatttaaagaaacgatatcctgatattattctcattacagaatcggaagcattagcattgcaatc

SEQ ID NO: 135671 - DNA, 75 bp, synthetic construct
  source 1..75: mol_type = other DNA
gcagcacagggccaggacctgatggcaagcggtaacaccacggttaaggcgaccttcggtaaggactccagtgtt

SEQ ID NO: 135672 - DNA, 75 bp, synthetic construct
  source 1..75: mol_type = other DNA
tttctggcggcatctgaagaaaatgcgtcagcactatgcgcagcgtaggcagtggattgaacaggcgcttacgca

SEQ ID NO: 135673 - DNA, 75 bp, synthetic construct
  source 1..75: mol_type = other DNA
ttacctgtgcctgttgatgacaacggactggatgtcgcaagtggaatgcaaaattatcctgatgcgcattttgcc

SEQ ID NO: 135674 - DNA, 75 bp, synthetic construct
  source 1..75: mol_type = other DNA
ccatcccgctgggcctggcacgcgaaaataaaggcgtagcggcattcgctggcttcgtcggttatgcggtaatga

SEQ ID NO: 135675 - DNA, 75 bp, synthetic construct
  source 1..75: mol_type = other DNA
aataaaccggccctgattaaagaaatcatccgctctatgccgctgaccctgaacgtcaaaatcgccgagttgtcg

SEQ ID NO: 135676 - DNA, 75 bp, synthetic construct
  source 1..75: mol_type = other DNA
gcgaaatggatattattaataaaaacgccgaactgatggtttcccaggtcgggcatctggcgtttgatattgatc

SEQ ID NO: 135677 - DNA, 75 bp, synthetic construct
  source 1..75: mol_type = other DNA
gcatctttaaattagaaggtaatcggctcggacgcccctaccatcgcctgccgaccctgtttacggggaattttg

SEQ ID NO: 135678 - DNA, 75 bp, synthetic construct
  source 1..75: mol_type = other DNA
ctaaaggtaacgatacggttaaggcgaccttcggtaaggactccagtatcgttaaatgggttgttctggctgagg

SEQ ID NO: 135679 - DNA, 75 bp, synthetic construct
  source 1..75: mol_type = other DNA
gttttcgtattttgctcgacgacgcccacaccgattttattttaaatctgatccgccacagcgagcacagtaaac

SEQ ID NO: 135680 - DNA, 75 bp, synthetic construct
  source 1..75: mol_type = other DNA
atttttatggtctggagtcgtctcttgaagaggcgaaagcgcataacggcctgccgaccaaaaccgaaacacgat

SEQ ID NO: 135681 - DNA, 75 bp, synthetic construct
  source 1..75: mol_type = other DNA
aacttagacgcaaccgcaattaatcaaatccatgcccttatttctgctcagggtgttaatgaaattatcagtaag

SEQ ID NO: 135682 - DNA, 75 bp, synthetic construct
  source 1..75: mol_type = other DNA
aatcacaattgaagcaaaccagaccgctgattttgaagacaatgacttcagcggcaaacgctctctgatggagtc

SEQ ID NO: 135683 - DNA, 75 bp, synthetic construct
  source 1..75: mol_type = other DNA
aatcgtttccgtttccgtggtgcactttccactgccagcatcgatgactttacccgttattctaaagatcttgca

SEQ ID NO: 135684 - DNA, 75 bp, synthetic construct
  source 1..75: mol_type = other DNA
tttaatttaaatcgcttccgtttccgtggtgcgctttccactgccagcatcgatgactttacccgttattctaaa

SEQ ID NO: 135685 - DNA, 75 bp, synthetic construct
  source 1..75: mol_type = other DNA
atgcgtgccgtcagtgtgcttaacctgggtactattgatgagccaggtcacgcagataacactgccactctcaaa

SEQ ID NO: 135686 - DNA, 75 bp, synthetic construct
  source 1..75: mol_type = other DNA
tgagtatttaaaacaagattcacgaatgaaagaagctatagattttttatcaagctctgaagaaaccataaagat

SEQ ID NO: 135687 - DNA, 75 bp, synthetic construct
  source 1..75: mol_type = other DNA
aaagggggaatccagatggttatcagcatgatgggcgatgatattgcctacgcgcgtaaagctaatgccgctggc

SEQ ID NO: 135688 - DNA, 75 bp, synthetic construct
  source 1..75: mol_type = other DNA
gttctatggcagaacacactggcagactttcttcgcgaggggcatttctggcggcatctgaagaaaatgcgtcag

SEQ ID NO: 135689 - DNA, 75 bp, synthetic construct
  source 1..75: mol_type = other DNA
ggagacgggatgtggatggaagatcccggttttccactgattcgtccgattgtcactcgccacggtgtgaacgtt

SEQ ID NO: 135690 - DNA, 75 bp, synthetic construct
  source 1..75: mol_type = other DNA
gcgtgcccgggctgaagggcgtcacagtatgggaccgggaaaatttatcgccggtatcgtcatctgcggcatgct

SEQ ID NO: 135691 - DNA, 75 bp, synthetic construct
  source 1..75: mol_type = other DNA
gaacttgtttatatatttttctttttactgcgtttgttagttacctaaatgctttgttaggtggtaagtttaatg

SEQ ID NO: 135692 - DNA, 75 bp, synthetic construct
  source 1..75: mol_type = other DNA
ggggacaggctggcacatttgtcagtgagcggatatatccgcaacaatctactgtacaagttgtagcttttgccg

SEQ ID NO: 135693 - DNA, 75 bp, synthetic construct
  source 1..75: mol_type = other DNA
cgcgtgtcgctcacgctcgacacgctggataaaatggagcactaccggggccatctctacaactggtatgacacc

SEQ ID NO: 135694 - DNA, 75 bp, synthetic construct
  source 1..75: mol_type = other DNA
acctgggcgcatcaaaaagcactatggcaaacagatacttaagagatagctttccagcggaatgggtgattcagt

SEQ ID NO: 135695 - DNA, 75 bp, synthetic construct
  source 1..75: mol_type = other DNA
caccatcacagctacaggtgtgcaggatatacgtctgggcagcgccattggtattggacgtggcgggaatgcacc

SEQ ID NO: 135696 - DNA, 75 bp, synthetic construct
  source 1..75: mol_type = other DNA
cagaaggtcaggcatggattgacgacaaaacagttgccaacccagcaaggccagaagactacgatccgactccct

SEQ ID NO: 135697 - DNA, 75 bp, synthetic construct
  source 1..75: mol_type = other DNA
gcggttgcctgcattctggccgagatgaaactcgactatgaaacgctgatggcggcgctgctgcatgacgtgatt

SEQ ID NO: 135698 - DNA, 75 bp, synthetic construct
  source 1..75: mol_type = other DNA
atgatacacgtgaaagcgggcgagaataccgggggaagagaggctatccataggctaatggctgcctacgatttc

SEQ ID NO: 135699 - DNA, 75 bp, synthetic construct
  source 1..75: mol_type = other DNA
atcaggatgattcatcgtttgagtgtggcctagatgacattgaggtagtaggccgcgcactgaaaatcattaaga

SEQ ID NO: 135700 - DNA, 75 bp, synthetic construct
  source 1..75: mol_type = other DNA
atggaactgtatctggacaccgctaacgtcgcagaagtcgaacgtctggcacgcatattccccattgccggggtg

SEQ ID NO: 135701 - DNA, 75 bp, synthetic construct
  source 1..75: mol_type = other DNA
gtatctggcttcgttgtgtggtctgagatttaacccattgatgaaagcgatgtatgagcgattatgcctgagagg

SEQ ID NO: 135702 - DNA, 75 bp, synthetic construct
  source 1..75: mol_type = other DNA
aaattggaccaccggagataagaacaaaactttatcttgccgctttatgtgggctgagattcaaccctgtaatga

SEQ ID NO: 135703 - DNA, 75 bp, synthetic construct
  source 1..75: mol_type = other DNA
aaagcatggtgctggctgccagctttaaaacaccacgtcaggcgctggattgtttgctggcaggatgtgaatcca

SEQ ID NO: 135704 - DNA, 75 bp, synthetic construct
  source 1..75: mol_type = other DNA
acaaatgctcaacacgcctgcggtagagtcagctatagagaagttcgaacacgactggaatgccgcatttggcac

SEQ ID NO: 135705 - DNA, 75 bp, synthetic construct
  source 1..75: mol_type = other DNA
tctggcagcaattaaaatactgaaaaaagagggtattactacacttggcaccgctgtatatagcgccgcacaagg

SEQ ID NO: 135706 - DNA, 75 bp, synthetic construct
  source 1..75: mol_type = other DNA
gcaaaacagcttagtaacggaatttggctcatagacatcgacggtatgaaaaacatcgtcaaaattgcgcgcata

SEQ ID NO: 135707 - DNA, 75 bp, synthetic construct
  source 1..75: mol_type = other DNA
acaagccgcgtccggggcgcgtgaaagactacatcgccatcccaaaagcgaacggctatcagtctttacacacct

SEQ ID NO: 135708 - DNA, 75 bp, synthetic construct
  source 1..75: mol_type = other DNA
tggtcacgcctgcgtgggcgcacgcgtcgaccgccagccatatccactatcgcagccgctctccagcggtcaaac

SEQ ID NO: 135709 - DNA, 75 bp, synthetic construct
  source 1..75: mol_type = other DNA
tacgtcatcgctatgcgccgggcgtgacgcgcaatacagaatcatggttctgccttgcgctcccgcacgaacgtc

SEQ ID NO: 135710 - DNA, 75 bp, synthetic construct
  source 1..75: mol_type = other DNA
gctatgcgccgggcgtgacgcgtaatacggaatcatggttctgtattgcgctaccgcacgagcgtcaggtcgtat

SEQ ID NO: 135711 - DNA, 75 bp, synthetic construct
  source 1..75: mol_type = other DNA
aagatgacacttcatttgaatgttctgtagatgatgtggaagtcgtaggacgtgcagtcaaagtaatcaagaacc

SEQ ID NO: 135712 - DNA, 75 bp, synthetic construct
  source 1..75: mol_type = other DNA
ggcaacgcttgacgatctgctggctgaaatcggccttggtaacgcaatgagcgtggtggtcgcgaaaaatctaca

SEQ ID NO: 135713 - DNA, 75 bp, synthetic construct
  source 1..75: mol_type = other DNA
cgattaaaggtgctgatggcgtgttgatcacctttgcgaaatgctgccgccccattcctggcgacccgattatcg

SEQ ID NO: 135714 - DNA, 75 bp, synthetic construct
  source 1..75: mol_type = other DNA
gatatggaccagatggcggagatgggtgttgccgcgcactgggcttataaagagcacggcgaaaccagtactact

SEQ ID NO: 135715 - DNA, 75 bp, synthetic construct
  source 1..75: mol_type = other DNA
agactacatcgccattccaaaagcgaacggctatcagtcgttgcacacctcgatgattggcccgcacggcgtgcc

SEQ ID NO: 135716 - DNA, 75 bp, synthetic construct
  source 1..75: mol_type = other DNA
gaagcgggaataccgtgccgcgtcagtggtcgcgagaaacatctttattcgatttactgcaaaatggtgctcaaa

SEQ ID NO: 135717 - DNA, 75 bp, synthetic construct
  source 1..75: mol_type = other DNA
ggcggcgctgctgcatgacgtgattgaagatacacccgccacctaccaggatatggaacagctttttggtaaaag

SEQ ID NO: 135718 - DNA, 75 bp, synthetic construct
  source 1..75: mol_type = other DNA
caactagtaccagtgcacaggcaagagtgatgctttaccaggccagtcagcgcccaagcctgatggaggccgact

SEQ ID NO: 135719 - DNA, 75 bp, synthetic construct
  source 1..75: mol_type = other DNA
tatgactttacgtaactatcgtcggagattgaaagaagattccgtgcaattgctggaaattggaattgatttgaa

SEQ ID NO: 135720 - DNA, 75 bp, synthetic construct
  source 1..75: mol_type = other DNA
aatgtccggcaccggcctgcgttggaagccgctacgcgatcagatcttttttctcgctattgagcagcaattccc

SEQ ID NO: 135721 - DNA, 75 bp, synthetic construct
  source 1..75: mol_type = other DNA
catacctttaaggcgattaatcaacgtaacggagagcgcaacaatgcgtttctcaccattggagtgcactggtaa

SEQ ID NO: 135722 - DNA, 75 bp, synthetic construct
  source 1..75: mol_type = other DNA
ggcacgattgctgtatcagcaagaaccggcaaatcttacccgcctggatcaactgacctggcaactgatgcagaa

SEQ ID NO: 135723 - DNA, 75 bp, synthetic construct
  source 1..75: mol_type = other DNA
cgatgagcagggcaaggttcgcccgatgtacagcctgacgaaagatggctggatcatggttgtgatggggttcac

SEQ ID NO: 135724 - DNA, 75 bp, synthetic construct
  source 1..75: mol_type = other DNA
accgtctggcgaagtgttatcgggacacgctacccggtgtggcgttgtatgcatggcttcaggccgaacaacggc

SEQ ID NO: 135725 - DNA, 75 bp, synthetic construct
  source 1..75: mol_type = other DNA
caaaatggcgcatccgataccatgctgcgcgccagcggctcattctttaatggcggcaaatacagcgacgaatga

SEQ ID NO: 135726 - DNA, 75 bp, synthetic construct
  source 1..75: mol_type = other DNA
tgctcagccagaacttgcactgaacgatctcactcgctcaattaacattgcgccttcagctaacgcttacgttgc

SEQ ID NO: 135727 - DNA, 75 bp, synthetic construct
  source 1..75: mol_type = other DNA
gaagacgtcaaaacggttaaaaccgttgaagatctgcttgcccagcaaaaagcgtgcgatgcctcccctactccg

SEQ ID NO: 135728 - DNA, 75 bp, synthetic construct
  source 1..75: mol_type = other DNA
cccactgacgccggggcaaaatcagcaacgcttcaatttccgccgtctgcatgaagatgtcggtcgccgctggac

SEQ ID NO: 135729 - DNA, 75 bp, synthetic construct
  source 1..75: mol_type = other DNA
tatcaggcgtatcaggttgaggactacgccaccgcactggcggcctggcagaaaatcagtcttcacgacatgagc

SEQ ID NO: 135730 - DNA, 75 bp, synthetic construct
  source 1..75: mol_type = other DNA
gctctagcggcggggacctgtcagcaactggcgcgcatcggcgtctggcaatctctggctgattgcgcaaccgcc

SEQ ID NO: 135731 - DNA, 75 bp, synthetic construct
  source 1..75: mol_type = other DNA
tggccgtgattgcgaacgttgcgacttccgttgcgcacgaaggccgggcgtttgagcgtttcacacaatatggcc

SEQ ID NO: 135732 - DNA, 75 bp, synthetic construct
  source 1..75: mol_type = other DNA
tgggcaatgcggcgcaaaccctgcacccgattgccgggcaagggttcaacctcggtatgcgagatgtgatgagtc

SEQ ID NO: 135733 - DNA, 75 bp, synthetic construct
  source 1..75: mol_type = other DNA
tgcactggtgctatggtgtgctgaaaacgcagttaccattcgacgcagaacacaaccaacaaagtcattataaaa

SEQ ID NO: 135734 - DNA, 75 bp, synthetic construct
  source 1..75: mol_type = other DNA
attagcgaccatctgcggcgttgactggcagcaagagccttacgaacaactggcagtgattgctaatgttgctac

SEQ ID NO: 135735 - DNA, 75 bp, synthetic construct
  source 1..75: mol_type = other DNA
ataatgtcgggcaacggctgtttgcattgctgcgcaaagcacctggcgtaacgctgcattgccctgatcgcgtgg

SEQ ID NO: 135736 - DNA, 75 bp, synthetic construct
  source 1..75: mol_type = other DNA
gagttaatccggcaactggacttcccatgttaggtggaattgatgtgggggggaatttcttgggaatgaataatc

SEQ ID NO: 135737 - DNA, 75 bp, synthetic construct
  source 1..75: mol_type = other DNA
cagtcggttaatgaacgaacggaagaaagagaagcgtgtcctggctgtcgagcatgaatacattttgcaggtgac

SEQ ID NO: 135738 - DNA, 75 bp, synthetic construct
  source 1..75: mol_type = other DNA
cactacgacgcctggccgcacaaagtcagtctcggcgtcgaatatcaacatacctttaaggcgattaatcaacgt

SEQ ID NO: 135739 - DNA, 75 bp, synthetic construct
  source 1..75: mol_type = other DNA
cgggctgatggcaatggaattattcaccccggcacgcgatgtgctggcgcagcgcaccctcggttgggtggcgcg

SEQ ID NO: 135740 - DNA, 75 bp, synthetic construct
  source 1..75: mol_type = other DNA
gctggcgttaacccacgccgccagatctattacccatcgtaccgtgctggtgggcaatgcggcgcaaaccctgca

SEQ ID NO: 135741 - DNA, 75 bp, synthetic construct
  source 1..75: mol_type = other DNA
ggtctggtgtcatccactggaacggcgcgaagaggtgctgtcgtggagcgacgagaagttttgccgtgaactcca

SEQ ID NO: 135742 - DNA, 75 bp, synthetic construct
  source 1..75: mol_type = other DNA
gagacttgggctgttatcagtagataaagttaggcgaaaaaatatctaccgattccctgggtttgatggttcgaa

SEQ ID NO: 135743 - DNA, 75 bp, synthetic construct
  source 1..75: mol_type = other DNA
tggctgttcctgtgagtacaactaaaatacagtgggcggaaattaaccgtgctattgaatatggtaaaagtaaag

SEQ ID NO: 135744 - DNA, 75 bp, synthetic construct
  source 1..75: mol_type = other DNA
ccttctaccgaatgaagtgtgaagtgaaataccagcagacgcggccagtggtccaccgcctgctgaacaaaacgc

SEQ ID NO: 135745 - DNA, 75 bp, synthetic construct
  source 1..75: mol_type = other DNA
gttaaccgctacaaattgctgaaaaaagatgcgcgtaccgtcgccgcccagcaggtagcaaggctggaatccgcc

SEQ ID NO: 135746 - DNA, 75 bp, synthetic construct
  source 1..75: mol_type = other DNA
attcagcaggcaaaaacaatttgtatagacggatttaagaacaggtgtgatgttatttttataatatctataatc

SEQ ID NO: 135747 - DNA, 75 bp, synthetic construct
  source 1..75: mol_type = other DNA
ggattgaagcattccataaacttaagttaagaagcaagattgagctttatgcgctaaagatgttcatctacttat

SEQ ID NO: 135748 - DNA, 75 bp, synthetic construct
  source 1..75: mol_type = other DNA
tatatgcttgcttaacggaaatcttagccttgattactccgcatctttatatcctgaagccatcaaagcggaatc

SEQ ID NO: 135749 - DNA, 75 bp, synthetic construct
  source 1..75: mol_type = other DNA
aaacgcaagggttaaccgaaacctacgtcggcaactggctggcgaaacatggcagccgcgaaaagttaattatcg

SEQ ID NO: 135750 - DNA, 75 bp, synthetic construct
  source 1..75: mol_type = other DNA
ggcggacaaacacgatctgccgcgcatcgtcactattcagaatccctatagtctgttaaaccgcagctttgaagt

SEQ ID NO: 135751 - DNA, 75 bp, synthetic construct
  source 1..75: mol_type = other DNA
tgaagaggagtacccgctgctcgccaggcagatccaacagggtttggccggggccgttccggaaggcggtatagc

SEQ ID NO: 135752 - DNA, 75 bp, synthetic construct
  source 1..75: mol_type = other DNA
ggccgatcgaatggctgatccaaatcaaactccttatatcgtctttgagtatgtggaaggcctggacgtgtccga

SEQ ID NO: 135753 - DNA, 75 bp, synthetic construct
  source 1..75: mol_type = other DNA
cttttaacattcctgatgacctaaccaacctgcctgccgattttgtattagctgagcgtttcagtgtgcaaaaga

SEQ ID NO: 135754 - DNA, 75 bp, synthetic construct
  source 1..75: mol_type = other DNA
gctggtcgttaatcatggaaatcgacgaaggttttgcggtgggtatgtcaccagccgaacttagcgctgagcagc

SEQ ID NO: 135755 - DNA, 75 bp, synthetic construct
  source 1..75: mol_type = other DNA
cggttcgctgctgctggattttggcccacggcagttcaccgtcagctttgatgaaaccttaaaaccgtttgtgcg

SEQ ID NO: 135756 - DNA, 75 bp, synthetic construct
  source 1..75: mol_type = other DNA
gtgagcgcattactgagcatgacaataataatcatcatcctggcggttattctttatcttgcatacagcaccgcc

SEQ ID NO: 135757 - DNA, 75 bp, synthetic construct
  source 1..75: mol_type = other DNA
gggcggaaaaccggtgccgtttggatcactggtacgggaaaacagtatcggaataaccagtatgtgggtgatgac

SEQ ID NO: 135758 - DNA, 75 bp, synthetic construct
  source 1..75: mol_type = other DNA
tggctaacgaactggccaaaaacctcaaaacccctgaagacctcagtcagtttgagaatccgcatcccctccgct

SEQ ID NO: 135759 - DNA, 75 bp, synthetic construct
  source 1..75: mol_type = other DNA
ggcctgcagtcggtgctgctgcatgggtggcacctttcgcagcattagtgataccagttggcatcgtacttaacc

SEQ ID NO: 135760 - DNA, 75 bp, synthetic construct
  source 1..75: mol_type = other DNA
gtcagctttgatgaaaccttaaaaccgtttgtgcgtgatgtttccggcagccgcctgaaagacctgccaaaacca

SEQ ID NO: 135761 - DNA, 75 bp, synthetic construct
  source 1..75: mol_type = other DNA
atgttacattttggactcaaaggtttacctggtttagttaactcaattacacgctatccacaggaagccttgccc

SEQ ID NO: 135762 - DNA, 75 bp, synthetic construct
  source 1..75: mol_type = other DNA
cattactgcaagaaatcgcccggcgttataaccagccggaagtaacagacgcggtgaacgctctgcttgcgctcg

SEQ ID NO: 135763 - DNA, 75 bp, synthetic construct
  source 1..75: mol_type = other DNA
gtgtctgaattactcccgatatgcattatcctgattgtccttgcggcaattctgtatctttcatacagcgccgcc

SEQ ID NO: 135764 - DNA, 75 bp, synthetic construct
  source 1..75: mol_type = other DNA
atatcgcgaagttgcgcatattatcatcgacgcaacaaacgaacccagccaggtgatttctgaaattcgcagcgc

SEQ ID NO: 135765 - DNA, 75 bp, synthetic construct
  source 1..75: mol_type = other DNA
ccagccgaactgagtgccgagcaaatcttaagcaagctgtggctatgggaaggcaacgcagaaagctatggctgg

SEQ ID NO: 135766 - DNA, 75 bp, synthetic construct
  source 1..75: mol_type = other DNA
ctcgcagtgtgggccatcaggatccaggcgcgacctcctcctggctgatgattaaggctatgcaggaaggattcg

SEQ ID NO: 135767 - DNA, 75 bp, synthetic construct
  source 1..75: mol_type = other DNA
cccaccggcactgctgaatgctctgtctctgggtacagataatgaagttggcatggtcattgataatggccggct

SEQ ID NO: 135768 - DNA, 75 bp, synthetic construct
  source 1..75: mol_type = other DNA
gcactgggtcgatcgtgaaccattcaccggtactatgcgttgcacggtaaaaacccgctatcgccagaccgatat

SEQ ID NO: 135769 - DNA, 75 bp, synthetic construct
  source 1..75: mol_type = other DNA
gatgatgtcagcgccacccgcctttccaccagtctgtcatttgcggaagttgaaaaagaggcaattattaacgca

SEQ ID NO: 135770 - DNA, 75 bp, synthetic construct
  source 1..75: mol_type = other DNA
tccgacccgcgtctggcgaacgcagcgtgaaggaccggaaggctggcgtgaagggctggaccattttttctccgc

SEQ ID NO: 135771 - DNA, 75 bp, synthetic construct
  source 1..75: mol_type = other DNA
gcatgatcattgataatggtcggctgattgtggagccgcatagacgtccgcagtattcactggctgagctactgg

SEQ ID NO: 135772 - DNA, 75 bp, synthetic construct
  source 1..75: mol_type = other DNA
atgctctgtattcaggtcgcctttgcgataacgacgattttaatgctgtggtctgaaccgccccgggtttcctgg

SEQ ID NO: 135773 - DNA, 75 bp, synthetic construct
  source 1..75: mol_type = other DNA
atctatagtgtggtttacattctgctgggcattttgtgttggtttttgttagcgataacaacaatctgcgcagtg

SEQ ID NO: 135774 - DNA, 75 bp, synthetic construct
  source 1..75: mol_type = other DNA
ctcatttgctaactcgtaactaccgccatgatatacacccatatagacagtggatcgatgaaagtgaaggagtag

SEQ ID NO: 135775 - DNA, 75 bp, synthetic construct
  source 1..75: mol_type = other DNA
caacaacgtctggggcttttagagcagcgagacacggcaatgttgcaccgtttgctgcatgatattgaaaaaaat

SEQ ID NO: 135776 - DNA, 75 bp, synthetic construct
  source 1..75: mol_type = other DNA
cgatggtggcggattatccttcgctcaatctggggcaggcggtgatggtctattgctatcaattagcaacattaa

SEQ ID NO: 135777 - DNA, 75 bp, synthetic construct
  source 1..75: mol_type = other DNA
gcttttcattctgactgcaacgggcaatatgtctctgtgtggattaaaaaaagagtgtctgatagcagcttctga

SEQ ID NO: 135778 - DNA, 75 bp, synthetic construct
  source 1..75: mol_type = other DNA
atagtaaagtagagtctgaggatgtgtttgctttggctcttatgctccagaagaatttattcgaatctgatatgc

SEQ ID NO: 135779 - DNA, 75 bp, synthetic construct
  source 1..75: mol_type = other DNA
actgaagcttcctgatgagccttattttcagaatgtatctgaagaggaagtactgcgtttaacttctttgataaa

SEQ ID NO: 135780 - DNA, 75 bp, synthetic construct
  source 1..75: mol_type = other DNA
aagcttacagcactgggagctgaagctgatacgttaaaaacacagtcatcactgttacagaccaggctggaacaa

SEQ ID NO: 135781 - DNA, 75 bp, synthetic construct
  source 1..75: mol_type = other DNA
tctgcccctgcgatttctctgctcgacacgctggatgcactggcggagtaccaacgcgcgggaaaaattcgttat

SEQ ID NO: 135782 - DNA, 75 bp, synthetic construct
  source 1..75: mol_type = other DNA
atttccttatacacgatatggttatctggtgggtaaggtgaaaaatataaatttagatgcaatagaagaccagag

SEQ ID NO: 135783 - DNA, 75 bp, synthetic construct
  source 1..75: mol_type = other DNA
ctgatacgttaaaaacgcagtcatcactgttacaggccaggctggaacaaattcggtatcaaattctgagccggt

SEQ ID NO: 135784 - DNA, 75 bp, synthetic construct
  source 1..75: mol_type = other DNA
tggtcaacagcggatacctgaacagtggtgaaccggagaccaatctgttccagcagacctggaaagtcgctgtca

SEQ ID NO: 135785 - DNA, 75 bp, synthetic construct
  source 1..75: mol_type = other DNA
ctgtacgccagccgcactgggtatttcggaccttcttgcagacacaaccggccttgtagcccatgacagcactgg

SEQ ID NO: 135786 - DNA, 75 bp, synthetic construct
  source 1..75: mol_type = other DNA
atcggccgcactaccctgtggcggaaaatgaagcaacatggcattgatgcagggcagtttaagcgccgtggatag

SEQ ID NO: 135787 - DNA, 75 bp, synthetic construct
  source 1..75: mol_type = other DNA
ttgacgttaaattaggcgttaacaaattccatgttgatgaggggaatccgcacatcatcctggcagcaaatcctg

SEQ ID NO: 135788 - DNA, 75 bp, synthetic construct
  source 1..75: mol_type = other DNA
tcctgcaccgctattccgtgccgggtcatgccgaatacaaccagatgaacacggcgctggacatgaacggcaaga

SEQ ID NO: 135789 - DNA, 75 bp, synthetic construct
  source 1..75: mol_type = other DNA
gttggaagccaaattactttgcaggctcagtggcaacatacgattcaaacagaattgtgacgtgtggttactacg

SEQ ID NO: 135790 - DNA, 75 bp, synthetic construct
  source 1..75: mol_type = other DNA
agggtacaatgcggaagtggttcgcatgaaaaaacaaaagttacagttaaaggatgagatgcttaaaatcctgca

SEQ ID NO: 135791 - DNA, 75 bp, synthetic construct
  source 1..75: mol_type = other DNA
atgtttccagaataccgagatttaatatcccgtctgaaaaacgaaaatcctcgctttatgtccttgttcgataaa

SEQ ID NO: 135792 - DNA, 75 bp, synthetic construct
  source 1..75: mol_type = other DNA
ctcacgccgcgaggattcgcccgtgctgtattcctggctaatgaccgggcaatcacgcggactactcttaaccgc

SEQ ID NO: 135793 - DNA, 75 bp, synthetic construct
  source 1..75: mol_type = other DNA
aaggaggttacgccacctaaaaaaacgaatgactaccggaaacgaaccgatttaggcatggccaccaatgagccg

SEQ ID NO: 135794 - DNA, 75 bp, synthetic construct
  source 1..75: mol_type = other DNA
aagggcaggggcgcgcttttatcatgatgacaaaattacgcacccgacagcgaccatatctggatattccgctga

SEQ ID NO: 135795 - DNA, 75 bp, synthetic construct
  source 1..75: mol_type = other DNA
atggataaaactaacgaaaatatcgtcactctgattaaacccattaagcgcggtgagcaggttattaccgacgtc

SEQ ID NO: 135796 - DNA, 75 bp, synthetic construct
  source 1..75: mol_type = other DNA
tacgccgttaaagactgggcggaagcaggatataagtgctattgcttcaactatgacggcgcaaatcacggcgat

SEQ ID NO: 135797 - DNA, 75 bp, synthetic construct
  source 1..75: mol_type = other DNA
tcaaaaacacgtctgataaagacatgagtgggctgcagggcaaaattgctgatgctgtgaaagcggtatcaggtg

SEQ ID NO: 135798 - DNA, 75 bp, synthetic construct
  source 1..75: mol_type = other DNA
actggctactacggcctgacgcaggggctgctttccgtcctgcgtcttttctggggcaacctgattaacttcatg

SEQ ID NO: 135799 - DNA, 75 bp, synthetic construct
  source 1..75: mol_type = other DNA
cgaatattgaatatgttaacgtatggattgacagtcacttcctggtgatgttctcgcctgaattatctgtttacc

SEQ ID NO: 135800 - DNA, 75 bp, synthetic construct
  source 1..75: mol_type = other DNA
atggcgtaaaccggattttatcttcaatccgtgcgcttatggtggctacctgccggaagatgataaacatcccgc

SEQ ID NO: 135801 - DNA, 75 bp, synthetic construct
  source 1..75: mol_type = other DNA
caaatattgaatacgttaacgtatggattgacagccatttcctggtgatgttctcccctgaattgtctgtttatc

SEQ ID NO: 135802 - DNA, 75 bp, synthetic construct
  source 1..75: mol_type = other DNA
gcttaccgggcgcacgcttttcaccgggggaaactatgaatactaaccaacaccaggaaatcctccgcaccgaag

SEQ ID NO: 135803 - DNA, 75 bp, synthetic construct
  source 1..75: mol_type = other DNA
ctaatcaaagcattaaccggtgtataccacgccgatcgcggcaccatctggctggaaggccaggctatctcaccg

SEQ ID NO: 135804 - DNA, 75 bp, synthetic construct
  source 1..75: mol_type = other DNA
agagattgccgaacgctttatccgccagcttggcattcgcacaccttcaactgaacaaccgattgaatttctctc

SEQ ID NO: 135805 - DNA, 75 bp, synthetic construct
  source 1..75: mol_type = other DNA
acgccgtaaagagatggaaaagcgcgctaccgaactgatggcatcttatggcttttccctcgacgtgcgtgaacc

SEQ ID NO: 135806 - DNA, 75 bp, synthetic construct
  source 1..75: mol_type = other DNA
gcttctccctcgacgtgcgtgaaccgctcaaccgtttttcagtggcgatgcagcaaatcgtcgccatttgtcggg

SEQ ID NO: 135807 - DNA, 75 bp, synthetic construct
  source 1..75: mol_type = other DNA
gatcgcaaacaggtagcggagatcccgctggcagagctttccgttccggcgatcatgaacgccattgcggcgtaa

SEQ ID NO: 135808 - DNA, 75 bp, synthetic construct
  source 1..75: mol_type = other DNA
agtctggactatccacaagcaaaagtgcttgccgagaaagcagcgcaagcgggcagtaaagaaggtgaagtaacg

SEQ ID NO: 135809 - DNA, 75 bp, synthetic construct
  source 1..75: mol_type = other DNA
caagccggcgttatccggtgaggcgcaatgttgcggggctttatccctggtggcattggttgctggaaagagaaa

SEQ ID NO: 135810 - DNA, 75 bp, synthetic construct
  source 1..75: mol_type = other DNA
tcaccgggacaaagccccgcaccagtacggcgcataccctatgaccctgacctgtacatcccggaaaacacctcg

SEQ ID NO: 135811 - DNA, 75 bp, synthetic construct
  source 1..75: mol_type = other DNA
ccgcctgattgaaacgctgtgtgctgacggtctggcgctgctggtgatctcctccgaactggaagagctggtggg

SEQ ID NO: 135812 - DNA, 75 bp, synthetic construct
  source 1..75: mol_type = other DNA
ctacgatcgccacatcaggcttcggtactgggcatcggcttttgcccggaagacaggaaaactgatggcatcatc

SEQ ID NO: 135813 - DNA, 75 bp, synthetic construct
  source 1..75: mol_type = other DNA
gtcagcaatccccgtgagcttgcccgtaaacaggccgttgccctgtcctgttttctgggcgggcggcagttttac

SEQ ID NO: 135814 - DNA, 75 bp, synthetic construct
  source 1..75: mol_type = other DNA
cgcttataccaaggcggaatgtaattcacgttttattacaggtattcgcttaggtggtttgtcatcccttccaac

SEQ ID NO: 135815 - DNA, 75 bp, synthetic construct
  source 1..75: mol_type = other DNA
tacaacgcgaccgatgcgcaggtctggcgcaccggaattgtgatggtgattttgctggcgattaccccgctgtgc

SEQ ID NO: 135816 - DNA, 75 bp, synthetic construct
  source 1..75: mol_type = other DNA
acaatcaattaaaaatgcaccgcagtttctaggtatgattcagcagagatacaggccgcgtaaaggagcacctgt

SEQ ID NO: 135817 - DNA, 75 bp, synthetic construct
  source 1..75: mol_type = other DNA
tctggtctaaagctacctcaactaacgcaacactggagaaaaacttcccggaagataatgctgtcggtgtgcttg

SEQ ID NO: 135818 - DNA, 75 bp, synthetic construct
  source 1..75: mol_type = other DNA
gattacgtcgatgacaaaatcgcagagcacgagcagtcccgccgccatcctgacgccacgctgacagaaaaaggt

SEQ ID NO: 135819 - DNA, 75 bp, synthetic construct
  source 1..75: mol_type = other DNA
aatcagaaaccacacaggggcgcacttttgagcgcgtctatgccgggagcaaatggaccgaatggcgagaagtat

SEQ ID NO: 135820 - DNA, 75 bp, synthetic construct
  source 1..75: mol_type = other DNA
tccggtcagccgggcagcaccggtggcgcgggaatggcgggaaattccccgcacggagcctgacccggaaatcac

SEQ ID NO: 135821 - DNA, 75 bp, synthetic construct
  source 1..75: mol_type = other DNA
gaatatgcgcggggtgatgactgatgccacccgcttccacgcagacaagtgggttggatacagtaaggttcttgc

SEQ ID NO: 135822 - DNA, 75 bp, synthetic construct
  source 1..75: mol_type = other DNA
ccgtcagctatagcggttgggcagcgtaaagacggggaaatctacacagcggatcttaaaagtaaggcgcttgca

SEQ ID NO: 135823 - DNA, 75 bp, synthetic construct
  source 1..75: mol_type = other DNA
atcataaaggtggggtaagtaaaaccacaacaaccttcaatcttggatgggcacttgcggatgaaggcaagaaag

SEQ ID NO: 135824 - DNA, 75 bp, synthetic construct
  source 1..75: mol_type = other DNA
gacgcaccacagacatcccgctggggcgttttctgcgggaatttacctgtgaccgtcctgacctgtttaaacgca

SEQ ID NO: 135825 - DNA, 75 bp, synthetic construct
  source 1..75: mol_type = other DNA
tgccgctattgcactgtggccggtcggtcgccgcgtagtttctgtggaaacagctcgtgctgcgcgtgaagccaa

SEQ ID NO: 135826 - DNA, 75 bp, synthetic construct
  source 1..75: mol_type = other DNA
agccctggtataataaatggacccgagggcgtatgattcaattcaatactgcctcaccttataaaaatgcttcag

SEQ ID NO: 135827 - DNA, 75 bp, synthetic construct
  source 1..75: mol_type = other DNA
ttacgctcacgttcaggacaacggctatcgtgataaaggcactcagggcgcgcagcttggcggagtcggggtccg

SEQ ID NO: 135828 - DNA, 75 bp, synthetic construct
  source 1..75: mol_type = other DNA
ctgatagcgtggatgcaatggcagtgtggcacgttgattgccagtacatccctacagaaagcctgattgagtcag

SEQ ID NO: 135829 - DNA, 75 bp, synthetic construct
  source 1..75: mol_type = other DNA
gatggctacctgcaactggtgggtatcatgcagaaatttatcgatcagtcgatctctgctaacaccaactacgat

SEQ ID NO: 135830 - DNA, 75 bp, synthetic construct
  source 1..75: mol_type = other DNA
atgaatcagaatctgctggtgacaaagcgcgacggtagcacagagcgcatcaatctcgacaaaatccatcgcgtt

SEQ ID NO: 135831 - DNA, 75 bp, synthetic construct
  source 1..75: mol_type = other DNA
gagctagtttcgtatctgcttggatggaatgctcttgttataaaatggatcacttctgatactaaaggtctgcca

SEQ ID NO: 135832 - DNA, 75 bp, synthetic construct
  source 1..75: mol_type = other DNA
gatcggcatgacgctggcgctctcctctacggcgattgccatgcaggcgatgaatgaacgcaatctgatggtgac

SEQ ID NO: 135833 - DNA, 75 bp, synthetic construct
  source 1..75: mol_type = other DNA
gccaggaaaaagctatcgtagctacgggcaactggaagccgagtaccgcattggacgcaatatgctgctggaagg

SEQ ID NO: 135834 - DNA, 75 bp, synthetic construct
  source 1..75: mol_type = other DNA
aacctacagcgggagatgtcggtgcactgccgttatctggtggtcaattgaatggtgctctgggtataggaacat

SEQ ID NO: 135835 - DNA, 75 bp, synthetic construct
  source 1..75: mol_type = other DNA
gtgactaaccgtttttacatgatgtgctcgcgtgaaactgtgggcaataacgcttcattccattgccataacggc

SEQ ID NO: 135836 - DNA, 75 bp, synthetic construct
  source 1..75: mol_type = other DNA
actagttttacgagtggatataatgtcactgtgacatcggcagcgagcgatgccatagtgaatttgtctggtggg

SEQ ID NO: 135837 - DNA, 75 bp, synthetic construct
  source 1..75: mol_type = other DNA
atatgaacataattttaatgattcgtcatgcgtgagtacgaatactattacccccatgagtccttcggatattat

SEQ ID NO: 135838 - DNA, 75 bp, synthetic construct
  source 1..75: mol_type = other DNA
caggcgcgggatctgttcgtcgctcaggcgtcgttaaccggtgagtctctgcccgtagaaaaagccgctaccact

SEQ ID NO: 135839 - DNA, 75 bp, synthetic construct
  source 1..75: mol_type = other DNA
accaaagacggcaccgaagaaccgtggtatgtggtcgataaagacgtcgaaaacaacattctgattgttgcgcaa

SEQ ID NO: 135840 - DNA, 75 bp, synthetic construct
  source 1..75: mol_type = other DNA
gcgacgccttcttcgttggcgctcttcttctccttgtctggcctgccctcaagtcagctaaccaatcagcggatc

SEQ ID NO: 135841 - DNA, 75 bp, synthetic construct
  source 1..75: mol_type = other DNA
cggatgtcggtggtagtggcagaaaataccgaacaccatcagctggtttgcaaaggtgcattgcaggaaatcctc

SEQ ID NO: 135842 - DNA, 75 bp, synthetic construct
  source 1..75: mol_type = other DNA
tgaactttattcaggaagctcgttccaccaaagcggcagatgccctgaaagcgatggtcagcaataccgcgacgg

SEQ ID NO: 135843 - DNA, 75 bp, synthetic construct
  source 1..75: mol_type = other DNA
gattccgtttgatttcgagcgtcgccggatgtcggtggtagtggcagaaaataccgagcaccatcagctggtttg

SEQ ID NO: 135844 - DNA, 75 bp, synthetic construct
  source 1..75: mol_type = other DNA
cgcctatcaacaaggggcgtttgattatctgcccaaaccgtttgatatcgacgaagccgtggcgctggttgagcg

SEQ ID NO: 135845 - DNA, 75 bp, synthetic construct
  source 1..75: mol_type = other DNA
gtcagttttatcgcgttggcggctatgcgccggtgaaagtggatgtgcggattatcgctgccactcaccagaatc

SEQ ID NO: 135846 - DNA, 75 bp, synthetic construct
  source 1..75: mol_type = other DNA
gcacgttatttctcgacgaaattggtgatatgccgctggatgtgcagacgcgtttgctgcgcgtgctggcagacg

SEQ ID NO: 135847 - DNA, 75 bp, synthetic construct
  source 1..75: mol_type = other DNA
attggcgaacgtaaattccgcgagttcctggggcgttatctcccggcgcaaccgggcaaaatcattaccgttgat

SEQ ID NO: 135848 - DNA, 75 bp, synthetic construct
  source 1..75: mol_type = other DNA
ccgaaagatttgatcgaatcagaactgtttggtcacgagaaaggcgcgtttaccggtgccaataccgttcgtcag

SEQ ID NO: 135849 - DNA, 75 bp, synthetic construct
  source 1..75: mol_type = other DNA
ggggcataaacaggaagcggcgcggctactcggctgggggcgtaacactctgacgcggaagttaaaagagctggg

SEQ ID NO: 135850 - DNA, 75 bp, synthetic construct
  source 1..75: mol_type = other DNA
tcttctcaacgcgtctgggaatgctggaaatggtcttcgccaaagcagacctgtggctggcggaatactatgacc

SEQ ID NO: 135851 - DNA, 75 bp, synthetic construct
  source 1..75: mol_type = other DNA
ctgatgctcccagcctggctgggcgcgggtactgcgctgcaaaaagtggtggaagatggcaaacagagcgaactg

SEQ ID NO: 135852 - DNA, 75 bp, synthetic construct
  source 1..75: mol_type = other DNA
atcacggtcagcagcctgtcgctgtacaccggggcgattctggaagccaacctgctgccaccgcctgagccgaaa

SEQ ID NO: 135853 - DNA, 75 bp, synthetic construct
  source 1..75: mol_type = other DNA
catgagcaatgaggatctgcttgctgctgccaataccgcccaggcggcaggaaatggtgcagctcgcgatcgctg

SEQ ID NO: 135854 - DNA, 75 bp, synthetic construct
  source 1..75: mol_type = other DNA
acgcgcgaagtgctcgatacctgccaggtgattgccgaagcgccgcaaggctccattgccgcctacgtgatctcg

SEQ ID NO: 135855 - DNA, 75 bp, synthetic construct
  source 1..75: mol_type = other DNA
ggtccgttttacctcgtggatgggcggtgaccgcgacggcaacccgaacgtcactgccgatatcacccgccacgt

SEQ ID NO: 135856 - DNA, 75 bp, synthetic construct
  source 1..75: mol_type = other DNA
gccgcggatatcggtatttccgtggatggcgcggtggatattgcccgtgaagcggcagatattattctgctggag

SEQ ID NO: 135857 - DNA, 75 bp, synthetic construct
  source 1..75: mol_type = other DNA
gcggcgaaagtgtgccatgaagtggggctggacgcaggagaagtggttactggtagtgatattgaaacgctaact

SEQ ID NO: 135858 - DNA, 75 bp, synthetic construct
  source 1..75: mol_type = other DNA
gctggaacccggcggatctggggcgctttatgatcttcttcggaccgatcagctcgatcttcgatattctgacgt

SEQ ID NO: 135859 - DNA, 75 bp, synthetic construct
  source 1..75: mol_type = other DNA
tatgggcattatcgccaacggcgatctgctcgatactctgcgccgcgtgaaatgtttcggtgtaccgctggtgcg

SEQ ID NO: 135860 - DNA, 75 bp, synthetic construct
  source 1..75: mol_type = other DNA
cctcactggcgacagtgagttagtggcggcgaaagtgtgccatgaagtgggactggacgcgggagaggtggttac

SEQ ID NO: 135861 - DNA, 75 bp, synthetic construct
  source 1..75: mol_type = other DNA
aagctatttcccgtggctggttgcgattctggcagggtatatgacgctaacgcaactggtgaaagggttttatag

SEQ ID NO: 135862 - DNA, 75 bp, synthetic construct
  source 1..75: mol_type = other DNA
tactccgctctgaaagcgcacactaccatgttgcaggtggatgcgccgtatgctgatgggcggatgttctttcgc

SEQ ID NO: 135863 - DNA, 75 bp, synthetic construct
  source 1..75: mol_type = other DNA
tgcgaagtttgaagcgcaggcgggagacccaacgcaggcgctggaaatttacaaagacgctatggtcgcatccgg

SEQ ID NO: 135864 - DNA, 75 bp, synthetic construct
  source 1..75: mol_type = other DNA
ccataccggtgatgtggcgggagcgcatggaaaactggtcgtgggagctgggggcgtctggctcgtggtcgcatt

SEQ ID NO: 135865 - DNA, 75 bp, synthetic construct
  source 1..75: mol_type = other DNA
tctggcggtaggtctgtatgacggcatgaatctggactggctggcttatcgtatcgcgcaggtgcagtatctggt

SEQ ID NO: 135866 - DNA, 75 bp, synthetic construct
  source 1..75: mol_type = other DNA
tgcggtagaaattgggtctttcctgttaggtcgcgatccgaaaaccggtaaacaattaccatgtccggctgagct

SEQ ID NO: 135867 - DNA, 75 bp, synthetic construct
  source 1..75: mol_type = other DNA
atgcttccccgttttgccgatatttttcagcagggaaaccgatggcttaactggctggagaagcagccggtgcag

SEQ ID NO: 135868 - DNA, 75 bp, synthetic construct
  source 1..75: mol_type = other DNA
agggcagctaatgttctctggcatcacaccggacgcattctgctactggccgctgcgaacttgcatggtagaata

SEQ ID NO: 135869 - DNA, 75 bp, synthetic construct
  source 1..75: mol_type = other DNA
taaagattacggcaagaaagggatcatcgcgccgtttgatctcgaagtgcgccccggcgagatcgtcggcctggc

SEQ ID NO: 135870 - DNA, 75 bp, synthetic construct
  source 1..75: mol_type = other DNA
gcgatcgcggcgtcagcctgatctttgtcactcactttctcgatcaggtctatcaggtcagcgatcggatcaccg

SEQ ID NO: 135871 - DNA, 75 bp, synthetic construct
  source 1..75: mol_type = other DNA
gaagtcgtaagggaaacgctttcccataacaatattgttggagctattaagatcactaaaaacccagacattaaa

SEQ ID NO: 135872 - DNA, 75 bp, synthetic construct
  source 1..75: mol_type = other DNA
atttgtcactgactaatgcattacattctttagatacatcatcaagaattaattgggatgatttacttaatgaag

SEQ ID NO: 135873 - DNA, 75 bp, synthetic construct
  source 1..75: mol_type = other DNA
cggaaaacgctgacggcaccttccgcaaaatcggtccggtcctgccgctgccggagggctacaccggccacgtgc

SEQ ID NO: 135874 - DNA, 75 bp, synthetic construct
  source 1..75: mol_type = other DNA
aggaagcgaaattcgcttgcgcatgtggctttacccgtggctcacctggctggtaatcggctttattacctttgt

SEQ ID NO: 135875 - DNA, 75 bp, synthetic construct
  source 1..75: mol_type = other DNA
ttgtccgcgccaccaactcggttatctggcgtatctctattttctatttgtgttctatttttgtcgttgtggcat

SEQ ID NO: 135876 - DNA, 75 bp, synthetic construct
  source 1..75: mol_type = other DNA
aagctattggccgttgggcgggttataccatcggctggctgtactggtggttttgggtactggttatcccgctgg

SEQ ID NO: 135877 - DNA, 75 bp, synthetic construct
  source 1..75: mol_type = other DNA
cggcgcggcgtttttaacggtggtggttaactattacgcaccggcgaaagtgtttaaatttctgatcgacagctc

SEQ ID NO: 135878 - DNA, 75 bp, synthetic construct
  source 1..75: mol_type = other DNA
tcaccatgttctcgtttatgggcgcggaaattgtcaccatcgcggcagcagaatccgacacgccggataaacata

SEQ ID NO: 135879 - DNA, 75 bp, synthetic construct
  source 1..75: mol_type = other DNA
tgatgctattccgcccggcgcaacagttagaagtgatctccaccggcttattagcgatagggattatctgtaccg

SEQ ID NO: 135880 - DNA, 75 bp, synthetic construct
  source 1..75: mol_type = other DNA
cggttgagatgatgcaggcgcataaagataaaaaaatcgtgatgtactgtaccggtggtattcgttgcgaaaagg

SEQ ID NO: 135881 - DNA, 75 bp, synthetic construct
  source 1..75: mol_type = other DNA
tgagcaggaaaaaggcctggatcgcagcaaaatggtggcgttctctaactatttcttcgacaccactcagggcca

SEQ ID NO: 135882 - DNA, 75 bp, synthetic construct
  source 1..75: mol_type = other DNA
aattatgaggggatctctcagtactatgcgttagccgagtcagtgaaaaatatctttggttatcaatacaccatt

SEQ ID NO: 135883 - DNA, 75 bp, synthetic construct
  source 1..75: mol_type = other DNA
ttagtcatcgccgtttcacagttgcggatgcgcaaaattctgcgagcagaaggaagcgaaattcgcttgcgaatg

SEQ ID NO: 135884 - DNA, 75 bp, synthetic construct
  source 1..75: mol_type = other DNA
agaaattgtcaccattgccgccgcggaatccgacacgccggaaaaacatattgtccgcgccaccaactcggttat

SEQ ID NO: 135885 - DNA, 75 bp, synthetic construct
  source 1..75: mol_type = other DNA
aaacgcgctggaaattccggcagataccttccgtgagcagctgccaaaagcagtcgagatgatgcaggcacataa

SEQ ID NO: 135886 - DNA, 75 bp, synthetic construct
  source 1..75: mol_type = other DNA
tactataaatccaggggatggcaccacacagcttgtcgacgagaatggcaggggaattcaaatttggtctgtatc

SEQ ID NO: 135887 - DNA, 75 bp, synthetic construct
  source 1..75: mol_type = other DNA
atccggatgcgattaacgcggcgcgggaagtcattcgccacaaaatgaaactgttcggttcgctcggtaaagcat

SEQ ID NO: 135888 - DNA, 75 bp, synthetic construct
  source 1..75: mol_type = other DNA
ggaccatcggacaaacaggaacgtcagtggaaggtggagtttcacaagtgacctacactgacccggcgcaagccg

SEQ ID NO: 135889 - DNA, 75 bp, synthetic construct
  source 1..75: mol_type = other DNA
atgatgccccaggacgatatttctatcaaccctggggctgccactccaaaccagacaatttggatggtagtccct

SEQ ID NO: 135890 - DNA, 75 bp, synthetic construct
  source 1..75: mol_type = other DNA
gacggataatggttcatgctaccgggctaatgaaacacgacagttggccaggatgttgggccttgaaccgaagat

SEQ ID NO: 135891 - DNA, 75 bp, synthetic construct
  source 1..75: mol_type = other DNA
gacggataatggttcatgctaccgggcaaatgaaacacgacagttggccaggatgttgggccttgaaccgaagaa

SEQ ID NO: 135892 - DNA, 75 bp, synthetic construct
  source 1..75: mol_type = other DNA
atatccgcgccaccgtaaagttgccgatgattgttatgaagcgcacgctacagcagcttctgggcggcgcaccgt

SEQ ID NO: 135893 - DNA, 75 bp, synthetic construct
  source 1..75: mol_type = other DNA
ccattatacctgcttataacgaaggcccgtgtctggcacagtcactggataatctgctgcgtaacccttattttt

SEQ ID NO: 135894 - DNA, 75 bp, synthetic construct
  source 1..75: mol_type = other DNA
acgccacgatgtttgaccgttatgggactgcggactatttcctggactgctttatcattccagcccgcattgttg

SEQ ID NO: 135895 - DNA, 75 bp, synthetic construct
  source 1..75: mol_type = other DNA
cactgaaacgtctgttcacagccaaccagtgctggacgtcctttctggatgcgggcggtctgcgcgatattgagg

SEQ ID NO: 135896 - DNA, 75 bp, synthetic construct
  source 1..75: mol_type = other DNA
agtccggagagtaacggcatagcagagagcttcgtgaaaacgataaagcgtgattacatcagtatcatgcccaaa

SEQ ID NO: 135897 - DNA, 75 bp, synthetic construct
  source 1..75: mol_type = other DNA
agtgcgctgggttatcgctcgccacgggaatatctgcggcagcgggcttgtaatggggtaagtgataacagatgt

SEQ ID NO: 135898 - DNA, 75 bp, synthetic construct
  source 1..75: mol_type = other DNA
ggataatggttcatgctaccgggctaatgaaacacggcagtttgcccggatgttggggcttgaaccgaagaacac

SEQ ID NO: 135899 - DNA, 75 bp, synthetic construct
  source 1..75: mol_type = other DNA
caaccctggggctgccactccaaacccgaacaatttggatggtagtcccttcttcgcatggaggcaatataaaca

SEQ ID NO: 135900 - DNA, 75 bp, synthetic construct
  source 1..75: mol_type = other DNA
attgctattggtattcagtcaaaaggcaccacggttatccaccagcaggggcttccccctttgtctaacctggaa

SEQ ID NO: 135901 - DNA, 75 bp, synthetic construct
  source 1..75: mol_type = other DNA
cgctggatacttatcgtcagattggcaaaaacgctgcgcgttatgcgaagcgcgagtctccacaaccagttccga

SEQ ID NO: 135902 - DNA, 75 bp, synthetic construct
  source 1..75: mol_type = other DNA
ggaaaaaaatctggctgaaaatacgttgaacgcataccgtcgcgatctgtcaatgatggtggagtggttgcatca

SEQ ID NO: 135903 - DNA, 75 bp, synthetic construct
  source 1..75: mol_type = other DNA
aggcagtctactggctggaaacctatctggaacacgggcgaccgtggttgctaaacggtgtgtcgattgatgtac

SEQ ID NO: 135904 - DNA, 75 bp, synthetic construct
  source 1..75: mol_type = other DNA
tgctgacgaaatatgcccttgtggcagtcatagtgctgtgtttgacagtgctgggatttacgcttctggtcggcg

SEQ ID NO: 135905 - DNA, 75 bp, synthetic construct
  source 1..75: mol_type = other DNA
gacggataatggttcatgctaccgggcgaatgaaacacgacagttggccaggatgttgggccttgaaccgaagag

SEQ ID NO: 135906 - DNA, 75 bp, synthetic construct
  source 1..75: mol_type = other DNA
gacggataatggttcatgctaccgggccaatgaaacacgacagttggcccggatgttgggccttgaaccgaagaa

SEQ ID NO: 135907 - DNA, 75 bp, synthetic construct
  source 1..75: mol_type = other DNA
gacggataatggttcatgctaccgggccaatgaaacacgacagttggccaggatgttgggccttgaaccgaagac

SEQ ID NO: 135908 - DNA, 75 bp, synthetic construct
  source 1..75: mol_type = other DNA
gcgacctaaatatcaggctaaatctgccattatgcatataaaagagacgaagtacgtcgtggcgggcaaaaaagc

SEQ ID NO: 135909 - DNA, 75 bp, synthetic construct
  source 1..75: mol_type = other DNA
agcaacgaagttaaccagttggtcgcaactattgaacagcgtaatcgggccggacttacccatctggaaaacgcc

SEQ ID NO: 135910 - DNA, 75 bp, synthetic construct
  source 1..75: mol_type = other DNA
gacggataatggttcatgctaccgggcgaatgaaacacgacagttggccgggatgttgggccttgaaccgaagaa

SEQ ID NO: 135911 - DNA, 75 bp, synthetic construct
  source 1..75: mol_type = other DNA
agctacagcgatgatatcggtccgcttggctataccgttgacgcgcatcgtcgacctgtctccagttcaatgctg

SEQ ID NO: 135912 - DNA, 75 bp, synthetic construct
  source 1..75: mol_type = other DNA
aatcgccagaaaaagccgaagcgtttattgcatcgctctctgccagccaacggcgcagcattgatgatattgaac

SEQ ID NO: 135913 - DNA, 75 bp, synthetic construct
  source 1..75: mol_type = other DNA
acagctatgcggtgctggggctgggcgatgtggcgatggcgcgcaaagattaccccgccgctgaacgctattacc

SEQ ID NO: 135914 - DNA, 75 bp, synthetic construct
  source 1..75: mol_type = other DNA
ccacgccgatgggcttcaacgtggtggatgtggtcggtggcatcagttacagcgacgatatcgggccgcttggtt

SEQ ID NO: 135915 - DNA, 75 bp, synthetic construct
  source 1..75: mol_type = other DNA
ctctaaaatctggtacgggcagattaaagacatgcctgtcagcgatgccagcgtgcaggcgctgaaaaaatatct

SEQ ID NO: 135916 - DNA, 75 bp, synthetic construct
  source 1..75: mol_type = other DNA
gaagataactggcgcgtgcgctggatgacgggctattactataagatcatcaaccagaataatcgccgtgtgacc

SEQ ID NO: 135917 - DNA, 75 bp, synthetic construct
  source 1..75: mol_type = other DNA
caagttcagagcgactacgaactcgaaccacaatctgccagttgcgccaaatctgctgaaccagacgttcgctcc

SEQ ID NO: 135918 - DNA, 75 bp, synthetic construct
  source 1..75: mol_type = other DNA
cgcactcgcgaaacatatggaacccggcggctccagacggagctggcagagaatggcatcatcgttggtcgtgac

SEQ ID NO: 135919 - DNA, 75 bp, synthetic construct
  source 1..75: mol_type = other DNA
aaagggcaagcgaattaagcggacaggtatatacagtatcaagggtgttaacataaaagaatacaacgtcaggta

SEQ ID NO: 135920 - DNA, 75 bp, synthetic construct
  source 1..75: mol_type = other DNA
aggcgcagcttggcgataccgcagcggcgcagcagacgtttaataagttgatcccgcaggcaaaatctcagccac

SEQ ID NO: 135921 - DNA, 75 bp, synthetic construct
  source 1..75: mol_type = other DNA
tgcgaagtttgaagcgcaggcgggcgatccaacgcaggcgctggaaacctacaaagacgccatggtcgcatccgg

SEQ ID NO: 135922 - DNA, 75 bp, synthetic construct
  source 1..75: mol_type = other DNA
tatccagcaggcgaaagattacgcgcccagccatttcctgctctacgtacgttattccgccgccggatggcaggg

SEQ ID NO: 135923 - DNA, 75 bp, synthetic construct
  source 1..75: mol_type = other DNA
cagacattgagcgcggcatggatgcggtgggcgggatcccctcttccgacctccggggggccgggctgctgcccc

SEQ ID NO: 135924 - DNA, 75 bp, synthetic construct
  source 1..75: mol_type = other DNA
gctgcgctgcggctttacgctggcgaatgaagaggtgatcgcgctattaatgaaggtgattgcgccgtacccgct

SEQ ID NO: 135925 - DNA, 75 bp, synthetic construct
  source 1..75: mol_type = other DNA
tcaatgcgatgcgtgagcgtgtggcgcaaatcctggaagaacgacagtacttggtgaccgccctgaaagcgctcc

SEQ ID NO: 135926 - DNA, 75 bp, synthetic construct
  source 1..75: mol_type = other DNA
atttaccgtcaggtacgcccaggcgcggattacaactggtcgctgaaacttttagaacgctttaaagaagcgcat

SEQ ID NO: 135927 - DNA, 75 bp, synthetic construct
  source 1..75: mol_type = other DNA
tgtgacgttgcccacggtcgcccggtagctccggatgccaatgagccggtgaaactggcgcagaccattgccgat

SEQ ID NO: 135928 - DNA, 75 bp, synthetic construct
  source 1..75: mol_type = other DNA
tgtgatgttgcccacggtcgcccggtagctcctgatgccaatgaaccagtgaaactggcgcagaccattgccgat

SEQ ID NO: 135929 - DNA, 75 bp, synthetic construct
  source 1..75: mol_type = other DNA
gattgtagcgaaaggtcgcgtccaggcgtttatcgctacgctggttatgatgcttttactgcgcggcgtgaccat

SEQ ID NO: 135930 - DNA, 75 bp, synthetic construct
  source 1..75: mol_type = other DNA
ccagttgcgccaaatctgctgaaccagacgttcgctcctacagcaccaaatcaggtctgggtggcggacctgacg

SEQ ID NO: 135931 - DNA, 75 bp, synthetic construct
  source 1..75: mol_type = other DNA
gaagctcgccttgagcgagatatattaaattgcacaggagtcgctgaaaaatacgcgttaatcgaacaatggcga

SEQ ID NO: 135932 - DNA, 75 bp, synthetic construct
  source 1..75: mol_type = other DNA
cgttttaataaccgggatgaagccatctcagtaatacgggaatacattgagattttctacaatcgtcagcgtcgt

SEQ ID NO: 135933 - DNA, 75 bp, synthetic construct
  source 1..75: mol_type = other DNA
aaagatgtttatacgtgcgaaattgtcggctacgccatgggagagcgcatgacaaaagagctgacaggtaaagcc

SEQ ID NO: 135934 - DNA, 75 bp, synthetic construct
  source 1..75: mol_type = other DNA
ccctgtttatggcgctcaggagccagcgcccacctgccgggctaatccaccactctgatcgaggttcacagtact

SEQ ID NO: 135935 - DNA, 75 bp, synthetic construct
  source 1..75: mol_type = other DNA
gtggagttgcaagtacatacgatctagttagacaaaaccctcttaatggcgttgaaactaatactactaatgctt

SEQ ID NO: 135936 - DNA, 75 bp, synthetic construct
  source 1..75: mol_type = other DNA
gggattaatcacccgaccgggattgccggtaatccgcagggacggggcattatcgaacggcttaaccgcacatta

SEQ ID NO: 135937 - DNA, 75 bp, synthetic construct
  source 1..75: mol_type = other DNA
caactgatggtcgaacgcctcaatgccctgactgaaaaccagcgccaggtggcagacgcacgcattgcgatcgtc

SEQ ID NO: 135938 - DNA, 75 bp, synthetic construct
  source 1..75: mol_type = other DNA
ggaatctataactgcctggacattacaaactagtgagaataaagtgcaaggggttgcaagtacttacgatttggt

SEQ ID NO: 135939 - DNA, 75 bp, synthetic construct
  source 1..75: mol_type = other DNA
cagggaaagtcactttgaatggtaaaggcagtgtcgtaattaaagccacatctggtgataagcaaacagtaagtt

SEQ ID NO: 135940 - DNA, 75 bp, synthetic construct
  source 1..75: mol_type = other DNA
atttgacatagttacaaaaaatgaaattcctaataatggaattaaggttaaggtcaacgtggatgcagctaacgc

SEQ ID NO: 135941 - DNA, 75 bp, synthetic construct
  source 1..75: mol_type = other DNA
gcgaatggggtgattaccctacactcaaagatgcaatcattgcagcccagtcaatgagacctatgtgggatggtg

SEQ ID NO: 135942 - DNA, 75 bp, synthetic construct
  source 1..75: mol_type = other DNA
ggatgttggggcttgaaccgaagaccacggcggtgcggagtccggagagtaacggaatagcagagagcttcgtga

SEQ ID NO: 135943 - DNA, 75 bp, synthetic construct
  source 1..75: mol_type = other DNA
ggatgttggggcttgaaccgaagaacacggcggtgcggagtccggagagtaacggcatagcagagagcttcgtga

SEQ ID NO: 135944 - DNA, 75 bp, synthetic construct
  source 1..75: mol_type = other DNA
ttgctggcaccgggtaaacgccaggaaataaaagccgaagatattaactggctgcccgaatttctggcgcagtat

SEQ ID NO: 135945 - DNA, 75 bp, synthetic construct
  source 1..75: mol_type = other DNA
aacaacctggtttcagctgtgcgaaggctatccggtttatcgttgacaacctggcacgttcgcagctggacgagc

SEQ ID NO: 135946 - DNA, 75 bp, synthetic construct
  source 1..75: mol_type = other DNA
gaattaccgtacgtcgcccggatggcagcgtgatttgcgaggcggtatgggacggcaataaacgcgaagccttcc

SEQ ID NO: 135947 - DNA, 75 bp, synthetic construct
  source 1..75: mol_type = other DNA
ctgatgattctgccgtctttgccagcaggcacgggcggcgttcccgcactttcaaatctgactggttccagcatc

SEQ ID NO: 135948 - DNA, 75 bp, synthetic construct
  source 1..75: mol_type = other DNA
acgatccctgtactgaagaacaggccgaatggctgattcataactaccgcagacgtgggtatgagtttaagaaag

SEQ ID NO: 135949 - DNA, 75 bp, synthetic construct
  source 1..75: mol_type = other DNA
cgggtgtatcaagtacatatgatttaatcacaacaaactctttgacaaatgttaagacaacagataacaatgcct

SEQ ID NO: 135950 - DNA, 75 bp, synthetic construct
  source 1..75: mol_type = other DNA
atcatgataattcgaccgttcttgcccacacgcacgagcggtattctcatgcatttaagtcagactggtaccagc

SEQ ID NO: 135951 - DNA, 75 bp, synthetic construct
  source 1..75: mol_type = other DNA
attctgccgcccttgccagtaggcaagggcggtgttcgcacgtatttaaaaccgactggttccagcatcccccat

SEQ ID NO: 135952 - DNA, 75 bp, synthetic construct
  source 1..75: mol_type = other DNA
attctgataccgaccttgccatccggcacgggcggcgttctcacacattcaaatatgactggtatcagcacaatc

SEQ ID NO: 135953 - DNA, 75 bp, synthetic construct
  source 1..75: mol_type = other DNA
gtggtgttgcaagtacatacgatttagttaaacaaaaccctctgaataatattaaggctagtgaatctaatgctt

SEQ ID NO: 135954 - DNA, 75 bp, synthetic construct
  source 1..75: mol_type = other DNA
aatgtctttaaagcatggggggctgcaaataaatatgaatattataagtctagtcagactataatttcatgggta

SEQ ID NO: 135955 - DNA, 75 bp, synthetic construct
  source 1..75: mol_type = other DNA
tcaccagtacttacgatttggtaaggaaaaacccacaattaaataaagttaatataaacgacaataatgcttatg

SEQ ID NO: 135956 - DNA, 75 bp, synthetic construct
  source 1..75: mol_type = other DNA
gtttcaggtgatgcaactttaagtgccaggagtgccactactaatagcagcggtaaggcgaccgtaacgctgaaa

SEQ ID NO: 135957 - DNA, 75 bp, synthetic construct
  source 1..75: mol_type = other DNA
ttaatggctatttaccatcatatccggcattaggcgccaaactgatgtacgaacagtattatggtgataatgttg

SEQ ID NO: 135958 - DNA, 75 bp, synthetic construct
  source 1..75: mol_type = other DNA
atttggtcaggtcggtgcgcgttacattgactcccgctttacggcaaatttaggtgctggccagcgttttttcct

SEQ ID NO: 135959 - DNA, 75 bp, synthetic construct
  source 1..75: mol_type = other DNA
aaggcgtggaatggtacaacaaccgcccgcattctgagctgccgatgaaaccgaacgggcggcattacagcccgg

SEQ ID NO: 135960 - DNA, 75 bp, synthetic construct
  source 1..75: mol_type = other DNA
atcacaaacaacagcagcgtattaaaggaatgcgcaagcgtgctgaggaaaaaatacgtgatgctgaggatgaag

SEQ ID NO: 135961 - DNA, 75 bp, synthetic construct
  source 1..75: mol_type = other DNA
ccgctgtgataacggagaaaaactgcgggtcacgttcgcgctggactgctgtgaccgtgaggcactgcactgggc

SEQ ID NO: 135962 - DNA, 75 bp, synthetic construct
  source 1..75: mol_type = other DNA
atccggcattgacccggcgatttcaggtgttgcaggtggcagagccggaagaggctgccgctgttgagatggtac

SEQ ID NO: 135963 - DNA, 75 bp, synthetic construct
  source 1..75: mol_type = other DNA
aggacggcagctttatctgtgaggcgatatggaacggcaataaacgcgcagccttccctgtcagtgcggaatatc

SEQ ID NO: 135964 - DNA, 75 bp, synthetic construct
  source 1..75: mol_type = other DNA
agagcatgacgaagaatttgaacgcgatttcaggctggggatgcaaaaactttttgccatgcaggaagaagatga

SEQ ID NO: 135965 - DNA, 75 bp, synthetic construct
  source 1..75: mol_type = other DNA
cttatgatgattttgctgcggaatggtatgaagtgcatcaggacaatcctgcgatgtgtgcagcactgccgtcgt

SEQ ID NO: 135966 - DNA, 75 bp, synthetic construct
  source 1..75: mol_type = other DNA
gttgggtcatagcgatctctccaccacccaaatttatacgcatgtcgccaccgagcgtttgcgtcaacttcatca

SEQ ID NO: 135967 - DNA, 75 bp, synthetic construct
  source 1..75: mol_type = other DNA
gatgacgcggcagactttctggcatcgcattaaacattatgctgtgctggcagggattgacagcgaaaagctgtc

SEQ ID NO: 135968 - DNA, 75 bp, synthetic construct
  source 1..75: mol_type = other DNA
aattatgcctggattggtgatggtcacggcatgaagatgaaagtggcacatcctgatcacggcaatccattttcc

SEQ ID NO: 135969 - DNA, 75 bp, synthetic construct
  source 1..75: mol_type = other DNA
atgatcaggtttgctatgccatgaacaaactcccggttgttgtgaaacaacgtgggcgcgttacaggcagcgagt

SEQ ID NO: 135970 - DNA, 75 bp, synthetic construct
  source 1..75: mol_type = other DNA
gcgatgtgtgcagcactgccgtcgtatgatcaggtttgctatgccatgaacaaactcccggttgttgtgaaacaa

SEQ ID NO: 135971 - DNA, 75 bp, synthetic construct
  source 1..75: mol_type = other DNA
tggaaagagacggtgatctcgggcgactgaaagccattaactttcttgtcgaaaaagcccgtaaaggtgaactac

SEQ ID NO: 135972 - DNA, 75 bp, synthetic construct
  source 1..75: mol_type = other DNA
cgaaactgagcgtgatgaatatctgaatcattcgctggatattctggaacagaacagacgtaaaaaaagccattt

SEQ ID NO: 135973 - DNA, 75 bp, synthetic construct
  source 1..75: mol_type = other DNA
gtggtgaccgttcagccgttgaggtgtgaggaagagcatgatgatgaatacgaaactgagcgtgatgaatatctg

SEQ ID NO: 135974 - DNA, 75 bp, synthetic construct
  source 1..75: mol_type = other DNA
ggatgttgggccttgaaccgaagatcacggcggtgcggagtccggagagtaacggtatagcagagagcttcgtga

SEQ ID NO: 135975 - DNA, 75 bp, synthetic construct
  source 1..75: mol_type = other DNA
ggatgttgggacttgaaccgaagagcacggcggtgcggagtccggagagtaacgggatagcagagagcttcgtga

SEQ ID NO: 135976 - DNA, 75 bp, synthetic construct
  source 1..75: mol_type = other DNA
atgtgatgaccgttcagcaacaggaatatgaagaggagcacgacgaagaatccgaacgcaatttcaggcggggat

SEQ ID NO: 135977 - DNA, 75 bp, synthetic construct
  source 1..75: mol_type = other DNA
cggcgcgtggtgttattgcccgcctgcatcttgacaggctgatggatcggatggcagagcagcatggcgtttcac

SEQ ID NO: 135978 - DNA, 75 bp, synthetic construct
  source 1..75: mol_type = other DNA
gacatactgacgatacggatcgcctcactgaatgcagatctttctgacaccgaagcgcgctggcagcaggaactg

SEQ ID NO: 135979 - DNA, 75 bp, synthetic construct
  source 1..75: mol_type = other DNA
aaaagcccatcacgacgtccacgagttgttctaccaggtattcgataaaggtgcgatggaggatggcgaaggtgt

SEQ ID NO: 135980 - DNA, 75 bp, synthetic construct
  source 1..75: mol_type = other DNA
ccgcagggacgcggcattattgagcgcctgaaccggacgttaccgatgcgtatagcaaggaggtatcgcacctat

SEQ ID NO: 135981 - DNA, 75 bp, synthetic construct
  source 1..75: mol_type = other DNA
acagggttaaaagaggcgttaatgccggagttacgtaaacacttcccggcggctttcctggggcgtgtgacggtt

SEQ ID NO: 135982 - DNA, 75 bp, synthetic construct
  source 1..75: mol_type = other DNA
cggtgggcgtctttctgctggccgggccgtccggtgtcggcaagaccgagaccgcgctggcgctggcggaatcta

SEQ ID NO: 135983 - DNA, 75 bp, synthetic construct
  source 1..75: mol_type = other DNA
tactggacgcgcgaatggagcaagaaggctatgcccgtagttccatcaacccgttcctgtttccgggtgaagggg

SEQ ID NO: 135984 - DNA, 75 bp, synthetic construct
  source 1..75: mol_type = other DNA
atgttggtattcattgatgacggttcaacaaacatcaaactacagtggcaggaaaacgacggaacaattaaacag

SEQ ID NO: 135985 - DNA, 75 bp, synthetic construct
  source 1..75: mol_type = other DNA
tcacgcaccgctccttcgaaccgtttattcgtgcgatccaggcgcaaatttccccttgttgcaattgcatcatcg

SEQ ID NO: 135986 - DNA, 75 bp, synthetic construct
  source 1..75: mol_type = other DNA
gaacaacttgagcaaaaaggtatcgaaaaaggtatcgaaaaaggtatcgaaaaaggtatcgaaaaaggtatcgaa

SEQ ID NO: 135987 - DNA, 75 bp, synthetic construct
  source 1..75: mol_type = other DNA
gttggtggtgccgtttctgttttatcagggcagtgtctgtccttatccgtacagcatgaactggctggacgggtt

SEQ ID NO: 135988 - DNA, 75 bp, synthetic construct
  source 1..75: mol_type = other DNA
gcttcgatggaaaagttgtgagctggtctctcagtactcatcccgatgctgaaatggtcaacaccatgctggata

SEQ ID NO: 135989 - DNA, 75 bp, synthetic construct
  source 1..75: mol_type = other DNA
tactggacgcacgaatggagcaagaaggctatgcccgtagttccatcaacccgttcctgtttccaggtgaagggg

SEQ ID NO: 135990 - DNA, 75 bp, synthetic construct
  source 1..75: mol_type = other DNA
ttgttccctcggctcaagaatttatacaaccgccgcgccgagcgtctgcgcgagctggcagaaaataatccgctg

SEQ ID NO: 135991 - DNA, 75 bp, synthetic construct
  source 1..75: mol_type = other DNA
ttagatatttctcaggtaatggggaaattattagggatcagtaaaatatacggagactcatctcttggtgtatct

SEQ ID NO: 135992 - DNA, 75 bp, synthetic construct
  source 1..75: mol_type = other DNA
ttacccgcatctcaatgaaggaaaagataatcgcggtcttttatccttatcgcaagtgtatccccttgtgttagg

SEQ ID NO: 135993 - DNA, 75 bp, synthetic construct
  source 1..75: mol_type = other DNA
caacttaccgaggagcaacattggcaattattttctgagcagttggaattgctaaaatcatgccaacactttttt

SEQ ID NO: 135994 - DNA, 75 bp, synthetic construct
  source 1..75: mol_type = other DNA
gagagggataattacgcaggcgaactattaaaatatccgtttattgaactgttgattaatgagaattacccgcat

SEQ ID NO: 135995 - DNA, 75 bp, synthetic construct
  source 1..75: mol_type = other DNA
actgctctccagcggggtgaaaatggtggtgctcgatcacgatccggaccatatcgaaaccttgcgtaaatttgg

SEQ ID NO: 135996 - DNA, 75 bp, synthetic construct
  source 1..75: mol_type = other DNA
gctgctctccagcggagtgaaaatggttgtgctcgatcatgatcctgaccatatagaaacgttgcgcaaatttgg

SEQ ID NO: 135997 - DNA, 75 bp, synthetic construct
  source 1..75: mol_type = other DNA
gatgctgaatctattctgcactttgccgaaatcggcgtggtgctgatgctgtttatcatcggtctcgaactcgac

SEQ ID NO: 135998 - DNA, 75 bp, synthetic construct
  source 1..75: mol_type = other DNA
agtaatagcgatgattttacggacgtattaccccacggcacggcgcagataagcgcaggtgaaccgctgttatcc

SEQ ID NO: 135999 - DNA, 75 bp, synthetic construct
  source 1..75: mol_type = other DNA
cttgcgggaagtgtttagtgccgtggcgttattcctcgtgtttggctttggtttgctgctggaagaggtcggctt

SEQ ID NO: 136000 - DNA, 75 bp, synthetic construct
  source 1..75: mol_type = other DNA
agtgagtttgcctttgtggtatttggtgcggcgcagatggcgaatgtgctggagccggagtgggcgaaatcgctg

SEQ ID NO: 136001 - DNA, 75 bp, synthetic construct
  source 1..75: mol_type = other DNA
gtgttttatggcgatgccacgcggatggatttactggaatctgccggagcggcgaaagcggaagtgctgattaac

SEQ ID NO: 136002 - DNA, 75 bp, synthetic construct
  source 1..75: mol_type = other DNA
atgacgctggcgctctcctctacggcgattgccatgcaggcgatgaatgaacgcaatctgatggtgacgcaaatg

SEQ ID NO: 136003 - DNA, 75 bp, synthetic construct
  source 1..75: mol_type = other DNA
atggatagccatacgctggttcaggcgctgatttatctcggttcggcagcgctgattgtacccattgcggtacgt

SEQ ID NO: 136004 - DNA, 75 bp, synthetic construct
  source 1..75: mol_type = other DNA
gtgctggagccggagtgggcgaaatcgctgaccctggcggtggcgctgtcgatggcggcaacgccgattctgctg

SEQ ID NO: 136005 - DNA, 75 bp, synthetic construct
  source 1..75: mol_type = other DNA
tgatgagatcgacgaagaacaaccgcgggtaattgttgccggattcggtcgttttggtcagatcaccgggcgttt

SEQ ID NO: 136006 - DNA, 75 bp, synthetic construct
  source 1..75: mol_type = other DNA
acatttcccgcatttgcagattattgcccgcgcccgcgatgtcgaccactacattcgtttgcgtcaggcaggcgt

SEQ ID NO: 136007 - DNA, 75 bp, synthetic construct
  source 1..75: mol_type = other DNA
gcagcgccaacaacctgacgcaccaaacctttgaagcgatccagtattatctgctgaaagcgtctaacgaactgg

SEQ ID NO: 136008 - DNA, 75 bp, synthetic construct
  source 1..75: mol_type = other DNA
aatcaaaacgcacggcctgcgtaactccacgctttctgccctgatgccgtcagagacttcttcacagatctctaa

SEQ ID NO: 136009 - DNA, 75 bp, synthetic construct
  source 1..75: mol_type = other DNA
gctggattatcaggattacccgatcccggcagcaaaacgcggggcaatgggccgtcgtacgctgggtattggtgt

SEQ ID NO: 136010 - DNA, 75 bp, synthetic construct
  source 1..75: mol_type = other DNA
ataaaaccgtcccattggccgttgagcgggtactgccggatattgcagcggcgattgatgtcatccacgcccagg

SEQ ID NO: 136011 - DNA, 75 bp, synthetic construct
  source 1..75: mol_type = other DNA
caaagtgtttggcaacctgatggtcgatgtggtcgccaccaacgaaaaattgcacgtgcgccagattaatatcgt

SEQ ID NO: 136012 - DNA, 75 bp, synthetic construct
  source 1..75: mol_type = other DNA
gccgtacagtgggcatttcctgtaatccggggagtgccgtttcatccaccgcagagtttgctattacgccggtag

SEQ ID NO: 136013 - DNA, 75 bp, synthetic construct
  source 1..75: mol_type = other DNA
ctggggattctggatgccagcgaatgtccgcccacctacggcgtgaaaccaggcctggtagttggattaattgct

SEQ ID NO: 136014 - DNA, 75 bp, synthetic construct
  source 1..75: mol_type = other DNA
ccctgcagatggcgctgtggcgtcgtaagagcctccggaacgttatcgttcactcggaccatggaagccagttct

SEQ ID NO: 136015 - DNA, 75 bp, synthetic construct
  source 1..75: mol_type = other DNA
gctacagacttgtatatcaagtcattgatgagaaagtcgttttactcgttattgccgttggaagaagggaaagca

SEQ ID NO: 136016 - DNA, 75 bp, synthetic construct
  source 1..75: mol_type = other DNA
cccgtgacggcgctgaagacgcacaagacgatctggtgccgtcaatccaggacgatggctgcgaaagcggcgcat

SEQ ID NO: 136017 - DNA, 75 bp, synthetic construct
  source 1..75: mol_type = other DNA
tcacagatctctaacgccactaacggtattgaaccgccgcgcggttacgtcagcatcaaagcgtcgaaagacggt

SEQ ID NO: 136018 - DNA, 75 bp, synthetic construct
  source 1..75: mol_type = other DNA
cgcgattgtgaaatacgtttcccagcgtgccgggatcggcatcaacgccgggcgtattcgtgcgctgggtagccc

SEQ ID NO: 136019 - DNA, 75 bp, synthetic construct
  source 1..75: mol_type = other DNA
atggggcaggttatgccgggctgggaaaaggttaagaagcgactggatggtatggctgggatgttgttggcagat

SEQ ID NO: 136020 - DNA, 75 bp, synthetic construct
  source 1..75: mol_type = other DNA
atgagtgaaaaagaatcgccatcaatgaaagcgttacgcattgtctatggtgatgaggtcatcgtcgtacagtgt

SEQ ID NO: 136021 - DNA, 75 bp, synthetic construct
  source 1..75: mol_type = other DNA
gtatttggcaatgatattcagttcaatatctatcctggcgtctctgttggcgatgcatcgcgaaaaacaaagtat

SEQ ID NO: 136022 - DNA, 75 bp, synthetic construct
  source 1..75: mol_type = other DNA
atgcagatcgtcaacctgtttgaagatgaagagaatttcgaccgtttacgtgcctgccgtaccgagcaggaagta

SEQ ID NO: 136023 - DNA, 75 bp, synthetic construct
  source 1..75: mol_type = other DNA
atgaagagaatttcgaccgtttacgcgcctgccgtaccgagcaggaagtactggatttaattgaccgcaccaacg

SEQ ID NO: 136024 - DNA, 75 bp, synthetic construct
  source 1..75: mol_type = other DNA
gctggaagccgcttaccggctggggctgcaaacgcaggcgccagttaaacgcatctactggtcaaacggccctac

SEQ ID NO: 136025 - DNA, 75 bp, synthetic construct
  source 1..75: mol_type = other DNA
taatgggaacggtggggctacgttatctgccttagctgtagatgactccgataacattacagcaataaatgtcgg

SEQ ID NO: 136026 - DNA, 75 bp, synthetic construct
  source 1..75: mol_type = other DNA
tgaaaggcggcgtactggcgaacggcctgaactcgtttgtctcggcggtatttaataccttcccgaactcctgct

SEQ ID NO: 136027 - DNA, 75 bp, synthetic construct
  source 1..75: mol_type = other DNA
gggtctggtggttggtttgattgctggcggcgaatatgccattcagcacgcggtggaaggcgcggaagacagccg

SEQ ID NO: 136028 - DNA, 75 bp, synthetic construct
  source 1..75: mol_type = other DNA
atgaatcagcaacgatttgatgaaagcaccctaatccgtatcttcgctctccacgagttacatcgactgaaagaa

SEQ ID NO: 136029 - DNA, 75 bp, synthetic construct
  source 1..75: mol_type = other DNA
ctttagaagatgatgataatattaccgcagtaaatgtaggtgatagccgtatttattatgtctcgcatgaagaaa

SEQ ID NO: 136030 - DNA, 75 bp, synthetic construct
  source 1..75: mol_type = other DNA
tactgaaataataagaaattctcatttaccaatacgttcttgtcttgagaaagctgtgctacaagcgaatgattc

SEQ ID NO: 136031 - DNA, 75 bp, synthetic construct
  source 1..75: mol_type = other DNA
agggacgattatttaccgcgtgggagagagtgctatccgtgacggtggtaaacgtctggatgtatcccgcgatgc

SEQ ID NO: 136032 - DNA, 75 bp, synthetic construct
  source 1..75: mol_type = other DNA
cgttatgagattgaaccaacacaacgactaaatacgcgtgctaagggggataaaacttatcatttggttatttct

SEQ ID NO: 136033 - DNA, 75 bp, synthetic construct
  source 1..75: mol_type = other DNA
ggagatcgcccccctccaatgcgcgaaaaccgccaggttcaccttggggatgttcccgttatgcagattaacagt

SEQ ID NO: 136034 - DNA, 75 bp, synthetic construct
  source 1..75: mol_type = other DNA
caacgttgcacctgtatgctcggcgcaacgccgtttgtctatgaccttttgaatttactggaaaaacagcccgca

SEQ ID NO: 136035 - DNA, 75 bp, synthetic construct
  source 1..75: mol_type = other DNA
tacacctatagcgcgctcgatcaggccgcgagctgtctggcaaactggatgctggcgaacggtattgaagccggc

SEQ ID NO: 136036 - DNA, 75 bp, synthetic construct
  source 1..75: mol_type = other DNA
tgagattttctacaatcatcagcgtcgtcactctcgtctggggaatatctccccggcagccttcagggaaaaata

SEQ ID NO: 136037 - DNA, 75 bp, synthetic construct
  source 1..75: mol_type = other DNA
tccagagctggaaaagctgagacaaatcctcactaaaaaagcggcccgcgaacgtgaatacatccatattccgtt

SEQ ID NO: 136038 - DNA, 75 bp, synthetic construct
  source 1..75: mol_type = other DNA
aaccggcccggaggggataggcgtaaaagccagctctgttgatcgcgttctttcccgtgcctcccttgagaaaaa

SEQ ID NO: 136039 - DNA, 75 bp, synthetic construct
  source 1..75: mol_type = other DNA
attacccgtcgtacgctgatccacaaaatggtggaagtgaacacctgtttgaaacagctcgataacaaagacatc

SEQ ID NO: 136040 - DNA, 75 bp, synthetic construct
  source 1..75: mol_type = other DNA
acaaaacgtatcacctggtgatttcattccggcccggagaaaagccgtcagaagacgttttaaacgctatagagg

SEQ ID NO: 136041 - DNA, 75 bp, synthetic construct
  source 1..75: mol_type = other DNA
aggtgcaggtgtaaataaacgctacctttacagcctagtcagtaaagcgctgggcgcggaacttgaacgcacaaa

SEQ ID NO: 136042 - DNA, 75 bp, synthetic construct
  source 1..75: mol_type = other DNA
tggcgatcatcagagactaagtgcagtacatcacgatacagataatctgcatatccatgtggctatcaacaaaat

SEQ ID NO: 136043 - DNA, 75 bp, synthetic construct
  source 1..75: mol_type = other DNA
actcgcgaaacatatggaacccggcggctccagacggagctggcagagaatggcatcatcgttggtcgtgaccga

SEQ ID NO: 136044 - DNA, 75 bp, synthetic construct
  source 1..75: mol_type = other DNA
atatggaacccggcggctccagacggaactggcagagaatggcatcatcgttggtcgtgaccgactggcacgtct

SEQ ID NO: 136045 - DNA, 75 bp, synthetic construct
  source 1..75: mol_type = other DNA
taacgccccggtaattttcgacgttacccacgcgctgcaatgccgcgatccgtttggtgccgcttccggcggtcg

SEQ ID NO: 136046 - DNA, 75 bp, synthetic construct
  source 1..75: mol_type = other DNA
cccggcagccttcagggaaaaatatcatcagatggctgcttaaaaaaagaacaaatggtagtgtccgctattgcc

SEQ ID NO: 136047 - DNA, 75 bp, synthetic construct
  source 1..75: mol_type = other DNA
caggagcggttattacaactgggtacagcatgaaccctcagacagaaaacaaagtgatgagcggctaaaactgga

SEQ ID NO: 136048 - DNA, 75 bp, synthetic construct
  source 1..75: mol_type = other DNA
gtggatcactattgcaccgttcgtgacatccaccactctgatcgaggttcacagtactgcgcatacgattaccgt

SEQ ID NO: 136049 - DNA, 75 bp, synthetic construct
  source 1..75: mol_type = other DNA
ctgaacatattgtggtaacagagaaattaccacgtactgcatcaggtaaaatacaaaagtttttgttaaggaaag

SEQ ID NO: 136050 - DNA, 75 bp, synthetic construct
  source 1..75: mol_type = other DNA
ctcgttaagtcatcttatcgccgacaataccccactgactaaggcaataacggtccacggcgatgaattagcagc

SEQ ID NO: 136051 - DNA, 75 bp, synthetic construct
  source 1..75: mol_type = other DNA
gcctgtgtggttgcaatgcccgatgaacgtttaggtgaacgatcatgcgcttatgtcgtgctgaaagcgccgcat

SEQ ID NO: 136052 - DNA, 75 bp, synthetic construct
  source 1..75: mol_type = other DNA
gaagggatgaaaatcttccaggaattgaagcaaacttttggcgtgaaaattattactgacgttcacgagccaagc

SEQ ID NO: 136053 - DNA, 75 bp, synthetic construct
  source 1..75: mol_type = other DNA
gatcgaggttcacagtactacgcatacgattaccgggtcatccaggagcagtttggtctgaaaacatcaatgtcg

SEQ ID NO: 136054 - DNA, 75 bp, synthetic construct
  source 1..75: mol_type = other DNA
ttatgcacaccgatggttacgctgccgcaggtgtagagattaaagtggtcgatgacgcacgcaagaccttaccgc

SEQ ID NO: 136055 - DNA, 75 bp, synthetic construct
  source 1..75: mol_type = other DNA
gcttgatgtactgaatatcgccgccgattatgcggaatatgtggcagaggcgcgttatagaagaaaatttcctga

SEQ ID NO: 136056 - DNA, 75 bp, synthetic construct
  source 1..75: mol_type = other DNA
tcaccaaaacggtgacagcgctgtcaccaaaacagggacacacaaaagaaactattacaaaagaaaaaagaaata

SEQ ID NO: 136057 - DNA, 75 bp, synthetic construct
  source 1..75: mol_type = other DNA
atttaatgtcgatggcccacttgccgaactgactgcactgattaactacgtcaccagctcacagatgtctatgca

SEQ ID NO: 136058 - DNA, 75 bp, synthetic construct
  source 1..75: mol_type = other DNA
gctgacatacaatttgcctgagatagctccatttaatgtagaggcgggactgaaagcgatgaaggatggggttcg

SEQ ID NO: 136059 - DNA, 75 bp, synthetic construct
  source 1..75: mol_type = other DNA
tacaagtcagagggtgaaatgattcttagtattgcgtcggactatgcggaatatgtggcagagacgcgttactga

SEQ ID NO: 136060 - DNA, 75 bp, synthetic construct
  source 1..75: mol_type = other DNA
atgcataacctgtcaatttatgaccttaacagcattcagtttcgtgagaaattcaccgagcagctactggttaac

SEQ ID NO: 136061 - DNA, 75 bp, synthetic construct
  source 1..75: mol_type = other DNA
ctctcctccgggatcgccgctggcggtatcactgccattgtgctgaacctgattttcccgccagaaaaacagtaa

SEQ ID NO: 136062 - DNA, 75 bp, synthetic construct
  source 1..75: mol_type = other DNA
ggttggctccggtttgttgtctattcagggcaccagctttaacttcgttgccccgctgattatgggtggaacagc

SEQ ID NO: 136063 - DNA, 75 bp, synthetic construct
  source 1..75: mol_type = other DNA
cctgaactcgtttgtttcggcggtgtttaacaccttcccgaactcctgcttcgggcagaacaacggagtgatcca

SEQ ID NO: 136064 - DNA, 75 bp, synthetic construct
  source 1..75: mol_type = other DNA
tgagattttctacaatcgtcagcgtcgtcactctcgtctggggaatatctccccggcaaccttcagggaaaaata

SEQ ID NO: 136065 - DNA, 75 bp, synthetic construct
  source 1..75: mol_type = other DNA
aagttggagtcattaccagccctgtttatggcgctcaggagccagcgcccacctgccgggctaatccaccactct

SEQ ID NO: 136066 - DNA, 75 bp, synthetic construct
  source 1..75: mol_type = other DNA
atgtaaaaagcgtcgtaactccagcaggaacgataatgggagaagtttttatggatgataaaatcatcgcctatt

SEQ ID NO: 136067 - DNA, 75 bp, synthetic construct
  source 1..75: mol_type = other DNA
cgtccggcgatggatctggaagcctggtgtgcagagcaagatgaaggcttgaaactcaatcttcacccgcgcgcc

SEQ ID NO: 136068 - DNA, 75 bp, synthetic construct
  source 1..75: mol_type = other DNA
cagagtctccgcccgacgttaagtgccctgacgcccgaggtgcttgagtggttaagggatgaagagatgctggat

SEQ ID NO: 136069 - DNA, 75 bp, synthetic construct
  source 1..75: mol_type = other DNA
cgaacaaatttgacgatatcgcctccgactatgagcgtcgacgtcaggatttcgaaaacttaacgcagtgccaac

SEQ ID NO: 136070 - DNA, 75 bp, synthetic construct
  source 1..75: mol_type = other DNA
cgatgtccatgacccagctgctcaatatcgactgtatcgcggccctgattcagggcaaacagatggtgatgattg

SEQ ID NO: 136071 - DNA, 75 bp, synthetic construct
  source 1..75: mol_type = other DNA
atctcgatggcgaaaacgccgtccgacgtactggctgtccacctgctgctgaaagaagcgggtatcggtttgcga

SEQ ID NO: 136072 - DNA, 75 bp, synthetic construct
  source 1..75: mol_type = other DNA
aggtgctggtttctgaactgtcgatggttgaagcgacccctgaactgctggcgctggttggcgaagaaggtgccg

SEQ ID NO: 136073 - DNA, 75 bp, synthetic construct
  source 1..75: mol_type = other DNA
gctgcggtgaacggctatatgcagctttaccagccgcagtttgcccttgttgaattgctgaacgggcgagaggtt

SEQ ID NO: 136074 - DNA, 75 bp, synthetic construct
  source 1..75: mol_type = other DNA
cgtgccctgatagggcagcgtgaaatacatgcatctacccgcacaacccacctcgcaaatgctaaggcaatcgcc

SEQ ID NO: 136075 - DNA, 75 bp, synthetic construct
  source 1..75: mol_type = other DNA
gattcaagttctttatttatcaacaatgtgcaggctgaaaagctgcgtagcatgtgggataaagcatttgcgaaa

SEQ ID NO: 136076 - DNA, 75 bp, synthetic construct
  source 1..75: mol_type = other DNA
catcactcgtgttgatggtgctgtgcagttgaatgaaagtctgtgcgtaagctgcaaactgtgtggcatcgcctg

SEQ ID NO: 136077 - DNA, 75 bp, synthetic construct
  source 1..75: mol_type = other DNA
tgaaaaagaatctgcgccgcagccctgtcaccactgtgaagatgcaccctgcgcggtggtctgcccggttaacgc

SEQ ID NO: 136078 - DNA, 75 bp, synthetic construct
  source 1..75: mol_type = other DNA
tgaaaaagaatctgcaccgcagctctgtcaccactgtgaagatgcgccctgtgcggtggtctgtccggttaatgc

SEQ ID NO: 136079 - DNA, 75 bp, synthetic construct
  source 1..75: mol_type = other DNA
acttgagctcggtgataaaatgatttcaatcaatctattacctatgaccctggttaacgaacctgacgcagtctc

SEQ ID NO: 136080 - DNA, 75 bp, synthetic construct
  source 1..75: mol_type = other DNA
accgtctggcgctgactgttgataattcaacgatcgacgacaactacgaacacaacacatataacggcacctaca

SEQ ID NO: 136081 - DNA, 75 bp, synthetic construct
  source 1..75: mol_type = other DNA
tgattcactgactgtcgacaacagtaccgtaaccatttctgatgaagtttctgctggttgggctgtaggtgatgc

SEQ ID NO: 136082 - DNA, 75 bp, synthetic construct
  source 1..75: mol_type = other DNA
gtttgtttaatgtgactttgaacggtggttcagagtgggatacaacaaaatcttctctgattgatactttaagta

SEQ ID NO: 136083 - DNA, 75 bp, synthetic construct
  source 1..75: mol_type = other DNA
gtctacaactttgaacaaatcaaaaaatctgtcgaacgtacctcaatgaccttcagcattctaattctgatggtc

SEQ ID NO: 136084 - DNA, 75 bp, synthetic construct
  source 1..75: mol_type = other DNA
tgatcaacggtggaaagataattttggcggatgagccaactggtgctctggattcgcaatccgggcaagaagtgt

SEQ ID NO: 136085 - DNA, 75 bp, synthetic construct
  source 1..75: mol_type = other DNA
acgcgacagccgtcggcaacgtgcaacggcgttgctgggcagactgggactggaaggacgtgagcatcataaacc

SEQ ID NO: 136086 - DNA, 75 bp, synthetic construct
  source 1..75: mol_type = other DNA
cgcgtcagcgttgctgatgtgtccaaagtggatcaggctggcctgaagaaactgggcgcagcgggcgtagtggtt

SEQ ID NO: 136087 - DNA, 75 bp, synthetic construct
  source 1..75: mol_type = other DNA
gcgatttggattttgagcgggtgagagagctggagatcgtccgcgaaggagacagcatcatcctgcgtcccgtcc

SEQ ID NO: 136088 - DNA, 75 bp, synthetic construct
  source 1..75: mol_type = other DNA
gccccgagaactggattttgagggggtaagcgagctcgaaataatccgggaaggaaacagcattatcctgcgtcc

SEQ ID NO: 136089 - DNA, 75 bp, synthetic construct
  source 1..75: mol_type = other DNA
gatgaccatctaccagtccatgtctgacctgtccgacaacatgttcaaggcctacaagccacaggatgcgcgtct

SEQ ID NO: 136090 - DNA, 75 bp, synthetic construct
  source 1..75: mol_type = other DNA
gcgtagtggttgctggttctggtgttcaggcgattttcggtactaaatccgataacctgaaaaccgagatggatg

SEQ ID NO: 136091 - DNA, 75 bp, synthetic construct
  source 1..75: mol_type = other DNA
cctgaccggtatcaccgaaccgatcgagttctccttcatgttcgttgcgccgatcctgtacatcatccacgcgat

SEQ ID NO: 136092 - DNA, 75 bp, synthetic construct
  source 1..75: mol_type = other DNA
cttctataacgatgcggtcatcgacccgtatatgctggaacgtgctgaaattatgcgtggcccggtttccgtgct

SEQ ID NO: 136093 - DNA, 75 bp, synthetic construct
  source 1..75: mol_type = other DNA
gtggcgcatctaatacttatgattacctgatcatccgcggatttgcggcagacggccaaagccagaataactatc

SEQ ID NO: 136094 - DNA, 75 bp, synthetic construct
  source 1..75: mol_type = other DNA
gtcggtgaaagaagcgcttagctatacccctggcgttgctgtgggaacccgtggcgcatctaatacttatgatta

SEQ ID NO: 136095 - DNA, 75 bp, synthetic construct
  source 1..75: mol_type = other DNA
aatagcgcaaaatttgaatttgttaatgatttaaaagggatgagattcacaatcatgtcctctaaaaaggaaata

SEQ ID NO: 136096 - DNA, 75 bp, synthetic construct
  source 1..75: mol_type = other DNA
gcgattcggcaatcaatttcctcaaaatcaatcgcgaagtcactatccagacggtattccgctatgccaatcgtt

SEQ ID NO: 136097 - DNA, 75 bp, synthetic construct
  source 1..75: mol_type = other DNA
tatttacgattatcgggatgtacaacaggcatttgaagagtcggttaacaacaaacgcgacattattaaaggcgt

SEQ ID NO: 136098 - DNA, 75 bp, synthetic construct
  source 1..75: mol_type = other DNA
agtctgttgttgttacatgacaaaccatcacgacagcagcgggaacataaaggccgaatatcggtgaaggaaagc

SEQ ID NO: 136099 - DNA, 75 bp, synthetic construct
  source 1..75: mol_type = other DNA
tgcgctctttaacgctctggcggacgggatattcgcagctatatattcgtggcaggctgctgttgctgcattttt

SEQ ID NO: 136100 - DNA, 75 bp, synthetic construct
  source 1..75: mol_type = other DNA
gatttctgtaacggaacgaactcatgaaattggcgtacgaatggcggttggcgcgagacgcagcgacattatgca

SEQ ID NO: 136101 - DNA, 75 bp, synthetic construct
  source 1..75: mol_type = other DNA
cggaccctgagggttccttcttctcggttgaaggtggcgagatccgcgctcgtggcgtagaaatcgaagcgaaag

SEQ ID NO: 136102 - DNA, 75 bp, synthetic construct
  source 1..75: mol_type = other DNA
tgcatacctggttttccgcctgggaaatcacccattgaaagacctggaagtaagagactttgcattaatactgga

SEQ ID NO: 136103 - DNA, 75 bp, synthetic construct
  source 1..75: mol_type = other DNA
atctaatccatagtcggcaccagaaacaaccgaagccgatgagtaaagacaacctgagcgactactttgccaaag

SEQ ID NO: 136104 - DNA, 75 bp, synthetic construct
  source 1..75: mol_type = other DNA
cggattttatcgtgatttaccacgactatggatgcagcctgatggtgacgcggcgctgctgaactatcgcattat

SEQ ID NO: 136105 - DNA, 75 bp, synthetic construct
  source 1..75: mol_type = other DNA
aatttataagacccgattttctctccagttctctaatattgcgggtaatccatttagcgaaatcgatctctttac

SEQ ID NO: 136106 - DNA, 75 bp, synthetic construct
  source 1..75: mol_type = other DNA
caacgtttcttgcctcaaggcgactatcattatcaaattcattatcaggttaaaaatgctttcctgcgtgaaggg

SEQ ID NO: 136107 - DNA, 75 bp, synthetic construct
  source 1..75: mol_type = other DNA
ttttcaaggtgttgaactgacgtttgcgaaacaagaaatatttaatgcacagcaacaagcagccaaggcgcttac

SEQ ID NO: 136108 - DNA, 75 bp, synthetic construct
  source 1..75: mol_type = other DNA
gagcacaaagagcttgacccgatcctgatcaaactcgcaaatcgcgctattgctgaaaacgcatggtctgcggcg

SEQ ID NO: 136109 - DNA, 75 bp, synthetic construct
  source 1..75: mol_type = other DNA
caacagaagaacaaaaggcaattgagactataggcgctgattttatttcgtcatattataaagatagatatgagg

SEQ ID NO: 136110 - DNA, 75 bp, synthetic construct
  source 1..75: mol_type = other DNA
ctgtcggcaataaaactgggcgccaagattatccatcgtgatatcaacaaagcaggactggttgatatcctgggt

SEQ ID NO: 136111 - DNA, 75 bp, synthetic construct
  source 1..75: mol_type = other DNA
tggaccccctggatggctcgtccaacatcgatgttaacgtttctgtcggtaccattttctccatctaccgccgcg

SEQ ID NO: 136112 - DNA, 75 bp, synthetic construct
  source 1..75: mol_type = other DNA
atgtattcgccgttcacaacaacatcgaagccccctgcggggatcgattttcgcggagcgttccggattttgaat

SEQ ID NO: 136113 - DNA, 75 bp, synthetic construct
  source 1..75: mol_type = other DNA
cggaacagctcggcgcgacagtggttattaacggcgcaaaagaagacactattgcacgctgtcagcaatttaccg

SEQ ID NO: 136114 - DNA, 75 bp, synthetic construct
  source 1..75: mol_type = other DNA
tacttatcgagatggtatacagggcaaagaggctatagtcgtcaaacatgctctggcccgcccgcaggacagcac

SEQ ID NO: 136115 - DNA, 75 bp, synthetic construct
  source 1..75: mol_type = other DNA
ggcagtggtgcaggactggctgcaaccgctcgaacaccttagctacgacgttcgccttttgctagaatcagatat

SEQ ID NO: 136116 - DNA, 75 bp, synthetic construct
  source 1..75: mol_type = other DNA
tatttctattggtggtttgattctgatgccagaaactgcgccacgaaaattaaaatcagaatatcaggagtgggc

SEQ ID NO: 136117 - DNA, 75 bp, synthetic construct
  source 1..75: mol_type = other DNA
accggtggtcattattatggcatggctatttatgtgattgttcttggtgttatttctattggtggtttgattctg

SEQ ID NO: 136118 - DNA, 75 bp, synthetic construct
  source 1..75: mol_type = other DNA
aatctggatgctaatattttaatggagacaatgattgtcgctgtcattatagaagtgttcgcaattcctttaatg

SEQ ID NO: 136119 - DNA, 75 bp, synthetic construct
  source 1..75: mol_type = other DNA
acggcaacaaccgcgccatccgtcttccccgcgatctggattttgaaggggtcagcgagctggaaatcctccggg

SEQ ID NO: 136120 - DNA, 75 bp, synthetic construct
  source 1..75: mol_type = other DNA
gagatcatcgacaacagcagagacaatgtggccagtccttatgttgttcaccggcttctggaaaagagaagcaat

SEQ ID NO: 136121 - DNA, 75 bp, synthetic construct
  source 1..75: mol_type = other DNA
atggacaaggtgaagacgttaatcatcgccgttgttgtttgcattattgccgggcttgctgccgtaacgtgctat

SEQ ID NO: 136122 - DNA, 75 bp, synthetic construct
  source 1..75: mol_type = other DNA
ctgttgtgtttttaaaatatttgtattttaacgtattcattcaggataagtgtgtaagcaaaaacagaggaggat

SEQ ID NO: 136123 - DNA, 75 bp, synthetic construct
  source 1..75: mol_type = other DNA
aatacatacataattttataaatgtatattatgtccttatccatctgataaatgaaacgttaaaatggtttcctt

SEQ ID NO: 136124 - DNA, 75 bp, synthetic construct
  source 1..75: mol_type = other DNA
gcaaccggaaatgcgtttcctggttatcgccggggccggtcaaaaagcggggacattcagaacaggcgatcccac

SEQ ID NO: 136125 - DNA, 75 bp, synthetic construct
  source 1..75: mol_type = other DNA
tcgaaaagctggagaactacccagaagacgagccgctgctgatggtgatggggcacaaggaagatggaggtgaag

SEQ ID NO: 136126 - DNA, 75 bp, synthetic construct
  source 1..75: mol_type = other DNA
gtatggctacatgacgccggtctcacggaatcataacggccagttaacagccgaccaggcagactgcctagacaa

SEQ ID NO: 136127 - DNA, 75 bp, synthetic construct
  source 1..75: mol_type = other DNA
atgatccagatgtgcacctttccccccaacggggtaaaagctccaactgtaacgatgttcgttatggttgtctgt

SEQ ID NO: 136128 - DNA, 75 bp, synthetic construct
  source 1..75: mol_type = other DNA
caatgataatcttctgttcaaatggctcaggctctggctgatcaaaggtaagcgtaaaccgactgccgtatgtag

SEQ ID NO: 136129 - DNA, 75 bp, synthetic construct
  source 1..75: mol_type = other DNA
ccgcctgtacgcggggaaaaaatacgacatcgccggggttatcggctttttgctgttttgccgtgggaatcctga

SEQ ID NO: 136130 - DNA, 75 bp, synthetic construct
  source 1..75: mol_type = other DNA
tcccctgtcttcgtccatttattaagctggagttgatggaaagcactctgctggaacatccggaaagcagagata

SEQ ID NO: 136131 - DNA, 75 bp, synthetic construct
  source 1..75: mol_type = other DNA
gtaactcaggtgctcagatttgccgtgggggagggtttatgggcagtacgctgtactgtgacgcttctgaggacg

SEQ ID NO: 136132 - DNA, 75 bp, synthetic construct
  source 1..75: mol_type = other DNA
atgaacttcacgataaaatcccgtaaaaccggcgaaattttcagtttttacgcacccgacagtggtggttatgtt

SEQ ID NO: 136133 - DNA, 75 bp, synthetic construct
  source 1..75: mol_type = other DNA
ataaaacactctccaggaaacccggggcggttcagttgtcgcacatgttacaggggctggaaagtcaggctgtat

SEQ ID NO: 136134 - DNA, 75 bp, synthetic construct
  source 1..75: mol_type = other DNA
gtagttattcccactgtgaattagccgttaagcatggtgaaaagagttacctttgttactctgcatcactacgcg

SEQ ID NO: 136135 - DNA, 75 bp, synthetic construct
  source 1..75: mol_type = other DNA
tttctgcaattaaaggagagttggcgctattccccaaaccacttgtacgctttagtcagtagctggcaatatcag

SEQ ID NO: 136136 - DNA, 75 bp, synthetic construct
  source 1..75: mol_type = other DNA
cgacgataaaggttacgactggctgggtgccattggttttgtgttactcagtcagggcaaacaggagcgcctgtt

SEQ ID NO: 136137 - DNA, 75 bp, synthetic construct
  source 1..75: mol_type = other DNA
agcactctgctggaacatccggaaagcagagatatttattcccttgtcacggagttaacgggtaaaggtacacct

SEQ ID NO: 136138 - DNA, 75 bp, synthetic construct
  source 1..75: mol_type = other DNA
ataaagggcgagaagatcatcatgggtttgcacggctttccgactggctgacgcgactggtgacgcggggtgagt

SEQ ID NO: 136139 - DNA, 75 bp, synthetic construct
  source 1..75: mol_type = other DNA
ataaagggcgagccgatcatcatgggttcgcacgtctttccgactggctgacgcggctggtgacgcggggtgagt

SEQ ID NO: 136140 - DNA, 75 bp, synthetic construct
  source 1..75: mol_type = other DNA
gcaacctgttcagagcacatcaccttctgataatacttcatcgtttctcgacaaagcgcgtggcctttttacgcg

SEQ ID NO: 136141 - DNA, 75 bp, synthetic construct
  source 1..75: mol_type = other DNA
ggaacagaatcatccttatgacatccctgcagaagagacagacaatcaggcatatgaagatgactatgcagcata

SEQ ID NO: 136142 - DNA, 75 bp, synthetic construct
  source 1..75: mol_type = other DNA
ttgacgtggcagaaaatgcccgccaaatctggactgacagcccctttgtcttctgtgccgacaacgaccatcaac

SEQ ID NO: 136143 - DNA, 75 bp, synthetic construct
  source 1..75: mol_type = other DNA
ataatggcgtacaactccatagctatgacgtagctgacagtgaactagtaactgatccgtcaactggttatcaat

SEQ ID NO: 136144 - DNA, 75 bp, synthetic construct
  source 1..75: mol_type = other DNA
tattgcagcaggtcgtgatctctttattctcgtttcaaccaatcaaacctaccaatcagtaaactataataatca

SEQ ID NO: 136145 - DNA, 75 bp, synthetic construct
  source 1..75: mol_type = other DNA
acctgacagtattgtctacgccccggaacgtcctgatgcaccgatatcgcttaatctggacgaaatcataaaatc

SEQ ID NO: 136146 - DNA, 75 bp, synthetic construct
  source 1..75: mol_type = other DNA
ccccggtgaaagtgtgactgccgtcctgacaaactacggagaaaaagagtatgcgcccggaaaagggcgctgctt

SEQ ID NO: 136147 - DNA, 75 bp, synthetic construct
  source 1..75: mol_type = other DNA
ttcatacatatatctttataaggatagagtgtatcgattggtttatgatttatttaaatcaaatgggcttaatgt

SEQ ID NO: 136148 - DNA, 75 bp, synthetic construct
  source 1..75: mol_type = other DNA
ggactatgcagtctgcaggaaaagcaacagcaaggatctctgaagagccgcaacccggcgaacagatgaaactct

SEQ ID NO: 136149 - DNA, 75 bp, synthetic construct
  source 1..75: mol_type = other DNA
ttaaatggccgcaaagcggtagcatgggatccagagaaaaaactctggtatgccgaggcgggtaccgacctttca

SEQ ID NO: 136150 - DNA, 75 bp, synthetic construct
  source 1..75: mol_type = other DNA
tatccgtaatatctgggccataaccccggtcagtaacggcattaccgttaataatgaccaacctcatgcgggtca

SEQ ID NO: 136151 - DNA, 75 bp, synthetic construct
  source 1..75: mol_type = other DNA
aaatatcgatcctctcgccagactgcatctgaaggcatccgctcagcaaaatcgcgatgagaaagaacgtaaact

SEQ ID NO: 136152 - DNA, 75 bp, synthetic construct
  source 1..75: mol_type = other DNA
cacgggatctggctgggataattccaccagcaggaaaaactccgccaactgaaccgccccgggtttcctggagag

SEQ ID NO: 136153 - DNA, 75 bp, synthetic construct
  source 1..75: mol_type = other DNA
agcgaatagctgcagcagaagctgaatatttcatgcgcaaaattgatgaaagtccgtcagcaacaaaacgtcggg

SEQ ID NO: 136154 - DNA, 75 bp, synthetic construct
  source 1..75: mol_type = other DNA
caaccctatttgggagcatgagcatgaaaatgttctccgcgccgccatgattgtatttctcatgatgcaggaaaa

SEQ ID NO: 136155 - DNA, 75 bp, synthetic construct
  source 1..75: mol_type = other DNA
taaatttcagcgtaaagctgatttcattcgctacgaacgccctgttcccagggcaagattacgaaagcccgctcc

SEQ ID NO: 136156 - DNA, 75 bp, synthetic construct
  source 1..75: mol_type = other DNA
atagcaacaatcaacaaagtcctttgccagaatcaggttaaacctgttgttaaatttcagcgtaaagctgatttc

SEQ ID NO: 136157 - DNA, 75 bp, synthetic construct
  source 1..75: mol_type = other DNA
aaatgcctttcccgatacagcgctctcagacagaccggggaagagaattttttgccgttaaagcgcaggaaagat

SEQ ID NO: 136158 - DNA, 75 bp, synthetic construct
  source 1..75: mol_type = other DNA
gatttttggtccgctctcagacagaatcgggcgacggccaattctacttgcgggcgcaacggctttcgtcattgc

SEQ ID NO: 136159 - DNA, 75 bp, synthetic construct
  source 1..75: mol_type = other DNA
ggtcggtattgtcttcacggtgtccgttaccgcgaacggcgctttggcagagttcgacgacatcgcgggatcagc

SEQ ID NO: 136160 - DNA, 75 bp, synthetic construct
  source 1..75: mol_type = other DNA
gctaccgggctaatgaaacacgccagttcgcccggatgttgggacttgaaccgaagaacacggcggtgcggagta

SEQ ID NO: 136161 - DNA, 75 bp, synthetic construct
  source 1..75: mol_type = other DNA
atgaacgccttatccgacctacagttctgctccagcacaggcctgataagacgcgctggcgtcacatcaggcaac

SEQ ID NO: 136162 - DNA, 75 bp, synthetic construct
  source 1..75: mol_type = other DNA
tggattccattccgcgggtattaatcgccaataatccctcattaaaagagtttgcccagcaaattattaccgtac

SEQ ID NO: 136163 - DNA, 75 bp, synthetic construct
  source 1..75: mol_type = other DNA
gatatattgtattaactccttcatatatttatacagactgcctgatgcgatcatttatagatgtatcagggcttt

SEQ ID NO: 136164 - DNA, 75 bp, synthetic construct
  source 1..75: mol_type = other DNA
catgccacccatgcaatctgcacaagggaaggtgcgaacaagttcctgatatgagatcatcatattcatccggag

SEQ ID NO: 136165 - DNA, 75 bp, synthetic construct
  source 1..75: mol_type = other DNA
cggcgaattatcagtgatggtcgtcgtgaattccttgcgtccgggaaaggcaaagcgctggttcgtatgggattg

SEQ ID NO: 136166 - DNA, 75 bp, synthetic construct
  source 1..75: mol_type = other DNA
gcgccgcagcgaacatcgtgatcaccagtaccgtgtttgaattccgtaaacataaccgggtggtagacgccgccc

SEQ ID NO: 136167 - DNA, 75 bp, synthetic construct
  source 1..75: mol_type = other DNA
gaaatgcatttgtagtaccttattgccacgcggcggacagcaaagataaagagttgctggttattcaagaatata

SEQ ID NO: 136168 - DNA, 75 bp, synthetic construct
  source 1..75: mol_type = other DNA
aataaatgctttatatgacctttcagaaaacttcgtttatgattttcaatcaacaaatcccctatattgtgctag

SEQ ID NO: 136169 - DNA, 75 bp, synthetic construct
  source 1..75: mol_type = other DNA
aactgctcatgctgaggaaaaggccgacccgaacgatccatgtgcaatggtgttatgccttgccggaaaacttga

SEQ ID NO: 136170 - DNA, 75 bp, synthetic construct
  source 1..75: mol_type = other DNA
ctcgggcggccttgatgtgatgctgcaaatcgctgagaaactgctgcgccgcaacccgaaatatgtctctatcgt

SEQ ID NO: 136171 - DNA, 75 bp, synthetic construct
  source 1..75: mol_type = other DNA
ttatcgaacataccgatgtcgatgaaagcctgaaagggcaagggattggtggtaatgctgccaacttactgattt

SEQ ID NO: 136172 - DNA, 75 bp, synthetic construct
  source 1..75: mol_type = other DNA
cgatattgttgccgtcagctggccggctcataatgccactattctggttattctcacgggctatatttactcact

SEQ ID NO: 136173 - DNA, 75 bp, synthetic construct
  source 1..75: mol_type = other DNA
aagccggagcggctttttcctggttaagtcgtcattatcaggaaaaacacgcgacatcctgcgcgcctacaaaac

SEQ ID NO: 136174 - DNA, 75 bp, synthetic construct
  source 1..75: mol_type = other DNA
aagcaacagcccatggtatacgaactggcagtatgacgattgattatcacgacgccatacgtcgtctggatgccg

SEQ ID NO: 136175 - DNA, 75 bp, synthetic construct
  source 1..75: mol_type = other DNA
gcagaagccgatgagtccgggattttagaaaactgttctatcgatatgaaggttgcacagtggcgctggctgtat

SEQ ID NO: 136176 - DNA, 75 bp, synthetic construct
  source 1..75: mol_type = other DNA
atgcatcaggatatcaaagagtacagggccgggaaccgttgcgcagcgtattcgctgggcgcgtccagagcagaa

SEQ ID NO: 136177 - DNA, 75 bp, synthetic construct
  source 1..75: mol_type = other DNA
gatgctataagggaactatggtcgacgtatgacccagatgacccacagacggctccgacagagcatgaggtactt

SEQ ID NO: 136178 - DNA, 75 bp, synthetic construct
  source 1..75: mol_type = other DNA
acgtcatcgccgcggtcgtggtcggcggtacggcgctttccggtggtcgcggctcgttgttcggtacgctgcttg

SEQ ID NO: 136179 - DNA, 75 bp, synthetic construct
  source 1..75: mol_type = other DNA
tatgaaaatttacgccgtccatttcatgttactgctgatgtaccttataccgatgtatgggagtttcctcctgtg

SEQ ID NO: 136180 - DNA, 75 bp, synthetic construct
  source 1..75: mol_type = other DNA
ctggtttggtgccagtcagtggcagttgccgaatgaggctgactatcggaagttacaggcactgttttcccgtat

SEQ ID NO: 136181 - DNA, 75 bp, synthetic construct
  source 1..75: mol_type = other DNA
ctttaaatataaataatagtgtagataactggattgcatataataaaagattgcttgatttttttttggagaata

SEQ ID NO: 136182 - DNA, 75 bp, synthetic construct
  source 1..75: mol_type = other DNA
ttattaaggctgttacatcacctcatatcagtaaagaagcgttaatagcgataaccatggcatttaggataactc

SEQ ID NO: 136183 - DNA, 75 bp, synthetic construct
  source 1..75: mol_type = other DNA
aataaaagtattatgccgctgcaaggtttgtgatcatgagtggtcggctaaacctagagacattaagagcgggcg

SEQ ID NO: 136184 - DNA, 75 bp, synthetic construct
  source 1..75: mol_type = other DNA
cgatgaagaaaccagcatggctggggcgcgctattttgccgaaaccaccgccctgcgtcctgactgcgccatcat

SEQ ID NO: 136185 - DNA, 75 bp, synthetic construct
  source 1..75: mol_type = other DNA
cgcagggcaagagcgtctcgctcaaacaatttgtcagtcgccatattaatgagatcggtttgctggtggtgatcg

SEQ ID NO: 136186 - DNA, 75 bp, synthetic construct
  source 1..75: mol_type = other DNA
ctaaaatacgggaaaggctgcccgaaatgttctggtcacacaaagttgtcgcatgaagaacatgttaaggctatt

SEQ ID NO: 136187 - DNA, 75 bp, synthetic construct
  source 1..75: mol_type = other DNA
atgttgccgctattgcgaaagttaatcctgatgttgaagtgctggggaaaattattaatagcaaaacaaaagtat

SEQ ID NO: 136188 - DNA, 75 bp, synthetic construct
  source 1..75: mol_type = other DNA
tgaagctgactatgatctgacgaatgtgactgtttcgaaagagatgggacaggatgcaatcgaggctgctgaact

SEQ ID NO: 136189 - DNA, 75 bp, synthetic construct
  source 1..75: mol_type = other DNA
cgaagagaagaaaaggatggataaaagatcttactgaatatgaacgatcaattttcgttaacatgctgaatgaag

SEQ ID NO: 136190 - DNA, 75 bp, synthetic construct
  source 1..75: mol_type = other DNA
gccggagaggggtatcctgttgccattcttaaccggaatcagcctgcattctactgtgttcctgctgaattgtat

SEQ ID NO: 136191 - DNA, 75 bp, synthetic construct
  source 1..75: mol_type = other DNA
ccggatgattttacgctggcggaccgaacagcagaacgcatgacccgcgcccgcaatgggctggctcacgttatg

SEQ ID NO: 136192 - DNA, 75 bp, synthetic construct
  source 1..75: mol_type = other DNA
accttgaacgcaaactggaaatagaaaaagcggtcactgacgttgcggaactgaacggtgaattacgtaatcggc

SEQ ID NO: 136193 - DNA, 75 bp, synthetic construct
  source 1..75: mol_type = other DNA
tggcttgtggtggtgtgttgttgcgtcatgcgatggcatccagaaaacaggatgccatgatggcagaccacttag

SEQ ID NO: 136194 - DNA, 75 bp, synthetic construct
  source 1..75: mol_type = other DNA
accaggagttggtgaagctggttactgaacgcaacagtcagccactgcatgatgtcgatctggacagttatttat

SEQ ID NO: 136195 - DNA, 75 bp, synthetic construct
  source 1..75: mol_type = other DNA
gaaaaatccgatggcgacagtcagcgccggtgatggtttcccgatcgctatcctgaaccgtaatcagcctgcttt

SEQ ID NO: 136196 - DNA, 75 bp, synthetic construct
  source 1..75: mol_type = other DNA
ttgcacacaggcagagaaggaaaccatcaccgaaaaggcgaacttctttggcgtcagtgttcccgaatacctgcg

SEQ ID NO: 136197 - DNA, 75 bp, synthetic construct
  source 1..75: mol_type = other DNA
tcgccatatttttattttcctgtattgccggaatgggcagcgtactggatgaatttcagactcaccgtccactta

SEQ ID NO: 136198 - DNA, 75 bp, synthetic construct
  source 1..75: mol_type = other DNA
accaggagctggtgaaactggttactgaacgtagcactcagcctctgcatgatgtggacctggacagttatttat

SEQ ID NO: 136199 - DNA, 75 bp, synthetic construct
  source 1..75: mol_type = other DNA
gaaaggatgcttgatgccctagatgaccaggagctggtgaaactggttactgagcgcagcagtcagcctctgcat

SEQ ID NO: 136200 - DNA, 75 bp, synthetic construct
  source 1..75: mol_type = other DNA
actcgctttccaataagagcgtggaaaggaataaagatctgaccatcagtgtgaaggacgacaggcgccgtattt

SEQ ID NO: 136201 - DNA, 75 bp, synthetic construct
  source 1..75: mol_type = other DNA
cgacggccctgtacggtggcgggagtaccggagggttgatcaacatcgtgaccaaaaaaggtcagccggaaacca

SEQ ID NO: 136202 - DNA, 75 bp, synthetic construct
  source 1..75: mol_type = other DNA
aatcggctggacatcatgggaaccggtacgctgaacatcgatgaatcccggcagcttcaactgataacgcagtac

SEQ ID NO: 136203 - DNA, 75 bp, synthetic construct
  source 1..75: mol_type = other DNA
cgctggtgctttcggaaaaattcagtttcgaagatgccaaagttggtgaactgctgttcaacatgcaccacgact

SEQ ID NO: 136204 - DNA, 75 bp, synthetic construct
  source 1..75: mol_type = other DNA
gattaatgaatttgcctttagtgaacgcggcattcattgccagtttacctatcaactaaccaccacgccagaaaa

SEQ ID NO: 136205 - DNA, 75 bp, synthetic construct
  source 1..75: mol_type = other DNA
ttatgtcaggcccaataatgctaccgggtttgacctcatttaccggcggcgtattactgacgccgtttgtctatc

SEQ ID NO: 136206 - DNA, 75 bp, synthetic construct
  source 1..75: mol_type = other DNA
tcaatcaacagcttgccgccagccagctgtctgtcagtaacagcatcgcaggtctgcgattactgggtgaaacgg

SEQ ID NO: 136207 - DNA, 75 bp, synthetic construct
  source 1..75: mol_type = other DNA
gctacgcgctgaagaccaggtgatcagccgcaaccggcgtggtcagtccggtctgtggggctgggcaatttcagg

SEQ ID NO: 136208 - DNA, 75 bp, synthetic construct
  source 1..75: mol_type = other DNA
cggtttgcagcgctggcggagcacaggctggatgaaagcgtcgccgcgatgtgccgttcacaggctctgcgcctg

SEQ ID NO: 136209 - DNA, 75 bp, synthetic construct
  source 1..75: mol_type = other DNA
tgtttaagggtctggagcagcagcaagacaacttgcaggccgacgctcgacagctccagcgcctgcaatctgccg

SEQ ID NO: 136210 - DNA, 75 bp, synthetic construct
  source 1..75: mol_type = other DNA
gcccatccgttgaatacgccagagtatgatccggtacgccagagggtggtcaaaggatttggtattttacaaccc

SEQ ID NO: 136211 - DNA, 75 bp, synthetic construct
  source 1..75: mol_type = other DNA
tattgcacgaaactgccatgcagggcgcaggttggttgttaatcgcggtgatattacctctggttatcgctttaa

SEQ ID NO: 136212 - DNA, 75 bp, synthetic construct
  source 1..75: mol_type = other DNA
gctccggtgagcgaacgctggccgggtcgtctgacggtcgacgagctgcatccgccgatccctggctatgaatgc

SEQ ID NO: 136213 - DNA, 75 bp, synthetic construct
  source 1..75: mol_type = other DNA
agcctgtatgacgcgctgaccgccgcctgcctgctgccggacaccggggcgcgtaatatcgacagcctgctgaac

SEQ ID NO: 136214 - DNA, 75 bp, synthetic construct
  source 1..75: mol_type = other DNA
cagcctgtacgacgccctgaccgccgcctgcctgctgccggacactggggcgcgtaatatcgacagcctgctgaa

SEQ ID NO: 136215 - DNA, 75 bp, synthetic construct
  source 1..75: mol_type = other DNA
gcatattcacggtggcgatgcatctaaccgtatttgcgcttgctgtgagttgcatatggatattcgtccgctgcc

SEQ ID NO: 136216 - DNA, 75 bp, synthetic construct
  source 1..75: mol_type = other DNA
cgcggagttaacgctatcgaactgatgcacgacgccatcgggcatattttgcaattgcgcgataacctgaaagaa

SEQ ID NO: 136217 - DNA, 75 bp, synthetic construct
  source 1..75: mol_type = other DNA
atttaatcactctgctggcggactggtttaaagatttgggcttcaatgtggaagtgcagcctgtgccaggaactc

SEQ ID NO: 136218 - DNA, 75 bp, synthetic construct
  source 1..75: mol_type = other DNA
aaggcgtgaaggtcgattcttatgagctgggctggcgctttactggcgataatctgcgcacccaaatcgcggcct

SEQ ID NO: 136219 - DNA, 75 bp, synthetic construct
  source 1..75: mol_type = other DNA
aaggcgtgaaagtcgattcttatgagctgggctggcgctttactggcaataatctgcgcacccaaatcgcggcct

SEQ ID NO: 136220 - DNA, 75 bp, synthetic construct
  source 1..75: mol_type = other DNA
aggtttacgatctgggttgttctctgggcgcggcgacactctcggtgcgtcgcaacattcatcatgataattgca

SEQ ID NO: 136221 - DNA, 75 bp, synthetic construct
  source 1..75: mol_type = other DNA
tcaccaacctggcggtcttcctgcaatcaggctatgacatcaataatctctttaccctcaacggtggcgtacgct

SEQ ID NO: 136222 - DNA, 75 bp, synthetic construct
  source 1..75: mol_type = other DNA
cgctgaacatcgatgaatcccggcagcttcaactgataacgcagtactataaaagtcagggggacgacaattacg

SEQ ID NO: 136223 - DNA, 75 bp, synthetic construct
  source 1..75: mol_type = other DNA
acgtctttccgtggcatatcagaaatttggcggctggtttgacggtaacggcgatgccaccctgcttgataacac

SEQ ID NO: 136224 - DNA, 75 bp, synthetic construct
  source 1..75: mol_type = other DNA
ccggaaaaaagagggagagaagggctaaagctatccgagcgcaacgtgataaagaagcgatgcagcggagcaaaa

SEQ ID NO: 136225 - DNA, 75 bp, synthetic construct
  source 1..75: mol_type = other DNA
ccggaaaaaagagggagaaaagggccaaagcaatccgagcgcgtcgtaataaagaagcgcagcagcggagcgaaa

SEQ ID NO: 136226 - DNA, 75 bp, synthetic construct
  source 1..75: mol_type = other DNA
ttctctttcttaaccccgatgtattcataaccagtgaaagtttgattaattatgttgattatataattagtaatg

SEQ ID NO: 136227 - DNA, 75 bp, synthetic construct
  source 1..75: mol_type = other DNA
ggttcaacatcagcagcgcgtcccgggtagggactatcaaaatttataacctctcggcagatactgtgaaccgaa

SEQ ID NO: 136228 - DNA, 75 bp, synthetic construct
  source 1..75: mol_type = other DNA
atgacggcttttaccgacaaagagctaattaaagaaattaaagaacgtatcagcagtctggaggtgcgggacaat

SEQ ID NO: 136229 - DNA, 75 bp, synthetic construct
  source 1..75: mol_type = other DNA
attaaacagtcggtgcgatttctcttaatatatttagggttattagctaccgacatatttatctatctcgtattt

SEQ ID NO: 136230 - DNA, 75 bp, synthetic construct
  source 1..75: mol_type = other DNA
atgcaaaacaaaacgctgcttttctccctcgatgacacgctggttaataacgccctgcaaacactgaataaaaac

SEQ ID NO: 136231 - DNA, 75 bp, synthetic construct
  source 1..75: mol_type = other DNA
gtgaaaccttcgcggatatcggccagactctggcaaaatattttggtacttctgatatggaatatggcaaagcca

SEQ ID NO: 136232 - DNA, 75 bp, synthetic construct
  source 1..75: mol_type = other DNA
gctggaattttcattacgaaacagcccgctcaaattactttcttgaatgcttcggggactctctggctattaaag

SEQ ID NO: 136233 - DNA, 75 bp, synthetic construct
  source 1..75: mol_type = other DNA
ccctggatgacacgctggttaataacgcattgcaaacactgaataaaacgcgaccggcaatggtggatgtaattc

SEQ ID NO: 136234 - DNA, 75 bp, synthetic construct
  source 1..75: mol_type = other DNA
taacgcaaacacaacagggcgacgcgcaaatctggcggcgtgaagtcagctcccgttatggtcagtatcccgcag

SEQ ID NO: 136235 - DNA, 75 bp, synthetic construct
  source 1..75: mol_type = other DNA
gttgcaaacccccctgtttgttggccaatttgatggcgctgccgagcaagcgcaactgccagggaagctgtttac

SEQ ID NO: 136236 - DNA, 75 bp, synthetic construct
  source 1..75: mol_type = other DNA
cgttcacaacaacatcgaagcccccctgcggggatcgattttcgcggagcgttccggattttgaatatcagtgaa

SEQ ID NO: 136237 - DNA, 75 bp, synthetic construct
  source 1..75: mol_type = other DNA
gcgtgagttagatatgtcttatgcctgcaaatatgatttctttatcccgaatgaaacagaactggaaatattaac

SEQ ID NO: 136238 - DNA, 75 bp, synthetic construct
  source 1..75: mol_type = other DNA
cgcctgattaccgcttttcgttggctaatgaacgtacatttctggcgtggatccgtactgcattagggtttctgg

SEQ ID NO: 136239 - DNA, 75 bp, synthetic construct
  source 1..75: mol_type = other DNA
ttcactcaccttcgccgtcacagtgcctttctggacttcgtgaaaatggccggtgaaatcaaaaccgtcagggag

SEQ ID NO: 136240 - DNA, 75 bp, synthetic construct
  source 1..75: mol_type = other DNA
gacaagttaaccgctggttcaaagatcactacggagtgcccgtcagagtcattcgttgggagccggaaacacaac

SEQ ID NO: 136241 - DNA, 75 bp, synthetic construct
  source 1..75: mol_type = other DNA
agtacctcctccggcttgatgcccagcctctgccggagtcgaggatcgccctgctcctgcacctggtatctgatg

SEQ ID NO: 136242 - DNA, 75 bp, synthetic construct
  source 1..75: mol_type = other DNA
gtgggcagatcaccgaccagaacacagacggaaatatcacgctcagcggcaccacatcgcagcctgccagcatcg

SEQ ID NO: 136243 - DNA, 75 bp, synthetic construct
  source 1..75: mol_type = other DNA
aggggccaggcgtggtacatggatatgatgtgcgaagcgcgtggcgcggcggatctgtatacgcgatcggctttg

SEQ ID NO: 136244 - DNA, 75 bp, synthetic construct
  source 1..75: mol_type = other DNA
ctctcggcagatactgtgaaccgaatcaccgggcaggagttttcgaaagtgcgtctgattgccggttacgacggt

SEQ ID NO: 136245 - DNA, 75 bp, synthetic construct
  source 1..75: mol_type = other DNA
agcaccagaacccttgcagattatgaagggacttatcaccgccaccttgaaaaagcattaggaaaccttcgcatt

SEQ ID NO: 136246 - DNA, 75 bp, synthetic construct
  source 1..75: mol_type = other DNA
gccgaacgtcgcacaggctgaccacaccattgaagggttacgccagttgatcttcatctacccaagcgcactggc

SEQ ID NO: 136247 - DNA, 75 bp, synthetic construct
  source 1..75: mol_type = other DNA
gcgctgattaatccgaacatccgggttaacgggcttattcagctggatcaggcttccgtgtaccgcaccgcgctg

SEQ ID NO: 136248 - DNA, 75 bp, synthetic construct
  source 1..75: mol_type = other DNA
agtgaaaaaataaaatactatataggtgatgttcgtgattatcgaagcatcttaaatgcttcaaggggggtagat

SEQ ID NO: 136249 - DNA, 75 bp, synthetic construct
  source 1..75: mol_type = other DNA
agcaatatgaagcactatgtagccgtgaagagatgtttgttgcgcaagaggaagggaattattatcgagtgccag

SEQ ID NO: 136250 - DNA, 75 bp, synthetic construct
  source 1..75: mol_type = other DNA
tcctttagaagcggttaaaacaaatgtattaggcaccgaaaatgttttagaagcagccattactcatggagtaaa

SEQ ID NO: 136251 - DNA, 75 bp, synthetic construct
  source 1..75: mol_type = other DNA
ttactggtggtacggggtcttttggtaatgctgttcttagacgtttccttgacactgatatcaaagaaatacgca

SEQ ID NO: 136252 - DNA, 75 bp, synthetic construct
  source 1..75: mol_type = other DNA
aatccgaaacttaagttctatataggtgatgttcgcgactattcgagtatcctcaatgcttctcgaggtgttgat

SEQ ID NO: 136253 - DNA, 75 bp, synthetic construct
  source 1..75: mol_type = other DNA
ccctatggaggcggttaagacaaatgttctgggtacggaaaatgttctggaggctgctattgcgaatgggattaa

SEQ ID NO: 136254 - DNA, 75 bp, synthetic construct
  source 1..75: mol_type = other DNA
tgttaaaggaatgaaggaattattgcttaaactaccgtttgttcgagctttgatagctggtgaagcttttgaatt

SEQ ID NO: 136255 - DNA, 75 bp, synthetic construct
  source 1..75: mol_type = other DNA
ttactggtggcacaggttcctttgggaatgccgttttacaacgctttttagattcagatattggcgaaattcgaa

SEQ ID NO: 136256 - DNA, 75 bp, synthetic construct
  source 1..75: mol_type = other DNA
aactatctgctgaagatgcattccagacaacatgagacgggaggagatgccatttattgtgggctttatggccat

SEQ ID NO: 136257 - DNA, 75 bp, synthetic construct
  source 1..75: mol_type = other DNA
tccacttgaagcggttaaaacgaatgtattaggaactgaaaatgttttagaagctgcaattaatcattcagtaaa

SEQ ID NO: 136258 - DNA, 75 bp, synthetic construct
  source 1..75: mol_type = other DNA
taactggcggtactggttcttttggaaatgcagttttaaaacgttttctcaaaacagatataaaagaaattcgca

SEQ ID NO: 136259 - DNA, 75 bp, synthetic construct
  source 1..75: mol_type = other DNA
tcggaaaaactaaaattttatattggtgatgtgagagattaccaaagcatctcaaatgcaatgcgtggagttgat

SEQ ID NO: 136260 - DNA, 75 bp, synthetic construct
  source 1..75: mol_type = other DNA
atgaaacagccattaccgcccgtattacgcgccgcgctgtatcgtcgcgccgtggcctgtgcatggctgaccctg

SEQ ID NO: 136261 - DNA, 75 bp, synthetic construct
  source 1..75: mol_type = other DNA
atctcacccttgaatcactggaggcggccatcgccgctgagctggaaggcttttatctgcgccagcacggtgagg

SEQ ID NO: 136262 - DNA, 75 bp, synthetic construct
  source 1..75: mol_type = other DNA
tcggggccgcttaaagcctgtccggttctctcattgctcggaatgacggtcatggatgaactttgttcccgtcac

SEQ ID NO: 136263 - DNA, 75 bp, synthetic construct
  source 1..75: mol_type = other DNA
cgtcattcagccgtgcattatgccgatgatcggcgcacgccagggtgggcgcatcatcacgctgtcctcggtttc

SEQ ID NO: 136264 - DNA, 75 bp, synthetic construct
  source 1..75: mol_type = other DNA
aacgctgaacgccattgtcgccaacgggggtaacgggcgtttgctcagtttcgacgtcgcaaaccgcgaacagtg

SEQ ID NO: 136265 - DNA, 75 bp, synthetic construct
  source 1..75: mol_type = other DNA
tacgcgccgcgctgtatcgtcgcgccgtggcctgtgcatggctgacggtatgcgaacgccagcgccgctatccgc

SEQ ID NO: 136266 - DNA, 75 bp, synthetic construct
  source 1..75: mol_type = other DNA
tccaatggaagcggttaagactaacgtgctcggcaccgaaaacgttctcgaagctgcaattgcaaacgaagtaaa

SEQ ID NO: 136267 - DNA, 75 bp, synthetic construct
  source 1..75: mol_type = other DNA
ttacaggcggaacaggttcctttggaaatgcagttttaaatcgttttctggaaactgatattaaagaaattcgca

SEQ ID NO: 136268 - DNA, 75 bp, synthetic construct
  source 1..75: mol_type = other DNA
cagacctgcgcgatcttaactatggaaaatacgtagaacaaggtgatagccgaatctcagcagtagaggattata

SEQ ID NO: 136269 - DNA, 75 bp, synthetic construct
  source 1..75: mol_type = other DNA
cacttcgggtagctttgtatcgccgcgcggtagcctgcgcctggctgagtgtctgccatcagcaaaaccgccacc

SEQ ID NO: 136270 - DNA, 75 bp, synthetic construct
  source 1..75: mol_type = other DNA
cacttcggctggcgttatatcgccgcgcggttgcctgcgcctggctgagtatctgccatcagcacaaccgccacc

SEQ ID NO: 136271 - DNA, 75 bp, synthetic construct
  source 1..75: mol_type = other DNA
agctgaaaaagtttgccgcccgaatctcatcgcagcttttcatgatgtatgaggaactctgcgatgcctgggtgg

SEQ ID NO: 136272 - DNA, 75 bp, synthetic construct
  source 1..75: mol_type = other DNA
atgaaaaaatgggcagtattaatttccgcagtcggactggcatttgctgtttccggttgtagtagtgattatgtg

SEQ ID NO: 136273 - DNA, 75 bp, synthetic construct
  source 1..75: mol_type = other DNA
gaaatacaccgcacaggacgctacgacagcacaaaaaggaattgtccagctaagcagcgcgactaacagcacatc

SEQ ID NO: 136274 - DNA, 75 bp, synthetic construct
  source 1..75: mol_type = other DNA
agcacactcgcacgttgatggtcgcaggtttaatacaagcacttttaaagacacctatcagtatggttctacagc

SEQ ID NO: 136275 - DNA, 75 bp, synthetic construct
  source 1..75: mol_type = other DNA
tcagaaacgaacgcatcatcaagcgccagtagtgccgcttcctcggcaacggcggcaggaaattccgcgaaggcg

SEQ ID NO: 136276 - DNA, 75 bp, synthetic construct
  source 1..75: mol_type = other DNA
tttaatgttcaaccgtcgccagttgtcgttgatattctgcaactggcgcgttccggagtgatagccatgagcgaa

SEQ ID NO: 136277 - DNA, 75 bp, synthetic construct
  source 1..75: mol_type = other DNA
cttgccgcgacaccaaaggcagtaaaagcagccaatgacaatgctgagaaacgtctgcagaaagatcagaacggt

SEQ ID NO: 136278 - DNA, 75 bp, synthetic construct
  source 1..75: mol_type = other DNA
tacggatttggggacgaaaaacacatcgtcgtttgattacggaaccaaatccacgaataacaccggggcgcatac

SEQ ID NO: 136279 - DNA, 75 bp, synthetic construct
  source 1..75: mol_type = other DNA
tccgccagttcggcggcgtcatcggcatcatctgcgtctgcttcaaaagatgaggcgaccagacaggcgtcagca

SEQ ID NO: 136280 - DNA, 75 bp, synthetic construct
  source 1..75: mol_type = other DNA
caaaatcatcagaaacgaacgcctccacaagcgccagcagtgcagcctcctcggcaacggcggcaggaaattccg

SEQ ID NO: 136281 - DNA, 75 bp, synthetic construct
  source 1..75: mol_type = other DNA
agcgattctgaaacgctggcggcaacgccaaaggcggtaaaggcagcatatgaccttgctaatggcaaatacacc

SEQ ID NO: 136282 - DNA, 75 bp, synthetic construct
  source 1..75: mol_type = other DNA
ttaaagatacttatcaatatggttatacaagctcaggtcaaaatacctggggtgtacaaggctcagtaggtatgt

SEQ ID NO: 136283 - DNA, 75 bp, synthetic construct
  source 1..75: mol_type = other DNA
gcctccgcagcagcagactcaaaaacagcggctgcatcatctgccagcgccgcgtcaacaagtgccgggcaggcc

SEQ ID NO: 136284 - DNA, 75 bp, synthetic construct
  source 1..75: mol_type = other DNA
tgccagcgtgacgattcatacgtcaccagcatattctgctaataagccggaagggttaacggacggtacagttta

SEQ ID NO: 136285 - DNA, 75 bp, synthetic construct
  source 1..75: mol_type = other DNA
tttttgtcgctattttaaccagtctcgccacatgggttgttccggtggggatgtttgacagtcaggaagtgcagt

SEQ ID NO: 136286 - DNA, 75 bp, synthetic construct
  source 1..75: mol_type = other DNA
taatgcctggtttattccagagattgccagccagttcttcgccatggggctggtgattggcatcatcggcgttat

SEQ ID NO: 136287 - DNA, 75 bp, synthetic construct
  source 1..75: mol_type = other DNA
cattgataacggtatcctggcgcttattcgccatacccgcgggaatgaaattctctttattcctgcgctgtttat

SEQ ID NO: 136288 - DNA, 75 bp, synthetic construct
  source 1..75: mol_type = other DNA
atgaagttgaattttaagggattttttaaggctgccggtttattcccactggcgctgatgctttcgggctgtatc

SEQ ID NO: 136289 - DNA, 75 bp, synthetic construct
  source 1..75: mol_type = other DNA
gttcactttcggtgactggctggtattgattgtcctgaccgccgtcatgatctgggtgatttggggcgtgatcgt

SEQ ID NO: 136290 - DNA, 75 bp, synthetic construct
  source 1..75: mol_type = other DNA
gcgaacccgagtatcaccgagtacaactgttcacgacgggagatgaacgccccggtttgatgaacttcccgtttg

SEQ ID NO: 136291 - DNA, 75 bp, synthetic construct
  source 1..75: mol_type = other DNA
aaggcggaaaactttctcatgttcagcaggcttatgcgaaatccggcgcagtgcagtgcgggttttgtactcctg

SEQ ID NO: 136292 - DNA, 75 bp, synthetic construct
  source 1..75: mol_type = other DNA
tcgaatgcaccattaacgggatgccttttcagcttcacgccgcaccaggcacgccgctctcggaattactccgcg

SEQ ID NO: 136293 - DNA, 75 bp, synthetic construct
  source 1..75: mol_type = other DNA
tcgaatgcgtcattaacgggatgccttttcagcttcacgccgcgccaggaatgccgctttcggaactactccgag

SEQ ID NO: 136294 - DNA, 75 bp, synthetic construct
  source 1..75: mol_type = other DNA
actggcttatgcgaaatctggtgcagtgcaatgcgggttttgtacgccgggcctgattatggctaccacggcgat

SEQ ID NO: 136295 - DNA, 75 bp, synthetic construct
  source 1..75: mol_type = other DNA
gtgcagtgcgggttttgtacgcctggcctgattatggctaccgtaagcgtaaagccaatgccgtctgtaacacct

SEQ ID NO: 136296 - DNA, 75 bp, synthetic construct
  source 1..75: mol_type = other DNA
cgacggcatccacgaaggcgacagaggcagctggcagtgcgacggcggcagctcagagcaaaagtacggcggaat

SEQ ID NO: 136297 - DNA, 75 bp, synthetic construct
  source 1..75: mol_type = other DNA
gcagttttatccgcctggcgcaccaatcccgtggccatcagataccgttccgtctggctatgccctgatgcaggg

SEQ ID NO: 136298 - DNA, 75 bp, synthetic construct
  source 1..75: mol_type = other DNA
ttcgcctgcaacttacagcagaggagcttgatgcgttaacggcggattttatttcctataagcgtgacggtgttt

SEQ ID NO: 136299 - DNA, 75 bp, synthetic construct
  source 1..75: mol_type = other DNA
cactctatacgccatcagagcagttttatccgcctggcgcaccaatcccgtggccatcagataccgttccgtctg

SEQ ID NO: 136300 - DNA, 75 bp, synthetic construct
  source 1..75: mol_type = other DNA
acgccaaagtcggtaaaggcagcctatgaccttgctaacgggaaatatactgctcaggacgctacgacagcacaa

SEQ ID NO: 136301 - DNA, 75 bp, synthetic construct
  source 1..75: mol_type = other DNA
cggaaattatgcgactggtgtaaatattcaatgggattataccagtaatgccagcgtgacgattcatacgtcacc

SEQ ID NO: 136302 - DNA, 75 bp, synthetic construct
  source 1..75: mol_type = other DNA
cagcaggctcaaaaacagcggctgcgtcgtctgccagtgcagcgtcaacaagtgccgggcaggcctcagccagtg

SEQ ID NO: 136303 - DNA, 75 bp, synthetic construct
  source 1..75: mol_type = other DNA
cggtgcacatacccattcgatgacatttgtttcaggtggttccagtggtgctccgggaagtggatcacctgatta

SEQ ID NO: 136304 - DNA, 75 bp, synthetic construct
  source 1..75: mol_type = other DNA
ggtgtaaatattcaatgggattataccagtaatgccagcgtgacgattcatacgtcaccagcatattctgctaat

SEQ ID NO: 136305 - DNA, 75 bp, synthetic construct
  source 1..75: mol_type = other DNA
tggtgtaaatattcaatgggattataccagtaacgccagcgtaacgattcatacttcaccagcatattctgctaa

SEQ ID NO: 136306 - DNA, 75 bp, synthetic construct
  source 1..75: mol_type = other DNA
gcgcatccagtacggatttggggacgaaaaccacatcgtcgtttgattacggcactaaatccacgaataacactg

SEQ ID NO: 136307 - DNA, 75 bp, synthetic construct
  source 1..75: mol_type = other DNA
agcggcttatccgtcaggcgtgatccctgatatgcgtggctggacgattaagggcaaacctgccagtggtcgggc

SEQ ID NO: 136308 - DNA, 75 bp, synthetic construct
  source 1..75: mol_type = other DNA
cggcaacaccaaaggcggtaaaggcagcctatgaccttgctaacgggaaatataccgcacaggacgccacgacgg

SEQ ID NO: 136309 - DNA, 75 bp, synthetic construct
  source 1..75: mol_type = other DNA
gagcgcaggagggcatgctcacaatgtatatatcggtgcccataaccacactatcggcattggtgctcatgccca

SEQ ID NO: 136310 - DNA, 75 bp, synthetic construct
  source 1..75: mol_type = other DNA
caacgccaaaggcagtaaaagcagcctatgaccttgctaacgggaaatataccgctcaggacgctacgacagcac

SEQ ID NO: 136311 - DNA, 75 bp, synthetic construct
  source 1..75: mol_type = other DNA
ttggcgcacacactcatacggtaggaattggcgcacacacacactccgttgcgataggttcacacgggcatacca

SEQ ID NO: 136312 - DNA, 75 bp, synthetic construct
  source 1..75: mol_type = other DNA
ggaaatatactgcgcaggacgccaccacagcgcggaaaggccttgtccagctcagtagcgccaccaacagcgatt

SEQ ID NO: 136313 - DNA, 75 bp, synthetic construct
  source 1..75: mol_type = other DNA
ttggttcgcacacacacaccattaccattgccgcttatggcaacgcggaaaacaccgtaaaaaacatcgcattta

SEQ ID NO: 136314 - DNA, 75 bp, synthetic construct
  source 1..75: mol_type = other DNA
gttaagcagcagcgcgttgaatgccggggagcgtggtttactaattttatatgcgatataaaccgcaacattaaa

SEQ ID NO: 136315 - DNA, 75 bp, synthetic construct
  source 1..75: mol_type = other DNA
gccagtgtgaatacaagtgctgcaggagcgcacactcatagtgtcagcggcacagctgcatctgcaggtgctcac

SEQ ID NO: 136316 - DNA, 75 bp, synthetic construct
  source 1..75: mol_type = other DNA
cgccagcgcatccagtacggatttggggacgaaaaacacatcgtcgtttgattacggaaccaaatccacgaataa

SEQ ID NO: 136317 - DNA, 75 bp, synthetic construct
  source 1..75: mol_type = other DNA
gtctgagcggctctacaagctcggccggagcacactcgcacgttgatggtcgcaggtttaatacaagcactttta

SEQ ID NO: 136318 - DNA, 75 bp, synthetic construct
  source 1..75: mol_type = other DNA
tcagtagtgcaaccaacagcgcatctgaaacgcttgccgcgacaccgaaagcagtgaaagcagctaatgataatg

SEQ ID NO: 136319 - DNA, 75 bp, synthetic construct
  source 1..75: mol_type = other DNA
gaagctggaaggtactgactggactatccacaatcacgcgaatgtcttctcccgcaccgggctggatattggcgc

SEQ ID NO: 136320 - DNA, 75 bp, synthetic construct
  source 1..75: mol_type = other DNA
gttcactgacactacaacgtttcccggcgacggatgacgttaacccgctacaggcgtgggaagcggcggatgaat

SEQ ID NO: 136321 - DNA, 75 bp, synthetic construct
  source 1..75: mol_type = other DNA
aagaaaattttcggcaattgcaccaccatcgctacgaataataaatttgtggtgctgaaagcggtgaaactgggg

SEQ ID NO: 136322 - DNA, 75 bp, synthetic construct
  source 1..75: mol_type = other DNA
gccttaaaagtgctggccgggcagtttgacctgagcatcaacaccgtggcggtggatcttgactggcagccgtac

SEQ ID NO: 136323 - DNA, 75 bp, synthetic construct
  source 1..75: mol_type = other DNA
gaactggcttattcagacttatcagcagcgctggcctttgcatgaatggctgactgaaggaattgaagaagaccg

SEQ ID NO: 136324 - DNA, 75 bp, synthetic construct
  source 1..75: mol_type = other DNA
cccgcaccgggctggatattggcgcgcgcttctttatgcagcatctgccagagaatctcgaaggtgagattgtcg

SEQ ID NO: 136325 - DNA, 75 bp, synthetic construct
  source 1..75: mol_type = other DNA
ggcgatatcgaccacactctgctgaccggcgtcgactttatgcgtatgcgtaatgacatcaacgcctggtttggt

SEQ ID NO: 136326 - DNA, 75 bp, synthetic construct
  source 1..75: mol_type = other DNA
gcgttcacctggcgcccggatgataaaaccaatttcaccttcctttcttacttccagaacgagccggaaaccggt

SEQ ID NO: 136327 - DNA, 75 bp, synthetic construct
  source 1..75: mol_type = other DNA
ttatgttcaggatcaggcgcagtgggataaagtgctggtgactctgggcgggcgctatgactgggcagaccagga

SEQ ID NO: 136328 - DNA, 75 bp, synthetic construct
  source 1..75: mol_type = other DNA
gtacagcattggcgactcatacatcagtgaactggccacgcgcgagaatttacgcctcaacgggattgatgagtc

SEQ ID NO: 136329 - DNA, 75 bp, synthetic construct
  source 1..75: mol_type = other DNA
atttgctgcaacagttggacgacacagaaatccgcggcccggtgttgatcctgaatgatgcctttggtgcgttaa

SEQ ID NO: 136330 - DNA, 75 bp, synthetic construct
  source 1..75: mol_type = other DNA
gctaattgttagaaaaaagagtatgatctttataaatattatatacttcaggattctaaagattataaacctgaa

SEQ ID NO: 136331 - DNA, 75 bp, synthetic construct
  source 1..75: mol_type = other DNA
ccagtaaagagattcagtttgcggtgcagtcagggccaatgttgatggaaaacggtgtaattaatccgcgtattc

SEQ ID NO: 136332 - DNA, 75 bp, synthetic construct
  source 1..75: mol_type = other DNA
gcttgtccgggcaatgcatctgagtatcctggtacaggaaaatccgctcgccaacaccaccggccatcagggcta

SEQ ID NO: 136333 - DNA, 75 bp, synthetic construct
  source 1..75: mol_type = other DNA
atgacacagggcaggcgggaggataaatgcccgtctgcccgtgcaggaaaaaaaccgcgcgccggtggcgctgaa

SEQ ID NO: 136334 - DNA, 75 bp, synthetic construct
  source 1..75: mol_type = other DNA
tggcttgaatccgcaggaattgagatgtttcagggagatctgtttgctaaagctaaattgaatggtatcccttcc

SEQ ID NO: 136335 - DNA, 75 bp, synthetic construct
  source 1..75: mol_type = other DNA
aaggaatgatcaccttgaatctcagacggattttacccgccctcgtcttactccccttatttgctgttgccgctg

SEQ ID NO: 136336 - DNA, 75 bp, synthetic construct
  source 1..75: mol_type = other DNA
ctggcggatattaatagtcagggtcaggtgcagatggcgatgaacggcggcatctatgatgaatttatccgtcct

SEQ ID NO: 136337 - DNA, 75 bp, synthetic construct
  source 1..75: mol_type = other DNA
gattgctggttgtaccggcagtctgactgatgttgctttgcgctatgccggacaagaaaacaccacccttctaag

SEQ ID NO: 136338 - DNA, 75 bp, synthetic construct
  source 1..75: mol_type = other DNA
atgatgacattgccctacccatattcttcctccgcacgcttttacgcgctgcgcctgctccccgggcaggaagtt

SEQ ID NO: 136339 - DNA, 75 bp, synthetic construct
  source 1..75: mol_type = other DNA
ggcatctcggggtggggtatagcaacggtgccgatgtggaatccccgtggaacgcggtggctggtgtgaactggt

SEQ ID NO: 136340 - DNA, 75 bp, synthetic construct
  source 1..75: mol_type = other DNA
gcagtatatatcgtgaactgggtgcaacgctgagttacaacatgcgtctggggaacggtatggaaattgaaccct

SEQ ID NO: 136341 - DNA, 75 bp, synthetic construct
  source 1..75: mol_type = other DNA
atttgtctgttactgatgatgtggttgttcctgctactgctactgctactgctactgctactgctactgctactg

SEQ ID NO: 136342 - DNA, 75 bp, synthetic construct
  source 1..75: mol_type = other DNA
tatatcgtgaactgggtgcaacgctgagttacaacatgcgtctggggaacggtatggaaattgaaccctgcctga

SEQ ID NO: 136343 - DNA, 75 bp, synthetic construct
  source 1..75: mol_type = other DNA
tggatcattgaaaattggaagaatcagtaccaaggagcgcgaacactccgggtggctgaaacggcgtatttttta

SEQ ID NO: 136344 - DNA, 75 bp, synthetic construct
  source 1..75: mol_type = other DNA
tcatccgcatcgaaacagacaacggtgaacgggagaaagcgcagtgccgcagcctggcggagaagatacagcagg

SEQ ID NO: 136345 - DNA, 75 bp, synthetic construct
  source 1..75: mol_type = other DNA
gaataagcaccaaggaacgggaaaattgcgtatggctgaaaagacgacttttttattatacaacaccgttttttt

SEQ ID NO: 136346 - DNA, 75 bp, synthetic construct
  source 1..75: mol_type = other DNA
gataatgttatgcttcgctggtctgaagtgaacgaaatgttgcaatctggtctggtcgaatttcatgttcatacg

SEQ ID NO: 136347 - DNA, 75 bp, synthetic construct
  source 1..75: mol_type = other DNA
gaaagaagaatgaatgctcctgctaaaggaactacacggataggaagaataagcaccaaagaacgggaaagttgc

SEQ ID NO: 136348 - DNA, 75 bp, synthetic construct
  source 1..75: mol_type = other DNA
gatcggatgacgaaagccattgctgcgttcccacatgcagcaatggcggcactgacggaacttcttgggcaaaaa

SEQ ID NO: 136349 - DNA, 75 bp, synthetic construct
  source 1..75: mol_type = other DNA
attgacgaaaagcttatggagcttcacaagtggttttgggaacaaagtgaagccgagcgcgccgctggcattcgc

SEQ ID NO: 136350 - DNA, 75 bp, synthetic construct
  source 1..75: mol_type = other DNA
aattgccggtgaagcacctgtaatgcctttcgatcagcgaattaatgcgcttaacgattttatgaagcacttttc

SEQ ID NO: 136351 - DNA, 75 bp, synthetic construct
  source 1..75: mol_type = other DNA
gattaccaaacggtaatggcatacaaagtttctgaagtcatcgatgcaatccgcgctactggcattcgcatcaaa

SEQ ID NO: 136352 - DNA, 75 bp, synthetic construct
  source 1..75: mol_type = other DNA
catactcatacacgttgggataaaaagctcacttcacgagaagaacagtgtaaacatcttcggcaggacttattg

SEQ ID NO: 136353 - DNA, 75 bp, synthetic construct
  source 1..75: mol_type = other DNA
gcaccgattgacgaaaagcttatggagcttcacaagtggttttgggaacaaagtgaagccgagcgcgccgctggc

SEQ ID NO: 136354 - DNA, 75 bp, synthetic construct
  source 1..75: mol_type = other DNA
tcaggcctactttaatcgcaaatatgcaccgattgacgaaaagcttatggagcttcacaagtggttttgggaaca

SEQ ID NO: 136355 - DNA, 75 bp, synthetic construct
  source 1..75: mol_type = other DNA
tattgcgggacgcatcaggtgaaaaacgtatcaaaggtgaaaaggacagccgtatgctgatgtccgttggcctga

SEQ ID NO: 136356 - DNA, 75 bp, synthetic construct
  source 1..75: mol_type = other DNA
tggcagcctgagttcacagataaaacactctccaggaaaaccggggcggttcactggaaagtcactgcccgcgac

SEQ ID NO: 136357 - DNA, 75 bp, synthetic construct
  source 1..75: mol_type = other DNA
gatcggtccgaccggttccggtaaaacgctgctggccgaaacgctggcgcgcctgctggacgtcccgttcaccat

SEQ ID NO: 136358 - DNA, 75 bp, synthetic construct
  source 1..75: mol_type = other DNA
gccagaataactaccttaacggtctgaaattacagggcaacttctataacgatgcggttatcgatccgtatatgc

SEQ ID NO: 136359 - DNA, 75 bp, synthetic construct
  source 1..75: mol_type = other DNA
tggagcgcgccgaaatcatgcgtggtccggtatccgtgctgtacgggaaaagcagccctggcggcctgttgaaca

SEQ ID NO: 136360 - DNA, 75 bp, synthetic construct
  source 1..75: mol_type = other DNA
gttggcctgaatgcagaaatcagggataacgtccgctttggactggagtttgagaaatccgcctttggtaagtac

SEQ ID NO: 136361 - DNA, 75 bp, synthetic construct
  source 1..75: mol_type = other DNA
ccgtttcgcccttcagtatagccgccagcacgccgatgacgttttggatcgcctgattactggctgtgctggtct

SEQ ID NO: 136362 - DNA, 75 bp, synthetic construct
  source 1..75: mol_type = other DNA
agtgctgaaatcatgccagcaccaactgacacagccctcaaaccatgccagcgccgatctactgccagccatagt

SEQ ID NO: 136363 - DNA, 75 bp, synthetic construct
  source 1..75: mol_type = other DNA
ttagccatgaagaaagtactaccaacctgttggcaaggatgggttttcaacgacggatcgctggtacatatatta

SEQ ID NO: 136364 - DNA, 75 bp, synthetic construct
  source 1..75: mol_type = other DNA
ttgcggcaaaagccagcatgaagtgcgcaagctgattgccggtccctccgtgtatatctgcgacgaatgtgttga

SEQ ID NO: 136365 - DNA, 75 bp, synthetic construct
  source 1..75: mol_type = other DNA
gccggttatgtgggcgaagacgttgaaaacatcattcagaagctgttgcagaagtgcgattacgacgtacagaaa

SEQ ID NO: 136366 - DNA, 75 bp, synthetic construct
  source 1..75: mol_type = other DNA
cagttgtcgcaacgttgaatgaactgagcgaagaagctctgattcagatcctcaaagagccgaaaaacgccctga

SEQ ID NO: 136367 - DNA, 75 bp, synthetic construct
  source 1..75: mol_type = other DNA
catatcaaacctgttcgaatttgaaaaagaaatgctggacggtaaaccggtttacctccatatgggacatctcat

SEQ ID NO: 136368 - DNA, 75 bp, synthetic construct
  source 1..75: mol_type = other DNA
tgataaagccggttatctgtgtttcagggaaagggtattgcgtgatgtgaagcttaaccccgaagccatggtcgc

SEQ ID NO: 136369 - DNA, 75 bp, synthetic construct
  source 1..75: mol_type = other DNA
agttctggcaggttcgcctgggaggtagaactggtaaaaaaacgccacgaccagggaaagttttccttaactggg

SEQ ID NO: 136370 - DNA, 75 bp, synthetic construct
  source 1..75: mol_type = other DNA
aagagcagttctccgatggcgtcggttacagttggatcgacaccctgaaagaagtggcggcgcagcaggtttctg

SEQ ID NO: 136371 - DNA, 75 bp, synthetic construct
  source 1..75: mol_type = other DNA
ctgaagatgtcattaggcaggtaattattaacctgtttgaatttgaaaaagagatgttaaatggcaagcccattt

SEQ ID NO: 136372 - DNA, 75 bp, synthetic construct
  source 1..75: mol_type = other DNA
agctaaaccctgaagccatggtcgccgaacgtatttactgggcagaagatgaatccgttgcccgtattcaccttc

SEQ ID NO: 136373 - DNA, 75 bp, synthetic construct
  source 1..75: mol_type = other DNA
cccgccgctgcaccgcgagacccggcactgcgggttccacttaacggaacaccgcccgccacactgacgccgctc

SEQ ID NO: 136374 - DNA, 75 bp, synthetic construct
  source 1..75: mol_type = other DNA
tgatgcctttaaacaaaaagccatgcagctgattgtcgaatacgacatcaaggttcgcatgaaactcccggccca

SEQ ID NO: 136375 - DNA, 75 bp, synthetic construct
  source 1..75: mol_type = other DNA
aaaagcccctgtcagtgcacagccgcagcaacccgacacaccggaggaagagccgcccggcaagctcagccccgg

SEQ ID NO: 136376 - DNA, 75 bp, synthetic construct
  source 1..75: mol_type = other DNA
atgatgagtgtggatattgatatcattaaggcccgggcaaacaacgaatatcgcctttcgaaagtccgtggcgag

SEQ ID NO: 136377 - DNA, 75 bp, synthetic construct
  source 1..75: mol_type = other DNA
tgaaccaacggcagaagataaaccgaaggaagagcgtccagtgtctgccactgagaccagcacagcgaatgaaac

SEQ ID NO: 136378 - DNA, 75 bp, synthetic construct
  source 1..75: mol_type = other DNA
aactgcaggcagtacggctgaaacaccgcatccggaagcgccggtcacggcaaaagctgaagccccccgggccga

SEQ ID NO: 136379 - DNA, 75 bp, synthetic construct
  source 1..75: mol_type = other DNA
attttacccctgagcttatttctgaaaaaagtagcattcctaaatttccagttcattggacaaatgaccaatata

SEQ ID NO: 136380 - DNA, 75 bp, synthetic construct
  source 1..75: mol_type = other DNA
taatcagaatgttgggctggtgatccgcaatgataaaattgaagtttatgaccagaacggacgcctggctgttcg

SEQ ID NO: 136381 - DNA, 75 bp, synthetic construct
  source 1..75: mol_type = other DNA
ggttgcaatttctgcgtcacagctgtttgtctttgacccgaataatccggataacaccgcctatccgtttgcggt

SEQ ID NO: 136382 - DNA, 75 bp, synthetic construct
  source 1..75: mol_type = other DNA
ctcaggcacaaacacagatcggcgtgaaggccatcattgaccagatccgcgatgaggctgcaaagtcgccggttg

SEQ ID NO: 136383 - DNA, 75 bp, synthetic construct
  source 1..75: mol_type = other DNA
gcagtgaaatcacacagaccgtcagccagagcacggaggaaaacgccaggcagatagcgcaggtccgccagtacg

SEQ ID NO: 136384 - DNA, 75 bp, synthetic construct
  source 1..75: mol_type = other DNA
atttatgacgcggtgattgaaacactggtgtcgcggaaggttgtggcggatgaggtaaaagccggggtaagtatc

SEQ ID NO: 136385 - DNA, 75 bp, synthetic construct
  source 1..75: mol_type = other DNA
ggcgaagtggatctgattgaaggtacggggcagattggctatgacggcagacacacgtacaacgggcttttcgtc

SEQ ID NO: 136386 - DNA, 75 bp, synthetic construct
  source 1..75: mol_type = other DNA
catcactaatgatcaggcggcgctgttacgtcagacgcttgctgcctttgctccggctcgctgtcatctggcaag

SEQ ID NO: 136387 - DNA, 75 bp, synthetic construct
  source 1..75: mol_type = other DNA
gccggaactgaccttcttctacgacaactctctggttgaagggatgcgcatgtcaaacctggtgaccagcgtggt

SEQ ID NO: 136388 - DNA, 75 bp, synthetic construct
  source 1..75: mol_type = other DNA
acacagttataacgggctttttgtccacggcgatgcggaagcctgggcggtctatcgcgtcatccttaaacagcc

SEQ ID NO: 136389 - DNA, 75 bp, synthetic construct
  source 1..75: mol_type = other DNA
cctggagtatcagtctgtggccattcgctataacaatactgccatccatgatggcagttataaccacgggagcag

SEQ ID NO: 136390 - DNA, 75 bp, synthetic construct
  source 1..75: mol_type = other DNA
gcgatggctgggaactggcggaatctgacgatgtacgccgcatgcttatcaaatccgctatcgagctacaccgct

SEQ ID NO: 136391 - DNA, 75 bp, synthetic construct
  source 1..75: mol_type = other DNA
ctcactgaccacggtgtggaatacggttcaggcatggcaccgggacggtgtactgaatgccacagacaggagaaa

SEQ ID NO: 136392 - DNA, 75 bp, synthetic construct
  source 1..75: mol_type = other DNA
gttaattattgaggaaataaaccaacgtaaaaaccaagagagtgttacagaagaaaagaccgcttccgtaacgtt

SEQ ID NO: 136393 - DNA, 75 bp, synthetic construct
  source 1..75: mol_type = other DNA
tcctcgtcggcgtattactggtgccattaactgtaaaatgttttggtaaaaaacaggtttatttagctggcatgg

SEQ ID NO: 136394 - DNA, 75 bp, synthetic construct
  source 1..75: mol_type = other DNA
ccattccatctaaaagtgacgacagcgaaaacaaaaatgttttgcagattgccgttcgcacccgaatcaaacttt

SEQ ID NO: 136395 - DNA, 75 bp, synthetic construct
  source 1..75: mol_type = other DNA
ggatattaagtctgctcccggtgagatgcgttttacacgaagcggtaatcaaataaaagtagataatccatccgt

SEQ ID NO: 136396 - DNA, 75 bp, synthetic construct
  source 1..75: mol_type = other DNA
atgtgctgcaaaccaccacgcgaggtgagtggtatcgaagtgatttttttgcgccgcaaccgtggcagcagttcg

SEQ ID NO: 136397 - DNA, 75 bp, synthetic construct
  source 1..75: mol_type = other DNA
atcaaactggcgattcaggtctattacacccagtatgtgctgaatgatattaatttattgtcgtggatgggattc

SEQ ID NO: 136398 - DNA, 75 bp, synthetic construct
  source 1..75: mol_type = other DNA
atgtctgaccataatccactgacattaaaactgaatctgcgggaaaaaatcgcctatggtatgggcgacgtcggt

SEQ ID NO: 136399 - DNA, 75 bp, synthetic construct
  source 1..75: mol_type = other DNA
ttggtattgggaaagaattcgggttattacaaaaatgaaggtactgccgaaaatattcagatagagctgagggat

SEQ ID NO: 136400 - DNA, 75 bp, synthetic construct
  source 1..75: mol_type = other DNA
cgcgcgcaactcgctgcttaccgccagggtggtgcaaccatagggctattgatctgtaccgtggcgtttattcct

SEQ ID NO: 136401 - DNA, 75 bp, synthetic construct
  source 1..75: mol_type = other DNA
tttgggttgtcttatagcctgatgaattgttcctatggcgcaatgatcccggcgatcactaaaaacccgaatgaa

SEQ ID NO: 136402 - DNA, 75 bp, synthetic construct
  source 1..75: mol_type = other DNA
gtaatccaccattgctggttttatgcattgctaacctgtgtactctggcggcatttaatatcaaactggcgattc

SEQ ID NO: 136403 - DNA, 75 bp, synthetic construct
  source 1..75: mol_type = other DNA
tggactataccggccatgacggcacacacgccagctactacatgcgtggctggaactccgtggatacacgggaca

SEQ ID NO: 136404 - DNA, 75 bp, synthetic construct
  source 1..75: mol_type = other DNA
gggcgacaactggttaagaaagggaaggacttcaccacgctgtgtccgttccatgacgagaaaacgccgtcctgt

SEQ ID NO: 136405 - DNA, 75 bp, synthetic construct
  source 1..75: mol_type = other DNA
gcgaaaagtgctgaaaatgaaaataaaaacgtcttacagatagccgttcgcacccgtttgaagttgttctatcgt

SEQ ID NO: 136406 - DNA, 75 bp, synthetic construct
  source 1..75: mol_type = other DNA
cggctgaaacaccgcatccggaagcgccggtcacggcaaaagctgaagccccccgggccgacagaccggaacaac

SEQ ID NO: 136407 - DNA, 75 bp, synthetic construct
  source 1..75: mol_type = other DNA
gcttccgtgctcttcgatatgccaagcccaactatgcgcatcctcaacgagctacacagcaagggctataacgtc

SEQ ID NO: 136408 - DNA, 75 bp, synthetic construct
  source 1..75: mol_type = other DNA
gcgactataccggtcatgatggcacccacggaagttattacatgaaaggctggcagtcggttgatatgccggaaa

SEQ ID NO: 136409 - DNA, 75 bp, synthetic construct
  source 1..75: mol_type = other DNA
caattgcagggcagcgtagaactggctcaccagcggattacgccgctcggcactctgcgctcaacctggctaagt

SEQ ID NO: 136410 - DNA, 75 bp, synthetic construct
  source 1..75: mol_type = other DNA
tggtcgaagcggactcctgcggtgaagctgaagcggcattccagcaacatatcgacgaaggtatagcgcacttgg

SEQ ID NO: 136411 - DNA, 75 bp, synthetic construct
  source 1..75: mol_type = other DNA
tccggttcgaaaggggggatctctcactgcactgctggcggcaaatttgtctgtaacgatggttctatcagcgca

SEQ ID NO: 136412 - DNA, 75 bp, synthetic construct
  source 1..75: mol_type = other DNA
tccgtttactggattaatgtaaaggccattcctgcgaaaagtgctgaaaatgaaaataaaaacgtcttacagata

SEQ ID NO: 136413 - DNA, 75 bp, synthetic construct
  source 1..75: mol_type = other DNA
gtgttttgctggtggcgtagccttaagcacgacgcgtgttatttatgatggcggcaagaaagaagcgtcgctgac

SEQ ID NO: 136414 - DNA, 75 bp, synthetic construct
  source 1..75: mol_type = other DNA
cggactggtagcggaacgtgacggcattcgcgagccgattctcggccttgatgtgctacaaaccgctacgcgggg

SEQ ID NO: 136415 - DNA, 75 bp, synthetic construct
  source 1..75: mol_type = other DNA
tcactgtacagtgaatggggagatatggggcattacacgactgacgctggttttcaatcaaatatgtattggtca

SEQ ID NO: 136416 - DNA, 75 bp, synthetic construct
  source 1..75: mol_type = other DNA
caattgattacactcaaaatatcaacggtgattacaaagctactgttacaggagacggagagggtatcgcaacgc

SEQ ID NO: 136417 - DNA, 75 bp, synthetic construct
  source 1..75: mol_type = other DNA
aaccgtgaaggttactggcaacccaagcaccgcacatgttgctagctttatcgctgaaccgtcgactatcgccgc

SEQ ID NO: 136418 - DNA, 75 bp, synthetic construct
  source 1..75: mol_type = other DNA
atttcgatattagaagcaggaatagccaaaattgaatctggtgatttccatgtaaatgagtatcgtcgtcattaa

SEQ ID NO: 136419 - DNA, 75 bp, synthetic construct
  source 1..75: mol_type = other DNA
ccgcccatgttgctagctttatcgctgatccatcgactatcgccgccaccaacactgatttaagtaccttaaagg

SEQ ID NO: 136420 - DNA, 75 bp, synthetic construct
  source 1..75: mol_type = other DNA
aaccgtcgactatcgccgccaccaacagttatttaagtaccttaaaggcaacggttgaggatggcagtggtaacc

SEQ ID NO: 136421 - DNA, 75 bp, synthetic construct
  source 1..75: mol_type = other DNA
tggtagtgatattgaaacgctatctgacgacgaactggcaaatctcgcacagcgcaccacgctgtttgctcgcct

SEQ ID NO: 136422 - DNA, 75 bp, synthetic construct
  source 1..75: mol_type = other DNA
cacgccccgctttaatcaggggattgggtgtaccactctttccctttcttggaatgtgtctgatctgcgttctgc

SEQ ID NO: 136423 - DNA, 75 bp, synthetic construct
  source 1..75: mol_type = other DNA
gcggattcaccggagcgtctggtgaaagataccaatatcgtgacttccactctggaagatttggggctgattgtc

SEQ ID NO: 136424 - DNA, 75 bp, synthetic construct
  source 1..75: mol_type = other DNA
cgccgcgatgggcgcgccgctgcgcccacgcccacggttgccggaaatggagcaactggctctggcactgctgcg

SEQ ID NO: 136425 - DNA, 75 bp, synthetic construct
  source 1..75: mol_type = other DNA
tctgaagatttgtcaattctgacagatcagcttaatacgcttatacgtagctttgaagggaaatctgttacgctt

SEQ ID NO: 136426 - DNA, 75 bp, synthetic construct
  source 1..75: mol_type = other DNA
atgagtactctttttaaaggtcttacgcgccctgctttaataagggggctgggcgttccgctctacccctttctt

SEQ ID NO: 136427 - DNA, 75 bp, synthetic construct
  source 1..75: mol_type = other DNA
ggctctatccaccagaaaaataaaaaagcggattactcaaacgtgatggttttccatcagccctttacggtggga

SEQ ID NO: 136428 - DNA, 75 bp, synthetic construct
  source 1..75: mol_type = other DNA
gcagcaatcctcgttcagtttcctgacgccagtccactggccattgccggtgccggctctgcgctgggcattgcc

SEQ ID NO: 136429 - DNA, 75 bp, synthetic construct
  source 1..75: mol_type = other DNA
cacacaaccgggcgtctggcagggcaggccgccgggtatgcctatggtggctccctgtatgcccgcacccaggtc

SEQ ID NO: 136430 - DNA, 75 bp, synthetic construct
  source 1..75: mol_type = other DNA
gtaccttctgcccgtaaggtgaatggtaaggcgctttcggcggatataacactgacgccgaaagatattggtacg

SEQ ID NO: 136431 - DNA, 75 bp, synthetic construct
  source 1..75: mol_type = other DNA
agctaatgacaatgcgaatggtcgggtaccttctgcccgtaaggtgaatggtaaggcgctttcggcggatataac

SEQ ID NO: 136432 - DNA, 75 bp, synthetic construct
  source 1..75: mol_type = other DNA
acgagcagtcacgacgtcacccggacgcctcgctgaccgcaaaaggctttgttcaactcagtagcgccactaaca

SEQ ID NO: 136433 - DNA, 75 bp, synthetic construct
  source 1..75: mol_type = other DNA
cgaaatcgaaggtgaaactatctatattcatcgtgcacgttcaaaggatatcgaagctctaaacactccactaaa

SEQ ID NO: 136434 - DNA, 75 bp, synthetic construct
  source 1..75: mol_type = other DNA
ggatcagccgcgtcagcatattgctgattcgctttatgctggtgatgacgccggtggtgctgctcatcaacggtt

SEQ ID NO: 136435 - DNA, 75 bp, synthetic construct
  source 1..75: mol_type = other DNA
gatcccggcagatttacgtatcttgcaggcgcgggatctgtttgtcgctcaggcgtcgttaaccggtgagtctct

SEQ ID NO: 136436 - DNA, 75 bp, synthetic construct
  source 1..75: mol_type = other DNA
gccctgctggttcgttacccgaaccttgacccactggccattgccggcgcaggcactgcaatgggcgttgccggt

SEQ ID NO: 136437 - DNA, 75 bp, synthetic construct
  source 1..75: mol_type = other DNA
ttttacaaatcgaactggctttatccattgctaacttatctgaggcgaatccaattgagatacgaaaaaaaatca

SEQ ID NO: 136438 - DNA, 75 bp, synthetic construct
  source 1..75: mol_type = other DNA
ccaattgagatacgaaaaaaaatcaaaagcattgaccgacaattatcttcaacctcaaaaatcagaactacatta

SEQ ID NO: 136439 - DNA, 75 bp, synthetic construct
  source 1..75: mol_type = other DNA
atgaacgacagtgaatttcatcgcctggccgataccctgtggctgaccattgaagaacgtctggatgactgggat

SEQ ID NO: 136440 - DNA, 75 bp, synthetic construct
  source 1..75: mol_type = other DNA
aataaattgaaacttgaaatatggggggatggggatgaaaaagatgatcttcagaattatgttgaaagtttaggt

SEQ ID NO: 136441 - DNA, 75 bp, synthetic construct
  source 1..75: mol_type = other DNA
ctgagcagcaacgcaaagagttcctggctgatgatgtagcggccgtttatgacctcatgaaagaggttgtggaat

SEQ ID NO: 136442 - DNA, 75 bp, synthetic construct
  source 1..75: mol_type = other DNA
tgcaatatccactgatattttggctgttaacgacaaagtcttttacagttttttagatgattatgttttcatagc

SEQ ID NO: 136443 - DNA, 75 bp, synthetic construct
  source 1..75: mol_type = other DNA
cggataagtattatgcgaatcctactttggcgcttttcggttataagttgtatagagttaacatttctcatgcag

SEQ ID NO: 136444 - DNA, 75 bp, synthetic construct
  source 1..75: mol_type = other DNA
cggataagtattatgcgaaccctactttggcccttttcggttataagctgtatagagttaacatttcttattcag

SEQ ID NO: 136445 - DNA, 75 bp, synthetic construct
  source 1..75: mol_type = other DNA
cctttttagtgttacttctcaggggcaactgaccattcgttactctaatcagaatgtggggctggtgatccgcaa

SEQ ID NO: 136446 - DNA, 75 bp, synthetic construct
  source 1..75: mol_type = other DNA
ggtaatctcagggaggagacattaaaaacgattggtggcgtggaaacccgcataaccgatatggactcatcaaca

SEQ ID NO: 136447 - DNA, 75 bp, synthetic construct
  source 1..75: mol_type = other DNA
cggaggatgaccttgctgatgccgtgctggttgccacgacgcctgggcaggtctacggcgatccggttgatccgg

SEQ ID NO: 136448 - DNA, 75 bp, synthetic construct
  source 1..75: mol_type = other DNA
ggtcctggcaatatgggggatgtggaagggagaaagagagaactggtgcgatggagatatgacgcctttactctc

SEQ ID NO: 136449 - DNA, 75 bp, synthetic construct
  source 1..75: mol_type = other DNA
cctggcaatatgggggatgtggaagggagaaagagagaactggtgcgatggagatatgacgcctttactctcatg

SEQ ID NO: 136450 - DNA, 75 bp, synthetic construct
  source 1..75: mol_type = other DNA
ggggggctttcccggtggatggcgattaccttgcgaacggcacacggacgctgacggtgtatgatgatcacaact

SEQ ID NO: 136451 - DNA, 75 bp, synthetic construct
  source 1..75: mol_type = other DNA
ttagtaaataaattaatgttgctgggagttgattattttcaaggttattactttggtcaggctattgagctatgt

SEQ ID NO: 136452 - DNA, 75 bp, synthetic construct
  source 1..75: mol_type = other DNA
gcgtgcttcttatcgtaaggtctgtatctaaatacaacttcacattctttgcgaaaaaaaagggcagtaaagaat

SEQ ID NO: 136453 - DNA, 75 bp, synthetic construct
  source 1..75: mol_type = other DNA
atgctggccgcagtgtggctggcagtcgccagtaccatgaaagaaccgccgtatgtcagcagtttgcgcattgaa

SEQ ID NO: 136454 - DNA, 75 bp, synthetic construct
  source 1..75: mol_type = other DNA
cggcatattttgctcagttgccgggtaactacacactgcggccacgtctctgcacccttagtagtcttaattttg

SEQ ID NO: 136455 - DNA, 75 bp, synthetic construct
  source 1..75: mol_type = other DNA
ccagtggttatacttcctttggtaaatgccaccagaccctgattgtctacgctgacacgccggaacgtctggtga

SEQ ID NO: 136456 - DNA, 75 bp, synthetic construct
  source 1..75: mol_type = other DNA
gcaatcaaggcgctggatgatcagatcgacaaactcgaaatgaccgatgatgccgctaaatccttgctcgctgat

SEQ ID NO: 136457 - DNA, 75 bp, synthetic construct
  source 1..75: mol_type = other DNA
tggcggaaccgcggctgctgaaactcaacttcggcattatgtgtctgcacatgctgctgatgtcgacgtttgttg

SEQ ID NO: 136458 - DNA, 75 bp, synthetic construct
  source 1..75: mol_type = other DNA
gtgaaaggcagtttcagtaaagtgctggcggaaccgcggctgctgaaactcaactttggcattatgtgtctgcat

SEQ ID NO: 136459 - DNA, 75 bp, synthetic construct
  source 1..75: mol_type = other DNA
gtcgatgatgatggcgaaacgatggttgtcactgcatcttccgtggaacaaaatcttaaagatgcaccagccagt

SEQ ID NO: 136460 - DNA, 75 bp, synthetic construct
  source 1..75: mol_type = other DNA
gtgagcggcgcgcgacctggggtttagggaccgtattctcgttgcgcatgctgggcatgttcatggttctgccgg

SEQ ID NO: 136461 - DNA, 75 bp, synthetic construct
  source 1..75: mol_type = other DNA
ctggcgaagttagagcatagcgtctatgtgaaaatagacagcaaaatcaccaatcgcttcgaaatagagcgagtt

SEQ ID NO: 136462 - DNA, 75 bp, synthetic construct
  source 1..75: mol_type = other DNA
ctcacaaacttgggctgcatgcgctgttctggatgatcgctattctggcaacgaccggcattgcgttgaccattt

SEQ ID NO: 136463 - DNA, 75 bp, synthetic construct
  source 1..75: mol_type = other DNA
gatgacgcccgttaccaggcaaaatacgtttcagctatctggcaaaaactgattccgaatcaggctgatttttaa

SEQ ID NO: 136464 - DNA, 75 bp, synthetic construct
  source 1..75: mol_type = other DNA
ggtgagcgccataatgcacttgatgacgcccgttaccaggcaaaatacgtttcagttatctggcaaaaactgatc

SEQ ID NO: 136465 - DNA, 75 bp, synthetic construct
  source 1..75: mol_type = other DNA
actgaaaacccagcagaaaaaatccctcctgtcactgccgccattcgtcgtgaatacaagcagacatggaaaacc

SEQ ID NO: 136466 - DNA, 75 bp, synthetic construct
  source 1..75: mol_type = other DNA
ctcgtctgggtttcaaaggcgaaactcagatcaacgatcaactgactggtttcggtcagtgggaatatgaattca

SEQ ID NO: 136467 - DNA, 75 bp, synthetic construct
  source 1..75: mol_type = other DNA
ggtgtttggggtgatcaggacctggttgaatatattgatgtaggtgcaacctattacttcaacaaaaatatgtcc

SEQ ID NO: 136468 - DNA, 75 bp, synthetic construct
  source 1..75: mol_type = other DNA
tctctgctacctatgaatacgaaggattcggtatcggtgcaacttatgcgaaatctgatcgtaccgacactcaag

SEQ ID NO: 136469 - DNA, 75 bp, synthetic construct
  source 1..75: mol_type = other DNA
gaaaaggagcgcaaagaaggtagtgcatatacttctgttgttgatctcgcccgcgccagcgtcaaccgacagaac

SEQ ID NO: 136470 - DNA, 75 bp, synthetic construct
  source 1..75: mol_type = other DNA
aaatggagccaacttcgacaatgtgattttacgccgttcatatgaacggcaggggatcccctgcccgtggcgtta

SEQ ID NO: 136471 - DNA, 75 bp, synthetic construct
  source 1..75: mol_type = other DNA
ttaatatttttggttttgtcattccgctggtcaatgaagaaaccggggaagttgtcatgcgcagcgatggcagcg

SEQ ID NO: 136472 - DNA, 75 bp, synthetic construct
  source 1..75: mol_type = other DNA
agatgaaggaacaaatcagagcgcaactgatactctctcatcgccagtaccagaaactgatgcagtggaaacggc

SEQ ID NO: 136473 - DNA, 75 bp, synthetic construct
  source 1..75: mol_type = other DNA
aagcaatcacgcgaggcgcaatctgccattctgaccgatgaaatcccgttagatgatgcactactgcaattgcgg

SEQ ID NO: 136474 - DNA, 75 bp, synthetic construct
  source 1..75: mol_type = other DNA
gtacatactcaggttcacaacaaaatactggtgcatctgacacgatcgcacaaccagagccggtaaaagttaccg

SEQ ID NO: 136475 - DNA, 75 bp, synthetic construct
  source 1..75: mol_type = other DNA
gaccctaatgatccgaaatgggtgaaagggatccagagtcgcaacgctgaggaccagaatcagcccggcgtgaaa

SEQ ID NO: 136476 - DNA, 75 bp, synthetic construct
  source 1..75: mol_type = other DNA
aaggtgaacgcaaggaaaccgggaaatacacatctgtcgttgatatcgcccgttccagagtaaaccaacagaaca

SEQ ID NO: 136477 - DNA, 75 bp, synthetic construct
  source 1..75: mol_type = other DNA
cgaaaactccggtgaattttttgttcaggtctggggaaatggagccaacttcgacaacgtgattttacgccgttc

SEQ ID NO: 136478 - DNA, 75 bp, synthetic construct
  source 1..75: mol_type = other DNA
cggcacgtactcaggttcacaacaaaatactggtgcatctgacacgaccgcacaaccagagccggtaaaagttac

SEQ ID NO: 136479 - DNA, 75 bp, synthetic construct
  source 1..75: mol_type = other DNA
tccgaaatggattaaggggatccagacccgcgattctgtgagccagaaccagcatgaatcggaacggaactacca

SEQ ID NO: 136480 - DNA, 75 bp, synthetic construct
  source 1..75: mol_type = other DNA
actggcgagacagcaaatcccttaattaaggtgaacggtcatcgtgaaattacatccaccagcaggttgtggcac

SEQ ID NO: 136481 - DNA, 75 bp, synthetic construct
  source 1..75: mol_type = other DNA
cactggtggatgccggatgcaatatcgtgattgtgtcgcatctgagtgacggttctttatgggatcgtcgggctt

SEQ ID NO: 136482 - DNA, 75 bp, synthetic construct
  source 1..75: mol_type = other DNA
tattattgactgcattcgtgctgaactgggttccggaaccacgaaaaacgccgtttttcagcatatccagagtct

SEQ ID NO: 136483 - DNA, 75 bp, synthetic construct
  source 1..75: mol_type = other DNA
aaacacaaatgtaatccgggtgccaaatggcccgaaattcaggctgaattacgtaactggaaaaaacggcaggac

SEQ ID NO: 136484 - DNA, 75 bp, synthetic construct
  source 1..75: mol_type = other DNA
ggcggcagatcactcaattaaggtgaacggtcatcacgaaatcacatccaccagcaggacgtgtgaccatctaat

SEQ ID NO: 136485 - DNA, 75 bp, synthetic construct
  source 1..75: mol_type = other DNA
cactgttacaattgcaggaatttatcgacgaaaactccggtgaattttttgttcaggtctggggaaatggagcca

SEQ ID NO: 136486 - DNA, 75 bp, synthetic construct
  source 1..75: mol_type = other DNA
gagcatgagaaatatccctggcagctatcatgcgatgcaaaatggctactggggtgagtcgcatggctgtgaatt

SEQ ID NO: 136487 - DNA, 75 bp, synthetic construct
  source 1..75: mol_type = other DNA
gggacaggagtttatcgactgccttggaggttttggaattttcaacgtggggcaccgtaatccagttgtggtttc

SEQ ID NO: 136488 - DNA, 75 bp, synthetic construct
  source 1..75: mol_type = other DNA
tggcaatatcgaagccatgcgcacggctcttaacgagtgcaaaaaaaccggtgatgatgtggctgcggtgatcct

SEQ ID NO: 136489 - DNA, 75 bp, synthetic construct
  source 1..75: mol_type = other DNA
ataccggtttgcacttcatcgaggatcatcagtgcgccgaactcatcgcacagcttacgcacggcggtgagatag

SEQ ID NO: 136490 - DNA, 75 bp, synthetic construct
  source 1..75: mol_type = other DNA
tttggaaggcatgaccttagctggcattctcatgtttggaacatgggaagcgatacaagatgtagccccaaatta

SEQ ID NO: 136491 - DNA, 75 bp, synthetic construct
  source 1..75: mol_type = other DNA
taactacggtgtagcatatgacatcggtgcgtggactgacgttctgccagaattcggtggcgatacctggaccca

SEQ ID NO: 136492 - DNA, 75 bp, synthetic construct
  source 1..75: mol_type = other DNA
tgccgggcttccgtcatgtgccgtttggcaatatcgaagccatgcgcacggctcttaacgagtgcaaaaaaaccg

SEQ ID NO: 136493 - DNA, 75 bp, synthetic construct
  source 1..75: mol_type = other DNA
ggtcacctgcaaattgctgataatccgcatcgcggcgaaccgggaaccggagaaattaattatgattatctcttt

SEQ ID NO: 136494 - DNA, 75 bp, synthetic construct
  source 1..75: mol_type = other DNA
catggatcttgccgattacatggagctgcagaaacgatttcagcaagtcactgggctgggcaagagcgacgaaaa

SEQ ID NO: 136495 - DNA, 75 bp, synthetic construct
  source 1..75: mol_type = other DNA
ggtgcgtggactgacgttctgccagaattcggtggcgatacctggacccaaacagatgtattcatgactggtcgc

SEQ ID NO: 136496 - DNA, 75 bp, synthetic construct
  source 1..75: mol_type = other DNA
gagccgctgattgcccgcagcaccggtcttattccggaagatctggagaatatggatctggcggattatctggag

SEQ ID NO: 136497 - DNA, 75 bp, synthetic construct
  source 1..75: mol_type = other DNA
ttatccccgtatacccctttatgaccgcagccggttcccgtattgagcgtattgagctgaaacgactgaccgtca

SEQ ID NO: 136498 - DNA, 75 bp, synthetic construct
  source 1..75: mol_type = other DNA
attgctgataatccgcatcgcggcgaaccggggaccggagaaattaattatgattatctctttaaggtaatcgaa

SEQ ID NO: 136499 - DNA, 75 bp, synthetic construct
  source 1..75: mol_type = other DNA
ggctacggcaatattggcaaaacactggcgaaaaggttatctggttttgatgttgagcttttagcttttgacaaa

SEQ ID NO: 136500 - DNA, 75 bp, synthetic construct
  source 1..75: mol_type = other DNA
ggggcgagtcgcatggctgcgagttacaaggtaaacgtattggcctgcttggctacggcaatattggcaaaacac

SEQ ID NO: 136501 - DNA, 75 bp, synthetic construct
  source 1..75: mol_type = other DNA
tgaagatatcttcatgctgtcgcatgtcatcattgttcttttgcctttttctcctgacctggagaacttcatcag

SEQ ID NO: 136502 - DNA, 75 bp, synthetic construct
  source 1..75: mol_type = other DNA
gaacgccataatgccctgcacgatgcgcgttaccaggcaaaatacgtttcagctatctggcaaaaactgttccca

SEQ ID NO: 136503 - DNA, 75 bp, synthetic construct
  source 1..75: mol_type = other DNA
tcataaatatttgtcgatgatgcgcaatggtgctctaatcatcaatgccgcaaggggaaagttgctggatgaggg

SEQ ID NO: 136504 - DNA, 75 bp, synthetic construct
  source 1..75: mol_type = other DNA
ggggtgagtcgcatggctatgaattacaaggcaaacggattggcatggttggctacggcaatataggtaaaaccc

SEQ ID NO: 136505 - DNA, 75 bp, synthetic construct
  source 1..75: mol_type = other DNA
agcccctgacagcgctgatggatcattatcttgatactgatgctctggcagacgggctaccgctgtatgtgtcgc

SEQ ID NO: 136506 - DNA, 75 bp, synthetic construct
  source 1..75: mol_type = other DNA
caccacaatccttgaaatccgtccccggaaaaggctgaaacacacaggggaagaaggcaaaagtggcggtctgct

SEQ ID NO: 136507 - DNA, 75 bp, synthetic construct
  source 1..75: mol_type = other DNA
aacagcgacgtggagggcgctgtaaaagacgactcttactttgcgatcatttacacgctcgatgagggagatgat

SEQ ID NO: 136508 - DNA, 75 bp, synthetic construct
  source 1..75: mol_type = other DNA
agctaccgcagtacattaaagatcatccgatctactacgcaggcccggcaaaaacaccagccggttatccttccg

SEQ ID NO: 136509 - DNA, 75 bp, synthetic construct
  source 1..75: mol_type = other DNA
aaacacggcggcttctacctcggcagcattggcggcccggcggcagtgctggcacagcagagcattaagcatctg

SEQ ID NO: 136510 - DNA, 75 bp, synthetic construct
  source 1..75: mol_type = other DNA
gtcagaggcggtattgcagaaaagcctggatataacggaagaggcagatttggcactgagaaacgcgatggcccg

SEQ ID NO: 136511 - DNA, 75 bp, synthetic construct
  source 1..75: mol_type = other DNA
aatcacgcgaagcgcaatctgccattatgaccgatgaaatcccgttagatgatgcactgttacaattgcgggaat

SEQ ID NO: 136512 - DNA, 75 bp, synthetic construct
  source 1..75: mol_type = other DNA
gagaaaagccggcgcatccagcttctggaagaaatgctgaaactggttcgtcaacagcgcttcggtaaaaagtgt

SEQ ID NO: 136513 - DNA, 75 bp, synthetic construct
  source 1..75: mol_type = other DNA
atcagcatcacaccagcgataatgaagctggcgggacggcaaatcccttaattaccatgaacggtcatcataaaa

SEQ ID NO: 136514 - DNA, 75 bp, synthetic construct
  source 1..75: mol_type = other DNA
gtaagactatcgatctggaaactgctggcggagtcattgatcgggacaccattaaatggtggcttaagcaatcac

SEQ ID NO: 136515 - DNA, 75 bp, synthetic construct
  source 1..75: mol_type = other DNA
tctgatgatcgaccttgaaaccatgggaaaaaatcctgatgccccgattatctcaataggtgcaatatttttcga

SEQ ID NO: 136516 - DNA, 75 bp, synthetic construct
  source 1..75: mol_type = other DNA
ctacaacgatcgcgatgtacgcacaatcgttgagctggggaaagccatagacttcgatgccagaactgtgaaccg

SEQ ID NO: 136517 - DNA, 75 bp, synthetic construct
  source 1..75: mol_type = other DNA
attatttagcgaggctggtcctgggaatcgacctgacggcgtcatgccgcaaacaaagtcgattgcaataaaatg

SEQ ID NO: 136518 - DNA, 75 bp, synthetic construct
  source 1..75: mol_type = other DNA
aaaatttcactggcaattcctggaacattatccggctgctcaggactgcgcttataaatttcttgtttgcgagga

SEQ ID NO: 136519 - DNA, 75 bp, synthetic construct
  source 1..75: mol_type = other DNA
agcgcaacaggaagtggaaaaagtctgcaccgcctgcggtcagaccggcggcggcaactgccctgattgtggcgc

SEQ ID NO: 136520 - DNA, 75 bp, synthetic construct
  source 1..75: mol_type = other DNA
ctggtctggataaggcgctggctgccggggctactgaaatcacgaaagaagaatatttcgcccgcaaaaacggta

SEQ ID NO: 136521 - DNA, 75 bp, synthetic construct
  source 1..75: mol_type = other DNA
ccgatgaacgtcacttttgacaagctgcccctgaagtacagaacgctgtcatggttaagttcgacacatgtgaaa

SEQ ID NO: 136522 - DNA, 75 bp, synthetic construct
  source 1..75: mol_type = other DNA
gctgggatgaggagtcagcttcctttgtcccggttgagactgaatccgatccgatgaacgtcacttttgaccagc

SEQ ID NO: 136523 - DNA, 75 bp, synthetic construct
  source 1..75: mol_type = other DNA
taagttgcttgctgcatcacgtggtgaatttgttgaagggattagtgacccgaatgatccgaaatgggttaaggg

SEQ ID NO: 136524 - DNA, 75 bp, synthetic construct
  source 1..75: mol_type = other DNA
tctgcaccgcctgcggtcagaccggcggcggcaactgccctgattgtggcgcggtgatgggcgacgcaacatacc

SEQ ID NO: 136525 - DNA, 75 bp, synthetic construct
  source 1..75: mol_type = other DNA
ctaccgatttggtaagtttatgtcaaatgcgtatgtcttgcatacgcacagttattcacgggaaagtgctgtttt

SEQ ID NO: 136526 - DNA, 75 bp, synthetic construct
  source 1..75: mol_type = other DNA
agctggggaaagccatagacttcgatgccagaactgctatcccattcgaaggtgagcgccataatgcacttgatg

SEQ ID NO: 136527 - DNA, 75 bp, synthetic construct
  source 1..75: mol_type = other DNA
gctggcagcgctcaggaccacgccagcgatagtgaaactggcgaggcggcagctcccttaattaaggtgaacagt

SEQ ID NO: 136528 - DNA, 75 bp, synthetic construct
  source 1..75: mol_type = other DNA
ccgcgcccgtgccaaatttacctggcaattcctggagcaatatccggctgctcaggactgcgcttataaatttct

SEQ ID NO: 136529 - DNA, 75 bp, synthetic construct
  source 1..75: mol_type = other DNA
cagatgaaaaattcgttcaggtatggggtaatggtgcgactttcgataacgcaattttgcgcacctcatacgaac

SEQ ID NO: 136530 - DNA, 75 bp, synthetic construct
  source 1..75: mol_type = other DNA
tttcgggagttcatcaacgaatactcagatgaaaaattcgttcaggtatggggtaatggtgcgactttcgataac

SEQ ID NO: 136531 - DNA, 75 bp, synthetic construct
  source 1..75: mol_type = other DNA
gtattttatatcgttatcagcctgactgacgcaatgaatacaggggctgttcctgatggtggcaccatcgaatgg

SEQ ID NO: 136532 - DNA, 75 bp, synthetic construct
  source 1..75: mol_type = other DNA
cgccagagtcaaccggcagcacactgaaaactcagcaggaaaaatcacccccgccactgccgccattcgtcgcga

SEQ ID NO: 136533 - DNA, 75 bp, synthetic construct
  source 1..75: mol_type = other DNA
ggtaccggtttgtcttacacgagtggaaacttgctcgcgggtcaaaagaactccaccggtaaacacgctgagaac

SEQ ID NO: 136534 - DNA, 75 bp, synthetic construct
  source 1..75: mol_type = other DNA
gatcgacattcacaaagaccctgtggcactgaacaaatatatctgcgaatacctgacgacaaagggcgtgtttga

SEQ ID NO: 136535 - DNA, 75 bp, synthetic construct
  source 1..75: mol_type = other DNA
accccgccctgccctcgattcctgggatgctgaatatatgcaggaaaaccgctgggatgaggcgtctgcttcctt

SEQ ID NO: 136536 - DNA, 75 bp, synthetic construct
  source 1..75: mol_type = other DNA
gggattgaaacccgcgattcagtgaatcagaaccagcaagaaacggaacagaacgaccagaaagcagaacaaaac

SEQ ID NO: 136537 - DNA, 75 bp, synthetic construct
  source 1..75: mol_type = other DNA
cccgaatgatccgaaatggattaaggggatccagacccgcgattctgtgaaccagaaccagcaagaaacggaaca

SEQ ID NO: 136538 - DNA, 75 bp, synthetic construct
  source 1..75: mol_type = other DNA
gcagagtgtggattcacctgtcggtcgaccttgaaacgatgggaacaaatcctgatgcgccaatcaactctattg

SEQ ID NO: 136539 - DNA, 75 bp, synthetic construct
  source 1..75: mol_type = other DNA
aatgaagttatcgacaacgaccgcgaagactggaagcgtatctcggcatcaatgcgcaaacagcctgatgccctt

SEQ ID NO: 136540 - DNA, 75 bp, synthetic construct
  source 1..75: mol_type = other DNA
gttgaagcgttgatgaaaatgccagaagttaacgctatgtatccggagcttaagctgcatgccatcgggtgggtt

SEQ ID NO: 136541 - DNA, 75 bp, synthetic construct
  source 1..75: mol_type = other DNA
tggcatcacaatgatatttagcgcgccctcttcctcttcgcagcacaaaccagccagcactgacaataccaacgt

SEQ ID NO: 136542 - DNA, 75 bp, synthetic construct
  source 1..75: mol_type = other DNA
gctacgccgaacgtgttgttgcaggagaaattgttgctggcgaatttgtccgcctggcctgccagcgttttcttg

SEQ ID NO: 136543 - DNA, 75 bp, synthetic construct
  source 1..75: mol_type = other DNA
aggcatacgccacaatgcgctggatgatgcccgtcaccaggcgaaatacgtttcagcaatctggcaaaaactgat

SEQ ID NO: 136544 - DNA, 75 bp, synthetic construct
  source 1..75: mol_type = other DNA
gagacattcaacgaagaaagccaggatgaagcccggaaaaaaatccggaggaaatggaaaatgccgtgctcccga

SEQ ID NO: 136545 - DNA, 75 bp, synthetic construct
  source 1..75: mol_type = other DNA
acgaagtaaacaaaattatgcaggcagccaatatcagccagcctgacgccgataagttgcttgctgccttgaggt

SEQ ID NO: 136546 - DNA, 75 bp, synthetic construct
  source 1..75: mol_type = other DNA
cgtctgacgcaatggcagatgaacaggcaacgactactgaagcaatgggacaggatacaactgaacatcgccagg
